United States Patent Application Publication US 2021/0199660 A1 - sequence listing, part 7

SEQ ID NO: 86410 - DNA, 120 bp, Artificial Sequence
  ENSG00000085224_119 (sequence is synthesized)
gaaatatcacattctccaaaagattacccctgaatagacgaataaatttttgttttatttgttgaccgttttgaaccaacatgatgttgtaaaatgtggtttgttcagagcacaaaggaa

SEQ ID NO: 86411 - DNA, 120 bp, Artificial Sequence
  ENSG00000085224_120 (sequence is synthesized)
tcagtcggtgaattaatgtagtttgaattattttaattaagaaacaatagggctgctgactcgcttgggaaatagcaccttcttcagttataaaatagttataataaattgctatcttac

SEQ ID NO: 86412 - DNA, 120 bp, Artificial Sequence
  ENSG00000085224_121 (sequence is synthesized)
tgtttgaaagtaagataaatatactcattaacttctattctagtgcattatagatgcacaattaaatatataatgcccaatattatgaaataaatgatttaaagctagaatcaattgtaa

SEQ ID NO: 86413 - DNA, 120 bp, Artificial Sequence
  ENSG00000085224_122 (sequence is synthesized)
attaaataggaaagactgggtttttattataccaataatgacttaattgaatctgaaacacattataaaatgtgcttatggattcttctgcattattaaattattggtgtgataaaactc

SEQ ID NO: 86414 - DNA, 120 bp, Artificial Sequence
  ENSG00000085224_123 (sequence is synthesized)
aaacttttttaatcttcctaacaagactctttgagcattgatatggtttactccactttattgatactgaattttgctgttctcttcaattatttaaagagttttaaaaccgactgctct

SEQ ID NO: 86415 - DNA, 120 bp, Artificial Sequence
  ENSG00000085224_124 (sequence is synthesized)
aagttggcaaatggaaggattccctatactttaacactatgctgtctttctgccttatataacttatttcttgcattcttctaggacctcattaatcaaggaagagaaaaagttgtagaa

SEQ ID NO: 86416 - DNA, 120 bp, Artificial Sequence
  ENSG00000085224_125 (sequence is synthesized)
gcaacaaacagtgtgacagcagtgaggattcaacctcttgaggatataatttcagctgtagtaagctaattggcaattgtcttattccaacctccaatttgtaccctccaccccctactg

SEQ ID NO: 86417 - DNA, 120 bp, Artificial Sequence
  ENSG00000085224_126 (sequence is synthesized)
ccatttttttaaatttttaattgttccttcttataaattgatttgcaatagtaaaatactggtaaaatggatggataatgccaaaccgtaacccagcaattttacatagatgttggcaca

SEQ ID NO: 86418 - DNA, 120 bp, Artificial Sequence
  ENSG00000085224_127 (sequence is synthesized)
agagagaaatgggtaaaatgtaagaattgagaaatcaaacatggaaatgtatgcattgtttatataaacattttaattaccagttgtacaaattaaatctaaattattgtttcattccag

SEQ ID NO: 86419 - DNA, 120 bp, Artificial Sequence
  ENSG00000085224_128 (sequence is synthesized)
agatagccagcccaggtacagcagtgaacaacttagtaccctgttttgcatcatgtttttcttcagaaaagaataaaggaaaaggggggtttgaaaccttgggaaatcccgaatatctta

SEQ ID NO: 86420 - DNA, 120 bp, Artificial Sequence
  ENSG00000085224_129 (sequence is synthesized)
tattggattctattatgtttcaggcacagtcgtaggggctgaagataaagcagtgaacaagaataacaagatctgtctccaaggagcttatattctagtggaggagagagctgctaatca

SEQ ID NO: 86421 - DNA, 120 bp, Artificial Sequence
  ENSG00000085224_130 (sequence is synthesized)
atttctatatgatgggtttcttttgtaatcctatttgttttatgtgtttcaaaacgatattccaagagaatttataagcttctctacactgccaaaagtgtttatgtcacaagtaagatt

SEQ ID NO: 86422 - DNA, 120 bp, Artificial Sequence
  ENSG00000085224_131 (sequence is synthesized)
tctcatgggccccagcggtctgggcccaggcaccgtctgagtcgggtgtttgggaaggcgttcgcttggtgggttaggcctgtgtgttgcttagccgaaagaggcatcgttttctcttta

SEQ ID NO: 86423 - DNA, 120 bp, Artificial Sequence
  ENSG00000085224_132 (sequence is synthesized)
ttaaaagcataaaatatttctaattaaaacactgatgctgtcaaaattaaaatcaagaagcaaattgatgaaaaagatatacagcacatatgaataatgcccttaatttgtaaagagctt

SEQ ID NO: 86424 - DNA, 120 bp, Artificial Sequence
  ENSG00000085224_133 (sequence is synthesized)
aagagcttttatttcagaaaaattatgaatgtgaataaatccataaaagaagatatacaaaattccagagtatttttttaaaaagtatttacccacattaataataaaaggtgtataagt

SEQ ID NO: 86425 - DNA, 120 bp, Artificial Sequence
  ENSG00000085224_134 (sequence is synthesized)
aaaaagattataacacaccctaggcatgggcacaaacagcagcaacggaacagcaagcaggttgtaaaaaccaggagtgcctgccttagaaagactcgctcacagtcttcctgcaagttt

SEQ ID NO: 86426 - DNA, 120 bp, Artificial Sequence
  ENSG00000085224_135 (sequence is synthesized)
gaaagaaaggccagaaaatgggctaaaactcagaaaccttaagagaaagtaatatcattatttacacacctagcatagggtgtgttataaatacagaactgtcaattttatgttgctatg

SEQ ID NO: 86427 - DNA, 120 bp, Artificial Sequence
  ENSG00000085224_136 (sequence is synthesized)
taaactgcagtaatttttttggaataatttattttgacagattattgatgaaagtaaatcatatctcagtaaattggtaacaacagacatctcctctatatttgactattgttaattgcc

SEQ ID NO: 86428 - DNA, 120 bp, Artificial Sequence
  ENSG00000085224_137 (sequence is synthesized)
atccaatatggtggtcctatttattaaggcctgttgagaagaaacaaaaagagagattactcagatatttaagattaagaaattgctttcaaaataagtgtcagtttacaaggtatctag

SEQ ID NO: 86429 - DNA, 120 bp, Artificial Sequence
  ENSG00000085224_138 (sequence is synthesized)
actgagttagagtttaaccagttttcaaataaaatagaaatacacggtatgagagcatttactttaataagacttaataggtttaaatgtcaacagtgtagcctatacagatatacttaa

SEQ ID NO: 86430 - DNA, 120 bp, Artificial Sequence
  ENSG00000085224_139 (sequence is synthesized)
gtaaggggtggctgggtgaagaaaaaaaaagacactatcagtgtagtgaagaataaggaaaacaacagtattaaagactatagctataatgtttcaacataacttttaaacacttcctgg

SEQ ID NO: 86431 - DNA, 120 bp, Artificial Sequence
  ENSG00000085224_140 (sequence is synthesized)
tctgatttctaacatttttaacaactgtctgtgtcatcatgggcaagtgactttactttttgtcaaaaatttactatatttaagaagaaaaagttgggcgaaattttctgtaattctagt

SEQ ID NO: 86432 - DNA, 120 bp, Artificial Sequence
  ENSG00000085224_141 (sequence is synthesized)
accaaaaaatccatgatagatttgagatgatttcattaaagagcactacattaaccattcatttattcctaatagtaagttctaacattaagaaaacataaaaatatacatgtaattttc

SEQ ID NO: 86433 - DNA, 120 bp, Artificial Sequence
  ENSG00000085224_142 (sequence is synthesized)
tgtcataattttgtaagaaattaactgacttagtaaatgccctgggttcagctgttagtttcgctcttttgtatcttgctgatgctgttaggtttctctgtttcaaaggtcagcattctg

SEQ ID NO: 86434 - DNA, 120 bp, Artificial Sequence
  ENSG00000085224_143 (sequence is synthesized)
ctaattaacagaagaatgtttttattaaggtgaatgaacagttttattttacagttttgaatagagcttaattgtggacacaaatattcagattctgcttgcctacttttttaaattaaa

SEQ ID NO: 86435 - DNA, 120 bp, Artificial Sequence
  ENSG00000085224_144 (sequence is synthesized)
aaatgtatatccatttattttatgggataggtggtaggttccagaatggagtgataagggcatacaatttattcatcagggattttacattatatcatcacagccagatactgaaagcat

SEQ ID NO: 86436 - DNA, 120 bp, Artificial Sequence
  ENSG00000085224_145 (sequence is synthesized)
ttaaaattttactcttttttaagatgctttaatttttcttcatttatatttgctatttgattttctatacatcatgaggcctcagatgttactcaaaggctaataatgttttaaacattc

SEQ ID NO: 86437 - DNA, 120 bp, Artificial Sequence
  ENSG00000085224_146 (sequence is synthesized)
tatatcttaatttaactgtgaatgatttactttaatttcatatttaaccaccaaataagagtgttgttaaggtataatttttttgtgtgtgttagagcttgtcaaaatataaatatcatt

SEQ ID NO: 86438 - DNA, 120 bp, Artificial Sequence
  ENSG00000085224_147 (sequence is synthesized)
ttcaacttttaagttacctgatcgtatctctctgtaactggcaagtattttattggaaagtatctttaattccaccttgaatttgtgattaaaaaatacaaccctgttgagtacttttga

SEQ ID NO: 86439 - DNA, 120 bp, Artificial Sequence
  ENSG00000085224_148 (sequence is synthesized)
gaagaattgaattttatcttgagcatgtctttctatactcagtttaatttgtttttataaaatatacaatttattaacttgtttaatattcactataccaaagaggtatctaatacccat

SEQ ID NO: 86440 - DNA, 120 bp, Artificial Sequence
  ENSG00000085224_149 (sequence is synthesized)
gggttatgtagtcatgatggggatacaaatactttcttgcactattttagtatagattatatatttgagcatatttgaatatgcactaagcaacttaaaaaattcatttgcagatcacga

SEQ ID NO: 86441 - DNA, 120 bp, Artificial Sequence
  ENSG00000085224_150 (sequence is synthesized)
ttaagtcttagaattatttttctaacttcctaatttttgagtaggttgtattttggtagacagcatattgtaattgtatgtaaatttgtacacaattgtgtgtaaattgtgtataaatct

SEQ ID NO: 86442 - DNA, 120 bp, Artificial Sequence
  ENSG00000085224_151 (sequence is synthesized)
tatatgctttgtctttttagcagtattgtaatacattttcagtgttggtgtttatgaagcgatagtgtattattgcaaatggttaactatttggatgcaataaatttttgtaaacctttt

SEQ ID NO: 86443 - DNA, 120 bp, Artificial Sequence
  ENSG00000085224_152 (sequence is synthesized)
taaagtttgttcatcttttcttcccccacagataaaatcagtggttctggaagtaactctgatatgatggaaaacagcaaggaagagggaactagctcttcagaaaaatccaagtcttca

SEQ ID NO: 86444 - DNA, 120 bp, Artificial Sequence
  ENSG00000085224_153 (sequence is synthesized)
atttgattccttgtgcacatgtgggagaaaatctccaaagaattacctagttttgtttaattcttgagcgatgtatgcaccaaagcacatagaagatacttaaagatgggcttcatggga

SEQ ID NO: 86445 - DNA, 120 bp, Artificial Sequence
  ENSG00000085231_0 (sequence is synthesized)
gaggcgcccgaagccgtcgcggcggggaccatgttgcttccgaacatcctgctcaccggtacaccaggggttggaaaaaccacactaggcaaagaacttgcgtcaaaatcaggactgaaa

SEQ ID NO: 86446 - DNA, 120 bp, Artificial Sequence
  ENSG00000085231_1 (sequence is synthesized)
tacattaatgtgggtgatttagctcgagaagagcaattgtatgatggctatgatgaagagtatgactgtcccattttagatgaagacagagtagttgatgagttagataaccaaatgaga

SEQ ID NO: 86447 - DNA, 120 bp, Artificial Sequence
  ENSG00000085231_2 (sequence is synthesized)
gaaggtggagttattgttgattaccatggttgtgatttcttccctgaacgctggtttcatatagtttttgtgctgagaacagataccaatgtattgtacgaaagacttgaaacaaggggt

SEQ ID NO: 86448 - DNA, 120 bp, Artificial Sequence
  ENSG00000085231_3 (sequence is synthesized)
tataatgagaagaaactaacagacaatattcagtgtgagatttttcaagttctttatgaagaagccacagcatcctacaaggaagaaatcgtgcatcagctgcccagtaataaaccagaa

SEQ ID NO: 86449 - DNA, 120 bp, Artificial Sequence
  ENSG00000085231_4 (sequence is synthesized)
gagctagaaaataatgtagatcagatcttgaaatggattgagcagtggatcaaagatcataactcttgacttataaggctagctacttaataatcactcttgttgatatctctgccgaca

SEQ ID NO: 86450 - DNA, 120 bp, Artificial Sequence
  ENSG00000085231_5 (sequence is synthesized)
tcatagaaattgttcaagtgtcagtaacactttattaaaatcatgttgcagaaccagcaggtggatagtatataggtttatgcctgtgtttctttttctccatgagaaagctaaacatga

SEQ ID NO: 86451 - DNA, 120 bp, Artificial Sequence
  ENSG00000085231_6 (sequence is synthesized)
aagaataaataaatctgacaaaatgggtggatatcttttaagtttattacagaaaaaaatgcagatgatctcttaaaataaaactaaagataaagcaacagagtattccttttttctttc

SEQ ID NO: 86452 - DNA, 120 bp, Artificial Sequence
  ENSG00000085231_7 (sequence is synthesized)
tttaaattagaaaaaaagttaagtgttgtactcgatacaaagttcaaaaggtacaaaagagcatgttgaaaagttaggtctcccttccagaccaccctatccccaggcaccccaggttcc

SEQ ID NO: 86453 - DNA, 120 bp, Artificial Sequence
  ENSG00000085231_8 (sequence is synthesized)
ttccctttaggaaataatgttactggtttcctatatgtctttttagaggttttatgcctgcacagtgtatatgtacatgtgtacattttttaaagaatataacagtatattatgcacact

SEQ ID NO: 86454 - DNA, 120 bp, Artificial Sequence
  ENSG00000085231_9 (sequence is synthesized)
attctgtacctttcttttttcacttactatatttgaagattatatcatctcagtacagacctccctgttcttttttttagttgagatagatatacatatcatacaataaaatttaccatt

SEQ ID NO: 86455 - DNA, 120 bp, Artificial Sequence
  ENSG00000085231_10 (sequence is synthesized)
ttaccattttgaagtgtataatcagaaccgggtatggtggcttatgcctgtaatcccagcaaatggggaggctgaggtggagaatcgcttgaggcaggagttcaagaccagcctgggcaa

SEQ ID NO: 86456 - DNA, 120 bp, Artificial Sequence
  ENSG00000085231_11 (sequence is synthesized)
gaccttagactctaaaaataaacataaataaaatttataatccgttggtttttagcttattaacaaggttatgtaactgtcaccactgtggaggaagcagtgatgataaagggaactcct

SEQ ID NO: 86457 - DNA, 120 bp, Artificial Sequence
  ENSG00000085231_12 (sequence is synthesized)
ataccctttagcagtcactctctattctttcctcctcatccccttgcagtcactagtctactttctgtctctatggatttgcatattctggatatttcatataaatgggattatacagta

SEQ ID NO: 86458 - DNA, 120 bp, Artificial Sequence
  ENSG00000085231_13 (sequence is synthesized)
cccaggaaagcttgaaggcagagatagactcacgtctctaagacatatacataatatagccgcaaccgcggcggccttactttcccggagctgcatccccttttaggcgaagagcggagg

SEQ ID NO: 86459 - DNA, 120 bp, Artificial Sequence
  ENSG00000085231_14 (sequence is synthesized)
cgaccagggactaccctaggtgaaagggcagccacctggccctacccgggctcaacgccgagcctctcggaggtacggcctcccggggaccttccagactggtcggcgcaagcgaagggc

SEQ ID NO: 86460 - DNA, 120 bp, Artificial Sequence
  ENSG00000085231_15 (sequence is synthesized)
ggggaccaccgaaggagtgtgtgacttaggcatccagcgcactgcctgacccgaagtaccgacccgagttatgcccaccctccaactttgcgacggaaatgtgtcatcgaaagccaggta

SEQ ID NO: 86461 - DNA, 89 bp, Artificial Sequence
  ENSG00000085231_16 (sequence is synthesized)
aaggtaagaaaggaaaaacattagattcttaaagcataatgttaacttttattcagatttctgaaattggccatgataaaagattgttg

SEQ ID NO: 86462 - DNA, 120 bp, Artificial Sequence
  ENSG00000085265_0 (sequence is synthesized)
gttagagctgggggactcttcagagtcaaaggccagagagcatggagctgagtggagccaccatggcccgggggctcgctgtcctgctagtcttgttcctgcatatcaagaacctgcctg

SEQ ID NO: 86463 - DNA, 120 bp, Artificial Sequence
  ENSG00000085265_1 (sequence is synthesized)
cccaggctgcggacacatgtccagaggtgaaggtggtgggcctggagggctctgacaagctcaccattctccgaggctgcccggggctgcccggggccccagggccaaagggagaggcag

SEQ ID NO: 86464 - DNA, 120 bp, Artificial Sequence
  ENSG00000085265_2 (sequence is synthesized)
gtgtcattggagagagaggagaacgcggtctccctggagcccctggaaaggcaggaccagtggggcccaaaggagaccgaggagagaaggggatgcgtggagagaaaggagacgctgggc

SEQ ID NO: 86465 - DNA, 120 bp, Artificial Sequence
  ENSG00000085265_3 (sequence is synthesized)
agtctcagtcgtgtgcgacaggcccacgcaactgcaaggacctgctagaccgggggtatttcctgagcggctggcacaccatctacctgcccgactgccggcccctgactgtgctctgtg

SEQ ID NO: 86466 - DNA, 120 bp, Artificial Sequence
  ENSG00000085265_4 (sequence is synthesized)
acatggacacggacggagggggctggaccgttttccagcggaggatggatggctctgtggacttctatcgggactgggccgcatacaagcagggcttcggcagtcagctgggggagttct

SEQ ID NO: 86467 - DNA, 120 bp, Artificial Sequence
  ENSG00000085265_5 (sequence is synthesized)
ggctggggaatgacaacatccacgccctgactgcccagggaagcagcgagctccgtgtagacctggtggactttgagggcaaccaccagtttgctaagtacaaatcattcaaggtggctg

SEQ ID NO: 86468 - DNA, 120 bp, Artificial Sequence
  ENSG00000085265_6 (sequence is synthesized)
acgaggcagagaagtacaagctggtactgggagcctttgtcgggggcagtgcgggtaattctctaacgggccacaacaacaacttcttctccaccaaagaccaagacaatgatgtgagtt

SEQ ID NO: 86469 - DNA, 120 bp, Artificial Sequence
  ENSG00000085265_7 (sequence is synthesized)
cttcgaattgtgctgagaagttccaaggagcctggtggtacgccgactgtcatgcttcaaacctcaatggtctctacctcatgggaccccatgagagctatgccaatggtatcaactgga

SEQ ID NO: 86470 - DNA, 120 bp, Artificial Sequence
  ENSG00000085265_8 (sequence is synthesized)
gtgcggcgaaggggtacaaatatagctacaaggtgtcagagatgaaggtgcggcccgcctagacgggccaggacccctccacatgcacctgctagtggggaggccacacccacaagcgct

SEQ ID NO: 86471 - DNA, 120 bp, Artificial Sequence
  ENSG00000085265_9 (sequence is synthesized)
gcgtcgtggaagtcaccccatttccccagccagacacactcccatgacgcccacagctgcccctttgcccccagctcagtcaagccgccacatgcccacaacctcaccagagggagaatt

SEQ ID NO: 86472 - DNA, 120 bp, Artificial Sequence
  ENSG00000085265_10 (sequence is synthesized)
atgtttctaaatatgtttactttgggacagaaaagttttaccagtttcaatgtgtgtttcttgaacaccagtggttttgatcactttcctgtgtctgttgcacggcaggtctttccctgg

SEQ ID NO: 86473 - DNA, 120 bp, Artificial Sequence
  ENSG00000085265_11 (sequence is synthesized)
aatttggtaagtcgggaagagtcaggacccttatttagcagatggcactaccgatgttcagggaggttgagtgacttttgcgaggattttccacctccagtaattgacacagggcgatcc

SEQ ID NO: 86474 - DNA, 120 bp, Artificial Sequence
  ENSG00000085265_12 (sequence is synthesized)
tcacctccacccccaagcctcccccatccccccatgcctcactcacaacacttcacacttcttgaaaaaggtcactttggggtccagaaaacacttactaaaaagggggaaagtttagta

SEQ ID NO: 86475 - DNA, 120 bp, Artificial Sequence
  ENSG00000085265_13 (sequence is synthesized)
ggaacttttctgcttcccaccacggcagagttcatgctttgggctggctggctgctgggaagagataaacacttagcactcactaagtgagcgcctggtcagccacctgcacagagaaga

SEQ ID NO: 86476 - DNA, 120 bp, Artificial Sequence
  ENSG00000085265_14 (sequence is synthesized)
ttccgaagaggccttcctcccacacacagacctcagctagaggggaccgcggacctcagtgggaaaagctgcacaaggcttctaggagatgatggagaaggggcttctccagctcccagg

SEQ ID NO: 86477 - DNA, 120 bp, Artificial Sequence
  ENSG00000085265_15 (sequence is synthesized)
ccaggggagatttctcaaccacgacctaagaagcatcaaagggaatgtggcaagtgtgactccattcaaatcaagagctcccacttaccgaaggacactaagggaaccaaaggaaggcca

SEQ ID NO: 86478 - DNA, 120 bp, Artificial Sequence
  ENSG00000085265_16 (sequence is synthesized)
gaggggcagaatcaacgtgcggcacacaaatctttagttttctactattgccgcaaccagtcaccacaaatggagtggcttgaaacaacaagaactcgccacctcctggctcagtagatc

SEQ ID NO: 86479 - DNA, 120 bp, Artificial Sequence
  ENSG00000085265_17 (sequence is synthesized)
tggagtccctgggccttactgggccagcaggcaggactcagcagtggtggctccttccagggttctaggggagaacctgcttccttgccttttccagccccaggggtcactggcattcat

SEQ ID NO: 86480 - DNA, 120 bp, Artificial Sequence
  ENSG00000085265_18 (sequence is synthesized)
tggcccggactccttcccccaaccccaaagccagcagcaccacatctctctgacccttcatccgttgtcccctctccccccaagccccatgggacagggtctccactcctgagactcatg

SEQ ID NO: 86481 - DNA, 120 bp, Artificial Sequence
  ENSG00000085265_19 (sequence is synthesized)
ggattagactaggcctacctggatgatctgggatcctctcccatgtccaggtctctatccctaaccacatcagcaaagtctcttttgccatggaaggtatttgcaggctctgactttgtg

SEQ ID NO: 86482 - DNA, 120 bp, Artificial Sequence
  ENSG00000085265_20 (sequence is synthesized)
tgtattagggcaggacatttttggcggggcagtggtgggggcagggaattattctgcctaccatgccttatacaaaaataaataaatcacaggcttatacctgaaagaattcctgcaaat

SEQ ID NO: 86483 - DNA, 120 bp, Artificial Sequence
  ENSG00000085265_21 (sequence is synthesized)
aataaaagaattagagcagctcagttaaataaaaaaaggtatgagatgtgaacagacacttcacagaagatgacatgcaggggagcaaggtatttatcaaaaagtgctccacttttcact

SEQ ID NO: 86484 - DNA, 120 bp, Artificial Sequence
  ENSG00000085265_22 (sequence is synthesized)
taccagagaaatgcaaatcagcacccaaaggagtcactgcggcaccctcatctgagcctcagaagttagaaagatggatagcaccagtgtcaaaggtgactgtgggagggagatttgcat

SEQ ID NO: 86485 - DNA, 120 bp, Artificial Sequence
  ENSG00000085265_23 (sequence is synthesized)
acactgctagtaacaatgcgaattgatggaaccaacctggaaaatggcttggcatcaactgttggagaagaagacacacagtcctctaacctgccagtcccacatcagggcctggatatg

SEQ ID NO: 86486 - DNA, 120 bp, Artificial Sequence
  ENSG00000085265_24 (sequence is synthesized)
gccgtcatgtgtaccagggagcatggccaggaatctttacagccaaatactcaccatagcaccaaactggaatcagccgacatacccatcaggaagagaatggatgttaaaaaatgcaag

SEQ ID NO: 86487 - DNA, 120 bp, Artificial Sequence
  ENSG00000085265_25 (sequence is synthesized)
gatagccattgggtagaacgccatacagccatgacaattacacagtgacacctacacacaaggagcatgagtctcacaaacatggcagcaaaaggagcctgttcaagagggtatgtgcta

SEQ ID NO: 86488 - DNA, 120 bp, Artificial Sequence
  ENSG00000085265_26 (sequence is synthesized)
tggattccattgtagataaagtttttcaaaagcaaaagtagccaatggtattttggatgcatatttaggtggtaaatgtatacaggaaaaataagaaagtgattgtatttgagggtggga

SEQ ID NO: 86489 - DNA, 120 bp, Artificial Sequence
  ENSG00000085265_27 (sequence is synthesized)
ccacatggtgactgggaagggacagggacaagcctctggggttctggcaatgctctgtttcttgacccaggtggtgattgtaaggatgtttgttaactagtgatgaaaataattaagctg

SEQ ID NO: 86490 - DNA, 120 bp, Artificial Sequence
  ENSG00000085265_28 (sequence is synthesized)
tacttttgctttatacacttttgagtacatgttatgttccacaatttaaaaactacttataaagaaactgcacatgcttggatccaggaacatgagctacaggcacatcctccactgatg

SEQ ID NO: 86491 - DNA, 120 bp, Artificial Sequence
  ENSG00000085265_29 (sequence is synthesized)
cccagtgttcttgactcaatacctgtaaggagaggtccttgtagcccattgggggctgaccagaccctactacgcccctgccacaatctctagtccatcacaaaatccactattgggata

SEQ ID NO: 86492 - DNA, 120 bp, Artificial Sequence
  ENSG00000085265_30 (sequence is synthesized)
gtactttcgtccctcagtaggtaagcatttttacaacctaggaagacttagctttaagtctagaaatgattagtataaatataaaatataaatatgattaatataaatataaaatagcca

SEQ ID NO: 86493 - DNA, 120 bp, Artificial Sequence
  ENSG00000085265_31 (sequence is synthesized)
cccaaattgctgagattacaggcgtgagacactgtgcctggccaaaatatgccttttgtattaaggaatctggacaggtttgatttttcacagtcttgtaatgtttaaataatttggcct

SEQ ID NO: 86494 - DNA, 120 bp, Artificial Sequence
  ENSG00000085265_32 (sequence is synthesized)
attatgaagaatctcacaaatccaatataaaatgtggaactaactaatcaaaatcatcttgtaatattacatggaaatcttagtgcgtttatacacggtattggcatatttaagagactt

SEQ ID NO: 86495 - DNA, 120 bp, Artificial Sequence
  ENSG00000085265_33 (sequence is synthesized)
tgagctcattgcatttctaagttaaattattagatttcttaagatttaagttaaattattagatttttaaagattaattagtgctaaggagggttttctcattagacagctgaaatgccg

SEQ ID NO: 86496 - DNA, 120 bp, Artificial Sequence
  ENSG00000085265_34 (sequence is synthesized)
caggagaaatttgagtgtattccacttcttattgcaattttaaatgtttgaagttatttaaagaactaaatttatggtatccaaaagctctaaaaaggtgactcttaagatttgcaggtc

SEQ ID NO: 86497 - DNA, 120 bp, Artificial Sequence
  ENSG00000085265_35 (sequence is synthesized)
ttataaatagaaaaacaagaactgtaagccaaacttaaaatattcaggatgaattgagtttttgaatttgtagctttcagaaactgaacattaattttaagaagcaaagcaggctgggca

SEQ ID NO: 86498 - DNA, 61 bp, Artificial Sequence
  ENSG00000085265_36 (sequence is synthesized)
tctactaaaaatacaaaaaaattagccgttcatggtgggggatgcctatcgaagtgagccg

SEQ ID NO: 86499 - DNA, 120 bp, Artificial Sequence
  ENSG00000085265_37 (sequence is synthesized)
actctgtctcaaaataaaagaagcaaagcaagcttatgaagagatgaagagtcttttcccatcaccaattcctccccaactcacatcagcagaactgagagagcttttgtgatttgaggg

SEQ ID NO: 86500 - DNA, 120 bp, Artificial Sequence
  ENSG00000085265_38 (sequence is synthesized)
ataaagctgaatgggtgaaaagaaatcaagccctcctcctcttgggccagtgctcttcttcctggccatgggacctctcaagtaggagtgtaggcgtgggcccatccagcaacatttggg

SEQ ID NO: 86501 - DNA, 120 bp, Artificial Sequence
  ENSG00000085265_39 (sequence is synthesized)
cattcgtggacatccacatagtgttgtttctgttcttttcctctccttcctcatcttctctcgtctttgttgaatatttttattatcccgtcacctcctctatcagcttataacttgttc

SEQ ID NO: 86502 - DNA, 120 bp, Artificial Sequence
  ENSG00000085265_40 (sequence is synthesized)
attcttttcctatcttttggtgtttatgcttgcgattgcaatatatagccttgattttttacggtatactataaattattccttctaccactttaccaatgaagactttgaaacacctct

SEQ ID NO: 86503 - DNA, 120 bp, Artificial Sequence
  ENSG00000085265_41 (sequence is synthesized)
aactacattcactcccttctgctttttatgccattcttgccgccatgctatgatacatttatttaaagtcctgcaagaaatggctattagtattgttttgtgcagtccgtattcattttt

SEQ ID NO: 86504 - DNA, 120 bp, Artificial Sequence
  ENSG00000085265_42 (sequence is synthesized)
accacatttttacactttatgttgccctttattccttcttctattttattattattattatttttggtgtgagatcatcttcttgctgcctgacaaactccctttcatatatatttttta

SEQ ID NO: 86505 - DNA, 87 bp, Artificial Sequence
  ENSG00000085265_43 (sequence is synthesized)
ctggagtgcagcggtatgaccttcaattctcctgcctcagcttcccgtgtagctgggactacaggtgtgcaccactacgctgggcta

SEQ ID NO: 86506 - DNA, 75 bp, Artificial Sequence
  ENSG00000085265_44 (sequence is synthesized)
acctcctgggctcaaacaattctcctgcctcagcttcccgtgtagctgggactacaggtgtgcaccactacgctg

SEQ ID NO: 86507 - DNA, 120 bp, Artificial Sequence
  ENSG00000085265_45 (sequence is synthesized)
cccaaagtgctaggattacagatgtgagacaccgtgcccagcctcatatattttttgatgaaagtctgctgaggatgaattctgtccacttttattatctgaaaacatctttattttgcc

SEQ ID NO: 86508 - DNA, 120 bp, Artificial Sequence
  ENSG00000085265_46 (sequence is synthesized)
ctttattttgcctcattttaaatagtatttagattgggtgtagacttctatattgccaattagtttcttttagcactgtaaatacagatgtccagtattttcagattcagttatttcagc

SEQ ID NO: 86509 - DNA, 120 bp, Artificial Sequence
  ENSG00000085265_47 (sequence is synthesized)
tgaaaagctagctgaaagtcttgttgctcctctgaaggtaatatgacttttttcaaaaaatacatttataaaattttttttctttgccttgatagttttactacaaggtgcctggatgag

SEQ ID NO: 86510 - DNA, 120 bp, Artificial Sequence
  ENSG00000085265_48 (sequence is synthesized)
actttctctgaatttgtcttgcttggggttcatagaatctgtgacttgatgtctttcatgagttttgaaaaatgctagccattatctcttaaatattgctattactctactccctcttct

SEQ ID NO: 86511 - DNA, 120 bp, Artificial Sequence
  ENSG00000085265_49 (sequence is synthesized)
ctttcagatatttcagttacaccaatggccaatgtttgctcgtgtctcatatgtctcttgttctagtttctggatttgtattcttttttccttttcacattcagtctggatattttctgc

SEQ ID NO: 86512 - DNA, 120 bp, Artificial Sequence
  ENSG00000085265_50 (sequence is synthesized)
tgacctatattccagttcactaataatgcttttcactgtatctaatttgcttataaatagaaaaccattgattgagttattaatttcagttatagaatagccagtgtagactccaatgct

SEQ ID NO: 86513 - DNA, 120 bp, Artificial Sequence
  ENSG00000085265_51 (sequence is synthesized)
tggctccacttctccactttttcacctatttttttcaccatcttccattttcttcaacacaccagtcagagtcgtttttaaagacattttaaacacctcagtggcctgtagatcttatct

SEQ ID NO: 86514 - DNA, 120 bp, Artificial Sequence
  ENSG00000085265_52 (sequence is synthesized)
tctgttttttgtttctttttaatcttagttttttggcacacttggagggttttgattgaatgctagacatagtattcaggaaggcagagaggatttttttttaagtcagattttttgagg

SEQ ID NO: 86515 - DNA, 120 bp, Artificial Sequence
  ENSG00000085265_53 (sequence is synthesized)
tataatttaatacagtaaaattcacctattttagttcagttctaagagtttcctctgtgacttttcctttggcccatggtttatttaaaattgtgttcttttacttccaaattatttggg

SEQ ID NO: 86516 - DNA, 120 bp, Artificial Sequence
  ENSG00000085265_54 (sequence is synthesized)
atttttctagatatctttctgttcttgatttctggcttacctctatcagggtcagagaacaaacttaatatgatttcaattattttaaatttgccaatgtttattttatggcccagaata

SEQ ID NO: 86517 - DNA, 120 bp, Artificial Sequence
  ENSG00000085265_55 (sequence is synthesized)
tggtctatgttggtgaaagttcaatttgaacttgaaaagaatatgttttatgctgttgtctactgaaaagtctatatataaaaaatagattaataaactgattaatagcctggttcacca

SEQ ID NO: 86518 - DNA, 120 bp, Artificial Sequence
  ENSG00000085274_0 (sequence is synthesized)
aggtaagggcatcttggaagctgagctacagttggctggggcacaaaaaaaccagggggtgccaagagttttcaggtacgtaagcgggaaaggggtgccaagtctcagctaaaaaatccc

SEQ ID NO: 86519 - DNA, 120 bp, Artificial Sequence
  ENSG00000085274_1 (sequence is synthesized)
ctatggcagagatccgagtacacatgcagcagtttccaccggtggggccccgaggaaggggaggatgatgggagaagacaagcaactacaagcccccgcacgcagtgcgcagctggcttc

SEQ ID NO: 86520 - DNA, 120 bp, Artificial Sequence
  ENSG00000085274_2 (sequence is synthesized)
aggagagaggcccgcggtgctgtgctgccgggcctcggcgcagagccccggcagagcgccagacgctgactgccggcaccagaatgctcgcgatgaggaagacaggcggagcgctgcgag

SEQ ID NO: 86521 - DNA, 120 bp, Artificial Sequence
  ENSG00000085274_3 (sequence is synthesized)
ctagcgagccctcagctctcgtatccatgacgcctgctgcttcgggggacccctggcatgctggggagtgggtctctgtggtacatcctgtaccgccctggccggcgccggacccccatg

SEQ ID NO: 86522 - DNA, 120 bp, Artificial Sequence
  ENSG00000085274_4 (sequence is synthesized)
gccccagaacctcccgcactgccacgggaagacagagccggacgtgacgccaccgtggaaggaagggaggggcggagcgtggctcggtgacgtcctcccaagatggcggagacagagtga

SEQ ID NO: 86523 - DNA, 120 bp, Artificial Sequence
  ENSG00000085274_5 (sequence is synthesized)
agaaactgtgttccccccttgggttgctatcgatcaagggtaaaattccattctgatatcaaaatgcagtattcgcaccactgtgagcaccttttagagagactgaacaaacagcgggaa

SEQ ID NO: 86524 - DNA, 120 bp, Artificial Sequence
  ENSG00000085274_6 (sequence is synthesized)
gcaggttttctctgtgactgtaccatagtgattggggaattccagtttaaagctcataggaatgtgctggcctcctttagtgagtattttggtgcgatctacagaagcacttctgagaac

SEQ ID NO: 86525 - DNA, 120 bp, Artificial Sequence
  ENSG00000085274_7 (sequence is synthesized)
aatgtctttcttgatcagagtcaggtgaaggctgatggatttcagaaactgttggagtttatatacacaggaactttaaatcttgacagttggaatgttaaagaaattcatcaggctgct

SEQ ID NO: 86526 - DNA, 120 bp, Artificial Sequence
  ENSG00000085274_8 (sequence is synthesized)
gactatctcaaagtggaagaggtggtcactaaatgcaaaataaagatggaagattttgcttttattgctaatccttcttctacagagatatctagtattactggaaacattgaattgaat

SEQ ID NO: 86527 - DNA, 120 bp, Artificial Sequence
  ENSG00000085274_9 (sequence is synthesized)
caacagacttgtcttcttactctgcgagattataataatcgagagaaatcagaagtatctacagatttgattcaggcaaatcctaaacaaggcgcgttagcgaaaaagtcatctcaaacg

SEQ ID NO: 86528 - DNA, 120 bp, Artificial Sequence
  ENSG00000085274_10 (sequence is synthesized)
aaaaagaagaagaaggctttcaactccccgaaaacagggcagaataaaacagtgcaatatcccagtgacatcttagagaatgcatctgttgaattattcctagatgcaaataaactgccc

SEQ ID NO: 86529 - DNA, 120 bp, Artificial Sequence
  ENSG00000085274_11 (sequence is synthesized)
acacctgtagtagaacaagttgcacaaataaatgataattcagaactcgagttgacatcagttgtggaaaatacttttccagcacaagatattgtgcacactgttacagtgaaacggaaa

SEQ ID NO: 86530 - DNA, 120 bp, Artificial Sequence
  ENSG00000085274_12 (sequence is synthesized)
cgtggaaaatcacagccaaactgtgctctgaaagaacactctatgtctaatatagccagcgtcaagagtccttatgaggcggagaactccggggaagagctggatcagaggtattccaag

SEQ ID NO: 86531 - DNA, 120 bp, Artificial Sequence
  ENSG00000085274_13 (sequence is synthesized)
gccaagccaatgtgtaacacatgtgggaaagtgttttcagaagccagcagtttgagaaggcacatgagaatacataaaggagtcaaaccttacgtctgccacttatgtggaaaggcattt

SEQ ID NO: 86532 - DNA, 120 bp, Artificial Sequence
  ENSG00000085274_14 (sequence is synthesized)
acccaatgtaaccagctgaaaacgcatgtaagaactcatacaggtgagaagccatacaaatgtgaattgtgtgataaaggatttgctcagaaatgtcagctagtcttccatagtcgcatg

SEQ ID NO: 86533 - DNA, 120 bp, Artificial Sequence
  ENSG00000085274_15 (sequence is synthesized)
catcatggtgaagaaaaaccctataaatgtgatgtatgcaacttacagtttgcaacttctagcaatctcaagattcatgcaaggaagcatagtggagagaagccatatgtctgtgatagg

SEQ ID NO: 86534 - DNA, 120 bp, Artificial Sequence
  ENSG00000085274_16 (sequence is synthesized)
tgtggacagagatttgctcaagccagcacactgacctatcatgtccgtaggcatactggagaaaagccttatgtatgtgatacctgtgggaaggcatttgctgtctctagttctcttatc

SEQ ID NO: 86535 - DNA, 120 bp, Artificial Sequence
  ENSG00000085274_17 (sequence is synthesized)
actcattctcgaaaacatacaggtgaaaaaccatacatatgtggtatttgtgggaaaagttttatttcctcaggagagctcaacaaacactttcggtcccatacaggagaaagaccattt

SEQ ID NO: 86536 - DNA, 120 bp, Artificial Sequence
  ENSG00000085274_18 (sequence is synthesized)
atctgcgaattatgtggaaattcttacacagatattaaaaatttaaagaagcacaaaacaaaagtccattctggtgcagataaaactctagactccagtgcagaggatcatactttgagt

SEQ ID NO: 86537 - DNA, 120 bp, Artificial Sequence
  ENSG00000085274_19 (sequence is synthesized)
gaacaggattccatacaaaaaagtcctttatcagaaactatggatgtgaagccttctgatatgactttaccattagctcttccacttgggactgaggaccatcacatgcttctgcctgtc

SEQ ID NO: 86538 - DNA, 120 bp, Artificial Sequence
  ENSG00000085274_20 (sequence is synthesized)
tacaacaattatactgactttgtaaggaatatggaattgctaagatatcattggtagcaaacatctctggtaaggtgcatatattcatattaaattcccattcatttgagttgtgaccat

SEQ ID NO: 86539 - DNA, 120 bp, Artificial Sequence
  ENSG00000085274_21 (sequence is synthesized)
tatttttcattcactgaagtaaaagcacctgatgctgcatcacaactgcaatgtttgtttttatttttggctttatgtctatactccacagagagctttttaagtaatgaattatgtagc

SEQ ID NO: 86540 - DNA, 120 bp, Artificial Sequence
  ENSG00000085274_22 (sequence is synthesized)
actattttgggtggatgagttttattttcttttaaagctgccttaattccatttttattttgcattttagaattgcccttcatttactaaatcagccagttaatgtgattcagttgtgac

SEQ ID NO: 86541 - DNA, 120 bp, Artificial Sequence
  ENSG00000085274_23 (sequence is synthesized)
ctgtgggattttaaaattttcctgccctcataatttaagcaaaatccacgatagtatcagcccaagagtgtgttgctatttgtaagccccatggatcaatacataaactatgcataaaaa

SEQ ID NO: 86542 - DNA, 120 bp, Artificial Sequence
  ENSG00000085274_24 (sequence is synthesized)
taaaatttcatattttcgctcgtaaaaatttaggcgctgaataagaattgtgctatttctctattaatatattgttagaaataacttttctaatgaaacaaaaatgtttctcaaaatcta

SEQ ID NO: 86543 - DNA, 120 bp, Artificial Sequence
  ENSG00000085274_25 (sequence is synthesized)
gaaaagtgcatataaatttttgttcatttagaactgagtattctggagaaaaccaatggtcagcacttttggtttgagttatctgagattgtattttcaaaatgaattttaagtagatat

SEQ ID NO: 86544 - DNA, 120 bp, Artificial Sequence
  ENSG00000085274_26 (sequence is synthesized)
ttggtgtttttatcttgtcaaagacagtttcaaaatttgattcagtttatgttttattccgttctaaaatattggagatgaggaaaatgtacttgagttttgaaatattttggtaagcct

SEQ ID NO: 86545 - DNA, 120 bp, Artificial Sequence
  ENSG00000085274_27 (sequence is synthesized)
ctcttactcctgttatgcactttttaaaataaatactgaattccagaaagaattttctagatataaacttaatgcatactagaaatcacttggcttctaaatttggtacattatattgca

SEQ ID NO: 86546 - DNA, 120 bp, Artificial Sequence
  ENSG00000085274_28 (sequence is synthesized)
taaagagttaagaaattaacctcaattataagtaaacattttgagttaccagaaagccaactatagttaaatattttatatctgagttttctataagtttggggtttgttaattttataa

SEQ ID NO: 86547 - DNA, 120 bp, Artificial Sequence
  ENSG00000085274_29 (sequence is synthesized)
attaaaccacaacttttggtggtggttgtagtttcacaatggtccttttccttccaaatgaatgtagaaaattcgttattatcctgatatttgcaccactcatccccatgccacttttcc

SEQ ID NO: 86548 - DNA, 120 bp, Artificial Sequence
  ENSG00000085274_30 (sequence is synthesized)
cacatattaatttatttcactgcctgatctttggatatgaaattatgagttccacaaagtcaatttttatagtgccaatcaaacagcatggtgatattctttttctttttttttcccccc

SEQ ID NO: 86549 - DNA, 120 bp, Artificial Sequence
  ENSG00000085274_31 (sequence is synthesized)
acaaggctgttgttcagtgtgagatgacatcatttcttatttctgccatgctgtggcttttttgtgttctgcttttaaactacacctgtagtacagttaatatgttttttattggtattg

SEQ ID NO: 86550 - DNA, 120 bp, Artificial Sequence
  ENSG00000085274_32 (sequence is synthesized)
atttctttaattcattaattttctctatttgggacccaagtcataagaaccaattagaggacataataaaaacacttaatgcttgtagtctgtagagatcttcaccatttcacagcacac

SEQ ID NO: 86551 - DNA, 120 bp, Artificial Sequence
  ENSG00000085274_33 (sequence is synthesized)
acattattttcataataaattgccactggtgggacatgggactgacttatttgaatagagtttgaaataccacctttgtatgatgcaaacaatatttgattattttatctaagaaatcta

SEQ ID NO: 86552 - DNA, 120 bp, Artificial Sequence
  ENSG00000085274_34 (sequence is synthesized)
tgcatgtgtatcaagttaaaatagtgggtttaaatacaatttacaaagcattagaatgttacctaatctcttctgggttaaatgtgataggaatgtattggaatgtgaagaaattataga

SEQ ID NO: 86553 - DNA, 120 bp, Artificial Sequence
  ENSG00000085274_35 (sequence is synthesized)
aaattaaaagactcagcctctttaggaagtttgctaaaatggagaggttatgtttaatttatttatatcttcgttaatccaagcatctaatgaacaaaaaactgctacagtgacgtcata

SEQ ID NO: 86554 - DNA, 120 bp, Artificial Sequence
  ENSG00000085274_36 (sequence is synthesized)
attctataagggcaatagttgccaaatttcctctggtattattagcattctgcctttgcatagattagccttcaaatttattatttttagtattatttgatacgattgaagtggctaaga

SEQ ID NO: 86555 - DNA, 120 bp, Artificial Sequence
  ENSG00000085274_37 (sequence is synthesized)
ttgattgagcttttcttgatcacattttctgcttcttagctaaagtaattttatttaaattgacatggcttgagttgtcatcattttctgctcttctagaatgatgtgtagagaaaactt

SEQ ID NO: 86556 - DNA, 120 bp, Artificial Sequence
  ENSG00000085274_38 (sequence is synthesized)
gaagatactatcccttctttggcattcttctcttaatgctatgctattatttatcataatatgcatatatttagttgtatctggtatcattctaacactcataactaccattttagttaa

SEQ ID NO: 86557 - DNA, 120 bp, Artificial Sequence
  ENSG00000085274_39 (sequence is synthesized)
gtccaactttatatttgttacaatgcagtgttttgggaaaggtctattagtaattatttaagtattacatatttttatggaagtctttagaaggtgaagatcttactgagaaactatttt

SEQ ID NO: 86558 - DNA, 120 bp, Artificial Sequence
  ENSG00000085274_40 (sequence is synthesized)
aagatcttactgagaaactattttctaaataaatttaattttcttttgtatttgtatcagatcatgcctactgtatgttagattttagactattttaaaagaaaccgtagattatataaa

SEQ ID NO: 86559 - DNA, 120 bp, Artificial Sequence
  ENSG00000085274_41 (sequence is synthesized)
gtgaagaaactgtgttccccccttgggttgctatcggtggtagaagtgttgccattcaccgtcacttattgatgtgtccaaaggattgtgttagttgatcaagatcaagggtaaaattcc

SEQ ID NO: 86560 - DNA, 120 bp, Artificial Sequence
  ENSG00000085274_42 (sequence is synthesized)
ccttttttcaaaggtaatggttctatcagtttcattccaacagtagctaatttctgtgtttcagtcctacagaaattgtgtgagtagttgaaataatgtacatgtactagtttttttaag

SEQ ID NO: 86561 - DNA, 120 bp, Artificial Sequence
  ENSG00000085274_43 (sequence is synthesized)
tattctaaatagttctaacatttaatgcatatcagaaacatgcttaagaaataacaatatccaggcccaccccacctattgaatcagacagttcccagggcatatatatgctggggaagc

SEQ ID NO: 86562 - DNA, 72 bp, Artificial Sequence
  ENSG00000085274_44 (sequence is synthesized)
gaatcagacagttcccagggcatatatatgctggggaagccccataggtgattttaatgtataccaaacatg

SEQ ID NO: 86563 - DNA, 71 bp, Artificial Sequence
  ENSG00000085274_45 (sequence is synthesized)
gcgccaccacacctgactaatttttgttagagatggggtttcattctgttggccaggctggtctcgaactc

SEQ ID NO: 86564 - DNA, 120 bp, Artificial Sequence
  ENSG00000085274_46 (sequence is synthesized)
aatcaatagtttttaaatgatttggattaaattgcacagatataccaagaaatgaaaaggaataggagaaagaccatttatctgcgaattatgtggaaattcttacacagatattaaaaa

SEQ ID NO: 86565 - DNA, 120 bp, Artificial Sequence
  ENSG00000085276_0 (sequence is synthesized)
gctgagatgttggaggggcgtctagcgcgcatgtgcgaaggtgtccaaactgacaatgctggagagatagcgagtgtggattgagagaaagggagagagggagggagagagagtgaaaga

SEQ ID NO: 86566 - DNA, 120 bp, Artificial Sequence
  ENSG00000085276_1 (sequence is synthesized)
ttgagagaaagggagagagggagggagagagagtgaaagaagaaaatacagagagtgagtgtgtggaagagagagagaaacaggagagaaacaggagggagggagagagagagagagaga

SEQ ID NO: 86567 - DNA, 120 bp, Artificial Sequence
  ENSG00000085276_2 (sequence is synthesized)
ggagagagagggagggagcgagagggagagcaaaagaaggaaaggatccaagaaaaaaaagccccaaccacacaccagcggctgcaggactgggcacagcatgagatccaaaggcagggc

SEQ ID NO: 86568 - DNA, 120 bp, Artificial Sequence
  ENSG00000085276_3 (sequence is synthesized)
aaggaaactggccacaaataatgagtgtgtatatggcaactaccctgaaatacctttggaagaaatgccagatgcagatggagtagccagcactccctccctcaatattcaagagccatg

SEQ ID NO: 86569 - DNA, 120 bp, Artificial Sequence
  ENSG00000085276_4 (sequence is synthesized)
ctctcctgccacatccagtgaagcattcactccaaaggagggttctccttacaaagcccccatctacatccctgatgatatccccattcctgctgagtttgaacttcgagagtcaaatat

SEQ ID NO: 86570 - DNA, 120 bp, Artificial Sequence
  ENSG00000085276_5 (sequence is synthesized)
gcctggggcaggactaggaatatggaccaaaaggaagatcgaagtaggtgaaaagtttgggccttatgtgggagagcagaggtcaaacctgaaagaccccagttatggatgggagatctt

SEQ ID NO: 86571 - DNA, 120 bp, Artificial Sequence
  ENSG00000085276_6 (sequence is synthesized)
agacgaattttacaatgtgaagttctgcatagatgccagtcaaccagatgttggaagctggctcaagtacattagattcgctggctgttatgatcagcacaaccttgttgcatgccagat

SEQ ID NO: 86572 - DNA, 120 bp, Artificial Sequence
  ENSG00000085276_7 (sequence is synthesized)
aaatgatcagatattctatagagtagttgcagacattgcgccgggagaggagcttctgctgttcatgaagagcgaagactatccccatgaaactatggcgccggatatccacgaagaacg

SEQ ID NO: 86573 - DNA, 120 bp, Artificial Sequence
  ENSG00000085276_8 (sequence is synthesized)
gcaatatcgctgcgaagactgtgaccagctctttgaatctaaggctgaactagcagatcaccaaaagtttccatgcagtactcctcactcagcattttcaatggttgaagaggactttca

SEQ ID NO: 86574 - DNA, 120 bp, Artificial Sequence
  ENSG00000085276_9 (sequence is synthesized)
gcaaaaactcgaaagcgagaatgatctccaagagatacacacgatccaggagtgtaaggaatgtgaccaagtttttcctgatttgcaaagcctggagaaacacatgctgtcacatactga

SEQ ID NO: 86575 - DNA, 120 bp, Artificial Sequence
  ENSG00000085276_10 (sequence is synthesized)
agagagggaatacaagtgtgatcagtgtcccaaggcatttaactggaagtccaatttaattcgccaccagatgtcacatgacagtggaaagcactatgaatgtgaaaactgtgccaaggt

SEQ ID NO: 86576 - DNA, 120 bp, Artificial Sequence
  ENSG00000085276_11 (sequence is synthesized)
tttcacggaccctagcaaccttcagcggcacattcgctctcagcatgtcggtgcccgggcccatgcatgcccggagtgtggcaaaacgtttgccacttcgtcgggcctcaaacaacacaa

SEQ ID NO: 86577 - DNA, 120 bp, Artificial Sequence
  ENSG00000085276_12 (sequence is synthesized)
gcacatccacagcagtgtgaagccctttatctgtgaggtctgccataaatcctatactcagttttcaaacctttgccgtcataagcgcatgcatgctgattgcagaacccaaatcaagtg

SEQ ID NO: 86578 - DNA, 120 bp, Artificial Sequence
  ENSG00000085276_13 (sequence is synthesized)
caaagactgtggacaaatgttcagcactacgtcttccttaaataaacacaggaggttttgtgagggcaagaaccattttgcggcaggtggattttttggccaaggcatttcacttcctgg

SEQ ID NO: 86579 - DNA, 120 bp, Artificial Sequence
  ENSG00000085276_14 (sequence is synthesized)
aaccccagctatggataaaacgtccatggttaatatgagtcatgccaacccgggccttgctgactattttggcgccaataggcatcctgctggtcttacctttccaacagctcctggatt

SEQ ID NO: 86580 - DNA, 120 bp, Artificial Sequence
  ENSG00000085276_15 (sequence is synthesized)
ttcttttagcttccctggtctgtttccttccggcttgtaccacaggcctcctttgatacctgctagttctcctgttaaaggactatcaagtactgaacagacaaacaaaagtcaaagtcc

SEQ ID NO: 86581 - DNA, 120 bp, Artificial Sequence
  ENSG00000085276_16 (sequence is synthesized)
cctcatgacacatcctcagatactgccagctacacaggatattttgaaggcactatctaaacacccatctgtaggggacaataagccagtggagctccagcccgagaggtcctctgaaga

SEQ ID NO: 86582 - DNA, 120 bp, Artificial Sequence
  ENSG00000085276_17 (sequence is synthesized)
gaggccctttgagaaaatcagtgaccagtcagagagtagtgaccttgatgatgtcagtacaccaagtggcagtgacctggaaacaacctcgggctctgatctggaaagtgacattgaaag

SEQ ID NO: 86583 - DNA, 120 bp, Artificial Sequence
  ENSG00000085276_18 (sequence is synthesized)
tgataaagagaaatttaaagaaaatggtaaaatgttcaaagacaaagtaagccctcttcagaatctggcttcaataaataataagaaagaatacagcaatcattccattttctcaccatc

SEQ ID NO: 86584 - DNA, 120 bp, Artificial Sequence
  ENSG00000085276_19 (sequence is synthesized)
tttagaggagcagactgcggtgtcaggagctgtgaatgattctataaaggctattgcttctattgctgaaaaatactttggttcaacaggactggtggggctgcaagacaaaaaagttgg

SEQ ID NO: 86585 - DNA, 120 bp, Artificial Sequence
  ENSG00000085276_20 (sequence is synthesized)
agctttaccttacccttccatgtttcccctcccattttttccagcattctctcaatcaatgtacccatttcctgatagagacttgagatcgttacctttgaaaatggaaccccaatcacc

SEQ ID NO: 86586 - DNA, 120 bp, Artificial Sequence
  ENSG00000085276_21 (sequence is synthesized)
aggtgaagtaaagaaactgcagaagggcagctctgagtccccctttgatctcaccactaagcgaaaggatgagaagcccttgactccagtcccctccaagcctccagtgacacctgccac

SEQ ID NO: 86587 - DNA, 120 bp, Artificial Sequence
  ENSG00000085276_22 (sequence is synthesized)
tgactgagcctcgaaaaaaccacgtgtttgggggaaaaaaaggaagcaacgtcgaatcaagacctgcttcagatggttccttgcagcatgcaagacccactcctttctttatggacccta

SEQ ID NO: 86588 - DNA, 120 bp, Artificial Sequence
  ENSG00000085276_23 (sequence is synthesized)
tttacagagtagagaaaagaaaactaactgacccacttgaagctttaaaagagaaatacttgaggccttctccaggattcttgtttcacccacaattccaactgcctgatcagagaactt

SEQ ID NO: 86589 - DNA, 120 bp, Artificial Sequence
  ENSG00000085276_24 (sequence is synthesized)
ggatgtcagctattgaaaacatggcagaaaagctagagagcttcagtgccctgaaacctgaggccagtgagctcttacagtcagtgccctctatgttcaacttcagggcgcctcccaatg

SEQ ID NO: 86590 - DNA, 120 bp, Artificial Sequence
  ENSG00000085276_25 (sequence is synthesized)
ccctgccagagaaccttctgcggaagggaaaggagcgctatacctgcagatactgtggcaagatttttccaaggtctgcaaacctaacacggcacttgagaacccacacaggagagcagc

SEQ ID NO: 86591 - DNA, 120 bp, Artificial Sequence
  ENSG00000085276_26 (sequence is synthesized)
cttacagatgcaaatactgtgacagatcatttagcatatcttctaacttgcaaaggcatgttcgcaacatccacaataaagagaagccatttaagtgtcacttatgtgataggtgttttg

SEQ ID NO: 86592 - DNA, 120 bp, Artificial Sequence
  ENSG00000085276_27 (sequence is synthesized)
gtcaacaaaccaatttagacagacacctaaagaaacatgagaatgggaacatgtccggtacagcaacatcgtcgcctcattctgaactggaaagtacaggtgcgattctggatgacaaag

SEQ ID NO: 86593 - DNA, 120 bp, Artificial Sequence
  ENSG00000085276_28 (sequence is synthesized)
aagatgcttacttcacagaaattcgaaatttcattgggaacagcaaccatggcagccaatctcccaggaatgtggaggagagaatgaatggcagtcattttaaagatgaaaaggctttgg

SEQ ID NO: 86594 - DNA, 120 bp, Artificial Sequence
  ENSG00000085276_29 (sequence is synthesized)
tgaccagtcaaaattcagacttgctggatgatgaagaagttgaagatgaggtgttgttagatgaggaggatgaagacaatgatattactggaaaaacaggaaaggaaccagtgacaagta

SEQ ID NO: 86595 - DNA, 120 bp, Artificial Sequence
  ENSG00000085276_30 (sequence is synthesized)
atttacatgaaggaaaccctgaggatgactatgaagaaaccagtgccctggagatgagttgcaagacatccccagtgaggtataaagaggaagaatataaaagtggactttctgctctag

SEQ ID NO: 86596 - DNA, 120 bp, Artificial Sequence
  ENSG00000085276_31 (sequence is synthesized)
atcatataaggcacttcacagatagcctcaaaatgaggaaaatggaagataatcaatattctgaagctgagctgtcttcttttagtacttcccatgtgccagaggaacttaagcagccgt

SEQ ID NO: 86597 - DNA, 120 bp, Artificial Sequence
  ENSG00000085276_32 (sequence is synthesized)
tacacagaaagtccaaatcgcaggcatatgctatgatgctgtcactgtctgacaaggagtccctccattctacatcccacagttcttccaacgtgtggcacagtatggccagggctgcgg

SEQ ID NO: 86598 - DNA, 120 bp, Artificial Sequence
  ENSG00000085276_33 (sequence is synthesized)
cggaatccagtgctatccagtccataagccacgtatgacgttatcaaggttgaccagagtgggaccaagtccaacagtagcatggctctttcatataggactatttacaagactgctgag

SEQ ID NO: 86599 - DNA, 120 bp, Artificial Sequence
  ENSG00000085276_34 (sequence is synthesized)
cagaatgccttataaacctgcagggtcactcatctaaagtctagtgaccttaaactgaatgatttaaaaaagaaaagaaagaaaaaagaaactatttattctcgatattttgttttgcac

SEQ ID NO: 86600 - DNA, 120 bp, Artificial Sequence
  ENSG00000085276_35 (sequence is synthesized)
agcaaaggcagctgctgacttctggaagatcaatcaatgcgacttaaagtgattcagtgaaaacaaaaaacttggtgggctgaaggcatcttccagtttaccccaccttagggtatgggt

SEQ ID NO: 86601 - DNA, 120 bp, Artificial Sequence
  ENSG00000085276_36 (sequence is synthesized)
gggtgagaagggcagttgagatggcagcattgatatgaatgaacactccatagaaactgaattctcttttgtacaagatcacctgacatgattgggaacagttgcttttaattacagatt

SEQ ID NO: 86602 - DNA, 120 bp, Artificial Sequence
  ENSG00000085276_37 (sequence is synthesized)
taatttttttcttcgttaaagttttatgtaatttaaccctttgaagacagaagtagttggatgaaatgcacagtcaattattatagaaactgataacagggagtacttgttccccctttt

SEQ ID NO: 86603 - DNA, 120 bp, Artificial Sequence
  ENSG00000085276_38 (sequence is synthesized)
gccttcttaagtacattgtttaaaactagggaaaaagggtatgtgtatattgtaaactatggatgttaacactcaaagaggttaagtcagtgaagtaacctattcatcaccagtaccgct

SEQ ID NO: 86604 - DNA, 120 bp, Artificial Sequence
  ENSG00000085276_39 (sequence is synthesized)
gtaccactaataaattgtttgccaaatccttgtaataacatcttaattttagacaatcatgtcactgtttttaatgtttatttttttgtgtgtgttgcgtgtatcatgtatttatttgtt

SEQ ID NO: 86605 - DNA, 120 bp, Artificial Sequence
  ENSG00000085276_40 (sequence is synthesized)
ggcaaactattgtttgttgattaaaatagcactgttccagtcagccactactttatgacgtctgaggcacacccctttccgaatttcaaggaccaaggtgacccgacctgtgtatgagag

SEQ ID NO: 86606 - DNA, 120 bp, Artificial Sequence
  ENSG00000085276_41 (sequence is synthesized)
tgccaaatggtgtttggcttttcttaacattcctttttgtttgtttgttttgttttccttcttaatgaactaaatacgaatagatgcaacttagtttttgtaatactgaaatcgattcaa

SEQ ID NO: 86607 - DNA, 120 bp, Artificial Sequence
  ENSG00000085276_42 (sequence is synthesized)
ttgtataaacgattataatttctttcatggaagcatgattcttctgattaaaaactgtactccatattttatgctggttgtctgcaagcttgtgcgatgttatgttcatgttaatcctat

SEQ ID NO: 86608 - DNA, 120 bp, Artificial Sequence
  ENSG00000085276_43 (sequence is synthesized)
ttgtaaaatgaagtgttcccaaccttatgttaaaagagagaagtaaataacagactgtattcagttattttgccctttattgaggaaccagatttgttttctttttgtttgtaatctcat

SEQ ID NO: 86609 - DNA, 120 bp, Artificial Sequence
  ENSG00000085276_44 (sequence is synthesized)
tttgaaataatcagcaagttgaggtactttcttcaaatgctttgtacaatataaactgttatgcctttcagtgcattactatgggaggagcaactaaaaaataaagacttacaaaaagga

SEQ ID NO: 86610 - DNA, 120 bp, Artificial Sequence
  ENSG00000085276_45 (sequence is synthesized)
aaaaggcactgtgaccaggagagtggctgcacatggcctttagagggtcaccgtgttagctatttatggtccaatccagtagggctatttatgattacaagtaaatcttttataatcaga

SEQ ID NO: 86611 - DNA, 120 bp, Artificial Sequence
  ENSG00000085276_46 (sequence is synthesized)
tttgctgtccaacatcgtgtgctgcttcgcgagaaagtcacattcggaccctttggctagattgtggggatttttttttttttccttttgctgttggttttttgaaagggcctttctcta

SEQ ID NO: 86612 - DNA, 120 bp, Artificial Sequence
  ENSG00000085276_47 (sequence is synthesized)
aagtctacctaaacggtttttttttaagctatctttggaggttgacagcttttaaaaacacaggagtgtgttatatgaaatgactgaagatgtgtcgttactttattttattcgagattt

SEQ ID NO: 86613 - DNA, 120 bp, Artificial Sequence
  ENSG00000085276_48 (sequence is synthesized)
ccgacacgattaagacatttgggagacaaatgcagttctgctagcaaatcaaaagtgaataattcacccagggggcaaacgtttctggagaaagctaagcttttgtcttggggcaagaat

SEQ ID NO: 86614 - DNA, 120 bp, Artificial Sequence
  ENSG00000085276_49 (sequence is synthesized)
attgagaggaagaatgttaatatgatggtgaaatctttgaataatcgtataacagattagtaaaaagacattctttggaaatgaacctttttaaaaattaattttgctgttgacagtggc

SEQ ID NO: 86615 - DNA, 120 bp, Artificial Sequence
  ENSG00000085276_50 (sequence is synthesized)
aatgctaataatgttaacacggaataaaattacacctacaatttttatgtgcagtgtatgtaatacttaactccctgcccctgtgaaagggtatgcttgaaagctaaggggatggatgct

SEQ ID NO: 86616 - DNA, 120 bp, Artificial Sequence
  ENSG00000085276_51 (sequence is synthesized)
tcttgactttgaaattaacaagttttccacgtctctctgcaaatatgaaatggaattagtattgcatttcactggctttattctatgtcctttattaaatatttctttggtgtgtcagga

SEQ ID NO: 86617 - DNA, 120 bp, Artificial Sequence
  ENSG00000085276_52 (sequence is synthesized)
tgaacaaaccaacaaaacccagcaacaaactccaactttttactatttaaaaatgtgcattgctattatttatgtaccttctcaacatctgggatggggggaaatctcaagttgccattt

SEQ ID NO: 86618 - DNA, 120 bp, Artificial Sequence
  ENSG00000085276_53 (sequence is synthesized)
actcttggttgtatttggggaagagaagctcagacgtaggaatagccttctctcaggctgatgtctacatgcctggactgcagtgtgccttcctctcgtagctcggaaggacgcggaacg

SEQ ID NO: 86619 - DNA, 120 bp, Artificial Sequence
  ENSG00000085276_54 (sequence is synthesized)
gcgggcgaggcggaaggcagagctgtgttgccggcgcctggcgggcagaggcgggttcacctgggtggctggagccgccggcgctgcgctttatttcggagcgcaatgccatctaccggc

SEQ ID NO: 86620 - DNA, 120 bp, Artificial Sequence
  ENSG00000085276_55 (sequence is synthesized)
gttgaagaaacatcttaaagtttgtaattttattgataacaaatttttagaatttgtcctcttaatagaaaggatgtttaagtgtacacttctgtcgttgttagtgtgaagaggcatcct

SEQ ID NO: 86621 - DNA, 80 bp, Artificial Sequence
  ENSG00000085276_56 (sequence is synthesized)
tatccctatcttatgttcgatttttcttttttaaattttgggacgacttattgcccttcaatttcctcatggccaaaggc

SEQ ID NO: 86622 - DNA, 120 bp, Artificial Sequence
  ENSG00000085276_57 (sequence is synthesized)
cacacacacacacacacaccacacttgtgctttcaagacatcgaaacggaggctatttccctggggaaagaaatcctgcctggcgagatctccccattggttgtttacccggagaaatct

SEQ ID NO: 86623 - DNA, 120 bp, Artificial Sequence
  ENSG00000085276_58 (sequence is synthesized)
acatgtttaagggggatggtgcatccataatcagtctgtccctataggacttgggtcttggcgacctttttgtgacctctcccgccagaggaggctgctgtcactttaaaaatttaaaag

SEQ ID NO: 86624 - DNA, 120 bp, Artificial Sequence
  ENSG00000085276_59 (sequence is synthesized)
aggagcccgtctggcttccgatcagatcactctgggcggcgggagatagctccctttctccctcgccccgggttctttctggatggccgagcagatcctctttaaagagacagttcatga

SEQ ID NO: 86625 - DNA, 120 bp, Artificial Sequence
  ENSG00000085276_60 (sequence is synthesized)
aatagaaacccggcggctgagcttggagttgcgaaaggggacgatcccgtgagggtccaggacccgcgaaggcgctgcggaggatctgaaagggggatagagctcccctcgcctccccag

SEQ ID NO: 86626 - DNA, 120 bp, Artificial Sequence
  ENSG00000085276_61 (sequence is synthesized)
gccccccaccttttcaaactctcctcctcctgcttgttttcccccattggaactgggaaggagaagtagaagttttagtgggtttcagataactttcattacacatcgggctgataagag

SEQ ID NO: 86627 - DNA, 120 bp, Artificial Sequence
  ENSG00000085276_62 (sequence is synthesized)
caagagaaagtgagaaaagagggaggtgatgtgaaccagaaggaatagctccgagctcatttaggaagggggaaaaagccaaaacacaccaaacccgggtcacccagacgaaagaagact

SEQ ID NO: 86628 - DNA, 120 bp, Artificial Sequence
  ENSG00000085276_63 (sequence is synthesized)
tcatttcttgtattaaaaatacactgttggcggacaataaatccgaaacgcgtggtcctggagagcagatcctagagacggacaaagttgtcagagacccatttggaaatcgagacgcga

SEQ ID NO: 86629 - DNA, 120 bp, Artificial Sequence
  ENSG00000085276_64 (sequence is synthesized)
ggcttttaaaaaattattattattatttttaaacatctctaaatgttgctcgggatcgtttgaaaggattttcgtgcaggagcgttgggggctgctgattattttattttgtttattttg

SEQ ID NO: 86630 - DNA, 120 bp, Artificial Sequence
  ENSG00000085276_65 (sequence is synthesized)
tttgctgtccaacatcgtgtgctgcttcgcgagaaagtcacattcggaccctttggctagattgcttattcatagggcttcttgactaaagcccttggagcactgggtttttcttgaagt

SEQ ID NO: 86631 - DNA, 120 bp, Artificial Sequence
  ENSG00000085276_66 (sequence is synthesized)
aaagtttgtcacttcggacagtttcctgccggggcaccgtttctacgggcgccccccgcccccagccttctttcctcctcgcccgcagtctcgcggagccctgctgcttatctacgttgc

SEQ ID NO: 86632 - DNA, 120 bp, Artificial Sequence
  ENSG00000085276_67 (sequence is synthesized)
gtggtttgctagggtgctttgaggattcagagaagggaaagttcttcgttaaacattacacaggatatatgtgacgcagctagccttgcattaagaaaatttgatttgtgaagtaggatt

SEQ ID NO: 86633 - DNA, 120 bp, Artificial Sequence
  ENSG00000085276_68 (sequence is synthesized)
aaaagaaaaagatgtttgttaaggtgtttgtacaggtatcttagtgtatatcttgccctttgttaatatatatacatctctctctttcctgattccatccacctttattttgtctttaaa

SEQ ID NO: 86634 - DNA, 120 bp, Artificial Sequence
  ENSG00000085365_0 (sequence is synthesized)
gcctcgtctctctctctgcgcctgggtcgggtgggtgacgccgagagccagagagatgtcggatttcgacagtaacccgtttgccgacccggatctcaacaatcccttcaaggatccatc

SEQ ID NO: 86635 - DNA, 120 bp, Artificial Sequence
  ENSG00000085365_1 (sequence is synthesized)
agttacacaagtgacaagaaatgttccaccaggacttgatgaatataatccattctcggattctagaacacctccaccaggcggtgtgaagatgcctaatgtacccaatacacaaccagc

SEQ ID NO: 86636 - DNA, 120 bp, Artificial Sequence
  ENSG00000085365_2 (sequence is synthesized)
aataatgaaaccaacagaggaacatccagcttatacacagattgcaaaggaacatgcattggcccaagctgaacttcttaagcgccaggaagaactagaaagaaaagccgcagaattaga

SEQ ID NO: 86637 - DNA, 120 bp, Artificial Sequence
  ENSG00000085365_3 (sequence is synthesized)
tcgtcgggaacgagaaatgcaaaacctcagtcaacatggtagaaaaaataattggccacctcttcctagcaattttcctgtcggaccttgtttctatcaggatttttctgtagacattcc

SEQ ID NO: 86638 - DNA, 120 bp, Artificial Sequence
  ENSG00000085365_4 (sequence is synthesized)
tgtagaattccaaaagacagtaaagcttatgtactacttgtggatgttccatgcagtaacactgtttctaaatatcttcggatgcttggcttggttttgtgttgattctgcaagagcggt

SEQ ID NO: 86639 - DNA, 120 bp, Artificial Sequence
  ENSG00000085365_5 (sequence is synthesized)
tgattttggattgagtatcctgtggttcttgctttttactccttgttcatttgtctgttggtacagaccactttatggagctttcaggagtgacagttcatttagattctttgtattctt

SEQ ID NO: 86640 - DNA, 120 bp, Artificial Sequence
  ENSG00000085365_6 (sequence is synthesized)
cttcgtctatatttgtcagtttgctgtacatgtactccaagctgcaggatttcataactggggcaattgtggttggatttcatcccttactggtctcaaccaaaatattcctgttggaat

SEQ ID NO: 86641 - DNA, 120 bp, Artificial Sequence
  ENSG00000085365_7 (sequence is synthesized)
catgatgataatcatagcagcacttttcacagcatcagcagtcatctcactagttatgttcaaaaaagtacatggactatatcgcacaacaggtgctagttttgagaaggcccaacagga

SEQ ID NO: 86642 - DNA, 120 bp, Artificial Sequence
  ENSG00000085365_8 (sequence is synthesized)
gtttgcaacaggtgtgatgtccaacaaaactgtccagaccgcagctgcaaatgcagcttcaactgcagcatctagtgcagctcagaatgctttcaagggtaaccagatttaagaatcttc

SEQ ID NO: 86643 - DNA, 120 bp, Artificial Sequence
  ENSG00000085365_9 (sequence is synthesized)
aaacaatacactgttaccttttgactgtacctttttctccagttactgtattctacaaatatttttatgttcaaaacacacagtacagacagcatggatatttcctgttcacttgtgcat

SEQ ID NO: 86644 - DNA, 120 bp, Artificial Sequence
  ENSG00000085365_10 (sequence is synthesized)
gggctaaaaccaggaaaacttccttgtcttattactttacctaatagtttcttaatatttcagtgccccttgcagaaaaaatattacatgctaaataaatattctccatatttttggggg

SEQ ID NO: 86645 - DNA, 120 bp, Artificial Sequence
  ENSG00000085365_11 (sequence is synthesized)
atgacattcagtgaattatttcagtggtgacccactgaaaattaataatggtacttatgattaaaaacgcatttaatactaactgcagtagttctttcaagaatctttagagataaggat

SEQ ID NO: 86646 - DNA, 120 bp, Artificial Sequence
  ENSG00000085365_12 (sequence is synthesized)
tgcacattggaaaagtaaaccatgtttcattcctttttccctatttatattgaaagaaataggccagcagagacttagggattttaaattggcttgctttttagctgtttcagtcaccag

SEQ ID NO: 86647 - DNA, 120 bp, Artificial Sequence
  ENSG00000085365_13 (sequence is synthesized)
tgaagagcctatgtgcattttgtagtagataatgtaaaatttgtcatctttttcttttcttttttttagaatagctgatattttgataacaatctctaatttgcatgggcaccacatttc

SEQ ID NO: 86648 - DNA, 120 bp, Artificial Sequence
  ENSG00000085365_14 (sequence is synthesized)
ttatattaaaagaattagtgttttggcttctgtactgcttatggttgtaggattcaggggttaatggaatcacagaaatgatattctgcaagaatttcttttaaataaaaagtttggggg

SEQ ID NO: 86649 - DNA, 120 bp, Artificial Sequence
  ENSG00000085365_15 (sequence is synthesized)
tgcaatataagaagtttatataatatgcagtacattatccaaaagagaaggtagttaatgcagtagaaagtagtggtaataattcctttttaaaaaaatttcggtagtcatatagtaaca

SEQ ID NO: 86650 - DNA, 120 bp, Artificial Sequence
  ENSG00000085365_16 (sequence is synthesized)
ttttgctatatgaaaactttggtatattctgtggttacaactaagattgtgtctggcagctcttttttggggatgtgtgtgtgtgatttttaacagaggtattaaaggctagcctaactg

SEQ ID NO: 86651 - DNA, 120 bp, Artificial Sequence
  ENSG00000085365_17 (sequence is synthesized)
ttgtctaaaaagattgtacagtatttaagggattttccttttagcttttcatctccagtggcattaaacataaaaagaccctggcattttttcacatacttgaatccctaaatgcacctg

SEQ ID NO: 86652 - DNA, 120 bp, Artificial Sequence
  ENSG00000085365_18 (sequence is synthesized)
tctttcactttttgagacagactgaatatatctaaaatttccagcaataaaaaaaaaagcatttaacttgcaccaagcaagaaaatataaatacagttaactgcattaagataatcacgt

SEQ ID NO: 86653 - DNA, 120 bp, Artificial Sequence
  ENSG00000085365_19 (sequence is synthesized)
taaaattgttactatgcagcacagaacttcattcttatagtattcttgggttcaacctttgaatcaattttaccactgattaaataaatgactcaaagacatctgtaagtcatgctgctg

SEQ ID NO: 86654 - DNA, 120 bp, Artificial Sequence
  ENSG00000085365_20 (sequence is synthesized)
tgttttgaaagtctttaactaaattaagattgcagaatgatagtgattattcaattagattttaagtaaggattgtgatattagaggctggaaatccttattttttaaaaaatcagatag

SEQ ID NO: 86655 - DNA, 120 bp, Artificial Sequence
  ENSG00000085365_21 (sequence is synthesized)
gcataaatagttaaatcactttcattctccccaaacctgtagttacagaaaaagttttatgctagaggtgggatgccaagttttcactatccatgaagcagcgctgcatgtcactaggta

SEQ ID NO: 86656 - DNA, 120 bp, Artificial Sequence
  ENSG00000085365_22 (sequence is synthesized)
acacagatccatccagatggtgtttacatttgatttatttgggatcttattgacatcaggtatacttggaagacatttcttttattcttcagcgtatgaatttaaagctattttttgtaa

SEQ ID NO: 86657 - DNA, 120 bp, Artificial Sequence
  ENSG00000085365_23 (sequence is synthesized)
atatttctaatcagcgataatttctacctatgttctcaaccaacttagccagtttgtttttcagagcctgtagtcttattggaaatctattttatcagtgtgctttattgagtgtggatt

SEQ ID NO: 86658 - DNA, 120 bp, Artificial Sequence
  ENSG00000085365_24 (sequence is synthesized)
ttgcatacattcaaaacattaaccacaaaatacagcaagtgcacctatattcaccattaacttatatcccaagtccattttttcctgtacactacaaacaaaagatatattagagacttt

SEQ ID NO: 86659 - DNA, 120 bp, Artificial Sequence
  ENSG00000085365_25 (sequence is synthesized)
ttcagaattggaatgtttatattatgtagaaatcttcaaaggtagcattattaaatagcaaagaataattagaacccacatatctttttttgtgtggatggggaaaatgttttaaaatcc

SEQ ID NO: 86660 - DNA, 120 bp, Artificial Sequence
  ENSG00000085365_26 (sequence is synthesized)
agttatttaatatgagtttgagagagaaaattgttttttaaaaatatatgtgcattgaaatgatggcaatgcttatagtatgatcaagtatgaaaggaactttaaattcttatatttact

SEQ ID NO: 86661 - DNA, 120 bp, Artificial Sequence
  ENSG00000085365_27 (sequence is synthesized)
tttctctcagtaaattgttaaattttcactcagcaaaagattggcatttgttaagtgttctatatttagtactaaaatcacagtcatgaaatcatagtcataaaatggtcttcacacagc

SEQ ID NO: 86662 - DNA, 120 bp, Artificial Sequence
  ENSG00000085365_28 (sequence is synthesized)
agtcatccgtgtcatttatcattttgtaatattaaattatggcaattttatttcaaactaaagtttgaacaccggaaagtcattactcagtgatttgtaatttgggacttggattattta

SEQ ID NO: 86663 - DNA, 120 bp, Artificial Sequence
  ENSG00000085365_29 (sequence is synthesized)
tctagagatgtttgtatattttgtcagtaactaatactgcgctgccatcatggtgactgtcatggttctacagaaatgccctccatgtgtccctctaatgttgcatgtttcagtgggttg

SEQ ID NO: 86664 - DNA, 120 bp, Artificial Sequence
  ENSG00000085365_30 (sequence is synthesized)
gaagttttgtatatttattgtattaacacagagtgtcataaaataaaatgctgtttactggatgtttgtttgtataattttgaacactataatagcaattcagagacagacattgttaaa

SEQ ID NO: 86665 - DNA, 120 bp, Artificial Sequence
  ENSG00000085365_31 (sequence is synthesized)
ggtttgatgtatatagaaattccatgtttgattttttaaaatatgtgtataagtctgtcatgtgctaaacaaaataatatgaaagacctagttaaaaattctaaccaatgtaaaatgacc

SEQ ID NO: 86666 - DNA, 120 bp, Artificial Sequence
  ENSG00000085365_32 (sequence is synthesized)
atttttctgttgcattagacctttacaggtaatggaacatgagcttcacccatattaaatattttggcccctttaaggtcaaaatacagatcatctagaagttagattcaaaatggaaaa

SEQ ID NO: 86667 - DNA, 120 bp, Artificial Sequence
  ENSG00000085365_33 (sequence is synthesized)
cctattcatggctcagatttttcattgtgggttaaaaatgggtgtctctgtactagtattgtatttattcaattgaacttgtattctgatttctatccttgctacctattgctgttttat

SEQ ID NO: 86668 - DNA, 120 bp, Artificial Sequence
  ENSG00000085365_34 (sequence is synthesized)
gtactgatgaaagtacctatttgtgtatattggatttttcacttggttagctaaagaagatgtaaaaatatctaaaataatgttcatggtgaatcttattttgagaaatacatgttaaaa

SEQ ID NO: 86669 - DNA, 120 bp, Artificial Sequence
  ENSG00000085365_35 (sequence is synthesized)
aaggaacagtattctttattttctgggtgttatatttaaaaaagcaagtttggatttttacacctaatttactaggaaaatattttattctgtaattcatgttaagattatgtatggttt

SEQ ID NO: 86670 - DNA, 120 bp, Artificial Sequence
  ENSG00000085365_36 (sequence is synthesized)
gcattttaaggggatttatgttaggttaattagttgtttctgtaaatcatttgtaatagcatagtgctttttactcattgctgtatctttttctgaaaacactgttgttaacatctaatt

SEQ ID NO: 86671 - DNA, 120 bp, Artificial Sequence
  ENSG00000085365_37 (sequence is synthesized)
cagtatccttattggtacaaatctgtgtttggcatgactgtttatatacagaatttgttacattttgagcattttttcccctgcttatgtataccttagagttaccatggctgtcatata

SEQ ID NO: 86672 - DNA, 120 bp, Artificial Sequence
  ENSG00000085365_38 (sequence is synthesized)
ccatttcactatatctcctttcagtttttccttaaggaaaatgtttagaggaatttgttcatttcatgtgattaagccctttagagatgaaataagattggttaattttaaaaaaattga

SEQ ID NO: 86673 - DNA, 120 bp, Artificial Sequence
  ENSG00000085365_39 (sequence is synthesized)
ggatggttaaaaaatagaaaacaccttactttgatacattttaaagtacaatagtatacatttatttagagtagactaatgtgtttaaaacatgagttgttttaaatacttttttattga

SEQ ID NO: 86674 - DNA, 120 bp, Artificial Sequence
  ENSG00000085365_40 (sequence is synthesized)
gctaaaaagttttatctcacatattaagtattacagaaagtgaagtattttggctagaattttagggcatattttataaagcagcatgcctgtaatattggtgggtatttttaaacttta

SEQ ID NO: 86675 - DNA, 120 bp, Artificial Sequence
  ENSG00000085365_41 (sequence is synthesized)
ggactttatcacagtatgtagagagctagaaataaatctagaaactttctaagccaggtattgccactaacctgtcttatataagcagatacctcttatttgaagattgtaggaaaatag

SEQ ID NO: 86676 - DNA, 120 bp, Artificial Sequence
  ENSG00000085365_42 (sequence is synthesized)
agaaagactgttctccagttttctcacccccgctgtgggttttatatttacaatttaactttggggtttgggtaagacaaacatttaatgtataggattttggccaggtgtggtggctca

SEQ ID NO: 86677 - DNA, 120 bp, Artificial Sequence
  ENSG00000085365_43 (sequence is synthesized)
cgagactccatctcaagaaaaaaaaaaaagaattttcattagtgctggccgtgtttcaaatggcaagggaacatgggaactatcatgtggcaatgtagtgagtgttaaactttgtgtttg

SEQ ID NO: 86678 - DNA, 120 bp, Artificial Sequence
  ENSG00000085365_44 (sequence is synthesized)
actttgtgtttgtccaaatcctgatttatttttcagttcatatctttctgggcttgacatggctgatggtgtagctgaaaccctcctaacactaaaagccatttaatcttttctgtaata

SEQ ID NO: 86679 - DNA, 120 bp, Artificial Sequence
  ENSG00000085365_45 (sequence is synthesized)
ggagcagaaaatagttaatcatccacctagtaatataagattactgtgaatattatcttctatacattaaaacagttctagtttgtagaataataccatacaagttttatttttaaattc

SEQ ID NO: 86680 - DNA, 120 bp, Artificial Sequence
  ENSG00000085365_46 (sequence is synthesized)
tagttattttcagtgcttacttaaatgtaattctagaattcctccacaacttttaatattttgtatgccagtgattctcaagataaatcatgattgtagtagttgttactgttggcagtt

SEQ ID NO: 86681 - DNA, 120 bp, Artificial Sequence
  ENSG00000085365_47 (sequence is synthesized)
tgtagtagtattcaggtattttggggatgggggaaaacaccaaaaatcagtgtcttttatctggtgatcactgtggtatctacagtattctagtctcctgcacaaaaactgaacccactg

SEQ ID NO: 86682 - DNA, 120 bp, Artificial Sequence
  ENSG00000085365_48 (sequence is synthesized)
ggcctatgcatccctcacactttttttctagtataaaagcaatacataatgtgttgtagaacaattaaaaattcagaaagtgatacatgagaaaataaaaataaatccttaattctgtca

SEQ ID NO: 86683 - DNA, 120 bp, Artificial Sequence
  ENSG00000085365_49 (sequence is synthesized)
actgcgtctgcccctcggctccccttagcagcccagagaggggcgcggggccgccgtcctccatttggggtcgcgccccggccccgtgtcactcctttgggttttggggcttgggggtgg

SEQ ID NO: 86684 - DNA, 120 bp, Artificial Sequence
  ENSG00000085365_50 (sequence is synthesized)
ctctctgcgcctgggtcgggtgggtgacgccgagagccagagagatgtcggatttcgacagtaacccgtttgccgacccggatctcaacaatcccttcaagataatgtgtctataaacat

SEQ ID NO: 86685 - DNA, 120 bp, Artificial Sequence
  ENSG00000085365_51 (sequence is synthesized)
tcctgtacaagtgttctgtttgatcacctgttttaaattcttttggggatatatacctacaagtggaattgcctagtcatatggtaactctgtttaatcatggaggagcttccagaccct

SEQ ID NO: 86686 - DNA, 120 bp, Artificial Sequence
  ENSG00000085365_52 (sequence is synthesized)
ggcctcgcctcgtctctctctctgcgcctgggtcgggtgggtgacgccgagagccagagagatgtcggatttcgacagtaacccgtttgccgacccggatctcaacaatcccttcaagcc

SEQ ID NO: 86687 - DNA, 80 bp, Artificial Sequence
  ENSG00000085377_0 (sequence is synthesized)
ctgctttctgcacgtcctcgccgccgcgccgccagtccgtttgtgctagctctggccgtgagccggccgcccgctgccgc

SEQ ID NO: 86688 - DNA, 120 bp, Artificial Sequence
  ENSG00000085377_1 (sequence is synthesized)
ggccagcccggctagctcaggtccgctcccggagcccgcgcccctccacgctgccccctgcctgtccccggccatgctgtcccttcagtaccccgacgtgtaccgcgacgagaccgccgt

SEQ ID NO: 86689 - DNA, 120 bp, Artificial Sequence
  ENSG00000085377_2 (sequence is synthesized)
acaggattatcatggtcataaaatttgtgacccttacgcctggcttgaagaccccgacagtgaacagactaaggcctttgtggaggcccagaataagattactgtgccatttcttgagca

SEQ ID NO: 86690 - DNA, 120 bp, Artificial Sequence
  ENSG00000085377_3 (sequence is synthesized)
gtgtcccatcagaggtttatacaaagagagaatgactgaactatatgattatcccaagtatagttgccacttcaagaaaggaaaacggtatttttatttttacaatacaggtttgcagaa

SEQ ID NO: 86691 - DNA, 120 bp, Artificial Sequence
  ENSG00000085377_4 (sequence is synthesized)
ccagcgagtattatatgtacaggattccttagagggtgaggccagagtgttcctggaccccaacatactgtctgacgatggcacagtggcactccgaggttatgcgttcagcgaagatgg

SEQ ID NO: 86692 - DNA, 120 bp, Artificial Sequence
  ENSG00000085377_5 (sequence is synthesized)
tgaatattttgcctatggtctgagtgccagtggctcagactgggtgacaatcaagttcatgaaagttgatggtgccaaagagcttccagatgtgcttgaaagagtcaagttcagctgtat

SEQ ID NO: 86693 - DNA, 120 bp, Artificial Sequence
  ENSG00000085377_6 (sequence is synthesized)
ggcctggacccatgatgggaagggaatgttctacaactcataccctcaacaggatggaaaaagtgatggcacagagacatctaccaatctccaccaaaagctctactaccatgtcttggg

SEQ ID NO: 86694 - DNA, 120 bp, Artificial Sequence
  ENSG00000085377_7 (sequence is synthesized)
aaccgatcagtcagaagatattttgtgtgctgagtttcctgatgaacctaaatggatgggtggagctgagttatctgatgatggccgctatgtcttgttatcaataagggaaggatgtga

SEQ ID NO: 86695 - DNA, 120 bp, Artificial Sequence
  ENSG00000085377_8 (sequence is synthesized)
tccagtaaaccgactctggtactgtgacctacagcaggaatccagtggcatcgcgggaatcctgaagtgggtaaaactgattgacaactttgaaggggaatatgactacgtgaccaatga

SEQ ID NO: 86696 - DNA, 120 bp, Artificial Sequence
  ENSG00000085377_9 (sequence is synthesized)
ggggacggtgttcacattcaagacgaatcgccagtctcccaactatcgcgtgatcaacattgacttcagggatcctgaagagtctaagtggaaagtacttgttcctgagcatgagaaaga

SEQ ID NO: 86697 - DNA, 120 bp, Artificial Sequence
  ENSG00000085377_10 (sequence is synthesized)
tgtcttagaatggatagcttgtgtcaggtccaacttcttggtcttatgctacctccatgacgtcaagaacattctgcagctccatgacctgactactggtgctctccttaagaccttccc

SEQ ID NO: 86698 - DNA, 120 bp, Artificial Sequence
  ENSG00000085377_11 (sequence is synthesized)
gctcgatgtcggcagcattgtagggtacagcggtcagaagaaggacactgaaatcttctatcagtttacttcctttttatctccaggtatcatttatcactgtgatcttaccaaagagga

SEQ ID NO: 86699 - DNA, 120 bp, Artificial Sequence
  ENSG00000085377_12 (sequence is synthesized)
gctggagccaagagttttccgagaggtgaccgtaaaaggaattgatgcttctgattaccagacagtccagattttctaccctagcaaggatggtacgaagattccaatgttcattgtgca

SEQ ID NO: 86700 - DNA, 120 bp, Artificial Sequence
  ENSG00000085377_13 (sequence is synthesized)
taaaaaaggcataaaattggatggctctcatccagctttcttatatggctatggcggcttcaacatatccatcacacccaactacagtgtttccaggcttatttttgtgagacacatggg

SEQ ID NO: 86701 - DNA, 120 bp, Artificial Sequence
  ENSG00000085377_14 (sequence is synthesized)
tggtatcctggcagtggccaacatcagaggaggtggcgaatatggagagacgtggcataaaggtggtatcttggccaacaaacaaaactgctttgatgactttcagtgtgctgctgagta

SEQ ID NO: 86702 - DNA, 120 bp, Artificial Sequence
  ENSG00000085377_15 (sequence is synthesized)
tctgatcaaggaaggttacacatctcccaagaggctgactattaatggaggttcaaatggaggcctcttagtggctgcttgtgcaaatcagagacctgacctctttggttgtgttattgc

SEQ ID NO: 86703 - DNA, 120 bp, Artificial Sequence
  ENSG00000085377_16 (sequence is synthesized)
ccaagttggagtaatggacatgctgaagtttcataaatataccatcggccatgcttggaccactgattatgggtgctcggacagcaaacaacactttgaatggcttgtcaaatactctcc

SEQ ID NO: 86704 - DNA, 120 bp, Artificial Sequence
  ENSG00000085377_17 (sequence is synthesized)
attgcataatgtgaagttaccagaagcagatgacatccagtacccgtccatgctgctcctcactgctgaccatgatgaccgcgtggtcccgcttcactccctgaagttcattgccaccct

SEQ ID NO: 86705 - DNA, 120 bp, Artificial Sequence
  ENSG00000085377_18 (sequence is synthesized)
tcagtacatcgtgggccgcagcaggaagcaaagcaaccccctgcttatccacgtggacaccaaggcgggccacggggcggggaagcccacagccaaagtgatagaggaagtctcagacat

SEQ ID NO: 86706 - DNA, 120 bp, Artificial Sequence
  ENSG00000085377_19 (sequence is synthesized)
gtttgcgttcatcgcgcggtgcctgaacgtcgactggattccataaacagttttcgtgcttcctcctgacagcgacagaaaacctcaagggctttcccacgttgacaccaagaaaccact

SEQ ID NO: 86707 - DNA, 120 bp, Artificial Sequence
  ENSG00000085377_20 (sequence is synthesized)
gggcataatgcttccccacgggaacattattcctgcactcacaggctacagttgaacagaactgccgtgggaattttatcttttttaggcttctcctttttagcaaggccttggtgtttc

SEQ ID NO: 86708 - DNA, 120 bp, Artificial Sequence
  ENSG00000085377_21 (sequence is synthesized)
tttttccaccctgtctaggcacatgtggttttttggtgttttttttaagggcatgttgggataaatagctaaatggcaacaaacacattgtgaatattagattgctgaattaaggatcat

SEQ ID NO: 86709 - DNA, 120 bp, Artificial Sequence
  ENSG00000085377_22 (sequence is synthesized)
agtcgggcatacttatctatatccataacctctatatctttaaataaatgtgagaactgttctcatggagaagacttctttgcaacaataataaatgttatttaagaatgacaggctttt

SEQ ID NO: 86710 - DNA, 120 bp, Artificial Sequence
  ENSG00000085377_23 (sequence is synthesized)
acttccggtttcttcatattgaggggcaactccagaagtggagttttctgtgagaataaagcatttcacctttctgcaacaagttagttttcaagcagttaagtcatagaatgtttgtta

SEQ ID NO: 86711 - DNA, 120 bp, Artificial Sequence
  ENSG00000085377_24 (sequence is synthesized)
gctttgaaaataagttgttcatccactctgtctcccttgtttgtttgtttgttagaggtgatgaagctgtcagagggggttcactgtcataaacaaacactgaccacttagttgggtaaa

SEQ ID NO: 86712 - DNA, 120 bp, Artificial Sequence
  ENSG00000085377_25 (sequence is synthesized)
aatctgatctggggctcttttggtttggatgcctcctttcaaaaatcactgggctggaaaattcagattattcacctatttgtatattgatttgtttacaaagtattcctagaaatcaga

SEQ ID NO: 86713 - DNA, 120 bp, Artificial Sequence
  ENSG00000085377_26 (sequence is synthesized)
gttccttggatccaaggatccttggttccaagagatcacatgagtaaattatccaaacaaacagatacatatatccaagcatttcttacagtcagaaatttcagcatttcccaagctgtt

SEQ ID NO: 86714 - DNA, 120 bp, Artificial Sequence
  ENSG00000085377_27 (sequence is synthesized)
tctcctgcatagatcactcctggaaatagaaatagtcatacttacttactggaaaaaaaaaaaaaaaagttttggtttgcccacccccaagatttttaagatatactattccttaaactt

SEQ ID NO: 86715 - DNA, 120 bp, Artificial Sequence
  ENSG00000085377_28 (sequence is synthesized)
tcatccataaaatttttttcaaggcatatattttaacatttcatgaaacaatgttcctttgagtatcagtttgggaaatgctgatctaacttaaaacagttttttttcctttgtcttgct

SEQ ID NO: 86716 - DNA, 120 bp, Artificial Sequence
  ENSG00000085377_29 (sequence is synthesized)
tgatatgataaaaattattattttatatagtatcttaaccttatataaaatagcttaaaagattacttcattattccaataatttgtacttttccaagtaagtcccatcttccaagttgt

SEQ ID NO: 86717 - DNA, 120 bp, Artificial Sequence
  ENSG00000085377_30 (sequence is synthesized)
tcaagttatggtcaaaaattagacataccattttctatcaagcatatcactgcataccaagcatattgaaagacagctatatggcttggtttttctctactggaatcatgttttccgtta

SEQ ID NO: 86718 - DNA, 120 bp, Artificial Sequence
  ENSG00000085377_31 (sequence is synthesized)
ctatttagtacggtacataatacagttgtcattgagtataagattcaccataactcctctggaaacaaagtgtgccagtagctagtgttgcatgctgagactctgtcgtcatcaccatct

SEQ ID NO: 86719 - DNA, 120 bp, Artificial Sequence
  ENSG00000085377_32 (sequence is synthesized)
actcagatactgatactagctagctttggtgtaactgctgaccagcatggcaggaaagaaagaaaatacatttgcatggtcaagccagaggcagcctctttcctagactagctgtgtggt

SEQ ID NO: 86720 - DNA, 120 bp, Artificial Sequence
  ENSG00000085377_33 (sequence is synthesized)
gtgaagtacaaatagctgagttggacccactgagtccagagcattttcaaggttgcacagaatctaaccatactttctgaggtctgctttacagcagaaaatacagtgtgtagtgtgtga

SEQ ID NO: 86721 - DNA, 120 bp, Artificial Sequence
  ENSG00000085377_34 (sequence is synthesized)
gcttcagatatcaggactgggttcaaatcccaaatgtcacttagcaactgatgaggaggaggaggaatacagtaatacgtttttaatgcctagcatgattggcctccagttacgagttct

SEQ ID NO: 86722 - DNA, 120 bp, Artificial Sequence
  ENSG00000085377_35 (sequence is synthesized)
cttttccaacctaatttttgtgtctagattttcacaggacaactaatcccaccaactaaaggtattttggggagtagggggagctttaaacattagaaataagacttgagattgggctcc

SEQ ID NO: 86723 - DNA, 120 bp, Artificial Sequence
  ENSG00000085377_36 (sequence is synthesized)
tacccagaactctaagggattcttctctatttgatcccacttttctgtatcctgtgctctgccctttggctctttcttatgattactctcttctagctattttgaaatgcacagtagatt

SEQ ID NO: 86724 - DNA, 120 bp, Artificial Sequence
  ENSG00000085377_37 (sequence is synthesized)
attgtaaactatagacaccctactgatctaacactaggtcttctttcaaactgtatatttgtaggcattaatctcttcatcctccctttctctgcctgcttttttagctcccacatgagt

SEQ ID NO: 86725 - DNA, 120 bp, Artificial Sequence
  ENSG00000085377_38 (sequence is synthesized)
tctctgcctgcttttttagctcccacatgagtggagaacatgggatatttgtcttcctgtgcctggcttatttcacttaccatattgaccttcagttccatccatgttgctgcaaatgac

SEQ ID NO: 86726 - DNA, 120 bp, Artificial Sequence
  ENSG00000085377_39 (sequence is synthesized)
ttccattgtatatatgtaccacattttcttcatctgttcatctgctgatgggcacgtgggttgattccctatcttggctgttgtggatagtgctgcagtagacacaggagtgcagatatc

SEQ ID NO: 86727 - DNA, 120 bp, Artificial Sequence
  ENSG00000085377_40 (sequence is synthesized)
tttttgatatactgatttcctttcttttggattcatacccagtagtggaattgctcgatcacagaggacttatatgtttagtttttttaggactgttttgaaaaagaaaaagttgtacat

SEQ ID NO: 86728 - DNA, 120 bp, Artificial Sequence
  ENSG00000085377_41 (sequence is synthesized)
gttgcacaggtggcctcactgctttgtcacaaggccctgctaagcacaccagagcatttgttaccttagcaagataaagtcacatttatgttcactatggacttacctggaatattataa

SEQ ID NO: 86729 - DNA, 120 bp, Artificial Sequence
  ENSG00000085377_42 (sequence is synthesized)
aactttccaattaatcatgtttcttaaatactcccactaaagcttaagcagctacacacacatggtgctacaagtttgaaaaggataagtttcaactaaggaagcctgtcaccagtctct

SEQ ID NO: 86730 - DNA, 120 bp, Artificial Sequence
  ENSG00000085377_43 (sequence is synthesized)
caaggtttgtcagttttaccagcctctggaagttcccagcaggccacatagctaatgcccagaaggagttgcaaagactcaaaggcaggttaaggacaggctggaaagctgtggaggttg

SEQ ID NO: 86731 - DNA, 120 bp, Artificial Sequence
  ENSG00000085377_44 (sequence is synthesized)
ctgtaaagaggcaaaggtcatactgttggggtggtcaggccagtgggatgaggactgaggcccttgaaggaggaacattgagccattctcatcctccatatctcaggggctgaaggtgca

SEQ ID NO: 86732 - DNA, 120 bp, Artificial Sequence
  ENSG00000085377_45 (sequence is synthesized)
gagagaaaatgtcctgccctcatccagttgatattccagggaggagacagatggtaaattatcttgctcatgtttaccctgtgccacccgctgcaagcactctgtgtggatgaatgtttg

SEQ ID NO: 86733 - DNA, 120 bp, Artificial Sequence
  ENSG00000085377_46 (sequence is synthesized)
tcctcacacaaccttaggaagcacataataccttttccccatttggcaaaggtccaagttccccagccaggaggtgggcaggcagggcagtaaccccaggagctgggccttggatactgc

SEQ ID NO: 86734 - DNA, 86 bp, Artificial Sequence
  ENSG00000085377_47 (sequence is synthesized)
ggcagggcagtaaccccaggagctgggccttggatactgcactctttttttgggatggagttttgctgttacgtactgcaacctcc

SEQ ID NO: 86735 - DNA, 120 bp, Artificial Sequence
  ENSG00000085377_48 (sequence is synthesized)
aggcatgagccaccatgcccagccgaaacagctctcttactgctgttgtctgagtgtttatgtcctccccgaaatgtatatgttgaaatcgtaaatcccaaagtgatggaattaggaggc

SEQ ID NO: 86736 - DNA, 120 bp, Artificial Sequence
  ENSG00000085377_49 (sequence is synthesized)
tcgtaaatcccaaagtgatggaattaggaggcagggccttcaggaggcgatgggtcatgagagcggaatcctcatgaatgggactggtgcctttatattagagcccaaggagagaccccc

SEQ ID NO: 86737 - DNA, 120 bp, Artificial Sequence
  ENSG00000085377_50 (sequence is synthesized)
ccgccccatcccttccaccatgtgaggacacaggagacggtgtcacctatgaaccaggaagcaaccctcattagacaccaaatctgccagtgccttgatcttagatgtcccagactctag

SEQ ID NO: 86738 - DNA, 120 bp, Artificial Sequence
  ENSG00000085377_51 (sequence is synthesized)
gactgtgagagagcaatttctgttgttgacaacccaccagtttatggtattttcttatagcagcttaaacagactaagatacccacgagtctattaacaagataataaacaaagtataat

SEQ ID NO: 86739 - DNA, 120 bp, Artificial Sequence
  ENSG00000085377_52 (sequence is synthesized)
ttcaggaattaacaagaaacaggaataaaaagagctgtgaagaaacaaagtggggcaaatgaatagtccgtgagaaggaatgctatttgagtcgaggtcagggtgcctctttcaggaagc

SEQ ID NO: 86740 - DNA, 120 bp, Artificial Sequence
  ENSG00000085377_53 (sequence is synthesized)
aacattcggacaaagacccgaacggaatgaggggacaaacaatgggcaacgttttgggggttggtgaggacagcagcaatgggcagagcctgaggcaggaaccagccaggcctttggagg

SEQ ID NO: 86741 - DNA, 120 bp, Artificial Sequence
  ENSG00000085377_54 (sequence is synthesized)
aagagcaggaagccagtgtggggggaacagggagccaggcgaggcctggaggatacactagagatggcaggcagctcagtcaggtgaagccactgagagatgaaagccgacaacactgtg

SEQ ID NO: 86742 - DNA, 120 bp, Artificial Sequence
  ENSG00000085377_55 (sequence is synthesized)
ggaaactgacagcaggagagcctagggaaaagcggggtggttattcaaagagcaggttgcttagcacctttaaggaattttgggggtgggggcagcaggaacccaccatcacaaaaatca

SEQ ID NO: 86743 - DNA, 120 bp, Artificial Sequence
  ENSG00000085377_56 (sequence is synthesized)
ctgacatgccatatcatggatgaatctcaaaaacattataagtgaaagaagccagacacaaatgactgggtatagtctgattaagtgaaatatcctgaaaaggcagttctataaagatag

SEQ ID NO: 86744 - DNA, 120 bp, Artificial Sequence
  ENSG00000085377_57 (sequence is synthesized)
aatgtagattagtgggtacctggagttggtggtgaagatggtaattaactacttgggcataaaggatctaaccgggatgacaaaaatgttctaaaactggatttcagtaacggttgcaca

SEQ ID NO: 86745 - DNA, 120 bp, Artificial Sequence
  ENSG00000085377_58 (sequence is synthesized)
acctggtaaatgtattaaaaagtcattgaattgtacacttgaaatgtatgaattttatggtttgtaaatcataatgttatcgaaataatctctggtagtgaaataaagagaaaaaagagc

SEQ ID NO: 86746 - DNA, 120 bp, Artificial Sequence
  ENSG00000085377_59 (sequence is synthesized)
gtatcatttatcactgtgatcttaccaaagaggagctggagccaagagttttccgagaggtgaccgtaaaaggaattgatgcttctgattaccagacagtccagctccccaagggtactg

SEQ ID NO: 86747 - DNA, 120 bp, Artificial Sequence
  ENSG00000085377_60 (sequence is synthesized)
agtcttccagaaactgaatcactggttgattgatgatgacgaagaatgtctctgttcctttgcaatgagaggtcaccaatagggcaccaggtgtttatcaaggcccctcccacctggagg

SEQ ID NO: 86748 - DNA, 120 bp, Artificial Sequence
  ENSG00000085377_61 (sequence is synthesized)
gctggaccacacaggccacagattaggaatcagaacattgtttgtgaaggaagatgagaataaagagcgctggatgttccccacaatgtttctgtgaaactagggcattattatagcttg

SEQ ID NO: 86749 - DNA, 120 bp, Artificial Sequence
  ENSG00000085377_62 (sequence is synthesized)
gtgaattacccttcaattgtctagaaatggtctagatgataggctacatctagatcatgaataaagctttgtttactaaaacaggtggtgggctggatttggtgtagagctatgatttat

SEQ ID NO: 86750 - DNA, 120 bp, Artificial Sequence
  ENSG00000085377_63 (sequence is synthesized)
agcccctgttctacatcagcagttggcaaactggcctcctgttttattggagaacacatgcccatttgtttacatattgcctgtggttgctttggcacttagagtggttgcaacagaaac

SEQ ID NO: 86751 - DNA, 120 bp, Artificial Sequence
  ENSG00000085377_64 (sequence is synthesized)
tctatgtcccagaaggcctgaaatatttaatatatggcctttaagaaaaagtttgcagaatcttcatctatgtaaatagcatttaaaagtacaacattcttgatagacatacagggccga

SEQ ID NO: 86752 - DNA, 120 bp, Artificial Sequence
  ENSG00000085377_65 (sequence is synthesized)
gaagacatacagggtcaagaagctctgtcagacaggcctgaaatccacgtggggcaagtcatttaacctttctgccacagttttttcaactgtaaagtagagattgatagtatctgtttt

SEQ ID NO: 86753 - DNA, 120 bp, Artificial Sequence
  ENSG00000085377_66 (sequence is synthesized)
ttaggattcctgtgggattattaagagataaggtatattcaagatctggcaatagaatataatctatttttttcaatcaacgttagaaataaatgtaacagacttttagtttcctattta

SEQ ID NO: 86754 - DNA, 120 bp, Artificial Sequence
  ENSG00000085377_67 (sequence is synthesized)
gggagaagaatagaacgattcttcagaaatgagagcacttacaattataaacagcattctctttcattcctgattcactctcgtcttcagccatactgtggctggtctaggatgcctgcc

SEQ ID NO: 86755 - DNA, 120 bp, Artificial Sequence
  ENSG00000085377_68 (sequence is synthesized)
tggtagagtaatccagaccatcattgagaaggccaaggctttggttaccaattcttgttgctgcaatcactcatttatgattatcagcaggtatgggaagcgccatgaagtattcgcagg

SEQ ID NO: 86756 - DNA, 120 bp, Artificial Sequence
  ENSG00000085377_69 (sequence is synthesized)
gaattcctgaatttcggatattttcctccctgccctcattttgcaggagcaactttatctcctaataataatcaaggttaattgcatcttccagtacaaatactttttcctttgcctgcc

SEQ ID NO: 86757 - DNA, 120 bp, Artificial Sequence
  ENSG00000085377_70 (sequence is synthesized)
tatctactggccagaggatcccaaaatgaccagtcagatgcagacgtagtggaaactgacatgtcctctgtgttaagaacctcaagaaccagaacctctaagtgaagtaaaggcagaagt

SEQ ID NO: 86758 - DNA, 120 bp, Artificial Sequence
  ENSG00000085377_71 (sequence is synthesized)
tgctgggacagtaaacgtaagtgagttactgggagtgatggtgagtaaggcaacttctacttccctccccttgaccttggatcccagattcatgtattctacacatccgtgacagcacca

SEQ ID NO: 86759 - DNA, 120 bp, Artificial Sequence
  ENSG00000085377_72 (sequence is synthesized)
tatatggctgatgactgaaagtatataacacctcttatccccaccctcatctgaccaccccaggagaaaaaagcacagaagtaacacaaggaaccatagcagctgaatgtcctgaaggaa

SEQ ID NO: 86760 - DNA, 120 bp, Artificial Sequence
  ENSG00000085382_0 (sequence is synthesized)
agaaggccacgcgagcccgggagggacgcggcggcgggggctgcaggaaaggcgcgagcagaggcggcggcgggtgtactgtaggtggtcggtccggcagcagcccggcccccggacgca

SEQ ID NO: 86761 - DNA, 120 bp, Artificial Sequence
  ENSG00000085382_1 (sequence is synthesized)
ggacgtggccccaggcagccctcgcagctcagtgctctagccggggcaagcccgcgtctccgcctgctggacgggcccaggcgagatgtagggctctgggcgcggaggccgccggtgggg

SEQ ID NO: 86762 - DNA, 120 bp, Artificial Sequence
  ENSG00000085382_2 (sequence is synthesized)
cggctgatcgcggaggatcgcggagggcgcgccgaggatggagagagcgatggagcaactcaaccgcctgacgcgctcgctgcgccgcgcgcgcaccgtggagttgcccgaggataatga

SEQ ID NO: 86763 - DNA, 120 bp, Artificial Sequence
  ENSG00000085382_3 (sequence is synthesized)
aactgctgtttatacattaatgccaatggttatggctgatcaacacaggtctgtttctgaactactatcaaattcaaaatttgatgtcaattatgcattcggacgtgtgaaaagaagctt

SEQ ID NO: 86764 - DNA, 120 bp, Artificial Sequence
  ENSG00000085382_4 (sequence is synthesized)
gcttcacattgcagcaaattgtggatcggtggaatgcttggttttgctgttaaagaaaggagcaaatcctaactatcaagatatttcaggctgtacaccccttcatttggcagcaagaaa

SEQ ID NO: 86765 - DNA, 120 bp, Artificial Sequence
  ENSG00000085382_5 (sequence is synthesized)
tgggcagaagaaatgtatgagtaaattattagaatatagcgctgatgtcaacatttgtaataatgaaggccttacagcaatacattggctggctgtgaatgggcggacagaactactcca

SEQ ID NO: 86766 - DNA, 120 bp, Artificial Sequence
  ENSG00000085382_6 (sequence is synthesized)
tgaccttgtgcagcatgtcagtgatgttgatgttgaggatgccatggggcagacagcactgcatgttgcctgccagaacggtcacaagacgacagtgcagtgcttgctagacagtggtgc

SEQ ID NO: 86767 - DNA, 120 bp, Artificial Sequence
  ENSG00000085382_7 (sequence is synthesized)
tgatattaacaggccaaatgtatcaggagcaactccattgtactttgcttgcagtcatggtcagagagatacagcacagatcctactattacgaggagccaaatatctgccagataaaaa

SEQ ID NO: 86768 - DNA, 120 bp, Artificial Sequence
  ENSG00000085382_8 (sequence is synthesized)
tggagtaactcctctggatttatgtgtacagggtggatatggagagacttgtgaagtattaattcaatatcacccgaggctttttcagactattattcaaatgacacagaatgaagacct

SEQ ID NO: 86769 - DNA, 120 bp, Artificial Sequence
  ENSG00000085382_9 (sequence is synthesized)
ccgagaaaacatgttacggcaagttctggagcatttgtctcagcaaagtgaaagccagtacctaaagattctaacaagccttgctgaagttgctacaacaaatggtcataaactgcttag

SEQ ID NO: 86770 - DNA, 120 bp, Artificial Sequence
  ENSG00000085382_10 (sequence is synthesized)
cctctctagcaattatgatgctcaaatgaagagccttttaaggattgtgagaatgttttgtcacgtctttcgaattggtccatcctcccccagtaatggaattgatatgggctacaatgg

SEQ ID NO: 86771 - DNA, 120 bp, Artificial Sequence
  ENSG00000085382_11 (sequence is synthesized)
gaataaaactccaagaagccaggtgttcaagcctctggaattgctttggcactcgttagatgaatggctagttttaatagccacagaattgatgaaaaacaaaagagactcaacagagat

SEQ ID NO: 86772 - DNA, 120 bp, Artificial Sequence
  ENSG00000085382_12 (sequence is synthesized)
cacttctattttactgaaacaaaaaggccaagatcaagatgctgcttccattcctccatttgaacctccaggacctgggagctatgaaaatctgtccactggcacaagggaatctaaacc

SEQ ID NO: 86773 - DNA, 120 bp, Artificial Sequence
  ENSG00000085382_13 (sequence is synthesized)
agatgctcttgcagggagacaggaagccagtgcagattgtcaggatgttatttctatgacagctaaccggctaagtgctgtcattcaagctttttacatgtgctgttcttgtcagatgcc

SEQ ID NO: 86774 - DNA, 120 bp, Artificial Sequence
  ENSG00000085382_14 (sequence is synthesized)
tccgggaatgacttcacctcgtttcattgaatttgtctgcaaacatgatgaagttttaaaatgctttgttaatagaaatcccaaaattatatttgaccactttcactttctccttgaatg

SEQ ID NO: 86775 - DNA, 120 bp, Artificial Sequence
  ENSG00000085382_15 (sequence is synthesized)
tcctgagttgatgtcaagattcatgcatatcataaaagcacagccttttaaagatcgctgtgaatggttctatgaacatttgcattcaggacagccagattcagatatggtgcacaggcc

SEQ ID NO: 86776 - DNA, 120 bp, Artificial Sequence
  ENSG00000085382_16 (sequence is synthesized)
agtgaatgaaaatgatatcctgctggttcacagagattctatttttaggagtagctgtgaagttgtgtcaaaagcaaattgtgcaaagctaaagcaagggattgctgtacggttccatgg

SEQ ID NO: 86777 - DNA, 120 bp, Artificial Sequence
  ENSG00000085382_17 (sequence is synthesized)
agaagaaggcatgggtcaaggtgttgtgcgtgagtggtttgatattctgtccaatgagatagtcaatcctgattatgcattgtttacccagtcagctgatggaacaacttttcagcctaa

SEQ ID NO: 86778 - DNA, 120 bp, Artificial Sequence
  ENSG00000085382_18 (sequence is synthesized)
tagcaactcttatgtaaatcctgatcacttgaactattttcggtttgctgggcagatcttgggattagcgttgaaccacaggcagctggtcaatatttacttcacacgatccttctacaa

SEQ ID NO: 86779 - DNA, 120 bp, Artificial Sequence
  ENSG00000085382_19 (sequence is synthesized)
tcctgtaaattaccaagatgtggcatccattgatccagaatatgcgaaaaatttgcaatggattttagataatgatataagtgatctgggtctagaactaactttttctgttgagactga

SEQ ID NO: 86780 - DNA, 120 bp, Artificial Sequence
  ENSG00000085382_20 (sequence is synthesized)
tgtgtttggagcaatggaagaggtgcctttgaaacctgggggtgggagtattcttgtgacacaaaataataaagcggagtacgtccagcttgttactgaacttcgaatgacaagagccat

SEQ ID NO: 86781 - DNA, 120 bp, Artificial Sequence
  ENSG00000085382_21 (sequence is synthesized)
tcagcctcagatcaatgcttttttacagggctttcatatgttcattccaccctccctcatacagctttttgatgaatatgaattggagctactgctttctggcatgccagaaattgatgt

SEQ ID NO: 86782 - DNA, 120 bp, Artificial Sequence
  ENSG00000085382_22 (sequence is synthesized)
gagtgattggataaaaaatacagaatacacaagtggctatgaaagagaagatccagttattcagtggttctgggaagttgtagaagacattactcaagaggagagagttcttctcttaca

SEQ ID NO: 86783 - DNA, 120 bp, Artificial Sequence
  ENSG00000085382_23 (sequence is synthesized)
gtttgttacgggcagttccagggtcccacatggtgggtttgctaatatcatgggtggaagtggattgcaaaactttacaatcgctgctgtgccatatactccaaatcttttaccaacttc

SEQ ID NO: 86784 - DNA, 120 bp, Artificial Sequence
  ENSG00000085382_24 (sequence is synthesized)
aagcacatgcatcaacatgctcaagttacctgaatacccaagtaaagaaatactcaaggacagacttcttgtggcactacattgtggcagctatggttacacaatggcataatgaagtct

SEQ ID NO: 86785 - DNA, 120 bp, Artificial Sequence
  ENSG00000085382_25 (sequence is synthesized)
ggaaaactcctctgactactgatgcacaattcagaatggcagaagtaatttgggaaaatgtcaacaaaaaagcagcctaaatgcaacccataggcagggctgatgcttccaatttataaa

SEQ ID NO: 86786 - DNA, 120 bp, Artificial Sequence
  ENSG00000085382_26 (sequence is synthesized)
ggatcatcaggttttctgtttctctcttttcccttttatgttttctctgtttgtgatacaattagaaaatataaaatcacagtagattttattttttaaaatgctaactgaaagtaatag

SEQ ID NO: 86787 - DNA, 120 bp, Artificial Sequence
  ENSG00000085382_27 (sequence is synthesized)
agactgtcctttttcataattaattttatccaagattgtattaaggcaaaatctgattctacattccacctctgctatgtaactgtcttgttaaaagggtgttttctcctaatttctgat

SEQ ID NO: 86788 - DNA, 120 bp, Artificial Sequence
  ENSG00000085382_28 (sequence is synthesized)
atattatatgaggtcatccagctggtgtgttcttttgcatgtaaactgccatttatattttagaaaactattgtatagaatggatttagattgtctataaagccacaaatacgtattttg

SEQ ID NO: 86789 - DNA, 120 bp, Artificial Sequence
  ENSG00000085382_29 (sequence is synthesized)
atacgtattttgccacagtgtattctatattgcaatgatttttttagcattttaatattttaatatatattgtaaaatttagactgatgatactaacagttgatgaaatgacatataatt

SEQ ID NO: 86790 - DNA, 120 bp, Artificial Sequence
  ENSG00000085382_30 (sequence is synthesized)
cttacgctatattgtatgaattatttgcatctttcagtggccagttttccatatgtatatattatggtctcaatgtttttcttacgcctcattttaatttataatgaaggtaaaattaaa

SEQ ID NO: 86791 - DNA, 120 bp, Artificial Sequence
  ENSG00000085382_31 (sequence is synthesized)
atgtattttaccacgtttcttttcattacttttatctgtgagctctgacacatctgaaaaagtaatctgatgtgcaaattataatttaaatatgttaatttttttgcttcttaaatttgc

SEQ ID NO: 86792 - DNA, 120 bp, Artificial Sequence
  ENSG00000085382_32 (sequence is synthesized)
ttttcatcattaaaatgtcaagttcaagtgatatgtgcctaatatcacttggatgttggtgggtttttgaatttttgggtggttaatcagttttattttgaaaagacgtacttgaatagt

SEQ ID NO: 86793 - DNA, 120 bp, Artificial Sequence
  ENSG00000085382_33 (sequence is synthesized)
tacagcatatgtttgaacaggaagtaggaacatgcatacacgaagaaatgctaacggaaggatttgttatgtttaggatcttcccttggaaactaaaaatagaatattaatgacattact

SEQ ID NO: 86794 - DNA, 120 bp, Artificial Sequence
  ENSG00000085382_34 (sequence is synthesized)
gtttgtagaatgacatatgcagattttctcataagcagtcattgtgtttgccagtaatgtttgagagacatgtaagttgaaagttttgctaaattataaagctcctttaattcgttggtt

SEQ ID NO: 86795 - DNA, 120 bp, Artificial Sequence
  ENSG00000085382_35 (sequence is synthesized)
ttgattctcttattctcttgtcttttctaaatgttaacaaaatatatcttaacagattacatgaaatttaggaattatttaaaagttaccattagctctaaaattaagattcggatgctt

SEQ ID NO: 86796 - DNA, 120 bp, Artificial Sequence
  ENSG00000085382_36 (sequence is synthesized)
tatttatagtaactgaagctaataatgttttatgttttgattttttgaaatttaattgtagaagtcactgccttctgagttttcaaatagataaccacctttaatattacactgcttata

SEQ ID NO: 86797 - DNA, 120 bp, Artificial Sequence
  ENSG00000085382_37 (sequence is synthesized)
acactgcttataatactaatgtttacagatatgtttctgtttataaccatataatacattggctttgtcatattagttttttttgcaagtagttatgtaaaagagatagataataaaata

SEQ ID NO: 86798 - DNA, 120 bp, Artificial Sequence
  ENSG00000085382_38 (sequence is synthesized)
cgggtcgcggggccaggctggccgcggggctgggggcggccagtggggcaggagctccggccgcgtcaaggtcgggtggaaaaactaactgaaagctgagaaaacgcccacttttacttt

SEQ ID NO: 86799 - DNA, 120 bp, Artificial Sequence
  ENSG00000085382_39 (sequence is synthesized)
tagaattttcagtgaaggtatctgtcagtatttatggcagctgggtgcttcttgcccttctttaagcagttcagggactccaaatctgtcaaccgttgtgagtatggaagagccctcatt

SEQ ID NO: 86800 - DNA, 120 bp, Artificial Sequence
  ENSG00000085382_40 (sequence is synthesized)
acgggtgagagggatgcttactttaacttcgaaggagggtataatttctcttaaaaaaggaaacattgtacttaacccgactacctagtgcatagtactggttgagtgagtgaactaggt

SEQ ID NO: 86801 - DNA, 120 bp, Artificial Sequence
  ENSG00000085382_41 (sequence is synthesized)
ttttgttgattgtagtagtggtggttttgttggttttgttgtgtttttctgctttttggttgaacgtgtaaatgaaggcctgaggtgatttaattatttgcaaattcagtaagtaaaata

SEQ ID NO: 86802 - DNA, 120 bp, Artificial Sequence
  ENSG00000085382_42 (sequence is synthesized)
ttttcaaaaagagaatattacagaaatctgaagaaaggctgaaagtggcagtgaaggtatttgttagataataattgggaagaatttcctggcagaatagttcaaacattttctaaggtt

SEQ ID NO: 86803 - DNA, 120 bp, Artificial Sequence
  ENSG00000085382_43 (sequence is synthesized)
ccaaatatggttgtataatctccttccatggcggtctttaaaagaaagattatttctttccttgaaatattttaaaggtgagtctttctgtagcacatggtgtagtttgtagcattctgt

SEQ ID NO: 86804 - DNA, 120 bp, Artificial Sequence
  ENSG00000085382_44 (sequence is synthesized)
aatcatgtcagattcaaaaagtgagataaacttttatatttatttgcagaaggatagctaatcattctcaataagaatatttaaaatagtgtaggatgaagggattgtttaaccactgta

SEQ ID NO: 86805 - DNA, 89 bp, Artificial Sequence
  ENSG00000085382_45 (sequence is synthesized)
ttaaaatagtgtaggatgaagggattgtttaaccactgtaccacttataaactattaatctttatttgggattaaaaatatcctagcag

SEQ ID NO: 86806 - DNA, 120 bp, Artificial Sequence
  ENSG00000085382_46 (sequence is synthesized)
tggagtatagtgacatgatcacagctcactgtagccttgacttccgagactcaagcaatcctcccccttcaacctcctcagtaactgggactacaagtgcatgcctgtgtacccagctag

SEQ ID NO: 86807 - DNA, 120 bp, Artificial Sequence
  ENSG00000085382_47 (sequence is synthesized)
aataataataggaaatagtttattctctcctcatcttttttttttttaatagaaaggtgttaatctttacttggaattaagaatttgctactcagtatttttttttttttttttgagatg

SEQ ID NO: 86808 - DNA, 120 bp, Artificial Sequence
  ENSG00000085382_48 (sequence is synthesized)
ctgggattacaggcgtgagccaccatctccggcctgctagtcagtattttaatagaagtttggtaattgtatctcttgttttaaaaaaacactaattattagaaatggattgtgtctgta

SEQ ID NO: 86809 - DNA, 120 bp, Artificial Sequence
  ENSG00000085382_49 (sequence is synthesized)
tgtctgtaagtatatgtatatacataaatatgccacattttgtaatttcttgtcaaaaattatccaaattctaggaattatatgtaatgaaaggagcacagtaaaaaagctgttcattag

SEQ ID NO: 86810 - DNA, 120 bp, Artificial Sequence
  ENSG00000085382_50 (sequence is synthesized)
gttctttagggattctcattttttaattgaaaaaagacatttgtttaattgaaagttgttgacattgatcatattaatacagaaaatgttgagtgattatacttaggggttctcattttt

SEQ ID NO: 86811 - DNA, 120 bp, Artificial Sequence
  ENSG00000085382_51 (sequence is synthesized)
taactgaaaaaatcttatttgtttaattgaaagtggttgacattgatcatattaatacagtaaatgttaagggtgattatatatagtagtaatgtgtgcttttaaaactaaacatttgaa

SEQ ID NO: 86812 - DNA, 120 bp, Artificial Sequence
  ENSG00000085382_52 (sequence is synthesized)
aattaaaagaagaaagattgtgaattttttgttagatttagtttttcctttttattacaaggaatacatacatacaaattaaattattgccataaatgaagaaattgtcatttatgtagc

SEQ ID NO: 86813 - DNA, 120 bp, Artificial Sequence
  ENSG00000085382_53 (sequence is synthesized)
atttgtataattttattacttacctttaggcattactatcacgttaacttgggaagatagaaatgactagagtaaattttctcttctataatatttgtctagttgtgttttgtttttttt

SEQ ID NO: 86814 - DNA, 120 bp, Artificial Sequence
  ENSG00000085382_54 (sequence is synthesized)
tttttaaggctaaataatactcccttggctaaataataatccagccatctgttgatggacacttgggttgcttctaccatttggctattgtgaataatgctgctgtatgcgcagatactt

SEQ ID NO: 86815 - DNA, 120 bp, Artificial Sequence
  ENSG00000085382_55 (sequence is synthesized)
ctttgagtccgtgctttcagttcttttggatatatacccagaagtggaattgcctgatcatatgataattctgtattgtaattctgttaattttgttgaggaacttgcatactgttttcc

SEQ ID NO: 86816 - DNA, 120 bp, Artificial Sequence
  ENSG00000085382_56 (sequence is synthesized)
acagaggctgcatcattttacattcccagcagcaatttctccacatccttgccaatacttgtaattttctgtcttttgtttttttgattttttgccgatagtcatcttaatgagtgtgaa

SEQ ID NO: 86817 - DNA, 120 bp, Artificial Sequence
  ENSG00000085382_57 (sequence is synthesized)
gtggttttgattggcatttccctagtaaatggtgatgttgagcatcttttcatgtgcttattgggcatttgtttatcttttttttggagaaatgtctttttcaattgtttgcccattttt

SEQ ID NO: 86818 - DNA, 120 bp, Artificial Sequence
  ENSG00000085382_58 (sequence is synthesized)
aatcgggatttttttttttttctatgggaattctttgtatgttctggatatcaatttggtgtcatattcaataaatcgttgccaaatccagtattatgaaacttttcccttatattttct

SEQ ID NO: 86819 - DNA, 120 bp, Artificial Sequence
  ENSG00000085382_59 (sequence is synthesized)
tctaagagttttatagtattagctcttagatttaggtcttcaatccattttgagttagtttttaagtaacttagtgtaaagtaagggtccaacttcattttcgttgtagtgaatatccgg

SEQ ID NO: 86820 - DNA, 120 bp, Artificial Sequence
  ENSG00000085382_60 (sequence is synthesized)
ttttcccaacacacttcgttgaaaagactgtcttttcccctttgaatgttgttggcactctagttgaaaatcatttcattatgtatgtgaggggttatttctggcctctattctgttcta

SEQ ID NO: 86821 - DNA, 120 bp, Artificial Sequence
  ENSG00000085382_61 (sequence is synthesized)
ctggttcatatgtctcttttcttggcagtatcacactgttttgattaccacagctttgtaataagttttcaaatcaggatatgtgagtctgccacctttgttcttttttttctagactgt

SEQ ID NO: 86822 - DNA, 120 bp, Artificial Sequence
  ENSG00000085382_62 (sequence is synthesized)
ttaggctatttgaggttcaactttttttttcagtgacctaaactatgctttatgttataaatcatatttttaagaaagtattttaaattttattcagatgtttgcaagtatgtatttagt

SEQ ID NO: 86823 - DNA, 120 bp, Artificial Sequence
  ENSG00000085382_63 (sequence is synthesized)
aacctatacattaaacgttcctttgtcatttttctaatttatccaaaaagcactacagcacctcattttaaaagcaatagaattttttttttgtatcagtttaatcatgatatgatacac

SEQ ID NO: 86824 - DNA, 120 bp, Artificial Sequence
  ENSG00000085382_64 (sequence is synthesized)
gggcaaactttagaagaaatattaattttctttttgatgtgtatagaacttgagaagttgtaattacatcctctacagccatgtacccaagattaaattttctactgatgtgttatgcat

SEQ ID NO: 86825 - DNA, 120 bp, Artificial Sequence
  ENSG00000085382_65 (sequence is synthesized)
tcattatgttagatgatgtttgaaaaatatatttgatattctgaatatcaaatcaaagaggaacataaagaatttttcagtttttccactataaaaaacaaaacaaatctttagggccta

SEQ ID NO: 86826 - DNA, 120 bp, Artificial Sequence
  ENSG00000085382_66 (sequence is synthesized)
gatatttttcacaaacaaggaaatcatttggattacatgtcagagcatttattgcttgaattagtcaatcgaatattaatctattcaacaaacatttaatgaatgtctactccaggcatt

SEQ ID NO: 86827 - DNA, 120 bp, Artificial Sequence
  ENSG00000085382_67 (sequence is synthesized)
ttgctagccccagggatatagatgtaaatatgacttgtttgggccctcaaatcagccccacttcaatagagagccacatgaaagcaaataattgtaaatgtagcatactaaatgcaatat

SEQ ID NO: 86828 - DNA, 120 bp, Artificial Sequence
  ENSG00000085382_68 (sequence is synthesized)
tgaggtatgtgctgtggccagttgcaagcatagtatagcttatggaaatgtggaggggtgtctccatggaagcttgctaactaatcacaaagcaacttacagtaatgaattggagttttg

SEQ ID NO: 86829 - DNA, 120 bp, Artificial Sequence
  ENSG00000085382_69 (sequence is synthesized)
tagactaaaaagtgtcgtgttgtcattgtcctagagttggatatattcctaccctaacttagaacttgaaatttatctgtcacaaatatctttctttcatgattacaatgtattaagata

SEQ ID NO: 86830 - DNA, 120 bp, Artificial Sequence
  ENSG00000085382_70 (sequence is synthesized)
ctcgctgcgccgcgcgcgcaccgtggagttgcccgaggagctgagaggcggccccgggccccgaactcccctggcccgacgctcccaccccggcagagatgaggtctcactatgttcccc

SEQ ID NO: 86831 - DNA, 83 bp, Artificial Sequence
  ENSG00000085382_71 (sequence is synthesized)
tgctcccctggcctggggataatcttcttgaaaaaatgataatgaaactgctgtttatacattaatgccaatggttatggctg

SEQ ID NO: 86832 - DNA, 120 bp, Artificial Sequence
  ENSG00000085382_72 (sequence is synthesized)
ctggagtatagttgatctgagctcactgcaacgtctgcctcctgggctgaagcgatcctcccagctcagtctttcaagtagctgggactacagccttttaaagatcgctgtgaatggttc

SEQ ID NO: 86833 - DNA, 120 bp, Artificial Sequence
  ENSG00000085415_0 (sequence is synthesized)
agcacaagccgtgcgctcccgggctgcgaggtctggctaggctacgggccacgcgccgccgccgctgccgccgccactgtcctcttcggaggcgcgggcccgacggaaaccatgtttgtg

SEQ ID NO: 86834 - DNA, 120 bp, Artificial Sequence
  ENSG00000085415_1 (sequence is synthesized)
gctcgcagcatcgcggcggaccacaaggatctcatccacgatgtctctttcgacttccacgggcggcggatggcaacctgctccagcgatcagagcgttaaggtctgggataaaagtgaa

SEQ ID NO: 86835 - DNA, 120 bp, Artificial Sequence
  ENSG00000085415_2 (sequence is synthesized)
agtggtgattggcattgtactgctagctggaagacacatagtggatctgtatggcgtgtgacatgggcccatcctgaatttgggcaggttttggcttcctgttcttttgaccgaacagct

SEQ ID NO: 86836 - DNA, 120 bp, Artificial Sequence
  ENSG00000085415_3 (sequence is synthesized)
gctgtatgggaagaaatagtaggagaatcaaatgataaactgcgaggacagagccactgggttaaaaggacaactctggtggatagcagaacatctgttactgatgtgaagtttgctccc

SEQ ID NO: 86837 - DNA, 120 bp, Artificial Sequence
  ENSG00000085415_4 (sequence is synthesized)
aagcacatgggtcttatgttagcaacctgttccgcagatggtatagtaagaatctatgaggcaccagatgttatgaatctcagccagtggtctttgcagcatgagatctcatgtaagcta

SEQ ID NO: 86838 - DNA, 120 bp, Artificial Sequence
  ENSG00000085415_5 (sequence is synthesized)
agctgtagttgtatttcttggaacccttcaagctctcgtgctcattcccccatgatcgccgtaggaagtgatgacagtagccccaacgcaatggccaaggttcagatttttgaatataat

SEQ ID NO: 86839 - DNA, 120 bp, Artificial Sequence
  ENSG00000085415_6 (sequence is synthesized)
gaaaacaccaggaaatatgcaaaagctgaaactcttatgacagtcactgatcctgttcatgatattgcattcgctccaaatttgggaagatctttccatattctagcaatagcgaccaaa

SEQ ID NO: 86840 - DNA, 120 bp, Artificial Sequence
  ENSG00000085415_7 (sequence is synthesized)
ggtgggccaacaaagtttgaaatccatatagtggctcagttcgataatcataattctcaggtctggcgagtgagttggaatataacaggaacggtgctagcatcttcaggagatgatggg

SEQ ID NO: 86841 - DNA, 120 bp, Artificial Sequence
  ENSG00000085415_8 (sequence is synthesized)
tgtgtaagattgtggaaagctaattatatggacaattggaagtgtactggtattttgaaaggtaatgggagcccagtcaatgggagttctcagcagggaacctcaaatccttccctaggt

SEQ ID NO: 86842 - DNA, 120 bp, Artificial Sequence
  ENSG00000085415_9 (sequence is synthesized)
tcaactattccaagtcttcagaattcattaaatggatcttctgctggcaggtatttctttacccctctggattccccacgggctggatcgagatggtccagttatgcccagctccttcct

SEQ ID NO: 86843 - DNA, 120 bp, Artificial Sequence
  ENSG00000085415_10 (sequence is synthesized)
cctcctcctcctcctctggtagagcactcttgcgatgctgacactgccaacctccagtatcctcaccctcgcagacgatatctctctcggcctcttaatcccttacctgagaatgaaggg

SEQ ID NO: 86844 - DNA, 120 bp, Artificial Sequence
  ENSG00000085415_11 (sequence is synthesized)
atttaaaacactgatttaacattgaaaggccttattcaagtgcttgtaaatgctttcatttctggctgctttttgtttttcattttctttcagaagatttttctaacttagggtctgtct

SEQ ID NO: 86845 - DNA, 120 bp, Artificial Sequence
  ENSG00000085415_12 (sequence is synthesized)
tgcatgtattacaaccagaatacagtgtttggaacctaaatctgtttgtgcgtctgcatcaaaggaacatttgcttcactgggtgataacctttgatgaaatgagatatgtccaagtaac

SEQ ID NO: 86846 - DNA, 120 bp, Artificial Sequence
  ENSG00000085415_13 (sequence is synthesized)
gttaactgtgaagttacacacagtagctgacttcaaagtgcctgttctgtaaattttattttaaactgttaccatagtcttaagttgtttatgctttatcagactggctaatgtgaaagc

SEQ ID NO: 86847 - DNA, 120 bp, Artificial Sequence
  ENSG00000085415_14 (sequence is synthesized)
ataatattatgaagtttattctgccttatgagaccttaaaaaatggatttcattttacaggctaatgttgtaactgactagtatgtaaaataaatcattcctgtgtataaagcagcaaaa

SEQ ID NO: 86848 - DNA, 120 bp, Artificial Sequence
  ENSG00000085415_15 (sequence is synthesized)
gcacagctgagtacaagctaactggagtaactttgctgttttgctgcttgttgcatgcacacaggaatggaaagcgagctccttttccccttccccagcgccgtttgacctctcccaaga

SEQ ID NO: 86849 - DNA, 120 bp, Artificial Sequence
  ENSG00000085415_16 (sequence is synthesized)
tacaccagcagcctgcttactactaaacgcaatccaaaaggcctttaaaaatacagtgtatattttttgtactagtcagtttattgacactatttgaaacttttgaaatataaacggaga

SEQ ID NO: 86850 - DNA, 120 bp, Artificial Sequence
  ENSG00000085415_17 (sequence is synthesized)
ggctttctgttgagacattgtcaccaaaacaattttttgaaatgttcctgaaactaatttgggtttaaagattaaaagggttgttaccattcttatctgagtagttgggaggaggggaat

SEQ ID NO: 86851 - DNA, 120 bp, Artificial Sequence
  ENSG00000085415_18 (sequence is synthesized)
aggggaataccactttagttcatttggaaaatatagacatatttcttttgctttcttaaaacagcttaaaatgatgaacttttataattttaatttgaagattgaataaatattttttat

SEQ ID NO: 86852 - DNA, 120 bp, Artificial Sequence
  ENSG00000085415_19 (sequence is synthesized)
ttgtttactttttgtagatttgctttatccatgatattcagtacaactctgtcatttctttgtaatatttaaaaaatattagtaaaggagtgaattaataaagtagtaatagtaaaatga

SEQ ID NO: 86853 - DNA, 120 bp, Artificial Sequence
  ENSG00000085415_20 (sequence is synthesized)
aaggaacttgactgtacagtttgtagccaggttaagcatttggtattgtttcatttacaatttgggactaagatggaaacactttttttataagtttttaattcatagtcactaaagaga

SEQ ID NO: 86854 - DNA, 120 bp, Artificial Sequence
  ENSG00000085415_21 (sequence is synthesized)
taaatgtttcttatatacatttgtgtatttttatggtgttatttattccatggcttagcttccttcaaatcaaaatttggacacacactattaagagaagccattaaaattttactaaaa

SEQ ID NO: 86855 - DNA, 120 bp, Artificial Sequence
  ENSG00000085415_22 (sequence is synthesized)
ttgtgcatgtaaattaattgtcagcattccatgtctcaagattttcttaatttagttcgctgtttaaattaattcatgtcctgtaaagttctgaccttgataacaaagctataaatattt

SEQ ID NO: 86856 - DNA, 120 bp, Artificial Sequence
  ENSG00000085415_23 (sequence is synthesized)
aagtttgctaatatgcgtaagtattatcggtaagttacaagatggaagaagaataacagtagggcacagtcattctgtgaatccttttacttatcaaaatttggtagctattctaaggct

SEQ ID NO: 86857 - DNA, 120 bp, Artificial Sequence
  ENSG00000085415_24 (sequence is synthesized)
tttgcagaaaaataagtgttcaatgtttgtagttcttcaaaagcatgttgcagtagccagccatactatgtgtattcccagtatcatgtacgcactaaaaaaaatgtgtgcttgctgctg

SEQ ID NO: 86858 - DNA, 120 bp, Artificial Sequence
  ENSG00000085415_25 (sequence is synthesized)
ctgtgagtgaaccattgcttaagataaaaaacttaactagatctgtaaatgtacagaatagcatcagatgtttctgagagattagaaaatgttttgaatttataaaattaatgtttttct

SEQ ID NO: 86859 - DNA, 120 bp, Artificial Sequence
  ENSG00000085415_26 (sequence is synthesized)
ttgtaacatttatatatattttttaacattttaagtttaacagattgtattcctttcaagtttctatacttgcttaagcaatcttgatttgagtaagggtcttgatttgtgctattatgt

SEQ ID NO: 86860 - DNA, 120 bp, Artificial Sequence
  ENSG00000085415_27 (sequence is synthesized)
tctgttagttttggcatgaatatactaaagcttttttttttttttctagcatgtgttttctcctctttggttctctttgtatttactacttttctctttttcttgtgttttttttttcct

SEQ ID NO: 86861 - DNA, 120 bp, Artificial Sequence
  ENSG00000085415_28 (sequence is synthesized)
gtcacaggcttgtgtgttgtagtcacacgggtgttgtcccaccaccttgccatgttccgtcccctgggtagaaaacaagccacgggccccactcacactcatggggaggagcctccacaa

SEQ ID NO: 86862 - DNA, 120 bp, Artificial Sequence
  ENSG00000085415_29 (sequence is synthesized)
gggcgggaccaccaggaggtgcgggtcatgggggcacttagaatctctctgccacagtacgggtgttcctcccactttacggagaacttgctgaaggtcgttacagcctggattcaaaca

SEQ ID NO: 86863 - DNA, 120 bp, Artificial Sequence
  ENSG00000085415_30 (sequence is synthesized)
cgttctggctgcagcatgtgtgctcttagctccacctgtcctatttctggcctttggtagaaggccagaatctatcccctgaattgcaggggatagatttaggaattattggtttatagg

SEQ ID NO: 86864 - DNA, 87 bp, Artificial Sequence
  ENSG00000085415_31 (sequence is synthesized)
gaattgcaggggatagatttaggaattattggtttataggtactgaaaccatgggtgtagaaaccatgcatattctggccgggcgca

SEQ ID NO: 86865 - DNA, 120 bp, Artificial Sequence
  ENSG00000085415_32 (sequence is synthesized)
aggccccaggagggggctgagattctggatttcccagaagctcccaggctgctgcagaccacacagtagaagcaaggatgtggatgagattgcttagggtgattggatgggtgagaaaga

SEQ ID NO: 86866 - DNA, 120 bp, Artificial Sequence
  ENSG00000085415_33 (sequence is synthesized)
tcaaggagagaaccttgaggtgtgtaccagcttggtagagattttaggaagaatgttgggatgaaaagaaggtcaagtgaagaatgctgtagaaaggtgggatggggagatgtctccacc

SEQ ID NO: 86867 - DNA, 120 bp, Artificial Sequence
  ENSG00000085415_34 (sequence is synthesized)
cagtctcctacatgcagggggttaggtgctgccgttctgtccaggatattcaatcttagaagaacctagtagaaaactctgatctaccactgccttcattatcctcttattctgtattta

SEQ ID NO: 86868 - DNA, 120 bp, Artificial Sequence
  ENSG00000085415_35 (sequence is synthesized)
tcttattctgtatttatagataaagaaatagaattgcaaggatgaaatagcctttgcatagtttccttttattatcacttaactcaattcctgctgggcgcagtggctcacacctgtaat

SEQ ID NO: 86869 - DNA, 73 bp, Artificial Sequence
  ENSG00000085415_36 (sequence is synthesized)
caacaagagtgaaactgtctcaaaaaaacctcaattcctgttaccagctttacttttttatttacattcaaat

SEQ ID NO: 86870 - DNA, 120 bp, Artificial Sequence
  ENSG00000085415_37 (sequence is synthesized)
attcctgttaccagctttacttttttatttacattcaaatacttaggcaatgtgttactcttttcctaagaaagatgttagtggctaataaatcaagcccttttttattttttatttttg

SEQ ID NO: 86871 - DNA, 120 bp, Artificial Sequence
  ENSG00000085415_38 (sequence is synthesized)
ctgggacaatgggtgtgcaccaccatgcccagctatttctgtattttttgtaaagatggggtcttgctgtgttgcgcaggctggtcttgaactactgggttcaagcaattctcccacctc

SEQ ID NO: 86872 - DNA, 120 bp, Artificial Sequence
  ENSG00000085415_39 (sequence is synthesized)
gggattacaggtgtgagccactgtggccagccaagaccttattgtaattaaatttttattaaagcgtttcgagctaaatgtacattattaaaggaggaaacgtgggaggttgtattaatt

SEQ ID NO: 86873 - DNA, 120 bp, Artificial Sequence
  ENSG00000085415_40 (sequence is synthesized)
tattaatttcctagggctgccataacaaattaccacaaatcaggtggcttaacacagaaatgtattcactcacagttctggaggtcggaagtctgaaatcaaggtgttggggctgtgctt

SEQ ID NO: 86874 - DNA, 120 bp, Artificial Sequence
  ENSG00000085415_41 (sequence is synthesized)
cctctagaatccttcctggtctagtccagctcctgctggctccgggagttctttggcttgtggcagcataactccaatctctgcctctgtgttcacatggctgcctcctctctgtctctg

SEQ ID NO: 86875 - DNA, 120 bp, Artificial Sequence
  ENSG00000085415_42 (sequence is synthesized)
cgtttcttctcttctttttaaagaatacttactgcacgttggatttaggacccaccctaaatctcggatgtcattctgaggtccttaattacattttcaaagacgctatttttgaataag

SEQ ID NO: 86876 - DNA, 120 bp, Artificial Sequence
  ENSG00000085415_43 (sequence is synthesized)
gtcacattcacagggtctgggggtcaggacttggacatattcttttgggggctgctgttgagcccactacagaggtgagcactacatgattgtgagcagtgtgaaaaaaaggtgagatgc

SEQ ID NO: 86877 - DNA, 120 bp, Artificial Sequence
  ENSG00000085415_44 (sequence is synthesized)
gaggttgcagtgagctgagattgcgctattgcactccaggctgggcaacaagagcgaaaccctgcctcaaaaaaaaaaagaggagaaggtaattgatctcccagtatgatgtaccatctt

SEQ ID NO: 86878 - DNA, 120 bp, Artificial Sequence
  ENSG00000085415_45 (sequence is synthesized)
tcttgcagtgaaacaaaaaataatagtaaaaaagggtgatgaatcttatgaagtggaagaattagggtgctaaagagcttatacctggggaacctaatctggtttaggggctaggaaggt

SEQ ID NO: 86879 - DNA, 120 bp, Artificial Sequence
  ENSG00000085415_46 (sequence is synthesized)
tcacctagaagatgacctatagggtgagtagaagttagccagacaaagagggcagaagcactcctggtggagaaaactgcatgtggtaaggccgtgagcaagagagagggagtatattta

SEQ ID NO: 86880 - DNA, 120 bp, Artificial Sequence
  ENSG00000085415_47 (sequence is synthesized)
tactgttgttggaacatgctgggcaaaaatgagtgtggagagaaataggcaagacttgtatctataagaagtaatgtccattgtttcagttttatcttacaggtgatgtgaatagggaat

SEQ ID NO: 86881 - DNA, 120 bp, Artificial Sequence
  ENSG00000085415_48 (sequence is synthesized)
aatgggatcagatggatcttctataggtgtgacaagtgttttggagggaaacatggtggattcacggctaggatgctatgaagacagtccaggtgggagagtacgtggctttgggatagt

SEQ ID NO: 86882 - DNA, 120 bp, Artificial Sequence
  ENSG00000085415_49 (sequence is synthesized)
agtagcagtggcatggagataagtggacaacttgagaataattgagaagtggtatcaataggatctggtgattgattggatttgagaactgaactgaggaagaagggggaaggtgttaag

SEQ ID NO: 86883 - DNA, 120 bp, Artificial Sequence
  ENSG00000085415_50 (sequence is synthesized)
atgatttccaaggttctggcttaagagttcagtgtgtaatttcaatgtgtgtaatttcttgagataaggaactctgggaacaaggcagatttgggtagagtgtggcagcatgtgaaggta

SEQ ID NO: 86884 - DNA, 120 bp, Artificial Sequence
  ENSG00000085415_51 (sequence is synthesized)
agttaattttggtcatgccgagatacaagtgtctgcaaagcttctgagagccaaaagcagtgtctcagaggcacactactcagtcttacaggagaagagagcacttgtcaggtgatcaga

SEQ ID NO: 86885 - DNA, 120 bp, Artificial Sequence
  ENSG00000085415_52 (sequence is synthesized)
tgggcttcgcaggtactagacaaaattcttgagtctaatagtcagatcttaggcagggccagcagtagagaaggaactagtgttactcccgtgggctctgcaattccaaatgttaccatc

SEQ ID NO: 86886 - DNA, 120 bp, Artificial Sequence
  ENSG00000085415_53 (sequence is synthesized)
tgggttaccaaggggatcttacaccttctaccttcctagattgttggtgtctgcagagaggctcagtcttcaacagtgctgtccagtagaatgtgctgcagtgatgggaaatggtcttag

SEQ ID NO: 86887 - DNA, 120 bp, Artificial Sequence
  ENSG00000085415_54 (sequence is synthesized)
agattttcatggagttttaagctgtaaaaactatgagccctattaatagcacattttatagaggcttcatgaagtgttgggcttgttaaagtaaatttcaacctgagctgagcagaatga

SEQ ID NO: 86888 - DNA, 120 bp, Artificial Sequence
  ENSG00000085415_55 (sequence is synthesized)
ttcaacctgagctgagcagaatgaatatgtagacataagcccaaaaacgtaaaaggtgtatcattggccacgcgaggtgacttatgcctgccatctcagcactttgggaggctgaggtgg

SEQ ID NO: 86889 - DNA, 90 bp, Artificial Sequence
  ENSG00000085415_56 (sequence is synthesized)
accagcctggacaacatggtgaaaccctttcgctacaaaaagtacaaaaattagctgtggggatgatggcctgaggtgggatgatcacct

SEQ ID NO: 86890 - DNA, 120 bp, Artificial Sequence
  ENSG00000085415_57 (sequence is synthesized)
acctgagcctgggaggtcgaggctgcggtaaatcaaaattgcaccacttcactccagcagtgtcaaaaaaagatttttttctaaaacataggaaaagaaaatatttcataagtaagattt

SEQ ID NO: 86891 - DNA, 120 bp, Artificial Sequence
  ENSG00000085415_58 (sequence is synthesized)
gaaaatatttcataagtaagatttgagtaaaaagataaataacttgcagttagttctgaaagaaaatacaggcaaatagaaattacctattttttttttttttgagagtctcactctgtc

SEQ ID NO: 86892 - DNA, 120 bp, Artificial Sequence
  ENSG00000085415_59 (sequence is synthesized)
cggcctagaaattacctaagtatttctaaattacctaaataatccaatgttaaaaataatctgagattgcatttgagtctagtctcttagctaacagaataaatctagactgggggattc

SEQ ID NO: 86893 - DNA, 120 bp, Artificial Sequence
  ENSG00000085415_60 (sequence is synthesized)
cctgtattatgtcatgtgacaaggagcctgagggtggagcagttctggggttaggtagtgactcagttgctcaatgatgacatcaaggacctacctaaatattttccacttttttcttgc

SEQ ID NO: 86894 - DNA, 120 bp, Artificial Sequence
  ENSG00000085415_61 (sequence is synthesized)
tgtcatgcttagtacactggtgatagctccctcttatgatcacaaaagagctgcacaatgtcaggttttacatgctaatacaaagaagggtattctagaaaaaaacacctttcctagaag

SEQ ID NO: 86895 - DNA, 120 bp, Artificial Sequence
  ENSG00000085415_62 (sequence is synthesized)
tatcttagcaggcttcttatcaggtgctggcggctggagtttggtcatccagccatgccttagctgcaagagagtgagacagcaagtgtctggcattttcagcatcaaaaacgaggggaa

SEQ ID NO: 86896 - DNA, 120 bp, Artificial Sequence
  ENSG00000085415_63 (sequence is synthesized)
gtggtgttggggaaagagtgtctgcaggtgggggtgtgtgctattgacttgggaagtaatcaaacctattaagttcagcactttttggagttctgttgctggttctttgaggtaagcatt

SEQ ID NO: 86897 - DNA, 120 bp, Artificial Sequence
  ENSG00000085415_64 (sequence is synthesized)
cattgtttgaaggttcttatttagattgaacgtggaggagatgtgatagtggactatgtagtatcgttattaatacctgtttatctttttctctctttttttttctttgagatggagtct

SEQ ID NO: 86898 - DNA, 66 bp, Artificial Sequence
  ENSG00000085415_65 (sequence is synthesized)
ttttctttgagatggagtctcactctgtttccaggctagagtgcagtggcgcaaccttggctcgct

SEQ ID NO: 86899 - DNA, 120 bp, Artificial Sequence
  ENSG00000085415_66 (sequence is synthesized)
gggagatgactttggcagctgtgtggactgggagcaggaactcagggatgaatgcagtagcccactatgatgtggaatgaggacatgcactgtggcgtgggatgaagagggaccggggag

SEQ ID NO: 86900 - DNA, 120 bp, Artificial Sequence
  ENSG00000085415_67 (sequence is synthesized)
gctgccggggctgcgggcgggaacccaggggcatcccaccgtcagcctcggcgtcgtgggtcttgcccgcgctgttcacccgacgacctgcagtgggacctggtgggagactttgcctgg

SEQ ID NO: 86901 - DNA, 120 bp, Artificial Sequence
  ENSG00000085415_68 (sequence is synthesized)
ctggcgctgcgtcgagttctgtgccccgccggtgttctctcaccagggcacatggttttctccgtgggttcagagcagaagctcactttgttacgccgaggaagaaaaatacaaaccatt

SEQ ID NO: 86902 - DNA, 120 bp, Artificial Sequence
  ENSG00000085415_69 (sequence is synthesized)
ttttccccggaggactctggctcccgggtagcaagcagcccacttccccggccgcttccttcccccgggatgacacgtttctacaggcggactcttctaattcatactatttccctaccc

SEQ ID NO: 86903 - DNA, 120 bp, Artificial Sequence
  ENSG00000085415_70 (sequence is synthesized)
ccgtggtggctcctagcacccccaggcctgttctacctgtaaaatcttgacacatttaaactactacttctgatcctttcctccccgtccagccttcgctcttaggctgccgagcctgga

SEQ ID NO: 86904 - DNA, 120 bp, Artificial Sequence
  ENSG00000085415_71 (sequence is synthesized)
ctgcttgtcatcccctcaggcgtctccccggccctccctgctcttcagccgtcccgacggagcgcggctcctgaccaaacccacggttcgtcttctccacctgctccgcgcgcctcgcat

SEQ ID NO: 86905 - DNA, 120 bp, Artificial Sequence
  ENSG00000085415_72 (sequence is synthesized)
ggtaattgttggtttatatttctgctctgcaatttttacttaaaatgtaaactctgaaatattttttgaaaatggtcttttacagttacttttaatgtcatattaatttatgttattttg

SEQ ID NO: 86906 - DNA, 120 bp, Artificial Sequence
  ENSG00000085415_73 (sequence is synthesized)
ttttaagttatgtggaacagagcagttttcaaaactaaagtaattacaacagaatatgcaatatctccaataaaaagataccagttgtcatatatgtaccttacatgactgctctacaaa

SEQ ID NO: 86907 - DNA, 120 bp, Artificial Sequence
  ENSG00000085415_74 (sequence is synthesized)
ctcaggctaggactgtagtggctccttttttatcaaataaattgctttagacaatccatccttaataggagaaaatccagtatcttccctgcttcttctctgcagctcccataagttaag

SEQ ID NO: 86908 - DNA, 120 bp, Artificial Sequence
  ENSG00000085415_75 (sequence is synthesized)
agccttgggggccctgattgtaagtttcttctaagtgccaggctgagtgagaaggtctggtcagttgacactgactgtggtctctgtagcttggttctgcacttctccttggatgattat

SEQ ID NO: 86909 - DNA, 120 bp, Artificial Sequence
  ENSG00000085433_0 (sequence is synthesized)
acttgacaaccgcagtctgcaagaggctgagctgaggagtcgctgggccgggaggggcggacgtgagaaggacggattgacgaactgatggattgacgcgcgggcggtaggagggaggac

SEQ ID NO: 86910 - DNA, 120 bp, Artificial Sequence
  ENSG00000085433_1 (sequence is synthesized)
cggtaggagggaggaccgacgccaaacccagaccgccgccgtcgtgctcctgccgcagcccggagccggccgcttcggggccctggccgccggcctcccagccgcgttctcctccgccgc

SEQ ID NO: 86911 - DNA, 120 bp, Artificial Sequence
  ENSG00000085433_2 (sequence is synthesized)
tggagccctcaggctatcaatatgacggctgaagaaacagtgaatgtaaaagaggttgaaatcattaagctaattttggacttcctgaattcaaagaagcttcacattagtatgctggcc

SEQ ID NO: 86912 - DNA, 120 bp, Artificial Sequence
  ENSG00000085433_3 (sequence is synthesized)
ctggagaaggaaagtggagtcataaatggcctgttttcagatgatatgcttttcctgaggcagctaatacttgatggtcaatgggatgaagttcttcagttcattcagcctctagaatgt

SEQ ID NO: 86913 - DNA, 120 bp, Artificial Sequence
  ENSG00000085433_4 (sequence is synthesized)
atggaaaaatttgacaaaaaaaggtttcgttatattatcctgaagcagaagtttttagaagctttatgtgttaacaacgcgatgtcagcagaagatgagccccagcatctggaatttacc

SEQ ID NO: 86914 - DNA, 120 bp, Artificial Sequence
  ENSG00000085433_5 (sequence is synthesized)
atgcaagaagctgtgcaatgtttacatgctctagaagaatactgtccttctaaagatgactatagtaagctctgtttgcttttgactttgcctcgtctgaccaatcatgccgagtttaag

SEQ ID NO: 86915 - DNA, 120 bp, Artificial Sequence
  ENSG00000085433_6 (sequence is synthesized)
gactggaatcccagcaccgcacgagttcactgttttgaagaggcttgtgtcatggttgcagaattcatccctgctgataggaagctaagtgaagctggttttaaggctagtaacaatcgt

SEQ ID NO: 86916 - DNA, 120 bp, Artificial Sequence
  ENSG00000085433_7 (sequence is synthesized)
ttatttcagcttgtaatgaaaggcctgctttatgaatgctgtgtagaattttgtcagagtaaagcaactggagaagaaattacagaaagcgaagtgcttcttggcatcgacctcttatgt

SEQ ID NO: 86917 - DNA, 120 bp, Artificial Sequence
  ENSG00000085433_8 (sequence is synthesized)
ggtaatggttgtgatgatttggatctgagtttactgtcatggcttcagaatcttccatcttctgtcttctcttgtgcttttgaacagaaaatgcttaatattcatgttgacaaacttctg

SEQ ID NO: 86918 - DNA, 120 bp, Artificial Sequence
  ENSG00000085433_9 (sequence is synthesized)
aaacctacaaaagctgcatatgctgatcttttgactcctcttatcagcaaactctctccctatccatcatccccaatgagaagacctcaatcagctgatgcctatatgacccgctctctg

SEQ ID NO: 86919 - DNA, 120 bp, Artificial Sequence
  ENSG00000085433_10 (sequence is synthesized)
aatcctgctttagatggcctcacctgtggactaaccagtcatgataagagaatttcagaccttggaaacaaaacttctccaatgtcacactcctttgctaacttccattatccaggggta

SEQ ID NO: 86920 - DNA, 120 bp, Artificial Sequence
  ENSG00000085433_11 (sequence is synthesized)
caaaacctcagtagaagtctcatgcttgagaatacagaatgtcacagtatttacgaagaatcccctgagcgaagtgatacacctgttgatgcacagaggcctatcggcagtgaaatcttg

SEQ ID NO: 86921 - DNA, 120 bp, Artificial Sequence
  ENSG00000085433_12 (sequence is synthesized)
ggccagagttcagtttcagaaaaagagcctgcaaatggagcacagaatccaggaccagctaaacaagaaaaaaatgagcttcgagattcaacagaacaatttcaagaatattataggcaa

SEQ ID NO: 86922 - DNA, 120 bp, Artificial Sequence
  ENSG00000085433_13 (sequence is synthesized)
agattacgctatcaacagcatttagaacagaaggagcaacagcggcagatataccaacagatgttgcttgaaggaggcgtgaatcaggaggatggtcctgatcagcagcagaatcttact

SEQ ID NO: 86923 - DNA, 120 bp, Artificial Sequence
  ENSG00000085433_14 (sequence is synthesized)
gaacagttccttaataggtccattcaaaagcttggtgaattaaatattggaatggatggccttggtaatgaggtatcagcactcaaccagcaatgtaatgggagcaaaggcaatggatct

SEQ ID NO: 86924 - DNA, 120 bp, Artificial Sequence
  ENSG00000085433_15 (sequence is synthesized)
aatggttcttctgtgactagttttactacaccaccccaagactctagtcagagattaacacatgatgcttcaaatattcatacaagcactcctcgtaatcctggatcaacaaatcacata

SEQ ID NO: 86925 - DNA, 120 bp, Artificial Sequence
  ENSG00000085433_16 (sequence is synthesized)
ccttttctggaggaatcaccttgtggaagccaaatctcttcagaacattcggtcattaagccacctcttggagattctccagggagtctttcaaggtcgaaaggggaagaggatgacaaa

SEQ ID NO: 86926 - DNA, 120 bp, Artificial Sequence
  ENSG00000085433_17 (sequence is synthesized)
cacaagctgttagagcagtggcttttcatccagctggaggtttatatgctgttggttcaaattcaaaaactctgagagtatgtgcctatccagatgtaattgatccaagtgcacatgaga

SEQ ID NO: 86927 - DNA, 120 bp, Artificial Sequence
  ENSG00000085433_18 (sequence is synthesized)
ctcctaagcagccggtggtacgttttaaaaggaataaacatcataaaggatccatttactgtgtggcctggagtccttgtgggcagttattagcaacaggatcaaatgacaaatacgtca

SEQ ID NO: 86928 - DNA, 120 bp, Artificial Sequence
  ENSG00000085433_19 (sequence is synthesized)
aagtgctgcccttcaatgcagagacttgtaacgcaacaggaccagatctggaatttagtatgcatgatggaacaattagagacttggcatttatggaaggcccagaaagcggaggagcta

SEQ ID NO: 86929 - DNA, 120 bp, Artificial Sequence
  ENSG00000085433_20 (sequence is synthesized)
ttttaataagtgctggagcaggggattgtaacatttatacaaccgattgtcaaagaggacagggcctccatgctttgagtggacatactgggcatattttagcactttatacctggagtg

SEQ ID NO: 86930 - DNA, 120 bp, Artificial Sequence
  ENSG00000085433_21 (sequence is synthesized)
gctggatgattgcatctggttcccaagataagactgttagattttgggatcttcgagtaccaagttgtgttcgtgttgttggcacaacatttcatggaactggcagtgcagtggcatctg

SEQ ID NO: 86931 - DNA, 120 bp, Artificial Sequence
  ENSG00000085433_22 (sequence is synthesized)
tagctgtagatcccagtggtcgtctcttagccacaggtcaagaagattctagctgcatgttgtatgacataagaggaggaagaatggtacaaagttatcatcctcattccagtgatgttc

SEQ ID NO: 86932 - DNA, 120 bp, Artificial Sequence
  ENSG00000085433_23 (sequence is synthesized)
gctctgttcgattctcccctggagctcactacttgctaacaggctcttatgatatgaaaataaaggtgacagacctacaaggggacctcaccaagcagcttcctatcatggtggtggggg

SEQ ID NO: 86933 - DNA, 120 bp, Artificial Sequence
  ENSG00000085433_24 (sequence is synthesized)
agcacaaggacaaagtgattcagtgcagatggcacacccaggatctttccttcctgtcatcctctgcagatagaactgtcaccctctggacttacaatgggtagagcacaccgcatgtca

SEQ ID NO: 86934 - DNA, 120 bp, Artificial Sequence
  ENSG00000085433_25 (sequence is synthesized)
gtctatgcagcaaaagcacagagacttaagactactgagttgtgaaaattacaaatctgaagaacatagtgtccaggaaagtggtttagcacgaagaggccccttattaccatgtatccc

SEQ ID NO: 86935 - DNA, 120 bp, Artificial Sequence
  ENSG00000085433_26 (sequence is synthesized)
actgataggaggtgttgggtggtgttattccgcagtgctttcagtcttccatgtgagctcgtgctgctgtgacctgctatatgtagtctcgttgccaaagtctgcagaagagctcttcag

SEQ ID NO: 86936 - DNA, 120 bp, Artificial Sequence
  ENSG00000085433_27 (sequence is synthesized)
ttgttggtgtgcactccaagtcaggatggacaatgtgtttacggtttagtattcaatgcattccttggtctttgcctaaataacagttttatatgcacattgaaatggaattatacttca

SEQ ID NO: 86937 - DNA, 120 bp, Artificial Sequence
  ENSG00000085433_28 (sequence is synthesized)
actatattattaaatgtaatgcaaccaagttcctcccagattaaacttcccaggtgttcagaattacttttgctcttctcacgatcccatattgtattatcacttgtcttctagaggtca

SEQ ID NO: 86938 - DNA, 120 bp, Artificial Sequence
  ENSG00000085433_29 (sequence is synthesized)
gaattccataatatatgtcactcaaaagttacatggttgctttcacttaaggatcattgtggagtttaaagatgaatgaaaaactgcttcttagtttactacatggtataggcccttttt

SEQ ID NO: 86939 - DNA, 120 bp, Artificial Sequence
  ENSG00000085433_30 (sequence is synthesized)
tcttaaacccagggatatgattattttgtcatataattttgtttcaggctaaaaggtaaatgtgtttgcttcagaaacttgttaacttcagttttttgaatgcaacaggatacctccctt

SEQ ID NO: 86940 - DNA, 120 bp, Artificial Sequence
  ENSG00000085433_31 (sequence is synthesized)
ccaaactgaactgtagaagcagagcagcagcagttatgtgatgcaacacttgatggtacagtaaatttactggcatttttctccttaaaaattaaaatccttgacatagaccatagcatg

SEQ ID NO: 86941 - DNA, 120 bp, Artificial Sequence
  ENSG00000085433_32 (sequence is synthesized)
gcttgaaatgctatgtctgcatgataatttaaaatggaagatttaaactttgcactccaaaagcttatttggatttttttcttgcactgttttgtgtaatgcagaataatgattttattt

SEQ ID NO: 86942 - DNA, 120 bp, Artificial Sequence
  ENSG00000085433_33 (sequence is synthesized)
acatttatgtatctttattttcatattgtacagtaattttactttaaattatttaaataggctattttatttatttcaaatgcagttgtattagttctcattattgaactgtctgtgcac

SEQ ID NO: 86943 - DNA, 120 bp, Artificial Sequence
  ENSG00000085433_34 (sequence is synthesized)
ttattgaactgtctgtgcactgtatgtagcaagcatttttcatctgttgtatacaagtggaaagggtattagaagtgtaactgtgctattatttcaataaagacctcttgacatttaaaa

SEQ ID NO: 86944 - DNA, 120 bp, Artificial Sequence
  ENSG00000085433_35 (sequence is synthesized)
tgccctggagccctcagagacatggtcttcctctgttgttcagaggtgtgcagtggtgtgatcatagctcactgtatgtaacttctaacttctgggctcaagcgatcctcctgcttcagc

SEQ ID NO: 86945 - DNA, 120 bp, Artificial Sequence
  ENSG00000085449_0 (sequence is synthesized)
gtcagctgatgggctgcctgccgaggaggccgcagcagtcgccgcgcgaacatggcggccgaaatccactccaggccgcagagcagccgcccggtgctgctgagcaagatcgaggggcac

SEQ ID NO: 86946 - DNA, 120 bp, Artificial Sequence
  ENSG00000085449_1 (sequence is synthesized)
caggacgccgtcacggccgcgctgctcatccccaaggaggacggcgtgatcacggccagcgaggacagaaccatccgggtatggctgaaaagagacagtggtcaatactggcccagcatt

SEQ ID NO: 86947 - DNA, 120 bp, Artificial Sequence
  ENSG00000085449_2 (sequence is synthesized)
taccacacaatggcctctccttgctctgctatggcttaccatcatgacagcagacggatatttgtgggccaggataatggagctgtaatggaatttcacgtttctgaagattttaataaa

SEQ ID NO: 86948 - DNA, 120 bp, Artificial Sequence
  ENSG00000085449_3 (sequence is synthesized)
atgaactttatcaagacctacccagctcatcagaaccgggtgtctgcgattatcttcagcttggccacagagtgggtgatcagtaccggccacgacaagtgtgtgagctggatgtgcacg

SEQ ID NO: 86949 - DNA, 120 bp, Artificial Sequence
  ENSG00000085449_4 (sequence is synthesized)
cggagcgggaacatgctcgggaggcacttcttcacgtcctgggcttcgtgtctgcaatatgactttgacactcagtatgctttcgttggtgattattctgggcagatcaccctgctgaag

SEQ ID NO: 86950 - DNA, 120 bp, Artificial Sequence
  ENSG00000085449_5 (sequence is synthesized)
cttgaacagaacacgtgttcagtcatcacaaccctcaaaggacatgaaggtagtgtcgcctgcctctggtgggaccctattcagcggttactcttctcaggagcatctgacaacagcatc

SEQ ID NO: 86951 - DNA, 120 bp, Artificial Sequence
  ENSG00000085449_6 (sequence is synthesized)
atcatgtgggacatcggaggaaggaaaggccggacgctgttacttcagggccatcatgacaaggtgcagtcgctgtgctaccttcagctcaccaggcagctcgtctcctgttcctcggac

SEQ ID NO: 86952 - DNA, 120 bp, Artificial Sequence
  ENSG00000085449_7 (sequence is synthesized)
ggcggaattgcagtgtggaacatggatgttagcagagaagaggctcctcagtggttggaaagtgattcttgtcagaaatgtgagcagccatttttctggaacataaagcagatgtgggac

SEQ ID NO: 86953 - DNA, 120 bp, Artificial Sequence
  ENSG00000085449_8 (sequence is synthesized)
accaagacgctggggctaagacaacatcactgcaggaaatgcgggcaggctgtctgcgggaagtgcagcagcaagcgctcaagttacccagtcatgggcttcgagttccaagtccgggtt

SEQ ID NO: 86954 - DNA, 120 bp, Artificial Sequence
  ENSG00000085449_9 (sequence is synthesized)
tgtgattcttgttacgactccatcaaagatgaagatcggacttctctagcgacctttcatgaaggaaaacataacatttcccacatgtccatggacattgccaggggactgatggtgacc

SEQ ID NO: 86955 - DNA, 120 bp, Artificial Sequence
  ENSG00000085449_10 (sequence is synthesized)
tgtgggaccgaccgcattgtaaagatctgggacatgacacctgtggtgggctgcagtctggcgactgggttttctccgcactgatctgagagctgggcggcgtccacacctaagaacagc

SEQ ID NO: 86956 - DNA, 120 bp, Artificial Sequence
  ENSG00000085449_11 (sequence is synthesized)
agctccaccaaatgaagtccctctcacgcagctccacagcgctgtctcgtgaatggacagtagccacttacaaacaaatcaacatttttaaaaagaaaatgtaaaggtgtgttttggggc

SEQ ID NO: 86957 - DNA, 120 bp, Artificial Sequence
  ENSG00000085449_12 (sequence is synthesized)
atttgtggaacttacccatggggactaatatggaaaaggtctgtccatagtggttccctgaagactggaattacttcagcaaaacttccccatgaacagctaatgtgtagtgaaagaatg

SEQ ID NO: 86958 - DNA, 120 bp, Artificial Sequence
  ENSG00000085449_13 (sequence is synthesized)
agctagcaaatgagttttagcggggacaaaaaatcaaacaaaaaagtgaatgcttagaaccttctcaaagcagtcacaagtacagacacttcacttagcctagggggccttccagggttc

SEQ ID NO: 86959 - DNA, 120 bp, Artificial Sequence
  ENSG00000085449_14 (sequence is synthesized)
ttgtggctgttgtcagagcaggagctgggggagggaagacttgttctctctttcttgaggggtggcattaggaacttacgaaaccagagacctttccctatgacttggcagtatgtgaat

SEQ ID NO: 86960 - DNA, 120 bp, Artificial Sequence
  ENSG00000085449_15 (sequence is synthesized)
atcctctacacttagttattgataaacttcttaaagagatctgttattttcaggtagtgccataatctgcacttagcattggcttgcttcagttgtttctcttcccagccagtatgccac

SEQ ID NO: 86961 - DNA, 120 bp, Artificial Sequence
  ENSG00000085449_16 (sequence is synthesized)
aggtgaactttcggggttgtcattaagtaagttgtgaaatttctgtaataacaaaggcagtccgcattcttccctttcccccaaattcctagggcaaaacttttttatggtgctgttaac

SEQ ID NO: 86962 - DNA, 120 bp, Artificial Sequence
  ENSG00000085449_17 (sequence is synthesized)
atgggagtcacacaagccgcctgactttttctcattgccattagtaatgactgatggaaaacccagccaccactgtgatgcgaaatgatcagtctgttgcctgaaacagcccagtcctct

SEQ ID NO: 86963 - DNA, 120 bp, Artificial Sequence
  ENSG00000085449_18 (sequence is synthesized)
taactgaaacagcattctacttcttgttccaagatgagcctctgcaatattctggcaatttaatataccccctacaaaagcactccacagcttttacactattttgactttgagttataa

SEQ ID NO: 86964 - DNA, 120 bp, Artificial Sequence
  ENSG00000085449_19 (sequence is synthesized)
ataatcatccatcaagtcttccacaataattcccaactcataaattgctttcctaacaactagcaaaagctattgttcataatggcatttctaaagcttttgggcactgtgtaccaggat

SEQ ID NO: 86965 - DNA, 120 bp, Artificial Sequence
  ENSG00000085449_20 (sequence is synthesized)
gaggaagagaagaaatgaggagcctgtcttttaatattccagtatttgtgtgtttgattttttttgacaacagtacatatatctatttctctagggatatggaagtaagtggagaagggc

SEQ ID NO: 86966 - DNA, 120 bp, Artificial Sequence
  ENSG00000085449_21 (sequence is synthesized)
ctacctttttaaaggacaaatataaaaatagcaacagtatctttgctaatcttactaatagatattgattaaaaaaaaaaaacctcagtactgcatcactgtgttgggatcataccagga

SEQ ID NO: 86967 - DNA, 120 bp, Artificial Sequence
  ENSG00000085449_22 (sequence is synthesized)
caatagggtcattccatatgataaaactaaaggactaaatttgttttataatgatgtcttagagggactgaaaggtttaaggaggcgatcaaactaaaatgtcttaatggctgtgtgaca

SEQ ID NO: 86968 - DNA, 120 bp, Artificial Sequence
  ENSG00000085449_23 (sequence is synthesized)
cacgtaaggaaaggaaagggggtcacgcacatcatgtactggaatgatctgcattaaacatagacttgtcttcagaaataagactgaagggttttgttgttccttagagttttcgtgtta

SEQ ID NO: 86969 - DNA, 120 bp, Artificial Sequence
  ENSG00000085449_24 (sequence is synthesized)
catcacctaaagagatttcttttaaaaactttctagactctttgcaaaatgtatattactaacatagtttggaagaaaaattgagtagtggtaagttttgttcaagcacaatgttgaatg

SEQ ID NO: 86970 - DNA, 120 bp, Artificial Sequence
  ENSG00000085449_25 (sequence is synthesized)
ttaagcttcctgtattaattttagttcagttaatggttcagcccatacaaaggtgctatcctagggattttatgaattcctgaaaggaaaatagaatatgatcaattccttgccctgtgg

SEQ ID NO: 86971 - DNA, 120 bp, Artificial Sequence
  ENSG00000085449_26 (sequence is synthesized)
aagagtgcagaactgtggttttgttttcctttgacttctgtaaaatgtgaccgtttgacatctgtggtagattgaacggaatatcacagctgctgagtttactccatagctttcaaacct

SEQ ID NO: 86972 - DNA, 120 bp, Artificial Sequence
  ENSG00000085449_27 (sequence is synthesized)
tttttattttaagaaattcttgaaaaaccctatgttccatgggaacataaagttattatagtgcctcctaaggggttaatataaatcaaggaggaagtttatatttaaggaagaattgga

SEQ ID NO: 86973 - DNA, 120 bp, Artificial Sequence
  ENSG00000085449_28 (sequence is synthesized)
gtgacgtatcttagaaaaggaaaggctgatgtttccatatagcttgctctccaccaggcctatcatttttctttttagagacaaacgtgacaggctagtcttgtctctctcatatgctag

SEQ ID NO: 86974 - DNA, 120 bp, Artificial Sequence
  ENSG00000085449_29 (sequence is synthesized)
gtagcaaatggggtgatatttttatagaagtgggcaaaaattattttctcaattttactgagtaggcacagaagaaaagtacagataggctgatggttattgccttattttgactgcatt

SEQ ID NO: 86975 - DNA, 120 bp, Artificial Sequence
  ENSG00000085449_30 (sequence is synthesized)
tctcttaaatggatcatttaaattagttcttcaagtaacagtttactggttgttccattcctgaatatgcaggctaatttgtacagatagggattaaggaatacagactattagagaaga

SEQ ID NO: 86976 - DNA, 120 bp, Artificial Sequence
  ENSG00000085449_31 (sequence is synthesized)
tccttatatttacatctagtatatatgtggtaaggaaatgccgattcttcattataaacaagttttaaaattgttctttcttagttcaaatgatagcaatacccctatagcattaggtag

SEQ ID NO: 86977 - DNA, 120 bp, Artificial Sequence
  ENSG00000085449_32 (sequence is synthesized)
aaacaaattattcattacatcgtaaatctctttactatgtcctagctctgtcctgctacctaaaggatataaagaaatactattgctctagaatgtattactttgttctcccatgaaaga

SEQ ID NO: 86978 - DNA, 120 bp, Artificial Sequence
  ENSG00000085449_33 (sequence is synthesized)
attcagtttgttagtacctatatttttaaactggtgaaactgacccaaatatgtaataaataccatagtagctcagacccaaggagatatttttctaaaatcagttttcgttaaagtact

SEQ ID NO: 86979 - DNA, 120 bp, Artificial Sequence
  ENSG00000085449_34 (sequence is synthesized)
tctacttccgttattggatatggtatctcctaaagtgtaaaaaaaatctgttactatatagtgataaaccatctgctcatcgtaagtgtaaggcttaacaaataagtaatacatgctata

SEQ ID NO: 86980 - DNA, 120 bp, Artificial Sequence
  ENSG00000085449_35 (sequence is synthesized)
tttattcaagtgtctattgcttaattgttaattgtgagcagatttattgaatgcctattctattttctgcagtttacaatacaataactctttgagtaagttgaagtttaattgtgcaac

SEQ ID NO: 86981 - DNA, 120 bp, Artificial Sequence
  ENSG00000085449_36 (sequence is synthesized)
aaatttgtattagagtacaatttaaagtgtttttctctatagccttttttgactggggaagcaaggggtaatgttaattagtacactttgttcttgtactagctatgtttctataagata

SEQ ID NO: 86982 - DNA, 120 bp, Artificial Sequence
  ENSG00000085449_37 (sequence is synthesized)
tggtgccctgtgtatcccagagatgctagaaaactgttctttgctcctatttgtgggttctgtttttgtgggtttttttttttgagaaaatgtacacaataaaacattccttgcttgtta

SEQ ID NO: 86983 - DNA, 120 bp, Artificial Sequence
  ENSG00000085449_38 (sequence is synthesized)
cacttcttcacgtcctgggcttcgtgtctgcagtatccttcagagccacggacctctccttcccctggcctctgcttctcagtgtttggttctgaatctcatcccaaatggctgagatct

SEQ ID NO: 86984 - DNA, 120 bp, Artificial Sequence
  ENSG00000085449_39 (sequence is synthesized)
aaagactgaatgaaacctatttaagtttgtgcaaaagtaattgcatttttttttttaccatggaaagtaattgcaaaaattgcaattacttttgcaccaacctaatacatatttcactga

SEQ ID NO: 86985 - DNA, 120 bp, Artificial Sequence
  ENSG00000085449_40 (sequence is synthesized)
aaatccgagaacttccgtaagtttgctgtaaattgggtttattaaaaataatgaaatgaattgttctgtgctgggaggtgctataggtttttaattcaaaattgtggaaaacccaagccc

SEQ ID NO: 86986 - DNA, 120 bp, Artificial Sequence
  ENSG00000085449_41 (sequence is synthesized)
atagtcagtggtaaaataccacttgctgattttaatgaggagagcaatttgagcctaaatgaagacagttcctgtgtttttccgcatggagacaagtgactgttgtgtgtgctgtttgca

SEQ ID NO: 86987 - DNA, 120 bp, Artificial Sequence
  ENSG00000085449_42 (sequence is synthesized)
tgttggaattacaggcatgagccactgcagtagccctgattgttttaaatagaagaaggtaaagtattttctcacataaatttctgaatgtgggaggcagcctactgacattgcttcacg

SEQ ID NO: 86988 - DNA, 120 bp, Artificial Sequence
  ENSG00000085449_43 (sequence is synthesized)
gttttaatttttaccttcaatatttacatattgcatgcttttcagttgggtgtttcctttcttgttatagttttacgtgtatgcttattctctttaaaatgcatgttttctaactttgaa

SEQ ID NO: 86989 - DNA, 120 bp, Artificial Sequence
  ENSG00000085449_44 (sequence is synthesized)
aactaactttgactaatgctggtatctctcttatgagaggactttcaggtgatttctgttctacatccttgactgcttctcctcagatatgactttgacactcagtatgctttcgttggt

SEQ ID NO: 86990 - DNA, 120 bp, Artificial Sequence
  ENSG00000085465_0 (sequence is synthesized)
atcagaccattgagatgtggaagctgttgctgtgggttgggctggttcttgtgctgaaacaccacgatggtgctgcccataaactcgtgtgttatttcaccaactgggcacacagtcggc

SEQ ID NO: 86991 - DNA, 120 bp, Artificial Sequence
  ENSG00000085465_1 (sequence is synthesized)
caggccctgcctcgatcttgccccatgacctggacccctttctctgcacccacctgatatttgcctttgcctcaatgaacaacaatcagattgttgctaaggatctccaggatgagaaaa

SEQ ID NO: 86992 - DNA, 120 bp, Artificial Sequence
  ENSG00000085465_2 (sequence is synthesized)
ttctctacccagagttcaacaaactaaaggagaggaacagagagctgaaaacactactgtccatcggcgggtggaactttggcacctcaagattcaccactatgttgtccacatttgcca

SEQ ID NO: 86993 - DNA, 120 bp, Artificial Sequence
  ENSG00000085465_3 (sequence is synthesized)
accgtgaaaagtttattgcttcagttatatcccttctgaggacacatgactttgatggtcttgaccttttcttcttatatcctggactaagaggcagccccatgcatgaccggtggactt

SEQ ID NO: 86994 - DNA, 120 bp, Artificial Sequence
  ENSG00000085465_4 (sequence is synthesized)
ttctcttcttaattgaagagctcctgtttgccttccggaaggaggcactgctcaccatgcgcccgaggctgctgctgtctgctgctgtttctggggtcccacacatcgtccaaacatcct

SEQ ID NO: 86995 - DNA, 120 bp, Artificial Sequence
  ENSG00000085465_5 (sequence is synthesized)
atgatgtgcgctttctaggaagactcctggatttcatcaatgtcttgtcttatgacttacatggaagttgggaaaggttcacaggacataatagccccctcttctctctgcctgaagacc

SEQ ID NO: 86996 - DNA, 120 bp, Artificial Sequence
  ENSG00000085465_6 (sequence is synthesized)
ccaaatcttcggcatatgctatgaattattggagaaagcttggggcaccctcagagaagctcatcatggggatccccacctatggacgtacctttcgcctcctcaaagcctctaagaatg

SEQ ID NO: 86997 - DNA, 120 bp, Artificial Sequence
  ENSG00000085465_7 (sequence is synthesized)
ggttgcaggccagagcgatcggaccagcatctccagggaagtacaccaagcaagaaggcttcttggcttattttgagatttgttcctttgtctggggagcgaagaagcactggattgatt

SEQ ID NO: 86998 - DNA, 120 bp, Artificial Sequence
  ENSG00000085465_8 (sequence is synthesized)
accagtatgtcccgtatgccaacaaggggaaagagtgggttggctatgacaatgccatcagcttcagttacaaggcatggtttataaggcgagagcattttgggggggccatggtgtgga

SEQ ID NO: 86999 - DNA, 120 bp, Artificial Sequence
  ENSG00000085465_9 (sequence is synthesized)
gcactggccctttcccccttgtctacgtattgaatgatatcctggtgcgggctgagttcagttcaacttctttaccacaattttggctgtcatctgctgtgaattcttcaagcactgacc

SEQ ID NO: 87000 - DNA, 120 bp, Artificial Sequence
  ENSG00000085465_10 (sequence is synthesized)
ctgaaaggctggctgtgaccacggcatggaccactgatagtaagattttgcccccaggaggagaggctggggtcactgagatccacggaaagtgtgaaaatatgactataacccctagag

SEQ ID NO: 87001 - DNA, 120 bp, Artificial Sequence
  ENSG00000085465_11 (sequence is synthesized)
gtacaactgtgacccctacaaaggaaactgtatcccttggaaagcacactgtagctctaggagagaagactgagatcactggggcaatgaccatgacttctgtgggtcatcagtccatga

SEQ ID NO: 87002 - DNA, 120 bp, Artificial Sequence
  ENSG00000085465_12 (sequence is synthesized)
cccctggagagaaggccctgacccctgtgggtcatcaatctgtgaccactggacagaagaccctgacctctgtgggttatcagtctgtgacccctggggaaaagaccctgacccctgtgg

SEQ ID NO: 87003 - DNA, 120 bp, Artificial Sequence
  ENSG00000085465_13 (sequence is synthesized)
gtcatcagtctgtgacccctgtgagtcatcagtctgtgagccctggaggaacgactatgacccctgtccattttcagactgagacccttagacagaatacagtggcccctagaaggaagg

SEQ ID NO: 87004 - DNA, 120 bp, Artificial Sequence
  ENSG00000085465_14 (sequence is synthesized)
ctgtggcccgtgaaaaggtgactgtcccctccagaaacatatcagtcacccctgaagggcagactatgcctttaagaggggagaatttgacttctgaggtgggcactcaccccaggatgg

SEQ ID NO: 87005 - DNA, 120 bp, Artificial Sequence
  ENSG00000085465_15 (sequence is synthesized)
gtaacttgggtcttcagatggaagctgaaaacaggatgatgctgtcctccagccccgtcatccagctcccggaacaaactcctctagcttttgacaaccgctttgttcccatctatggaa

SEQ ID NO: 87006 - DNA, 120 bp, Artificial Sequence
  ENSG00000085465_16 (sequence is synthesized)
accattcctctgtcaactcagtaacccctcaaacaagtcctctttctctaaaaaaagaaatcccagaaaactctgctgtggatgaagaagcctaagcccctctggtgtcagaaaccaggg

SEQ ID NO: 87007 - DNA, 120 bp, Artificial Sequence
  ENSG00000085465_17 (sequence is synthesized)
aaaacccttgtcttttcttctaagtgacatgttggaagccttctcatcccggggcaaagcaggcatcaaaaccagaataggccaatctcttttccattaaataaactgtaaacacaagaa

SEQ ID NO: 87008 - DNA, 120 bp, Artificial Sequence
  ENSG00000085465_18 (sequence is synthesized)
ttttttttttttcacaaatgaggcagttaagacacataagggttacataacttcttcaggatcccatagctaataaacagtaaaagctagattcaaatgctggctacactcctaaccacc

SEQ ID NO: 87009 - DNA, 120 bp, Artificial Sequence
  ENSG00000085465_19 (sequence is synthesized)
cagctacattgcttcctgagggactatcttcagttttttgccattgtacccagtctagagactgacaagtacagcaggttgactgactgttacttttacaggcatggtttataaggcgag

SEQ ID NO: 87010 - DNA, 80 bp, Artificial Sequence
  ENSG00000085491_0 (sequence is synthesized)
gcgggctcgggtggggtctccgctcctgcgccctgcgccctgcgcgccgcagccgcaaccccgacggcgccccaaacgct

SEQ ID NO: 87011 - DNA, 120 bp, Artificial Sequence
  ENSG00000085491_1 (sequence is synthesized)
ccggcctcgcgctggtcccggtctcgccccgcagccctcgatctcccgtgacttcctcggccaggccgcctgcgcctctgggaccatgttgcgctggctgcgggacttcgtgctgcccac

SEQ ID NO: 87012 - DNA, 120 bp, Artificial Sequence
  ENSG00000085491_2 (sequence is synthesized)
cgcggcctgccaggacgcggagcagccgacgcgctacgagaccctcttccaggcactggaccgcaatggggacggagtggtggacatcggcgagctgcaggaggggctcaggaacctggg

SEQ ID NO: 87013 - DNA, 120 bp, Artificial Sequence
  ENSG00000085491_3 (sequence is synthesized)
catccctctgggccaggacgccgaggagaaaatttttactactggagatgtcaacaaagatgggaagctggattttgaagaatttatgaagtaccttaaagaccatgagaagaaaatgaa

SEQ ID NO: 87014 - DNA, 120 bp, Artificial Sequence
  ENSG00000085491_4 (sequence is synthesized)
attggcatttaagagtttagacaaaaataatgatggaaaaattgaggcttcagaaattgtccagtctctccagacactgggtctgactatttctgaacaacaagcagagttgattcttca

SEQ ID NO: 87015 - DNA, 120 bp, Artificial Sequence
  ENSG00000085491_5 (sequence is synthesized)
aagcattgatgttgatgggacaatgacagtggactggaatgaatggagagactacttcttatttaatcctgttacagacattgaggaaattatccgtttctggaaacattctacaggaat

SEQ ID NO: 87016 - DNA, 120 bp, Artificial Sequence
  ENSG00000085491_6 (sequence is synthesized)
tgacataggggatagcttaactattccagatgaattcacggaagacgaaaaaaaatccggacaatggtggaggcagcttttggcaggaggcattgctggtgctgtctctcgaacaagcac

SEQ ID NO: 87017 - DNA, 120 bp, Artificial Sequence
  ENSG00000085491_7 (sequence is synthesized)
tgcccctttggaccgtctgaaaatcatgatgcaggttcacggttcaaaatcagacaaaatgaacatatttggtggctttcgacagatggtaaaagaaggaggtatccgctcgctttggag

SEQ ID NO: 87018 - DNA, 120 bp, Artificial Sequence
  ENSG00000085491_8 (sequence is synthesized)
gggaaatggtacaaacgtcatcaaaattgctcctgagacagctgttaaattctgggcatatgaacagtacaagaagttacttactgaagaaggacaaaaaataggaacatttgagagatt

SEQ ID NO: 87019 - DNA, 120 bp, Artificial Sequence
  ENSG00000085491_9 (sequence is synthesized)
tatttctggttccatggctggagcaactgcacagacttttatatatccaatggaggttatgaaaaccaggctggctgtaggcaaaactgggcagtactctggaatatatgattgtgccaa

SEQ ID NO: 87020 - DNA, 120 bp, Artificial Sequence
  ENSG00000085491_10 (sequence is synthesized)
gaagattttgaaacatgaaggcttgggagctttttacaaaggctatgttcccaatttattaggtatcataccttatgcaggcatagatcttgctgtgtatgagctcttgaagtcctattg

SEQ ID NO: 87021 - DNA, 120 bp, Artificial Sequence
  ENSG00000085491_11 (sequence is synthesized)
gctggataattttgcaaaagattctgtaaaccctggagtcatggtgttgctgggatgcggtgccttatccagcacctgtggtcagctggccagctacccattggctttggtgagaactcg

SEQ ID NO: 87022 - DNA, 120 bp, Artificial Sequence
  ENSG00000085491_12 (sequence is synthesized)
catgcaggctcaagccatgttagaaggttccccacagctgaatatggttggcctctttcgacgaattatttccaaagaaggaataccaggactttacagaggcatcaccccaaacttcat

SEQ ID NO: 87023 - DNA, 120 bp, Artificial Sequence
  ENSG00000085491_13 (sequence is synthesized)
gaaggtgctccctgctgtaggcatcagttatgtggtttatgaaaatatgaagcaaactttaggagtaacccagaaatgatgttgcattttttgctttagcctgataattgaaactttcaa

SEQ ID NO: 87024 - DNA, 120 bp, Artificial Sequence
  ENSG00000085491_14 (sequence is synthesized)
caatctctggagtgactttttctcctcgaattgaaacaagtctatggcaaaagaagctgcatttttttcacaaaagggaagatggtaacaatggtcacttcaaacttttgggctaaatta

SEQ ID NO: 87025 - DNA, 120 bp, Artificial Sequence
  ENSG00000085491_15 (sequence is synthesized)
tatgtacacagaaatgttcaaaatcatagttttaatgtgttttgaaaaggccacacaattatactttatcttttcttaataatcctgcaaatctctgccctgaatccgaaatctgaaaat

SEQ ID NO: 87026 - DNA, 120 bp, Artificial Sequence
  ENSG00000085491_16 (sequence is synthesized)
gtactggcttgaacaaaatttgttttgtgtgttagagttataaatcattaatctttatttcgggtggtttacgtttatgccagttcctttatatttaaatttcttgttttatatattttg

SEQ ID NO: 87027 - DNA, 120 bp, Artificial Sequence
  ENSG00000085491_17 (sequence is synthesized)
aatcattacatttaaaatataccttacagcaaaagcatccaaataagtatagggtttatgtccttatttttctttcagctgaatacgaatgaacacagtggtggaatttctgaagggaag

SEQ ID NO: 87028 - DNA, 120 bp, Artificial Sequence
  ENSG00000085491_18 (sequence is synthesized)
tgatgaaattatatttatttcagtgggcacttttccattttaccactgtaccattatttggttcctggagttatacactaattttcagtatattactgttaaattaccaacacaaggcaa

SEQ ID NO: 87029 - DNA, 120 bp, Artificial Sequence
  ENSG00000085491_19 (sequence is synthesized)
tttatttgaaagattccgtttatcctgccattgctttgaaaagcagcaggaaacgaaatcctttgacttgtatcagcttctgcagagcatctttgttttcctttgtcctttgtttcctac

SEQ ID NO: 87030 - DNA, 120 bp, Artificial Sequence
  ENSG00000085491_20 (sequence is synthesized)
cttttgaatcagattccgttttagtcaggaagacttcttgggaccattcttagtaacctgaaatttcttttttaattgcatgaagtggattgatcatgagcaaatgatgtgcttatttct

SEQ ID NO: 87031 - DNA, 120 bp, Artificial Sequence
  ENSG00000085491_21 (sequence is synthesized)
ccctcactgttgaatatctttgaacttgctgttttcaatatgggcagcacaaaggtgagagatacatattaatagtagtatgtattactcttatacattagatacctatatttaaatgaa

SEQ ID NO: 87032 - DNA, 120 bp, Artificial Sequence
  ENSG00000085491_22 (sequence is synthesized)
aggcccaatttgtaaacatatacattcatattctctcttgccccaagttttaggaacatgttaggatataggagacttaatttataataatgagagcatttttttattttactaaagcca

SEQ ID NO: 87033 - DNA, 120 bp, Artificial Sequence
  ENSG00000085491_23 (sequence is synthesized)
gccatttttatagtcaactatcttttcttatttgtgtgattagaacttagaaaaatatttactagttgaagttattatcagtttttaatttagttcttaaactcatttcacttctaataa

SEQ ID NO: 87034 - DNA, 120 bp, Artificial Sequence
  ENSG00000085491_24 (sequence is synthesized)
tgttataaatttccagcattttaatgaaaatctaatgatgtaataggcattttctttatttgaacctacctcttttattttctgaaccaaagagaaagatggactggtgtttgtgaaaca

SEQ ID NO: 87035 - DNA, 120 bp, Artificial Sequence
  ENSG00000085491_25 (sequence is synthesized)
aacatttttaaaaatgtagtttcatttatattagttatgtttgataaatgtctcagtatttttataatatgataagcctgggattctacttttagggttatttgtacttttgagtaatat

SEQ ID NO: 87036 - DNA, 120 bp, Artificial Sequence
  ENSG00000085491_26 (sequence is synthesized)
agtgacaatattaaggtacatgatcagctctttctatttttactcgtaaaaattatggaaatgaataattttgctaacaactttgaaatttcaaacttctggaaaatatgaaaatattca

SEQ ID NO: 87037 - DNA, 120 bp, Artificial Sequence
  ENSG00000085491_27 (sequence is synthesized)
ttgttcattatgaatttaaattgtaaggtatgaatgtgatttgtctgtacatcttgtatcttttccaaaaaatgattctgtatcttttggaaaaaagccgagagttgaagatagtatatt

SEQ ID NO: 87038 - DNA, 120 bp, Artificial Sequence
  ENSG00000085491_28 (sequence is synthesized)
tctggtagtactgaatatttacttacagtttctatcaaaaatatatatttgtttctaaaattacttgttttccagtttttattttttttagagaaaattcttaagtctcagtttcctaat

SEQ ID NO: 87039 - DNA, 120 bp, Artificial Sequence
  ENSG00000085491_29 (sequence is synthesized)
tgaaaaaaaaaaattataaataaagcaaaaattgtatcctacagcttagctagcttagatgtttggcaccagtttgaatcatgctttttacagctggctccatgtagtctttccaaacat

SEQ ID NO: 87040 - DNA, 120 bp, Artificial Sequence
  ENSG00000085491_30 (sequence is synthesized)
tttggcctttcctgagcagcccttgtagatattgtctgtatgatgcattttgacacaaggtgatattttttgtgatatcaaaattccacatttacccattagagttacagccctggggtt

SEQ ID NO: 87041 - DNA, 120 bp, Artificial Sequence
  ENSG00000085491_31 (sequence is synthesized)
cacagtaccaagggggacccagagcctcaggattggccaggctcattttgccgtggagtatcagtttgtcttgaaattgtgggaaaaaattctaagttgaattcactggtaagtaatttt

SEQ ID NO: 87042 - DNA, 120 bp, Artificial Sequence
  ENSG00000085491_32 (sequence is synthesized)
ttaaaatttcataatgcagattacatccaaaatttgatttaaaaattaaaacataagactgcagagaaattctgcatttcaactccaatactatccagacttcagaaataacttatcagt

SEQ ID NO: 87043 - DNA, 120 bp, Artificial Sequence
  ENSG00000085491_33 (sequence is synthesized)
tatttctgtaagcttcttgcttacctggatacctgacaggtgagatggctgtagcagacactggcagttccctgcccacacacctgtccctgtccacagctgcacaaggcagctctgtgt

SEQ ID NO: 87044 - DNA, 120 bp, Artificial Sequence
  ENSG00000085491_34 (sequence is synthesized)
gcaattgccagcatctgctcctctgttctcagggaatctttgttagaaaaatgctgccatatttgtttctcacctattagtcttgtctcccagtcaagagaataaatttatgcaagcaga

SEQ ID NO: 87045 - DNA, 120 bp, Artificial Sequence
  ENSG00000085491_35 (sequence is synthesized)
catgatgcagggggaatctgaggcccagagaattgacttttcctttacaacaaatgagagggggaatgcagtatctttgcctccagtgctcctggttctcatgctgcatgaaacctctga

SEQ ID NO: 87046 - DNA, 120 bp, Artificial Sequence
  ENSG00000085491_36 (sequence is synthesized)
gaagccgttaggatgagccctctccttccagagctttaaccgatgaaggtgcattgtgtttggcgcccctgaggaggatgctgtcttaggcctcttcccactggacgtgtgtggtgggca

SEQ ID NO: 87047 - DNA, 120 bp, Artificial Sequence
  ENSG00000085491_37 (sequence is synthesized)
gagatcccgttcgtcggtcgcacttccaccccgctggggctcactcaggccgcggagctgcgagggagacatcctcgatggactccctctacggagatctcttttggtacctggactata

SEQ ID NO: 87048 - DNA, 120 bp, Artificial Sequence
  ENSG00000085491_38 (sequence is synthesized)
acgcagatggctgttgatcttttctgcaacaaatccaggagtttctcctttttgttttataattgctccaatagatgctttaggatttaactctctgctttttaaagcagaatcgccatc

SEQ ID NO: 87049 - DNA, 120 bp, Artificial Sequence
  ENSG00000085491_39 (sequence is synthesized)
ccaggtgtgcaaccacgaaaaaattagacatccgtgagagacaatgccctccatggcccagtttccaggcagagagaagcagctctgggctgaccgccaaggctccggcccgagagggtc

SEQ ID NO: 87050 - DNA, 120 bp, Artificial Sequence
  ENSG00000085491_40 (sequence is synthesized)
tttaagtggagtaaccagtcttcaagaccccgctcccaagccaccgacgcgctgacgctgcagccctggacctgctgggggcctcttcctcggacccgcatgctgacagcgggactggca

SEQ ID NO: 87051 - DNA, 120 bp, Artificial Sequence
  ENSG00000085491_41 (sequence is synthesized)
actgggcagaggtcgaccccgggtccgcacagcacctcccgagacccagctcccagctccctcacttccggctctctggaggcgggcccggccagtgccgccgaggccagcgcggcgagc

SEQ ID NO: 87052 - DNA, 120 bp, Artificial Sequence
  ENSG00000085491_42 (sequence is synthesized)
ccgaggagggcggcggcttgaggcgttgccaggagaggaaggaggaactgtggcgcccagcgctccggtggcttcagaaactcgggcgtggggccgcgaccggcgaccccggtaacagaa

SEQ ID NO: 87053 - DNA, 120 bp, Artificial Sequence
  ENSG00000085491_43 (sequence is synthesized)
gttaaatttttaagacacttttgtcctgaatccatcccaggttctttgttttctgttttaataccttgcagacatgtaatccgttttagctgtcagacttcagtgggtcccaagttttgt

SEQ ID NO: 87054 - DNA, 120 bp, Artificial Sequence
  ENSG00000085491_44 (sequence is synthesized)
ataaaggcgcacacattcgatctctttcgaagctgctttgttacagcagctatgtgtattgtctactgtttgaaaactgtttgaaaaccaatcgcgtgtttcccccacttcctgttgaga

SEQ ID NO: 87055 - DNA, 120 bp, Artificial Sequence
  ENSG00000085491_45 (sequence is synthesized)
aggaatggcggcattccattgtttaagacattcctaggttaatgccctaggtacataaattgatctgaagggttgacttgacctgcgactgagcaatttcattttctctgagtcatctta

SEQ ID NO: 87056 - DNA, 120 bp, Artificial Sequence
  ENSG00000085491_46 (sequence is synthesized)
actgtgcccctgaacttctgcccctttagtagggtggagatatgtggaacttctccaaccctgttgaagcgttccctgacactggcattctcttatccaaagagggaaagtgattaggtt

SEQ ID NO: 87057 - DNA, 120 bp, Artificial Sequence
  ENSG00000085491_47 (sequence is synthesized)
actatgagggccaacaactgttatatagttatatttcacttctcttttaatgtctttggtagttataggcctcttcagtttactgtttcttctagagtcagatttagtaagttacaattt

SEQ ID NO: 87058 - DNA, 120 bp, Artificial Sequence
  ENSG00000085491_48 (sequence is synthesized)
tttttgaaactgcctgttctgtccaaggttcataatactcaccgatgattttataacacttctgactgaatctgtaggtaggttctctatttcattcctcatatctatccttttctcccc

SEQ ID NO: 87059 - DNA, 120 bp, Artificial Sequence
  ENSG00000085491_49 (sequence is synthesized)
ttcaatcttgccaaagttttgtgtattttattcatactttgaaggaaccaacttttggtactttgtgctgattgtcccagaaatggcccagttggagttccccaccatgtccaatcattg

SEQ ID NO: 87060 - DNA, 120 bp, Artificial Sequence
  ENSG00000085491_50 (sequence is synthesized)
gctggaagcagcccaggaaagggacgaccttgctgcagtgcatcagcagatgccagggttagaggctagagagtggaagtcaactgtgttcctcacagtaggtgcctttgaagggagatc

SEQ ID NO: 87061 - DNA, 120 bp, Artificial Sequence
  ENSG00000085491_51 (sequence is synthesized)
tcagtggtacaactccatggtccctacaatatacaaaagctctttggagtgctcaatgatttttaagattgtaaagggatcctgagatcaaaaagcttgagaattgctgctgtatcacca

SEQ ID NO: 87062 - DNA, 120 bp, Artificial Sequence
  ENSG00000085491_52 (sequence is synthesized)
tttttacgtaactgcatcatattctgttatatgtttgtgtcatagtatatgttaccaattctttttaaatcaccttttactttattgatagtttaaaaacgattgtaagtgaaattgcaa

SEQ ID NO: 87063 - DNA, 120 bp, Artificial Sequence
  ENSG00000085511_0 (sequence is synthesized)
gctcggccggtcgccgtttccaagatggccgcggcgcgcacggctcctgcggcggggtagaggcggaggcggagtcgagtcactcccgcacttcggggctccggtgccccgcgccaggct

SEQ ID NO: 87064 - DNA, 120 bp, Artificial Sequence
  ENSG00000085511_1 (sequence is synthesized)
gcagcttactgcccgccgcggccatgcggggctccgtgcacggatgagagaagccgctgccgcgctggtccctcctcccgcctttgccgtcacgcctgccgccgccatggaggagccgcc

SEQ ID NO: 87065 - DNA, 120 bp, Artificial Sequence
  ENSG00000085511_2 (sequence is synthesized)
gccaccgccgccgccgccaccaccgccaccggaacccgagaccgagtcagaacccgagtgctgcttggcggcgaggcaagagggcacattgggagattcagcttgcaagagtcctgaatc

SEQ ID NO: 87066 - DNA, 120 bp, Artificial Sequence
  ENSG00000085511_3 (sequence is synthesized)
tgatctagaagacttctccgatgaaacaaatacagagaatctttatggtacctctccccccagcacacctcgacagatgaaacgcatgtcaaccaaacatcagaggaataatgtggggag

SEQ ID NO: 87067 - DNA, 120 bp, Artificial Sequence
  ENSG00000085511_4 (sequence is synthesized)
gccagccagtcggtctaatttgaaagaaaaaatgaatgcaccaaatcagcctccacataaagacactggaaaaacagtggagaatgtggaagaatacagctataagcaggagaaaaagat

SEQ ID NO: 87068 - DNA, 120 bp, Artificial Sequence
  ENSG00000085511_5 (sequence is synthesized)
ccgagcagctcttagaacaacagagcgtgatcgtaaaaaaaatgtacagtgctcattcatgttagactcagtgggtggatctttgccaaaaaaatcaattccagatgtggatctcaataa

SEQ ID NO: 87069 - DNA, 120 bp, Artificial Sequence
  ENSG00000085511_6 (sequence is synthesized)
gccttacctcagccttggctgtagcaatgctaagcttccagtatctgtgcccatgcctatagccagacctgcacgccagacttctaggactgactgtccagcagatcgtttaaagttttt

SEQ ID NO: 87070 - DNA, 120 bp, Artificial Sequence
  ENSG00000085511_7 (sequence is synthesized)
tgaaactttacgacttttgctaaagcttacctcagtctcaaagaaaaaagacagggagcaaagaggacaagaaaatacgtctggtttctggcttaaccgatctaacgaactgatctggtt

SEQ ID NO: 87071 - DNA, 120 bp, Artificial Sequence
  ENSG00000085511_8 (sequence is synthesized)
agagctacaagcctggcatgcaggacggacaattaacgaccaggacttctttttatatacagcccgtcaagccatcccagatattattaatgaaatccttactttcaaagtcgactatgg

SEQ ID NO: 87072 - DNA, 120 bp, Artificial Sequence
  ENSG00000085511_9 (sequence is synthesized)
gagcttcgcctttgttagagatagagctggttttaatggtacttcagtagaagggcagtgcaaagccactcctggaacaaagattgtaggttactcaacacatcatgagcatctccaacg

SEQ ID NO: 87073 - DNA, 120 bp, Artificial Sequence
  ENSG00000085511_10 (sequence is synthesized)
ccagagggtctcatttgagcaggtaaaacggataatggagctgctagagtacatagaagcactttatccatcattgcaggctcttcagaaggactatgaaaaatatgctgcaaaagactt

SEQ ID NO: 87074 - DNA, 120 bp, Artificial Sequence
  ENSG00000085511_11 (sequence is synthesized)
ccaggacagggtgcaggcactctgtttgtggttaaacatcacaaaagacttaaatcagaaattaaggattatgggcactgttttgggcatcaagaatttatcagacattggctggccagt

SEQ ID NO: 87075 - DNA, 120 bp, Artificial Sequence
  ENSG00000085511_12 (sequence is synthesized)
gtttgaaatcccttcccctcgaccatccaaaggtaatgagccggagtatgagggtgatgacacagaaggagaattaaaggagttggaaagtagtacggatgagagtgaagaagaacaaat

SEQ ID NO: 87076 - DNA, 120 bp, Artificial Sequence
  ENSG00000085511_13 (sequence is synthesized)
ctctgatcctagggtaccggaaatcagacagcccatagataacagcttcgacatccagtcgcgggactgcatatccaagaagcttgagaggctcgaatctgaggatgattctcttggctg

SEQ ID NO: 87077 - DNA, 120 bp, Artificial Sequence
  ENSG00000085511_14 (sequence is synthesized)
gggagcaccagactggagcacagaagcaggctttagtagacattgtctgacttctatttatagaccatttgtagacaaagcactgaagcagatggggttaagaaagttaattttaagact

SEQ ID NO: 87078 - DNA, 120 bp, Artificial Sequence
  ENSG00000085511_15 (sequence is synthesized)
tcacaagctaatggatggttccttgcaaagggcacgtatagcattggtaaagaacgatcgtccagtggagttttctgaatttccagatcccatgtggggttcagattatgtgcagttgtc

SEQ ID NO: 87079 - DNA, 120 bp, Artificial Sequence
  ENSG00000085511_16 (sequence is synthesized)
aaggacaccaccttcatctgaggagaaatgcagtgctgtgtcgtgggaggagctgaaggccatggatttaccttcattcgaacctgccttcctagttctctgccgagtccttctgaatgt

SEQ ID NO: 87080 - DNA, 120 bp, Artificial Sequence
  ENSG00000085511_17 (sequence is synthesized)
catacatgagtgtctgaagttaagattggagcagagacctgctggagaaccatctctcttgagtattaagcagctggtgagagagtgtaaggaggtcctgaagggcggcctgctgatgaa

SEQ ID NO: 87081 - DNA, 120 bp, Artificial Sequence
  ENSG00000085511_18 (sequence is synthesized)
gcagtactaccagttcatgctgcaggaggttctggaggacttggagaagcccgactgcaacattgacgcttttgaagaggatctacataaaatgcttatggtgtattttgattacatgag

SEQ ID NO: 87082 - DNA, 120 bp, Artificial Sequence
  ENSG00000085511_19 (sequence is synthesized)
aagctggatccaaatgctacagcaattacctcaagcatcgcatagtttaaaaaatctgttagaagaagaatggaatttcaccaaagaaataactcattacatacggggaggagaagcaca

SEQ ID NO: 87083 - DNA, 120 bp, Artificial Sequence
  ENSG00000085511_20 (sequence is synthesized)
ggccgggaagcttttctgtgacattgcaggaatgctgctgaaatctacaggaagttttttagaatttggcttacaggagagctgtgctgaattttggactagtgcggatgacagcagtgc

SEQ ID NO: 87084 - DNA, 120 bp, Artificial Sequence
  ENSG00000085511_21 (sequence is synthesized)
ttccgacgaaatcaggaggtctgttatagagatcagtcgagccctgaaggagctcttccatgaagccagagaaagggcttccaaagcacttggatttgctaaaatgttgagaaaggacct

SEQ ID NO: 87085 - DNA, 120 bp, Artificial Sequence
  ENSG00000085511_22 (sequence is synthesized)
aacttgcaaatgtttgttccagacactcttgctgaggagaagagtattattttgcagttactcaatgcagctgcaggaaaggactgttcaaaagattcagatgacgtactcatcgatgcc

SEQ ID NO: 87086 - DNA, 120 bp, Artificial Sequence
  ENSG00000085511_23 (sequence is synthesized)
tatctgcttctgaccaagcacggtgatcgagcccgtgattcagaggacagctggggcacctgggaggcacagcctgtcaaagtcgtgcctcaggtggagactgttgacaccctgagaagc

SEQ ID NO: 87087 - DNA, 120 bp, Artificial Sequence
  ENSG00000085511_24 (sequence is synthesized)
atgcaggtggataatcttttactagttgtcatgcagtctgcgcatctcacaattcagagaaaagctttccagcagtccattgagggacttatgactctgtgccaggagcagacatccagt

SEQ ID NO: 87088 - DNA, 120 bp, Artificial Sequence
  ENSG00000085511_25 (sequence is synthesized)
cagccggtcatcgccaaagctttgcagcagctgaagaatgatgcattggagctatgcaacaggataagcaatgccattgaccgcgtggaccacatgttcacatcagaatttgatgctgag

SEQ ID NO: 87089 - DNA, 120 bp, Artificial Sequence
  ENSG00000085511_26 (sequence is synthesized)
gttgatgaatctgaatctgtcaccttgcaacagtactaccgagaagcaatgattcaggggtacaattttggatttgagtatcataaagaagttgttcgtttgatgtctggggagtttaga

SEQ ID NO: 87090 - DNA, 120 bp, Artificial Sequence
  ENSG00000085511_27 (sequence is synthesized)
cagaagataggagacaaatatataagctttgcccggaagtggatgaattatgtcctgactaaatgtgagagtggtagaggtacaagacccaggtgggcgactcaaggatttgattttcta

SEQ ID NO: 87091 - DNA, 120 bp, Artificial Sequence
  ENSG00000085511_28 (sequence is synthesized)
caagcaattgaacctgcctttatttcagctttaccagaagatgacttcttgagtttacaagccttgatgaatgaatgcattggccatgtcataggaaaaccacacagtcctgttacaggt

SEQ ID NO: 87092 - DNA, 120 bp, Artificial Sequence
  ENSG00000085511_29 (sequence is synthesized)
ttgtaccttgccattcatcggaacagcccccgtcctatgaaggtacctcgatgccatagtgaccctcctaacccacacctcattatccccactccagagggattcagcactcggagcatg

SEQ ID NO: 87093 - DNA, 120 bp, Artificial Sequence
  ENSG00000085511_30 (sequence is synthesized)
gctgctgctgctgctgctgctgctgttgctgccagtcggcccagcccctctggtggtgactctgtgctgcccaaatccatcagcagtgcccatgataccaggggttccagcgttcctgaa

SEQ ID NO: 87094 - DNA, 120 bp, Artificial Sequence
  ENSG00000085511_31 (sequence is synthesized)
agtgcccatgataccaggggttccagcgttcctgaaaatgatcgattggcttccatagctgctgaattgcagtttaggtccctgagtcgtcactcaagccccacggaggagcgagatgaa

SEQ ID NO: 87095 - DNA, 120 bp, Artificial Sequence
  ENSG00000085511_32 (sequence is synthesized)
ccagcatatccaagaggagattcaagtgggtccacaagaagaagttgggaacttcggacactaatcagccagagtaaagatactgcttctaaactaggacccatagaagctatccagaag

SEQ ID NO: 87096 - DNA, 120 bp, Artificial Sequence
  ENSG00000085511_33 (sequence is synthesized)
tcagtccgattgtttgaagaaaagaggtaccgagaaatgaggagaaagaatatcattggtcaagtttgtgatacgcctaagtcctatgataatgttatgcacgttggcttgaggaaggtg

SEQ ID NO: 87097 - DNA, 120 bp, Artificial Sequence
  ENSG00000085511_34 (sequence is synthesized)
accttcaaatggcaaagaggaaacaaaattggagaaggccagtatgggaaggtgtacacctgcatcagcgtcgacaccggggagctgatggccatgaaagagattcgatttcaacctaat

SEQ ID NO: 87098 - DNA, 120 bp, Artificial Sequence
  ENSG00000085511_35 (sequence is synthesized)
gaccataagactatcaaggaaactgcagacgaattgaaaatattcgaaggcatcaaacaccccaatctggttcggtattttggtgtggagctccatagagaagaaatgtacatcttcatg

SEQ ID NO: 87099 - DNA, 120 bp, Artificial Sequence
  ENSG00000085511_36 (sequence is synthesized)
gagtactgcgatgaggggactttagaagaggtgtcaaggctgggacttcaggaacatgtgattaggctgtattcaaagcagatcaccattgcgatcaacgtcctccatgagcatggcata

SEQ ID NO: 87100 - DNA, 120 bp, Artificial Sequence
  ENSG00000085511_37 (sequence is synthesized)
gtccaccgtgacattaaaggtgccaatatcttccttacctcatctggattaatcaaactgggagattttggatgttcagtaaagctcaaaaacaatgcccagaccatgcctggtgaagtg

SEQ ID NO: 87101 - DNA, 120 bp, Artificial Sequence
  ENSG00000085511_38 (sequence is synthesized)
aacagcaccctggggacagcagcatacatggcacctgaagtcatcactcgtgccaaaggagagggccatgggcgtgcggccgacatctggagtctggggtgtgttgtcatagagatggtg

SEQ ID NO: 87102 - DNA, 120 bp, Artificial Sequence
  ENSG00000085511_39 (sequence is synthesized)
actggcaagaggccttggcatgagtatgagcacaactttcaaattatgtataaagtggggatgggacataagccaccaatccctgaaagattaagccctgaaggaaaggacttcctttct

SEQ ID NO: 87103 - DNA, 120 bp, Artificial Sequence
  ENSG00000085511_40 (sequence is synthesized)
cactgccttgagagtgacccaaagatgagatggaccgccagccagctcctcgaccattcgtttgtcaaggtttgcacagatgaagaatgaagcctagtagaatatggacttggaaaattc

SEQ ID NO: 87104 - DNA, 120 bp, Artificial Sequence
  ENSG00000085511_41 (sequence is synthesized)
tcttaatcactactgtatgtaatatttacataaagactgtgctgagaagcagtataagcctttttaaccttccaagactgaagactgcacaggtgacaagcgtcacttctcctgctgctc

SEQ ID NO: 87105 - DNA, 120 bp, Artificial Sequence
  ENSG00000085511_42 (sequence is synthesized)
ctgtttgtctgatgtggcaaaaggccctctggagggctggtggccacgaggttaaagaagctgcatgttaagtgccattactactgtacacggaccatcgcctctgtctcctccgtgtct

SEQ ID NO: 87106 - DNA, 120 bp, Artificial Sequence
  ENSG00000085511_43 (sequence is synthesized)
cgcgcgactgagaaccgtgacatcagcgtagtgttttgacctttctaggttcaaaagaagttgtagtgttatcaggcgtcccataccttgtttttaatctcctgtttgttgagtgcactg

SEQ ID NO: 87107 - DNA, 120 bp, Artificial Sequence
  ENSG00000085511_44 (sequence is synthesized)
actgtgaaacctttaccttttttgttgttgttggcaagctgcaggtttgtaatgcaaaaggctgattactgaaatttaagaaaaaggttcttttttcaataaatggtttattttaggaaa

SEQ ID NO: 87108 - DNA, 120 bp, Artificial Sequence
  ENSG00000085511_45 (sequence is synthesized)
atatatgtaagatgtacattggttccatccagaaagacaggacaactcgaagcagggatggggcttgcaggtcacagttttctgaatttccagatcccatgtggggttcagattatgtgc

SEQ ID NO: 87109 - DNA, 120 bp, Artificial Sequence
  ENSG00000085511_46 (sequence is synthesized)
tccccccagcacacctcgacagatgaaacgcatgtcaaccaaacatcagaggaataatgtggggaggccagccagtcggtctaatttgaaaggtgtccgtcagatctcccatgctgtttc

SEQ ID NO: 87110 - DNA, 120 bp, Artificial Sequence
  ENSG00000085511_47 (sequence is synthesized)
atgtcgccagtgaccacaatctttttaacgtgtagacaacataaagaactcctttttattagggagataccacattttcatgtatctctaaaatgggttaaatcatttgtttagcttaca

SEQ ID NO: 87111 - DNA, 120 bp, Artificial Sequence
  ENSG00000085511_48 (sequence is synthesized)
ttatgtatgttttactccaggatttttaaaaatgttttttgatggagaaaactgttaatatataatagggctttactgacttttaaaaagtgacattttccataatatttgtatatgtaa

SEQ ID NO: 87112 - DNA, 120 bp, Artificial Sequence
  ENSG00000085511_49 (sequence is synthesized)
gaatctagaaactattgtaggttttttagaggcaaggttccctctgagttttttgaagatttaagtaggaagatataaaacacggatcgtctggttggagtttatggctgctggaacctg

SEQ ID NO: 87113 - DNA, 120 bp, Artificial Sequence
  ENSG00000085511_50 (sequence is synthesized)
taaatgctaccatacttcattataccattcacttaaaaatatatactaaatgactttaataaactaatgccatatttatttgaggttctttgattattcgaattacaattttaacacatt

SEQ ID NO: 87114 - DNA, 120 bp, Artificial Sequence
  ENSG00000085511_51 (sequence is synthesized)
ccctatttagttttaatttttactctttatgggttcattctggttgctgaacatttcactttattctggaaaagcacctcattaactttgttctttaatatattaagcttcctgctcttt

SEQ ID NO: 87115 - DNA, 120 bp, Artificial Sequence
  ENSG00000085511_52 (sequence is synthesized)
tgcacttttgcttggctactgcttgagaaacctttaggtattcccttccattttcttactgagagatttggaatcttttggaccatgaaatgattttagtactttaaatgtaattaagta

SEQ ID NO: 87116 - DNA, 120 bp, Artificial Sequence
  ENSG00000085511_53 (sequence is synthesized)
cataaatataatttgatggtaactttaaagatcagcaagatttggttaataacagttttattcaccctgggcttaagttatggagcttttcacatgtcagtaacatttcaatagtgttgt

SEQ ID NO: 87117 - DNA, 120 bp, Artificial Sequence
  ENSG00000085511_54 (sequence is synthesized)
gtttttatttctgttgttaatataagacaaggttttatgcaggcaggtgctctcaggctcgggtgttggctatggagagatgaaaatggagccctccttccagactctagagctctaaca

SEQ ID NO: 87118 - DNA, 120 bp, Artificial Sequence
  ENSG00000085511_55 (sequence is synthesized)
gactccagaggacggtctccacagcagcgctgttcacttagggggctgattctggtgggtctgtcctgtgcgttttccgctgcccactagatgccagtagcaccctcccaaaagtgtcta

SEQ ID NO: 87119 - DNA, 120 bp, Artificial Sequence
  ENSG00000085511_56 (sequence is synthesized)
atacattgctggaggcagagttgttcctggcaggcagagttgcccccagttgagaattattgctctagaaaaatctcgcagatctttcattttaagttctattgaattgatagctcaatt

SEQ ID NO: 87120 - DNA, 120 bp, Artificial Sequence
  ENSG00000085511_57 (sequence is synthesized)
actctttgtgtgaggaatcagtgagggcacagaatggagtcctgttctacatcacaggtcttctcatttcagagcacagtaactttgcctaattctcaggaaatctccatgagttacatc

SEQ ID NO: 87121 - DNA, 120 bp, Artificial Sequence
  ENSG00000085511_58 (sequence is synthesized)
agttttgtgattttttaaaaaatcctcatttagacctcagctaacagtggtgagaaccttgcttctgtcggtgctgcgtgcctgtgacagcccccggcccgcccccactttaccctgctg

SEQ ID NO: 87122 - DNA, 120 bp, Artificial Sequence
  ENSG00000085514_0 (sequence is synthesized)
accctggaggtgcactggtttggggaaggctcctggcccccacagccctcttcggagcctgagcccggctctcctcactcacctcaacccccaggcggcccctccacagggcccctctcc

SEQ ID NO: 87123 - DNA, 120 bp, Artificial Sequence
  ENSG00000085514_1 (sequence is synthesized)
tgcctggacggctctgctggtctccccgtcccctggagaagaacaaggccatgggtcggcccctgctgctgcccctactgcccttgctgctgccgccagcatttctgcagcctagtggct

SEQ ID NO: 87124 - DNA, 120 bp, Artificial Sequence
  ENSG00000085514_2 (sequence is synthesized)
ccacaggatctggtccaagctacctttatggggtcactcaaccaaaacacctctcagcctccatgggtggctctgtggaaatccccttctccttctattacccctgggagttagccacag

SEQ ID NO: 87125 - DNA, 120 bp, Artificial Sequence
  ENSG00000085514_3 (sequence is synthesized)
ctcccgacgtgagaatatcctggagacggggccacttccacaggcagtccttctacagcacaaggccgccttccattcacaaggattatgtgaaccggctctttctgaactggacagagg

SEQ ID NO: 87126 - DNA, 120 bp, Artificial Sequence
  ENSG00000085514_4 (sequence is synthesized)
gtcagaagagcggcttcctcaggatctccaacctgcagaagcaggaccagtctgtgtatttctgccgagttgagctggacacacggagctcagggaggcagcagtggcagtccatcgagg

SEQ ID NO: 87127 - DNA, 120 bp, Artificial Sequence
  ENSG00000085514_5 (sequence is synthesized)
aggctcagtagcacaaccaccacaaccggcctcagggtcacacagggcaaacgacgctcagactcttggcacataagtctggagactgctgtgggggtggcagtggctgtcactgtgctc

SEQ ID NO: 87128 - DNA, 120 bp, Artificial Sequence
  ENSG00000085514_6 (sequence is synthesized)
ggaatcatgattttgggactgatctgcctcctcaggtggaggagaaggaaaggtcagcagcggactaaagccacaaccccagccagggaacccttccaaaacacagaggagccatatgag

SEQ ID NO: 87129 - DNA, 120 bp, Artificial Sequence
  ENSG00000085514_7 (sequence is synthesized)
aatatcaggaatgaaggacaaaatacagatcccaagctaaatcccaaggatgacggcatcgtctatgcttcccttgccctctccagctccacctcacccagagcacctcccagccaccgt

SEQ ID NO: 87130 - DNA, 120 bp, Artificial Sequence
  ENSG00000085514_8 (sequence is synthesized)
cccctcaagagcccccagaacgagaccctgtactctgtcttaaaggcctaaccaatggacagccctctcaagactgaatggtgaggccaggtacagtggcgcacacctgtaatcccagct

SEQ ID NO: 87131 - DNA, 120 bp, Artificial Sequence
  ENSG00000085514_9 (sequence is synthesized)
actctgaagcctgaggcagaatcaagtgagcccaggagttcagggccagctttgataatggagcgagatgccatctctagttaaaaatatatattaacaataaagtaacaaatttaaaaa

SEQ ID NO: 87132 - DNA, 120 bp, Artificial Sequence
  ENSG00000085514_10 (sequence is synthesized)
tccccagcacctcagaccccacttcttctgacgacccctaagttctctctttggcccctaacacttcctcaggcctttgccacctctccccttttctcttccccttgtctccacaactga

SEQ ID NO: 87133 - DNA, 120 bp, Artificial Sequence
  ENSG00000085514_11 (sequence is synthesized)
tctgctttccccaaccatccccctcactgtcccctccagatccagccccgcccccactcctcaggcctcagcagctgctggaccctctaattatccttcattctttctccaaaatgaggc

SEQ ID NO: 87134 - DNA, 120 bp, Artificial Sequence
  ENSG00000085514_12 (sequence is synthesized)
catcttaaccactgtgttggttttggagcagatggaaagtggctccataatctaaatgaagcaagacagccttgaactttgatttcctacatatttccttaaatggccttttttgagaga

SEQ ID NO: 87135 - DNA, 120 bp, Artificial Sequence
  ENSG00000085514_13 (sequence is synthesized)
tttgggtttttctcaggccttctcttcctctttccttaattcctgcttgcttttctcacctctctgcataggtcagatttgttgtttttttcactaataaattgtattttcaattaattc

SEQ ID NO: 87136 - DNA, 120 bp, Artificial Sequence
  ENSG00000085552_0 (sequence is synthesized)
attgtgtagcggcgagagtggagccgagcggtgcggagcagatctggtggttctccggagagcagcttcctcgggtgttacatgagccaagccctcactgtacagaagagtgagagctga

SEQ ID NO: 87137 - DNA, 120 bp, Artificial Sequence
  ENSG00000085552_1 (sequence is synthesized)
aacctgttccctgagctgatcagaaggacatcccttggcccctccatctgggctcctgtggataggaggggctgggtgagcaggccagctgggctatggtgtggtgcctcggcctggccg

SEQ ID NO: 87138 - DNA, 120 bp, Artificial Sequence
  ENSG00000085552_2 (sequence is synthesized)
tcctcagcctggtcatcagccagggggctgacggtcgagggaagcctgaggtggtatcggtggtgggccgggctggggagagtgtggtgctgggctgtgacctgctgcccccggccggcc

SEQ ID NO: 87139 - DNA, 120 bp, Artificial Sequence
  ENSG00000085552_3 (sequence is synthesized)
ggccccccctgcatgtcatcgagtggctgcgctttggattcctgcttcccatcttcatccagttcggcctctactctccccgaattgaccctgattacgtgggacgagtccggctgcaga

SEQ ID NO: 87140 - DNA, 120 bp, Artificial Sequence
  ENSG00000085552_4 (sequence is synthesized)
agggggcctctctccagattgagggtctccgggtggaagaccagggctggtacgagtgccgcgtgttcttcctggaccagcacatccctgaagacgattttgctaacggctcctgggtgc

SEQ ID NO: 87141 - DNA, 120 bp, Artificial Sequence
  ENSG00000085552_5 (sequence is synthesized)
atctgacagtcaattcaccccctcaattccaggagacacctcctgctgtgttggaagtgcaggaactggagcctgtgaccctgcgttgtgtggcccgtggcagccccctgcctcatgtga

SEQ ID NO: 87142 - DNA, 120 bp, Artificial Sequence
  ENSG00000085552_6 (sequence is synthesized)
cgtggaagctccgaggaaaggaccttggccagggccagggccaggtgcaagtgcagaacgggacgctgcggatccgccgggtagagcgaggcagctctggggtctacacctgccaagcct

SEQ ID NO: 87143 - DNA, 120 bp, Artificial Sequence
  ENSG00000085552_7 (sequence is synthesized)
ccagcactgagggcagcgccacccacgccacccagctgctagtgctaggacccccagtcatcgtggtgccccccaagaacagcacagtcaatgcctcccaggatgtttcattggcctgcc

SEQ ID NO: 87144 - DNA, 120 bp, Artificial Sequence
  ENSG00000085552_8 (sequence is synthesized)
atgctgaggcataccctgctaacctcacctacagctggttccaggacaacatcaatgtcttccacattagccgcctgcagccccgggtgcggatcctggtggacgggagcctgcggctgc

SEQ ID NO: 87145 - DNA, 120 bp, Artificial Sequence
  ENSG00000085552_9 (sequence is synthesized)
tggccacccagcctgatgatgccggctgctacacctgtgtgcccagcaatggcctcctgcatccaccctcagcctctgcctacctcactgtgctctacccagcccaggtgacagctatgc

SEQ ID NO: 87146 - DNA, 120 bp, Artificial Sequence
  ENSG00000085552_10 (sequence is synthesized)
ctcctgagacacccctgcccataggcatgccgggggtgatccgctgcccggttcgtgccaaccccccactgctctttgtcagctggaccaaggatggaaaggccctgcagctggacaagt

SEQ ID NO: 87147 - DNA, 120 bp, Artificial Sequence
  ENSG00000085552_11 (sequence is synthesized)
tccctggctggtcccagggcacagaaggctcactgatcatcgccctggggaacgaggatgccctgggagaatactcctgcaccccctacaacagtcttggtaccgccgggccctctcctg

SEQ ID NO: 87148 - DNA, 120 bp, Artificial Sequence
  ENSG00000085552_12 (sequence is synthesized)
tgacccgcgtgctgctcaaggctcccccagcttttatagagcggcccaaggaagaatatttccaagaagtagggcgggagctgctcatcccctgctccgcccaaggggaccctcctcctg

SEQ ID NO: 87149 - DNA, 120 bp, Artificial Sequence
  ENSG00000085552_13 (sequence is synthesized)
ttgtctcttggaccaaggtgggccgggggctgcaaggccaggcccaggtggacagcaacagcagcctcatcctgcgaccattgaccaaggaggcccacgggcactgggaatgcagtgcca

SEQ ID NO: 87150 - DNA, 120 bp, Artificial Sequence
  ENSG00000085552_14 (sequence is synthesized)
gcaatgctgtggcccgagtggccacctccacgaacgtctacgtgctgggcactagccctcatgttgtcaccaatgtgtccgtggtggctttgcccaagggtgccaatgtctcctgggagc

SEQ ID NO: 87151 - DNA, 120 bp, Artificial Sequence
  ENSG00000085552_15 (sequence is synthesized)
ctggctttgatggtggttatctgcagagattcagtgtctggtacaccccactggccaagcgtcctgaccgaatgcaccatgactgggtgtccttggcagtgcctgtgggggctgctcacc

SEQ ID NO: 87152 - DNA, 120 bp, Artificial Sequence
  ENSG00000085552_16 (sequence is synthesized)
ctccggaagggcttcctaccacgccagctgcacccgggcttcccccaacagagataccgcctcccctgtcccctccgcggggtctggtggcagtgaggacaccccggggggtactcctgc

SEQ ID NO: 87153 - DNA, 120 bp, Artificial Sequence
  ENSG00000085552_17 (sequence is synthesized)
attgggatcccccagagctggtccctaagagactggatggctacgtcttggaaggccggcaaggctcccagggctgggaggtgctggacccggctgtggcaggcacagaaacagagctgc

SEQ ID NO: 87154 - DNA, 120 bp, Artificial Sequence
  ENSG00000085552_18 (sequence is synthesized)
tggtgccaggcctcatcaaggatgttctctacgagttccgcctcgtggccttcgcgggcagcttcgtcagcgaccccagcaacacggccaacgtctccacttccggtctggaggtctacc

SEQ ID NO: 87155 - DNA, 120 bp, Artificial Sequence
  ENSG00000085552_19 (sequence is synthesized)
cttcgcgcacgcagctgccgggcctcctgcctcagcccgtgctggccggcgtggtgggcggagtctgctttctgggagtggccgtccttgtgagcatcctggccggctgcctcctgaacc

SEQ ID NO: 87156 - DNA, 120 bp, Artificial Sequence
  ENSG00000085552_20 (sequence is synthesized)
ggcgcagggctgcccgccgccgccgcaagcgcctccgccaagatccacctcttatcttctctccgaccgggaagtcagctgcaccctctgctctgggctcaggcagtcctgacagcgtgg

SEQ ID NO: 87157 - DNA, 120 bp, Artificial Sequence
  ENSG00000085552_21 (sequence is synthesized)
cgaagctgaagctccagggatccccagtccccagcctgcgccagagtctgctctggggggatcctgccggaactcccagcccccacccggatcctccatctagccggggacccttacctc

SEQ ID NO: 87158 - DNA, 120 bp, Artificial Sequence
  ENSG00000085552_22 (sequence is synthesized)
tggagcccatttgccggggcccagacgggcgctttgtgatggggcccactgtggcggccccccaggaaaggtcaggccgggagcaggcagaacctcggactccagcccagcgtctggccc

SEQ ID NO: 87159 - DNA, 120 bp, Artificial Sequence
  ENSG00000085552_23 (sequence is synthesized)
ggtcctttgactgtagcagcagcagccccagtggggcaccccagcccctctgcattgaagacatcagccctgtggcaccccctccagcagccccacccagtcccttgccaggtcctggac

SEQ ID NO: 87160 - DNA, 120 bp, Artificial Sequence
  ENSG00000085552_24 (sequence is synthesized)
ccctgctccagtacctgagcctgcccttcttccgagagatgaatgtggatggggactggcccccgcttgaggagcccagccctgctgcacccccagattacatggatacccggcgctgtc

SEQ ID NO: 87161 - DNA, 120 bp, Artificial Sequence
  ENSG00000085552_25 (sequence is synthesized)
ccacctcatctttccttcgttctccagaaacccctcctgtatcccccagggaatcacttcctggggctgtggtaggggctggggccactgcagagcccccttacacagccctggctgact

SEQ ID NO: 87162 - DNA, 120 bp, Artificial Sequence
  ENSG00000085552_26 (sequence is synthesized)
ggacactgagggagcggctgctgccaggccttctccctgctgcccctcgaggcagcctcaccagccagagcagtgggcgaggcagcgcttcgttcctgcggcccccctccacagccccct

SEQ ID NO: 87163 - DNA, 120 bp, Artificial Sequence
  ENSG00000085552_27 (sequence is synthesized)
ctgcaggaggcagctacctcagccctgctccaggagacaccagcagctgggccagtggccctgagagatggccccgaagggagcatgtggtgacagtcagcaagaggaggaacacatctg

SEQ ID NO: 87164 - DNA, 120 bp, Artificial Sequence
  ENSG00000085552_28 (sequence is synthesized)
tggacgagaactatgagtgggactcagaattccctggggacatggaattgctggagactttgcacctgggcttggccagctcccggctcagacctgaagctgagccagagctaggtgtga

SEQ ID NO: 87165 - DNA, 120 bp, Artificial Sequence
  ENSG00000085552_29 (sequence is synthesized)
agactccagaggagggctgcctcctgaacactgcccatgttactggccctgaggcccgctgtgctgcccttcgggaggaattcctggccttccgccgccgccgagatgctactagggctc

SEQ ID NO: 87166 - DNA, 120 bp, Artificial Sequence
  ENSG00000085552_30 (sequence is synthesized)
ggctaccagcctatcgacagccagtcccccaccccgaacaggccactctgctgtgaacatccctgatgtgaggctgtgaaaaggcatatggacctgcaaaggaggcccccaaccagacag

SEQ ID NO: 87167 - DNA, 120 bp, Artificial Sequence
  ENSG00000085552_31 (sequence is synthesized)
acctagtttcaaacgagggcactgcccctgcctgcccctttggtgcccaggcacagaccctgatagtgggtttgggtcaccttggtatggaatgtatgtgctgaccccctaggtgagtct

SEQ ID NO: 87168 - DNA, 68 bp, Artificial Sequence
  ENSG00000085552_32 (sequence is synthesized)
cttggtatggaatgtatgtgctgaccccctaggtgagtctggggattggaacagggatcttaggtctg

SEQ ID NO: 87169 - DNA, 120 bp, Artificial Sequence
  ENSG00000085552_33 (sequence is synthesized)
aaagagtcaagaaggagaactgaagtttctttcgtgtgatgactgggaaattgtgtgtcccgggggaacacacacttcttaccaggtgctgtgtggggtagtgggttgagggcaggggca

SEQ ID NO: 87170 - DNA, 120 bp, Artificial Sequence
  ENSG00000085552_34 (sequence is synthesized)
aggaggcatccatccttaaagtgggcaccatctgggcagaggacagcaacactgtctggaaggccagggatggagctcgtgccttcctcttagggtggttgaggatagaccagcaacaga

SEQ ID NO: 87171 - DNA, 120 bp, Artificial Sequence
  ENSG00000085552_35 (sequence is synthesized)
ttctgggactttggtgatgggcctcaaagaggacacagtcattcccttgcagaaaccagggtcaagaggcaggaagtagtatagtacgtttatggaatcatggatcgtccaattgggtgg

SEQ ID NO: 87172 - DNA, 120 bp, Artificial Sequence
  ENSG00000085552_36 (sequence is synthesized)
gagccggagtgcctgcagggacatgaatggtgcagagaaagctggaaagacaggttagcatcaaaaggaagaactggatgccaagttactattgcctcattccaaggcaattgggatctt

SEQ ID NO: 87173 - DNA, 120 bp, Artificial Sequence
  ENSG00000085552_37 (sequence is synthesized)
ttgtctgcagagactataaatttttgaggcctagtattgcatcttttcatcatagtgtacctggggcttctacaacaatagtactcagtatatctttgttgaatatttaagaaaaaagtc

SEQ ID NO: 87174 - DNA, 120 bp, Artificial Sequence
  ENSG00000085552_38 (sequence is synthesized)
tacaggcagttggagccactggaatttgttgagcattggtgtgataggatcagagctgtgatcaggggttgagcttgcccagtggaatgtagcgggagatactggacataggaagagggg

SEQ ID NO: 87175 - DNA, 120 bp, Artificial Sequence
  ENSG00000085552_39 (sequence is synthesized)
ttctgaagctgctgaaatggcccaggtgagagttatggagtctgatttacagaggacatgaagatgaatgggctcatgctctgacaaaagggacttcccaggatgactggcttagtgagt

SEQ ID NO: 87176 - DNA, 120 bp, Artificial Sequence
  ENSG00000085552_40 (sequence is synthesized)
atttcaccagggggagtgagggaacgtgaggaggcagacttcagcaagaaggatggcgggccctttaatagagaaataggagctggttttgggtggaagactctgaacttagttgtggag

SEQ ID NO: 87177 - DNA, 120 bp, Artificial Sequence
  ENSG00000085552_41 (sequence is synthesized)
tgctgggaagagagccaggtgaagtcccagcaggcaggaagccccacgcggcccaactacaggggtggccattcacagtgtattttctgtgagtggcaccccctggagttgtgcagtcac

SEQ ID NO: 87178 - DNA, 120 bp, Artificial Sequence
  ENSG00000085552_42 (sequence is synthesized)
agcctcacactattgggaggggtccctctgcaggaaggaaaggaagcactggaaatcagagaggggtcaggcctagacatggagctgctggagtcttctgcacagctgtgggtttctcat

SEQ ID NO: 87179 - DNA, 120 bp, Artificial Sequence
  ENSG00000085552_43 (sequence is synthesized)
tccacctccttggctttcttctgcctttccattgtacgtgccagtatcttctgcttccttttttgcatctttaccagggggatgttgggtgttggggaggaacaaaagtgggagagggta

SEQ ID NO: 87180 - DNA, 120 bp, Artificial Sequence
  ENSG00000085552_44 (sequence is synthesized)
agaaggggtgtgcagtggccccagcctgaggccgttccagtatggcctgtgccttccctccacccctccaccttgttggtcctttcctcgcttgttcttcctagctctgctctgttgttc

SEQ ID NO: 87181 - DNA, 120 bp, Artificial Sequence
  ENSG00000085552_45 (sequence is synthesized)
agatggctggagatggtgctaaggccaggctgatgggggtggggtggggcagacacatggggaggggtttccaagtttgtttcccatggtggccacggcagcagctgcctgatgccatcc

SEQ ID NO: 87182 - DNA, 120 bp, Artificial Sequence
  ENSG00000085552_46 (sequence is synthesized)
cagaggtttctgcagaggtggtgctcgggaggtgggacatcagtcacacacatccagaagtaagatatcctgtttgccccaactctcactaaccttgaccgtgctgcctccctctctggg

SEQ ID NO: 87183 - DNA, 120 bp, Artificial Sequence
  ENSG00000085552_47 (sequence is synthesized)
gctctgggaggaagaatgttctgcagaggtttgtacatctctgagagtcctgcctaagcctgccagcccttactacaccaccattttcctccagcccctacccactggggaacagaaaca

SEQ ID NO: 87184 - DNA, 120 bp, Artificial Sequence
  ENSG00000085552_48 (sequence is synthesized)
gagccagagaggaattgagagatggagagagaatgaggtagagacaggcttggtgagtgtttagctagggggagtgagggagagtgaggtgagacatggcatgacagggagcacagagag

SEQ ID NO: 87185 - DNA, 120 bp, Artificial Sequence
  ENSG00000085552_49 (sequence is synthesized)
cagccattttgtgggagggagggtgtgggaaggagaaggctgtcagaggcagggtggggaggaactggagctgcctggagagatgaggggcgcctttggtgaggggtggctgcgtgtgtc

SEQ ID NO: 87186 - DNA, 120 bp, Artificial Sequence
  ENSG00000085552_50 (sequence is synthesized)
tcatcaaggtatgtgcgaaaggcgatacagagagaggcctcctaggggctctcctgcgtccttctccattccccaaactctatcttctcatcttgatttgagctcttcacctctgcgtcc

SEQ ID NO: 87187 - DNA, 120 bp, Artificial Sequence
  ENSG00000085563_0 (sequence is synthesized)
tattcagatattctccagattcctaaagattagagatcatttctcattctcctaggagtactcacttcaggaagcaaccagataaaagagaggtgcaacggaagccagaacattcctcct

SEQ ID NO: 87188 - DNA, 120 bp, Artificial Sequence
  ENSG00000085563_1 (sequence is synthesized)
ggaaattcaacctgtttcgcagtttctcgaggaatcagcattcagtcaatccgggccgggagcagtcatctgtggtgaggctgattggctgggcaggaacagcgccggggcgtgggctga

SEQ ID NO: 87189 - DNA, 120 bp, Artificial Sequence
  ENSG00000085563_2 (sequence is synthesized)
gcacagccgcttcgctctctttgccacaggaagcctgagctcattcgagtagcggctcttccaagctcaaagaagcagaggccgctgttcgtttcctttaggtctttccactaaagtcgg

SEQ ID NO: 87190 - DNA, 120 bp, Artificial Sequence
  ENSG00000085563_3 (sequence is synthesized)
agtatcttcttccaaaatttcacgtcttggtggccgttccaaggagcgcgaggtcggaatggatcttgaaggggaccgcaatggaggagcaaagaagaagaacttttttaaactgaacaa

SEQ ID NO: 87191 - DNA, 120 bp, Artificial Sequence
  ENSG00000085563_4 (sequence is synthesized)
taaaagtgaaaaagataagaaggaaaagaaaccaactgtcagtgtattttcaatgtttcgctattcaaattggcttgacaagttgtatatggtggtgggaactttggctgccatcatcca

SEQ ID NO: 87192 - DNA, 120 bp, Artificial Sequence
  ENSG00000085563_5 (sequence is synthesized)
tggggctggacttcctctcatgatgctggtgtttggagaaatgacagatatctttgcaaatgcaggaaatttagaagatctgatgtcaaacatcactaatagaagtgatatcaatgatac

SEQ ID NO: 87193 - DNA, 120 bp, Artificial Sequence
  ENSG00000085563_6 (sequence is synthesized)
agggttcttcatgaatctggaggaagacatgaccaggtatgcctattattacagtggaattggtgctggggtgctggttgctgcttacattcaggtttcattttggtgcctggcagctgg

SEQ ID NO: 87194 - DNA, 120 bp, Artificial Sequence
  ENSG00000085563_7 (sequence is synthesized)
aagacaaatacacaaaattagaaaacagttttttcatgctataatgcgacaggagataggctggtttgatgtgcacgatgttggggagcttaacacccgacttacagatgatgtctccaa

SEQ ID NO: 87195 - DNA, 120 bp, Artificial Sequence
  ENSG00000085563_8 (sequence is synthesized)
gattaatgaaggaattggtgacaaaattggaatgttctttcagtcaatggcaacatttttcactgggtttatagtaggatttacacgtggttggaagctaacccttgtgattttggccat

SEQ ID NO: 87196 - DNA, 120 bp, Artificial Sequence
  ENSG00000085563_9 (sequence is synthesized)
cagtcctgttcttggactgtcagctgctgtctgggcaaagatactatcttcatttactgataaagaactcttagcgtatgcaaaagctggagcagtagctgaagaggtcttggcagcaat

SEQ ID NO: 87197 - DNA, 120 bp, Artificial Sequence
  ENSG00000085563_10 (sequence is synthesized)
tagaactgtgattgcatttggaggacaaaagaaagaacttgaaaggtacaacaaaaatttagaagaagctaaaagaattgggataaagaaagctattacagccaatatttctataggtgc

SEQ ID NO: 87198 - DNA, 120 bp, Artificial Sequence
  ENSG00000085563_11 (sequence is synthesized)
tgctttcctgctgatctatgcatcttatgctctggccttctggtatgggaccaccttggtcctctcaggggaatattctattggacaagtactcactgtattcttttctgtattaattgg

SEQ ID NO: 87199 - DNA, 120 bp, Artificial Sequence
  ENSG00000085563_12 (sequence is synthesized)
ggcttttagtgttggacaggcatctccaagcattgaagcatttgcaaatgcaagaggagcagcttatgaaatcttcaagataattgataataagccaagtattgacagctattcgaagag

SEQ ID NO: 87200 - DNA, 120 bp, Artificial Sequence
  ENSG00000085563_13 (sequence is synthesized)
tgggcacaaaccagataatattaagggaaatttggaattcagaaatgttcacttcagttacccatctcgaaaagaagttaagatcttgaagggtctgaacctgaaggtgcagagtgggca

SEQ ID NO: 87201 - DNA, 120 bp, Artificial Sequence
  ENSG00000085563_14 (sequence is synthesized)
gacggtggccctggttggaaacagtggctgtgggaagagcacaacagtccagctgatgcagaggctctatgaccccacagaggggatggtcagtgttgatggacaggatattaggaccat

SEQ ID NO: 87202 - DNA, 120 bp, Artificial Sequence
  ENSG00000085563_15 (sequence is synthesized)
aaatgtaaggtttctacgggaaatcattggtgtggtgagtcaggaacctgtattgtttgccaccacgatagctgaaaacattcgctatggccgtgaaaatgtcaccatggatgagattga

SEQ ID NO: 87203 - DNA, 120 bp, Artificial Sequence
  ENSG00000085563_16 (sequence is synthesized)
gaaagctgtcaaggaagccaatgcctatgactttatcatgaaactgcctcataaatttgacaccctggttggagagagaggggcccagttgagtggtgggcagaagcagaggatcgccat

SEQ ID NO: 87204 - DNA, 120 bp, Artificial Sequence
  ENSG00000085563_17 (sequence is synthesized)
tgcacgtgccctggttcgcaaccccaagatcctcctgctggatgaggccacgtcagccttggacacagaaagcgaagcagtggttcaggtggctctggataaggccagaaaaggtcggac

SEQ ID NO: 87205 - DNA, 120 bp, Artificial Sequence
  ENSG00000085563_18 (sequence is synthesized)
caccattgtgatagctcatcgtttgtctacagttcgtaatgctgacgtcatcgctggtttcgatgatggagtcattgtggagaaaggaaatcatgatgaactcatgaaagagaaaggcat

SEQ ID NO: 87206 - DNA, 120 bp, Artificial Sequence
  ENSG00000085563_19 (sequence is synthesized)
gccttggaaatgtcttcaaatgattcaagatccagtctaataagaaaaagatcaactcgtaggagtgtccgtggatcacaagcccaagacagaaagcttagtaccaaagaggctctggat

SEQ ID NO: 87207 - DNA, 120 bp, Artificial Sequence
  ENSG00000085563_20 (sequence is synthesized)
gaaagtatacctccagtttccttttggaggattatgaagctaaatttaactgaatggccttattttgttgttggtgtattttgtgccattataaatggaggcctgcaaccagcatttgca

SEQ ID NO: 87208 - DNA, 120 bp, Artificial Sequence
  ENSG00000085563_21 (sequence is synthesized)
ataatattttcaaagattataggggtttttacaagaattgatgatcctgaaacaaaacgacagaatagtaacttgttttcactattgtttctagcccttggaattatttcttttattaca

SEQ ID NO: 87209 - DNA, 120 bp, Artificial Sequence
  ENSG00000085563_22 (sequence is synthesized)
tttttccttcagggtttcacatttggcaaagctggagagatcctcaccaagcggctccgatacatggttttccgatccatgctcagacaggatgtgagttggtttgatgaccctaaaaac

SEQ ID NO: 87210 - DNA, 120 bp, Artificial Sequence
  ENSG00000085563_23 (sequence is synthesized)
accactggagcattgactaccaggctcgccaatgatgctgctcaagttaaaggggctataggttccaggcttgctgtaattacccagaatatagcaaatcttgggacaggaataattata

SEQ ID NO: 87211 - DNA, 120 bp, Artificial Sequence
  ENSG00000085563_24 (sequence is synthesized)
tccttcatctatggttggcaactaacactgttactcttagcaattgtacccatcattgcaatagcaggagttgttgaaatgaaaatgttgtctggacaagcactgaaagataagaaagaa

SEQ ID NO: 87212 - DNA, 120 bp, Artificial Sequence
  ENSG00000085563_25 (sequence is synthesized)
ctagaaggttctgggaagatcgctactgaagcaatagaaaacttccgaaccgttgtttctttgactcaggagcagaagtttgaacatatgtatgctcagagtttgcaggtaccatacaga

SEQ ID NO: 87213 - DNA, 120 bp, Artificial Sequence
  ENSG00000085563_26 (sequence is synthesized)
aactctttgaggaaagcacacatctttggaattacattttccttcacccaggcaatgatgtatttttcctatgctggatgtttccggtttggagcctacttggtggcacataaactcatg

SEQ ID NO: 87214 - DNA, 120 bp, Artificial Sequence
  ENSG00000085563_27 (sequence is synthesized)
agctttgaggatgttctgttagtattttcagctgttgtctttggtgccatggccgtggggcaagtcagttcatttgctcctgactatgccaaagccaaaatatcagcagcccacatcatc

SEQ ID NO: 87215 - DNA, 120 bp, Artificial Sequence
  ENSG00000085563_28 (sequence is synthesized)
atgatcattgaaaaaacccctttgattgacagctacagcacggaaggcctaatgccgaacacattggaaggaaatgtcacatttggtgaagttgtattcaactatcccacccgaccggac

SEQ ID NO: 87216 - DNA, 120 bp, Artificial Sequence
  ENSG00000085563_29 (sequence is synthesized)
atcccagtgcttcagggactgagcctggaggtgaagaagggccagacgctggctctggtgggcagcagtggctgtgggaagagcacagtggtccagctcctggagcggttctacgacccc

SEQ ID NO: 87217 - DNA, 120 bp, Artificial Sequence
  ENSG00000085563_30 (sequence is synthesized)
ttggcagggaaagtgctgcttgatggcaaagaaataaagcgactgaatgttcagtggctccgagcacacctgggcatcgtgtcccaggagcccatcctgtttgactgcagcattgctgag

SEQ ID NO: 87218 - DNA, 120 bp, Artificial Sequence
  ENSG00000085563_31 (sequence is synthesized)
aacattgcctatggagacaacagccgggtggtgtcacaggaagagattgtgagggcagcaaaggaggccaacatacatgccttcatcgagtcactgcctaataaatatagcactaaagta

SEQ ID NO: 87219 - DNA, 120 bp, Artificial Sequence
  ENSG00000085563_32 (sequence is synthesized)
ggagacaaaggaactcagctctctggtggccagaaacaacgcattgccatagctcgtgcccttgttagacagcctcatattttgcttttggatgaagccacgtcagctctggatacagaa

SEQ ID NO: 87220 - DNA, 120 bp, Artificial Sequence
  ENSG00000085563_33 (sequence is synthesized)
agtgaaaaggttgtccaagaagccctggacaaagccagagaaggccgcacctgcattgtgattgctcaccgcctgtccaccatccagaatgcagacttaatagtggtgtttcagaatggc

SEQ ID NO: 87221 - DNA, 120 bp, Artificial Sequence
  ENSG00000085563_34 (sequence is synthesized)
agagtcaaggagcatggcacgcatcagcagctgctggcacagaaaggcatctatttttcaatggtcagtgtccaggctggaacaaagcgccagtgaactctgactgtatgagatgttaaa

SEQ ID NO: 87222 - DNA, 120 bp, Artificial Sequence
  ENSG00000085563_35 (sequence is synthesized)
tactttttaatatttgtttagatatgacatttattcaaagttaaaagcaaacacttacagaattatgaagaggtatctgtttaacatttcctcagtcaagttcagagtcttcagagactt

SEQ ID NO: 87223 - DNA, 120 bp, Artificial Sequence
  ENSG00000085563_36 (sequence is synthesized)
cgtaattaaaggaacagagtgagagacatcatcaagtggagagaaatcatagtttaaactgcattataaattttataacagaattaaagtagattttaaaagataaaatgtgtaattttg

SEQ ID NO: 87224 - DNA, 120 bp, Artificial Sequence
  ENSG00000085563_37 (sequence is synthesized)
tttatattttcccatttggactgtaactgactgccttgctaaaagattatagaagtagcaaaaagtattgaaatgtttgcataaagtgtctataataaaactaaactttcatgtgactgg

SEQ ID NO: 87225 - DNA, 120 bp, Artificial Sequence
  ENSG00000085563_38 (sequence is synthesized)
tgggaatggttaagcagtttaaataattcctgttgtatatgtctattcacattgggtcttacagaaccatctggcttcattcttcttggacttgatcctgctgattcttgcatttccaca

SEQ ID NO: 87226 - DNA, 120 bp, Artificial Sequence
  ENSG00000085563_39 (sequence is synthesized)
gcaaccagataaaagatacatatagaacagactgcagcagagaggcaaatctttaatgttgtcagagtatagacaagttggtgaaatggctacatgagagcggaggacaagaaggtgcag

SEQ ID NO: 87227 - DNA, 120 bp, Artificial Sequence
  ENSG00000085563_40 (sequence is synthesized)
ataatccatttaagtcttagcttctatttctgcaaaggagaagtttgaattagtcaatcttccttccagatccataactcagtttgataaattacttagtatctttttctacagagaaaa

SEQ ID NO: 87228 - DNA, 120 bp, Artificial Sequence
  ENSG00000085563_41 (sequence is synthesized)
tgctcatacataataataaatatgtaatcataaaattattttcattagtctgttttatagaattcaaattaatcaccactatttactcttgtgcctcttggtgatcggtgctgtctgtta

SEQ ID NO: 87229 - DNA, 120 bp, Artificial Sequence
  ENSG00000085563_42 (sequence is synthesized)
gatattctactttcagcattctgaagtcatggaaattcttactgtagaaactcaataaacttacaagtagacctttactttttagttcattactgataaaataatgaatatagtctcatg

SEQ ID NO: 87230 - DNA, 120 bp, Artificial Sequence
  ENSG00000085563_43 (sequence is synthesized)
atgcgagctagaccctgcggtgatcagcagtcacattgcacatctttctgatgttgccctttcaattacaaatgtatgaaagtcacacttactttttattccaggtcagtgttgatggac

SEQ ID NO: 87231 - DNA, 120 bp, Artificial Sequence
  ENSG00000085644_0 (sequence is synthesized)
gggagctcgcggcggaagtgggatctcctgggccgtagtgggcgttgtgtgtttcgggggcgggggcgggggcgggggccggggcggggacggggcctctggccgcctggctccaacatc

SEQ ID NO: 87232 - DNA, 120 bp, Artificial Sequence
  ENSG00000085644_1 (sequence is synthesized)
gcctggctccaacatcaagcaccgggctccgagtggccgggatcagcgccccgaggcagaggccggagggcgcgcgcactgctaggaagtgctggtcccccgcgccgctctgccagcttg

SEQ ID NO: 87233 - DNA, 120 bp, Artificial Sequence
  ENSG00000085644_2 (sequence is synthesized)
gtcccccggcagacgcccctgtacgatcgccgctcgccccgcgggcgaggctgcggtggacagcgcggggctccggctggctcgccttcccgcctgccgtgtcctgctgagcgaccctgg

SEQ ID NO: 87234 - DNA, 120 bp, Artificial Sequence
  ENSG00000085644_3 (sequence is synthesized)
agtacacatccagatgccagcccagctaccacaggggatccctctgggagactgaaagtacaggttctggggcccaggttgaagccgaccaaccctgagcctcaggccaggggaatggca

SEQ ID NO: 87235 - DNA, 120 bp, Artificial Sequence
  ENSG00000085644_4 (sequence is synthesized)
gcccccttggaggcccaggaccaggcccctggggagggagaagggcttctgattgtgaaagtggaagattcctcctgggaacaggaatctgcccagcatgaggatggcagggattccgaa

SEQ ID NO: 87236 - DNA, 120 bp, Artificial Sequence
  ENSG00000085644_5 (sequence is synthesized)
gcctgccgccagcgcttccggcaattctgctacggggatgtgcatgggcctcatgaggccttcagccagctctgggagctctgctgccgctggctgcggcccgagctgcgtaccaaggag

SEQ ID NO: 87237 - DNA, 120 bp, Artificial Sequence
  ENSG00000085644_6 (sequence is synthesized)
cagatcctggagctgctggtgctggagcagttcctgacagtgctgccaggggagatccagggctgggtgcgtgagcagcacccgggaagcggtgaggaggctgtcgccttggtggaggac

SEQ ID NO: 87238 - DNA, 120 bp, Artificial Sequence
  ENSG00000085644_7 (sequence is synthesized)
ctacagaagcagccagtgaaagcctggcgacaggatgtgccctcggaggaggcggaacccgaggctgcaggccggggatcccaggccacggggcctcccccgacggtgggggcacggagg

SEQ ID NO: 87239 - DNA, 120 bp, Artificial Sequence
  ENSG00000085644_8 (sequence is synthesized)
cggccgtctgttccccaggagcagcacagccatagcgcccagcctcctgctcttcttaaagagggtcgtcccggagagacgacggacacctgctttgtctctggggtccatggacctgtg

SEQ ID NO: 87240 - DNA, 120 bp, Artificial Sequence
  ENSG00000085644_9 (sequence is synthesized)
gcattgggagacatcccattctatttctcccgggaagaatggggcaccctggaccctgctcagcgggatctcttctgggacataaagcgggagaactcccggaacaccaccctgggtttt

SEQ ID NO: 87241 - DNA, 120 bp, Artificial Sequence
  ENSG00000085644_10 (sequence is synthesized)
gggctcaaaggccaaagtgagaagtccctgctgcaggagatggtgccggtggtgccaggccagacaggcagcgacgtgactgtgtcctggagccccgaggaggctgaggcctgggagagc

SEQ ID NO: 87242 - DNA, 120 bp, Artificial Sequence
  ENSG00000085644_11 (sequence is synthesized)
agggcggccctgggcccagtggtgggcgcgcgacgggggcggccacccactcgccggcgccagttccgggacctggcagccgagaagccgcacagctgcgggcagtgtggaaagcgcttc

SEQ ID NO: 87243 - DNA, 120 bp, Artificial Sequence
  ENSG00000085644_12 (sequence is synthesized)
ggaaagcgcttccgctggggctcggacctggcgcggcaccagcgcacgcacacgggcgagaagccacacaagtgccctgagtgcgacaagagcttccgcagctcctcggacctggtgcgc

SEQ ID NO: 87244 - DNA, 120 bp, Artificial Sequence
  ENSG00000085644_13 (sequence is synthesized)
ctacctggccgaccaccagcgcatacacacgggcgagaagcctttcggctgcagcgactgcggcaagagcttctcgctgcgctcctacctgctggaccatcggcgtgtgcacaccggtga

SEQ ID NO: 87245 - DNA, 120 bp, Artificial Sequence
  ENSG00000085644_14 (sequence is synthesized)
gcggcccttcggctgcggagagtgcgacaagagcttcaagcagcgcgcgcacctcatcgcgcatcagagcctgcacgccaagatggcccagcccgtggggtgagcagctggcttggccgg

SEQ ID NO: 87246 - DNA, 120 bp, Artificial Sequence
  ENSG00000085644_15 (sequence is synthesized)
aaacccgggggaggcccagccacggcacatcctgctttgttcaccactgggactctccttccatctgtggccacctcccgggctgtccgagggaccccagggtacctcacactcggagct

SEQ ID NO: 87247 - DNA, 120 bp, Artificial Sequence
  ENSG00000085644_16 (sequence is synthesized)
cgcctgccctgcttggctctgaggacctgcccagcgctcaaagggaacggaagccttcccctcccgcccccgatcttgtcctctttcccccttctgcgcctagcgttcctcttcccctct

SEQ ID NO: 87248 - DNA, 120 bp, Artificial Sequence
  ENSG00000085644_17 (sequence is synthesized)
agtttcctggagccccaacacattcctggcagggacagcagggtggcaaggactcaggtctaggtcccttcccagaagcccccgagcctcatttgactgtgtggctctttggcccccacc

SEQ ID NO: 87249 - DNA, 120 bp, Artificial Sequence
  ENSG00000085644_18 (sequence is synthesized)
ctgtggggtgggtccatgggtcaggcctctgccctaccaacctgtgcctttcagtgggcgtggaggactggccttggccccccagggggctgctggactttgggagagacagcccacacc

SEQ ID NO: 87250 - DNA, 120 bp, Artificial Sequence
  ENSG00000085644_19 (sequence is synthesized)
tgtgggaccgcgggtcttagtcacggcggcaggggctttctggccccctcccactcccgtttccaggccatgaccactctgccctgtcctggccatacggactcggcctgcctttgccct

SEQ ID NO: 87251 - DNA, 120 bp, Artificial Sequence
  ENSG00000085644_20 (sequence is synthesized)
cggcctacttgccctagcatgaggctctgagagccacctgcccaccaatctggtgaggataatggtggctccagcgacaggaggccaaccctggagaccaagaacagggcgcctggctgc

SEQ ID NO: 87252 - DNA, 120 bp, Artificial Sequence
  ENSG00000085644_21 (sequence is synthesized)
catcttttcctccagaggtggggctgcaccagactcagcactagcactccatcagcactagcacctcactccatcagcactagcacctcactccatcggccccggcaccctgctccatcg

SEQ ID NO: 87253 - DNA, 120 bp, Artificial Sequence
  ENSG00000085644_22 (sequence is synthesized)
gcactggcgccctgctccatcggcactaatgctccactcggcgccccactccatcggccccgctccatcggcactaatgccccactcggcgccccactccatcagcactaatgctccact

SEQ ID NO: 87254 - DNA, 120 bp, Artificial Sequence
  ENSG00000085644_23 (sequence is synthesized)
ccattggcactaacgccccaactccagcggcactaatgacccgctcctttgacattggtgccccactccatcagcactaacgccctgctccatcggcactggtgtcccactccattgtca

SEQ ID NO: 87255 - DNA, 120 bp, Artificial Sequence
  ENSG00000085644_24 (sequence is synthesized)
ctaacgtccggctccatcggcactaccaccccgctccatcatcactatgtccagctccgtcggcactaccaccctgctccatcatcactacgtccagctccaacggcactggtgccccat

SEQ ID NO: 87256 - DNA, 120 bp, Artificial Sequence
  ENSG00000085644_25 (sequence is synthesized)
tccatcggcactaacgccccgctccaccggcaccagtgcctcgctccattggcaccaacgcccagctccaccggtactggctccctgctccatcggcactaacgccctgcttcattggca

SEQ ID NO: 87257 - DNA, 120 bp, Artificial Sequence
  ENSG00000085644_26 (sequence is synthesized)
ctttgctgctgcctcctgagcactgccttccatgaacagggacagaccagaggccctgcaaggactccccctcagacctccaaagggcaacagaagagtattaataaacgtgaaaactta

SEQ ID NO: 87258 - DNA, 120 bp, Artificial Sequence
  ENSG00000085644_27 (sequence is synthesized)
ttcctgttcattggccatcggtcatggagaaggcgggctcagtggacgaacggctttctgggagctggggaatgcttgcgtagcgtagtttcccagcgagccccgcgaggacttccggcg

SEQ ID NO: 87259 - DNA, 120 bp, Artificial Sequence
  ENSG00000085644_28 (sequence is synthesized)
gtctcccagaggctcacagggtaggggagacacagagcccccaggagcaggcacacaagcacagtgtgccatgggtgcctttctgaaagatgcgatccaaagtaaatgtgatttattttt

SEQ ID NO: 87260 - DNA, 120 bp, Artificial Sequence
  ENSG00000085644_29 (sequence is synthesized)
tgtggctttggaaggcagcaatagggctgaagtgcgaatgttccagacaggaggttttagctccatgcagggtctgctgatgtttatttgcattttgctctaggcctggctctggggaca

SEQ ID NO: 87261 - DNA, 120 bp, Artificial Sequence
  ENSG00000085644_30 (sequence is synthesized)
caagggtgtgcatagagccagctccagagtggggcgagaaggtggagctgtccggggcctctgctaccttgtgggatgttgggtccttcacattggatgcatctggggaggttctaatga

SEQ ID NO: 87262 - DNA, 120 bp, Artificial Sequence
  ENSG00000085644_31 (sequence is synthesized)
gtggctgggggatggggttctgcctttggcaggagggtccccagctacccccttgctaagtggctgtgattctggcctttcagggctggttcttgcctcgtgaatgatcggggagcatcc

SEQ ID NO: 87263 - DNA, 120 bp, Artificial Sequence
  ENSG00000085644_32 (sequence is synthesized)
ttgggcacacagcattacctggtatcacattctcctccggacttttcctggggcaccatattggtctccttcccacaccccagcatcctgagggtcatgtcctgtgtctccttcccaggg

SEQ ID NO: 87264 - DNA, 120 bp, Artificial Sequence
  ENSG00000085644_33 (sequence is synthesized)
ttgtcaccggcgttgccctaagggtcacaggcaggacagctccctctgtgaagtccagggcgtgtgtgcatgcgcacaggctggggaggccataggcgtcggtgtcaagcctgggctggc

SEQ ID NO: 87265 - DNA, 120 bp, Artificial Sequence
  ENSG00000085644_34 (sequence is synthesized)
ctttctaaggctccattcttctccttcagcccagcctcctgctcttcttaaagagggtcgtcccggagagacgacggacacctgctttgtctctggggtccatgtgagtcaccagtccct

SEQ ID NO: 87266 - DNA, 120 bp, Artificial Sequence
  ENSG00000085644_35 (sequence is synthesized)
ttgtcttctttaaggcacttggccctgttgagtttgtaaaatgggacttgctgtcccatcaggcctctttcatctgacccatcctgtccccgccagtgctgctgggaggcctgagccggg

SEQ ID NO: 87267 - DNA, 120 bp, Artificial Sequence
  ENSG00000085644_36 (sequence is synthesized)
ggctctccctaggtcttgccaggagcctgagtaactcctttcttggctgatgatcagtttttgtgcgtttccacatgcagcatgggacggcgccggcgctgcccagccctgcagttgctc

SEQ ID NO: 87268 - DNA, 120 bp, Artificial Sequence
  ENSG00000085644_37 (sequence is synthesized)
taagggcaacttctcctttgagtctcacaacctagtgcatggaagtattgtccccattttacgcataagggacctgagactcaggtcagtggatgctgaagggacacagctgggacttgg

SEQ ID NO: 87269 - DNA, 120 bp, Artificial Sequence
  ENSG00000085644_38 (sequence is synthesized)
atcaggcacagttgtgaggccaccttgggctgctaggagcaggggtgctgacggggaaccccagctgctcaccagcctgggcccctgctcgtcagaactgcacttaccaggttcctctcc

SEQ ID NO: 87270 - DNA, 120 bp, Artificial Sequence
  ENSG00000085644_39 (sequence is synthesized)
atgccaggccccttctcagcaccatcagggatcatcttgttcagtcacactcccaggaggatgggctgcgacctctgtccagatctgtgttgagtttggagaactagagcctgcgtggtg

SEQ ID NO: 87271 - DNA, 120 bp, Artificial Sequence
  ENSG00000085644_40 (sequence is synthesized)
agtttggagaactagagcctgcgtggtgaagggagccacactagctagaccagtttggctcctcagtttccgactgtgacggttgggaaaaattttctttcttttttttttttttgagat

SEQ ID NO: 87272 - DNA, 120 bp, Artificial Sequence
  ENSG00000085644_41 (sequence is synthesized)
aaaagtttcagaattactataaatctgttctgctgtggagcttgatatctggggttcagagtgggacattggatcccagtgtggcctgcagggcacagatggcttagggggctggcccat

SEQ ID NO: 87273 - DNA, 120 bp, Artificial Sequence
  ENSG00000085644_42 (sequence is synthesized)
gcaggcgggatcagaggcttattcagactgctgctctgccgaattttttcatcatccctgatttatttgggtttttgtttgtttttgagacaaagtctcgctcttggagtgcaatggcat

SEQ ID NO: 87274 - DNA, 69 bp, Artificial Sequence
  ENSG00000085644_43 (sequence is synthesized)
gtttttgagacaaagtctcgctcttggagtgcaatggcatgatcccggcttactgcaacctccgcttca

SEQ ID NO: 87275 - DNA, 86 bp, Artificial Sequence
  ENSG00000085644_44 (sequence is synthesized)
actcctaacctcaggtgatcagctttgagtcactgcgcctggccaatcatccctgttttatagatgaggaacctgagaattcagct

SEQ ID NO: 87276 - DNA, 120 bp, Artificial Sequence
  ENSG00000085644_45 (sequence is synthesized)
tcatccctgttttatagatgaggaacctgagaattcagctgtgtgaacccagggctttctgaacctggaggccagggagctttccccagccttgtttcttcctcacctcagctctggccc

SEQ ID NO: 87277 - DNA, 120 bp, Artificial Sequence
  ENSG00000085644_46 (sequence is synthesized)
atttcacagagcaggcaacgcaggagctgggacgtaatcaataactagcacaggtttatattatgattcgtctgtagcggcctgccaaaggttccatataacatccctgcggcaggaact

SEQ ID NO: 87278 - DNA, 120 bp, Artificial Sequence
  ENSG00000085644_47 (sequence is synthesized)
gacacttcaggccccaccgaatcagctagataacggcccacattgcagagcagccaatcaaaaccggaacatatttagatcatttggtaaacgggacactcaagcagtcctatagggagg

SEQ ID NO: 87279 - DNA, 120 bp, Artificial Sequence
  ENSG00000085662_0 (sequence is synthesized)
gcaccgtactgggcgggggtctggggagcgcagcagccatggcaagccgtctcctgctcaacaacggcgccaagatgcccatcctggggttgggtacctggaagtcccctccagggcagg

SEQ ID NO: 87280 - DNA, 120 bp, Artificial Sequence
  ENSG00000085662_1 (sequence is synthesized)
tgactgaggccgtgaaggtggccattgacgtcgggtaccgccacatcgactgtgcccatgtgtaccagaatgagaatgaggtgggggtggccattcaggagaagctcagggagcaggtgg

SEQ ID NO: 87281 - DNA, 120 bp, Artificial Sequence
  ENSG00000085662_2 (sequence is synthesized)
tgaagcgtgaggagctcttcatcgtcagcaagctgtggtgcacgtaccatgagaagggcctggtgaaaggagcctgccagaagacactcagcgacctgaagctggactacctggacctct

SEQ ID NO: 87282 - DNA, 120 bp, Artificial Sequence
  ENSG00000085662_3 (sequence is synthesized)
accttattcactggccgactggctttaagcctgggaaggaatttttcccattggatgagtcgggcaatgtggttcccagtgacaccaacattctggacacgtgggcggccatggaagagc

SEQ ID NO: 87283 - DNA, 120 bp, Artificial Sequence
  ENSG00000085662_4 (sequence is synthesized)
tggtggatgaagggctggtgaaagctattggcatctccaacttcaaccatctccaggtggagatgatcttaaacaaacctggcttgaagtataagcctgcagttaaccagattgagtgcc

SEQ ID NO: 87284 - DNA, 120 bp, Artificial Sequence
  ENSG00000085662_5 (sequence is synthesized)
tccaaaggcatcgtggtgaccgcctacagccccctcggctctcctgacaggccctgggccaagcccgaggacccttctctcctggaggatcccaggatcaaggcgatcgcagccaagcac

SEQ ID NO: 87285 - DNA, 120 bp, Artificial Sequence
  ENSG00000085662_6 (sequence is synthesized)
aataaaactacagcccaggtcctgatccggttccccatgcagaggaacttggtggtgatccccaagtctgtgacaccagaacgcattgctgagaactttaaggtctttgactttgaactg

SEQ ID NO: 87286 - DNA, 120 bp, Artificial Sequence
  ENSG00000085662_7 (sequence is synthesized)
agcagccaggatatgaccaccttactcagctacaacaggaactggagggtctgtgccttgttgagctgtacctcccacaaggattaccccttccatgaagagttttgaagctgtggttgc

SEQ ID NO: 87287 - DNA, 120 bp, Artificial Sequence
  ENSG00000085662_8 (sequence is synthesized)
ctgctcgtccccaagtgacctatacctgtgtttcttgcctcatttttttccttgcaaatgtagtatggcctgtgtcactcagcagtgggacagcaacctgtagagtggccagcgagggcg

SEQ ID NO: 87288 - DNA, 120 bp, Artificial Sequence
  ENSG00000085662_9 (sequence is synthesized)
tgtctagcttgatgttggatctcaagagccctgtcagtagagtagaagtctcttccagtttgctttgcccttctttctaccctgctggggaaagtacaacctgaatacccttttctgacc

SEQ ID NO: 87289 - DNA, 120 bp, Artificial Sequence
  ENSG00000085662_10 (sequence is synthesized)
aaagagaagcaaaatctaccaggtcaaaatagtgccactaacggttgagttttgactgcttggaactggaatcctttcagcaagacttctctttgcctcaaataaaaagtgcttttgtga

SEQ ID NO: 87290 - DNA, 120 bp, Artificial Sequence
  ENSG00000085662_11 (sequence is synthesized)
aagaagcatccccgccgacccttggggaaggccgccgcggcacccccagcgcaaccaatcagaaggctccttcgcgcagcggcgcgccaaccgcaggcgccctttctgccgacctcacgg

SEQ ID NO: 87291 - DNA, 120 bp, Artificial Sequence
  ENSG00000085662_12 (sequence is synthesized)
gtgagccaccgcgcccggcctgtttgctcttcttatctcattaaagccagcctggctttcgtctcactgtctcttagcttctgaaaggtctaattcactggcactgaagagtgagggcag

SEQ ID NO: 87292 - DNA, 120 bp, Artificial Sequence
  ENSG00000085662_13 (sequence is synthesized)
tcccaggagatattcagatgctgcacagcaagagagtgatccctgcaggcctcagcgccaatgtgctctcgtcacagctgttcttgctttgcacattaccttgctttctcagccacgtga

SEQ ID NO: 87293 - DNA, 120 bp, Artificial Sequence
  ENSG00000085662_14 (sequence is synthesized)
gcatcagctgaactgcatggagccaagatgccaagagatccgctcttgatatcttcttccagccctggggcattgttggcctggcctgaagtaactacatattttggctttccattcaat

SEQ ID NO: 87294 - DNA, 120 bp, Artificial Sequence
  ENSG00000085662_15 (sequence is synthesized)
ttttaaatcctagcagttcatctgaaactaggtgatcccaggtgaccctggatcaaactctggaagaatttgcctgtgactttttgtcttaatgaccctaatgaaaggggtttggtcggg

SEQ ID NO: 87295 - DNA, 120 bp, Artificial Sequence
  ENSG00000085662_16 (sequence is synthesized)
agcccctggggctgaggtttgagacagtcccggctctgacctggtaagccacatggctccaaaacaggccctccctctgagcagcaggcacctcagttcctccagccacacatcctctgg

SEQ ID NO: 87296 - DNA, 120 bp, Artificial Sequence
  ENSG00000085662_17 (sequence is synthesized)
ttcaggtgttgctgaccgtccacaactgcctgcattcctgacagtcctgttagccaagaggaggaagtgactgagcctgttacaccctcacaggaagtatggttaggggtcctcaagtac

SEQ ID NO: 87297 - DNA, 120 bp, Artificial Sequence
  ENSG00000085662_18 (sequence is synthesized)
cttgttttcgtgactggttccctcttcttcttagaagcaatctgcctgccatttctcacattgcattttgttattctgtccctgttgtttgctctctctttttttttttttgagttgggg

SEQ ID NO: 87298 - DNA, 120 bp, Artificial Sequence
  ENSG00000085662_19 (sequence is synthesized)
ccagcgcttgttcattcatgtggaacctcatctgtacaaatgtaagagctcttagccgtgcagggaatgttctttctcctgagtggtagtgtgcatttctagccagtggagggcctcatg

SEQ ID NO: 87299 - DNA, 120 bp, Artificial Sequence
  ENSG00000085662_20 (sequence is synthesized)
tggtctcatgatatgcctgagacactgaagcgtgtggcacagtggctagcgcaggactctggagtcagatctggacctgaatgcgtcgcctacctgttgctagctgtgacctgacatctt

SEQ ID NO: 87300 - DNA, 120 bp, Artificial Sequence
  ENSG00000085662_21 (sequence is synthesized)
tgcatcagcccaaagccaagtccacactcaatacagctacacttttcactgatgggcgattcttcccggggaaacgtatcacccacggccatacagggctccagagctcgcccatccttg

SEQ ID NO: 87301 - DNA, 120 bp, Artificial Sequence
  ENSG00000085662_22 (sequence is synthesized)
gctctctgttgaatggtcattccatctgggcccattgcttagagtcccgtgctgatgaggctgaggttgtggattggccctccctttccagggagtcgctttcaaggatggaacttggtt

SEQ ID NO: 87302 - DNA, 120 bp, Artificial Sequence
  ENSG00000085719_0 (sequence is synthesized)
gccagtccagccctaggttctcctgaatccctgcggtcccagcgtcgctccggacgctgccaacctgttctccaccgtcgctcgacttccacctctaagactcccacgaaactcaggttg

SEQ ID NO: 87303 - DNA, 120 bp, Artificial Sequence
  ENSG00000085719_1 (sequence is synthesized)
aataattcatcaaattacacaactgaactcaagacatggctgcccagtgtgtcacaaaggtggcgctgaatgtttcctgtgccaatcttttggataaagatatagggtcaaagtcagacc

SEQ ID NO: 87304 - DNA, 120 bp, Artificial Sequence
  ENSG00000085719_2 (sequence is synthesized)
ctttatgtgtgttgtttttgaatacaagtggtcaacagtggtatgaggttgagcgcacagaaaggattaagaattgcttgaatccccaattttccaagacatttattattgattactact

SEQ ID NO: 87305 - DNA, 120 bp, Artificial Sequence
  ENSG00000085719_3 (sequence is synthesized)
ttgaagtggttcagaaattgaaatttggggtttatgacatcgacaacaaaactattgagctgagtgatgatgacttcttaggggaatgtgaatgtacccttggacaaattgtttccagca

SEQ ID NO: 87306 - DNA, 120 bp, Artificial Sequence
  ENSG00000085719_4 (sequence is synthesized)
agaagctaactcgaccactggtgatgaaaactggcagacctgcaggaaaagggagcattacgatttcagctgaagaaataaaagataatagagtggtcttgtttgaaatggaagccagaa

SEQ ID NO: 87307 - DNA, 120 bp, Artificial Sequence
  ENSG00000085719_5 (sequence is synthesized)
aactggataataaggatctatttggaaagtcagacccatacctggaattccacaagcagacatctgatggaaactggctaatggttcatcggacagaggttgttaaaaacaacttgaatc

SEQ ID NO: 87308 - DNA, 120 bp, Artificial Sequence
  ENSG00000085719_6 (sequence is synthesized)
ctgtttggaggcctttcaagatctctcttaactcactgtgttacggagatatggacaaaaccattaaggtggagtgttatgattatgacaatgatgggtcacatgatctcattggaacat

SEQ ID NO: 87309 - DNA, 120 bp, Artificial Sequence
  ENSG00000085719_7 (sequence is synthesized)
ttcagaccaccatgacaaaactgaaagaagcctccagaagctcacctgttgaatttgaatgcataaatgagaaaaaaaggcaaaagaaaaaaagctacaagaattcaggtgttatcagtg

SEQ ID NO: 87310 - DNA, 120 bp, Artificial Sequence
  ENSG00000085719_8 (sequence is synthesized)
tgaaacagtgtgagattacagtagaatgcacattccttgactatataatgggaggatgtcagctgaattttactgtgggagtggacttcactggctccaatggtgacccaaggtctccag

SEQ ID NO: 87311 - DNA, 120 bp, Artificial Sequence
  ENSG00000085719_9 (sequence is synthesized)
actcccttcattacatcagccccaatggcgttaatgagtatttgactgctctctggtctgtgggactggtcattcaagattatgatgctgataagatgtttccagcttttggttttggcg

SEQ ID NO: 87312 - DNA, 120 bp, Artificial Sequence
  ENSG00000085719_10 (sequence is synthesized)
ctcagatacctcctcagtggcaggtatcacatgaatttccaatgaacttcaacccatccaatccctactgcaatggaatccaaggcattgtagaggcgtatcggtcttgtcttcctcaga

SEQ ID NO: 87313 - DNA, 120 bp, Artificial Sequence
  ENSG00000085719_11 (sequence is synthesized)
taaaactctatggaccaactaatttttctccaatcataaatcacgtggccaggtttgctgctgcagccacgcaacagcagacagcttctcaatattttgtgcttttgattattactgatg

SEQ ID NO: 87314 - DNA, 120 bp, Artificial Sequence
  ENSG00000085719_12 (sequence is synthesized)
gtgtgatcacagaccttgatgaaaccagacaagctatagttaatgcctccaggctgcctatgtccatcataattgttggagttggaggtgctgacttcagcgccatggagtttctggatg

SEQ ID NO: 87315 - DNA, 120 bp, Artificial Sequence
  ENSG00000085719_13 (sequence is synthesized)
gtgatggtggaagtctccgctccccattgggcgaagtggccatcagagatattgtccagtttgtgcctttcagacagttccagaatgctccaaaagaagcacttgctcagtgtgtcttgg

SEQ ID NO: 87316 - DNA, 120 bp, Artificial Sequence
  ENSG00000085719_14 (sequence is synthesized)
cagagattccccagcaggtggtgggctacttcaatacatacaaactccttcctcccaagaacccagccacgaaacaacagaagcagtgaccacttcaacagaattcttttgtgttatgtg

SEQ ID NO: 87317 - DNA, 120 bp, Artificial Sequence
  ENSG00000085719_15 (sequence is synthesized)
gagcaatgccatctctcaccccaaatcgtgtatctgtcattctacgtactttttacccccagcatttatgatgtaaatctctttctctatggattatatctgtttaaagcattctttcta

SEQ ID NO: 87318 - DNA, 120 bp, Artificial Sequence
  ENSG00000085719_16 (sequence is synthesized)
ggttattttggggggacagtgccaagtccatctttgcccagtcaattcagtgattgatagcaatttacattaattgcagtaaagctctttggattagaaattagtgtggggaaagcttat

SEQ ID NO: 87319 - DNA, 120 bp, Artificial Sequence
  ENSG00000085719_17 (sequence is synthesized)
tctgttgttgtttttgtttactttcatatgatgaaaatgctgtgtttaagtgtttgtcaataggaagaatggaaaactgttgggatgatgtggtttgcaggttgctgtgcctgattcaca

SEQ ID NO: 87320 - DNA, 120 bp, Artificial Sequence
  ENSG00000085719_18 (sequence is synthesized)
gtgtatgttgtataagccaatgtccatacctgattatgagagcttcttaaattatatgatatcaaatttgttcctgtaactctgtatacagtgcttttctgcaaggtaaaaataacctgt

SEQ ID NO: 87321 - DNA, 120 bp, Artificial Sequence
  ENSG00000085719_19 (sequence is synthesized)
ctatgcatctgatttttgctacagtttagacactgtggtttacaaaacagcatgcactcaacttgggactttatgaaaagtactgaatgagcaggaaaaggcacatactcagttttttaa

SEQ ID NO: 87322 - DNA, 120 bp, Artificial Sequence
  ENSG00000085719_20 (sequence is synthesized)
tctagatattttattttattgtggaaaactgtaaacatggtcagatttggctttttttttcattaactgagcaagactttcaggatattgtagatgcacagatggtaggttgtcctgaat

SEQ ID NO: 87323 - DNA, 120 bp, Artificial Sequence
  ENSG00000085719_21 (sequence is synthesized)
tctacattattagattactttaattgagatttgttaaaacggttaggactgttttgtccaggaaagataagaggaccaaacatataaggtgaaattcagaattccgtttccttctaacta

SEQ ID NO: 87324 - DNA, 120 bp, Artificial Sequence
  ENSG00000085719_22 (sequence is synthesized)
atgaaaaactgcttactaaaaaaaaattttatactttccttgctaaggtcccatatattgatttgtacagatccacttagtcattttctcctttttttaagaaccattttcatctgattt

SEQ ID NO: 87325 - DNA, 120 bp, Artificial Sequence
  ENSG00000085719_23 (sequence is synthesized)
ttaaactcacgataccagttatctgttaatcaaaattgcattttacaatttaataatgtgatatttcctatgtctacagcataccttattaggtataaaacctactgcaacttagaaaaa

SEQ ID NO: 87326 - DNA, 120 bp, Artificial Sequence
  ENSG00000085719_24 (sequence is synthesized)
ggaaagaaaaaagaaaacttttccaactgctgcattaagatagggtggattttatgtgctttttttttttaagagttgaatttcttttcctgacttttaccttttacagcgtattactta

SEQ ID NO: 87327 - DNA, 120 bp, Artificial Sequence
  ENSG00000085719_25 (sequence is synthesized)
gtgaacattacattttcagaatagatcctaatattttattgagggcctatgtgctaaaaactatgcatatctatatattggccaattatctttaataatttaccttttgaaattgcatgt

SEQ ID NO: 87328 - DNA, 120 bp, Artificial Sequence
  ENSG00000085719_26 (sequence is synthesized)
ttatcatatatccttaagtggacacatacagtgccatgttgatgtgcctctcagttttattgaaaagctgccccacagcccatgtctcttgttctctgcaatgcctcaagggagtgagct

SEQ ID NO: 87329 - DNA, 120 bp, Artificial Sequence
  ENSG00000085719_27 (sequence is synthesized)
ctcaaccacagatagctgtggcttctcagaagcagctcattgccaaggccaggctgagaggggacctgcttgctgtggtggttgcctagcccagatgagcatttacctaccaccttccca

SEQ ID NO: 87330 - DNA, 120 bp, Artificial Sequence
  ENSG00000085719_28 (sequence is synthesized)
cttggctagctgtcctttggatatgtgctgttaactggggaaggcatctaactagtagcctgctactccatagtatggctcaatagatgacacatcattttgacattatcaataggagaa

SEQ ID NO: 87331 - DNA, 120 bp, Artificial Sequence
  ENSG00000085719_29 (sequence is synthesized)
aagaaaactaacccttcttctgattgtttggagccatagttgtctcagatgttctaattctctttgtatgcttggaaacagcatagatatgttgctgtggttttcagaattttctctttt

SEQ ID NO: 87332 - DNA, 120 bp, Artificial Sequence
  ENSG00000085719_30 (sequence is synthesized)
aatcacaagaagccttttaaaaaatgacttacacatattctcaatgtacagtaaaacagacagaagtgagcttatctgtttgatgctgtggcagggtcccagtcactgggcatatcctcc

SEQ ID NO: 87333 - DNA, 120 bp, Artificial Sequence
  ENSG00000085719_31 (sequence is synthesized)
ttctccttaaccagctccacagcagcccctgagtcacctgcacaaggtgcttgggaactgctggttatgagcattcctggttttcttcagccaaataacaggtaatcactgtcaattgga

SEQ ID NO: 87334 - DNA, 120 bp, Artificial Sequence
  ENSG00000085719_32 (sequence is synthesized)
ctgtcaattggatttggtcttcattattttatattctgattttatcagaattattctattttaaaattgttttaaaatttaaaacatttaattcatgatcatgttcatcagtagatgcta

SEQ ID NO: 87335 - DNA, 120 bp, Artificial Sequence
  ENSG00000085719_33 (sequence is synthesized)
actgtgattccagcaaactagggtaattggtgcctttttacagttttgaataaaagcatttacaatttctaaattatcagttttcacagtttcagcactcaacctcatcatacgctgatt

SEQ ID NO: 87336 - DNA, 120 bp, Artificial Sequence
  ENSG00000085719_34 (sequence is synthesized)
taatattgttttacattaaaatagtccttttccctgttgtgccaccattcatttaagtgctgtttgttcttaaaatgcatttaaagaaaaattacccatattgactttcacacctcatat

SEQ ID NO: 87337 - DNA, 120 bp, Artificial Sequence
  ENSG00000085719_35 (sequence is synthesized)
aatcagatctattacaaatatatatcggagtgacggtgcccaggatagatgtaatatttcttacagatgctggcacagaggaaataatataccagctaatctagtcacctaaccttgtgg

SEQ ID NO: 87338 - DNA, 120 bp, Artificial Sequence
  ENSG00000085719_36 (sequence is synthesized)
ttagaattgcaattttaagaccagaaaaatttgaagtctgatcagagatttacaactgttcattatagtggtgccttaggcaatctttccaaagtaaattcagggccccattgctactta

SEQ ID NO: 87339 - DNA, 120 bp, Artificial Sequence
  ENSG00000085719_37 (sequence is synthesized)
tgccatatttggacatactttttttttcttcaattttgtaaacttcctggaaagctgtcttcactaagtatcccctagtctctatatatgtggttagtagtcatggaaatgacacataaa

SEQ ID NO: 87340 - DNA, 120 bp, Artificial Sequence
  ENSG00000085719_38 (sequence is synthesized)
gtacgccagaagtttgatggaacgtgttagaaactgttttgtgcttttatggatgtcatacttgacaatacatgtgtaagttactaatatatgaattgatgctaaatatatcttacattt

SEQ ID NO: 87341 - DNA, 120 bp, Artificial Sequence
  ENSG00000085719_39 (sequence is synthesized)
gaattccttttggataaagttatttcttgatgtgacagagtagtgtgttttcatttttattctttacatgtgaccaaaacaatagaaaagttaaaaataaaatatagtgttttaggtggc

SEQ ID NO: 87342 - DNA, 120 bp, Artificial Sequence
  ENSG00000085719_40 (sequence is synthesized)
tggaaaaaacagtattttattaaatatttttttctttttagtgataagatgtttccagcttttggttttggcgctcagatacctcctcagtggcaggtatcacatgaatttccaatgaac

SEQ ID NO: 87343 - DNA, 120 bp, Artificial Sequence
  ENSG00000085719_41 (sequence is synthesized)
ggctcactagtctttgttattttgttctttgttctttgttttttttcttgtgattaaaactactcaaatttcatctctaggtttcattttcttacatatttaactttctgttgtataagg

SEQ ID NO: 87344 - DNA, 120 bp, Artificial Sequence
  ENSG00000085719_42 (sequence is synthesized)
tagaagaattgcaccaggttggtggttagggtggtaatggtaattacggggcaaatcagtattatgatgatgaaggtggtaagctaaatcctcctaccttaagaactttaataggacaaa

SEQ ID NO: 87345 - DNA, 120 bp, Artificial Sequence
  ENSG00000085719_43 (sequence is synthesized)
cagtccagccctaggttctcctgaatccctgcggtcccagcgtcgctccggacgctgccaacctgttctccaccgtcgctcgacttccacctctaagactcccacaactcaagacatggc

SEQ ID NO: 87346 - DNA, 120 bp, Artificial Sequence
  ENSG00000085719_44 (sequence is synthesized)
ctccggacgctgccaacctgttctccaccgtcgctcgacttccacctctaagactcccaccttcaagattcttctgtctagtgttttgggttccctacaccaggattgtggaggaagcgc

SEQ ID NO: 87347 - DNA, 89 bp, Artificial Sequence
  ENSG00000085719_45 (sequence is synthesized)
gacttccacctctaagactcccacgaaactcaggttgaataattcatcaaattacacaactatgcaatggcgtgatctcactgaccgaa

SEQ ID NO: 87348 - DNA, 120 bp, Artificial Sequence
  ENSG00000085719_46 (sequence is synthesized)
gttcctgggccggtgaggcagcagcccagcaaccgtaccgcccgggggaaaaggaaagtcctggcctggaggatccgagcccgcaggctccgtgcggcaggtcccgccgggccctgctgc

SEQ ID NO: 87349 - DNA, 120 bp, Artificial Sequence
  ENSG00000085719_47 (sequence is synthesized)
accatgacaaaactgaaagaagcctccagaagctcacctgtaagttacatccttgcatttgcatatactttatagtttggctatgtatttattactgtatttcatttttttcccatagca

SEQ ID NO: 87350 - DNA, 120 bp, Artificial Sequence
  ENSG00000085719_48 (sequence is synthesized)
gtaatcacataatccacaattcatacttggggcatgaattttattgagcagaacaccacgtaacagttactaatgccagatgaggactccaactacatggaggacagcaaagatgatcac

SEQ ID NO: 87351 - DNA, 120 bp, Artificial Sequence
  ENSG00000085719_49 (sequence is synthesized)
agtgtcagtcattaggaatagaagtccaatccttttgcctattgtatcatcgtattgaagtcaaggcaaacacaatgcaggcaagcactagagggaaccacactttacttacagagagaa

SEQ ID NO: 87352 - DNA, 120 bp, Artificial Sequence
  ENSG00000085719_50 (sequence is synthesized)
gaggcagagcaatatcagctttaaaagtaggcattggtttccgtggccagcagttccatccagcaaccaatgcagggcagttggccccagtgtgcttatctagtgctgtagaagaatgac

SEQ ID NO: 87353 - DNA, 120 bp, Artificial Sequence
  ENSG00000085719_51 (sequence is synthesized)
ctccaccgtcgctcgacttccacctctaagactcccacgaaactcaggttgaataattcatcaaattacacaactgctaattaactattaattagaggctttagtgctctgaagggattt

SEQ ID NO: 87354 - DNA, 120 bp, Artificial Sequence
  ENSG00000085719_52 (sequence is synthesized)
tgcagtgcatagcttactgtggcctcgaactcctgaacttgagtgagcctcctgccttagcctactgagtagctgggactacagaactcaagacatggctgcccagtgtgtcacaaaggt

SEQ ID NO: 87355 - DNA, 120 bp, Artificial Sequence
  ENSG00000085719_53 (sequence is synthesized)
gaatccctgcggtcccagcgtcgctccggacgctgccaacctgttctccaccgtcgctcgacttccacctctaagactcccacgtgagtgcgggcgtctcccagttcctgggccggaaac

SEQ ID NO: 87356 - DNA, 120 bp, Artificial Sequence
  ENSG00000085719_54 (sequence is synthesized)
tcatactttcaatataaaatgttatgagtaaaggggaaaagccaagattttttagggtgaacaagtggaatggagtttttgttttttaaaatgttgactgctatgctttttaaagccctc

SEQ ID NO: 87357 - DNA, 120 bp, Artificial Sequence
  ENSG00000085719_55 (sequence is synthesized)
aacatattggattcattactaatatcttaaaacttaaaatgagtgtatttcatctttcgccattagtattctaatcttaacattgctacaattatcttgaagcagaattttacagattca

SEQ ID NO: 87358 - DNA, 120 bp, Artificial Sequence
  ENSG00000085719_56 (sequence is synthesized)
tggcacataggggaaggggtatcttaaacctgaatgcaggggtaatttccatgtttatatcatgtcctgttcaatttacagacttttaaaaatatatgccaaagagttttttgcttctct

SEQ ID NO: 87359 - DNA, 120 bp, Artificial Sequence
  ENSG00000085721_0 (sequence is synthesized)
acgcgcaacttccgggacagaggctgtggctggaaggagctgggcatccggcctgaggcgcagcggtcgcgttagttcggcccaatggcggcaccgctgcttcacacgcgtttgccggga

SEQ ID NO: 87360 - DNA, 120 bp, Artificial Sequence
  ENSG00000085721_1 (sequence is synthesized)
gatgcggccgcttcgtcctctgcagttaagaagctgggcgcgtcgaggactgggatttcaaatatgcgtgcattagagaatgactttttcaattctcccccaagaaaaactgttcggttt

SEQ ID NO: 87361 - DNA, 120 bp, Artificial Sequence
  ENSG00000085721_2 (sequence is synthesized)
ggtggaactgtgacagaagtcttgctgaagtacaaaaagggtgaaacaaatgactttgagttgttgaagaaccagctgttagatccagacataaaggatgaccagatcatcaactggctg

SEQ ID NO: 87362 - DNA, 120 bp, Artificial Sequence
  ENSG00000085721_3 (sequence is synthesized)
ctagaattccgttcttctatcatgtacttgacaaaagactttgagcaacttatcagtattatattaagattgccttggttgaatagaagtcaaacagtagtggaagagtatttggctttt

SEQ ID NO: 87363 - DNA, 120 bp, Artificial Sequence
  ENSG00000085721_4 (sequence is synthesized)
cttggtaatcttgtatcagcacagactgttttcctcagaccgtgtctcagcatgattgcttcccattttgtgcctccccgagtgatcattaaggaaggcgatgtagatgtttcagattct

SEQ ID NO: 87364 - DNA, 120 bp, Artificial Sequence
  ENSG00000085721_5 (sequence is synthesized)
gatgatgaagatgataatcttcctgcaaattttgacacatgtcacagagccttgcaaataatagcaagatatgtaccatcgacaccgtggtttctcatgccaatactggtggaaaaattt

SEQ ID NO: 87365 - DNA, 120 bp, Artificial Sequence
  ENSG00000085721_6 (sequence is synthesized)
ccatttgttcgaaaatcagagagaacactggaatgttacgttcataacttactaaggattagtgtatattttccaaccttgaggcatgaaattctggagcttattattgaaaaactactc

SEQ ID NO: 87366 - DNA, 120 bp, Artificial Sequence
  ENSG00000085721_7 (sequence is synthesized)
aagttggatgtgaatgcatcccggcagggtattgaagatgctgaagaaacagcaactcaaacttgtggtgggacagattccacggaaggattgtttaatatggatgaagatgaagaaact

SEQ ID NO: 87367 - DNA, 120 bp, Artificial Sequence
  ENSG00000085721_8 (sequence is synthesized)
gaacatgaaacaaaggctggtcctgaacggctcgaccagatggtgcatcctgtagccgagcgcctggacatcctgatgtctttggttttgtcctacatgaaggatgtctgctatgtagat

SEQ ID NO: 87368 - DNA, 120 bp, Artificial Sequence
  ENSG00000085721_9 (sequence is synthesized)
ggtaaggttgataacggcaaaacaaaggatctatatcgcgacctgataaacatctttgacaaactcctgttgcccacccatgcctcctgccatgtacagtttttcatgttttacctctgt

SEQ ID NO: 87369 - DNA, 120 bp, Artificial Sequence
  ENSG00000085721_10 (sequence is synthesized)
agtttcaaattgggattcgcagaggcatttttggaacatctctggaaaaaattgcaggacccaagtaatcctgccatcatcaggcaggctgctggaaattatattggaagctttttggca

SEQ ID NO: 87370 - DNA, 120 bp, Artificial Sequence
  ENSG00000085721_11 (sequence is synthesized)
agagctaaatttattcctcttattactgtaaaatcatgcctagatcttttggttaactggctgcacatataccttaataaccaggattcgggaacaaaggcattctgcgatgttgctctc

SEQ ID NO: 87371 - DNA, 120 bp, Artificial Sequence
  ENSG00000085721_12 (sequence is synthesized)
catggaccattttactcagcctgccaagctgtgttctacacctttgtttttagacacaagcagcttttgagcggaaacctgaaagaaggtttgcagtatcttcagagtctgaattttgag

SEQ ID NO: 87372 - DNA, 120 bp, Artificial Sequence
  ENSG00000085721_13 (sequence is synthesized)
cggatagtgatgagccagctaaatcccctgaagatttgcctgccctcagtggttaacttttttgctgcaatcacaaataagtaccagctcgtcttctgctacaccatcattgagaggaac

SEQ ID NO: 87373 - DNA, 120 bp, Artificial Sequence
  ENSG00000085721_14 (sequence is synthesized)
aatcgccagatgctgccagtcattaggagtaccgctggaggagactcagtgcagatctgcacaaacccgctggacaccttcttcccctttgatccctgtgtgctgaagaggtcaaagaaa

SEQ ID NO: 87374 - DNA, 120 bp, Artificial Sequence
  ENSG00000085721_15 (sequence is synthesized)
gaagagctacaggagttcaagaaacccatgaaaaaggacatagtggaagatgaagatgatgactttctgaaaggcgaagtgccccagaatgataccgtgattgggatcacaccaagctcc

SEQ ID NO: 87375 - DNA, 120 bp, Artificial Sequence
  ENSG00000085721_16 (sequence is synthesized)
tttgacacgcatttccgaagtccttcaagtagtgtgggctccccacccgtgttgtacatgcaacccagtcccctctgacggcagaaatttgtgactgagatgtgacatttgggattcccc

SEQ ID NO: 87376 - DNA, 120 bp, Artificial Sequence
  ENSG00000085721_17 (sequence is synthesized)
atcacttgtcatgccctcagcacccagcttgtgccattgggcattgatggcattgaactagagcgagtgcctgcctcggctgtggcacttccaggttcgactgaatcaagcatctgaaga

SEQ ID NO: 87377 - DNA, 120 bp, Artificial Sequence
  ENSG00000085721_18 (sequence is synthesized)
ctgggtttttttgttgttgttgttccccttacagacaaaatgaagactatcatgtgcaatcttttacagtggggttgatgatacatttggaaggatttgcttgtttaatatgtacatttt

SEQ ID NO: 87378 - DNA, 120 bp, Artificial Sequence
  ENSG00000085721_19 (sequence is synthesized)
ttgtgttaacagctttttgacacaattactgggtaatttctaatataggcagcagactgttttacgggttgctgttttaacatgggtttttgtcagatccatggtcttaggacttgactg

SEQ ID NO: 87379 - DNA, 120 bp, Artificial Sequence
  ENSG00000085721_20 (sequence is synthesized)
atgagctttcagtgaagaatcctctaagataaaacttctatttaaagactttaactagaaagtgtttattttggctacattgttcaccttctgctgtattggtatttgtctgttgggatt

SEQ ID NO: 87380 - DNA, 120 bp, Artificial Sequence
  ENSG00000085721_21 (sequence is synthesized)
tcaagggagtgtagagaagacagaaggaaagctgagagctggcccgacatggtctgggacacagagttggagctggcactgaagatctccagggacttcagagaccaataaaagcccata

SEQ ID NO: 87381 - DNA, 120 bp, Artificial Sequence
  ENSG00000085721_22 (sequence is synthesized)
gggaagagagagaggatatagggaaacagaatcagatgtgtaatatacttggcacagcgaaaaaatggatttaaaagacaaaaatggaggtccaggtagatgtaattcacacagactgaa

SEQ ID NO: 87382 - DNA, 120 bp, Artificial Sequence
  ENSG00000085721_23 (sequence is synthesized)
agtgagttcgggcttgtgtaaaacacatgagattggatttgaccccttggctctcaagtgtccccttagatctagaactgctccttggtggccattagatcgagtcagttttgatctgca

SEQ ID NO: 87383 - DNA, 120 bp, Artificial Sequence
  ENSG00000085721_24 (sequence is synthesized)
tcacttagttattgggaatttctttgttggaaacaggaaaatttttttagattatttggtgtacggttttgctcacaacaataggtggaagttgctagtgcagtcttggtctgatggctg

SEQ ID NO: 87384 - DNA, 120 bp, Artificial Sequence
  ENSG00000085721_25 (sequence is synthesized)
tgtgcatcgcacattcggcttggtgaaatccttctctaaagcctctttttgtatttttataactaaacagaggaagtcttcagaagacctcgctttaaaacaaatttgtgcaaacactgc

SEQ ID NO: 87385 - DNA, 120 bp, Artificial Sequence
  ENSG00000085721_26 (sequence is synthesized)
tagagtcattttgaagctcaagcattttcactttgtttcttacatgtgtacttttttgtttacttgtgaaaatggccatctttaagcatatttattttctgccactttatttaaaggcaa

SEQ ID NO: 87386 - DNA, 120 bp, Artificial Sequence
  ENSG00000085721_27 (sequence is synthesized)
gcaatattttcttgatcataaatattttgtaatgaaatacttcctcttttccagggctttgtatgcacttgtataattacattgatggcaatgtagagtttgaatttcagtctgtaaata

SEQ ID NO: 87387 - DNA, 120 bp, Artificial Sequence
  ENSG00000085721_28 (sequence is synthesized)
cttttttggaaaatagaaatttttattgctttaaagttttggatatgggtggttttcttttccgggtttggtggaaagtaatttgagaactttaaggttgtctttttaactgctggcaaa

SEQ ID NO: 87388 - DNA, 120 bp, Artificial Sequence
  ENSG00000085721_29 (sequence is synthesized)
atgttgattttttaatattagataaaacgagtaaacgaaattccccagaaattagtagtaagtggggtctttgtgggttgggaagtagttttaatgtagaaagacatttacatataagtc

SEQ ID NO: 87389 - DNA, 120 bp, Artificial Sequence
  ENSG00000085721_30 (sequence is synthesized)
tgtttaatttcaaaggagtttgtgaaaaaaaatccatggtgaaaatgaaacaatgacatggttaatctggaacttacgttcttataccaataaaaggtacctcaatacatgttctttcaa

SEQ ID NO: 87390 - DNA, 120 bp, Artificial Sequence
  ENSG00000085721_31 (sequence is synthesized)
agcagtttattaatgaaagtggagatgaagtttatcataaagggtggaaacagctagtgctgctcatctttgttaaggctttagattgaaagaattaaaatagttcagcaaacttgaaaa

SEQ ID NO: 87391 - DNA, 120 bp, Artificial Sequence
  ENSG00000085721_32 (sequence is synthesized)
gagcgaaactccgtctcaaaaaacaaaaaaagttccagttctttgaggtaggggttcctgtttgcctcctatgtctatcaatatttgcttttagaatggtagttttcctttttattcctt

SEQ ID NO: 87392 - DNA, 80 bp, Artificial Sequence
  ENSG00000085733_0 (sequence is synthesized)
ggccgggctagcgcttagccagctgcgggcggacccccgggactcttgcgggccaagacgcgggaggaggcggggcaggg

SEQ ID NO: 87393 - DNA, 120 bp, Artificial Sequence
  ENSG00000085733_1 (sequence is synthesized)
ccctcggaaccggaagtagagcctggtgcctgggagcggctggcgcggcggaatccagggccgacccgggccggaccgaccccaggcggcgacggaatcagtccccaatgcctggaaatt

SEQ ID NO: 87394 - DNA, 120 bp, Artificial Sequence
  ENSG00000085733_2 (sequence is synthesized)
cctcattggattactgtgttttaaacagaatttcgtgaacagccttttatctccaagcggaaagaaagatgtggaaagcttcagcaggccacgctgtgtccatcgcccaggatgacgcgg

SEQ ID NO: 87395 - DNA, 120 bp, Artificial Sequence
  ENSG00000085733_3 (sequence is synthesized)
gggccgatgactgggagaccgaccctgattttgtgaatgatgtgagtgagaaggagcaaagatggggtgccaagacggtgcagggctccgggcaccaggagcatatcaacatacacaagc

SEQ ID NO: 87396 - DNA, 120 bp, Artificial Sequence
  ENSG00000085733_4 (sequence is synthesized)
tgagggagaatgtctttcaagagcatcagacccttaaggagaaggaacttgaaacaggaccaaaagcttcccatggctatggagggaaatttggtgtggaacaagaccgaatggataagt

SEQ ID NO: 87397 - DNA, 120 bp, Artificial Sequence
  ENSG00000085733_5 (sequence is synthesized)
cagctgtcggccacgaatatcagtcgaaactttccaagcactgctcgcaggtggactcggtccgtggcttcggaggcaagtttggtgtccagatggacagagttgatcagtctgctgtag

SEQ ID NO: 87398 - DNA, 120 bp, Artificial Sequence
  ENSG00000085733_6 (sequence is synthesized)
gctttgaataccaggggaagactgagaagcatgcctcccagaaagactactccagtggttttggcggcaagtatggcgtgcaggccgaccgagtagacaagagcgcggtgggcttcgact

SEQ ID NO: 87399 - DNA, 120 bp, Artificial Sequence
  ENSG00000085733_7 (sequence is synthesized)
accagggcaagacggagaagcacgagtcacagagagattactccaaaggtttcggcggcaaatacggtatcgacaaggacaaagtggataagagcgccgttggctttgagtatcaaggca

SEQ ID NO: 87400 - DNA, 120 bp, Artificial Sequence
  ENSG00000085733_8 (sequence is synthesized)
aaacggagaagcacgagtcccagaaagactatgtgaaagggtttggaggaaaatttggtgtgcagacagacagacaagacaaatgtgcccttggctgggatcaccaggagaaattgcagc

SEQ ID NO: 87401 - DNA, 120 bp, Artificial Sequence
  ENSG00000085733_9 (sequence is synthesized)
tgcatgaatcccaaaaagactactccaaaggattcggcgggaagtatggggtgcagaaggatcggatggataagaatgcgtcaacctttgaggatgtcacccaggtgtcctctgcctacc

SEQ ID NO: 87402 - DNA, 120 bp, Artificial Sequence
  ENSG00000085733_10 (sequence is synthesized)
agaagacagtacctgtcgaagctgtgaccagcaaaacaagtaacatcagagctaactttgaaaacctcgctaaggagaaagagcaggaggacaggcggaaggcggaggcggagagagccc

SEQ ID NO: 87403 - DNA, 120 bp, Artificial Sequence
  ENSG00000085733_11 (sequence is synthesized)
agcggatggccaaggagcggcaggagcaggaagaggccaggaggaagctggaggagcaagccagagccaaaacgcaaacgccccctgtgtcgcccgcacctcagccaaccgaggagaggc

SEQ ID NO: 87404 - DNA, 120 bp, Artificial Sequence
  ENSG00000085733_12 (sequence is synthesized)
tgccctcgagccccgtctatgaggatgcggcttccttcaaggcagagctgagctacagaggccctgtgagtgggacggagccggagcccgtgtacagcatggaggccgctgactaccgag

SEQ ID NO: 87405 - DNA, 120 bp, Artificial Sequence
  ENSG00000085733_13 (sequence is synthesized)
acagaggctgtctatgaaagcgcagaggccccgggccactatcccgcagaggacagcacctacgatgagtacgagaacgatctggggatcacagccgtcgccctgtacgactaccaggct

SEQ ID NO: 87406 - DNA, 120 bp, Artificial Sequence
  ENSG00000085733_14 (sequence is synthesized)
gcgggcgatgatgagatctcatttgaccctgatgacatcatcaccaacatcgagatgattgacgacggctggtggcgcggggtgtgcaagggccggtacgggctcttcccagccaactat

SEQ ID NO: 87407 - DNA, 120 bp, Artificial Sequence
  ENSG00000085733_15 (sequence is synthesized)
gtggagctgcggcagtagggcccccagcccccccccggagctgcgccctggatcctcacactacagatcaggccttctttggttcttgggtggttttgggttttttctgttttttttttt

SEQ ID NO: 87408 - DNA, 120 bp, Artificial Sequence
  ENSG00000085733_16 (sequence is synthesized)
ttttttttttttttgaaggtggggaggggaatatacacattgcttttatatttaatacttttgctgatgcttttgaaaatgtttatgccacagaatttgctaatatattgtaatcacatt

SEQ ID NO: 87409 - DNA, 120 bp, Artificial Sequence
  ENSG00000085733_17 (sequence is synthesized)
ccttaggaggactttggtaattggttttatgcattgatggttttttttttcttttttgccaaattgactgtcacgcggcagcttcagggagctcgcattctcttgtgttcgtgttgccct

SEQ ID NO: 87410 - DNA, 120 bp, Artificial Sequence
  ENSG00000085733_18 (sequence is synthesized)
cgtgcccatcaagtgcagtcgggacctcccaggacaagcacgaggcctcaggtcggccctgtggcgggtaggcaggaaggactgtcccagacgaggggcttcctctagagtctcactgct

SEQ ID NO: 87411 - DNA, 120 bp, Artificial Sequence
  ENSG00000085733_19 (sequence is synthesized)
ggggaggagaggactgggcctgatggaagttaacccggagctaagtcacccagagcacaggagctgccatgtcagatgggaaatctgcctatgtcataccgtgacagcccgcaggatcag

SEQ ID NO: 87412 - DNA, 120 bp, Artificial Sequence
  ENSG00000085733_20 (sequence is synthesized)
gtgacttctagcagagaccctggtttttttcctgtgcccactccggcttgtcctcatctctacccatcccctgatgcccaggtcaccgggagggctgctgggagcctctcctgtccccgc

SEQ ID NO: 87413 - DNA, 120 bp, Artificial Sequence
  ENSG00000085733_21 (sequence is synthesized)
cgggcagtgtcactgagtccttgaaatcctcccctgccccgcgggtctctggattgggacgcacagtgcagttgaggtctgcgtcgggcttggcttttcacaaaggctgatgtcttaact

SEQ ID NO: 87414 - DNA, 120 bp, Artificial Sequence
  ENSG00000085733_22 (sequence is synthesized)
gtcacccatatggtccctgggccaccgggcagcctggggcggtgtgtgtgccatgtcacagcatggcctctcggccttgggaaggaaggcagtgcctgctctgctgtgagccgccaggaa

SEQ ID NO: 87415 - DNA, 120 bp, Artificial Sequence
  ENSG00000085733_23 (sequence is synthesized)
ccctcctcctgtcaatgggggtgtagtatttttgccaaaatatcatgttcaatttcagtagtttgatcagttgaaggctagaagtgtgaagtgcagatgagtgtgtgttcttccccaagg

SEQ ID NO: 87416 - DNA, 120 bp, Artificial Sequence
  ENSG00000085733_24 (sequence is synthesized)
tccccccacagctccaggacaccgctgtcctggcatttgtggccactcactttgtaggaaactcatctccttcctgaggagccgggaggctggaccagtcccgtcgtgcagtcaggtggg

SEQ ID NO: 87417 - DNA, 120 bp, Artificial Sequence
  ENSG00000085733_25 (sequence is synthesized)
cggtgtgtctttccagaaggtcacgtggaaatgtctcgggacttgggtcccggagtgcccgtgaagcgtgtttttgctcctgaggtgcattttctcatcatccttgctttaccacaatga

SEQ ID NO: 87418 - DNA, 120 bp, Artificial Sequence
  ENSG00000085733_26 (sequence is synthesized)
gcaatgaggtcgggttttatatgcaacttattgtatctgaattcctgtagcacacctcataggtatgatttttttaaattaaagaattcagaataaacattttttgatccacttgcgtga

SEQ ID NO: 87419 - DNA, 120 bp, Artificial Sequence
  ENSG00000085733_27 (sequence is synthesized)
gaatcccaaaaagattataagactggttttggaggcaaattcggtgttcagtcggagaggcaggactccgctgctgtggggtttgattacaaggagaagctggccaagcacgagtcccag

SEQ ID NO: 87420 - DNA, 120 bp, Artificial Sequence
  ENSG00000085733_28 (sequence is synthesized)
ccgagggcccctctgcggatggagccccaggtgcaacagggcccatggtcatctgtggagggacagcccgtgtggaaactgcatttatcttcttgacctgatacccatgcagtaaatgaa

SEQ ID NO: 87421 - DNA, 120 bp, Artificial Sequence
  ENSG00000085733_29 (sequence is synthesized)
cacacacatatatgtgtatttgtgtaatgtgtgtgtttatatgtgtatatttagatacttctgtgctcagtaatttttaaattcccattgcaaacaatttccgtatttataattttagag

SEQ ID NO: 87422 - DNA, 120 bp, Artificial Sequence
  ENSG00000085733_30 (sequence is synthesized)
tgtccgcttctcagtattgtggcttttatcagggaacatttgtccctaagctctaccttacaagcgagaggtttctaaagtatgagatgtctgaataactgagaccttaaatgccctgtc

SEQ ID NO: 87423 - DNA, 120 bp, Artificial Sequence
  ENSG00000085733_31 (sequence is synthesized)
cctttttttattatctggaaatgattatgtgttaatagtgaggtactgtgagctttgtgttcttatcgaaagcccagagttgggcactgagtgaaccctgtcattgtttctcacttggca

SEQ ID NO: 87424 - DNA, 120 bp, Artificial Sequence
  ENSG00000085733_32 (sequence is synthesized)
ctatctaaaatgccagctcttggggcagttttttttttcgtcagaaagtgtagataaaaggaacttttaaaatatgctcagacttttattttaggccacgctgggttcagagtggatcct

SEQ ID NO: 87425 - DNA, 120 bp, Artificial Sequence
  ENSG00000085733_33 (sequence is synthesized)
cctttccctggctgtgaaggcagcaccactgacccggtgaccgcctcagtatcccgggaagactgtcccgcttgaccacggtcccttcagctgagaaagatttagtccttcctccagaaa

SEQ ID NO: 87426 - DNA, 120 bp, Artificial Sequence
  ENSG00000085733_34 (sequence is synthesized)
aaaagcaagagaacaaactgcgattgagcctctttttagcgctcagtagagcaggcgcacaggaagcagatgagaataagcccgtgctggtgcggaagactgtgctattgaagtggcgcg

SEQ ID NO: 87427 - DNA, 120 bp, Artificial Sequence
  ENSG00000085733_35 (sequence is synthesized)
gctgtctcatggtgcgggtggaagccgcatgcgtgggagcttccatggggtcctgtctggcttagtcacgatgctgaggtcatagactaggttatttcctgccactctccaaggagggcc

SEQ ID NO: 87428 - DNA, 120 bp, Artificial Sequence
  ENSG00000085733_36 (sequence is synthesized)
tcttcatggatgttatctaaagtattaccaaagatccggaagggaagagtagattgagtgaatcatatgcgtttaactgtattgaaaacatactttccacctgtgacctgcactacctgt

SEQ ID NO: 87429 - DNA, 120 bp, Artificial Sequence
  ENSG00000085733_37 (sequence is synthesized)
agtcatgccagtccgaagaccaaagtcaaatctgtaggtccccatggttcacagcacacacggaatccagccaaaggcctggctaacatccttcatgcgttcagtgaccatcagagcagt

SEQ ID NO: 87430 - DNA, 120 bp, Artificial Sequence
  ENSG00000085733_38 (sequence is synthesized)
agtaatgtgacaggtggtagccacaccggaaaaggaaaaacaaagcgttattgatagcccttaacgtagatgtctctttttcatgaaatgcccaacttgaaaacggcacatccagaaaca

SEQ ID NO: 87431 - DNA, 120 bp, Artificial Sequence
  ENSG00000085733_39 (sequence is synthesized)
ttcggaggcaagtttggtgtccagatggacagagttgatcagtctgctgtaggctttgaataccaggggaagactgagaagcatgcctcccagaaaggtaagacgcgaaaggtgcagaaa

SEQ ID NO: 87432 - DNA, 120 bp, Artificial Sequence
  ENSG00000085733_40 (sequence is synthesized)
gagcccgctccgggggccccgatggggagagtcacagccacctgaagccgtttccccgcgctccgggggccctgatggggagagtcacagccacctgaagccgtttcctgagcggtggct

SEQ ID NO: 87433 - DNA, 120 bp, Artificial Sequence
  ENSG00000085733_41 (sequence is synthesized)
tctgctgtcattgtggggcttctcccccttgtagcggaagccgccttcccttcatctgggcagcgctcctcctggaaaagagagctcacagattgatcggcagaaagctaacttcccccc

SEQ ID NO: 87434 - DNA, 120 bp, Artificial Sequence
  ENSG00000085733_42 (sequence is synthesized)
aaggctagaaaccagagttgttaaattcttgttttccttatacacatacggtcttaactgctggtgattaatcttgattacatcatgcagtctcttttttgaaagaccaaagcatatcgc

SEQ ID NO: 87435 - DNA, 120 bp, Artificial Sequence
  ENSG00000085733_43 (sequence is synthesized)
tcctcctgtgtcaccacttgtcagctgtcaggctgttcggcactttaaacccatttctagtagagcgacactgattttgagtggttcactttcttccctgtgaacttgtgatctgtgtat

SEQ ID NO: 87436 - DNA, 120 bp, Artificial Sequence
  ENSG00000085733_44 (sequence is synthesized)
ggcaggatgcgccagttagtgtgtgggtgccatctttctaacccggtgacccatccagtctctggactggggcatctccggtctccagcagcattctgcccgaggctgttctgctgttat

SEQ ID NO: 87437 - DNA, 120 bp, Artificial Sequence
  ENSG00000085733_45 (sequence is synthesized)
tgaggagagaggtgttggttcaaccaaaccactggccatttgaccaggggcttcgtagcagcaagggccaggagacaggcgtgttctgtgtggtttctgtgtttcatttgtggtggtgtt

SEQ ID NO: 87438 - DNA, 120 bp, Artificial Sequence
  ENSG00000085733_46 (sequence is synthesized)
tttggccggggttgggaggttttttgtttgttctgtttgatgacaccatatgtgtgtaacatctccacacagagccacacagtatgtacgtgaagccagctctgcatccttccttagagc

SEQ ID NO: 87439 - DNA, 120 bp, Artificial Sequence
  ENSG00000085733_47 (sequence is synthesized)
agttatgttgttaccttcaaaatttggacttggttattagaacctgaacacataattggaaaaacagtaattccctaaccttgcagggaagactctaggctttccacctgcagcgttaga

SEQ ID NO: 87440 - DNA, 120 bp, Artificial Sequence
  ENSG00000085733_48 (sequence is synthesized)
tagacacacctggggtggtcccgcagactgcatggagatggcagtggctctccgtggcatcactgctgcatgacagtgtgactttcatgtggatctgtgttgctgcaacggaagtctttg

SEQ ID NO: 87441 - DNA, 120 bp, Artificial Sequence
  ENSG00000085733_49 (sequence is synthesized)
gggaatgctgaagcctctgcccctggcctgtgctctgcttctcactgcctgtgtctcacgaccatgggtggaagcaaaacttgccttgcaagtgaagcctcgcttggccattctcgtttc

SEQ ID NO: 87442 - DNA, 120 bp, Artificial Sequence
  ENSG00000085733_50 (sequence is synthesized)
ttcccgctgtggtgcaccttcttgggctgtttctggatctgtctgcatgcacccacggccacccccatgctcgcctccacctcagagtaagtgttgtgttttgccacgtttcagactact

SEQ ID NO: 87443 - DNA, 120 bp, Artificial Sequence
  ENSG00000085733_51 (sequence is synthesized)
tgattttcaaagtgggcatgcagcgtcatttctgactacacaaaggaactgccctgtaacagctgacagggcccagaacccccccatgcacctgttgtgaaacagggtccagcgtcacct

SEQ ID NO: 87444 - DNA, 120 bp, Artificial Sequence
  ENSG00000085733_52 (sequence is synthesized)
gtatggagcagtgggtggcttgttgtacattttaaaatgtgcgcttgatgtgtttgtgagttgtaacccctacacacttttgcttagtttaacaaaaggaacagtgtagttcgtcctcag

SEQ ID NO: 87445 - DNA, 120 bp, Artificial Sequence
  ENSG00000085741_0 (sequence is synthesized)
cgtgcaggcggaggacttcggcgcggctcctcctgggtgtgaccccgggcgcgcccgccgcgcgacgatgagggcgcggccgcaggtctgcgaggcgctgctcttcgccctggcgctcca

SEQ ID NO: 87446 - DNA, 120 bp, Artificial Sequence
  ENSG00000085741_1 (sequence is synthesized)
aggcgctgctcttcgccctggcgctccagaccggcgtgtgctatggcatcaagtggctggcgctgtccaagacaccatcggccctggcactgaaccagacgcaacactgcaagcagctgg

SEQ ID NO: 87447 - DNA, 120 bp, Artificial Sequence
  ENSG00000085741_2 (sequence is synthesized)
agggtctggtgtctgcacaggtgcagctgtgccgcagcaacctggagctcatgcacacggtggtgcacgccgcccgcgaggtcatgaaggcctgtcgccgggcctttgccgacatgcgct

SEQ ID NO: 87448 - DNA, 120 bp, Artificial Sequence
  ENSG00000085741_3 (sequence is synthesized)
ggaactgctcctccattgagctcgcccccaactatttgcttgacctggagagagggacccgggagtcggccttcgtgtatgcgctgtcggccgccgccatcagccacgccatcgcccggg

SEQ ID NO: 87449 - DNA, 120 bp, Artificial Sequence
  ENSG00000085741_4 (sequence is synthesized)
cctgcacctccggcgacctgcccggctgctcctgcggccccgtcccaggtgagccacccgggcccgggaaccgctggggaggatgtgcggacaacctcagctacgggctcctcatggggg

SEQ ID NO: 87450 - DNA, 120 bp, Artificial Sequence
  ENSG00000085741_5 (sequence is synthesized)
ccaagttttccgatgctcctatgaaggtgaaaaaaacaggatcccaagccaataaactgatgcgtctacacaacagtgaagtggggagacaggctctgcgcgcctctctggaaatgaagt

SEQ ID NO: 87451 - DNA, 120 bp, Artificial Sequence
  ENSG00000085741_6 (sequence is synthesized)
gtaagtgccatggggtgtctggctcctgctccatccgcacctgctggaaggggctgcaggagctgcaggatgtggctgctgacctcaagacccgatacctgtcggccaccaaggtagtgc

SEQ ID NO: 87452 - DNA, 120 bp, Artificial Sequence
  ENSG00000085741_7 (sequence is synthesized)
ctgcatgaagaatgagaaggtgggctcccacgggacacaagacaggcagtgcaacaagacatccaacggaagcgacagctgcgaccttatgtgctgcgggcgtggctacaacccctacac

SEQ ID NO: 87453 - DNA, 120 bp, Artificial Sequence
  ENSG00000085741_8 (sequence is synthesized)
agaccgcgtggtcgagcggtgccactgtaagtaccactggtgctgctacgtcacctgccgcaggtgtgagcgtaccgtggagcgctatgtctgcaagtgaggccctgccctccgccccac

SEQ ID NO: 87454 - DNA, 120 bp, Artificial Sequence
  ENSG00000085741_9 (sequence is synthesized)
gcaggagcgaggactctgctcaaggaccctcagcaactggggccaggggcctggagacactccatggagctctgcttgtgaattccagatgccaggcatgggaggcggcttgtgctttgc

SEQ ID NO: 87455 - DNA, 120 bp, Artificial Sequence
  ENSG00000085741_10 (sequence is synthesized)
cttcacttggaagccaccaggaacagaaggtctggccaccctggaaggagggcaggacatcaaaggaaaccgacaagattaaaaataacttggcagcctgaggctctggagtgcccacag

SEQ ID NO: 87456 - DNA, 120 bp, Artificial Sequence
  ENSG00000085741_11 (sequence is synthesized)
gctggtgtaaggagcggggcttgggatcggtgagactgatacagacttgacctttcagggccacagagaccagcctccgggaaggggtctgcccgccttcttcagaatgttctgcgggac

SEQ ID NO: 87457 - DNA, 120 bp, Artificial Sequence
  ENSG00000085741_12 (sequence is synthesized)
cccctggcccaccctggggtctgagcctgctgggcccaccacatggaatcactagcttgggttgtaaatgttttcttttgttttttgctttttcttcctttgggatgtggaagctacaga

SEQ ID NO: 87458 - DNA, 120 bp, Artificial Sequence
  ENSG00000085741_13 (sequence is synthesized)
taaaacatagctttttctttggggtggcacttctcaattcctctttatatattttatatatataaatatatatgtatatatataatgatctctattttaaaactagctttttaagcagct

SEQ ID NO: 87459 - DNA, 120 bp, Artificial Sequence
  ENSG00000085741_14 (sequence is synthesized)
aagcagctgtatgaaataaatgctgagtgagccccagcccgcccctgcagttcccggcctcgtcaagtgaactcggcagaccctggggctggcagagggagctctccagtttccaggcaa

SEQ ID NO: 87460 - DNA, 120 bp, Artificial Sequence
  ENSG00000085741_15 (sequence is synthesized)
agctcgggcgagcggcgagcacaggccacgggagctgagcgcagcagagagcagccggagtccgcgcctgactccgcgcgggtcctgagccggccgcagcttgccaggatccccggcgtc

SEQ ID NO: 87461 - DNA, 120 bp, Artificial Sequence
  ENSG00000085741_16 (sequence is synthesized)
gcaggccggggcacccgggcacgcagggcgcgcctggcgagcgccccgggagggataagccccagctccgggtcctcgactctgctgcctcgcctggactcctgattcctcattcctctc

SEQ ID NO: 87462 - DNA, 120 bp, Artificial Sequence
  ENSG00000085741_17 (sequence is synthesized)
tctcctttccgtcccaggcggcgtgcaggaccagcggcggccgtgcaggcggaggacttcggcgcggctcctcctgggtgtgaccccgggcgcgcccgccgcgcgacgatgagggcgcgg

SEQ ID NO: 87463 - DNA, 120 bp, Artificial Sequence
  ENSG00000085741_18 (sequence is synthesized)
cgggaggtgagcagtggtcgcgggcagcgggcagccgctcagcggggacccgccagggctgggggcgcccgagtccgagggggacgacgcttctcgcacccgccacgacccccttgggca

SEQ ID NO: 87464 - DNA, 120 bp, Artificial Sequence
  ENSG00000085741_19 (sequence is synthesized)
gcttctcgcacccgccacgacccccttgggcacccactcccgggcggcgtgcaggaccagcggcggccgtgcaggcggaggacttcggcgcggctcctcctgggtgtgaccccgggcgcg

SEQ ID NO: 87465 - DNA, 120 bp, Artificial Sequence
  ENSG00000085760_0 (sequence is synthesized)
attcttccgggtccagaaggtgatctccgcccgtgctcagaatccaggggcccggggctgtagattccttgacaaggatatcctagcggcgaaacaacaccgtactgggagtcagaacgt

SEQ ID NO: 87466 - DNA, 120 bp, Artificial Sequence
  ENSG00000085760_1 (sequence is synthesized)
ctgggttctagtcttgactgccattaactagcggtatgacattggagaagcttttttgacccttctggatttccgtttccttttctgtaaaatgaggagcttggaagatccggaaaatga

SEQ ID NO: 87467 - DNA, 120 bp, Artificial Sequence
  ENSG00000085760_2 (sequence is synthesized)
ggcccataggaaacaagtgacttgctgagtccagataacactgactgtcagagagaaacatgaaccagaagctactgaagttggagaacttgctacgatttcacactatttataggcaac

SEQ ID NO: 87468 - DNA, 120 bp, Artificial Sequence
  ENSG00000085760_3 (sequence is synthesized)
tgcacagtctgtgtcaaagaagagcattaagacagtggaggcatgggttttcatctgcttaccctgtgtggacagctcaactgtgtgcctggccctggccaacagatgtgctcactgggg

SEQ ID NO: 87469 - DNA, 120 bp, Artificial Sequence
  ENSG00000085760_4 (sequence is synthesized)
ctgctttatctcagtataggcttctagtaacaaaaaaggaagaaggaccatggaaatctcagttatcttcaacaaaatctaaaaaggtggtagaagtatggattggaatgactattgagg

SEQ ID NO: 87470 - DNA, 120 bp, Artificial Sequence
  ENSG00000085760_5 (sequence is synthesized)
aactggccagggcaatggaaaaaaacacagattatgtatatgaagctttattgaacactgatattgacatagattcactggaagcagactcacatttagatgaagtctggatcaaagaag

SEQ ID NO: 87471 - DNA, 120 bp, Artificial Sequence
  ENSG00000085760_6 (sequence is synthesized)
tgataacgaaggcagggatgaagttaaagtggagtaaattaaaacaggacaaagtcagaaaaaataaagatgctgtaagaaggccccaggcagatccagctttattaaccccaaggtccc

SEQ ID NO: 87472 - DNA, 120 bp, Artificial Sequence
  ENSG00000085760_7 (sequence is synthesized)
cagttgttactataatgggccatgttgatcacgggaaaacgacattacttgacaaatttcgaaaaactcaagtggcagcagtggaaactggaggcatcactcagcacattggtgcctttc

SEQ ID NO: 87473 - DNA, 120 bp, Artificial Sequence
  ENSG00000085760_8 (sequence is synthesized)
ttgtctctctgccttctggggaaaagataacttttcttgatactccaggacatgctgctttctcagcaatgagagccagaggtgctcaggtcactgacattgtcgtattggttgtagctg

SEQ ID NO: 87474 - DNA, 120 bp, Artificial Sequence
  ENSG00000085760_9 (sequence is synthesized)
cagatgatggagtgatgaaacaaactgtagaatctattcagcatgccaaagatgcacaggttcctattatccttgccgtaaataaatgtgacaaagctgaggctgatcctgagaaagtga

SEQ ID NO: 87475 - DNA, 120 bp, Artificial Sequence
  ENSG00000085760_10 (sequence is synthesized)
ttacgatgtggtatgtgaagattatggaggtgatgttcaagcagtgcctgtctccgcacttacgggcgataatctgatggctttggcagaagcaacagttgctcttgcagaaatgttaga

SEQ ID NO: 87476 - DNA, 120 bp, Artificial Sequence
  ENSG00000085760_11 (sequence is synthesized)
attgaaagcagatcccaatggtccagtggaaggaacagtaatagagtctttcacagacaaaggaagaggtcttgttactacagctataattcaaagaggaactttaagaaaaggctctgt

SEQ ID NO: 87477 - DNA, 120 bp, Artificial Sequence
  ENSG00000085760_12 (sequence is synthesized)
tctggttgctggaaaatgttgggcaaaagtacgcttaatgtttgatgaaaatggaaaaacaattgatgaggcctatcccagcatgccagtgggaattacaggctggagagaccttccttc

SEQ ID NO: 87478 - DNA, 120 bp, Artificial Sequence
  ENSG00000085760_13 (sequence is synthesized)
tgcaggagaagaaattcttgaagtagaatctgagccaagggcacgtgaagttgttgactggaggaaatatgaacaagaacaggagaaaggtcaggaggatctgaaaataatagaagaaaa

SEQ ID NO: 87479 - DNA, 120 bp, Artificial Sequence
  ENSG00000085760_14 (sequence is synthesized)
gcgaaaggaacacaaagaagcacatcagaaagcccgtgagaagtatggccatctactgtggaagaagagatcaattctacggtttttagaaagaaaagaacaaatacccttaaagccaaa

SEQ ID NO: 87480 - DNA, 120 bp, Artificial Sequence
  ENSG00000085760_15 (sequence is synthesized)
agagaaaagggaaagagattcaaatgtactttctgtgattattaaaggtgatgttgatggttctgttgaggccattttgaacattatagatacctatgatgcttcacacgagtgtgaact

SEQ ID NO: 87481 - DNA, 120 bp, Artificial Sequence
  ENSG00000085760_16 (sequence is synthesized)
agaattagtacattttggagtgggtgatgtaagtgcaaatgatgttaaccttgctgaaacatttgatggtgttatatatggctttaatgtgaatgcaggcaatgttatccaacagtcagc

SEQ ID NO: 87482 - DNA, 120 bp, Artificial Sequence
  ENSG00000085760_17 (sequence is synthesized)
tgcaaaaaaaggagtaaaaattaaacttcacaaaataatttaccgtcttgttgaagatttgcaagaggaactgagcagcagattaccctgtgctgtggaagagcacccagtaggtgaggc

SEQ ID NO: 87483 - DNA, 120 bp, Artificial Sequence
  ENSG00000085760_18 (sequence is synthesized)
atctatactagctaccttctctgtaacagaagggaagaaaaaagttcctgtggctggctgcagagtccaaaagggacagttagaaaaacaaaaaaaatttaaactaacccgtaatggaca

SEQ ID NO: 87484 - DNA, 120 bp, Artificial Sequence
  ENSG00000085760_19 (sequence is synthesized)
tgtaatttggaagggctcattaacctcattgaaacaccataaagatgacatttcaattgtcaaaacgggaatggattgtggtctcagtttagatgaagacaatatggaatttcaagtggg

SEQ ID NO: 87485 - DNA, 120 bp, Artificial Sequence
  ENSG00000085760_20 (sequence is synthesized)
agacagaattgtttgttatgaagaaaagcaaattcaagccaagacttcttgggatccaggattttaaaattacattaaaaatgtaaataactcaacgtgttgtttgtttgaaggtagaaa

SEQ ID NO: 87486 - DNA, 120 bp, Artificial Sequence
  ENSG00000085760_21 (sequence is synthesized)
cggggctgtaggtaggagttaagtgggtaggatcccttaaccagggttgtccggtgcaggtggtgtgtgttgtttcgcctaacgtgtcagtggcacaaatcacgcgaacttcataaacat

SEQ ID NO: 87487 - DNA, 120 bp, Artificial Sequence
  ENSG00000085760_22 (sequence is synthesized)
tgtgcgttcggaagcctttccaagatgcatttaatccctgcgtgagcccacgttaggcattcacgaaggcatgtgcactgttctctcggaagcggctggccggcttcccctcctcgcgcg

SEQ ID NO: 87488 - DNA, 120 bp, Artificial Sequence
  ENSG00000085760_23 (sequence is synthesized)
cggctgtgggtgcaggtcctcacttcccagcctcccatgggcccaaggccttctgggctccaatttgaggcgagccaccccagatccgtaatttttctgcagtgatttatttttaccttt

SEQ ID NO: 87489 - DNA, 120 bp, Artificial Sequence
  ENSG00000085760_24 (sequence is synthesized)
gtaagaagtctctctgccttctggggaaaagataacttttcttgatactccaggacatgctgctttctcagcaatgagagccagaggtgctcaggtcactgacattgtcgtattggttgt

SEQ ID NO: 87490 - DNA, 120 bp, Artificial Sequence
  ENSG00000085760_25 (sequence is synthesized)
atcctcaaagcttataagcgagtatcaagacatgtgatatggttttaaaatagctgatgataaagtatatacatcatctcattttctcctcttagtcttgtaataggaaggacagatatt

SEQ ID NO: 87491 - DNA, 120 bp, Artificial Sequence
  ENSG00000085760_26 (sequence is synthesized)
gcagacagtcccacccccagcggcgacagcaactctctgaattccggaaagaaccttttccagcgggaccggaagcccggcggggaccgtagcggggacggactgacctaccgaccattc

SEQ ID NO: 87492 - DNA, 80 bp, Artificial Sequence
  ENSG00000085788_0 (sequence is synthesized)
gcgacacttgccgcccgtgccctgcggccctgcacgccccacccgcggtcgcgcgccgcgctccccgccgcctcaccttt

SEQ ID NO: 87493 - DNA, 120 bp, Artificial Sequence
  ENSG00000085788_1 (sequence is synthesized)
gtgttcggcgcgagcccggcggggctgcaggttccgccctgctccgccgcgccccgcccgggctggggtaaaggccgcggccgggccatgcagtgtcctcctcagggagggcaggagagc

SEQ ID NO: 87494 - DNA, 120 bp, Artificial Sequence
  ENSG00000085788_2 (sequence is synthesized)
gggcaggagagcctgaggagtggcggggccgccagagagcgaaatgtcatcagtgcagtcacaacaggagcagttgtcccagtcagatccatctccgtcaccaaactcatgtagttcctt

SEQ ID NO: 87495 - DNA, 120 bp, Artificial Sequence
  ENSG00000085788_3 (sequence is synthesized)
tgagctaatagacatggatgctggcagcttgtatgaaccagtttctccccattggttttattgtaagataatagattctaaggagacatggattcctttcaactctgaggattcacagca

SEQ ID NO: 87496 - DNA, 120 bp, Artificial Sequence
  ENSG00000085788_4 (sequence is synthesized)
gctggaagaggcatatagctctggaaaaggttgtaatgggagagttgttcctactgatgggggcagatatgatgttcatttgggggagaggatgcggtatgctgtatactgggatgaact

SEQ ID NO: 87497 - DNA, 120 bp, Artificial Sequence
  ENSG00000085788_5 (sequence is synthesized)
ggcatcggaagtgagacgatgtacgtggttttacaagggggacaaagacaataagtatgttccctactcggagagcttcagccaagttttagaggaaacttacatgcttgctgtaacttt

SEQ ID NO: 87498 - DNA, 120 bp, Artificial Sequence
  ENSG00000085788_6 (sequence is synthesized)
ggatgaatggaaaaagaaactggaatctcccaacagagaaattattattttacacaatccaaagcttatggtgcattaccagccagttgcagggtctgatgattggggttcaacacccac

SEQ ID NO: 87499 - DNA, 120 bp, Artificial Sequence
  ENSG00000085788_7 (sequence is synthesized)
ggagcagggtcgaccaagaactgtgaagagaggagttgagaacatctctgttgacattcattgtggagaacctttacaaatagatcacttggtttttgtagtccatgggattggaccagc

SEQ ID NO: 87500 - DNA, 120 bp, Artificial Sequence
  ENSG00000085788_8 (sequence is synthesized)
ttgtgatctccgctttcgaagcattgtacagtgtgttaatgattttcgcagtgtttccttgaacttgctacagacacattttaagaaagcccaagaaaatcagcagattgggagggtaga

SEQ ID NO: 87501 - DNA, 120 bp, Artificial Sequence
  ENSG00000085788_9 (sequence is synthesized)
atttcttccagtcaactggcacagtcctttgcattctactggtgtggatgtagatctgcagcgaataaccctgcccagcattaaccgcctcaggcacttcaccaatgacacaattctgga

SEQ ID NO: 87502 - DNA, 120 bp, Artificial Sequence
  ENSG00000085788_10 (sequence is synthesized)
tgtcttcttctacaatagtcccacctactgtcagactattgtggacacagttgcttctgaaatgaaccgaatatacacactttttctacagaggaaccctgatttcaaagggggtgtatc

SEQ ID NO: 87503 - DNA, 120 bp, Artificial Sequence
  ENSG00000085788_11 (sequence is synthesized)
cattgctggtcatagtttaggttcgcttatattgtttgatatcctaacaaatcagaaagattctttgggggatattgacagtgaaaaggattcgctaaatattgtaatggatcaaggaga

SEQ ID NO: 87504 - DNA, 120 bp, Artificial Sequence
  ENSG00000085788_12 (sequence is synthesized)
tacacctacactagaggaagatttgaagaaacttcagctctctgaattctttgatatctttgagaaggagaaagtagataaggaagctctggctttatgtacagaccgagatcttcagga

SEQ ID NO: 87505 - DNA, 120 bp, Artificial Sequence
  ENSG00000085788_13 (sequence is synthesized)
aataggaattcctttaggaccaagaaagaagatattaaactatttcagcaccagaaaaaactcaatgggtattaagagaccagccccgcagcctgcttcaggggcaaacatccccaaaga

SEQ ID NO: 87506 - DNA, 120 bp, Artificial Sequence
  ENSG00000085788_14 (sequence is synthesized)
atctgagttctgcagtagcagtaatactagaaatggtgactatctggatgttggcattgggcaggtgtctgtgaaatacccccggctcatctataaaccagagatattctttgcctttgg

SEQ ID NO: 87507 - DNA, 120 bp, Artificial Sequence
  ENSG00000085788_15 (sequence is synthesized)
atctcccattggaatgttccttactgtccgaggactaaaaagaattgatcccaactacagatttccaacgtgcaaaggtttcttcaatatttatcacccttttgatcctgtggcctatag

SEQ ID NO: 87508 - DNA, 120 bp, Artificial Sequence
  ENSG00000085788_16 (sequence is synthesized)
gattgaaccaatggtggtcccaggagtggaatttgagccaatgctgatcccacatcataaaggcaggaagcggatgcacttagaactgagagagggcttgaccaggatgagtatggacct

SEQ ID NO: 87509 - DNA, 120 bp, Artificial Sequence
  ENSG00000085788_17 (sequence is synthesized)
taagaacaacttgctaggttcgctgcggatggcctggaagtcttttaccagagctccataccctgccttacaagcttcagaaacaccagaagaaactgaagcagaacctgaatcaacttc

SEQ ID NO: 87510 - DNA, 120 bp, Artificial Sequence
  ENSG00000085788_18 (sequence is synthesized)
agagaagcctagtgatgttaacacagaagagacctctgtggcagttaaagaagaagtcctgcctatcaatgtggggatgctgaatggaggccaacgcattgactatgtgctacaggagaa

SEQ ID NO: 87511 - DNA, 120 bp, Artificial Sequence
  ENSG00000085788_19 (sequence is synthesized)
ctattgaaagttttaatgagtatttatttgctttacaaagccatctatgctactgggagtctgaagatacagtattgctcgtcctcaaagagatctaccaaacccagggtatcttccttg

SEQ ID NO: 87512 - DNA, 120 bp, Artificial Sequence
  ENSG00000085788_20 (sequence is synthesized)
atcagcctttacagtaaaaatgacccatctatggctgcttaatacggacattgagggatccttccccagaaaatccacctgtttgttgctgcaattttcctctcctcagctgcgtcattt

SEQ ID NO: 87513 - DNA, 120 bp, Artificial Sequence
  ENSG00000085788_21 (sequence is synthesized)
cctgcatgttgcctgccacttactcaccactggggtctttggaagataatcttcctctttggaaatgaatggaaaagcaaaaggccctattacttttaaccactggcttcatataaacac

SEQ ID NO: 87514 - DNA, 120 bp, Artificial Sequence
  ENSG00000085788_22 (sequence is synthesized)
ttgccatttttttctgcatagctgggggtggtttgtgtctttaattctttgatgatagtttatagttgccacactttattgattagtacttgacagggtgtaaagcctattttgggtttg

SEQ ID NO: 87515 - DNA, 120 bp, Artificial Sequence
  ENSG00000085788_23 (sequence is synthesized)
atttgttttgggtggggtagacatgtttttaaggaacttattgcttatctttagaaaatgttctagtttggaaacagattcttgagattcagaaggcattttggagtacacttatctctt

SEQ ID NO: 87516 - DNA, 120 bp, Artificial Sequence
  ENSG00000085788_24 (sequence is synthesized)
gtttgtgttgaactgaaggctaagtctcagtggacatggaaaagacttttgggtgatttatttttgaacctgcatttctttcttatgtgtagtgtatgaagaaagactagaatgtagctt

SEQ ID NO: 87517 - DNA, 120 bp, Artificial Sequence
  ENSG00000085788_25 (sequence is synthesized)
taaaaaagtgttgtttactctcttagaactgacagacttattgccagaaatcactgatgttcattgtttttgcaactgtttgagctgctgtaagagtctaaagttgacaagttagttcat

SEQ ID NO: 87518 - DNA, 120 bp, Artificial Sequence
  ENSG00000085788_26 (sequence is synthesized)
gttaggtgcatctttataaagcaaagatgttgtatatcctaggcctcccttttatatttgatagaagttatttgctaatagcttctattcttacgttgaaaatagttgtaaaagctgatg

SEQ ID NO: 87519 - DNA, 120 bp, Artificial Sequence
  ENSG00000085788_27 (sequence is synthesized)
aacctgaaattgtgtagcctctacaggctgctgaggttctaaataaaaccttttagtggtgcctttatggtgaaacagaatttgtcacctgccatttctacttgagctaaggtagtattg

SEQ ID NO: 87520 - DNA, 120 bp, Artificial Sequence
  ENSG00000085788_28 (sequence is synthesized)
tgtatcctctttccttcttaggtatccataatccacaaagcatatttaaaaggctcttggcacgggcagcattggttgagcaggtaggtttggctagggggaaatgtttaacttgttctg

SEQ ID NO: 87521 - DNA, 120 bp, Artificial Sequence
  ENSG00000085788_29 (sequence is synthesized)
aaagaaaaacttatgtctgtagggtccaagaaacagctattccagagtcagtgtcagctgagtctggaacatatgaagtgaggtttacttctaagaacacaagtgactgcacactaattt

SEQ ID NO: 87522 - DNA, 120 bp, Artificial Sequence
  ENSG00000085788_30 (sequence is synthesized)
tgtcaaggcatcttttcactactttgctgtagatttttcttcttcattggtcagtttgtcattgtctttgtagttctctttatgataatcctttatacttgctctcagattccacaggcc

SEQ ID NO: 87523 - DNA, 120 bp, Artificial Sequence
  ENSG00000085788_31 (sequence is synthesized)
tctgtttatagagtggcaaaggcaggcgagctgtggtttattgtttataaatttttttataaatgttatggtattcaaagccactgacatttaatatttactgaagccattccttagaca

SEQ ID NO: 87524 - DNA, 120 bp, Artificial Sequence
  ENSG00000085788_32 (sequence is synthesized)
gcagtggtctttatccctttctggaaagaaaaggaaaatgaagggtaattactgtcaccatggagattgtagaggtaaggttggggtataggtcaggcctggcctttctttgtcatctgc

SEQ ID NO: 87525 - DNA, 120 bp, Artificial Sequence
  ENSG00000085788_33 (sequence is synthesized)
ttatagtctagtgctaagtatgccactaagtttcagatatatggaatactttatttttttaaaggtatataaactctgagttattgagaattaagtattcactgtatattaaggggaagc

SEQ ID NO: 87526 - DNA, 120 bp, Artificial Sequence
  ENSG00000085788_34 (sequence is synthesized)
ttttgccaagttgtggtcttcaaatttatgtttactcttcctattggcagaataggtgctatttaagagtaaaccaaaggataagcagagggagtccctataaccaaagatggacagcat

SEQ ID NO: 87527 - DNA, 120 bp, Artificial Sequence
  ENSG00000085788_35 (sequence is synthesized)
agccctggatagccagataaaccactctttgtattaagaaatgtttctttcctagtggtgaggggtgggtaactgtgaaagagctttatatcttgtctattcatggtattatagctgtat

SEQ ID NO: 87528 - DNA, 120 bp, Artificial Sequence
  ENSG00000085788_36 (sequence is synthesized)
attcccaggatgataagcttgattgaaatcctgtatttagtcatatattatttgcgctgcttcatttgtatcatgtgcaatctctagaccaaccctatttttaaactctggtacagcatc

SEQ ID NO: 87529 - DNA, 120 bp, Artificial Sequence
  ENSG00000085788_37 (sequence is synthesized)
attttgtacatattcccagctgcagaactagtatcacttatctcagcaaaagagattgtttgcatggaaagattaatagcactgattagatttctaatattttgcatttttgaaatgttt

SEQ ID NO: 87530 - DNA, 120 bp, Artificial Sequence
  ENSG00000085788_38 (sequence is synthesized)
gttttctacgtgattatatttaaaactttagtaaatactaacatgaaaccatattgactagtggcctacttttacctggactcacccgtctcaaagtcaagaaaatcagtacagtcacga

SEQ ID NO: 87531 - DNA, 120 bp, Artificial Sequence
  ENSG00000085788_39 (sequence is synthesized)
ggaacctcggctcccgggaagccccgagcctgggggaaccctgggcaccctgtgaaccctgtggtctgcactggctgccctgctgctgtcgcggggctgcgggcggacgacctgagcccg

SEQ ID NO: 87532 - DNA, 120 bp, Artificial Sequence
  ENSG00000085788_40 (sequence is synthesized)
gacagagtgagactccgtctcaaaaatatgcactgctgatctgttaatagagttatggaatcattgagctaaatgaagtttgcatatgaacaaatgaatgaattggctacaaattgatat

SEQ ID NO: 87533 - DNA, 120 bp, Artificial Sequence
  ENSG00000085788_41 (sequence is synthesized)
ggctacaaattgatatgatttatagaaactctgttcgaaagtattggggacttgatgtttaaacattattttagtaaaaattcctataaccatgtatcatctgtaggattgatttggtac

SEQ ID NO: 87534 - DNA, 120 bp, Artificial Sequence
  ENSG00000085788_42 (sequence is synthesized)
tcatctgtaggattgatttggtacctatttctcctgttggaccatgagttcctccagagcagagcttttgtcttagactattttatttctatttctatttcttttttttctttctttttt

SEQ ID NO: 87535 - DNA, 76 bp, Artificial Sequence
  ENSG00000085788_43 (sequence is synthesized)
gatctcggctcactgcaacctctgcctgcagaggcgcatgccaccgtacccggctaatttttgtatctttagtaga

SEQ ID NO: 87536 - DNA, 120 bp, Artificial Sequence
  ENSG00000085788_44 (sequence is synthesized)
gccaccatgcccagcctagactgttttatttcttaagcactgttttcctaatttcttaagcactgagctcccttaaaattcagcaaatgtttgttaatgatgatgaatattttactaatt

SEQ ID NO: 87537 - DNA, 120 bp, Artificial Sequence
  ENSG00000085788_45 (sequence is synthesized)
tctttaaaaacatattttcaattgaagttgcaaaaccttggaacctcttaatttatatcttgcataaatgacaatttgttaaagttaagatacattgctgtggaaatctatgtatttctt

SEQ ID NO: 87538 - DNA, 120 bp, Artificial Sequence
  ENSG00000085788_46 (sequence is synthesized)
atggctgcttaatgtaagttttaaaatgtcatatatatagtgtaattcttacatattaacatgttataatgaactatggagcctcaagctctttttaaatatactagctgttgcctgtca

SEQ ID NO: 87539 - DNA, 120 bp, Artificial Sequence
  ENSG00000085788_47 (sequence is synthesized)
aaattcagaggtctagaagtggtctgtggtcaggaaatttggaaggggttggaagggtggcggtaaattggaaagaaagactccttgctgtatagatttgcttacatatgtaattggctt

SEQ ID NO: 87540 - DNA, 120 bp, Artificial Sequence
  ENSG00000085788_48 (sequence is synthesized)
tttcagcaccagaaaaaactcaatggtatgtgcctaatacagcttgttggactaaacaattctttgatgtccatagtgtgtccttgtgctttgtgggatgtttactctggggagccaagc

SEQ ID NO: 87541 - DNA, 67 bp, Artificial Sequence
  ENSG00000085788_49 (sequence is synthesized)
tccttgtgctttgtgggatgtttactctggggagccaagcagttttttggtaattgatctttggctc

SEQ ID NO: 87542 - DNA, 120 bp, Artificial Sequence
  ENSG00000085788_50 (sequence is synthesized)
tgctgggattacaggtgtgagccacccgcctggccgatctttggctctctttctagaaattaaacacattttcttttttacattcttttttttttcttttcctggaaatgaaatctcgct

SEQ ID NO: 87543 - DNA, 120 bp, Artificial Sequence
  ENSG00000085788_51 (sequence is synthesized)
aaattaaacacattttcttttttacattcttttttttttcttttcctggaaatgaaatctcgctgtgttgcccggggtggagtatagtgggtggtctcggctcactgcaacctccacctt

SEQ ID NO: 87544 - DNA, 60 bp, Artificial Sequence
  ENSG00000085788_52 (sequence is synthesized)
ccttccaggttcaagcaattctcctgcttcatcctcttgagtagctgggattccaggtgt

SEQ ID NO: 87545 - DNA, 120 bp, Artificial Sequence
  ENSG00000085788_53 (sequence is synthesized)
agatgacccatgtgcctcagcctcccaaagtgctgcaccgctcctggcccttctttttttacatccttaaaagtattattagcttcagaagtcttctctcctctggaattctcctaccat

SEQ ID NO: 87546 - DNA, 120 bp, Artificial Sequence
  ENSG00000085788_54 (sequence is synthesized)
ttatttatttatttattttttgcttttttcttttcatgagagttttaccaatatctacttcacatcacataccataaaattcacccttttaaagtttacaatttaatggtttttagtata

SEQ ID NO: 87547 - DNA, 120 bp, Artificial Sequence
  ENSG00000085788_55 (sequence is synthesized)
ttcatagagttatgtaaccattaccactatccaatttcagcacatttccattgtcccttagggaaaccccatacccatttgctgtcactccccattgctccctgcccccagcctctgtca

SEQ ID NO: 87548 - DNA, 120 bp, Artificial Sequence
  ENSG00000085788_56 (sequence is synthesized)
accactaatctactttctgtttctacagatttgcttattttggacattccatataaatggaatgtccttttgagccatgtgtctgacttctttcacttagcataatattctgaaggttta

SEQ ID NO: 87549 - DNA, 120 bp, Artificial Sequence
  ENSG00000085788_57 (sequence is synthesized)
cctgtgttaacagtacttccacattcagtttttctggtcactgaatttctaactccatatcttattagttagtttttttctttttgagtcggagtgttgctctgtcgcccaggatggagt

SEQ ID NO: 87550 - DNA, 64 bp, Artificial Sequence
  ENSG00000085788_58 (sequence is synthesized)
tttttgagtcggagtgttgctctgtcgcccaggatggagtgcagttgcacgatcttggctcaat

SEQ ID NO: 87551 - DNA, 120 bp, Artificial Sequence
  ENSG00000085788_59 (sequence is synthesized)
tctttttaaagactcagttcttggcccagcccatcgacatcctacttcccttgattacagaggcacagcacttcatagaactctagcaatcctcagcattatcttcccacagtgccctgc

SEQ ID NO: 87552 - DNA, 120 bp, Artificial Sequence
  ENSG00000085788_60 (sequence is synthesized)
tattgttttctcttatgattgttgcctaaagtttcaacgctactgaaatggctatgtacaactttcatcattttagagcatctaagaatgtcaattaacaatttaaggcaataatttaat

SEQ ID NO: 87553 - DNA, 120 bp, Artificial Sequence
  ENSG00000085788_61 (sequence is synthesized)
cttgttttctgaggaaatcttcctagaatttttggctgccatttcagaactttcccaagggtcctttcaaaccagtagaaaactatataatcctttggctatacttttactatatagtag

SEQ ID NO: 87554 - DNA, 120 bp, Artificial Sequence
  ENSG00000085788_62 (sequence is synthesized)
ctccccatactttttttttaaatagagactatgttgcccacgttggacttgaactcttgggcttaaacaatcctacctacctacctacctcagggtcctgagtagctgggactacaggtg

SEQ ID NO: 87555 - DNA, 120 bp, Artificial Sequence
  ENSG00000085788_63 (sequence is synthesized)
atcgtttattttttcttacctttggatgtatttgtttactccttaaattgtgacctttttctgtggatttagattacctcaaggcttaaaaatcatctttaatcatatgggtttattcca

SEQ ID NO: 87556 - DNA, 120 bp, Artificial Sequence
  ENSG00000085788_64 (sequence is synthesized)
agttgagattagcatcacttcgtctactaagaatcttaatagatgtaaaaatatcttttaaaacatatggtaggatgggtaaaatttggcaatactatccaggaagtcactaagtacaga

SEQ ID NO: 87557 - DNA, 120 bp, Artificial Sequence
  ENSG00000085788_65 (sequence is synthesized)
tgaactgatttagtcctaattccaagaagtgtgattccacctacttgactagaaatttatacctggtaataactccttgtccttgaagattttcaactaaggaaaactgtttttcagcag

SEQ ID NO: 87558 - DNA, 120 bp, Artificial Sequence
  ENSG00000085788_66 (sequence is synthesized)
gacctgattatgcactgctatctaggtagggtcacttatggttttataatatatttaattggattataatattccttttttcttgtctcttggacaaaatcctagctttactgtaattta

SEQ ID NO: 87559 - DNA, 120 bp, Artificial Sequence
  ENSG00000085788_67 (sequence is synthesized)
aaaagatgagtttaaaatttcaggctttaaaaacataccaaacattgataaaaatgaaatactagataaaagtattttatcaatgttcagttgcctggattcaataactgtattatggtt

SEQ ID NO: 87560 - DNA, 120 bp, Artificial Sequence
  ENSG00000085788_68 (sequence is synthesized)
atgtaagataatatacttaggaaatacacattatggtattaaagggttaaagaggtatggtgcatgcaacctgatgatgtatgtagtctgctttctaatgattcagaaaaataaatgtgt

SEQ ID NO: 87561 - DNA, 120 bp, Artificial Sequence
  ENSG00000085788_69 (sequence is synthesized)
gtgtgtgtgtgtgtacacacacagagaatcataaagcaaatgtaattgttaaaaagttgaatctctgtaaaaagtatgtgggagtgtctgtactatgctttctagttttctgtacatttc

SEQ ID NO: 87562 - DNA, 120 bp, Artificial Sequence
  ENSG00000085788_70 (sequence is synthesized)
ttcttgctgctgccatgtgaagaaggacgtatttgcttccccttctgccacgatgggaagttttccgaggcctccgccactatgctgaactagagcgaaatgtcatcagtgcagtcacaa

SEQ ID NO: 87563 - DNA, 120 bp, Artificial Sequence
  ENSG00000085788_71 (sequence is synthesized)
agaagcctagtggtcagtgacactgtacacattgaccagctgccagataagagggatgccatggtgtggcgtttttcatagttaatttaatttaatttcacatttaatttcatagttaat

SEQ ID NO: 87564 - DNA, 120 bp, Artificial Sequence
  ENSG00000085788_72 (sequence is synthesized)
attgcattcttttgctttagttttcaacttctaaagagctctattcctgcttgcatttagtataaacccaaggcaaatgacctagctatcaatggtataggtaatgagatgtgttgcgca

SEQ ID NO: 87565 - DNA, 120 bp, Artificial Sequence
  ENSG00000085788_73 (sequence is synthesized)
aaagcaaaaaaggggattggacaaaattactgtgacctgagaaggagcttgaaggagattgagaggaggaagatgggagagagctctctgaacagagagtagctcattctctggtaaact

SEQ ID NO: 87566 - DNA, 120 bp, Artificial Sequence
  ENSG00000085788_74 (sequence is synthesized)
gctcgtcctcaaagagatctaccaaacccagggtatcttccttgatcagcctttacagtaaaaatgacccatctatggctgcttaatgagtctcttcctcaaatgtgttcaatcaatctg

SEQ ID NO: 87567 - DNA, 120 bp, Artificial Sequence
  ENSG00000085788_75 (sequence is synthesized)
ataaatgtaaaaagaaactaaaataaggagaatctgaagagtttcaagtacttaaaaaacctgaattcaatgaggcagaggtctcaatgttaaagtgactatttcgtacctgtggtaaac

SEQ ID NO: 87568 - DNA, 120 bp, Artificial Sequence
  ENSG00000085788_76 (sequence is synthesized)
aattgcttaaaccagtgaggtggaggctgcagtgaggtgagatctcgccactgcaccccagcttgggttacagagcagtactccatctcaaaaaaaaaaagttattaaagaaacatcttt

SEQ ID NO: 87569 - DNA, 120 bp, Artificial Sequence
  ENSG00000085788_77 (sequence is synthesized)
tcctatatgcattcataatttttcctgaataccactttatttttgacggaagtcagtatgtgttctgtgcaaatgtagttagagtataattacatgatttgttgcatccagattctacag

SEQ ID NO: 87570 - DNA, 120 bp, Artificial Sequence
  ENSG00000085788_78 (sequence is synthesized)
agagatctaccaaacccagggtatcttccttgatcagcctttacagtaaaaatgacccatctatggctgcttaatgtatccataatccacaaagcatatttaaaaggctcttggcacggg

SEQ ID NO: 87571 - DNA, 120 bp, Artificial Sequence
  ENSG00000085788_79 (sequence is synthesized)
gacacaatgaagaagctgcataaaaatactgaaacctaagcaaaaacatttctttttcaagctgcaatggcactgaagcacaataaaaggcaagaaaagaccaagggaatttaaccctcc

SEQ ID NO: 87572 - DNA, 120 bp, Artificial Sequence
  ENSG00000085788_80 (sequence is synthesized)
acaaaagaatcccaaaccaaccaaatcaaacaaaaaccagacaccaccaactgcttctgcctgcatgaactggtttcccatttttgctttaataaggcagttccgatggcaaaggctgta

SEQ ID NO: 87573 - DNA, 120 bp, Artificial Sequence
  ENSG00000085831_0 (sequence is synthesized)
cgccgccgccgcgaggggccgcccgcggccccgtccgagcccggcccgcgcccatggcctttctgaccacctggaaggaggcggcctccgggaaaagcgaccgcaggactcctgagagca

SEQ ID NO: 87574 - DNA, 120 bp, Artificial Sequence
  ENSG00000085831_1 (sequence is synthesized)
ccgcaggactcctgagagcagcctccatgaggccctggaccagtgcatgaccgccctggacctcttcctcaccaaccagttctcagaagcactcagctacctcaagcccagaaccaagga

SEQ ID NO: 87575 - DNA, 120 bp, Artificial Sequence
  ENSG00000085831_2 (sequence is synthesized)
aagcatgtaccactcactgacatatgccaccatcctggagatgcaggccatgatgacctttgaccctcaggacatcctgcttgccggcaacatgatgaaggaggcacagatgctgtgtca

SEQ ID NO: 87576 - DNA, 120 bp, Artificial Sequence
  ENSG00000085831_3 (sequence is synthesized)
gaggcaccggaggaagtcttctgtaacagattccttcagcagcctggtgaaccgccccacgctgggccaattcactgaagaggaaatccacgctgaggtctgctatgcagagtgcctgct

SEQ ID NO: 87577 - DNA, 120 bp, Artificial Sequence
  ENSG00000085831_4 (sequence is synthesized)
gcagcgagcagccctgaccttcctgcaggacgagaacatggtgagcttcatcaaaggcggcatcaaagttcgaaacagctaccagacctacaaggagctggacagccttgttcagtcctc

SEQ ID NO: 87578 - DNA, 120 bp, Artificial Sequence
  ENSG00000085831_5 (sequence is synthesized)
acaatactgcaagggtgagaaccacccgcactttgaaggaggagtgaagcttggtgtaggggccttcaacctgacactgtccatgcttcctactaggatcctgaggctgttggagtttgt

SEQ ID NO: 87579 - DNA, 120 bp, Artificial Sequence
  ENSG00000085831_6 (sequence is synthesized)
ggggttttcaggaaacaaggactatgggctgctgcagctggaggagggagcgtcagggcacagcttccgctctgtgctctgtgtcatgctcctgctgtgctaccacaccttcctcacctt

SEQ ID NO: 87580 - DNA, 120 bp, Artificial Sequence
  ENSG00000085831_7 (sequence is synthesized)
cgtgctcggtactgggaacgtcaacatcgaggaggccgagaagctcttgaagccctacctgaaccggtaccctaagggtgccatcttcctgttctttgcagggaggattgaagtcattaa

SEQ ID NO: 87581 - DNA, 120 bp, Artificial Sequence
  ENSG00000085831_8 (sequence is synthesized)
aggcaacattgatgcagccatccggcgtttcgaggagtgctgtgaggcccagcagcactggaagcagttccaccacatgtgctactgggagctgatgtggtgcttcacctacaagggcca

SEQ ID NO: 87582 - DNA, 120 bp, Artificial Sequence
  ENSG00000085831_9 (sequence is synthesized)
gtggaagatgtcctacttctacgccgacctgctcagcaaggagaactgctggtccaaggccacctacatttacatgaaggccgcctacctcagcatgtttgggaaggaggaccacaagcc

SEQ ID NO: 87583 - DNA, 120 bp, Artificial Sequence
  ENSG00000085831_10 (sequence is synthesized)
gttcggggacgacgaagtggaattatttcgagctgtgccaggcctgaagctcaagattgctgggaaatctctacccacagagaagtttgccatccggaagtcccggcgctacttctcctc

SEQ ID NO: 87584 - DNA, 120 bp, Artificial Sequence
  ENSG00000085831_11 (sequence is synthesized)
gaaactcacggatgggatacttgagattatcactaaggctgaagagatgctggagaaaggcccagagaacgagtactcagtggatgacgagtgcttggtgaaattgttgaaaggcctgtg

SEQ ID NO: 87585 - DNA, 120 bp, Artificial Sequence
  ENSG00000085831_12 (sequence is synthesized)
tctgaaatacctgggccgtgtccaggaggccgaggagaattttaggagcatctctgccaatgaaaagaagattaaatatgaccactacttgatcccaaacgccctgctggagctggccct

SEQ ID NO: 87586 - DNA, 120 bp, Artificial Sequence
  ENSG00000085831_13 (sequence is synthesized)
gctgcttatggagcaagacagaaacgaagaggccatcaaacttttggaatctgccaagcaaaactacaagaattactccatggagtcaaggacacactttcgaatccaggcagccacact

SEQ ID NO: 87587 - DNA, 120 bp, Artificial Sequence
  ENSG00000085831_14 (sequence is synthesized)
ccaagccaagtcttccctagagaacagcagcagatccatggtctcatcagtgtccttgtagctttgtgcagcagttccgggctggaagacagagacagctggacagagctcctgaaaaca

SEQ ID NO: 87588 - DNA, 120 bp, Artificial Sequence
  ENSG00000085831_15 (sequence is synthesized)
tttcaaaataccccctccccctgccctgccctgcctttggggtccaccggcactccagttggatggcacaacatagtgtatccgtgcagaagccgagctggcattttcaccagtgtagcc

SEQ ID NO: 87589 - DNA, 120 bp, Artificial Sequence
  ENSG00000085831_16 (sequence is synthesized)
aagggcctttgccaagggcagagcaggtggagccctctgcctgccctatcacacatacgggtacttgcttttcactgtgatgtttaagagaatgtatgaacagtttacattttccttaga

SEQ ID NO: 87590 - DNA, 120 bp, Artificial Sequence
  ENSG00000085831_17 (sequence is synthesized)
aatacattgatgggatcacagttggctttaaaaaccaacaacaatcaaccacctgtaagtctttgtcttcacctattatcatctggaggtaaatctctttatatgatgatgccaaagggc

SEQ ID NO: 87591 - DNA, 120 bp, Artificial Sequence
  ENSG00000085831_18 (sequence is synthesized)
aaattgcttttcaaattcagcaagttctcagcttgtgtgacggaaggtccttcagaggacctgaggaatgcctgggagaggctaagcctcaggcttcaatgcttctggggttgggcatga

SEQ ID NO: 87592 - DNA, 120 bp, Artificial Sequence
  ENSG00000085831_19 (sequence is synthesized)
ggatgtacacagacacccactaccttactactcacacttcatttcactccttttgtaaatttccaatttaaaaatcaagcacgtctttttagtgagataaaatctgagctcttctgtaga

SEQ ID NO: 87593 - DNA, 120 bp, Artificial Sequence
  ENSG00000085831_20 (sequence is synthesized)
aaaatcaatctctaccagtagaaaatgccagggcttgatggaagagctgtgtagccctttctatgccaaagccaggaaatttggggggcaggaggaggttctcagaatccagtctgtatc

SEQ ID NO: 87594 - DNA, 120 bp, Artificial Sequence
  ENSG00000085831_21 (sequence is synthesized)
tttgctgtatgccaaactgaaaccactgggaataatttatgaaacataaaaatcttctgtacttcactccaaggtacatttgcttactgacagcatttttgttaaaactgttattcttga

SEQ ID NO: 87595 - DNA, 120 bp, Artificial Sequence
  ENSG00000085831_22 (sequence is synthesized)
cacgttcagagcagccttccccacctgcctcgtggcgttcactcctgtggggtgggccctgttactctcatccccattacagatgaggaaactgagacacagcacttaagtgacttgtca

SEQ ID NO: 87596 - DNA, 120 bp, Artificial Sequence
  ENSG00000085831_23 (sequence is synthesized)
cctgggggagggaggaggccttggagaaggaggagggaaaaaggggctgtgggatttagtggctgggctgcaccccctgggggggcagcagagcccaatgggccagaagggccacaaaga

SEQ ID NO: 87597 - DNA, 120 bp, Artificial Sequence
  ENSG00000085831_24 (sequence is synthesized)
gtgccagaagatcaggtcaggtggagacaccgcctcagggctcggtgcacagtggacatttggggagcgttgtgggtgacccccacacaggcactgggaatgcaggggagagggggccaa

SEQ ID NO: 87598 - DNA, 120 bp, Artificial Sequence
  ENSG00000085831_25 (sequence is synthesized)
ccagcaggaagtcaggcacatgtgacatactcagggacaggatagactgggggcggggggggggccaagagagaaccaaccagagagcaggggcaggagaggcccttctggcagagcagc

SEQ ID NO: 87599 - DNA, 120 bp, Artificial Sequence
  ENSG00000085831_26 (sequence is synthesized)
ctgggaagacaagggaggaggaggcatttgtggtgcctgggattttgactgggagatataggactgcagcattgcagtggagggaggtggagggaggtgcttgagggaggcagaggttag

SEQ ID NO: 87600 - DNA, 120 bp, Artificial Sequence
  ENSG00000085831_27 (sequence is synthesized)
gaaagcccatctgtttagggcatgacgattaggctggagtctggtacctcccctccattatagctctctcctgctctttcattttgttactaaaaaccagagtcctaggcgggggctgta

SEQ ID NO: 87601 - DNA, 120 bp, Artificial Sequence
  ENSG00000085831_28 (sequence is synthesized)
tttgagcccaacgtcatgtaagacttaggaggtaaaaccaggactggaggccagatctcctggctcctggggccccacctgagcctagcacagggctggaccactatgccctggaggagt

SEQ ID NO: 87602 - DNA, 120 bp, Artificial Sequence
  ENSG00000085831_29 (sequence is synthesized)
ctgctggtccaaggtgggctgatgccacgtgttaggggcattgggtgaccagggctgactgtgtgcctccagaccacgggccaaatccctaactgaacacagatgtctcagctggaatct

SEQ ID NO: 87603 - DNA, 120 bp, Artificial Sequence
  ENSG00000085831_30 (sequence is synthesized)
aaacataaccttaaattctaataggactcaggcttggaaggaactaaagaccacaagagaaacttctgaaccacaatgtgtcacaaagagatttctagtcacaaaggacagaaacatggc

SEQ ID NO: 87604 - DNA, 120 bp, Artificial Sequence
  ENSG00000085831_31 (sequence is synthesized)
tccctctgtccagtagaactgtttctgtggtagaaatgttctacttatgcactgcccaaatatggtagtcaccagccacatgtgcacaatgagcacatgaaatgtgcctagtgcaactgg

SEQ ID NO: 87605 - DNA, 120 bp, Artificial Sequence
  ENSG00000085831_32 (sequence is synthesized)
gaaactgattgttttcagttttatttaattttaattaactaaatgttaaatttaaatagccatgtagggcttgtggccactatattggactatgcaggtccaaaacacaaaaggctcata

SEQ ID NO: 87606 - DNA, 120 bp, Artificial Sequence
  ENSG00000085831_33 (sequence is synthesized)
taactgaacattcttggcacatccgacttcaggtagggctggatccaggaattcaaatgatgtcgtctggcttggtctttccatttgtggctgtgctctctcctatgacatctttgtttc

SEQ ID NO: 87607 - DNA, 120 bp, Artificial Sequence
  ENSG00000085831_34 (sequence is synthesized)
tgctgcatctttgcaggaaggttctctccatgtgacaggcaaggtggccacgggctgcttctactcatatcctccccttggtttcaaccagagtcccacagtttgagcctcactggtctg

SEQ ID NO: 87608 - DNA, 120 bp, Artificial Sequence
  ENSG00000085831_35 (sequence is synthesized)
acttgtcacctgccaatgcctggaacagaggggtgggaagattcctcatgggctgagagtaggagaggggtggttccacagaagaaaatgatgcacccagaaatagtggagggattaaca

SEQ ID NO: 87609 - DNA, 120 bp, Artificial Sequence
  ENSG00000085831_36 (sequence is synthesized)
agatgccatacaggcaaaacaaagccaaacagatgcccgcctaccaaagatgaaatttatcatggtaagtattgaaataagtgttagcttgtaccatcatagtaatgatagtgcagaaat

SEQ ID NO: 87610 - DNA, 120 bp, Artificial Sequence
  ENSG00000085831_37 (sequence is synthesized)
tggaaccaagagtcttacaaccacctagctcagcaaacgtctaatctgttatttgtaaatacacaggacatgtgtcttcatggcttcatcccctgcccatagcagacattgctaatcaat

SEQ ID NO: 87611 - DNA, 120 bp, Artificial Sequence
  ENSG00000085831_38 (sequence is synthesized)
cctctgccatgagcctagctgtgaccttagataccttccctgcaaagctccaggcagccgttagaactgacccacattggcacctgttaggagacctgtcatctgcatctggtccctccc

SEQ ID NO: 87612 - DNA, 120 bp, Artificial Sequence
  ENSG00000085831_39 (sequence is synthesized)
ctgaaggggaattctctgggtctggggcaggtggggctggggaagggagcaggcttctactgagctctcaacatgtctggcacctgtcatgtcctccacaccacacccagtgaggagaag

SEQ ID NO: 87613 - DNA, 120 bp, Artificial Sequence
  ENSG00000085831_40 (sequence is synthesized)
ttattatctccattgggcacatgagggccactgatgctaagcgaggactgtgactttcccacccacatggctgttggtgacagacaccggatttgaggacagtcctgtgtgactcagagg

SEQ ID NO: 87614 - DNA, 120 bp, Artificial Sequence
  ENSG00000085831_41 (sequence is synthesized)
cctctgcttctctcttgctcctagagtcctcctgaggagtcggggcttgccctgagcccaccctgctgttgaaggtgcttcctcaggcccagctcccatggcccccacaccccctcctca

SEQ ID NO: 87615 - DNA, 90 bp, Artificial Sequence
  ENSG00000085831_42 (sequence is synthesized)
cctcaggcccagctcccatggcccccacaccccctcctcatcacctcctactcccaaaaaggacaaagcctcagggaaccttttttcgtc

SEQ ID NO: 87616 - DNA, 120 bp, Artificial Sequence
  ENSG00000085831_43 (sequence is synthesized)
ctctgcctcctaaagtgctgggattctgggccttagggaacctttttgaactgaaagtgactctcgaagccttcctgtagagtgaggtgggtggctggggctaaccatatggggaaggag

SEQ ID NO: 87617 - DNA, 120 bp, Artificial Sequence
  ENSG00000085831_44 (sequence is synthesized)
agacctggtgggggcacacagctgctatatagaggaacagaaggtgggccaggcctcccagctgtcaggaaatctggctcagtccccagaccgctgtgtggctttggggtggccagtccc

SEQ ID NO: 87618 - DNA, 120 bp, Artificial Sequence
  ENSG00000085831_45 (sequence is synthesized)
tctctctctgcaacactctcctcatgaggacttctgtgaaaaatgggggttgtaaccctctgagttctggggccccacccatttctaatctccagaacttggccaccacagactccacca

SEQ ID NO: 87619 - DNA, 120 bp, Artificial Sequence
  ENSG00000085831_46 (sequence is synthesized)
acttctagtcctggggcctgggcctctggccattgccataggcaccacctgctctgtgcaggcagcgcccccctctgccaggatcctccgaggtcagctgctgggtctgacccgcagacc

SEQ ID NO: 87620 - DNA, 120 bp, Artificial Sequence
  ENSG00000085831_47 (sequence is synthesized)
ctggctgagcgacggatgaacggagtatgcagacacaggcttgcctgtcagcagatgggggacccctgccagagtcagcagcggcccccataagcctgccacgcttgcatttatttagta

SEQ ID NO: 87621 - DNA, 120 bp, Artificial Sequence
  ENSG00000085831_48 (sequence is synthesized)
cagatgtaatgacaaaggcctaaagcaaactccatttgtgggtaattaacattgtcgcccccccagaaagagcagtcctccgcatgatgattaaaggccaggttccgaggcctaagtaaa

SEQ ID NO: 87622 - DNA, 120 bp, Artificial Sequence
  ENSG00000085831_49 (sequence is synthesized)
ccaacttatctagatcaattcccttacttcttgttatctactctgagagaattcagctgccttcagccaaatcctttcccgaagcttttgcaaaacctccgagccttccaaggtttgctt

SEQ ID NO: 87623 - DNA, 120 bp, Artificial Sequence
  ENSG00000085831_50 (sequence is synthesized)
ctttctgtaatttttctcaccaccctgacctatctcctgcagtcagccctgtggaggcctttgtgtttcccccagtgctggcagcctagaggctgagatggccagaaacaaggtggtgac

SEQ ID NO: 87624 - DNA, 120 bp, Artificial Sequence
  ENSG00000085831_51 (sequence is synthesized)
agtggcgtgctcagggcttgggaaacccaaggagctaaaggcatgcccaggcaaccaaagaggacaggaaggcttctgaggagagacctctgaggtgggtcttggagaggaaggacttag

SEQ ID NO: 87625 - DNA, 120 bp, Artificial Sequence
  ENSG00000085831_52 (sequence is synthesized)
ggaggcagagtggaggaagtgagaggacaccccaagccaagagggcggcaggaccaaaggctcagaagccagggcgctgcagaggggctgtgtgccacagggtgaagagtttgtgtggca

SEQ ID NO: 87626 - DNA, 120 bp, Artificial Sequence
  ENSG00000085831_53 (sequence is synthesized)
gaagggcagggggcttgcatcaggggtgacagctgctcttttgtcccagcatagcccctgtacatccctggagagctggggcgtccacaactctaagtcacagcccccatcctaaccctg

SEQ ID NO: 87627 - DNA, 120 bp, Artificial Sequence
  ENSG00000085831_54 (sequence is synthesized)
gtggtgcagtgagggtgagctgtctgtgggcaggagggaagactcttggagatgagcctggtgaagggataatggcatcccgggccgaggagcagcacaggcagaggcctggggagagtt

SEQ ID NO: 87628 - DNA, 120 bp, Artificial Sequence
  ENSG00000085831_55 (sequence is synthesized)
taaggagtgtaggggaggaaatggcagaagatgagccagaaaaagaaaggttagggcaggtcctggaggacatgagtggctgtttgggctttatccagcagtgggggagccttggcaggc

SEQ ID NO: 87629 - DNA, 120 bp, Artificial Sequence
  ENSG00000085831_56 (sequence is synthesized)
ttgtggcttagataggtgctttagaaagcccaccagcagttgctgggccaccccgctggctgggtcctgttctaaggcaggaaatacaagcatgagcaggaaaagaccccctcaaggctc

SEQ ID NO: 87630 - DNA, 120 bp, Artificial Sequence
  ENSG00000085831_57 (sequence is synthesized)
acgtcctagtggggagacaagaaacacagatgggcaatataacacgatgtctggttccagtaagtgcagtgaagaacaagcgaggctggatgcagggagtgatgggaggggctttgtaag

SEQ ID NO: 87631 - DNA, 120 bp, Artificial Sequence
  ENSG00000085831_58 (sequence is synthesized)
gggaggtcgggggaagcctgtctcagaggacaccagaatggagcgcaggagcagcacgtggcagtcacatggcaggccgttagggcagagggagctgggcagggcacagcagggcaggag

SEQ ID NO: 87632 - DNA, 120 bp, Artificial Sequence
  ENSG00000085831_59 (sequence is synthesized)
tgtgtttgatgtgtcctgggaaccgccctgaggccgtcgtgtggctggagtgctgcaggtgtcaaggaaattgtaggagatgtctcctgagtgtgatggaatataaccagatttccagaa

SEQ ID NO: 87633 - DNA, 120 bp, Artificial Sequence
  ENSG00000085831_60 (sequence is synthesized)
ggaactgacatgatctgacttaaaaaggtcagtgtgcgaaatggcttgcaggggacaggagtgggagcagggagataggagacaatgtgtaccaggacagcagaaagacatcccgggtag

SEQ ID NO: 87634 - DNA, 120 bp, Artificial Sequence
  ENSG00000085831_61 (sequence is synthesized)
cctggaacagggagacggtgtggagatggtggcagtccgataatgagagccgtagggcaaggccagcaggatcctagagtgagacgggaggtaaagtcaccgggacttggtgtctccacg

SEQ ID NO: 87635 - DNA, 120 bp, Artificial Sequence
  ENSG00000085831_62 (sequence is synthesized)
cgggaggtaaagtcaccgggacttggtgtctccacgtcaggggcaggggaaagggagaggacaagggtgacccgggaggttaaagatgggaccggggccagacgcagtggctcatgcctg

SEQ ID NO: 87636 - DNA, 63 bp, Artificial Sequence
  ENSG00000085831_63 (sequence is synthesized)
gctgaggcagcactccagccttagcctgggcgacagagcgagaccacatcaaaaaaaaaaaaa

SEQ ID NO: 87637 - DNA, 120 bp, Artificial Sequence
  ENSG00000085831_64 (sequence is synthesized)
atttagtgggcaaggtgctggggttgactcccggctctgccccagtagctctggggtcccaggaagcagaggtggggccacctacatttacatgaaggccgcctacctcagcatgtttgg

SEQ ID NO: 87638 - DNA, 120 bp, Artificial Sequence
  ENSG00000085831_65 (sequence is synthesized)
ccccagtctgggggaggttaccgcagacagcctcatcccagttaagcagaagaggtgccggggctgccgagggaaggactgtgcctgtctgcactgactgtccatccggcctggatcttt

SEQ ID NO: 87639 - DNA, 80 bp, Artificial Sequence
  ENSG00000085831_66 (sequence is synthesized)
ccgcgattggcgtccggctggggcagcgccgcccgcgcccctcggcgatgacctcggctggcggcgccccaggagccctg

SEQ ID NO: 87640 - DNA, 120 bp, Artificial Sequence
  ENSG00000085831_67 (sequence is synthesized)
ccctgaccttcctgcagggttcctcacacggaggggcagtcaggcccagagccttgcatgatccctctcacgcctgcagctgcccacctgggccaggccgtcagcatcttttcctcctgc

SEQ ID NO: 87641 - DNA, 120 bp, Artificial Sequence
  ENSG00000085831_68 (sequence is synthesized)
agaccagccaggccaccctgagctgtgggcactggggagggaggagtagggtggctccctgcccccacccgcggactgccccccctgcgtgtcctcccctcccatcaccaccccatgctg

SEQ ID NO: 87642 - DNA, 120 bp, Artificial Sequence
  ENSG00000085831_69 (sequence is synthesized)
ctgctgctggtggttggagccctttgactttcttcagaggctttctttcacagaaatggttttgctaatatcgtcttcctccgagtctctttcatgtggacagtaggacagatgtggctc

SEQ ID NO: 87643 - DNA, 120 bp, Artificial Sequence
  ENSG00000085831_70 (sequence is synthesized)
caaggtccagggagggaaggtctttcactctgctgagttaacctgagacactcagagaagcacagtagagagctgacagtcggaatcgaacaaacaagagtaaacccagcctctgcttgt

SEQ ID NO: 87644 - DNA, 120 bp, Artificial Sequence
  ENSG00000085831_71 (sequence is synthesized)
tcttagctgtgtcaccttggacaacttcagcatctgtaaaatgggaacaacaacctccacctcgcagcactgttttgcaaatcaactagataataaatgttaagagcctggcgcatagaa

SEQ ID NO: 87645 - DNA, 120 bp, Artificial Sequence
  ENSG00000085832_0 (sequence is synthesized)
gtcttccttcccctcccttgcatgatggaaacaccatggctgcggcggcccagctctctctgacacagttatcaagtgggaatcctgtatatgaaaaatactatagacaggttgatacag

SEQ ID NO: 87646 - DNA, 120 bp, Artificial Sequence
  ENSG00000085832_1 (sequence is synthesized)
gcaatactggaagggtgttggcttctgatgctgctgctttcctgaaaaaatcagggcttccagacttgatacttggaaagatttgggatttagccgacacagatggcaaaggtatcctga

SEQ ID NO: 87647 - DNA, 120 bp, Artificial Sequence
  ENSG00000085832_2 (sequence is synthesized)
acaaacaagaattctttgttgctttgcgtcttgtggcatgtgcccagaatggattggaagtttcactaagtagtttgaacctggctgttcctccaccaagatttcatgataccagtagtc

SEQ ID NO: 87648 - DNA, 120 bp, Artificial Sequence
  ENSG00000085832_3 (sequence is synthesized)
ctttgctaatcagtggaacctctgcagctgagctcccatgggctgtaaaacctgaagataaggccaaatatgatgcaatatttgatagtttaagcccagtgaatggatttctgtctggtg

SEQ ID NO: 87649 - DNA, 120 bp, Artificial Sequence
  ENSG00000085832_4 (sequence is synthesized)
ataaagtgaaaccagtgttgctcaactctaagttacctgtggatatccttggaagagtttgggagttgagtgatattgaccatgatggaatgcttgacagagatgagtttgcagttgcca

SEQ ID NO: 87650 - DNA, 120 bp, Artificial Sequence
  ENSG00000085832_5 (sequence is synthesized)
tgtttttggtatactgtgcactggagaaagaacctgtgccaatgtccttgcctccagccttggtgccaccatctaagagaaaaacgtgggttgtatcccctgcagaaaaagctaaatatg

SEQ ID NO: 87651 - DNA, 120 bp, Artificial Sequence
  ENSG00000085832_6 (sequence is synthesized)
atgaaatcttcctgaaaactgataaagatatggacggatttgtgtctggattggaggtccgtgaaatattcttgaaaacaggtttaccttctaccttactagcccatatatggtcattat

SEQ ID NO: 87652 - DNA, 120 bp, Artificial Sequence
  ENSG00000085832_7 (sequence is synthesized)
gcgacacaaaggactgtgggaagctttcaaaggatcagtttgccttggcttttcacttaatcagtcagaagttaatcaagggcattgatcctcctcacgttcttactcctgaaatgattc

SEQ ID NO: 87653 - DNA, 120 bp, Artificial Sequence
  ENSG00000085832_8 (sequence is synthesized)
caccatcagacagggccagtttacaaaagaacatcataggatcaagtcctgttgcagatttctctgctattaaggaactagatactcttaacaatgaaatagttgacctacagagggaaa

SEQ ID NO: 87654 - DNA, 120 bp, Artificial Sequence
  ENSG00000085832_9 (sequence is synthesized)
agaataatgtggaacaggaccttaaggagaaggaagatactattaaacagaggacaagtgaggttcaggatcttcaagatgaagttcaaagggagaatactaatctgcaaaaactacagg

SEQ ID NO: 87655 - DNA, 120 bp, Artificial Sequence
  ENSG00000085832_10 (sequence is synthesized)
cccagaaacagcaggtacaggaactccttgatgaactggatgagcagaaagcccagctggaggagcaactcaaggaagtcagaaagaaatgtgctgaggaggcccaactgatctcttctc

SEQ ID NO: 87656 - DNA, 120 bp, Artificial Sequence
  ENSG00000085832_11 (sequence is synthesized)
tgaaagctgaattaactagtcaggaatcgcagatctccacttacgaagaagaattggcaaaagctagagaagagctgagccgtctacagcaagaaacagcagaattggaggagagtgtag

SEQ ID NO: 87657 - DNA, 120 bp, Artificial Sequence
  ENSG00000085832_12 (sequence is synthesized)
agtcagggaaggctcagttggaacctcttcagcagcacctacaagattcacaacaggaaattagttcaatgcaaatgaaactgatggaaatgaaagatttggaaaatcataatagtcagt

SEQ ID NO: 87658 - DNA, 120 bp, Artificial Sequence
  ENSG00000085832_13 (sequence is synthesized)
taaattggtgcagtagcccacacagcattcttgtaaacggagctacagattattgcagcctcagcaccagcagcagtgaaacagccaaccttaatgaacatgttgaaggccagagcaacc

SEQ ID NO: 87659 - DNA, 120 bp, Artificial Sequence
  ENSG00000085832_14 (sequence is synthesized)
tagagtctgagcccatacaccaggaatctccagcaagaagtagtcctgaactactgccttctggtgtgactgatgaaaatgaggtgactacagctgttactgaaaaagtttgttctgaac

SEQ ID NO: 87660 - DNA, 120 bp, Artificial Sequence
  ENSG00000085832_15 (sequence is synthesized)
tcgacaataatagacattcaaaagaggaagatccatttaatgtagactcaagttcgctgacaggtccagttgcagatacaaacttggattttttccagtctgatccttttgttggcagtg

SEQ ID NO: 87661 - DNA, 120 bp, Artificial Sequence
  ENSG00000085832_16 (sequence is synthesized)
atcctttcaaggatgatccttttggaaaaatcgatccatttggtggtgatcctttcaaaggttcagatccatttgcatcagactgtttcttcaggcaatctactgatccttttgccactt

SEQ ID NO: 87662 - DNA, 120 bp, Artificial Sequence
  ENSG00000085832_17 (sequence is synthesized)
caagcactgaccctttcagtgcagccaacaatagcagtattacatcggtagaaacgttgaagcacaatgatccttttgctcctggtggaacagttgttgcagcaagcgattcagccacag

SEQ ID NO: 87663 - DNA, 120 bp, Artificial Sequence
  ENSG00000085832_18 (sequence is synthesized)
acccctttgcttctgtttttgggaatgaatcatttggaggtggatttgctgacttcagcacattgtcaaaggtcaacaatgaagatccttttcgttcagccacatcgagctctgtcagca

SEQ ID NO: 87664 - DNA, 120 bp, Artificial Sequence
  ENSG00000085832_19 (sequence is synthesized)
acgtagtgattacaaaaaatgtatttgaggaaacatcggtcaaaagtgaagatgaacccccagcactgccaccaaagatcggaactccaacaagaccctgccctctaccacctgggaaaa

SEQ ID NO: 87665 - DNA, 120 bp, Artificial Sequence
  ENSG00000085832_20 (sequence is synthesized)
gatccatcaacaaattggattctcctgatccctttaaactgaatgatccatttcagcctttcccaggcaacgatagccccaaagaaaaagatcctgaaatattttgtgatccattcactt

SEQ ID NO: 87666 - DNA, 120 bp, Artificial Sequence
  ENSG00000085832_21 (sequence is synthesized)
ctactaccactaccaataaagaggctgatccaagcaattttgccaacttcagtgcttatccctctgaagaagatatgatcgaatgggccaagagggaaagtgagagagaggaagagcaga

SEQ ID NO: 87667 - DNA, 120 bp, Artificial Sequence
  ENSG00000085832_22 (sequence is synthesized)
ggcttgcccgactaaatcagcaggaacaagaagacttagaactggctattgcactcagcaaatctgagatatcagaagcatgaagaattctcttgttctttggcaacaatatagtattct

SEQ ID NO: 87668 - DNA, 120 bp, Artificial Sequence
  ENSG00000085832_23 (sequence is synthesized)
tcttcctgaatactgaaactatttacaatgtgtatcaaaactacctgtgagcatgggaatacaaaaggtttgagattcctgtaaatgtgacaaaattttaggattttttttttttcttca

SEQ ID NO: 87669 - DNA, 120 bp, Artificial Sequence
  ENSG00000085832_24 (sequence is synthesized)
ttacagattcgtctttttttttttttcttataaaagccgtaacccagtcagacaaattcaccttcacttaggcccctgttctggtatacatttactgtgagcttttgcctgcctgtgcta

SEQ ID NO: 87670 - DNA, 120 bp, Artificial Sequence
  ENSG00000085832_25 (sequence is synthesized)
ttttacttgtaaagctagagcacccaagcttctgccttctggaatatagagaaatagtttcaccctgcactaccctgttctgtagttattctgatgatagccagtgaggttcttaaagtt

SEQ ID NO: 87671 - DNA, 120 bp, Artificial Sequence
  ENSG00000085832_26 (sequence is synthesized)
tgcagtattctcccctgattggaatggttgagtgagggtaagggaaagaatatcttatttcttttatgattggtgcaaattggctaaagtgcatttttaaatttcctctacttaatttgt

SEQ ID NO: 87672 - DNA, 120 bp, Artificial Sequence
  ENSG00000085832_27 (sequence is synthesized)
ttttcagagataaggaaaaatattttgcacagatttactccactatggaaaagggatgctgtaggttgaaccattatagcctcagattcgatcttttcctaactaaaaatattaaagcct

SEQ ID NO: 87673 - DNA, 120 bp, Artificial Sequence
  ENSG00000085832_28 (sequence is synthesized)
catgtgtgaaataaatttttaaaaagatttatctggatttagagaattttagatcaacagatacctctcagtgtgtttgctaattaataaaaatcagtttcttacaaataaagtttgtaa

SEQ ID NO: 87674 - DNA, 120 bp, Artificial Sequence
  ENSG00000085832_29 (sequence is synthesized)
gaaaatgttcattttaagtgatagatagtggagaaaatttatcacctaaaatatacccatcagtataaggcaagcaaaagtcttaacatggcagccattctgcctttgccgtggccctgt

SEQ ID NO: 87675 - DNA, 120 bp, Artificial Sequence
  ENSG00000085832_30 (sequence is synthesized)
cctgtttagttcttagtgggttaatttttgtacttttgcagaagaaacttcagcaagctagaactggaaggtactttaatttttcatatatatttgtttttttttttttaatgaaggctc

SEQ ID NO: 87676 - DNA, 120 bp, Artificial Sequence
  ENSG00000085832_31 (sequence is synthesized)
atttacttgaaatgtaaaaactttcactgaatacaaatagaaaaagtgatgtgttttatatcatattgctttttgtccatctttgtggtttagtttatttactcacttcatgtttttcac

SEQ ID NO: 87677 - DNA, 120 bp, Artificial Sequence
  ENSG00000085832_32 (sequence is synthesized)
ctataaaattgtcaagctagcaaaaaaactcttgtttttttaattgggagagaagagacctgccagattatcagacctcttcatgttaaaagaccatctcctgtaaaactgacctagtgg

SEQ ID NO: 87678 - DNA, 120 bp, Artificial Sequence
  ENSG00000085832_33 (sequence is synthesized)
acaagctgaatttgaaatagactgtgaagtaagctgtaacttgtcattttaattttgtttaacacggttactgacttagatgatgtattaaataccaagataaagaaaaatgcacctaaa

SEQ ID NO: 87679 - DNA, 120 bp, Artificial Sequence
  ENSG00000085832_34 (sequence is synthesized)
atctaattagaattctctgggtcaacaagtcaaggtggtattgatctgtgttaatctgagtaacttattgcctagcctataaataaattccaaaatatccaattcatttcttcttgaaat

SEQ ID NO: 87680 - DNA, 120 bp, Artificial Sequence
  ENSG00000085832_35 (sequence is synthesized)
ggtgcttgttttgttttctttccattacacaattagactcctacagtttaaaacaaactttaaaccactatcttgcactgctaacttttttctacctttgtaaatagaaacatttctgca

SEQ ID NO: 87681 - DNA, 120 bp, Artificial Sequence
  ENSG00000085832_36 (sequence is synthesized)
taaaagtcatacatatgaagcaagggctgaatcataatcacaaggcttaattttgataaacgaatccagtgacctaaggattttctgcaaaatttgactgggagttgtgataggtggtat

SEQ ID NO: 87682 - DNA, 120 bp, Artificial Sequence
  ENSG00000085832_37 (sequence is synthesized)
ttttgtttattttcttcctcttactccttaggataaaggtaagttgacttgaacaactttcttttgcactgggaaaataagcaaatgtttaaatgcttcaaaaaaattttcaattaaact

SEQ ID NO: 87683 - DNA, 120 bp, Artificial Sequence
  ENSG00000085832_38 (sequence is synthesized)
tattaaatatctataacttataaacaccaactttcaatgtaataaatgtatcctaatcttatgtatgtttaactggattacatagatttttatcttttgttaaaatgtgtataccccgtg

SEQ ID NO: 87684 - DNA, 120 bp, Artificial Sequence
  ENSG00000085832_39 (sequence is synthesized)
cgtggaccaacataatattaaagtatgtatatattatataaatatatatgtatatgtgctcgcttgtgtaggatgaatgtcttagagtcgtttgtggtattttatgttgttgactctggc

SEQ ID NO: 87685 - DNA, 120 bp, Artificial Sequence
  ENSG00000085832_40 (sequence is synthesized)
tccagggcctgtgcttgaaaaggacagataagtattgcccagagctaagtggcactacttacaaagttttaaatgtcttctacatactgattcatgtttatttgagctctctttatagaa

SEQ ID NO: 87686 - DNA, 120 bp, Artificial Sequence
  ENSG00000085832_41 (sequence is synthesized)
ttttctcttaaagtttcaaacctctaagttgtagcctgtaattatgagaacagtaaactttaagtaataataaagaatcccatccatatatccaatttgcaattgagttttgcatggttc

SEQ ID NO: 87687 - DNA, 120 bp, Artificial Sequence
  ENSG00000085832_42 (sequence is synthesized)
tctgattatgtccatgctgtgtccaaggaggagtaggtacatacaatcagcacagattaatatatgtaaagggtttgggacagcacctggtatagaataaataataaatgtaaactatta

SEQ ID NO: 87688 - DNA, 120 bp, Artificial Sequence
  ENSG00000085832_43 (sequence is synthesized)
tcattatcttaatgattttctcatgtgcaaatttcctcttttagttcatccttagaggaaaactatattctcatcagattattgggtgaactttttttttttttctttttgagacagagt

SEQ ID NO: 87689 - DNA, 60 bp, Artificial Sequence
  ENSG00000085832_44 (sequence is synthesized)
tattaccacattttaaaaatgcagaaagagaaacttaaagtgacttgaattcttgttcac

SEQ ID NO: 87690 - DNA, 87 bp, Artificial Sequence
  ENSG00000085832_45 (sequence is synthesized)
gcatgcaccaccacccgtttcgccgtgtttgccagactggtctcgagctcctgataataggtgatccactcgcctcggcctcccaaa

SEQ ID NO: 87691 - DNA, 75 bp, Artificial Sequence
  ENSG00000085832_46 (sequence is synthesized)
atccactcttcaggcccaagacaaaaatatagttagagtagatggggaatagtagtgtcatcatttgataaacag

SEQ ID NO: 87692 - DNA, 120 bp, Artificial Sequence
  ENSG00000085832_47 (sequence is synthesized)
cagtgcagccaacaatagcagtattacatcgtaatcctatgaggtttacgtaggttaagttgaggccaggtgtggtggctcccacctctaattccagcacttcaggaggccaaggcagga

SEQ ID NO: 87693 - DNA, 120 bp, Artificial Sequence
  ENSG00000085832_48 (sequence is synthesized)
tgaggtagaaacgttgaagcacaatgatccttttgctcctggtggaacagttgttgcagcaagcgattcaggtaaataaataatttatcaacttcattgaacattaaacattttttttaa

SEQ ID NO: 87694 - DNA, 120 bp, Artificial Sequence
  ENSG00000085832_49 (sequence is synthesized)
tccttttttaatctatcctcttttcaccacattttagtgagaaagcaattttttttttacaaatggagcttatattgatttttatttcataaataattgaaagagggtagaaaaatctgc

SEQ ID NO: 87695 - DNA, 120 bp, Artificial Sequence
  ENSG00000085832_50 (sequence is synthesized)
ccttcatttaaaaattgaatgtttcactatgtatttaaaaagcgattcaggattaggaggatggataaccataccagctgtagctgatgttctaaaatattcttgcattgtttgctggtc

SEQ ID NO: 87696 - DNA, 120 bp, Artificial Sequence
  ENSG00000085832_51 (sequence is synthesized)
gaataaacacaatttatcttatatgcctggagcctattcccaggtaactggccttttttttttttaataaaaagctttattaaaaataatttttgaataataaatacatttgtaggaaat

SEQ ID NO: 87697 - DNA, 120 bp, Artificial Sequence
  ENSG00000085832_52 (sequence is synthesized)
tactaccttgaattttgttttaaatagtagacacccctttatcttctcctagatttacttgttaaccattttgtcacatttgctttctccctgtatccatattcttcagaattttttcct

SEQ ID NO: 87698 - DNA, 120 bp, Artificial Sequence
  ENSG00000085832_53 (sequence is synthesized)
agttttaaactctagcttgtgtgattttaatactgcttctcctgttccctctttttttgaattacctgatatttcttatgtttgttgtgtatgtctcttgaaaatggcagatttctgtat

SEQ ID NO: 87699 - DNA, 120 bp, Artificial Sequence
  ENSG00000085832_54 (sequence is synthesized)
tttaatgctttacctaattggatagtttttaagataatagcacttatattgatttgattttcccttctttaccgatttattttacatttttattttctctgtttcttactgttgcttatt

SEQ ID NO: 87700 - DNA, 120 bp, Artificial Sequence
  ENSG00000085832_55 (sequence is synthesized)
atcaacttgtgattcattcccttaccccgcctcccagttaatgtggaaattttgttataatgtcttgtttcattaatatagttaatacaggttgagcatccctaatctgaaaatccaaaa

SEQ ID NO: 87701 - DNA, 120 bp, Artificial Sequence
  ENSG00000085832_56 (sequence is synthesized)
cttgaaatgcttcaaaatctgaaacttttgagtactgacatgacccacaaagtggaaaattccactcctggtctcatgtgataagttacagtcaaaacttttgtttcatgcacaaaatta

SEQ ID NO: 87702 - DNA, 80 bp, Artificial Sequence
  ENSG00000085832_57 (sequence is synthesized)
acttttgtttcatgcacaaaattattaaaaagattgtataaaattatcttagattatgtgtataaagtcccatccccaag

SEQ ID NO: 87703 - DNA, 120 bp, Artificial Sequence
  ENSG00000085832_58 (sequence is synthesized)
gagctcccatgggcttgaatggatttctgtctggtgataaagtgaaaccagtgttgctcaactctaagttacctgtggatatccttggaagagtttgggagttgagtgatattgaccatg

SEQ ID NO: 87704 - DNA, 120 bp, Artificial Sequence
  ENSG00000085832_59 (sequence is synthesized)
agattttgttagtaaaatttttgctgtaatgtcttcccctccatccgtaacctcaacttgtgatcaaggtaagtatagttggctgtatatttcataaggtcaatgacattccttatttta

SEQ ID NO: 87705 - DNA, 120 bp, Artificial Sequence
  ENSG00000085840_0 (sequence is synthesized)
ctttggtcctggctttcggcccgtagttgtagaaggagccctgctggtgcaggttagaggtgccgcatcccccggagctctcgaagtggaggcggtaggaaacggagggcttgcggctag

SEQ ID NO: 87706 - DNA, 120 bp, Artificial Sequence
  ENSG00000085840_1 (sequence is synthesized)
ccggaggaagctttggagccggccatggcacactaccccacaaggctgaagaccagaaaaacttattcatgggttggcaggcccttgttggatcgaaaactgcactaccaaacctataga

SEQ ID NO: 87707 - DNA, 120 bp, Artificial Sequence
  ENSG00000085840_2 (sequence is synthesized)
gaaatgtgtgtgaaaacagaaggttgttccaccgagattcacatccagattggacagtttgtgttgattgaaggggatgatgatgaaaacccgtatgttgctaaattgcttgagttgttc

SEQ ID NO: 87708 - DNA, 120 bp, Artificial Sequence
  ENSG00000085840_3 (sequence is synthesized)
gaagatgactctgatcctcctcctaagaaacgtgctcgagtacagtggtttgtccgattctgtgaagtccctgcctgtaaacggcatttgttgggccggaagcctggtgcacaggaaata

SEQ ID NO: 87709 - DNA, 120 bp, Artificial Sequence
  ENSG00000085840_4 (sequence is synthesized)
ttctggtatgattacccggcctgtgacagcaacattaatgcggagaccatcattggccttgttcgggtgatacctttagccccaaaggatgtggtaccgacgaatctgaaaaatgagaag

SEQ ID NO: 87710 - DNA, 120 bp, Artificial Sequence
  ENSG00000085840_5 (sequence is synthesized)
acactctttgtgaaactatcctggaatgagaagaaattcaggccactttcctcagaactatttgcggagttgaataaaccacaagagagtgcagccaagtgccagaaacccgtgagagcc

SEQ ID NO: 87711 - DNA, 120 bp, Artificial Sequence
  ENSG00000085840_6 (sequence is synthesized)
aagagtaagagtgcagagagcccttcttggaccccagcagaacatgtggccaaaaggattgaatcaaggcactccgcctccaaatctcgccaaactcctacccatcctcttaccccaaga

SEQ ID NO: 87712 - DNA, 120 bp, Artificial Sequence
  ENSG00000085840_7 (sequence is synthesized)
gccagaaagaggctggagcttggcaacttaggtaaccctcagatgtcccagcagacttcatgtgcctccttggattctccaggaagaataaaacggaaagtggccttctcggagatcacc

SEQ ID NO: 87713 - DNA, 120 bp, Artificial Sequence
  ENSG00000085840_8 (sequence is synthesized)
tcaccttctaagagatctcagcctgataaacttcaaaccttgtctccagctctgaaagccccagagaaaaccagagagactggactctcttatactgaggatgacaagaaggcttcacct

SEQ ID NO: 87714 - DNA, 120 bp, Artificial Sequence
  ENSG00000085840_9 (sequence is synthesized)
gaacatcgcataatcctgagaacccgaattgcagcttcgaaaaccatagacattagagaggagagaacacttacccctatcagtgggggacagagatcttcagtggtgccatccgtgatt

SEQ ID NO: 87715 - DNA, 120 bp, Artificial Sequence
  ENSG00000085840_10 (sequence is synthesized)
ctgaaaccagaaaacatcaaaaagagggatgcaaaagaagcaaaagcccagaatgaagcgacctctactccccatcgtatccgcagaaagagttctgtcttgactatgaatcggattagg

SEQ ID NO: 87716 - DNA, 120 bp, Artificial Sequence
  ENSG00000085840_11 (sequence is synthesized)
cagcagcttcggtttctaggtaatagtaaaagtgaccaagaagagaaagagattctgccagcagcagagatttcagactctagcagtgacgaagaagaggcttccacaccgccccttcca

SEQ ID NO: 87717 - DNA, 120 bp, Artificial Sequence
  ENSG00000085840_12 (sequence is synthesized)
gaagagtctcaagcctagaacgccacgttgtgccgctcctcagatccgtagtcgaagcctggctgcccaggagccagccagtgtgctggaggaagcccgactgaggctgcatgtttctgc

SEQ ID NO: 87718 - DNA, 120 bp, Artificial Sequence
  ENSG00000085840_13 (sequence is synthesized)
tgtacctgagtctcttccctgtcgggaacaggaattccaagacatctacaattttgtggaaagcaaactccttgaccataccggagggtgcatgtacatctccggtgtccctgggacagg

SEQ ID NO: 87719 - DNA, 120 bp, Artificial Sequence
  ENSG00000085840_14 (sequence is synthesized)
gaagactgccactgttcatgaagtgatacgctgcctgcagcaggcagcccaagccaatgatgttcctccctttcaatacattgaggtcaatggcatgaagctgacggagccccaccaagt

SEQ ID NO: 87720 - DNA, 120 bp, Artificial Sequence
  ENSG00000085840_15 (sequence is synthesized)
ctatgtgcaaatcttgcagaagctaacaggccaaaaagcaacagccaaccatgcggcagaactgctggcaaagcaattctgcacccgagggtcacctcaggaaaccaccgtcctgcttgt

SEQ ID NO: 87721 - DNA, 120 bp, Artificial Sequence
  ENSG00000085840_16 (sequence is synthesized)
ggatgagctcgaccttctgtggactcacaaacaagacataatgtacaatctctttgactggcccactcataaggaggcccggcttgtggtcctggcaattgccaacacaatggacctgcc

SEQ ID NO: 87722 - DNA, 120 bp, Artificial Sequence
  ENSG00000085840_17 (sequence is synthesized)
agagcgaatcatgatgaaccgggtgtccagccgactgggtcttaccaggatgtgcttccagccctatacatatagccagctgcagcagatcctaaggtcccggctcaagcatctaaaggc

SEQ ID NO: 87723 - DNA, 120 bp, Artificial Sequence
  ENSG00000085840_18 (sequence is synthesized)
ctttgaagatgatgccatccagctggtagccaggaaggtagcagcactgtctggagatgcacgacggtgcctggacatctgcaggcgtgccacagagatctgtgagttctcccagcagaa

SEQ ID NO: 87724 - DNA, 120 bp, Artificial Sequence
  ENSG00000085840_19 (sequence is synthesized)
gcctgactcccctggcctggtcaccatagcccactcaatggaagctgtggatgagatgttttcatcatcatacatcacggccatcaaaaattcctctgttctggaacagagcttcctgag

SEQ ID NO: 87725 - DNA, 120 bp, Artificial Sequence
  ENSG00000085840_20 (sequence is synthesized)
agccatcctcgcagagttccgtcgatcaggactggaggaagccacgtttcaacagatatatagtcaacatgtggcactgtgcagaatggagggactgccgtaccccaccatgtcagagac

SEQ ID NO: 87726 - DNA, 120 bp, Artificial Sequence
  ENSG00000085840_21 (sequence is synthesized)
catggccgtgtgttctcacctgggctcctgtcgcctcctgcttgtggagcccagcaggaacgatctgctccttcgggtgcggctcaacgtcagccaggatgatgtgctgtatgcgctgaa

SEQ ID NO: 87727 - DNA, 87 bp, Artificial Sequence
  ENSG00000085840_22 (sequence is synthesized)
ggctcaacgtcagccaggatgatgtgctgtatgcgctgaaagacgagtaaaggggcttcacaagttaaaagactggggtcttgctgg

SEQ ID NO: 87728 - DNA, 90 bp, Artificial Sequence
  ENSG00000085840_23 (sequence is synthesized)
gcacgatcatggctcactgcagccttgacttctcaggcttaggtgaccccccaacctcatcctcccaggtggctgagattttttgtagag

SEQ ID NO: 87729 - DNA, 120 bp, Artificial Sequence
  ENSG00000085840_24 (sequence is synthesized)
caagctagtctacaaagcatctgattttggaagtacatggaattgttgtaacaaagtatattgaatggaaatggctctcatgtattttggaattttccattaaataatttgctttttcct

SEQ ID NO: 87730 - DNA, 120 bp, Artificial Sequence
  ENSG00000085871_0 (sequence is synthesized)
ataaagatctgtgaccggcagccccagacctgcctgccttcctgacttctgttccagagcaaaggtcattcagccgcttgaatcagccttttccccccacccggtccccaactttgttta

SEQ ID NO: 87731 - DNA, 120 bp, Artificial Sequence
  ENSG00000085871_1 (sequence is synthesized)
cccgataaggaaggtcagcattcaaagtcaagaagcgccatttatcttcccgtgcgctctacaaatagttccgtgagaaagatggccgggaactcgatcctgctggctgctgtctctatt

SEQ ID NO: 87732 - DNA, 120 bp, Artificial Sequence
  ENSG00000085871_2 (sequence is synthesized)
ctctcggcctgtcagcaaagttattttgctttgcaagttggaaaggcaagattaaaatacaaagttacgcccccagcagtcactgggtcaccagagtttgagagagtatttcgggcacaa

SEQ ID NO: 87733 - DNA, 120 bp, Artificial Sequence
  ENSG00000085871_3 (sequence is synthesized)
tcctatattcataattacattgtggatggctgggtggtatttcaaccaagtttttgctacttgtctgggtctggtgtacatatatggccgtcacctatacttctggggatattcagaagc

SEQ ID NO: 87734 - DNA, 120 bp, Artificial Sequence
  ENSG00000085871_4 (sequence is synthesized)
tgctaaaaaacggatcaccggtttccgactgagtctggggattttggccttgttgaccctcctaggtgccctgggaattgcaaacagctttctggatgaatatctggacctcaatattgc

SEQ ID NO: 87735 - DNA, 120 bp, Artificial Sequence
  ENSG00000085871_5 (sequence is synthesized)
caagaaactgaggcggcaattctaactttttctcttccctttaatacttgcagaagctgttcccaccatgaaggtaatatggtatcatttgttaaataaaaataaagtctttattctgtt

SEQ ID NO: 87736 - DNA, 120 bp, Artificial Sequence
  ENSG00000085871_6 (sequence is synthesized)
tcgagaggtgggtgaaaactgccattgcctccacagactgtcttctccgtggaaagaagacctgagtcaccagggctgggaaacctgcaccactgagacgagcacagcctctgccggcat

SEQ ID NO: 87737 - DNA, 120 bp, Artificial Sequence
  ENSG00000085871_7 (sequence is synthesized)
gcaagtggccgctgtcaggacacatggactgaaagtggtttgtcagctgctccattaggttttttttacccatatgtttgctacctttctttccttgatttaaaaatagggagggggagc

SEQ ID NO: 87738 - DNA, 120 bp, Artificial Sequence
  ENSG00000085871_8 (sequence is synthesized)
agtctcagctgtcttcagctgctagggagatttttttccccctcctgagctactgtttcccccaacccgagcctttctctcttattgtacccaccctttctgatgaagtcatcaaagcaa

SEQ ID NO: 87739 - DNA, 120 bp, Artificial Sequence
  ENSG00000085871_9 (sequence is synthesized)
agattgcataactgatgcataggcctatcttgtgttatactgggagacaggccaatgtttccattaatagacaagagcaccaccacgctgccaaatggagctctctgctgcaaccactac

SEQ ID NO: 87740 - DNA, 120 bp, Artificial Sequence
  ENSG00000085871_10 (sequence is synthesized)
tgttcccaccatgaagttattggtttcttgaactctttggggcacaatttcaagaggaagaagtaaaaaaaggataccatttcaaggaattgcccagggacaagtgcgaagagaatattc

SEQ ID NO: 87741 - DNA, 120 bp, Artificial Sequence
  ENSG00000085871_11 (sequence is synthesized)
tttctcttggctgaggaaggttctcttgtgatcctgggaaatgctagaccgtgagcatcttgatggaggatgtgaactgccacttcctcacaggcagcaggcaggtgctgaataagtgct

SEQ ID NO: 87742 - DNA, 120 bp, Artificial Sequence
  ENSG00000085871_12 (sequence is synthesized)
tgctgaatgaatgaatgaatcacgccaaggggcatgttacctgttccgccaaaatctgctgctgctgctgctgctgctgctgcctttgctcccgcaggaactgttgcttctgctgctcta

SEQ ID NO: 87743 - DNA, 120 bp, Artificial Sequence
  ENSG00000085871_13 (sequence is synthesized)
gccacctgagcctgggggcacggaggactgcatggggcctgtggttcggggaagtccaactggatgctgctcctgggaagacaagagagagggagatgcagggattccccatagagactc

SEQ ID NO: 87744 - DNA, 120 bp, Artificial Sequence
  ENSG00000085871_14 (sequence is synthesized)
actgctgtttgaagggaagcccctggaaaaagggaacggggcagaagtcccagcttatggactggagggtttttgagtggcacgcattgcatttccataaacgtagcttcaaacccgacc

SEQ ID NO: 87745 - DNA, 120 bp, Artificial Sequence
  ENSG00000085871_15 (sequence is synthesized)
ttacctgagtagaatgagagaggccacaagggacagtaagagagcatggctctgggaagtccaaggccaagtccagtctgtttcggatgggactgactattgcatatagactggattttc

SEQ ID NO: 87746 - DNA, 120 bp, Artificial Sequence
  ENSG00000085871_16 (sequence is synthesized)
aactaacatcctgtgttcctccaaggaaagggaataagccctcaggctgagctcacctaaagtctggaacacgagacacatcctgacctcacctgttaatccttatttcttactgtctac

SEQ ID NO: 87747 - DNA, 120 bp, Artificial Sequence
  ENSG00000085871_17 (sequence is synthesized)
ttggccaaaatggacgtcttctttgcaagtaggagggacatttgcagaaaactgcaggaatttgttaatcaacagatctgatatttgatggaattctaacgagttgcaacatttgagagc

SEQ ID NO: 87748 - DNA, 120 bp, Artificial Sequence
  ENSG00000085871_18 (sequence is synthesized)
ttagatatatgtcagaaagaaaaatcctcctggccagagttgttgatggtgagaactgggaatgttttacaccgatcaaagctatgtaatctcctaatatttttaaaaatagaattgagt

SEQ ID NO: 87749 - DNA, 69 bp, Artificial Sequence
  ENSG00000085871_19 (sequence is synthesized)
atagaattgagtctactttgggtggatcacgaggtcagttcgagaccagcttggccaagatggtgaaac

SEQ ID NO: 87750 - DNA, 120 bp, Artificial Sequence
  ENSG00000085871_20 (sequence is synthesized)
cactcttcacagccaagaccgttctcagaatccagaaagtttgaagggttcggggcatgaagtctctgcccacatctattaccaattcagcagggtatatttacagaaaaggctgggatc

SEQ ID NO: 87751 - DNA, 120 bp, Artificial Sequence
  ENSG00000085871_21 (sequence is synthesized)
tcaggagggactgctgtgtctcccaaggagggtcactgggtcaaagaggccccctggagccttgtgagaccacaatagtctgaagttggattcgttatgctacaattttctatcttattt

SEQ ID NO: 87752 - DNA, 120 bp, Artificial Sequence
  ENSG00000085871_22 (sequence is synthesized)
tttcctccctacttcaaaacagaggtagatcaggattaatcttttgccagtttctctgtgaaccatttcttaaaatcagaaacctgtaagaatgagaaagcttgccagctcacatgcatg

SEQ ID NO: 87753 - DNA, 120 bp, Artificial Sequence
  ENSG00000085872_0 (sequence is synthesized)
gcagacggcgctggtggtcgatcgtgtggcgccggaggacgttccccgcggccggagccatggagatgccgctgccccccgatgaccaggagcttcgaaatgtcatcgacaagctcgccc

SEQ ID NO: 87754 - DNA, 120 bp, Artificial Sequence
  ENSG00000085872_1 (sequence is synthesized)
agttcgtggctcgcaatgggcccgagtttgagaagatgactatggagaagcagaaggacaaccccaaattctcgtttcttttcggaggcgaattctacagttactacaagtgcaagctgg

SEQ ID NO: 87755 - DNA, 120 bp, Artificial Sequence
  ENSG00000085872_2 (sequence is synthesized)
cgctggagcagcagcagctcatctgcaagcagcagaccccggagctggagccagccgccaccatgccacccctgccacagcccccgctggcccccgccgcgcccatcccgccggcccagg

SEQ ID NO: 87756 - DNA, 120 bp, Artificial Sequence
  ENSG00000085872_3 (sequence is synthesized)
gcgcgccatccatggacgagctcatccagcagagccagtggaacctccagcagcaggagcagcacttgctggcgctcagacaggagcaagtgacagcggccgtggcccacgcggtggagc

SEQ ID NO: 87757 - DNA, 120 bp, Artificial Sequence
  ENSG00000085872_4 (sequence is synthesized)
agcagatgcagaagcttctggaggagacccagctagacatgaacgagtttgacaacctcctgcagcccatcatcgacacgtgcaccaaggacgccatctcggccgggaagaactggatgt

SEQ ID NO: 87758 - DNA, 120 bp, Artificial Sequence
  ENSG00000085872_5 (sequence is synthesized)
tcagcaatgccaagtccccgccgcactgtgagctgatggccggccacctccggaaccgcatcacggctgatggggcacacttcgagctgcggctgcacctcatctacctgatcaatgacg

SEQ ID NO: 87759 - DNA, 120 bp, Artificial Sequence
  ENSG00000085872_6 (sequence is synthesized)
tgctgcaccactgccagcgcaagcaggcccgggagctgctggccgccctgcagaaggtcgtggtgcccatctactgcaccagcttcttggccgtggaggaagacaagcagcagaagatcg

SEQ ID NO: 87760 - DNA, 120 bp, Artificial Sequence
  ENSG00000085872_7 (sequence is synthesized)
cccggctcctgcagctctgggagaaaaacggctacttcgatgactccatcattcagcagctacagagcccagccctggggcttggtcagtaccaggccaccctcatcaacgagtactcct

SEQ ID NO: 87761 - DNA, 120 bp, Artificial Sequence
  ENSG00000085872_8 (sequence is synthesized)
cagtggtccagccggtgcagctggccttccagcagcagatccagaccctcaagacgcagcacgaggagtttgtcaccagcctggcccagcagcagcagcagcagcaacagcagcagcagc

SEQ ID NO: 87762 - DNA, 120 bp, Artificial Sequence
  ENSG00000085872_9 (sequence is synthesized)
agctccagatgccgcagatggaggctgaagtcaaggccacgcctccaccgcctgctccacccccggccccagcacctgcccctgccatcccgcccaccacccagcctgatgacagcaagc

SEQ ID NO: 87763 - DNA, 120 bp, Artificial Sequence
  ENSG00000085872_10 (sequence is synthesized)
ctcccatccagatgcctggctcttcagagtacgaagctccaggaggggtccaggatcctgcagctgccggcccccggggccccgggccacacgaccagatcccaccaaacaagccccctt

SEQ ID NO: 87764 - DNA, 120 bp, Artificial Sequence
  ENSG00000085872_11 (sequence is synthesized)
ggtttgaccagcctcaccccgtggctccttggggccagcagcagccgccagagcagccaccctacccgcaccaccagggcggcccaccccactgccccccctggaacaacagccatgagg

SEQ ID NO: 87765 - DNA, 120 bp, Artificial Sequence
  ENSG00000085872_12 (sequence is synthesized)
gcatgtggggcgagcagcgcggtgaccccggctggaacggccagcgcgacgcgccctggaacaaccagcccgacgccgcctggaacagccagttcgagggcccctggaacagccagcacg

SEQ ID NO: 87766 - DNA, 120 bp, Artificial Sequence
  ENSG00000085872_13 (sequence is synthesized)
cacgagcagccgccctggggcgggggccagcgcgagccacccttccgcatgcagcggcccccacacttccgggggcccttcccgccccaccagcagcacccgcagttcaaccagcctccg

SEQ ID NO: 87767 - DNA, 120 bp, Artificial Sequence
  ENSG00000085872_14 (sequence is synthesized)
cccacaacttcaaccgcttcccgccccgcttcatgcaggacgacttcccgccacggcaccccttcgagcggccgccctatccccaccgcttcgactacccccagggggacttccctgccg

SEQ ID NO: 87768 - DNA, 120 bp, Artificial Sequence
  ENSG00000085872_15 (sequence is synthesized)
aaatggggccccctcaccaccaccctggccaccgcatgcctcatcctggcatcaacgagcacccgccttgggctggaccccagcaccctgacttcggccctcccccccatggcttcaacg

SEQ ID NO: 87769 - DNA, 120 bp, Artificial Sequence
  ENSG00000085872_16 (sequence is synthesized)
gaagctggaagatcacgagtacaagcctttggaccctaaagacatccgcctcccaccccccatgccgcccagcgagaggctgctggctgcagtggaggccttctacagccccccgtccca

SEQ ID NO: 87770 - DNA, 120 bp, Artificial Sequence
  ENSG00000085872_17 (sequence is synthesized)
cgacaggcccaggaacagtgaaggctgggagcagaacggcctctatgagttcttccgagcaaaaatgcgggcccggcggaggaaaggccaggagaagaggaacagcggaccctcgaggtc

SEQ ID NO: 87771 - DNA, 120 bp, Artificial Sequence
  ENSG00000085872_18 (sequence is synthesized)
tcggagcagatccaagagtcgagggcgttcttcctcccgctccaactcaagatcctccaagtcttcaggctcgtactcaaggtcaaggtcgcgctcctgctcccgttcctactcccgctc

SEQ ID NO: 87772 - DNA, 120 bp, Artificial Sequence
  ENSG00000085872_19 (sequence is synthesized)
cagatctagaagtcggagcaggtcgcgctcctccagaagccgctcccggtcccagtcgcggtcccggtccaagtcgtactccccaggaagaagacgccggtcacggtccaggagccccac

SEQ ID NO: 87773 - DNA, 120 bp, Artificial Sequence
  ENSG00000085872_20 (sequence is synthesized)
cccgccttcctctgctggtctgggttctaattcggcgcctcccatccctgactcaaggctcggagaagagaacaaaggccatcagatgctggtgaagatgggctggagcggctcaggcgg

SEQ ID NO: 87774 - DNA, 120 bp, Artificial Sequence
  ENSG00000085872_21 (sequence is synthesized)
cctcggtgcgaaggagcaagggatccaggaccccatcaagggcggggacgtccgggataagtgggaccagtataaaggcgtgggcgtggctctggatgacccctatgagaactaccgcag

SEQ ID NO: 87775 - DNA, 120 bp, Artificial Sequence
  ENSG00000085872_22 (sequence is synthesized)
gaacaagagctactccttcatcgcccgcatgaaggccagggacgagtgtaagtaggcgcccatgccgggagccgcgccggtggccagcggtgccggctgtgggaccttcctggctgactg

SEQ ID NO: 87776 - DNA, 120 bp, Artificial Sequence
  ENSG00000085872_23 (sequence is synthesized)
gcagaggaagattgcagtgacagctcagttcttacaccgtctccacttgtggagagccacaggaagagaaggaagaccagcgcatgcccagtgggaacgccgtgctccatggcgtggagg

SEQ ID NO: 87777 - DNA, 120 bp, Artificial Sequence
  ENSG00000085872_24 (sequence is synthesized)
gcacgggtgccacccacaaaccacaccaggaggcgctgcagccaccagggccccaggctcgttttcctttatagcgaagcaaaaaacacaagaccctccgcccgagtaaattcttcagcc

SEQ ID NO: 87778 - DNA, 120 bp, Artificial Sequence
  ENSG00000085872_25 (sequence is synthesized)
acgaagggatggatgtgcatctgccctaagtcagattgaagcctcctcctaggctccaggaggagcatgtgcaggaagggttggcctgagccagagccggcaccccagctccttcctcca

SEQ ID NO: 87779 - DNA, 120 bp, Artificial Sequence
  ENSG00000085872_26 (sequence is synthesized)
gctccccgcacccaccggccctgacctggcttcccctcggctgtgtagggacaaagccgaagcccagtgccatgactgcccgcggattgaaaaacagaaacacaaaactttgacttgact

SEQ ID NO: 87780 - DNA, 120 bp, Artificial Sequence
  ENSG00000085872_27 (sequence is synthesized)
tgcgaagtgaagcagggttttcatttttactctccttggtttaggtctagaaagaagaatactgacctgagaggaggcccagtgagattctgaaacctaattcttcgaaggcgtactggc

SEQ ID NO: 87781 - DNA, 120 bp, Artificial Sequence
  ENSG00000085872_28 (sequence is synthesized)
ccttagttcagttattttagttgtataagttgatattttttttctggaatgtagccatttgctgttatctgggaaacaagattctaacaggaaaccagcctaagacacttcaggttgagc

SEQ ID NO: 87782 - DNA, 120 bp, Artificial Sequence
  ENSG00000085872_29 (sequence is synthesized)
gctgcctcggagtctgtgcccgtcgcgtcccctgcttgagttttgcacttggaagaaccctgcaccggctggcgtgtgcgacggcccagtcccatccagagcatggagcccgaccccagc

SEQ ID NO: 87783 - DNA, 120 bp, Artificial Sequence
  ENSG00000085872_30 (sequence is synthesized)
cagcgccttccactccatcatttcatttcacacccccgaagggaggggaggccaggaggggagctgctcctgccagaagctggtgggtgaccgttgggaatcggccacacctggtgtcca

SEQ ID NO: 87784 - DNA, 120 bp, Artificial Sequence
  ENSG00000085872_31 (sequence is synthesized)
tgggcagcctggtgcaattccattcatttgtacagaaacatttttgaaaaattcttttcaataagatgcaaaatcttccaacttttcaacccaacgtgatgaatatttgattttgttcta

SEQ ID NO: 87785 - DNA, 120 bp, Artificial Sequence
  ENSG00000085872_32 (sequence is synthesized)
gatttcctgtagctgtgaattgttaaaatgtatgattcaggataaaacgtaaacacgtgctgttagtaatttcttgtggatttcattgttttgccttcaaataaagcctttttttaaaga

SEQ ID NO: 87786 - DNA, 120 bp, Artificial Sequence
  ENSG00000085872_33 (sequence is synthesized)
atcctgtcttaagtgctgcgctggtaactctgggaagctgcggtgctttgctgtgaatgtggaaacattggtggttaggagactgtgttaggaggccgccagcattagcccggggacagt

SEQ ID NO: 87787 - DNA, 120 bp, Artificial Sequence
  ENSG00000085872_34 (sequence is synthesized)
ggcacccctcacccttcaccacagtagccacttggcgaagcctgaggcagtaactggggtctgctttctaaccaccatctgggttggaggtgtcctgctctcaatgctgagcgtggggtg

SEQ ID NO: 87788 - DNA, 120 bp, Artificial Sequence
  ENSG00000085872_35 (sequence is synthesized)
caggccgtcccatcgagcgcttcctttctcggattccagtccgggctctgccacaaacctctttctttcgggtcgtttattctttgaagtggagcagctcggtccacacgatccctgttc

SEQ ID NO: 87789 - DNA, 120 bp, Artificial Sequence
  ENSG00000085872_36 (sequence is synthesized)
aatggagaacaacgaggttttcgatcctcccccctgggctctggatcagggattttgctgttgttttgcagactgatgacggagattagcaggagtagcgtgattgttttagtgttttct

SEQ ID NO: 87790 - DNA, 120 bp, Artificial Sequence
  ENSG00000085872_37 (sequence is synthesized)
agggaggaagtgatagaggccggatgggagtccatgggacaggcactgtccagccccctttgccgtctccctgtgggtccagcaaggttttgtgcatttcagatgcctgcagcagaaatc

SEQ ID NO: 87791 - DNA, 120 bp, Artificial Sequence
  ENSG00000085872_38 (sequence is synthesized)
aaaaagaattatccctctgagttttagttattggcaagtgtttatcaatgttcgttcatttaggcaacaggattccagtcctgctctaaagaagtttaaagttaggaagcagagctggcc

SEQ ID NO: 87792 - DNA, 120 bp, Artificial Sequence
  ENSG00000085872_39 (sequence is synthesized)
tttgaataatggatagtcaccaggtggtgcggctgctcagggcaggtatcacatctgtcacgttcagtacccaaccccgtctctagattgtttaaatgaataactaggagtttgccaggt

SEQ ID NO: 87793 - DNA, 120 bp, Artificial Sequence
  ENSG00000085872_40 (sequence is synthesized)
attcccggcgagcgtgtggcccctatcgggacccgtacaagggcggcctcttcggggcccacccccttggggtccccggcaaggcggacgggggctggggcgccgagtcccccggctttg

SEQ ID NO: 87794 - DNA, 120 bp, Artificial Sequence
  ENSG00000085872_41 (sequence is synthesized)
cccgtgcccagagcgccacttcctcgcgctcctcctcaaccctcctgggtggccgcttgctccggtcggtagcttggcttggcctgtcccgagactagggggcacttgtccggggacccc

SEQ ID NO: 87795 - DNA, 120 bp, Artificial Sequence
  ENSG00000085872_42 (sequence is synthesized)
gggtggggggtctctgtgagccaccaggcttctgtctccaggactgcgaggtctaggtgtcctgtgcaccttcgctgcatgccctgtcctctcccctagaccccggcctcacctgtcaca

SEQ ID NO: 87796 - DNA, 120 bp, Artificial Sequence
  ENSG00000085872_43 (sequence is synthesized)
ttgctgtctcctgggggccactgtcccctgcactccttcctctcatggggcagcttcttggcgtctccttgttgccttctcagccacggcctccttggcctctgtgtctgtctcctgccc

SEQ ID NO: 87797 - DNA, 120 bp, Artificial Sequence
  ENSG00000085872_44 (sequence is synthesized)
tcgtcactgatttgcacgcacacacacgcggtcacctgactttgctcagccatcaggaccctcctttgggatccccttctccagccctgacccatctctcaggcttcaacagagccacat

SEQ ID NO: 87798 - DNA, 120 bp, Artificial Sequence
  ENSG00000085872_45 (sequence is synthesized)
ctgccgaccctctgtccccacccagccctcacccttcccactgttgctgtctccaccctccccaaggttgggtgggtatttccttctacagggtcactggggcccttctcacaaaaatta

SEQ ID NO: 87799 - DNA, 120 bp, Artificial Sequence
  ENSG00000085872_46 (sequence is synthesized)
aagtctccagagcagaagctgatgagggaagagcctcccgtcttcagtctacaggaagatgctggcttggtttgaaagtccccagaagcagaccccaggacaaggatccgccagagcagc

SEQ ID NO: 87800 - DNA, 120 bp, Artificial Sequence
  ENSG00000085978_0 (sequence is synthesized)
agaccgtcccggatggcctcggggactgccagtgtgtggaggtgagctccgggattgccggcattcccgcttctgctggttgcttcatgctgcaggctgcggccgtcagccctcgctcgc

SEQ ID NO: 87801 - DNA, 120 bp, Artificial Sequence
  ENSG00000085978_1 (sequence is synthesized)
attggtggcgctgaggtgccggggcagcaagtgacatgtcgtcgggcctccgcgccgctgacttcccccgctggaagcgccacatctcggagcaactgaggcgccgggaccggctgcaga

SEQ ID NO: 87802 - DNA, 120 bp, Artificial Sequence
  ENSG00000085978_2 (sequence is synthesized)
gacaggcgttcgaggagatcatcctgcagtataacaaattgctggaaaagtcagatcttcattcagtgttggcccagaaactacaggctgaaaagcatgacgtaccaaacaggcacgaga

SEQ ID NO: 87803 - DNA, 120 bp, Artificial Sequence
  ENSG00000085978_3 (sequence is synthesized)
taagtcccggacatgatggcacatggaatgacaatcagctacaagaaatggcccaactgaggattaagcaccaagaggaactgactgaattacacaagaaacgtggggagttagctcaac

SEQ ID NO: 87804 - DNA, 120 bp, Artificial Sequence
  ENSG00000085978_4 (sequence is synthesized)
tggtgattgacctgaataaccaaatgcagcggaaggacagggagatgcagatgaatgaagcaaaaattgcagaatgtttgcagactatctctgacctggagacggagtgcctagacctgc

SEQ ID NO: 87805 - DNA, 120 bp, Artificial Sequence
  ENSG00000085978_5 (sequence is synthesized)
gcactaagctttgtgaccttgaaagagccaaccagaccctgaaggatgaatatgatgccctgcagatcacttttactgccttggagggaaaactgaggaaaactacggaagagaaccagg

SEQ ID NO: 87806 - DNA, 120 bp, Artificial Sequence
  ENSG00000085978_6 (sequence is synthesized)
agctggtcaccagatggatggctgagaaagcccaggaagccaatcggcttaatgcagagaatgaaaaagactccaggaggcggcaagcccggctgcagaaagagcttgcagaagcagcaa

SEQ ID NO: 87807 - DNA, 120 bp, Artificial Sequence
  ENSG00000085978_7 (sequence is synthesized)
aggaacctctaccagtcgaacaggatgatgacattgaggtcattgtggatgaaacttctgatcacacagaagagacctctcctgtgcgagccatcagcagagcagccactaagcgactct

SEQ ID NO: 87808 - DNA, 120 bp, Artificial Sequence
  ENSG00000085978_8 (sequence is synthesized)
cgcagcctgctggaggccttctggattctatcactaatatctttgggagacgctctgtctcttccttcccagtcccccaggacaatgtggatactcatcctggttctggtaaagaagtga

SEQ ID NO: 87809 - DNA, 120 bp, Artificial Sequence
  ENSG00000085978_9 (sequence is synthesized)
gggtaccagctactgccttgtgtgtcttcgatgcacatgatggggaagtcaacgctgtgcagttcagtccaggttcccggttactggccactggaggcatggaccgcagggttaagcttt

SEQ ID NO: 87810 - DNA, 120 bp, Artificial Sequence
  ENSG00000085978_10 (sequence is synthesized)
gggaagtatttggagaaaaatgtgagttcaagggttccctatctggcagtaatgcaggaattacaagcattgaatttgatagtgctggatcttacctcttagcagcttcaaatgattttg

SEQ ID NO: 87811 - DNA, 120 bp, Artificial Sequence
  ENSG00000085978_11 (sequence is synthesized)
caagccgaatctggactgtggatgattatcgattacggcacacactcacgggacacagtgggaaagtgctgtctgctaagttcctgctggacaatgcgcggattgtctcaggaagtcacg

SEQ ID NO: 87812 - DNA, 120 bp, Artificial Sequence
  ENSG00000085978_12 (sequence is synthesized)
accggactctcaaactctgggatctacgcagcaaagtctgcataaagacagtgtttgcaggatccagttgcaatgatattgtctgcacagagcaatgtgtaatgagtggacattttgaca

SEQ ID NO: 87813 - DNA, 120 bp, Artificial Sequence
  ENSG00000085978_13 (sequence is synthesized)
gggaaagattactgccctggacttaaacccagaaaggactgagctcctgagctgctcccgtgatgacttgctaaaagttattgatctccgaacaaatgctatcaagcagacattcagtgc

SEQ ID NO: 87814 - DNA, 120 bp, Artificial Sequence
  ENSG00000085978_14 (sequence is synthesized)
acctgggttcaagtgcggctctgactggaccagagttgtcttcagccctgatggcagttacgtggcggcaggctctgctgagggctctctgtatatctggagtgtgctcacagggaaagt

SEQ ID NO: 87815 - DNA, 120 bp, Artificial Sequence
  ENSG00000085978_15 (sequence is synthesized)
ggaaaaggttctttcaaagcagcacagctcatccatcaatgcggtggcgtggtcgccctctggctcgcacgttgtcagtgtggacaaaggatgcaaagctgtgctgtgggcacagtactg

SEQ ID NO: 87816 - DNA, 120 bp, Artificial Sequence
  ENSG00000085978_16 (sequence is synthesized)
acggggctctcagggctgggaggaccccagtgccctcctcagaagaagcacatgggctcctgcagccctgtcctggcaggtgatgtgctgggtatagcatggacctcccagagaagctca

SEQ ID NO: 87817 - DNA, 120 bp, Artificial Sequence
  ENSG00000085978_17 (sequence is synthesized)
agctatgtggcactgtagctttgccgtgaatgggatttctgaagatttgactgaggtctctcttggcctggaagaataacactgaaaaaacctgacgctgcggtcacttagcagaggctc

SEQ ID NO: 87818 - DNA, 120 bp, Artificial Sequence
  ENSG00000085978_18 (sequence is synthesized)
aggttcttgccttgggaaacactactagctctgaccttccatacctcacttgggggagcacagggccccgctgggcctcctcaccaacggcagtgccaaaatcagcccccacatcaaggt

SEQ ID NO: 87819 - DNA, 120 bp, Artificial Sequence
  ENSG00000085978_19 (sequence is synthesized)
ggtgttctctgtgctttctctcgtccttccaaagtcggttctggcctaacgcatgtcccaacaccttgggttcatttgcccggtgaactcactttaagcattggattaacggaaactccc

SEQ ID NO: 87820 - DNA, 120 bp, Artificial Sequence
  ENSG00000085978_20 (sequence is synthesized)
gaactacagacccctccctggtgggttgcatgaatgtgtctcattactgctgaaatgtcctcacatctctttcactgttcttcagagctttctggctctctttcccccacaaaattcgac

SEQ ID NO: 87821 - DNA, 120 bp, Artificial Sequence
  ENSG00000085978_21 (sequence is synthesized)
atatttaaaaatctccgtgtggctttaaaaaatggttttttgtttttttgtttttttgaggtgggagaggatgtgtgaaaatcttttccagggaaatgggttcgctgcagaggtaaggat

SEQ ID NO: 87822 - DNA, 120 bp, Artificial Sequence
  ENSG00000085978_22 (sequence is synthesized)
gtgttcctgtatcgatctgcagacacccagaaggtgggtgcacactgcatgcttgggggtgccaagggattcgagacctccaacatacttgtctgaaggtggtgattctggccatggccc

SEQ ID NO: 87823 - DNA, 120 bp, Artificial Sequence
  ENSG00000085978_23 (sequence is synthesized)
ctctgccaagcctgtgtgcgatgcccttggtgctttagtgcaagaagcctaggctcagaagcacagcagcgccatctttccgtttcaggggttgtgatgaaggccaaggaaaaacattta

SEQ ID NO: 87824 - DNA, 120 bp, Artificial Sequence
  ENSG00000085978_24 (sequence is synthesized)
tctttactattttacctacgtataaagttttagttcattgggtgtgcgaaacaccctttttatcacttttaaatttgcactttattttttttcttccatgcttgttctctggacatttgg

SEQ ID NO: 87825 - DNA, 120 bp, Artificial Sequence
  ENSG00000085978_25 (sequence is synthesized)
ggatgtgagtgttagagctggtgagagaggagtcaggtggccttcccaccgatggtcctggcctccacctgccctctcttccctgcctgatcaccgctttccaatttgcccttcagagaa

SEQ ID NO: 87826 - DNA, 120 bp, Artificial Sequence
  ENSG00000085978_26 (sequence is synthesized)
cttaagtcaaggagagttgaaattcacaggccagggcacatcttttatttatttcattatgttggccaacagaacttgattgtaaataataataaagaaatctgttatatacttttcaaa

SEQ ID NO: 87827 - DNA, 120 bp, Artificial Sequence
  ENSG00000085978_27 (sequence is synthesized)
agaaataaaatagttttgcaaaaaagaccaaagagctacctctgagctagctgttacattaagttgagaaagtttcccagcagcttattgactgggtaagcagttgttcaggattgcttt

SEQ ID NO: 87828 - DNA, 120 bp, Artificial Sequence
  ENSG00000085978_28 (sequence is synthesized)
tcattgttgggttttggagtccacaggttagtgtgcaggagagtaaggcatgtgctggctctctttctcatttgagtgagggtgcttttgatttttttgtgaattgttctgtagtttgaa

SEQ ID NO: 87829 - DNA, 120 bp, Artificial Sequence
  ENSG00000085978_29 (sequence is synthesized)
tggtcaaggtccactgatcaaccgtctatatacactcttactaaaacctgcaagagaacaaggagaggttcactctcacaactcacagagaacaccgatctggatgttctggccaaccaa

SEQ ID NO: 87830 - DNA, 120 bp, Artificial Sequence
  ENSG00000085978_30 (sequence is synthesized)
ccattgaaaagaaggagtgatcacccacctagaaacctaagaaaatgagctgaaaagctgttaacacaagttcagcagatgccaggaggcggcaagcccggctgcagaaagagcttgcag

SEQ ID NO: 87831 - DNA, 120 bp, Artificial Sequence
  ENSG00000085978_31 (sequence is synthesized)
tcaaactctgggatctacgcagcaaagtctgtgaggaaattcagtctctctgtctgtgtatatgcttagatgttagcgtggaggtgtgtgtttgcacgtcagagcctgcatttatgtaat

SEQ ID NO: 87832 - DNA, 120 bp, Artificial Sequence
  ENSG00000085978_32 (sequence is synthesized)
atagtttgaatttcagatctggcttcatgtttagaggggcactgaggatagtgatagtttttcttgtttaaagcttcatttaagtgagtaactctgacaagtcagtggttagagggtggc

SEQ ID NO: 87833 - DNA, 120 bp, Artificial Sequence
  ENSG00000085978_33 (sequence is synthesized)
ttttctgacgggctggctggcctgcactggtttcttagcttttctgagcctcaatctcctcatctgtacaatggaaagaaggctacctggtgtggttgtcgaagattcactgagctcatc

SEQ ID NO: 87834 - DNA, 120 bp, Artificial Sequence
  ENSG00000085978_34 (sequence is synthesized)
tctgcaaagcccctggctcggcgcctggccctgctgtaggggttcagtgagtgttatcccgttccctcatccttcgagacaaggcagtgagggagggcaccgtgcacagcatcggaaaag

SEQ ID NO: 87835 - DNA, 120 bp, Artificial Sequence
  ENSG00000085978_35 (sequence is synthesized)
ggagcaatatgaaggcacatctgtggacatgacaaagaatgcagtcagatgcacccaaccccttaccccttttctgggacacccagcgtcgaacacaccacagaggtgtccagtctttct

SEQ ID NO: 87836 - DNA, 120 bp, Artificial Sequence
  ENSG00000085978_36 (sequence is synthesized)
cagttcacctctgcttaatgggagggaagcagaacacgggtggcttcaaatgcttctaaatacaaaaaaatgtagtggcttactcaaatatggacagtgaaaccttattaagcagaatga

SEQ ID NO: 87837 - DNA, 120 bp, Artificial Sequence
  ENSG00000085978_37 (sequence is synthesized)
ttgtttaggtttgatcatcctgtttcattcttactagggcttccccccgcccgcaccgcccttcaagagtggggattggttactaacagtcagaaattgtgaagttagttagccaggaat

SEQ ID NO: 87838 - DNA, 120 bp, Artificial Sequence
  ENSG00000085978_38 (sequence is synthesized)
tgtgaggttagttgtctaatgctttatttccagggaaattaatttaatactagggaaccttgtttcttttgaaacttctaggctgggttttccctttcccttcccactgttttctggcag

SEQ ID NO: 87839 - DNA, 120 bp, Artificial Sequence
  ENSG00000085978_39 (sequence is synthesized)
tttggtactgtgttgggtttctcttggctggggtttgggaactaagtgggaaacatattcccagttacctgtttttgtgggctgtttattgattgattatttgggcaaaatgtttctaag

SEQ ID NO: 87840 - DNA, 120 bp, Artificial Sequence
  ENSG00000085978_40 (sequence is synthesized)
tagtaaattagtaattactagtagatcaataagtagtattaactcagtctggaccaaaattaattctaggtttacttttaaactattaagataaatataggccattattgttagaacaga

SEQ ID NO: 87841 - DNA, 120 bp, Artificial Sequence
  ENSG00000085978_41 (sequence is synthesized)
ataggccattattgttagaacagatgaaattaatgcaaggaccaactttaagcagtctacacagattttgagtactttttgagaaggttgcactgcactctaatgcaactgtaactagaa

SEQ ID NO: 87842 - DNA, 120 bp, Artificial Sequence
  ENSG00000085978_42 (sequence is synthesized)
gaataaaatgataatagaatcttagttgacctgggctaggagtccagtttagtttatgattggctccacctgtctttaaggatgagtgtttccccatgaattaggcatttggagtgttcg

SEQ ID NO: 87843 - DNA, 120 bp, Artificial Sequence
  ENSG00000085978_43 (sequence is synthesized)
aagacccagttaagaaagttagtgcaatctccaaacttcatgtggtgttatcaaggcacaaactggcaggtgcttaattaggggactttgttttcccaaaaatcatgcttgattcaccct

SEQ ID NO: 87844 - DNA, 120 bp, Artificial Sequence
  ENSG00000085978_44 (sequence is synthesized)
gcccttcctttcctccttggggaaatctgtgtttccactttatactctttgtccaaaactcagtttcaaaatatttgcaatgggaccctcacatttgcatgaaaaccttggaatactctt

SEQ ID NO: 87845 - DNA, 120 bp, Artificial Sequence
  ENSG00000085982_0 (sequence is synthesized)
atgtcactttttttaagggtagtatttagtttcacaatgtttggggacctgtttgaagaggagtattccactgtgtctaataatcagtatggaaaagggaagaaattaaagactaaagct

SEQ ID NO: 87846 - DNA, 120 bp, Artificial Sequence
  ENSG00000085982_1 (sequence is synthesized)
ttggagccacctgctcctagagaattcaccaatttaagcggaatcagaaatcagggtggaacctgttacctcaattcccttcttcagactcttcatttcacacctgaattcagagaagct

SEQ ID NO: 87847 - DNA, 120 bp, Artificial Sequence
  ENSG00000085982_2 (sequence is synthesized)
ctattttctcttggcccagaagagcttggtttgtttgaagataaggataaacccgatgcaaaggttcgaatcatccctttacagttacagcgcttgtttgctcagcttctgctcttagac

SEQ ID NO: 87848 - DNA, 120 bp, Artificial Sequence
  ENSG00000085982_3 (sequence is synthesized)
caggaagctgcatccacagcagacctcactgacagctttgggtggaccagtaatgaggaaatgaggcaacatgatgtgcaggaactgaatcgaatcctcttcagcgctttggaaacttct

SEQ ID NO: 87849 - DNA, 120 bp, Artificial Sequence
  ENSG00000085982_4 (sequence is synthesized)
ttagttgggacctccggtcatgacctcatctatcgtctgtaccatggaaccattgttaaccagattgtttgtaaagaatgtaagaacgttagcgagaggcaggaagacttcttagatcta

SEQ ID NO: 87850 - DNA, 120 bp, Artificial Sequence
  ENSG00000085982_5 (sequence is synthesized)
acagtagcagtcaaaaatgtatccggtttggaagatgctctctggaacatgtatgtagaagaggaagtttttgattgtgacaacttgtaccactgtggaacttgtgacaggctggttaaa

SEQ ID NO: 87851 - DNA, 120 bp, Artificial Sequence
  ENSG00000085982_6 (sequence is synthesized)
gcagcaaagtcggccaaattacgtaagctgcctccttttcttactgtttcattactaagatttaattttgattttgtgaaatgcgaacgctacaaggaaactagctgttatacattccct

SEQ ID NO: 87852 - DNA, 120 bp, Artificial Sequence
  ENSG00000085982_7 (sequence is synthesized)
ctccggattaatctcaagcccttttgtgaacagagtgaattggatgacttagaatatatatatgacctcttctcagttattatacacaaaggtggctgctacggaggccattaccatgta

SEQ ID NO: 87853 - DNA, 120 bp, Artificial Sequence
  ENSG00000085982_8 (sequence is synthesized)
tatattaaagatgttgatcatttgggaaactggcagtttcaagaggaaaaaagtaaaccagatgtgaatctgaaagatctccagagtgaagaagagattgatcatccactgatgattcta

SEQ ID NO: 87854 - DNA, 120 bp, Artificial Sequence
  ENSG00000085982_9 (sequence is synthesized)
aaagcaatcttattagaggagaataatctaattcctgttgatcagctgggccagaaacttttgaaaaagataggaatatcttggaacaagaagtacagaaaacagcatggaccactgcgg

SEQ ID NO: 87855 - DNA, 120 bp, Artificial Sequence
  ENSG00000085982_10 (sequence is synthesized)
aagttcttacagctccattctcagatatttctactcagttcagatgaaagtacagttcgtctcttgaagaatagttctctccaggctgagtctgatttccaaaggaatgaccagcaaatt

SEQ ID NO: 87856 - DNA, 120 bp, Artificial Sequence
  ENSG00000085982_11 (sequence is synthesized)
ttcaagatgcttcctccagaatccccaggtttaaacaatagcatctcctgtccccactggtttgatataaatgattctaaagtccagccaatcagggaaaaggatattgaacagcaattt

SEQ ID NO: 87857 - DNA, 120 bp, Artificial Sequence
  ENSG00000085982_12 (sequence is synthesized)
cagggtaaagaaagtgcctacatgttgttttatcggaaatcccagttgcagagaccccctgaagctcgagctaatccaagatatggggttccatgtcatttactgaatgaaatggatgca

SEQ ID NO: 87858 - DNA, 120 bp, Artificial Sequence
  ENSG00000085982_13 (sequence is synthesized)
gctaacattgaactgcaaaccaaaagggcagaatgtgattctgcaaacaatacttttgaattgcatcttcacctgggccctcagtatcatttcttcaatggggctctgcacccagtagtc

SEQ ID NO: 87859 - DNA, 120 bp, Artificial Sequence
  ENSG00000085982_14 (sequence is synthesized)
tctcaaacagaaagcgtgtgggatttgacctttgataaaagaaaaactttaggagatctccggcagtcaatatttcagctgttagaattttgggaaggagacatggttcttagtgttgca

SEQ ID NO: 87860 - DNA, 120 bp, Artificial Sequence
  ENSG00000085982_15 (sequence is synthesized)
aagcttgtaccagcaggacttcacatttaccagtcacttggcggggatgaactgacactgtgtgaaactgaaattgctgatggggaagacatctttgtgtggaatggggtggaggttggt

SEQ ID NO: 87861 - DNA, 120 bp, Artificial Sequence
  ENSG00000085982_16 (sequence is synthesized)
ggagtccacattcaaactggtattgactgcgaacctctacttttaaatgttcttcatctagacacaagcagtgatggagaaaagtgttgtcaggtgatagaatctccacatgtctttcca

SEQ ID NO: 87862 - DNA, 120 bp, Artificial Sequence
  ENSG00000085982_17 (sequence is synthesized)
gctaatgcagaagtgggcactgtcctcacagccttagcaatcccagcaggtgtcatcttcatcaacagtgctggatgtccaggtggggagggttggacggccatccccaaggaagacatg

SEQ ID NO: 87863 - DNA, 120 bp, Artificial Sequence
  ENSG00000085982_18 (sequence is synthesized)
aggaagacgttcagggagcaagggctcagaaatggaagctcaattttaattcaggattctcatgatgataacagcttgttgaccaaggaagagaaatgggtcactagtatgaatgagatt

SEQ ID NO: 87864 - DNA, 120 bp, Artificial Sequence
  ENSG00000085982_19 (sequence is synthesized)
gactggctccacgttaaaaatttatgccagttagaatctgaagagaagcaagttaaaatatcagcaactgttaacacaatggtgtttgatattcgaattaaagccataaaggaattaaaa

SEQ ID NO: 87865 - DNA, 120 bp, Artificial Sequence
  ENSG00000085982_20 (sequence is synthesized)
ttaatgaaggaactagctgacaacagctgtttgagacctattgatagaaatgggaagcttctttgtccagtgccggacagctatactttgaaggaagcagaattgaagatgggaagttca

SEQ ID NO: 87866 - DNA, 120 bp, Artificial Sequence
  ENSG00000085982_21 (sequence is synthesized)
ttgggactgtgtcttggaaaagcaccaagttcgtctcagttgttcctgttttttgcaatggggagtgacgttcaacctgggacagaaatggaaatcgtagtagaagaaacaatatctgtg

SEQ ID NO: 87867 - DNA, 120 bp, Artificial Sequence
  ENSG00000085982_22 (sequence is synthesized)
agagattgtttaaagttaatgctgaagaaatctggcctacaaggagatgcctggcatttacgaaaaatggattggtgctatgaagctggagagcctttatgtgaagaagatgcaacactg

SEQ ID NO: 87868 - DNA, 120 bp, Artificial Sequence
  ENSG00000085982_23 (sequence is synthesized)
cttcagggtccctcaggacactgggagagtcatcaggaccagaccaactgtacttcgtcttggggcagagtttggagagccacttccagccaaggtgcttctgggaacgagcctgcgcaa

SEQ ID NO: 87869 - DNA, 120 bp, Artificial Sequence
  ENSG00000085982_24 (sequence is synthesized)
gtttctctcctctacttgggagacatagagatctcagaagatgccacgctggcggagctgaagtctcaggccatgaccttgcctcctttcctggagttcggtgtcccgtccccagcccac

SEQ ID NO: 87870 - DNA, 120 bp, Artificial Sequence
  ENSG00000085982_25 (sequence is synthesized)
ctcagagcctggacggtggagaggaagcgcccaggcaggcttttacgaactgaccggcagccactcagggaatataaactaggacggagaattgagatctgcttagagccccttcagaaa

SEQ ID NO: 87871 - DNA, 120 bp, Artificial Sequence
  ENSG00000085982_26 (sequence is synthesized)
ggcgaaaacttgggcccccaggacgtgctgctgaggacacaggtgcgcatccctggtgagaggacctatgcccctgccctggacctggtgtggaacgcggcccagggtgggactgccggc

SEQ ID NO: 87872 - DNA, 120 bp, Artificial Sequence
  ENSG00000085982_27 (sequence is synthesized)
tccctgaggcagagagttgccgatttctatcgtcttcccgtggagaagattgaaattgccaaatactttcccgaaaagttcgagtggcttccgatatctagctggaaccaacaaataacc

SEQ ID NO: 87873 - DNA, 120 bp, Artificial Sequence
  ENSG00000085982_28 (sequence is synthesized)
aagaggaaaaagaaaaaaaaacaagattatttgcaaggggcaccgtattacttgaaagacggagatactattggtgttaagaatctcctgattgacgacgatgatgatttcagtacaatc

SEQ ID NO: 87874 - DNA, 120 bp, Artificial Sequence
  ENSG00000085982_29 (sequence is synthesized)
agagatgacactggaaaagaaaagcagaaacaacgggccctggggagaaggaaaagccaagaagccctccatgagcagagcagctacatcctctccagtgcagagacgcctgcccggccc

SEQ ID NO: 87875 - DNA, 120 bp, Artificial Sequence
  ENSG00000085982_30 (sequence is synthesized)
cgagccccggaaacttctctctccatccacgtggggagcttcagataaccgcgccgctgcacggctctactcccgatgaactctccggctgatgccacaaacgtgggtttcctgggcatg

SEQ ID NO: 87876 - DNA, 120 bp, Artificial Sequence
  ENSG00000085982_31 (sequence is synthesized)
gggactggctgcctggcgcctccaatcccaaatcctctgcttcctttgagcacagggacggctcctctgaggcctggccagtgcatgtagtcacttagctctgcaacacgtggcagccac

SEQ ID NO: 87877 - DNA, 120 bp, Artificial Sequence
  ENSG00000085982_32 (sequence is synthesized)
gggggctggtgcagctctggatgtcgcccacccagctgccagtaggtgctgggctctctcacacagcacccggccccagctgcctttttttttcttttaaccagaaaatgcacaacgtgt

SEQ ID NO: 87878 - DNA, 120 bp, Artificial Sequence
  ENSG00000085982_33 (sequence is synthesized)
gcgtgaaccgcaggtatggaggcagcggcatgccgttgctccgctgtgggaggtgtgtggggtcaggccagccactttcctccgtgttcagatgactctcgttcgccctgaccggcttct

SEQ ID NO: 87879 - DNA, 120 bp, Artificial Sequence
  ENSG00000085982_34 (sequence is synthesized)
cacagtgtctcaggccactgcgccaccgcgctggtgctgagcagaagcgggcagaagtggggtctgctttcaggacttcatttcccccactcgttccggccccgcatgctccacgtctgc

SEQ ID NO: 87880 - DNA, 120 bp, Artificial Sequence
  ENSG00000085982_35 (sequence is synthesized)
cctttggtctgagttaaaactgcgatgctgaaaagtgcgagctctttccacgaggaggagccacacagggtggcctccgagggtgagtcgctctgctaagcaagggcagccgctgcacgt

SEQ ID NO: 87881 - DNA, 120 bp, Artificial Sequence
  ENSG00000085982_36 (sequence is synthesized)
cagcccgcaggccaagggtccagcttatcctgggtgctctgtgatcagaaggtccttggatcccgaggactgcagctgctgccgtccacagcgcctcagcctctcttcctgtgtggaagc

SEQ ID NO: 87882 - DNA, 120 bp, Artificial Sequence
  ENSG00000085982_37 (sequence is synthesized)
ggggcaggcagggctgtggcagacaggcctggcatagcccaggttccaggtgtcctgggcagcctgaccggtttcctgagtagcctcaatgaaaacacctgagaaaaagaaaatgtaaac

SEQ ID NO: 87883 - DNA, 120 bp, Artificial Sequence
  ENSG00000085982_38 (sequence is synthesized)
taaggaagggttttcccacttaatccaacccagatttctattcaacttaaaggatttaattggcatttgtgagaaataatagtacctgtgtcactgagttgattgatttgggacatagac

SEQ ID NO: 87884 - DNA, 120 bp, Artificial Sequence
  ENSG00000085982_39 (sequence is synthesized)
ggttgactttcccagacagcagcttagcggaaagcagcatcccgaagacggtgtcgcatgtcctgagcctgcttgtcacctgggcctcacggtttctcgtcagccccgtcactgatggga

SEQ ID NO: 87885 - DNA, 120 bp, Artificial Sequence
  ENSG00000085982_40 (sequence is synthesized)
agcagcactgaagtgtgagggcagaaaggacaccgctggagtcaggcgctcccctgcctgtgacccttttccaacaagctgatgctgagccagcggcctgctttgtccctcatactcctc

SEQ ID NO: 87886 - DNA, 120 bp, Artificial Sequence
  ENSG00000085982_41 (sequence is synthesized)
ccaacagtccaaacccctaccagacagaagccacgtcgcttctgcacacgtgtctgagagcgtctgccatagacgtctgtgcgtttccgtgaagcactgcgccctaaggacccaactctg

SEQ ID NO: 87887 - DNA, 120 bp, Artificial Sequence
  ENSG00000085982_42 (sequence is synthesized)
actagcagctgcctcccactcccaaacactaaccccgctcaggagactcgcactgggtgtagactgcgtctttgcagagggagatgatagaggcttctgatgacgccagagctgtaagtg

SEQ ID NO: 87888 - DNA, 120 bp, Artificial Sequence
  ENSG00000085982_43 (sequence is synthesized)
tcgtgacgagctgggcgcccagcccttcttaagctgttctgtttctgtggctttaactgacatatttctgtagcatctgccttcatctcatctcagcgtaatgaaatattaatgaaatcg

SEQ ID NO: 87889 - DNA, 120 bp, Artificial Sequence
  ENSG00000085982_44 (sequence is synthesized)
ctgaaaagctttgccttcgagaggccagaagcctcgcggaatgtctgcaagtccaaagacgcgtgtgggttgtgccctgaagtgccgtccagcaggcgcgtgcggccgggccggcctgtg

SEQ ID NO: 87890 - DNA, 120 bp, Artificial Sequence
  ENSG00000085982_45 (sequence is synthesized)
cgtgtggcctttgccttcttccctttcttcctgttttctgtttttttaatttggggattgagaaagctgtacgattttgttaaagaaaaaaataaaccattttttaaagttgtagccctt

SEQ ID NO: 87891 - DNA, 120 bp, Artificial Sequence
  ENSG00000085982_46 (sequence is synthesized)
gagagattcctgtgacttttaaaatgatgttatcattacttgagatactctttccttgagatgccactgtgtagtgcttcattttttttttctaaaacagtatgttttgaagagtgcttt

SEQ ID NO: 87892 - DNA, 120 bp, Artificial Sequence
  ENSG00000085982_47 (sequence is synthesized)
gaatcagttttccaagtacaatactgctactgctttataaacatgtaacactctttactatgcttattctttcttctggtgaaggaaatatttgcagaacatccacattagcttccccca

SEQ ID NO: 87893 - DNA, 120 bp, Artificial Sequence
  ENSG00000085982_48 (sequence is synthesized)
gaagtctatttaaagcactttttttgcaacaataccgacctctccaccccacacaaaaaaaaatagaggctagtattctttcaatttggtactctggaaataaattgagtaatgagttaa

SEQ ID NO: 87894 - DNA, 120 bp, Artificial Sequence
  ENSG00000085982_49 (sequence is synthesized)
tgttgtaaattataatccatgtaattaaatgtatgatatataccacacaaggattaaagtgtttattactaaaagtaatttattgagtttttttttcttctaactacacctaaatcatga

SEQ ID NO: 87895 - DNA, 120 bp, Artificial Sequence
  ENSG00000085982_50 (sequence is synthesized)
atgagcctataatccagatttctccatgtagattgaaagaagcaaatatcttgaaacttaatcttttattcagtaccctaatatttggaaaatagatttgggggatatttacaaatagaa

SEQ ID NO: 87896 - DNA, 77 bp, Artificial Sequence
  ENSG00000085982_51 (sequence is synthesized)
ttgacctcctgggctcaagcagtcctcccgcctcaacctcctggctaattttttttatctttttgtagagtgtgcaa

SEQ ID NO: 87897 - DNA, 120 bp, Artificial Sequence
  ENSG00000085982_52 (sequence is synthesized)
ggcctcccaaattgctgggattacaggaggaaaaaagtaaaccagatgtgaatctgaaagatctccagagtgaagaagagattgatcatccactgatgattctaaaagcaatcttattag

SEQ ID NO: 87898 - DNA, 120 bp, Artificial Sequence
  ENSG00000085982_53 (sequence is synthesized)
ctccaatacctaatatttaaaaattaccttttggaaactgatttataggacatattttcttccaggtatcttacctttatattgcagaaatccttaaccagaaacaaacacttctgtttt

SEQ ID NO: 87899 - DNA, 120 bp, Artificial Sequence
  ENSG00000085982_54 (sequence is synthesized)
ctaaatgaaacaccattctttctgattatccgattctcattttactcacgggtttgatctagttatattttttccagctttattttcaaaatttttccatttttttgtgaattttattgc

SEQ ID NO: 87900 - DNA, 120 bp, Artificial Sequence
  ENSG00000085982_55 (sequence is synthesized)
gataccaattatgaaataaaatcttcagttctcatctctgtatcacctcttaccattagatttaatttagtcatggatgagcctaattattgatggtaataacaatctcaactttaaact

SEQ ID NO: 87901 - DNA, 120 bp, Artificial Sequence
  ENSG00000085982_56 (sequence is synthesized)
tggaagaagctacttcttcatttatggattgatttggattatctggcttttaatctatataaacaacagctctttgaacaagtcatttttattaagtaggaaactagactttcatagctt

SEQ ID NO: 87902 - DNA, 120 bp, Artificial Sequence
  ENSG00000085982_57 (sequence is synthesized)
ccatttagcattgttacatagaaaacaggaagacaatatcttaagagtatggaaattgaaaatcaaacctaatcttagtgcatgtaatccttttgtctgaagtgcaactcatttttcttc

SEQ ID NO: 87903 - DNA, 120 bp, Artificial Sequence
  ENSG00000085982_58 (sequence is synthesized)
tttcttgatattcttgattttcaaagaaatactgatttcagcatttatttttcttagagagctaggaattaataaccttcatcatattatcaaaatttttttaagtgccggacagctata

SEQ ID NO: 87904 - DNA, 120 bp, Artificial Sequence
  ENSG00000085982_59 (sequence is synthesized)
gagaagtaaattgactgcctgtgctctgagagtcaattgatatatttatttttaaaacgtaagatcttgaaaatcaagacctattaatttcataagtcattccagacatcacataataat

SEQ ID NO: 87905 - DNA, 120 bp, Artificial Sequence
  ENSG00000085982_60 (sequence is synthesized)
aacactgtgccatttctgtacgtgctctgtaacctctgtaaagcactatatatcttgttgtttattattatatcaatatattacactttccaaagacttttatgtatcatctctcaagat

SEQ ID NO: 87906 - DNA, 120 bp, Artificial Sequence
  ENSG00000085982_61 (sequence is synthesized)
cctcagggcaacaggggccccatttatcaccacgtaccagaatattgagacttcatccaattctaatgatgtcattttagcccacaggggcagagaccaggagtccacatcctacatgtc

SEQ ID NO: 87907 - DNA, 120 bp, Artificial Sequence
  ENSG00000085982_62 (sequence is synthesized)
ttccaatctttctgcctcaaaaccctcaggaactgcttctagggcatttgatatcatctcactgacttctgagaaggaacatagacaagtacaagcatgttgtcttactcagcactcagc

SEQ ID NO: 87908 - DNA, 120 bp, Artificial Sequence
  ENSG00000085982_63 (sequence is synthesized)
cgcacacatcacgatgggcagaagtcactatcagtgagttctgttgcccttgtacaaagaggagttccacttcattataaagaaatggagcgagtatatttttaataggcccaactcttt

SEQ ID NO: 87909 - DNA, 120 bp, Artificial Sequence
  ENSG00000085982_64 (sequence is synthesized)
agctatgtttttctttttatcaggctttacttatttagtttttctagtgccttgaagtatattacttatatttctttttaatcttttcagcctcagtaataaaattaatataaatgagtc

SEQ ID NO: 87910 - DNA, 120 bp, Artificial Sequence
  ENSG00000085982_65 (sequence is synthesized)
cagtttgaccaggtacttttagtcttgcactactgcacaaaacaaagactgcctgtacttattttgggggttttttctttggttgttggggggtttttggtttgtttttgtttttagctt

SEQ ID NO: 87911 - DNA, 120 bp, Artificial Sequence
  ENSG00000085982_66 (sequence is synthesized)
tctgtagttttctgctaattaacacaatagagcatctctcttttgttttctgtgtttgatgctgtaaccagcttccttttattttgataataggatgaaggttattaattcctagctctc

SEQ ID NO: 87912 - DNA, 120 bp, Artificial Sequence
  ENSG00000085982_67 (sequence is synthesized)
gcacggaagaaggctgctgttgtgtcccttgttgtactgttagagcgggctctgccctggtgaattctactcccatggaagttaattccaaagtttcattttttaaacatgatgattaaa

SEQ ID NO: 87913 - DNA, 120 bp, Artificial Sequence
  ENSG00000085982_68 (sequence is synthesized)
aagaagcttttgactcagatttagagagagggaactcacttctttctcaaggtgatttcagtgcagaggaatatgaagaccgctcagggccatgaccttgcctcctttcctggagttcgg

SEQ ID NO: 87914 - DNA, 120 bp, Artificial Sequence
  ENSG00000085982_69 (sequence is synthesized)
caacggattcatcattgctcccgtcgctctgcccccttattctactttcttcatcctagtatcacctgacatatctgtacttactgatttatttgttagtatctgtctcccactactaga

SEQ ID NO: 87915 - DNA, 120 bp, Artificial Sequence
  ENSG00000085982_70 (sequence is synthesized)
atataagtacttggtttattcattgctatatccttaatacctagaatagtaattgtgcccatgtcatagtcaataattatttattaaataaagatacacccaaaattgtctacaatcaaa

SEQ ID NO: 87916 - DNA, 120 bp, Artificial Sequence
  ENSG00000085982_71 (sequence is synthesized)
aggagaatacaaaaaacagtttagggagaactcacatacctaccacccaaaatggacaaatattaacattttgtcatatgtttgtttttgtttgaaacattataaatgaagttaaagtcc

SEQ ID NO: 87917 - DNA, 120 bp, Artificial Sequence
  ENSG00000085982_72 (sequence is synthesized)
ctttaaagtccccctgtttggccactcgcagtggaagcttctggagctgaagggaaagaatctcctgattgacgacgatgatgatttcagtacaatcagagatgacactggaaaagaaaa

SEQ ID NO: 87918 - DNA, 120 bp, Artificial Sequence
  ENSG00000085998_0 (sequence is synthesized)
ggggccgcaagcggcatggaggaggcggaggccgcggcgagccgggccgagcagtgagggccctagcggggcccgagcggggcccggggcccctaagccattcctgaagtcatgggctgg

SEQ ID NO: 87919 - DNA, 120 bp, Artificial Sequence
  ENSG00000085998_1 (sequence is synthesized)
ccaggacattggtgacccgccaatccggtatggacgactggaagcccagccccctcatcaagccctttggggctcggaagaagcggagctggtaccttacctggaagtataaactgacaa

SEQ ID NO: 87920 - DNA, 120 bp, Artificial Sequence
  ENSG00000085998_2 (sequence is synthesized)
accagcgggccctgcggagattctgtcagacaggggccgtgcttttcctgctggtgactgtcattgtcaatatcaagttgatcctggacactcggcgagccatcagtgaagccaatgaag

SEQ ID NO: 87921 - DNA, 120 bp, Artificial Sequence
  ENSG00000085998_3 (sequence is synthesized)
acccagagccagagcaagactatgatgaggccctaggccgcctggagcccccacggcgcagaggcagtggtccccggcgggtcctggacgtagaggtgtattcaagtcgcagcaaagtat

SEQ ID NO: 87922 - DNA, 120 bp, Artificial Sequence
  ENSG00000085998_4 (sequence is synthesized)
atgtggcagtggatggcaccacggtgctggaggatgaggcccgggagcagggccggggcatccatgtcattgtcctcaaccaggccacgggccacgtgatggcaaaacgtgtgtttgaca

SEQ ID NO: 87923 - DNA, 120 bp, Artificial Sequence
  ENSG00000085998_5 (sequence is synthesized)
cgtactcacctcatgaggatgaggccatggtgctattcctcaacatggtagcgcccggccgagtgctcatctgcactgtcaaggatgagggctccttccacctcaaggacacagccaagg

SEQ ID NO: 87924 - DNA, 120 bp, Artificial Sequence
  ENSG00000085998_6 (sequence is synthesized)
ctctgctgaggagcctgggcagccaggctggccctgccctgggctggagggacacatgggccttcgtgggacgaaaaggaggtcctgtcttcggggagaaacattctaaatcacctgccc

SEQ ID NO: 87925 - DNA, 120 bp, Artificial Sequence
  ENSG00000085998_7 (sequence is synthesized)
tctcttcctggggggacccagtcctgctgaagacagatgtgccattgagctcagcagaagaggcagagtgccactgggcagacacagagctgaaccgtcgccgccggcgcttctgcagca

SEQ ID NO: 87926 - DNA, 120 bp, Artificial Sequence
  ENSG00000085998_8 (sequence is synthesized)
aagttgagggctatggaagtgtatgcagctgcaaggaccccacacccatcgagttcagccctgacccactcccagacaacaaggtcctcaatgtgcctgtggctgtcattgcagggaacc

SEQ ID NO: 87927 - DNA, 120 bp, Artificial Sequence
  ENSG00000085998_9 (sequence is synthesized)
gacccaattacctgtacaggatgctgcgctctctgctttcagcccagggggtgtctcctcagatgataacagttttcattgacggctactatgaggaacccatggatgtggtggcactgt

SEQ ID NO: 87928 - DNA, 120 bp, Artificial Sequence
  ENSG00000085998_10 (sequence is synthesized)
ttggtctgaggggcatccagcatactcccatcagcatcaagaatgcccgcgtgtctcagcactacaaggccagcctcactgccactttcaacctgtttccggaggccaagtttgctgtgg

SEQ ID NO: 87929 - DNA, 120 bp, Artificial Sequence
  ENSG00000085998_11 (sequence is synthesized)
cagcctgtactgcatctctgcctggaatgaccaggggtatgaacacacggctgaggacccagcactactgtaccgtgtggagaccatgcctgggctgggctgggtgctcaggaggtcctt

SEQ ID NO: 87930 - DNA, 120 bp, Artificial Sequence
  ENSG00000085998_12 (sequence is synthesized)
gtacaaggaggagcttgagcccaagtggcctacaccggaaaagctctgggattgggacatgtggatgcggatgcctgaacaacgccggggccgagagtgcatcatccctgacgtttcccg

SEQ ID NO: 87931 - DNA, 120 bp, Artificial Sequence
  ENSG00000085998_13 (sequence is synthesized)
atcctaccactttggcatcgtcggcctcaacatgaatggctactttcacgaggcctacttcaagaagcacaagttcaacacggttccaggtgtccagctcaggaatgtggacagtctgaa

SEQ ID NO: 87932 - DNA, 120 bp, Artificial Sequence
  ENSG00000085998_14 (sequence is synthesized)
gaaagaagcttatgaagtggaagttcacaggctgctcagtgaggctgaggttctggaccacagcaagaacccttgtgaagactctttcctgccagacacagagggccacacctacgtggc

SEQ ID NO: 87933 - DNA, 120 bp, Artificial Sequence
  ENSG00000085998_15 (sequence is synthesized)
ctttattcgaatggagaaagatgatgacttcaccacctggacccagcttgccaagtgcctccatatctgggacctggatgtgcgtggcaaccatcggggcctgtggagattgtttcggaa

SEQ ID NO: 87934 - DNA, 120 bp, Artificial Sequence
  ENSG00000085998_16 (sequence is synthesized)
gaagaaccacttcctgatggtgggggtcccggcttccccctactcagtgaagaagccaccctcagtcaccccaattttcctggagccacccccaaaggaggagggagccccaggagcccc

SEQ ID NO: 87935 - DNA, 120 bp, Artificial Sequence
  ENSG00000085998_17 (sequence is synthesized)
agaacagacatgagacctcctccaggaccctgcggggctgggtactgtgtacccccaggctggctagcccttccctccatcctgtaggattttgtagatgctggtaggggctggggctac

SEQ ID NO: 87936 - DNA, 120 bp, Artificial Sequence
  ENSG00000085998_18 (sequence is synthesized)
cttgtttttaacatgagacttaattactaactccaaggggagggttcccctgctccaacaccccgttcctgagttaaaagtctatttatttacttccttgttggagaagggcaggagagt

SEQ ID NO: 87937 - DNA, 120 bp, Artificial Sequence
  ENSG00000085998_19 (sequence is synthesized)
acctgggaatcattacgatccctagcagctcatcctgccctttgaataccctcactttccaggcctggctcagaatctaacctatttattgactgtcctgagggccttgaaaacaggccg

SEQ ID NO: 87938 - DNA, 120 bp, Artificial Sequence
  ENSG00000085998_20 (sequence is synthesized)
aacctggagggcctggatttctttttgggctggaatgctgccctgagggtggggctggctcttactcaggaaactgctgtgcccaacccatggacaggcccagctggggcccacatgctg

SEQ ID NO: 87939 - DNA, 120 bp, Artificial Sequence
  ENSG00000085998_21 (sequence is synthesized)
acacagactcactcagagacccttagacactggaccaggcctcctctcagccttctctttgtccagatttccaaagctggataagttggtcattgattaaaaaaggagaagccctctggg

SEQ ID NO: 87940 - DNA, 120 bp, Artificial Sequence
  ENSG00000085998_22 (sequence is synthesized)
gaatcaattttgggggagaccacatctaatggataaaagagccacaggattacaaaagggtggaatagttgttacaagaaggtcacatcatcctggcactgctcccagaaccagtgggcc

SEQ ID NO: 87941 - DNA, 120 bp, Artificial Sequence
  ENSG00000085998_23 (sequence is synthesized)
tcgaagcccagcttggcactctcatcctctggtgactcaggtggtccaccttgaagcctctcccctgggggcttccacacagctctcaagctccctagcctggtggctgccacatccacc

SEQ ID NO: 87942 - DNA, 120 bp, Artificial Sequence
  ENSG00000085998_24 (sequence is synthesized)
tcagtcctggccctctctccaccagctataacttttgcccagtccatctcggaacgtggagccccaggtgggccctgttcatccagctcgctgggggccactgtgtccaggaagctgcca

SEQ ID NO: 87943 - DNA, 120 bp, Artificial Sequence
  ENSG00000085998_25 (sequence is synthesized)
atagagacactgtccagccggtcggtggtgctggtgtctggcaggctgtcccagctgcctcgccttgagcggcctgggctcccgcctgtcaggctatattgactgctggtgaggctgctg

SEQ ID NO: 87944 - DNA, 120 bp, Artificial Sequence
  ENSG00000085998_26 (sequence is synthesized)
caatgactggtcaacgtcccccgctcctccaacagccagcgcactgcctcgatgccctcattcaaggtcaccagctgctgcaggatcttcacatcgatggctcgcagattcctgaagtca

SEQ ID NO: 87945 - DNA, 120 bp, Artificial Sequence
  ENSG00000085998_27 (sequence is synthesized)
caatagattctagacgcattcacctctgtgggtaagcatagggactctgggcccagctgtaaacacaggggaacctgagttgaggggtgatgaagtgaccctaacctatccctgggctcc

SEQ ID NO: 87946 - DNA, 120 bp, Artificial Sequence
  ENSG00000085998_28 (sequence is synthesized)
ccaggatgctgcgctctctgctttcagcccagggggtgtctcctcagatgataacagttttcattgacggctactatgaggtgagcaggacttggggggtgcctcgggtggagtacaaca

SEQ ID NO: 87947 - DNA, 120 bp, Artificial Sequence
  ENSG00000085998_29 (sequence is synthesized)
tggagcagcagtgattgccagggacgggcaagggagaccgcccaggcaagggctgtgaaatgtgaaggccttggattgcagaggtgggcagagggaaagtgacctcacatggtgagcagt

SEQ ID NO: 87948 - DNA, 120 bp, Artificial Sequence
  ENSG00000085998_30 (sequence is synthesized)
ctttggcatcgtcggcctcaacatgaatggctactttcacgtgagtgggaggcagggagcagggcacagtgtggcatgacagtcaagaacaagaacatggactctgaagcaatcttagct

SEQ ID NO: 87949 - DNA, 77 bp, Artificial Sequence
  ENSG00000085998_31 (sequence is synthesized)
gctacttgctagccatgtaaccttggggaaagagctatcctatttttgcctcagtttctttatctgaaaaatgagga

SEQ ID NO: 87950 - DNA, 120 bp, Artificial Sequence
  ENSG00000085998_32 (sequence is synthesized)
agagcgagactccatctcaaaaaaaaagaggataaaatactactacctcactgggttacgatattttgaggtttaaatgagtcaatatatgtaaagtgctttgaattataaacatatata

SEQ ID NO: 87951 - DNA, 120 bp, Artificial Sequence
  ENSG00000085998_33 (sequence is synthesized)
tatataagggtcagctggtattgtttttatttttactatttttagcactagactgtgggtgtctggggagagtatttctgcctctaagtactggtccagccctgcaatctctgccctttc

SEQ ID NO: 87952 - DNA, 120 bp, Artificial Sequence
  ENSG00000085998_34 (sequence is synthesized)
ctgttttggcaagtgctggagcctatgcttcagcctgaggagaacagggaagtccttaggtaccgccaacccacctggctgcattcagaggaccattccccagttacagcaagggaggcc

SEQ ID NO: 87953 - DNA, 120 bp, Artificial Sequence
  ENSG00000085998_35 (sequence is synthesized)
ttgagccagcccagcccaaaggaatgaatagcgtccagcttggaacctcctagaagccagaggtccctcagaggctgactaatacgcgagccccattcctctcccagagaggggcaggcg

SEQ ID NO: 87954 - DNA, 120 bp, Artificial Sequence
  ENSG00000085998_36 (sequence is synthesized)
cttccctcaggtcactctcagtaccagagtcaaagtagttttttccttcccagcccagcccgtccctttgcccaccacctcctgcagggcctgtttctgacatctgtggctctagaacag

SEQ ID NO: 87955 - DNA, 120 bp, Artificial Sequence
  ENSG00000085998_37 (sequence is synthesized)
caggcccagggagaactacaagaggcagggactgctagttcatgggtctgtggtgcagtagtgtgagctgccgtgacagcatgagctctccagcaatggtggaggccaaattaaagctag

SEQ ID NO: 87956 - DNA, 120 bp, Artificial Sequence
  ENSG00000085998_38 (sequence is synthesized)
taagagcttgctgaggatgctgcaaagaggatggagaagacggtgggaaattagagggctctttacaggtctaggacttcatttgtgtgtcttatagatgtctggctggtcagcaagtgg

SEQ ID NO: 87957 - DNA, 120 bp, Artificial Sequence
  ENSG00000085998_39 (sequence is synthesized)
ggggctggcagcagggcaaggggtggatatctaggagatttggaggccagtccctgaaagtcccttccaatgctgggcctgtgtgtttactccagccctgcggctacagattcccatgtg

SEQ ID NO: 87958 - DNA, 120 bp, Artificial Sequence
  ENSG00000085998_40 (sequence is synthesized)
accccttgccctgctcagtgctacccatgggacctgagggcctgcccactcccctgacccatttctccctcctcttcagtctgaagaaagaagcttatgaagtggaagttcacaggctgc

SEQ ID NO: 87959 - DNA, 120 bp, Artificial Sequence
  ENSG00000085998_41 (sequence is synthesized)
tcaggtatggcctaggacaattggggtgtagcagggagcaaagagtcaaatactggggatcttggccccataatttacagggtcctgtgcaaaatgaaaatcagggccctcatctcaaac

SEQ ID NO: 87960 - DNA, 120 bp, Artificial Sequence
  ENSG00000085998_42 (sequence is synthesized)
cccttggacagccttgattcagagagttactccagtctcagggaatttccaggtgatccaaccccactgaagggtttcctgccagcccagagaagttgagccactttccccatgtcacac

SEQ ID NO: 87961 - DNA, 120 bp, Artificial Sequence
  ENSG00000085998_43 (sequence is synthesized)
agtatgggtgcttgcagggaagagttgctgggaggtcctccctcatctccccagaaggcatcagactttgggaggagcatcttaccccatgtggccctctggtcccttcagattcctgaa

SEQ ID NO: 87962 - DNA, 120 bp, Artificial Sequence
  ENSG00000085998_44 (sequence is synthesized)
gcgcccggccgagtgctcatctgcactgtcaaggtcagttattctgtcctgaccctgacccctactccctagctccaaccctgcttctagccccggcttctctgcccctcatataacata

SEQ ID NO: 87963 - DNA, 120 bp, Artificial Sequence
  ENSG00000085998_45 (sequence is synthesized)
gtgggaagattctctgaaggaaggttactcaggttccaatctcagccttaacatttgtattaattcagcaaatagttattgagcaacagctgtatgccaggtacttctctgggtgctgaa

SEQ ID NO: 87964 - DNA, 120 bp, Artificial Sequence
  ENSG00000085998_46 (sequence is synthesized)
gatacaatgggaaacaagacagagtccccaccctcatggagcttatattccagcagtgggaggtcaacagaaacagccaagtaaatgtggataatgctagtaaatgataacttgtataaa

SEQ ID NO: 87965 - DNA, 120 bp, Artificial Sequence
  ENSG00000085998_47 (sequence is synthesized)
tgcctccatatctgggacctggatgtgcgtggcaaccatcggggcctgtggagattgtttcggaagaagaaccacttcctgatggtgggggtcccggcttccccctactcgcctggctca

SEQ ID NO: 87966 - DNA, 120 bp, Artificial Sequence
  ENSG00000085998_48 (sequence is synthesized)
ggagggagccccaggagccccagaacagacatgagacctcctccaggaccctgcggggctgggcctggctcagaatctaacctatttattgactgtcctgagggccttgaaaacaggccg

SEQ ID NO: 87967 - DNA, 120 bp, Artificial Sequence
  ENSG00000085999_0 (sequence is synthesized)
gttaacgcgcgctttgggaacaggaaggttgagagagaggtgctggggtctgcgtctatctctgtcgctcttttcagcccctcctggtattcccctcctaacctgggttttttacacgcc

SEQ ID NO: 87968 - DNA, 120 bp, Artificial Sequence
  ENSG00000085999_1 (sequence is synthesized)
cgcgtggcttcctgctcgacctccctgagtctgatcctggtttccacctccagccctgggaaatttcctttctccagactcgccctccccacccgggcctcggactttcaccccagcttc

SEQ ID NO: 87969 - DNA, 120 bp, Artificial Sequence
  ENSG00000085999_2 (sequence is synthesized)
tctctcctggccagtgattacccacccccaatcccaccccgccccgccgcgcaactacctcctcccttcacccggactgggaccatcatccccactccactccgcccagtctgggactcc

SEQ ID NO: 87970 - DNA, 120 bp, Artificial Sequence
  ENSG00000085999_3 (sequence is synthesized)
acctgcctcctccccaatcccacactaatctctgcttggtctcttcctctttggcctaatctctcgtctcggcttattggggacggccactctcacagtttggttccaaacaccagttcc

SEQ ID NO: 87971 - DNA, 120 bp, Artificial Sequence
  ENSG00000085999_4 (sequence is synthesized)
tggatggattcccgccatccatgccccctctttaattagccggtcctctcaataatgtagcagccccctctacagattagaccctggtcctacactcttagccgctgcctgcttttgacc

SEQ ID NO: 87972 - DNA, 120 bp, Artificial Sequence
  ENSG00000085999_5 (sequence is synthesized)
tttggctcatgggtacttgacgttttaaactcctaggcccaggatgaggaggagcttggctcccagccagctggccaagagaaaacctgaaggcaggtcctgtgatgatgaagactggca

SEQ ID NO: 87973 - DNA, 120 bp, Artificial Sequence
  ENSG00000085999_6 (sequence is synthesized)
acctggcctagtgactcctaggaaacggaaatccagcagtgagacccagatccaggagtgtttcctgtctccttttcggaaacctttgagtcagctaaccaatcaaccaccttgtctgga

SEQ ID NO: 87974 - DNA, 120 bp, Artificial Sequence
  ENSG00000085999_7 (sequence is synthesized)
cagcagtcagcatgaagcatttattcgaagcattttgtcaaagcctttcaaagtccccattccaaattatcaaggtcctctgggctctcgagcattgggcctgaaaagggctggggtccg

SEQ ID NO: 87975 - DNA, 120 bp, Artificial Sequence
  ENSG00000085999_8 (sequence is synthesized)
ccgggccctccatgaccccctggaaaaagatgccttggttctgtatgagcctcccccgctgagcgctcatgaccagctgaagcttgacaaggagaaactccctgtccatgtggttgttga

SEQ ID NO: 87976 - DNA, 120 bp, Artificial Sequence
  ENSG00000085999_9 (sequence is synthesized)
ccctattctcagtaaggttttgcggcctcatcagagagagggagtgaaattcctgtgggagtgtgtcaccagtcggcgcatccctggcagccatggctgcatcatggctgatgagatggg

SEQ ID NO: 87977 - DNA, 120 bp, Artificial Sequence
  ENSG00000085999_10 (sequence is synthesized)
cctaggaaagacgctgcagtgcatcacattgatgtggacacttttacgccagagtccagagtgcaagccagaaattgacaaggcagtggtggtgtcgccttccagcctggtgaagaactg

SEQ ID NO: 87978 - DNA, 120 bp, Artificial Sequence
  ENSG00000085999_11 (sequence is synthesized)
gtacaatgaggttgggaaatggctcggagggaggatccaacctctggccatcgatggaggatctaaggatgaaatagaccaaaagctggaaggattcatgaaccagcgtggagccagggt

SEQ ID NO: 87979 - DNA, 120 bp, Artificial Sequence
  ENSG00000085999_12 (sequence is synthesized)
ggtcatatgtgacgagggacacaggctcaagaactctgagaatcagacttaccaagccctggacagcttgaacaccagccggcgggtgctcatctccggaactcccatccagaatgatct

SEQ ID NO: 87980 - DNA, 120 bp, Artificial Sequence
  ENSG00000085999_13 (sequence is synthesized)
gcttgagtatttcagcttggtacattttgttaattccggcatcctagggactgcccatgaattcaagaagcattttgaattgccaattttgaagggtcgagacgctgctgctagtgaggc

SEQ ID NO: 87981 - DNA, 120 bp, Artificial Sequence
  ENSG00000085999_14 (sequence is synthesized)
agacaggcagctaggagaggagcggctgcgggagctcaccagcattgtgaatagatgcctgatacggaggacttctgatatcctttctaaatatctgcctgtgaagattgagcaggtcgt

SEQ ID NO: 87982 - DNA, 120 bp, Artificial Sequence
  ENSG00000085999_15 (sequence is synthesized)
ttgttgtaggctgacaccccttcagactgagttatacaagaggtttctgagacaagccaaaccggcagaagaattgcttgagggcaagatgagtgtgtcttccctttcttccatcacctc

SEQ ID NO: 87983 - DNA, 120 bp, Artificial Sequence
  ENSG00000085999_16 (sequence is synthesized)
gctaaagaagctttgtaatcatccagctctaatctatgataagtgtgtggaagaggaggatggctttgtgggtgccttggacctcttccctcctggttacagctctaaggccctggagcc

SEQ ID NO: 87984 - DNA, 120 bp, Artificial Sequence
  ENSG00000085999_17 (sequence is synthesized)
ccagctgtcaggtaagatgctggtcctggattatattctggcggtgacccgaagccgtagcagtgacaaagtagtgctggtgtcgaattacacccagactttggatctctttgagaagct

SEQ ID NO: 87985 - DNA, 120 bp, Artificial Sequence
  ENSG00000085999_18 (sequence is synthesized)
gtgccgtgcccgaaggtacttatacgtccgcctggatggcacgatgtccattaagaagcgagccaaggttgtagaacgcttcaatagtccatcgagccctgactttgtcttcatgctgag

SEQ ID NO: 87986 - DNA, 120 bp, Artificial Sequence
  ENSG00000085999_19 (sequence is synthesized)
cagcaaagctgggggctgtggcctcaatctcattggggctaaccggctggtcatgtttgaccctgactggaacccagccaatgatgaacaagccatggcccgggtctggcgagatggtca

SEQ ID NO: 87987 - DNA, 120 bp, Artificial Sequence
  ENSG00000085999_20 (sequence is synthesized)
aaagaagacttgctatatctaccgcctgctgtctgcagggaccattgaggagaagatcttccagcgtcagagccacaagaaggcactgagcagctgtgtggtggatgaggagcaggatgt

SEQ ID NO: 87988 - DNA, 120 bp, Artificial Sequence
  ENSG00000085999_21 (sequence is synthesized)
agagcgccacttctctctgggcgagttgaaggagctgtttatcctggatgaagctagcctcagtgacacacatgacaggttgcactgccgacgttgtgtcaacagccgtcagatccggcc

SEQ ID NO: 87989 - DNA, 120 bp, Artificial Sequence
  ENSG00000085999_22 (sequence is synthesized)
accccctgatggttctgactgcacttcagacctggcagggtggaaccactgcactgataagtgggggctccgggatgaggtactccaggctgcctgggatgctgcctccactgccatcac

SEQ ID NO: 87990 - DNA, 120 bp, Artificial Sequence
  ENSG00000085999_23 (sequence is synthesized)
cttcgtcttccaccagcgttctcatgaggagcagcggggcctccgctgataaccagctggtctgggtgtagctcttagaggaaggagatagggaaaaggggctccttgctccacagggcc

SEQ ID NO: 87991 - DNA, 120 bp, Artificial Sequence
  ENSG00000085999_24 (sequence is synthesized)
ctgttgaattttgttctctgggagaaaatcatcaagaagggctgcatgatgtttgcccaaaatttattttataagaaaaacttttttggttaaaaaaaagaataaaggtatgaaagggtt

SEQ ID NO: 87992 - DNA, 120 bp, Artificial Sequence
  ENSG00000085999_25 (sequence is synthesized)
caggatatcaagagtaagaagcctgggccattgggacagccagtaggggactgctggttgctgctcttcccaggtaagatgctggtcctggattatattctggcggtgacccgaagccgt

SEQ ID NO: 87993 - DNA, 120 bp, Artificial Sequence
  ENSG00000085999_26 (sequence is synthesized)
tttctgggtgggcgaggcctgactccaaccccggccctccgctctagacctggtaccactgtagattcaatccaaactcccagaaatgtgccgcctttcataatccccagctgtccacta

SEQ ID NO: 87994 - DNA, 120 bp, Artificial Sequence
  ENSG00000085999_27 (sequence is synthesized)
caggtggtaactcccctgctgctcaatgtggcgtaaatcttcccttccatagctgcgggaccacagctcaccgacctgggacaaacacccgagacgggccgaattccagctcgcaggtca

SEQ ID NO: 87995 - DNA, 120 bp, Artificial Sequence
  ENSG00000085999_28 (sequence is synthesized)
ctccagagcccagactcctcattgggcgcagcactattcccgcctcttccttgggtcgcgagcgccgaactcatcgaacgcagccaatgggtgatacgacggcagcgcggcgggaggttc

SEQ ID NO: 87996 - DNA, 69 bp, Artificial Sequence
  ENSG00000085999_29 (sequence is synthesized)
cagaattcttgataaccctgtgaggatggcttaagctatactcagctgcgggaccacagctcaccgacc

SEQ ID NO: 87997 - DNA, 90 bp, Artificial Sequence
  ENSG00000085999_30 (sequence is synthesized)
atcccacttgagatgcctgatacggaggacttctgatatcctttctaaatatctgcctgtgaagattgagcaggtcgtttgttgtaggct

SEQ ID NO: 87998 - DNA, 120 bp, Artificial Sequence
  ENSG00000086015_0 (sequence is synthesized)
gtaggcaggcggctgagccggcggcgggtggcctgcccaacgtgtgctgggtgggagaaggcgaggcgtcagcgatgctgtctcttccgtgaggagcgcagaggaggtcgcggcgccgga

SEQ ID NO: 87999 - DNA, 120 bp, Artificial Sequence
  ENSG00000086015_1 (sequence is synthesized)
gtcccctgctcttcaggaaactcagtaatcctgacatattttcatccactggaaaagttaaacttcagcgacaactgagtcaggatgattgtaagttatggagaggaaacctggccagct

SEQ ID NO: 88000 - DNA, 120 bp, Artificial Sequence
  ENSG00000086015_2 (sequence is synthesized)
ctctatcgggtaagcagctgctccctttgtccagcagtgtacatagcagtgtgggacaggtgacttggcagtcgtcaggagaagcatcaaacctggttcgaatgagaaaccagtcccttg

SEQ ID NO: 88001 - DNA, 120 bp, Artificial Sequence
  ENSG00000086015_3 (sequence is synthesized)
gacagtctgcaccttctcttactgctggcctgaaggagttgagccttccaagaagaggcagcttttgtcggacaagtaaccgcaagagcttgattgtgacctctagcacatcacctacac

SEQ ID NO: 88002 - DNA, 120 bp, Artificial Sequence
  ENSG00000086015_4 (sequence is synthesized)
taccacggccacactcaccactccatggccacacaggtaacagtcctttggacagcccccggaatttctctccaaatgcacctgctcacttttcttttgttcctgcccgtaggactgatg

SEQ ID NO: 88003 - DNA, 120 bp, Artificial Sequence
  ENSG00000086015_5 (sequence is synthesized)
ggcggcgctggtctttggcctctttgccctcttcaggatatggaactaacactcctagctccactgtctcatcatcatgctcctcacaggaaaagctgcatcagttgcctttccagccta

SEQ ID NO: 88004 - DNA, 120 bp, Artificial Sequence
  ENSG00000086015_6 (sequence is synthesized)
cagctgatgagctgcactttttgacgaagcatttcagcacagagagcgtaccagatgaggaaggacggcagtccccagccatgcggcctcgctcccggagcctcagtcccggacgatccc

SEQ ID NO: 88005 - DNA, 120 bp, Artificial Sequence
  ENSG00000086015_7 (sequence is synthesized)
cagtatcctttgacagtgaaataataatgatgaatcatgtttacaaagaaagattcccaaaggccaccgcacaaatggaagagcgactagcagagtttatttcctccaacactccagaca

SEQ ID NO: 88006 - DNA, 120 bp, Artificial Sequence
  ENSG00000086015_8 (sequence is synthesized)
gcgtgctgcccttggcagatggagccctgagctttattcatcatcaggtgattgagatggcccgagactgcctggataaatctcggagtggcctcattacatcacaatacttctacgaac

SEQ ID NO: 88007 - DNA, 120 bp, Artificial Sequence
  ENSG00000086015_9 (sequence is synthesized)
ttcaagataatttggagaaacttttacaagatgctcatgagcgctcagagagctcagaagtggcttttgtgatgcagctggtgaaaaagctgatgattatcattgcccgcccagcacgtc

SEQ ID NO: 88008 - DNA, 120 bp, Artificial Sequence
  ENSG00000086015_10 (sequence is synthesized)
tcctggaatgcctggagtttgaccctgaagagttctaccaccttttagaagcagctgagggccacgccaaagagggacaagggattaaatgtgacattccccgctacatcgttagccagc

SEQ ID NO: 88009 - DNA, 120 bp, Artificial Sequence
  ENSG00000086015_11 (sequence is synthesized)
tgggcctcacccgggatcccctagaagaaatggcccagttgagcagctgtgacagtcctgacactccagagacagatgattctattgagggccatggggcatctctgccatctaaaaaga

SEQ ID NO: 88010 - DNA, 120 bp, Artificial Sequence
  ENSG00000086015_12 (sequence is synthesized)
caccctctgaagaggacttcgagaccattaagctcatcagcaatggcgcctatggggctgtatttctggtgcggcacaagtccacccggcagcgctttgccatgaagaagatcaacaagc

SEQ ID NO: 88011 - DNA, 120 bp, Artificial Sequence
  ENSG00000086015_13 (sequence is synthesized)
agaacctgatcctacggaaccagatccagcaggccttcgtggagcgtgacatactgactttcgctgagaacccctttgtggtcagcatgttctgctcctttgataccaagcgccacttgt

SEQ ID NO: 88012 - DNA, 120 bp, Artificial Sequence
  ENSG00000086015_14 (sequence is synthesized)
gcatggtgatggagtacgttgaagggggagactgtgccactctgctgaagaatattggggccctgcctgtggacatggtgcgtctatactttgcggaaactgtgctggccctggagtact

SEQ ID NO: 88013 - DNA, 120 bp, Artificial Sequence
  ENSG00000086015_15 (sequence is synthesized)
tacacaactatggcatcgtgcaccgtgacctcaagcctgacaacctcctaattacatccatggggcacatcaagctcacggactttggactgtccaaaattggcctcatgagtctgacaa

SEQ ID NO: 88014 - DNA, 120 bp, Artificial Sequence
  ENSG00000086015_16 (sequence is synthesized)
cgaacttgtatgagggtcatattgaaaaggatgcccgggaattcctggacaagcaggtatgcgggaccccagaatacattgcgcctgaggtgatcctgcgccagggctatgggaagccag

SEQ ID NO: 88015 - DNA, 120 bp, Artificial Sequence
  ENSG00000086015_17 (sequence is synthesized)
tggactggtgggccatgggcattatcctgtatgagttcctggtgggctgcgtccctttttttggagatactccggaggagctctttgggcaggtgatcagtgatgagattgtgtggcctg

SEQ ID NO: 88016 - DNA, 120 bp, Artificial Sequence
  ENSG00000086015_18 (sequence is synthesized)
agggtgatgaggcactgcccccagacgcccaggacctcacctccaaactgctccaccagaaccctctggagagacttggcacaggcagtgcctatgaggtgaagcagcacccattcttta

SEQ ID NO: 88017 - DNA, 120 bp, Artificial Sequence
  ENSG00000086015_19 (sequence is synthesized)
ctggtctggactggacaggacttctccgccagaaggctgaatttattcctcagttggagtcagaggatgatactagctattttgacacccgctcagagcgataccaccacatggactcgg

SEQ ID NO: 88018 - DNA, 120 bp, Artificial Sequence
  ENSG00000086015_20 (sequence is synthesized)
gctctcactgctcgaggagcgccggacaccacccccgaccaagcgcagcctgagtgaggagaaggaggaccattcagatggcctggcagggctcaaaggccgagaccggagctgggtgat

SEQ ID NO: 88019 - DNA, 120 bp, Artificial Sequence
  ENSG00000086015_21 (sequence is synthesized)
tggctcccctgagatattacggaagcggctgtcggtgtctgagtcatcccacacagagagtgactcaagccctccaatgacagtgcgacgccgctgctcaggcctcctggatgcgcctcg

SEQ ID NO: 88020 - DNA, 120 bp, Artificial Sequence
  ENSG00000086015_22 (sequence is synthesized)
gttcccggagggccctgaggaggccagcagcaccctcaggaggcaaccacaggagggtatatgggtcctgacacccccatctggagagggggtatctgggcctgtcactgaacactcagg

SEQ ID NO: 88021 - DNA, 120 bp, Artificial Sequence
  ENSG00000086015_23 (sequence is synthesized)
ggagcagcggccaaagctggatgaggaagctgttggccggagcagtggttccagtccagctatggagacccgaggccgtgggacctcacagctggctgagggagccacagccaaggccat

SEQ ID NO: 88022 - DNA, 120 bp, Artificial Sequence
  ENSG00000086015_24 (sequence is synthesized)
cagtgacctggctgtgcgtagggcccgccaccggctgctctctggggactcaacagagaagcgcactgctcgccctgtcaacaaagtgatcaagtccgcctcagccacagccctctcact

SEQ ID NO: 88023 - DNA, 120 bp, Artificial Sequence
  ENSG00000086015_25 (sequence is synthesized)
cctcattccttcggaacaccacacctgctccccgttggccagccccatgtccccacattctcagtcgtccaacccatcatcccgggactcttctccaagcagggacttcttgccagccct

SEQ ID NO: 88024 - DNA, 120 bp, Artificial Sequence
  ENSG00000086015_26 (sequence is synthesized)
tggcagcatgaggcctcccatcatcatccaccgagctggcaagaagtatggcttcaccctgcgggccattcgcgtctacatgggtgactccgatgtctacaccgtgcaccatatggtgtg

SEQ ID NO: 88025 - DNA, 120 bp, Artificial Sequence
  ENSG00000086015_27 (sequence is synthesized)
gcacgtggaggatggaggtccggccagtgaggcagggcttcgtcaaggtgacctcatcacccatgtcaatggggaacctgtgcatggcctggtgcacacggaggtggtagagctgatcct

SEQ ID NO: 88026 - DNA, 120 bp, Artificial Sequence
  ENSG00000086015_28 (sequence is synthesized)
gaagagtggaaacaaggtggccatttcaacaactcccctggagaacacatccattaaagtggggccagctcggaagggcagctacaaggccaagatggcccgaaggagcaagaggagccg

SEQ ID NO: 88027 - DNA, 120 bp, Artificial Sequence
  ENSG00000086015_29 (sequence is synthesized)
cggcaaggatgggcaagaaagcagaaaaaggagctccctgttccgcaagatcaccaagcaagcatccctgctccacaccagccgcagcctttcttcccttaaccgctccttgtcatcagg

SEQ ID NO: 88028 - DNA, 120 bp, Artificial Sequence
  ENSG00000086015_30 (sequence is synthesized)
ggagagtgggccaggctctcccacacacagccacagcctttccccccgatctcccactcaaggctaccgggtgacccccgatgctgtgcattcagtgggagggaattcatcacagagcag

SEQ ID NO: 88029 - DNA, 120 bp, Artificial Sequence
  ENSG00000086015_31 (sequence is synthesized)
ctcccccagctccagcgtgcccagttccccagccggctctgggcacacacggcccagctccctccacggtctggcacccaagctccaacgccagtaccgctctccacggcgcaagtcagc

SEQ ID NO: 88030 - DNA, 120 bp, Artificial Sequence
  ENSG00000086015_32 (sequence is synthesized)
aggcagcatcccactgtcaccactggcccacaccccttctcccccacccccaacagcttcacctcagcggtccccatcgcccctgtctggccatgtagcccaggcctttcccacaaagct

SEQ ID NO: 88031 - DNA, 120 bp, Artificial Sequence
  ENSG00000086015_33 (sequence is synthesized)
tcacttgtcacctcccctgggcaggcaactctcacggcccaagagtgcggagccaccccgttcaccactactcaagagggtgcagtcggctgagaaactggcagcagcacttgccgcctc

SEQ ID NO: 88032 - DNA, 120 bp, Artificial Sequence
  ENSG00000086015_34 (sequence is synthesized)
tgagaagaagctagccacttctcgcaagcacagccttgacctgccccactctgaactaaagaaggaactgccgcccagggaagtgagccctctggaggtagttggagccaggagtgtgct

SEQ ID NO: 88033 - DNA, 120 bp, Artificial Sequence
  ENSG00000086015_35 (sequence is synthesized)
gtctggcaagggggccctgccagggaagggggtgctgcagcctgctccctcacgggccctaggcaccctccggcaggaccgagccgaacgacgggagtcgctgcagaagcaagaagccat

SEQ ID NO: 88034 - DNA, 120 bp, Artificial Sequence
  ENSG00000086015_36 (sequence is synthesized)
tcgtgaggtggactcctcagaggacgacaccgaggaagggcctgagaacagccagggtgcacaggagctgagcttggcacctcacccagaagtgagccagagtgtggcccctaaaggagc

SEQ ID NO: 88035 - DNA, 120 bp, Artificial Sequence
  ENSG00000086015_37 (sequence is synthesized)
aggagagagtggggaagaggatcctttcccgtccagagaccctaggagcctgggcccaatggtcccaagcctattgacagggatcacactggggcctcccagaatggaaagtcccagtgg

SEQ ID NO: 88036 - DNA, 120 bp, Artificial Sequence
  ENSG00000086015_38 (sequence is synthesized)
tccccacaggaggctcgggagcccacaagccattgaggaggctgccagctcctcctcagcaggccccaacctaggtcagtctggagccacagaccccatccctcctgaaggttgctggaa

SEQ ID NO: 88037 - DNA, 120 bp, Artificial Sequence
  ENSG00000086015_39 (sequence is synthesized)
ggcccagcacctccacacccaggcactaacagcactttctcccagcacttcgggactcacccccaccagcagttgctctcctcccagctccacctctgggaagctgagcatgtggtcctg

SEQ ID NO: 88038 - DNA, 120 bp, Artificial Sequence
  ENSG00000086015_40 (sequence is synthesized)
gaaatcccttattgagggcccagacagggcatccccaagcagaaaggcaaccatggcaggtgggctagccaacctccaggatttggaaaacacaactccagcccagcctaagaacctgtc

SEQ ID NO: 88039 - DNA, 120 bp, Artificial Sequence
  ENSG00000086015_41 (sequence is synthesized)
tcccagggagcaggggaagacacagccacctagtgcccccagactggcccatccatcttatgaggatcccagccagggctggctatgggagtctgagtgtgcacaagcagtgaaagagga

SEQ ID NO: 88040 - DNA, 120 bp, Artificial Sequence
  ENSG00000086015_42 (sequence is synthesized)
tccagccctgagcatcacccaagtgcctgatgcctcaggtgacagaaggcaggacgttccatgccgaggctgccccctcacccagaagtctgagcccagcctcaggaggggccaagaacc

SEQ ID NO: 88041 - DNA, 120 bp, Artificial Sequence
  ENSG00000086015_43 (sequence is synthesized)
agggggccatcaaaagcatcgggatttggcattggttccagatgagcttttaaagcaaacatagcagttgtttgccatttcttgcactcagacctgtgtaatatatgctcctggaaacca

SEQ ID NO: 88042 - DNA, 120 bp, Artificial Sequence
  ENSG00000086015_44 (sequence is synthesized)
ctgggaaataggaaagttcctaggccctgtgtgcttctgacagatcccactctgagtctctcatttagcccaccccctgaaagatcctgtagtcttggggaggaattaattgatggggaa

SEQ ID NO: 88043 - DNA, 120 bp, Artificial Sequence
  ENSG00000086015_45 (sequence is synthesized)
cccagtcctctgggcagatgcctcggggtggaccttctcactcccagaagcctcctgggtgggcaggagttcagattcctctgacatccgatcattgttcctttcccagacaagattccc

SEQ ID NO: 88044 - DNA, 120 bp, Artificial Sequence
  ENSG00000086015_46 (sequence is synthesized)
acctgggtgttcctgtctgtgtatgtgcacatcccataagtgtgaggggtacgtctgtgtatgttttgtggagtataaaagcagggtgagctagagctttgcagtgcctgctgtggatca

SEQ ID NO: 88045 - DNA, 120 bp, Artificial Sequence
  ENSG00000086015_47 (sequence is synthesized)
aagatcaagctatggtctaggaacctatagaatttaaggactggggtcccaggcaaggctttcaggggctccaggctgggtcctttttgcctcctttcctttcactgttctgggaccctc

SEQ ID NO: 88046 - DNA, 120 bp, Artificial Sequence
  ENSG00000086015_48 (sequence is synthesized)
ggcagaacaggctggaggatcagaagaagagggcctgtcaaagggcacacctggggcaggctcagggagttggggttggggccacctctagaaaaagaggagctaagggttggggctaca

SEQ ID NO: 88047 - DNA, 120 bp, Artificial Sequence
  ENSG00000086015_49 (sequence is synthesized)
tatagctatatataggtgcttctagaaccactgctgtccctgacatgagatgccaggtcagatcagtggaataactccttccccaaatattcagcaggggtgtgtgaaggagggatggaa

SEQ ID NO: 88048 - DNA, 120 bp, Artificial Sequence
  ENSG00000086015_50 (sequence is synthesized)
attcatttgggatctggaacttgtcactgtcccactgctgcctcgtgggctcttaggtcttttgtggggggatgggaggggtgttctgaagatcatgtttttgaagaaaagtactttaat

SEQ ID NO: 88049 - DNA, 120 bp, Artificial Sequence
  ENSG00000086015_51 (sequence is synthesized)
ttttgccaatctctaccctttgccgaggagctgaagtaaaccagcacatgttttcacccacatctgctccagccctcttcctcactaaagtcccatttagtgctgattgtgctttggcta

SEQ ID NO: 88050 - DNA, 120 bp, Artificial Sequence
  ENSG00000086015_52 (sequence is synthesized)
cttctcctcttgccattttcctgaacccacgagcccacagcagtcctggcactccttgttccagccgcccactgccgtggagttgtcggacaagtaaccgcaagagcttgattgtgacct

SEQ ID NO: 88051 - DNA, 120 bp, Artificial Sequence
  ENSG00000086015_53 (sequence is synthesized)
atggaggccaaggcacagtctgagacttagccttaaacagggaccagcagctttgtacagaggtgaagtttcagggcccagctttccagtccacctttggcattggtttctgcctcagga

SEQ ID NO: 88052 - DNA, 120 bp, Artificial Sequence
  ENSG00000086015_54 (sequence is synthesized)
tcacagagaccatttggccacagtgggcacaaagctccctgcctctaccatgagaggcattctgggataggatgtagcaggccagcagctatagaatcttgcaccccaaagcctgcacgc

SEQ ID NO: 88053 - DNA, 120 bp, Artificial Sequence
  ENSG00000086015_55 (sequence is synthesized)
tctctactgctggtatcagacagcaacagaggaggcagcagagctacaaaagcccaggattaggtgctaggaggtttgcatctggaccctcagaagaaaggaaagccattaattaccctg

SEQ ID NO: 88054 - DNA, 120 bp, Artificial Sequence
  ENSG00000086015_56 (sequence is synthesized)
tttgtaatcccaagctaagattagggcattagtggtattctcagtcttcacagactgcttgttacccaccctcaaaggtagagctgagggacttagattcctcctcagtcccctgcaata

SEQ ID NO: 88055 - DNA, 120 bp, Artificial Sequence
  ENSG00000086015_57 (sequence is synthesized)
gagggacaaagggctgaaagaacaagcataccaggcatgtacctctgcaagcctaactttgaaaattcctttattcttccagtggccagaactgggtcatatggtctcccctaagtgcag

SEQ ID NO: 88056 - DNA, 120 bp, Artificial Sequence
  ENSG00000086015_58 (sequence is synthesized)
tataaggggccaagatagtaaatatttttaggctttataggccatatatctctgtcacattcctcaactctgctgttgtagtatgaaagtatccacaaataatatataaactttatttac

SEQ ID NO: 88057 - DNA, 120 bp, Artificial Sequence
  ENSG00000086061_0 (sequence is synthesized)
gcggaactttccagaacgctcggtgagaggcggaggagcggtaactaccccggctgcgcacagctcggcgctccttcccgctccctcacacaccggcctcagcccgcaccggcagtagaa

SEQ ID NO: 88058 - DNA, 120 bp, Artificial Sequence
  ENSG00000086061_1 (sequence is synthesized)
gatggtgaaagaaacaacttactacgatgttttgggggtcaaacccaatgctactcaggaagaattgaaaaaggcttataggaaactggctttgaagtaccatcctgataagaacccaaa

SEQ ID NO: 88059 - DNA, 120 bp, Artificial Sequence
  ENSG00000086061_2 (sequence is synthesized)
tgaaggagagaagtttaaacagatttctcaagcttacgaagttctctctgatgcaaagaaaagggaattatatgacaaaggaggagaacaggcaattaaagagggtggagcaggtggcgg

SEQ ID NO: 88060 - DNA, 120 bp, Artificial Sequence
  ENSG00000086061_3 (sequence is synthesized)
ttttggctcccccatggacatctttgatatgttttttggaggaggaggaaggatgcagagagaaaggagaggtaaaaatgttgtacatcagctctcagtaaccctagaagacttatataa

SEQ ID NO: 88061 - DNA, 120 bp, Artificial Sequence
  ENSG00000086061_4 (sequence is synthesized)
tggtgcaacaagaaaactggctctgcaaaagaatgtgatttgtgacaaatgtgaaggtagaggaggtaagaaaggagcagtagagtgctgtcccaattgccgaggtactggaatgcaaat

SEQ ID NO: 88062 - DNA, 120 bp, Artificial Sequence
  ENSG00000086061_5 (sequence is synthesized)
aagaattcatcagataggacctggaatggttcagcaaattcagtctgtgtgcatggagtgccagggccatggggagcggatcagtcctaaagatagatgtaaaagctgcaacggaaggaa

SEQ ID NO: 88063 - DNA, 120 bp, Artificial Sequence
  ENSG00000086061_6 (sequence is synthesized)
gatagttcgagagaagaaaattttagaagttcatattgacaaaggcatgaaagatggccagaagataacattccatggtgaaggagaccaagaaccaggactggagccaggcgatattat

SEQ ID NO: 88064 - DNA, 120 bp, Artificial Sequence
  ENSG00000086061_7 (sequence is synthesized)
cattgtgttagatcagaaggaccatgctgtttttactcgacgaggagaagaccttttcatgtgtatggacatacagctcgttgaagcactgtgtggcttccagaagccaatatctactct

SEQ ID NO: 88065 - DNA, 120 bp, Artificial Sequence
  ENSG00000086061_8 (sequence is synthesized)
tgacaaccgaaccatcgtcatcacctctcatccaggtcagattgtcaagcatggagatatcaagtgtgtactaaatgaaggcatgccaatttatcgtagaccatatgaaaagggtcgcct

SEQ ID NO: 88066 - DNA, 120 bp, Artificial Sequence
  ENSG00000086061_9 (sequence is synthesized)
tctctctcctgataaactgtctttgctggaaaaactcctacccgagaggaaggaagtggaagagactgatgagatggaccaagtagaactggtggactttgatccaaatcaggaaagacg

SEQ ID NO: 88067 - DNA, 120 bp, Artificial Sequence
  ENSG00000086061_10 (sequence is synthesized)
gcgccactacaatggagaagcatatgaggatgatgaacatcatcccagaggtggtgttcagtgtcagacctcttaatgggccagtgaataacactcactgctggcatttaatgtgcagta

SEQ ID NO: 88068 - DNA, 120 bp, Artificial Sequence
  ENSG00000086061_11 (sequence is synthesized)
gtgaatgagtgaaggactgtaatcataatatgctcactacttgctcttgtttttgttttaataaactatagtagtgttttaaaaagttaaatgaagaataaacgcaaatataaaagctct

SEQ ID NO: 88069 - DNA, 120 bp, Artificial Sequence
  ENSG00000086061_12 (sequence is synthesized)
gattttgccctgtatgtatgatgacttcagtgtgcaagatgaagtttaatacctgtaaaaactacaaagaagttcccctagcatttctaggccaaaccttgtaattgacttcagctatgt

SEQ ID NO: 88070 - DNA, 120 bp, Artificial Sequence
  ENSG00000086061_13 (sequence is synthesized)
acgtggacaagcttagactgaaatgctaggtatatgtattggcttcagtgtatgacccttcattgttaagctatgaaagtaaaactctgtatttaactggcaatgaggaaaaaaaaattt

SEQ ID NO: 88071 - DNA, 120 bp, Artificial Sequence
  ENSG00000086061_14 (sequence is synthesized)
tgtagagaagtgttggtctgtatagttctttatattaagtgggattcattgtaatgcctctgcatttattctgttgcctcagctgttacttgaagatggcgtaatatataatttatcctg

SEQ ID NO: 88072 - DNA, 120 bp, Artificial Sequence
  ENSG00000086061_15 (sequence is synthesized)
tggtatcagtgataaaaatgatacctttctgtaggaggggtttatcataatatgctgcttcttgaaggcttgcacttccagaattgtgtttccttctgctgtgccattcatatatatata

SEQ ID NO: 88073 - DNA, 120 bp, Artificial Sequence
  ENSG00000086061_16 (sequence is synthesized)
catatatatatataatcttgaccagtcctggtcatttgctcccctccttgtctgtggaccatgataagcccaagtagtgacttcagagctgggtaacagaaattaaagtgaaaagacctt

SEQ ID NO: 88074 - DNA, 120 bp, Artificial Sequence
  ENSG00000086061_17 (sequence is synthesized)
tacgtggagaatttgcatgcgtaatataggaaggtgttctttaggtatgttacaggattactttaaaccatttgactttcgctccaaagttatgttggtagtatagcaaattatgatgaa

SEQ ID NO: 88075 - DNA, 120 bp, Artificial Sequence
  ENSG00000086061_18 (sequence is synthesized)
tagctttaattgtatgtttaaaagtctcatatgttcacatgcttaaatctgggtatcagaatttaagcaattcttgaaatgtattgtctccttaatatactaattacaaagcatctccaa

SEQ ID NO: 88076 - DNA, 87 bp, Artificial Sequence
  ENSG00000086061_19 (sequence is synthesized)
aaaaaagtaaaatttcagccaggtgcaagtagctcatgcctgtaatccccgcattttggagttttgagaacagcctgggcaacatag

SEQ ID NO: 88077 - DNA, 120 bp, Artificial Sequence
  ENSG00000086061_20 (sequence is synthesized)
gaacgctcggtgagaggcggaggagcggtaactaccccggctgcgcacagctcggcgctccttcccgctccctcacacaccggcctcagcccgcaccggcatgaaagatggccagaagat

SEQ ID NO: 88078 - DNA, 120 bp, Artificial Sequence
  ENSG00000086061_21 (sequence is synthesized)
agataacattccatggtgaaggagaccaagaaccaggactggagccaggcgatattatcattgtgttagatcagaaggaccatgctgtttttactcgtagagatggggtttcaccatgtt

SEQ ID NO: 88079 - DNA, 120 bp, Artificial Sequence
  ENSG00000086061_22 (sequence is synthesized)
tggtcttgaacttcagaccttaggtgatccaccctcctcagcctcccaaactgctggaattacagatgcgaaccacagtgcctggcctaaccctcactcttacgaggagaagaccttttc

SEQ ID NO: 88080 - DNA, 120 bp, Artificial Sequence
  ENSG00000086062_0 (sequence is synthesized)
gcctcgggcggcttctcgccgctcccaggtctggctggctggaggagtctcagctctcagccgctcgcccgcccccgctccgggccctcccctagtcgccgctgtggggcagcgcctggc

SEQ ID NO: 88081 - DNA, 120 bp, Artificial Sequence
  ENSG00000086062_1 (sequence is synthesized)
gggcggcccgcgggcgggtcgcctcccctcctgtagcccacacccttcttaaagcggcggcgggaagatgaggcttcgggagccgctcctgagcggcagcgccgcgatgccaggcgcgtc

SEQ ID NO: 88082 - DNA, 120 bp, Artificial Sequence
  ENSG00000086062_2 (sequence is synthesized)
cctacagcgggcctgccgcctgctcgtggccgtctgcgctctgcaccttggcgtcaccctcgtttactacctggctggccgcgacctgagccgcctgccccaactggtcggagtctccac

SEQ ID NO: 88083 - DNA, 120 bp, Artificial Sequence
  ENSG00000086062_3 (sequence is synthesized)
gtctccacaccgctgcagggcggctcgaacagtgccgccgccatcgggcagtcctccggggagctccggaccggaggggcccggccgccgcctcctctaggcgcctcctcccagccgcgc

SEQ ID NO: 88084 - DNA, 120 bp, Artificial Sequence
  ENSG00000086062_4 (sequence is synthesized)
cgactccagcccagtcgtggattctggccctggccccgctagcaacttgacctcggtcccagtgccccacaccaccgcactgtcgctgcccgcctgccctgaggagtccccgctgcttgt

SEQ ID NO: 88085 - DNA, 120 bp, Artificial Sequence
  ENSG00000086062_5 (sequence is synthesized)
gggccccatgctgattgagtttaacatgcctgtggacctggagctcgtggcaaagcagaacccaaatgtgaagatgggcggccgctatgcccccagggactgcgtctctcctcacaaggt

SEQ ID NO: 88086 - DNA, 120 bp, Artificial Sequence
  ENSG00000086062_6 (sequence is synthesized)
ggccatcatcattccattccgcaaccggcaggagcacctcaagtactggctatattatttgcacccagtcctgcagcgccagcagctggactatggcatctatgttatcaaccaggcggg

SEQ ID NO: 88087 - DNA, 120 bp, Artificial Sequence
  ENSG00000086062_7 (sequence is synthesized)
agacactatattcaatcgtgctaagctcctcaatgttggctttcaagaagccttgaaggactatgactacacctgctttgtgtttagtgacgtggacctcattccaatgaatgaccataa

SEQ ID NO: 88088 - DNA, 120 bp, Artificial Sequence
  ENSG00000086062_8 (sequence is synthesized)
tgcgtacaggtgtttttcacagccacggcacatttccgttgcaatggataagtttggattcagcctaccttatgttcagtattttggaggtgtctctgctctaagtaaacaacagtttct

SEQ ID NO: 88089 - DNA, 120 bp, Artificial Sequence
  ENSG00000086062_9 (sequence is synthesized)
aaccatcaatggatttcctaataattattggggctggggaggagaagatgatgacatttttaacagattagtttttagaggcatgtctatatctcgcccaaatgctgtggtcgggaggtg

SEQ ID NO: 88090 - DNA, 120 bp, Artificial Sequence
  ENSG00000086062_10 (sequence is synthesized)
tcgcatgatccgccactcaagagacaagaaaaatgaacccaatcctcagaggtttgaccgaattgcacacacaaaggagacaatgctctctgatggtttgaactcactcacctaccaggt

SEQ ID NO: 88091 - DNA, 120 bp, Artificial Sequence
  ENSG00000086062_11 (sequence is synthesized)
gctggatgtacagagatacccattgtatacccaaatcacagtggacatcgggacaccgagctagcgttttggtacacggataagagacctgaaattagccagggacctctgctgtgtgtc

SEQ ID NO: 88092 - DNA, 120 bp, Artificial Sequence
  ENSG00000086062_12 (sequence is synthesized)
tctgccaatctgctgggctggtccctctcatttttaccagtctgagtgacaggtccccttcgctcatcattcagatggctttccagatgaccaggacgagtgggatattttgcccccaac

SEQ ID NO: 88093 - DNA, 120 bp, Artificial Sequence
  ENSG00000086062_13 (sequence is synthesized)
ttggctcggcatgtgaattcttagctctgcaaggtgtttatgcctttgcgggtttcttgatgtgttcgcagtgtcaccccagagtcagaactgtacacatcccaaaatttggtggccgtg

SEQ ID NO: 88094 - DNA, 120 bp, Artificial Sequence
  ENSG00000086062_14 (sequence is synthesized)
gaacacattcccggtgatagaattgctaaattgtcgtgaaataggttagaatttttctttaaattatggttttcttattcgtgaaaattcggagagtgctgctaaaattggattggtgtg

SEQ ID NO: 88095 - DNA, 120 bp, Artificial Sequence
  ENSG00000086062_15 (sequence is synthesized)
atctttttggtagttgtaatttaacagaaaaacacaaaatttcaaccattcttaatgttacgtcctccccccacccccttctttcagtggtatgcaaccactgcaatcactgtgcatatg

SEQ ID NO: 88096 - DNA, 120 bp, Artificial Sequence
  ENSG00000086062_16 (sequence is synthesized)
tcttttcttagcaaaaggattttaaaacttgagccctggaccttttgtcctatgtgtgtggattccagggcaactctagcatcagagcaaaagccttgggtttctcgcattcagtggcct

SEQ ID NO: 88097 - DNA, 120 bp, Artificial Sequence
  ENSG00000086062_17 (sequence is synthesized)
tctccagattgtctgatttctgaatgtaaagttgttgtgtttttttttaaatagtagtttgtagtattttaaagaaagaacagatcgagttctaattatgatctagcttgattttgtgtt

SEQ ID NO: 88098 - DNA, 120 bp, Artificial Sequence
  ENSG00000086062_18 (sequence is synthesized)
gatccaaatttgcatagctgtttaatgttaagtcatgacaatttatttttcttggcatgctatgtaaacttgaatttcctatgtatttttattgtggtgttttaaatatggggaggggta

SEQ ID NO: 88099 - DNA, 120 bp, Artificial Sequence
  ENSG00000086062_19 (sequence is synthesized)
ttgagcattttttagggagaaaaataaatatatgctgtagtggccacaaataggcctatgatttagctggcaggccaggttttctcaagagcaaaatcaccctctggccccttggcaggt

SEQ ID NO: 88100 - DNA, 120 bp, Artificial Sequence
  ENSG00000086062_20 (sequence is synthesized)
aaggcctcccggtcagcattatcctgccagacctcggggaggatacctgggagacagaagcctctgcacctactgtgcagaactctccacttccccaaccctccccaggtgggcagggcg

SEQ ID NO: 88101 - DNA, 120 bp, Artificial Sequence
  ENSG00000086062_21 (sequence is synthesized)
gagggagcctcagcctccttagactgacccctcaggcccctaggctggggggttgtaaataacagcagtcaggttgtttaccagccctttgcacctccccaggcagagggagcctctgtt

SEQ ID NO: 88102 - DNA, 120 bp, Artificial Sequence
  ENSG00000086062_22 (sequence is synthesized)
ctggtgggggccacctccctcagaggctctgctagccacactccgtggcccaccctttgttaccagttcttcctccttcctcttttcccctgcctttctcattccttccttcgtctccct

SEQ ID NO: 88103 - DNA, 120 bp, Artificial Sequence
  ENSG00000086062_23 (sequence is synthesized)
ttttgttcctttgcctcttgcctgtcccctaaaacttgactgtggcactcagggtcaaacagactatccattccccagcatgaatgtgccttttaattagtgatctagaaagaagttcag

SEQ ID NO: 88104 - DNA, 120 bp, Artificial Sequence
  ENSG00000086062_24 (sequence is synthesized)
ccgaacccacaccccaactccctcccaagaacttcggtgcctaaagcctcctgttccacctcaggttttcacaggtgctcccaccccagttgaggctcccacccacagggctgtctgtca

SEQ ID NO: 88105 - DNA, 120 bp, Artificial Sequence
  ENSG00000086062_25 (sequence is synthesized)
caaacccacctctgttgggagctattgagccacctgggatgagatgacacaaggcactcctaccactgagcgcctttgccaggtccagcctgggctcaggttccaagactcagctgccta

SEQ ID NO: 88106 - DNA, 120 bp, Artificial Sequence
  ENSG00000086062_26 (sequence is synthesized)
atcccagggttgagccttgtgctcgtggcggaccccaaaccactgccctcctgggtaccagccctcagtgtggaggctgagctggtgcctggccccagtcttatctgtgcctttactgct

SEQ ID NO: 88107 - DNA, 120 bp, Artificial Sequence
  ENSG00000086062_27 (sequence is synthesized)
ttgcgcatctcagatgctaacttggttctttttccagaagcctttgtattggttaaaaattattttccattgcagaagcagctggactatgcaaaaagtatttctctgtcagttccccac

SEQ ID NO: 88108 - DNA, 120 bp, Artificial Sequence
  ENSG00000086062_28 (sequence is synthesized)
tctataccaaggatattattaaaactagaaatgactgcattgagagggagttgtgggaaataagaagaatgaaagcctctctttctgtccgcagatcctgacttttccaaagtgccttaa

SEQ ID NO: 88109 - DNA, 120 bp, Artificial Sequence
  ENSG00000086062_29 (sequence is synthesized)
agatcctgacttttccaaagtgccttaaaagaaatcagacaaatgccctgagtggtaacttctgtgttattttactcttaaaaccaaactctaccttttcttgttgtttttttttttttt

SEQ ID NO: 88110 - DNA, 120 bp, Artificial Sequence
  ENSG00000086062_30 (sequence is synthesized)
tcatgtcaagtatgtggttcattcttagaaccaagggaaatactgctccccccatttgctgacgtagtgctctcatgggctcacctgggcccaaggcacagccagggcacagttaggcct

SEQ ID NO: 88111 - DNA, 120 bp, Artificial Sequence
  ENSG00000086062_31 (sequence is synthesized)
ggatgtttgcctggtccgtgagatgccgcgggtcctgtttccttactggggatttcagggctgggggttcagggagcatttccttttcctgggagttatgaccgcgaagttgtcatgtgc

SEQ ID NO: 88112 - DNA, 120 bp, Artificial Sequence
  ENSG00000086062_32 (sequence is synthesized)
cgtgcccttttctgtttctgtgtatcctattgctggtgactctgtgtgaactggcctttgggaaagatcagagagggcagaggtggcacaggacagtaaaggagatgctgtgctggcctt

SEQ ID NO: 88113 - DNA, 120 bp, Artificial Sequence
  ENSG00000086062_33 (sequence is synthesized)
cagcctggacagggtctctgctgactgccaggggcgggggctctgcatagccaggatgacggctttcatgtcccagagacctgttgtgctgtgtattttgatttcctgtgtatgcaaatg

SEQ ID NO: 88114 - DNA, 120 bp, Artificial Sequence
  ENSG00000086062_34 (sequence is synthesized)
tgtgtatttaccattgtgtagggggctgtgtctgatcttggtgttcaaaacagaactgtatttttgcctttaaaattaaataatataacgtgaataaatgaccctatctttgtaactgca

SEQ ID NO: 88115 - DNA, 120 bp, Artificial Sequence
  ENSG00000086062_35 (sequence is synthesized)
atttgagcgtgagacgtgctggctgtgtgggctgtgccacctgaggaggattggccagtcataaggactcagcctggttgctgaatccagctggggaccttgaccccagtgactggcttt

SEQ ID NO: 88116 - DNA, 120 bp, Artificial Sequence
  ENSG00000086062_36 (sequence is synthesized)
tcagcggctacctgttctcgagacaaatgctgtcctcccctaaggagtctgggctgtggcaaagctatgacataggtacaaccgtccttttgccaggtggggcttaggtggagaagttga

SEQ ID NO: 88117 - DNA, 120 bp, Artificial Sequence
  ENSG00000086062_37 (sequence is synthesized)
agcctggactcagtcaagatctcaggactgggagcaaggagcctcttactcccagggtgcccacttggttcccactgactgttggtggaaactaggggctgagctggaggctttttagag

SEQ ID NO: 88118 - DNA, 120 bp, Artificial Sequence
  ENSG00000086062_38 (sequence is synthesized)
gaagaaatgacaagctgggggctggattatccctgggggtgaaaatggagtcagctagataggttatgtcttgaaggagaggagggtcccctggtgtcaggaagcagagcctgaactcca

SEQ ID NO: 88119 - DNA, 120 bp, Artificial Sequence
  ENSG00000086062_39 (sequence is synthesized)
tgttagaccctggattggagagtgggcaggacacttgggagagacaggacttggtactggcgagggtactaccacacccattctgggagtggactatagagaaataaatcctaaaagtgg

SEQ ID NO: 88120 - DNA, 120 bp, Artificial Sequence
  ENSG00000086065_0 (sequence is synthesized)
agtgtttgggtttcttcgcggctgctcaagatgaaccgactcttcgggaaagcgaaacccaaggctccgccgcccagcctgactgactgcattggcacggtggacagtagagcagaatcc

SEQ ID NO: 88121 - DNA, 120 bp, Artificial Sequence
  ENSG00000086065_1 (sequence is synthesized)
attgacaagaagatttctcgattggatgctgagctagtgaagtataaggatcagatcaagaagatgagagagggtcctgcaaagaatatggtcaagcagaaagccttgcgagttttaaag

SEQ ID NO: 88122 - DNA, 120 bp, Artificial Sequence
  ENSG00000086065_2 (sequence is synthesized)
caaaagaggatgtatgagcagcagcgggacaatcttgcccaacagtcattcaacatggaacaagccaattataccatccagtctttgaaggacaccaagaccacggttgatgctatgaaa

SEQ ID NO: 88123 - DNA, 120 bp, Artificial Sequence
  ENSG00000086065_3 (sequence is synthesized)
ctgggagtaaaggaaatgaagaaggcatacaagcaagtgaagatcgaccagattgaggatttacaagaccagctagaggatatgatggaagatgcaaatgaaatccaagaagcactgagt

SEQ ID NO: 88124 - DNA, 120 bp, Artificial Sequence
  ENSG00000086065_4 (sequence is synthesized)
cgcagttatggcaccccagaactggatgaagatgatttagaagcagagttggatgcactaggtgatgagcttctggctgatgaagacagttcttatttggatgaggcagcatctgcacct

SEQ ID NO: 88125 - DNA, 120 bp, Artificial Sequence
  ENSG00000086065_5 (sequence is synthesized)
gcaattccagaaggtgttcccactgatacaaaaaacaaggatggagttctggtggatgaatttggattgccacagatccctgcttcatagatttgcatcattcaagcatatcttgtaaaa

SEQ ID NO: 88126 - DNA, 120 bp, Artificial Sequence
  ENSG00000086065_6 (sequence is synthesized)
caaacacatattatgggactaggaaatatttatctttccaaatttgccataacagatttaggtttctttcctttctttgaaggaaagtttaattacattgctcttttattttttccatta

SEQ ID NO: 88127 - DNA, 120 bp, Artificial Sequence
  ENSG00000086065_7 (sequence is synthesized)
acttgttttcattcattaataataatttgaaataaaactaaggaaatggaatcttaaaagtctatgacagtgtaactctacagtctcaaaatgacctgataaattgataagacaaagatg

SEQ ID NO: 88128 - DNA, 120 bp, Artificial Sequence
  ENSG00000086065_8 (sequence is synthesized)
agattattggggctgttcatattatgattcagaatcattttctattgtggtattataggttggttaaagtgatggcctttttgatgggttttgttgtgtcttgtgaacaagtcgttactg

SEQ ID NO: 88129 - DNA, 120 bp, Artificial Sequence
  ENSG00000086065_9 (sequence is synthesized)
tgtccattattggaatggaattatcactactgtatcatgagtgggtattttgattctatggttccctcagtattacatcttgacttgtaatcaattatgaatatttcttgatatttaatg

SEQ ID NO: 88130 - DNA, 120 bp, Artificial Sequence
  ENSG00000086065_10 (sequence is synthesized)
tataggacatttatttatactcaataaatatttttcaaaaggatataattttaataatatcacttcagcttaaaacctctactgcggaaaccaaatttaatagaattttaatgtcatttc

SEQ ID NO: 88131 - DNA, 120 bp, Artificial Sequence
  ENSG00000086065_11 (sequence is synthesized)
agcctataactccactacagaaaccaaattaaccagtagcattgtgaggaaagagcaaggaacaatctgggcttgggccctgggtctaccatttactaactactgagtagtctattcaac

SEQ ID NO: 88132 - DNA, 120 bp, Artificial Sequence
  ENSG00000086065_12 (sequence is synthesized)
ctctctaaccttctgtttccttattagtaaaatcatgcttaactcacagagcttttgtgaggaataattgaggtaatggtcataagtaccttgttaactgcaaggggctattcttatatg

SEQ ID NO: 88133 - DNA, 120 bp, Artificial Sequence
  ENSG00000086065_13 (sequence is synthesized)
agggattgttaacaataaaaaagaaactgcttcattcttttcttggaaggtgcctggagtactacagcaagttcaaactcctgcccaatttcagggtctttaatgatcctgtcctccctt

SEQ ID NO: 88134 - DNA, 120 bp, Artificial Sequence
  ENSG00000086065_14 (sequence is synthesized)
cctcattcaacttgttgccaacagcatggcccctccagcctagctgggtgcctcacagtgctatgtgcacctgactctcatgtgtctgcagatcaaaccaataaacatttaggaacacca

SEQ ID NO: 88135 - DNA, 120 bp, Artificial Sequence
  ENSG00000086065_15 (sequence is synthesized)
ctgcaggctctctccgagagcaccaagtccttttgctctccatccccggaagacccggctgaaaatccggaaaaagaatcgggaaacgccaggaggcatattgcgcttgcgcacggaggg

SEQ ID NO: 88136 - DNA, 120 bp, Artificial Sequence
  ENSG00000086065_16 (sequence is synthesized)
gctttcccgctctctccatggtctatttttgcctagaacctttcattttttttccacttatttctttattttttaatttcccatcttcaattgcccctgataagtctctacctgctattg

SEQ ID NO: 88137 - DNA, 120 bp, Artificial Sequence
  ENSG00000086065_17 (sequence is synthesized)
tcattcctcttggccacttccaactcattttaccacagacttatttttggagtctgatttcacgtaatggtcacacagcatacaacaatctcatgccctcttcactgccttctttcaagt

SEQ ID NO: 88138 - DNA, 120 bp, Artificial Sequence
  ENSG00000086102_0 (sequence is synthesized)
gacctggtgacagtgctgacttggctgtacagctcgatctaggttctgcggcacgggatggcggaggcgcctcctgtctcaggtacttttaaattcaatacagatgctgctgaattcatt

SEQ ID NO: 88139 - DNA, 120 bp, Artificial Sequence
  ENSG00000086102_1 (sequence is synthesized)
cctcaggagaaaaaaaattctggtctaaattgtgggactcaaaggagactagactctaataggattggtagaagaaattacagttcaccacctccctgtcacctttccaggcaggtccct

SEQ ID NO: 88140 - DNA, 120 bp, Artificial Sequence
  ENSG00000086102_2 (sequence is synthesized)
tatgatgaaatctctgctgttcatcagcatagttatcatccgtcaggaagcaaacctaagagtcagcagacgtctttccagtcctctccttgtaataaatcgcccaagagccatggcctt

SEQ ID NO: 88141 - DNA, 120 bp, Artificial Sequence
  ENSG00000086102_3 (sequence is synthesized)
cagaatcaaccttggcagaaattgaggaatgagaagcaccatatcagagtcaagaaagcacagagtcttgctgagcagacctcagatacagctggattagagagctcgaccagatcagag

SEQ ID NO: 88142 - DNA, 120 bp, Artificial Sequence
  ENSG00000086102_4 (sequence is synthesized)
agtgggacagacctcagagagcatagtccttctgagagtgagaaggaagttgtgggtgcagatcccaggggagcaaaacccaaaaaagcaacacagtttgtatacagctatggtagagga

SEQ ID NO: 88143 - DNA, 120 bp, Artificial Sequence
  ENSG00000086102_5 (sequence is synthesized)
ccaaaagtcaaggggaaactcaaatgtgaatggagtaaccgaacaactccaaaaccggaggatgctggacccgaaagtaccaaacctgtgggggttttccaccctgactcttcagaggca

SEQ ID NO: 88144 - DNA, 120 bp, Artificial Sequence
  ENSG00000086102_6 (sequence is synthesized)
tcctctagaaaaggagtattggatgggtatggagccagacgaaatgagcagagaagatacccacagaaaaggcctccctgggaagtggagggggccaggccacgaccaggcagaaatcca

SEQ ID NO: 88145 - DNA, 120 bp, Artificial Sequence
  ENSG00000086102_7 (sequence is synthesized)
ccaaaacaggagggccaccgacatacaaacgcaggacacagaaacaacatgggccccattccaaaggatgacctcaatgaaagaccagcaaaatctacctgtgacagtgagaacttggca

SEQ ID NO: 88146 - DNA, 120 bp, Artificial Sequence
  ENSG00000086102_8 (sequence is synthesized)
gtcatcaacaagtcttccaggagggttgaccaagagaaatgcactgtacggaggcaggatcctcaagtagtatctcctttctcccgaggcaaacagaaccatgtgctaaagaatgtggaa

SEQ ID NO: 88147 - DNA, 120 bp, Artificial Sequence
  ENSG00000086102_9 (sequence is synthesized)
acgcacacaggttctctaattgaacaactaacaacagaaaaatacgagtgcatggtgtgctgtgaattggttcgtgtcacggccccagtgtggagttgtcagagctgttaccatgtgttt

SEQ ID NO: 88148 - DNA, 120 bp, Artificial Sequence
  ENSG00000086102_10 (sequence is synthesized)
catttgaactgcataaagaaatgggcaaggtctccagcatctcaagcagatggccagagtggttggaggtgccctgcctgtcagaatgtttctgcacatgttcctaatacctacacttgt

SEQ ID NO: 88149 - DNA, 120 bp, Artificial Sequence
  ENSG00000086102_11 (sequence is synthesized)
ttctgtggcaaggtaaagaatcctgagtggagcagaaatgaaattccacatagctgtggtgaggtttgtagaaagaaacagcctggccaggactgcccacattcctgtaaccttctctgc

SEQ ID NO: 88150 - DNA, 120 bp, Artificial Sequence
  ENSG00000086102_12 (sequence is synthesized)
catccaggaccctgcccaccctgccctgcctttatgacaaaaacatgtgaatgtggacgaaccaggcacacagttcgctgtggtcaggctgtctcagtccactgttctaacccatgtgag

SEQ ID NO: 88151 - DNA, 120 bp, Artificial Sequence
  ENSG00000086102_13 (sequence is synthesized)
aatattttgaactgtggtcagcaccagtgtgctgagctgtgccatgggggtcagtgccagccttgccagatcattttgaaccaggtatgctattgcggcagcacctcccgagatgtgtta

SEQ ID NO: 88152 - DNA, 120 bp, Artificial Sequence
  ENSG00000086102_14 (sequence is synthesized)
tgtggaaccgatgtaggaaagtctgatggatttggggatttcagctgtttaaagatatgtggcaaggacttgaaatgcggtaaccatacatgttcgcaagtgtgccaccctcagccctgc

SEQ ID NO: 88153 - DNA, 120 bp, Artificial Sequence
  ENSG00000086102_15 (sequence is synthesized)
cagcaatgcccacggctcccccagctggtgcgctgttgcccctgtggccaaactcctctcagccaattgctagaacttggaagtagtagtcggaaaacatgcatggaccctgtgccttca

SEQ ID NO: 88154 - DNA, 120 bp, Artificial Sequence
  ENSG00000086102_16 (sequence is synthesized)
tgtggaaaagtgtgcggcaagcctctgccttgtggttccttagatttcattcatacctgtgaaaagctctgccatgaaggagactgtggaccatgctctcgcacatcagttatttcctgc

SEQ ID NO: 88155 - DNA, 120 bp, Artificial Sequence
  ENSG00000086102_17 (sequence is synthesized)
agatgctctttcagaacaaaggagcttccatgtaccagtctcaaaagtgaagatgctacatttatgtgtgacaagcggtgtaacaagaaacggttgtgtggacggcataaatgtaatgag

SEQ ID NO: 88156 - DNA, 120 bp, Artificial Sequence
  ENSG00000086102_18 (sequence is synthesized)
atatgctgtgtggataaggagcacaagtgtcctttgatttgtgggaggaaactccgttgtggccttcataggtgtgaagaaccttgtcatcgtggaaactgccagacatgctggcaagcc

SEQ ID NO: 88157 - DNA, 120 bp, Artificial Sequence
  ENSG00000086102_19 (sequence is synthesized)
atttaccctccagttccctgtggtactaggccccctgaatgtacccaaacctgcgctagagtccatgagtgtgaccatccagtatatcattcttgtcatagtgaggagaagtgtccccct

SEQ ID NO: 88158 - DNA, 120 bp, Artificial Sequence
  ENSG00000086102_20 (sequence is synthesized)
tgcactttcctaactcagaagtggtgcatgggcaagcatgagtttcggagcaacatcccctgtcacctggttgatatctcttgcggattaccctgcagtgccacgctaccatgtgggatg

SEQ ID NO: 88159 - DNA, 120 bp, Artificial Sequence
  ENSG00000086102_21 (sequence is synthesized)
cacaaatgtcagagactctgtcacaaaggggagtgtcttgtggatgagccctgcaagcagccctgcaccacccccagagctgactgtggtcacccgtgtatggcaccctgccataccagc

SEQ ID NO: 88160 - DNA, 120 bp, Artificial Sequence
  ENSG00000086102_22 (sequence is synthesized)
tcaccctgccctgtgactgcttgtaaagctaaggtagagctacagtgtgaatgtggacgaagaaaagagatggtgatttgctctgaagcatctagtacttatcaaagaatagctgcaatc

SEQ ID NO: 88161 - DNA, 120 bp, Artificial Sequence
  ENSG00000086102_23 (sequence is synthesized)
tccatggcctctaagataacagacatgcagcttggaggttcagtggagatcagcaagttaattaccaaaaaggaagttcatcaagccaggctggagtgtgatgaggagtgttcagccttg

SEQ ID NO: 88162 - DNA, 120 bp, Artificial Sequence
  ENSG00000086102_24 (sequence is synthesized)
gaaaggaaaaagagattagcagaggcatttcatatcagtgaggattctgatcctttcaatatacgttcttcagggtcaaaattcagtgatagtttgaaagaagatgccaggaaggactta

SEQ ID NO: 88163 - DNA, 120 bp, Artificial Sequence
  ENSG00000086102_25 (sequence is synthesized)
aagtttgtcagtgacgttgagaaggaaatggaaaccctcgtggaggccgtgaataagggaaagaatagtaagaaaagccacagcttccctcccatgaacagagaccaccgccggatcatc

SEQ ID NO: 88164 - DNA, 120 bp, Artificial Sequence
  ENSG00000086102_26 (sequence is synthesized)
catgacttggcccaagtttatggcctggagagcgtgagctatgacagtgaaccgaagcgcaatgtggtggtcactgccatcagggggaagtccgtttgtcctcctaccacgctgacaggt

SEQ ID NO: 88165 - DNA, 120 bp, Artificial Sequence
  ENSG00000086102_27 (sequence is synthesized)
gtgcttgaaagggaaatgcaggcacggcctccaccaccgattcctcatcacagacatcagtcagacaagaatcctgggagcagtaatttacagaaaataaccaaggagccaataattgac

SEQ ID NO: 88166 - DNA, 120 bp, Artificial Sequence
  ENSG00000086102_28 (sequence is synthesized)
tattttgacgtccaggactaagaagatcatgatgcacttagataaaagaatgattaggtatagtggagacttatttgccagcagataaatcatgcccgttcccctctgcctggcagaatc

SEQ ID NO: 88167 - DNA, 120 bp, Artificial Sequence
  ENSG00000086102_29 (sequence is synthesized)
acagtctcacatactgtcttgtactgacacatccaaagcatgagtgtgtcagaaatcccttgtctattcctgtctgtataaagtgtttcattatgaccagatctctgattgtatggtcac

SEQ ID NO: 88168 - DNA, 120 bp, Artificial Sequence
  ENSG00000086102_30 (sequence is synthesized)
taggtatgcaatcacgcattcaaagaggctctttacaccatcactgtgattgctctgagagttgagggactattgggctttatttggacaaaccaaacttttagcctgaaaccaacttta

SEQ ID NO: 88169 - DNA, 120 bp, Artificial Sequence
  ENSG00000086102_31 (sequence is synthesized)
tgccactaagtcatagcctcagttgtcccagttatttgtcctcctgaaaatgcctgaaacatcagacagacattgcttgctttacccaaactgatcaaaatctttaggagcacaaatgaa

SEQ ID NO: 88170 - DNA, 120 bp, Artificial Sequence
  ENSG00000086102_32 (sequence is synthesized)
ttttttagtctgaaataccaaataatgaattggtataccatatccggaatcacacatgttatcttaaacccagccatcatacctaagtcttttgccaaaacctctcataggtatatctag

SEQ ID NO: 88171 - DNA, 120 bp, Artificial Sequence
  ENSG00000086102_33 (sequence is synthesized)
ctgaacttattttggcattttcaatgtgatcagttctagacctagaagggggtcaggctgctttacagaattctatttccttaagtccctggcacttctcataccacatcactgaacctg

SEQ ID NO: 88172 - DNA, 120 bp, Artificial Sequence
  ENSG00000086102_34 (sequence is synthesized)
ttcagtaacaatcagtttggccgtcccccatgatggtaggaaatatagagagcaagttcttctgccagggtcacactgtggtctctgaactgaccagtatatccctaactcctctttgat

SEQ ID NO: 88173 - DNA, 120 bp, Artificial Sequence
  ENSG00000086102_35 (sequence is synthesized)
agagaaagagtctcaaatggacaactgtcctgtgttgctttccctaggccttcagcagcctattggctctccctgcctctgagctctggactctgtttgaatattccaagtagtatatgg

SEQ ID NO: 88174 - DNA, 120 bp, Artificial Sequence
  ENSG00000086102_36 (sequence is synthesized)
acagtccagggcttatgcccagcagcccactggaggcattcttcaggctcctttaaggcaggtgcattgatagttccattagtgtgacccttgcattggcacccctccagcctggaggcc

SEQ ID NO: 88175 - DNA, 120 bp, Artificial Sequence
  ENSG00000086102_37 (sequence is synthesized)
aggcttccagcaacttccttctgccctagagcaagccatgagccccagagcagtagcaggagacttgagaagtagagtgacaaaaacaagcacttaattaaattataaaatttaacttta

SEQ ID NO: 88176 - DNA, 120 bp, Artificial Sequence
  ENSG00000086102_38 (sequence is synthesized)
tcctaactcagaagtggtgcatgggcaagcatgagcagtcccactactgggcgtctacccagaagaaaagaagtcattatatgaaaaagatacctgcacacgcatgtttatagcagcaca

SEQ ID NO: 88177 - DNA, 120 bp, Artificial Sequence
  ENSG00000086102_39 (sequence is synthesized)
atgtggaaccagcccaactgcccatcagtcaacaagtggataaagaaattgtggtgtatctatacgtaccatggaatactactcagccaggaacgaaataatggcattcacagcaacctg

SEQ ID NO: 88178 - DNA, 90 bp, Artificial Sequence
  ENSG00000086102_40 (sequence is synthesized)
attataagagggagctaagctatgaggacgcaaaggcatgagaatgatacaatggactttggggactctggggaaaggacgggaggcggg

SEQ ID NO: 88179 - DNA, 120 bp, Artificial Sequence
  ENSG00000086102_41 (sequence is synthesized)
gacgcaaaggcatgagaatgatacaatggactttggggactctggggaaaggacgggaggcgggtgagggataaaaaactacacactgggtccgagcacggtggctcatgcctataatcc

SEQ ID NO: 88180 - DNA, 120 bp, Artificial Sequence
  ENSG00000086102_42 (sequence is synthesized)
ggagttcgaaaccagcctggccaacaaggtgagaccccccccatctctactaaaataattagccgggcctggtggcgcatccctgtaatcccagctactttacttgggaggctgaggcag

SEQ ID NO: 88181 - DNA, 120 bp, Artificial Sequence
  ENSG00000086102_43 (sequence is synthesized)
gaaaaaaaaaataaattttaaaaactacacattgggtacaatgtacactcctcgggtgatgggtgcaccaaaatctcaaaaatcactactaaggaacttatccatgtaaccaaacaccac

SEQ ID NO: 88182 - DNA, 120 bp, Artificial Sequence
  ENSG00000086102_44 (sequence is synthesized)
aactattgaaataagaaaaaagaaaaaaaaaaaatcactgattgcaggtcaccctaacagatataataatgaaaaagtctgagatgttgcgagaattaccaaaatgtgatgcagacacga

SEQ ID NO: 88183 - DNA, 120 bp, Artificial Sequence
  ENSG00000086102_45 (sequence is synthesized)
aatgagcatgtgctgttggaaaagtggaacagatagacttgctggagacagggttgccacaaagtttcaatttgtaaaaaatgtgatatctatgaaatgcaataaagtgaagtccaataa

SEQ ID NO: 88184 - DNA, 120 bp, Artificial Sequence
  ENSG00000086102_46 (sequence is synthesized)
tctctaaggccagcttgatgaaaaaaaaaaagcaatcaagtcctggaaacactttcaacctagagtagttgtaggaaaaagtcacaacttctttgaggatccttatctttctcaaaacac

SEQ ID NO: 88185 - DNA, 120 bp, Artificial Sequence
  ENSG00000086102_47 (sequence is synthesized)
ttctcaaaacacagccattataacatctgtggaagcctgtcctggttcaggacagttgactgcagaaaagatctacagtcggctgggcacagtgtctcatgcctgtaatgccagcacttt

SEQ ID NO: 88186 - DNA, 67 bp, Artificial Sequence
  ENSG00000086102_48 (sequence is synthesized)
attagctgggtgtggtggcgggcacctgttattccagctacttgcaaggcttctgccactgcactcc

SEQ ID NO: 88187 - DNA, 65 bp, Artificial Sequence
  ENSG00000086102_49 (sequence is synthesized)
tcaaaaagaaagaaagaaagaaagaaagctctgcagtcagctgtaagtaaacaggcggatcactt

SEQ ID NO: 88188 - DNA, 65 bp, Artificial Sequence
  ENSG00000086102_50 (sequence is synthesized)
aagtaaacaggcggatcacttgagtccaggagttcacgaccagcctgggcaacgtggcaaaaccc

SEQ ID NO: 88189 - DNA, 120 bp, Artificial Sequence
  ENSG00000086102_51 (sequence is synthesized)
gaggcaggaggattgcttaagcccaggaggtcaagcctgcagtaagctgaggttgagtcactgtactccagcttggatctccagcttgagatcctgtctcaataaaaaagaaagaaagaa

SEQ ID NO: 88190 - DNA, 120 bp, Artificial Sequence
  ENSG00000086102_52 (sequence is synthesized)
cttgagatcctgtctcaataaaaaagaaagaaagaaaaagaaaataaagatgctggccaagtgcctaagaatggatgaagaaactctgggtgagggggctcaatagtgatagttgagtga

SEQ ID NO: 88191 - DNA, 120 bp, Artificial Sequence
  ENSG00000086102_53 (sequence is synthesized)
tagcccctcagatctttgaagggctattgtatgctaggaaagcccactgttctttataattccaaaggcaggaatgtcccctttgggaaggatgaaagttgtatgactacagctggagag

SEQ ID NO: 88192 - DNA, 120 bp, Artificial Sequence
  ENSG00000086102_54 (sequence is synthesized)
cagtgggatagactccttcagaagagggagacccctgtcctggaggcggccagggatgtcacggaggtagctttaagtggaaaagtcttgagtttagtcagaagcccccagcgctgcatt

SEQ ID NO: 88193 - DNA, 120 bp, Artificial Sequence
  ENSG00000086102_55 (sequence is synthesized)
ctgccctgtgactgcttgtaaagctaaggtgggtatttctggccacagatgcagcattgactgtagttctgaggctactagtgaatccagaactgtctacagtggcccctgggcatgcat

SEQ ID NO: 88194 - DNA, 120 bp, Artificial Sequence
  ENSG00000086102_56 (sequence is synthesized)
gtgaaagtgtcgtcactctgaatcttgttagggagttgggttatgtatttgtcaaaattcagtgaaggcatacttaagatttgtggtataactttcacctcaaaaggaaaaaaatataaa

SEQ ID NO: 88195 - DNA, 120 bp, Artificial Sequence
  ENSG00000086159_0 (sequence is synthesized)
atacacatgcataagcccatccgcctgcgccctgccagtctgaccagcacagtcctggggacaggagcgtggtggaggagctgcaggtgggggccagagaagcctccacagagagcaaaa

SEQ ID NO: 88196 - DNA, 120 bp, Artificial Sequence
  ENSG00000086159_1 (sequence is synthesized)
gccagggtcagccagagacaggacaccagaagagacaggagatcagagaccagaggaacagagaagaggccccagagcaaggcaaggaacggccaaggcaccaggacatggatgcagtgg

SEQ ID NO: 88197 - DNA, 120 bp, Artificial Sequence
  ENSG00000086159_2 (sequence is synthesized)
agccagggggacgtggctgggccagcatgttggcgtgcaggctttggaaagccatcagcagggcgctgtttgcagagttcctggccacggggctgtatgtgttctttggcgtgggctcag

SEQ ID NO: 88198 - DNA, 120 bp, Artificial Sequence
  ENSG00000086159_3 (sequence is synthesized)
tcatgcgctggcccacagcacttccctccgtgctacagattgccatcaccttcaacctggtcaccgccatggctgtgcaggtcacctggaaggccagcggggcccacgccaaccccgccg

SEQ ID NO: 88199 - DNA, 120 bp, Artificial Sequence
  ENSG00000086159_4 (sequence is synthesized)
tgacgctggccttcctcgtaggctcccacatctctctgccccgtgctgtggcctatgtggctgcccagctggtgggggccacggtgggggctgctctgctttatggggtcatgccgggag

SEQ ID NO: 88200 - DNA, 120 bp, Artificial Sequence
  ENSG00000086159_5 (sequence is synthesized)
acatccgagagacccttgggatcaacgtggtccggaacagtgtctcaactggccaggcggtggcagtggagctgcttctgaccctgcagctggtgctctgtgtcttcgcttccaccgaca

SEQ ID NO: 88201 - DNA, 120 bp, Artificial Sequence
  ENSG00000086159_6 (sequence is synthesized)
gccgtcagacatcaggctccccggccaccatgattgggatctctgtggcactgggccacctcattgggatccacttcactggctgctccatgaatccagcccgctccttcggccctgcca

SEQ ID NO: 88202 - DNA, 120 bp, Artificial Sequence
  ENSG00000086159_7 (sequence is synthesized)
tcatcattgggaagttcacagtccactgggtcttctgggtggggcccctgatgggagccctcctggcctcactgatctacaacttcgtcctgttccccgacaccaagaccctggcgcagc

SEQ ID NO: 88203 - DNA, 120 bp, Artificial Sequence
  ENSG00000086159_8 (sequence is synthesized)
ggctggctatcctcacaggcaccgtagaggtggggacaggggcaggggcaggggcggagcccctgaagaaggaatcccagccgggttcgggagccgtggagatggagagtgtgtgaaaca

SEQ ID NO: 88204 - DNA, 120 bp, Artificial Sequence
  ENSG00000086159_9 (sequence is synthesized)
gcctacgcctggccgcgcccttgggcttcctgccttgcaggacctgcctggaggttctccctgggggtggcgggagggggaggcttgaccttttgtcctgaccaggtgggctggagggga

SEQ ID NO: 88205 - DNA, 120 bp, Artificial Sequence
  ENSG00000086159_10 (sequence is synthesized)
ttctaggtagaatctgggagtgaatttgtcccattccctctctgtagggcttccccacctctcggtgggacagagcagaggaaggcaggggatttaggatcgccctcccatcctctcacc

SEQ ID NO: 88206 - DNA, 120 bp, Artificial Sequence
  ENSG00000086159_11 (sequence is synthesized)
cactggaccccgtaggagtcctgaccccagatgcccaagtcttgggggagaaaggaatgggagcccagacagccactctgcttagacatgggagctatagggacctcagggagccccagc

SEQ ID NO: 88207 - DNA, 120 bp, Artificial Sequence
  ENSG00000086159_12 (sequence is synthesized)
ttcttacccacccaggaaacccttggtccagagaggacaggctttctggaggaatcaggccctgggacagcctctgagctcctgggggtgtttctctgaccttgggtgtggttttggggg

SEQ ID NO: 88208 - DNA, 120 bp, Artificial Sequence
  ENSG00000086159_13 (sequence is synthesized)
ggggctatatttcctccttcagactgggggcttcctgaggacagagactgctctaccaatagatctttgtttgttttgagacagaatcttgatctgttacccaggctggagtgcagtggc

SEQ ID NO: 88209 - DNA, 120 bp, Artificial Sequence
  ENSG00000086159_14 (sequence is synthesized)
ccaataggtctttattcctcaatcctccaaatgctctggagaggcccccacccttgagaagaactgacacagagaagaacattttctcaggctcgtagagaggtgggatagaggaaggga

SEQ ID NO: 88210 - DNA, 120 bp, Artificial Sequence
  ENSG00000086159_15 (sequence is synthesized)
ggtttgagccagacaggcctttcccagggaagcctcctcccaggtgcttgccccagctcccaccccacagcccactctcaggcaggaacaatcctcagaggggaagtgcccatctagcca

SEQ ID NO: 88211 - DNA, 120 bp, Artificial Sequence
  ENSG00000086159_16 (sequence is synthesized)
ttgactcatgacctgggtcaaagaagccgtctccaggctctctgtcagcattacaggatccccagaaagctgttgaataagccctaagggtggtaggaacccaggagggacccaggaaac

SEQ ID NO: 88212 - DNA, 120 bp, Artificial Sequence
  ENSG00000086159_17 (sequence is synthesized)
taagatttgagattcagtgcctctgaaagactaccaaaatctaagttggtttaatagttaaaagctgctgtagatttattctgcccacaacttgggggtcctttctggatctcggcttct

SEQ ID NO: 88213 - DNA, 120 bp, Artificial Sequence
  ENSG00000086159_18 (sequence is synthesized)
ccagctgtaaaatggacacacaatcctcctccagggactgctgtgaaatcaagaaatcggaaaatactttcagaagttaaaatgctagaaaaacaaccccaataaatgatgattattgtt

SEQ ID NO: 88214 - DNA, 120 bp, Artificial Sequence
  ENSG00000086159_19 (sequence is synthesized)
gtccacaagtcctgggtctgggctctagccagatgggggtggagtggaggacacagggagtccctcatgcttgagtcccctggggccaccttgaggcagcctatcccaatgcatccccgc

SEQ ID NO: 88215 - DNA, 120 bp, Artificial Sequence
  ENSG00000086159_20 (sequence is synthesized)
cccgctatccgggtggggcgcagaagagaggggagcccttctccgctcagtctccaggagactcagggcctgccagttctcaccagctgggaggtggacaaggtgatatggggagagatg

SEQ ID NO: 88216 - DNA, 120 bp, Artificial Sequence
  ENSG00000086159_21 (sequence is synthesized)
gaagaggaccgggaggagaggtggagagcggacagaggggctggctgttgagatgggtggacaggaggaaggacatctgggaggaccaggtctctccgctcctcttggcctcatgtgtct

SEQ ID NO: 88217 - DNA, 120 bp, Artificial Sequence
  ENSG00000086159_22 (sequence is synthesized)
ccgtcatgtgtggatgaggacatcagacctccctacctttccaggttttgtggggatcactgagatgaggcacgggaagccatcttgaattccctccccatcagtttgtgttctccctcc

SEQ ID NO: 88218 - DNA, 120 bp, Artificial Sequence
  ENSG00000086159_23 (sequence is synthesized)
ttttctctcccggtaccttcctccttcccctccccttcgccccccttactttccccaatctctaataggacttcagtcagagctgcattgacaggcagccctaggcagccagataaggaa

SEQ ID NO: 88219 - DNA, 120 bp, Artificial Sequence
  ENSG00000086159_24 (sequence is synthesized)
cctcggcaaaaggtttttgagcatgaatgagcttaaagcttggcactagagcccagtgctggctgggttcgggcacgtgctggctaggacaggaagccaggcctggagcaagccctggtc

SEQ ID NO: 88220 - DNA, 120 bp, Artificial Sequence
  ENSG00000086159_25 (sequence is synthesized)
aatggctacctggcctcaggaggtgaaggaccttgtcccaggctgggcagaggtcaggagactcagccccgagctagctggggacaagggctgccactgcacttagcactttcaggctcc

SEQ ID NO: 88221 - DNA, 120 bp, Artificial Sequence
  ENSG00000086159_26 (sequence is synthesized)
aaggcccagggcaggtgctgaggtgcctgtcttggagccgccatgcagccccgtccccacagctgtctaacggcagggggcagggaagttacaatcctaatcattcacattttctgactt

SEQ ID NO: 88222 - DNA, 120 bp, Artificial Sequence
  ENSG00000086159_27 (sequence is synthesized)
ggaggccctctcctaggtatcagcacatttactcctaactacacacagggaggagggaattattagcatcatccccactgcataaatgaggatcttgaggttaagcaactgcttagggtg

SEQ ID NO: 88223 - DNA, 120 bp, Artificial Sequence
  ENSG00000086159_28 (sequence is synthesized)
caatacacatggcagtgttcacaatcctttcagtggcctcatcagcagctctcaacaggcacgtttatagggaagaagtcaagagaaggggaagcctgaaagccacaggtgagactggga

SEQ ID NO: 88224 - DNA, 120 bp, Artificial Sequence
  ENSG00000086159_29 (sequence is synthesized)
aaggccaagagagggtcccagtcactcaaagggagccagaagtccaaggagggtcccccgaccccgacttgtacactggagaagggctgcccctacttcaaggccacagggcagctgcag

SEQ ID NO: 88225 - DNA, 120 bp, Artificial Sequence
  ENSG00000086159_30 (sequence is synthesized)
gccacagtgtccacagcgtccttggtaaagtcgactgtattcacatctgcattctgtgagtgcgggtataggtgggagtggaggagggaacttactttctgggtttacgggcacggtgtg

SEQ ID NO: 88226 - DNA, 120 bp, Artificial Sequence
  ENSG00000086159_31 (sequence is synthesized)
gtgtcagcccatttggaagcaaagcctagatatggagggggccagacgaacaggacctgggaatgcacaggaccccctgaagcaggccggggatctgagtgatcttgctgtatctaagct

SEQ ID NO: 88227 - DNA, 120 bp, Artificial Sequence
  ENSG00000086159_32 (sequence is synthesized)
gacattggaacatgaacagtctgaaatcccatgagccccgctgccctgcacctgcgaccctcaggctagaccttggactgtctacaacacgagtcaggcccaacccgccctggaaatcat

SEQ ID NO: 88228 - DNA, 120 bp, Artificial Sequence
  ENSG00000086159_33 (sequence is synthesized)
cttgggatcaacgtggctccacccacgtcctctgctctccgactgttcccaagttcttccctccacctcgaggcctgcctcactcgccccttctccatttcgtaaccatctgtgttccac

SEQ ID NO: 88229 - DNA, 120 bp, Artificial Sequence
  ENSG00000086159_34 (sequence is synthesized)
gtggggtgggaggagcaccactcacttctgcagggagcaagggtccagagcagatatggacccctctgcacaggcctcccgaagtcctgaagctgggcggcagtgaggtgtcacccccct

SEQ ID NO: 88230 - DNA, 120 bp, Artificial Sequence
  ENSG00000086159_35 (sequence is synthesized)
aaaaagacaaacagaaatagacacacacaccagcagagacagaaacagcaatagccaggactcctggctaaaacgggggaagtgagaggaaagaggcgggggcgggtgaggagactggcc

SEQ ID NO: 88231 - DNA, 120 bp, Artificial Sequence
  ENSG00000086159_36 (sequence is synthesized)
ccaggccccagccacggctgcagagcctgggctcagccccagggagggcagggagagcaaggggcaaggtccccttaccttgtgggcttgggaaacacgactcgtggttctcaaatttag

SEQ ID NO: 88232 - DNA, 120 bp, Artificial Sequence
  ENSG00000086159_37 (sequence is synthesized)
caccttacagacagttgagggagacctgggagatcaagtcggcactggggaagcaggcagcggtcccagagccaccctgtggtcctgatagctcctgggtggggtgacgacatccttctc

SEQ ID NO: 88233 - DNA, 120 bp, Artificial Sequence
  ENSG00000086189_0 (sequence is synthesized)
cttgcccctccggcgcttgggccagagtggtgcgggcggcgcgtggcggcgatccccacgtggtggctttctcacgctagccctctttggtcctccttgacgtcccgggcctgtgggccc

SEQ ID NO: 88234 - DNA, 120 bp, Artificial Sequence
  ENSG00000086189_1 (sequence is synthesized)
gctttctgccgagatgccgaaggtcaagtcgggggccatcggccgccgccgcgggcggcaggagcagcgccgggagctgaagagcgctggaggactcatgttcaacacggggattgggca

SEQ ID NO: 88235 - DNA, 120 bp, Artificial Sequence
  ENSG00000086189_2 (sequence is synthesized)
gcacattttgaaaaatcctctcattattaacagcattatcgataaggctgccttaagaccaactgatgtagtgctggaagttggacctggaactggcaacatgactgtaaagttgttaga

SEQ ID NO: 88236 - DNA, 120 bp, Artificial Sequence
  ENSG00000086189_3 (sequence is synthesized)
aaaggcaaaaaaggttgttgcttgtgaacttgacccaaggctagtagctgaacttcacaaaagagttcagggcacgcctgtggccagcaaacttcaagtactggtgggtgatgtgctgaa

SEQ ID NO: 88237 - DNA, 120 bp, Artificial Sequence
  ENSG00000086189_4 (sequence is synthesized)
aacagatttgccattctttgatacttgtgtggcaaatttgccttatcagatctcttcaccttttgtcttcaagctgttgctacatcgaccttttttcaggtgtgctatacttatgtttca

SEQ ID NO: 88238 - DNA, 120 bp, Artificial Sequence
  ENSG00000086189_5 (sequence is synthesized)
aagagaatttgccctccgactggttgcaaaacctggagataagttatactgcagactctcaattaatacacagctgttggcacgtgtggaccatctaatgaaagtgggaaagaataactt

SEQ ID NO: 88239 - DNA, 120 bp, Artificial Sequence
  ENSG00000086189_6 (sequence is synthesized)
cagaccaccgcccaaggtggaatccagtgttgtaaggatagaacctaagaatccaccaccacccatcaattttcaggaatgggatggtctagtaaggataacctttgttaggaaaaacaa

SEQ ID NO: 88240 - DNA, 120 bp, Artificial Sequence
  ENSG00000086189_7 (sequence is synthesized)
gacactctctgctgcatttaaatcaagtgcagtgcaacaactcttggaaaaaaactacagaattcactgttcagtccataatattataataccagaagatttcagcatagcagataaaat

SEQ ID NO: 88241 - DNA, 120 bp, Artificial Sequence
  ENSG00000086189_8 (sequence is synthesized)
acagcaaatcctaaccagcacaggttttagtgacaaacgggcccgttccatggacatagatgacttcatcagattgctacatggattcaacgcagaaggtattcatttttcctaggtatt

SEQ ID NO: 88242 - DNA, 120 bp, Artificial Sequence
  ENSG00000086189_9 (sequence is synthesized)
tggaaaacagaaattttcaaggtcaagaaaagaaatgaattttgtattttttgtatttgagaagataatgcttttgctttactgagacattatttacttgactatttttggttcaatact

SEQ ID NO: 88243 - DNA, 120 bp, Artificial Sequence
  ENSG00000086189_10 (sequence is synthesized)
actactgttgtcaccatttatgattctgaattttaaagttggaaagttctaagtatcaaagtttttaatatataatgctggtccaatctattcataataatcttcaagttcaggagccgc

SEQ ID NO: 88244 - DNA, 120 bp, Artificial Sequence
  ENSG00000086189_11 (sequence is synthesized)
ttatatactgtaaggccttctttaggcctttagctctgttcctccagtaataaaaaagttaaaatatgcttcactagtcacacattccccataccatttcgtgttattcacattccccgt

SEQ ID NO: 88245 - DNA, 120 bp, Artificial Sequence
  ENSG00000086189_12 (sequence is synthesized)
accatttcttgttattcacatgtacagtaaaacaattgtttcttaaattatttttattttggttctctcattctcttccctatttatcctatacagtgtctgttacgattgcctacctct

SEQ ID NO: 88246 - DNA, 120 bp, Artificial Sequence
  ENSG00000086189_13 (sequence is synthesized)
ttcgctatcctatagcgtcagagacttagggttctgggtaagcccaagtctgctactgccaccgtgcagtgccaggcatattaaagggcatgactcccaacatgtaaaatgaggaagcta

SEQ ID NO: 88247 - DNA, 120 bp, Artificial Sequence
  ENSG00000086189_14 (sequence is synthesized)
aactggaatgaaattaacaataaaattatctttttttatggttcttagggagataactataggcttagcaaaatttcagagggttttgtaattgaaactggtttcaacttcagaaaaaca

SEQ ID NO: 88248 - DNA, 120 bp, Artificial Sequence
  ENSG00000086189_15 (sequence is synthesized)
gccatttcccataactacaggttcccagtattcctatgatttctggacaattaaaatttccagttcctttttcatatacctggtgcttagttttaagctattttaaaactgtcagactga

SEQ ID NO: 88249 - DNA, 120 bp, Artificial Sequence
  ENSG00000086189_16 (sequence is synthesized)
cagactgagaatttcaatagatgtcataaactagttttattagctactatgtttaagtcaatataatactaagtgctgttaatatactataatagagttatagtagctattttgtttcta

SEQ ID NO: 88250 - DNA, 120 bp, Artificial Sequence
  ENSG00000086189_17 (sequence is synthesized)
taataaaaatatctttattgatatttggctttttttaatacctaacttaatagaagagtgtttccaattaatttaacaaagccagattttgaaatctggcttcaaagtcatagtaaatgt

SEQ ID NO: 88251 - DNA, 120 bp, Artificial Sequence
  ENSG00000086189_18 (sequence is synthesized)
tactacataattaaaataatgcttgttcttaatgtataatccagaacaaaggcatcaagctgcttttgttaaacaaatatgaaataatatacattaagagtagatttttttgtttaattt

SEQ ID NO: 88252 - DNA, 120 bp, Artificial Sequence
  ENSG00000086189_19 (sequence is synthesized)
cacaaaactattttgcagagttcacttgtatcatctctatccttatagtaaaaattttaagatttaactcggctttctcaggttatttccctctacccctatgaactgctgagttttagt

SEQ ID NO: 88253 - DNA, 120 bp, Artificial Sequence
  ENSG00000086189_20 (sequence is synthesized)
tccttttctggccttcagttttcactatctgtaaagctgaaggactgtattatattacctccagtatcttttctggtactaatttttaaaatacctgatcagaatgaagccatcatagtg

SEQ ID NO: 88254 - DNA, 120 bp, Artificial Sequence
  ENSG00000086189_21 (sequence is synthesized)
taaggcagcatatttgtctataaggagactttccaaagacagtacccatccaatgcaaataataaatttgaagctaatcatctgttgtgctttaaaatgagcaaattcacatgtctttat

SEQ ID NO: 88255 - DNA, 120 bp, Artificial Sequence
  ENSG00000086189_22 (sequence is synthesized)
tgccctttgaaagttggttaatctcaaaaactaccttttttttaaatatcctttgcaaggtcaattgtaacagttctccatccttcctcttccctttgaaataaacacaaatagaatata

SEQ ID NO: 88256 - DNA, 67 bp, Artificial Sequence
  ENSG00000086189_23 (sequence is synthesized)
tagatgacttcatcagattgctacatggattcaacgcagaaggttggtctggaattctcaacctcag

SEQ ID NO: 88257 - DNA, 120 bp, Artificial Sequence
  ENSG00000086189_24 (sequence is synthesized)
gctccttgcagacaaggaaacttataagatcatacagcataaaggcaatctcttcattttaagcaagataatttatcttttaacaattcgatggaaataataccacctatgtcaactgag

SEQ ID NO: 88258 - DNA, 120 bp, Artificial Sequence
  ENSG00000086189_25 (sequence is synthesized)
aagcagactgtgaagtgagaattaagagatcacagagagatgtcttgaactggagatatatctgaaacactaccattctgttgtgcagaggaagactgttcaggaaattgactgggccgt

SEQ ID NO: 88259 - DNA, 78 bp, Artificial Sequence
  ENSG00000086189_26 (sequence is synthesized)
ttgtgcagaggaagactgttcaggaaattgactgggccgtgcacgtgctgaaccaaccactggtctcactctaacctc

SEQ ID NO: 88260 - DNA, 120 bp, Artificial Sequence
  ENSG00000086189_27 (sequence is synthesized)
gagtagctgagactacaggtaattctaatgtacagtaaaggttgctaatgatataccaggaagaataaactacaaaaatcctccaatgaagatccctcattttgaagatgaatataaaaa

SEQ ID NO: 88261 - DNA, 120 bp, Artificial Sequence
  ENSG00000086189_28 (sequence is synthesized)
aacctctaagtggtgactctcaatatgattaaactcatgagttgaaaatatgcctcaggttcaactgcatagtttatgaaacaaagttttgttgcttctattatactatatttaaatgct

SEQ ID NO: 88262 - DNA, 120 bp, Artificial Sequence
  ENSG00000086189_29 (sequence is synthesized)
tatctatgtcctccctgaaagatatcaagttcctacaggctgaaagccatgtcatcattcatctttgtattttgtccagcatagtatttggcacaatgtaaaaaagcaaaacaacaacaa

SEQ ID NO: 88263 - DNA, 120 bp, Artificial Sequence
  ENSG00000086189_30 (sequence is synthesized)
caaaaccacaaatgcttgttgagatgaacacaaagaaccgcagattcaacaactttgcaatactacctgttttaaaaagagttgtattttgaaacaaaaatttaatactgaaaggtcttg

SEQ ID NO: 88264 - DNA, 120 bp, Artificial Sequence
  ENSG00000086189_31 (sequence is synthesized)
agagaaaggaaggagaattatctttaaaagccagaagaataatgtgcttttaatttttataaagataaaactgctagggaggatttagcacagttttaaggtatatcatgacagtcaata

SEQ ID NO: 88265 - DNA, 120 bp, Artificial Sequence
  ENSG00000086189_32 (sequence is synthesized)
tagaagtgaactacactatcatttcccatctttctttaagaaacaaatagcagaattatactttcaaaagactatcagagttggtagttattattcctaagaaacagctattatgccttt

SEQ ID NO: 88266 - DNA, 120 bp, Artificial Sequence
  ENSG00000086189_33 (sequence is synthesized)
gtcaaagtcatatgtcttcattcaacaaacaccaagcaaatggttttgatctatatctcctgagaaacttagtctcaggaaaaatactaattaggtgagaaatttctaagaccttatcca

SEQ ID NO: 88267 - DNA, 120 bp, Artificial Sequence
  ENSG00000086189_34 (sequence is synthesized)
acgatggtcataattgtgaattagacaacctcaatccttgaaaatatgtatgtatatatatgaatatgatggcagaaaaagcaaattaatcaattcttaaactcttcaaagcctaccaat

SEQ ID NO: 88268 - DNA, 120 bp, Artificial Sequence
  ENSG00000086189_35 (sequence is synthesized)
ttcaaactagaacacacacacatctacaactcccgctctctcccagtgtcctgcactctgaattttcatcactaacctttacaattttgtttactttggctgaggatgctggaggtggag

SEQ ID NO: 88269 - DNA, 120 bp, Artificial Sequence
  ENSG00000086189_36 (sequence is synthesized)
gtgtttctggactgggttcaatttcttcatcaggaacaaggtcagggttaagtgaaaagatgctctccaggtcaatctgttcacaacacatacacatagtcttttgagagtatattttga

SEQ ID NO: 88270 - DNA, 120 bp, Artificial Sequence
  ENSG00000086189_37 (sequence is synthesized)
tgagagtatattttgacaattaaccttttacttttcaagtaaattgatgaagtaaataactcttaaattactttagcctaatgaatacagtaactcggctgggtgcagtggctcatgcct

SEQ ID NO: 88271 - DNA, 120 bp, Artificial Sequence
  ENSG00000086189_38 (sequence is synthesized)
aaaaacaaaaaaaaaagaatacagtgccttagccttacaaatgagatttagaattataatccacaaatttaaagaatctctcttaaaatatcattttatagtcttgactctatgaattgc

SEQ ID NO: 88272 - DNA, 120 bp, Artificial Sequence
  ENSG00000086189_39 (sequence is synthesized)
taacaacacagtgaccaatagaaccacataattaaatattatagcacattttcaaactgtgtgagctagacttaaagaatagtatattttatcaaataattaagactgatatgtgcaatc

SEQ ID NO: 88273 - DNA, 120 bp, Artificial Sequence
  ENSG00000086189_40 (sequence is synthesized)
acataagagatacaggaggaatctacctttaagtgaaaatttttaatcatttgaaagttttcaaggaataataaaaatatatgcactaaataaaataacattatgtacttttctgttttg

SEQ ID NO: 88274 - DNA, 120 bp, Artificial Sequence
  ENSG00000086189_41 (sequence is synthesized)
tccaccctgtcctctaactactgacagttgtttttagccataacaagaatcagattcagcagttacaggttcctcaaagctgtagatatgtgtagcttgcacaacttaaaataattgtgt

SEQ ID NO: 88275 - DNA, 120 bp, Artificial Sequence
  ENSG00000086189_42 (sequence is synthesized)
agtttactgtcctctgaattgtgaccacgtcttgtttcttgctcacatagcagttacaaatatagttattactttctttgtatagaaattgaaataaagttcatatggctcaatagcaga

SEQ ID NO: 88276 - DNA, 120 bp, Artificial Sequence
  ENSG00000086189_43 (sequence is synthesized)
cctctttgagaaaaatgaggtggttaaggtcaaatctgtaggaagaaaatgcattattttgaaaggagtaacaattgctttaaaatttaatttacagttgtaattatttgtgaagtctga

SEQ ID NO: 88277 - DNA, 120 bp, Artificial Sequence
  ENSG00000086189_44 (sequence is synthesized)
aactaataactatttcagaattttaaagaagaaaatggctaatatagacaggattactaattcaaggtattccaagtttttgttaataaagatcagccacttttaattagagatccaagt

SEQ ID NO: 88278 - DNA, 120 bp, Artificial Sequence
  ENSG00000086189_45 (sequence is synthesized)
aacagatatattaaaggtgactattttatgacttactgaactaaaaaaaagagtcaaggtgacctcattaaagatatgtcgttcatttattctgaatcttatattgatagataataccag

SEQ ID NO: 88279 - DNA, 120 bp, Artificial Sequence
  ENSG00000086189_46 (sequence is synthesized)
atttaagtaagtattacactaatttctaatgtataaagggccagtgctccagatactatgctagaatttggtccttttcctgagcagctaccctaaagcataaagattatgggtccagac

SEQ ID NO: 88280 - DNA, 120 bp, Artificial Sequence
  ENSG00000086200_0 (sequence is synthesized)
tttggagctgcgacgccaaacatggcgtgttcctagaagccgctttcggcatcagtaggcggcggcgtggggtctggcagcgtggggagagggaccaaccgacgccacttcgtgttggga

SEQ ID NO: 88281 - DNA, 120 bp, Artificial Sequence
  ENSG00000086200_1 (sequence is synthesized)
agtgggagcgggagggccgggcaattcccgaccgaaccaaacggtttccatggatctcaatagtgccagcactgttgttcttcaggtgttaacacaggccaccagtcaggatactgctgt

SEQ ID NO: 88282 - DNA, 120 bp, Artificial Sequence
  ENSG00000086200_2 (sequence is synthesized)
gttaaaaccagctgaggagcagttgaagcagtgggagacacagccaggtttctattcagtgttgctgaatattttcaccaaccacactttggatataaatgtaaggtggcttgctgtact

SEQ ID NO: 88283 - DNA, 120 bp, Artificial Sequence
  ENSG00000086200_3 (sequence is synthesized)
gtattttaaacatggaattgatcgctactggagacgtgtagcacctcatgctctctcagaggaggagaaaactactctgcgtgcagggctcatcaccaacttcaatgaaccaataaacca

SEQ ID NO: 88284 - DNA, 120 bp, Artificial Sequence
  ENSG00000086200_4 (sequence is synthesized)
gattgcaactcagattgcagtgctcattgcaaaagttgctagattggattgtcccagacagtggcctgaactaattcccactcttatagagtctgttaaagtccaggatgatcttcgaca

SEQ ID NO: 88285 - DNA, 120 bp, Artificial Sequence
  ENSG00000086200_5 (sequence is synthesized)
gcacagagcattacttaccttctatcatgttaccaagacactggcatctaaacgacttgctgctgatagaaaactattttatgatttagcttctggaatttataattttgcctgctctct

SEQ ID NO: 88286 - DNA, 120 bp, Artificial Sequence
  ENSG00000086200_6 (sequence is synthesized)
gtggaatcaccacacagacacattcctgcaagaagtttcttctggcaatgaagctgcaattttgagttcactagaacgaacactgctatcattgaaagtgctgcgtaagttaactgttaa

SEQ ID NO: 88287 - DNA, 120 bp, Artificial Sequence
  ENSG00000086200_7 (sequence is synthesized)
tggatttgtggaacctcataagaatatggaggtgatgggttttttacatggaatatttgaacgtctaaaacagtttctggaatgcagtagaagtataggtacagataatgtgtgtagaga

SEQ ID NO: 88288 - DNA, 120 bp, Artificial Sequence
  ENSG00000086200_8 (sequence is synthesized)
tagactggaaaagaccatcattctttttactaaagtgcttttggacttcttggatcagcatcctttttcatttactcctctaattcagagatcactggaattttctgtaagctatgtttt

SEQ ID NO: 88289 - DNA, 120 bp, Artificial Sequence
  ENSG00000086200_9 (sequence is synthesized)
tacagaagttggtgaaggcgttacatttgaacgattcattgtccaatgtatgaatcttattaagatgattgtcaaaaattatgcttataagccatccaaaaattttgaagatagcagccc

SEQ ID NO: 88290 - DNA, 120 bp, Artificial Sequence
  ENSG00000086200_10 (sequence is synthesized)
tgaaactcttgaagcccataagattaagatggcattcttcacatatcctactttgacagagatatgtagaagattagtctctcattatttcctattaactgaagaagaactgacaatgtg

SEQ ID NO: 88291 - DNA, 120 bp, Artificial Sequence
  ENSG00000086200_11 (sequence is synthesized)
ggaagaagacccagaaggctttacagtggaagaaacaggaggagattcttggaaatatagtttgaggccatgcactgaagtattatttatagatatattccatgaatataatcagactct

SEQ ID NO: 88292 - DNA, 120 bp, Artificial Sequence
  ENSG00000086200_12 (sequence is synthesized)
tactcctgtacttctagaaatgatgcaaacacttcaaggacccacaaatgtggaagatatgaatgcactgttaatcaaagatgctgtgtataatgctgttggattagctgcttatgagct

SEQ ID NO: 88293 - DNA, 120 bp, Artificial Sequence
  ENSG00000086200_13 (sequence is synthesized)
ctttgacagtgttgattttgatcagtggtttaaaaaccagcttcttccagaattacaagtcattcacaataggtataagccattgcgacgcagggtgatttggctcatcggtcagtggat

SEQ ID NO: 88294 - DNA, 120 bp, Artificial Sequence
  ENSG00000086200_14 (sequence is synthesized)
ttctgtgaaattcaagtctgacttaagacccatgctttatgaagcaatctgtaacttgcttcaagatcaagatttagtggtccgtattgaaacagctacaactttgaagttaactgttga

SEQ ID NO: 88295 - DNA, 120 bp, Artificial Sequence
  ENSG00000086200_15 (sequence is synthesized)
tgattttgaatttagaacagatcagtttctaccgtatttggaaaccatgttcacactactttttcagttactgcagcaagttacagaatgtgacacaaagatgcatgttttgcatgtcct

SEQ ID NO: 88296 - DNA, 120 bp, Artificial Sequence
  ENSG00000086200_16 (sequence is synthesized)
ttcttgtgtgatcgaaagagtcaacatgcagatacgaccatatgtgggatgtttggtacaatatttgcccctcctttggaagcagagtgaagaacacaatatgttgagatgtgctatttt

SEQ ID NO: 88297 - DNA, 120 bp, Artificial Sequence
  ENSG00000086200_17 (sequence is synthesized)
gacaacacttattcatcttgttcagggattaggagcagacagcaagaacctgtaccctttcctgctcccagttattcaactgagtacagatgtttcacagcctccacatgtttatcttct

SEQ ID NO: 88298 - DNA, 120 bp, Artificial Sequence
  ENSG00000086200_18 (sequence is synthesized)
aaacagtccatgtattacaccagagttgcttcgtatatttcagaatatgtcaccacttcttgaactaagttcagaaaatcttagaacttgctttaagatcatcaatggttatatcttttt

SEQ ID NO: 88299 - DNA, 120 bp, Artificial Sequence
  ENSG00000086200_19 (sequence is synthesized)
atcatcaacagaatttttacagacatacgcagtaggtctatgccagtccttttgtgaacttttaaaggaaattactacagaaggtcaagttcaggtgctcaaggttgtggaaaatgccct

SEQ ID NO: 88300 - DNA, 120 bp, Artificial Sequence
  ENSG00000086200_20 (sequence is synthesized)
taaagtgaacccaatactaggtccacaaatgtttcaaccgattttaccctatgttttcaagggtattatagaaggggagaggtatcctgtagtgatgtccacgtatcttggagttatggg

SEQ ID NO: 88301 - DNA, 120 bp, Artificial Sequence
  ENSG00000086200_21 (sequence is synthesized)
tcgagttctactacaaaacactagttttttttcttcactacttaatgagatggcccataaatttaatcaggagatggaccagcttttgggaaatatgattgaaatgtgggttgatcgaat

SEQ ID NO: 88302 - DNA, 120 bp, Artificial Sequence
  ENSG00000086200_22 (sequence is synthesized)
ggacaacattacccagcctgaaagaagaaaactttcagctttggctttgctctctcttctgccatctgataatagtgttatccaagataaattctgtgggattataaacatttcagtaga

SEQ ID NO: 88303 - DNA, 120 bp, Artificial Sequence
  ENSG00000086200_23 (sequence is synthesized)
aggcctgcatgatgtcatgacggaagatcctgaaacaggaacttataaagactgtatgttgatgtctcatcttgaggaaccaaaagtaacagaagatgaagaaccacccacagaacaaga

SEQ ID NO: 88304 - DNA, 120 bp, Artificial Sequence
  ENSG00000086200_24 (sequence is synthesized)
taagaggaaaaagatgctggccctgaaggaccctgttcatacagtgtcactgcagcagttcatctacgagaagctcaaggcacagcaggagatgctaggagaacaaggtttccagtccct

SEQ ID NO: 88305 - DNA, 120 bp, Artificial Sequence
  ENSG00000086200_25 (sequence is synthesized)
catggaaacagtggatacggagattgtcacccagctacaggagtttttgcaaggattctaagagcacatgacatgtggctgcctcccctttcagaaacaagctgagtaacccagcctgcc

SEQ ID NO: 88306 - DNA, 120 bp, Artificial Sequence
  ENSG00000086200_26 (sequence is synthesized)
gtttgtatgtgagagcctgctgagatgaagaaatcacttcatgaaaataagcaaagaccacacattttttactacaaaatgtaaaggataaatgtaaatcctgcataactaaaatcacaa

SEQ ID NO: 88307 - DNA, 120 bp, Artificial Sequence
  ENSG00000086200_27 (sequence is synthesized)
acctattcctcaaaagaatttaattttatatttatgagggggcccttcactaaaaagtacatgtaaaagtacatttgatgacaatagctgcttagtttcctgttaagagaagaaacttta

SEQ ID NO: 88308 - DNA, 120 bp, Artificial Sequence
  ENSG00000086200_28 (sequence is synthesized)
tcttttaattatgtgctcttaatatttgaagatgagagttaatacctgagatgtttttctgcaaccaaaattcattaaatttggctgccttatcctttttttaagctaatgaaactacag

SEQ ID NO: 88309 - DNA, 120 bp, Artificial Sequence
  ENSG00000086200_29 (sequence is synthesized)
gtttgaaaaatgacaaagctgttcagatgatgctattaaagaaatgtgtgtactaagcaaaaatatataaatagtgacaaatacacattaccaagcttatcttgcaagggagttattttc

SEQ ID NO: 88310 - DNA, 120 bp, Artificial Sequence
  ENSG00000086200_30 (sequence is synthesized)
atctaacatagaaagtgtgttttatcagacaaatgcttttattttcattctaataatttgatacagaaattagtaaaggcatttttttctttttttttccagtaaatacattgggtctat

SEQ ID NO: 88311 - DNA, 120 bp, Artificial Sequence
  ENSG00000086200_31 (sequence is synthesized)
aaatgtgcatttgtaagggccacaaaagtgaacgtgtggtactgtagtaccacgtgggagacctctggttatggtttagtcctagttcctttgttactcctgtgagcaccgagaagaact

SEQ ID NO: 88312 - DNA, 120 bp, Artificial Sequence
  ENSG00000086200_32 (sequence is synthesized)
gggcgactcccagtcccacctgtgctgtgacagtcccacgtggctatgacagactgtttagtacttacccttctcaggttcctcagtgcaggggtgcatcagggcctcaataataggggt

SEQ ID NO: 88313 - DNA, 120 bp, Artificial Sequence
  ENSG00000086200_33 (sequence is synthesized)
atacctgggaggatccagcagtaatccccagggtactaggattactagtactctgatggaactagtcttccttccttattcctcgaacatgcagtacataaaaaggggaaaaggagaaaa

SEQ ID NO: 88314 - DNA, 120 bp, Artificial Sequence
  ENSG00000086200_34 (sequence is synthesized)
aaaaagccttactttgttttacttgccatttattgtaaggaaactttaaagcattttttaggaaatactcaaaagcaaggttggaaaatgttttatctttctatagaaagttgggtacag

SEQ ID NO: 88315 - DNA, 120 bp, Artificial Sequence
  ENSG00000086200_35 (sequence is synthesized)
tatgtaactgcgggaaacccactgcccctttgtaagctgtggaacccaaactgtatggggatatttgatgttttcagaaagaggaagaaaatatggtccaaattaaattttccaaagata

SEQ ID NO: 88316 - DNA, 120 bp, Artificial Sequence
  ENSG00000086200_36 (sequence is synthesized)
agtttgaggttgcaacttgtcctctcctctgagggtagcagcaaattagtctagcaaattagagaacagtgaacagtagtcatccaattgaataaagaataatctaagtacaagttgaca

SEQ ID NO: 88317 - DNA, 120 bp, Artificial Sequence
  ENSG00000086200_37 (sequence is synthesized)
gttttgaaaaatgcatgttttttttaattgtaccagattggcagtgatttattaaatgatactactaaaatcactcatgggctacatacatgttttgaataagtctgcttagctgtcagg

SEQ ID NO: 88318 - DNA, 120 bp, Artificial Sequence
  ENSG00000086200_38 (sequence is synthesized)
gaggactgcagtctggagttggagcccttgtcccaaccagggctggataagaaggtgttggtgtggtgctctcggtgttgcgaaggctgtttaagttatatgatgaggtttccatggatc

SEQ ID NO: 88319 - DNA, 120 bp, Artificial Sequence
  ENSG00000086200_39 (sequence is synthesized)
acgactgtttctgccttgcatccaagggtccttaagccgttgtcttcattgattcatcttcaggcaaattctaatccttgggaatgtaactgcaaacttttgggccttcgagactggcta

SEQ ID NO: 88320 - DNA, 120 bp, Artificial Sequence
  ENSG00000086200_40 (sequence is synthesized)
gcatcttcagccattactctaaacatctattgtcagaatcccccatccatgcgtggcagagcattacgttatattaacattacaaattgtgttacatcttcaataaatgtatccagagct

SEQ ID NO: 88321 - DNA, 120 bp, Artificial Sequence
  ENSG00000086200_41 (sequence is synthesized)
agcttcctgtatccatggcaacctctgttttacacattgactgtaaaggaaccaatgtgaagagtggtgtttcctgagcaaacggtgacttaaaaaaaaaaaaaaaaaagtggtggggtg

SEQ ID NO: 88322 - DNA, 120 bp, Artificial Sequence
  ENSG00000086200_42 (sequence is synthesized)
gaggtcagcagtgccacagaacaaactggagttaagaaatgtcgttcttcagatttaaaaagaaaacctttactgaatcagctgagtgttaataatacgaatttccttttcttgccttgc

SEQ ID NO: 88323 - DNA, 120 bp, Artificial Sequence
  ENSG00000086200_43 (sequence is synthesized)
taaccacaaatggcagtcctctggaaaatactgagactgagaacattactttctgggaacgaattcctacttcacctgctggtagattttttcaagagaatgcctttggtaatccattag

SEQ ID NO: 88324 - DNA, 120 bp, Artificial Sequence
  ENSG00000086200_44 (sequence is synthesized)
agactacagcagtgttacctgtgcaaatacaacttactacttctgttaccttgaacttggaaaaaaacagtgctctaccgaatgatgctgcttcaatgtcagggaaaacatctctaattt

SEQ ID NO: 88325 - DNA, 120 bp, Artificial Sequence
  ENSG00000086200_45 (sequence is synthesized)
gtacacaagaagttgagaagttgaatgaggcttttgacattttgctagcttttttcatcttagcttgtgttttaatcatttttttgatctacaaagttgttcagtttaaacaaaaactaa

SEQ ID NO: 88326 - DNA, 120 bp, Artificial Sequence
  ENSG00000086200_46 (sequence is synthesized)
aggcatcagaaaactcaagggaaaatagacttgaatactacagcttttatcagtcagcaaggtataatgtaactgcctcaatttgtaacacttccccaaattctctagaaagtcctggct

SEQ ID NO: 88327 - DNA, 120 bp, Artificial Sequence
  ENSG00000086200_47 (sequence is synthesized)
tggagcagattcgacttcataaacaaattgttcctgaaaatgaggcacaggtcattctttttgaacattctgctttataactcaactaaatattgtctataagaaacttcagtgccatgg

SEQ ID NO: 88328 - DNA, 120 bp, Artificial Sequence
  ENSG00000086200_48 (sequence is synthesized)
tgccatggacatgatttaaactgaaacctccttatataattatatactttagttggaaatataatgaattatatgaggttagcattattaaaatatgtttttaataatttgtgaacagtg

SEQ ID NO: 88329 - DNA, 120 bp, Artificial Sequence
  ENSG00000086200_49 (sequence is synthesized)
ggggcatatatctcctttttttggcagctgtcaatcagtgtaggattatagtagacaaagttaaagggggacatttcaataggaactcagctgcatttcatcttttggaatttgtcatgt

SEQ ID NO: 88330 - DNA, 120 bp, Artificial Sequence
  ENSG00000086200_50 (sequence is synthesized)
aatatggggtcatggtaacttttccaaaaagttactgacttacaatttccagtctgttaaatgagatgtttgggggatattgaggtcctcttactacttaaccaagtgttgagatattat

SEQ ID NO: 88331 - DNA, 120 bp, Artificial Sequence
  ENSG00000086200_51 (sequence is synthesized)
accttagctccaaatgctaatgcgacttacagtcttaacttactgttctactgagtaaattagtagtatgcgttattaagaggttaaaaaaaatgccctgcttctgtggcagctcggtgc

SEQ ID NO: 88332 - DNA, 120 bp, Artificial Sequence
  ENSG00000086200_52 (sequence is synthesized)
ggaggtcagcagtgccacagaacaaactggagttaagaaatgtcgttcttcagatttaaaaagaaaacctttactgaatcagctgagtgttaataatacgaatttccttttcttgtgtta

SEQ ID NO: 88333 - DNA, 120 bp, Artificial Sequence
  ENSG00000086200_53 (sequence is synthesized)
actgccgggaattggagtcacagagggaggaaggccgaaccgcgggagcctacagatcccagaagacaccgcgctaccgaggactgcagtctggagttggagcccttgtcccaaccaggg

SEQ ID NO: 88334 - DNA, 120 bp, Artificial Sequence
  ENSG00000086200_54 (sequence is synthesized)
gcagatattcaaaataaaatgatttataactacccagaaggtacaagtgctatcaggacaagttcctcatagcacagtcatgtcatttggaacacaagctgtatgttgatgtctcatctt

SEQ ID NO: 88335 - DNA, 120 bp, Artificial Sequence
  ENSG00000086200_55 (sequence is synthesized)
tgtttagaaaactttttattgttaaagttcacagtagtgccaatatacaagtaatggaaataatcctttttatttacaaaaaccaatcagagacacatgtttgaaaggctttttattaaa

SEQ ID NO: 88336 - DNA, 120 bp, Artificial Sequence
  ENSG00000086200_56 (sequence is synthesized)
atttacagtaatgcttacctacatttattattaggtggcattcttttgcataatcaatacttttttttttttacagtgctctctcagaggaggagaaaactactctgcgtgcagggctca

SEQ ID NO: 88337 - DNA, 120 bp, Artificial Sequence
  ENSG00000086200_57 (sequence is synthesized)
atagcaccaggtgtgaaactgctgggtcatagaagatacagtcacgagttgcttaaggctgggatacatcctgagaaatgggtcgttaggcaattttgttgttctatgaacatcatatga

SEQ ID NO: 88338 - DNA, 120 bp, Artificial Sequence
  ENSG00000086200_58 (sequence is synthesized)
acaaacctagatggtacagcctattatacacttgggctatgtggtatatagcttattgtatctaggctataagcctgtacagcatgttactgcactgaatactgtaagcagttgtcacaa

SEQ ID NO: 88339 - DNA, 120 bp, Artificial Sequence
  ENSG00000086205_0 (sequence is synthesized)
agtgcactctagaaacactgctgtggtggagaaactggaccccaggtctggagcgaattccagcctgcagggctgataagcgaggcattagtgagattgagagagactttaccccgccgt

SEQ ID NO: 88340 - DNA, 120 bp, Artificial Sequence
  ENSG00000086205_1 (sequence is synthesized)
ggtggttggagggcgcgcagtagagcagcagcacaggcgcgggtcccgggaggccggctctgctcgcgccgagatgtggaatctccttcacgaaaccgactcggctgtggccaccgcgcg

SEQ ID NO: 88341 - DNA, 120 bp, Artificial Sequence
  ENSG00000086205_2 (sequence is synthesized)
ccgcccgcgctggctgtgcgctggggcgctggtgctggcgggtggcttctttctcctcggcttcctcttcgggtggtttataaaatcctccaatgaagctactaacattactccaaagca

SEQ ID NO: 88342 - DNA, 120 bp, Artificial Sequence
  ENSG00000086205_3 (sequence is synthesized)
taatatgaaagcatttttggatgaattgaaagctgagaacatcaagaagttcttatataattttacacagataccacatttagcaggaacagaacaaaactttcagcttgcaaagcaaat

SEQ ID NO: 88343 - DNA, 120 bp, Artificial Sequence
  ENSG00000086205_4 (sequence is synthesized)
tcaatcccagtggaaagaatttggcctggattctgttgagctagcacattatgatgtcctgttgtcctacccaaataagactcatcccaactacatctcaataattaatgaagatggaaa

SEQ ID NO: 88344 - DNA, 120 bp, Artificial Sequence
  ENSG00000086205_5 (sequence is synthesized)
tgagattttcaacacatcattatttgaaccacctcctccaggatatgaaaatgtttcggatattgtaccacctttcagtgctttctctcctcaaggaatgccagagggcgatctagtgta

SEQ ID NO: 88345 - DNA, 120 bp, Artificial Sequence
  ENSG00000086205_6 (sequence is synthesized)
tgttaactatgcacgaactgaagacttctttaaattggaacgggacatgaaaatcaattgctctgggaaaattgtaattgccagatatgggaaagttttcagaggaaataaggttaaaaa

SEQ ID NO: 88346 - DNA, 120 bp, Artificial Sequence
  ENSG00000086205_7 (sequence is synthesized)
tgcccagctggcaggggccaaaggagtcattctctactccgaccctgctgactactttgctcctggggtgaagtcctatccagatggttggaatcttcctggaggtggtgtccagcgtgg

SEQ ID NO: 88347 - DNA, 120 bp, Artificial Sequence
  ENSG00000086205_8 (sequence is synthesized)
aaatatcctaaatctgaatggtgcaggagaccctctcacaccaggttacccagcaaatgaatatgcttataggcgtggaattgcagaggctgttggtcttccaagtattcctgttcatcc

SEQ ID NO: 88348 - DNA, 120 bp, Artificial Sequence
  ENSG00000086205_9 (sequence is synthesized)
aattggatactatgatgcacagaagctcctagaaaaaatgggtggctcagcaccaccagatagcagctggagaggaagtctcaaagtgccctacaatgttggacctggctttactggaaa

SEQ ID NO: 88349 - DNA, 120 bp, Artificial Sequence
  ENSG00000086205_10 (sequence is synthesized)
cttttctacacaaaaagtcaagatgcacatccactctaccaatgaagtgacaagaatttacaatgtgataggtactctcagaggagcagtggaaccagacagatatgtcattctgggagg

SEQ ID NO: 88350 - DNA, 120 bp, Artificial Sequence
  ENSG00000086205_11 (sequence is synthesized)
tcaccgggactcatgggtgtttggtggtattgaccctcagagtggagcagctgttgttcatgaaattgtgaggagctttggaacactgaaaaaggaagggtggagacctagaagaacaat

SEQ ID NO: 88351 - DNA, 120 bp, Artificial Sequence
  ENSG00000086205_12 (sequence is synthesized)
tttgtttgcaagctgggatgcagaagaatttggtcttcttggttctactgagtgggcagaggagaattcaagactccttcaagagcgtggcgtggcttatattaatgctgactcatctat

SEQ ID NO: 88352 - DNA, 120 bp, Artificial Sequence
  ENSG00000086205_13 (sequence is synthesized)
agaaggaaactacactctgagagttgattgtacaccgctgatgtacagcttggtacacaacctaacaaaagagctgaaaagccctgatgaaggctttgaaggcaaatctctttatgaaag

SEQ ID NO: 88353 - DNA, 120 bp, Artificial Sequence
  ENSG00000086205_14 (sequence is synthesized)
ttggactaaaaaaagtccttccccagagttcagtggcatgcccaggataagcaaattgggatctggaaatgattttgaggtgttcttccaacgacttggaattgcttcaggcagagcacg

SEQ ID NO: 88354 - DNA, 120 bp, Artificial Sequence
  ENSG00000086205_15 (sequence is synthesized)
gtatactaaaaattgggaaacaaacaaattcagcggctatccactgtatcacagtgtctatgaaacatatgagttggtggaaaagttttatgatccaatgtttaaatatcacctcactgt

SEQ ID NO: 88355 - DNA, 120 bp, Artificial Sequence
  ENSG00000086205_16 (sequence is synthesized)
ggcccaggttcgaggagggatggtgtttgagctagccaattccatagtgctcccttttgattgtcgagattatgctgtagttttaagaaagtatgctgacaaaatctacagtatttctat

SEQ ID NO: 88356 - DNA, 120 bp, Artificial Sequence
  ENSG00000086205_17 (sequence is synthesized)
tgtatcatttgattcacttttttctgcagtaaagaattttacagaaattgcttccaagttcagtgagagactccaggactttgacaaaagcaacccaatagtattaagaatgatgaatga

SEQ ID NO: 88357 - DNA, 120 bp, Artificial Sequence
  ENSG00000086205_18 (sequence is synthesized)
tcaactcatgtttctggaaagagcatttattgatccattagggttaccagacaggcctttttataggcatgtcatctatgctccaagcagccacaacaagtatgcaggggagtcattccc

SEQ ID NO: 88358 - DNA, 120 bp, Artificial Sequence
  ENSG00000086205_19 (sequence is synthesized)
aggaatttatgatgctctgtttgatattgaaagcaaagtggacccttccaaggcctggggagaagtgaagagacagatttatgttgcagccttcacagtgcaggcagctgcagagacttt

SEQ ID NO: 88359 - DNA, 120 bp, Artificial Sequence
  ENSG00000086205_20 (sequence is synthesized)
gagtgaagtagcctaagaggattctttagagaatccgtattgaatttgtgtggtatgtcactcagaaagaatcgtaatgggtatattgataaattttaaaattggtatatttgaaataaa

SEQ ID NO: 88360 - DNA, 120 bp, Artificial Sequence
  ENSG00000086205_21 (sequence is synthesized)
gttgaatattatatatagttatgtgagtgtttatatatgtgtgtgtttatattgtttatcttctccctatggattaaaactgaatttcataattataagaggttattctgaagtggaaaa

SEQ ID NO: 88361 - DNA, 120 bp, Artificial Sequence
  ENSG00000086205_22 (sequence is synthesized)
atttaactcagtattaaatctaaggagaatggcctaatatagtaaaactctcatctggcattatcagggaatcaagtctaatctattcatgtcacttcacacagaagaaaacatcagtat

SEQ ID NO: 88362 - DNA, 120 bp, Artificial Sequence
  ENSG00000086205_23 (sequence is synthesized)
gtcagagagcacactggggaatatgcacaagattatcccaagccagaggcctcacggcctacctggccagcctgggctgagaggatcactatctcagcacactatttgggaaatggatca

SEQ ID NO: 88363 - DNA, 120 bp, Artificial Sequence
  ENSG00000086205_24 (sequence is synthesized)
ctcagcacactatttgggaaatggatcaaatcacacttttagtaaatgttatcactctatagcataagaaataattattttttatttatataaaaggctatagtataaaatatatgtata

SEQ ID NO: 88364 - DNA, 120 bp, Artificial Sequence
  ENSG00000086205_25 (sequence is synthesized)
tagccatatgaagaaaataacatttctaatatctttggatgccccatgtactaatgacagttatgcttttgcattttcttgaattttatgtttatttatctttcctctgtcattatttat

SEQ ID NO: 88365 - DNA, 120 bp, Artificial Sequence
  ENSG00000086205_26 (sequence is synthesized)
aattttatcacacatggctgtatcctttacatgttttggcattatgtatttttgaactttttgtaaagacaatcataccatgtgtaattttcagggacttgatttttttcattgactttt

SEQ ID NO: 88366 - DNA, 120 bp, Artificial Sequence
  ENSG00000086205_27 (sequence is synthesized)
aagggttcaaatatattatcactgtggctgtagtttgccatattttgctgatatagagcattcattcacatgagggtaggattcagggtccatcaagacagagaaaacatacagtaatgt

SEQ ID NO: 88367 - DNA, 120 bp, Artificial Sequence
  ENSG00000086205_28 (sequence is synthesized)
gaatagggaaagttaatatgaagaattattaattgttacagcattggaacaatgaaatattgtctagtaatatgtaaagagaagtctcaagaatatgtgatgagcagatgtaaggaattg

SEQ ID NO: 88368 - DNA, 120 bp, Artificial Sequence
  ENSG00000086205_29 (sequence is synthesized)
ctcttgtctccatggtgaatttggagcagccaatgaagagtcccctcacattgtggcctcgctcaaagttaagaagtcgctgtagtgttgcccttgaagaatctgcttcaaattgacact

SEQ ID NO: 88369 - DNA, 120 bp, Artificial Sequence
  ENSG00000086205_30 (sequence is synthesized)
tcagaactccccagaaacttgtcttctgggccaatgtgtaaagctgtttatgaagaaatgtcaagccagaggggctctactacaaatttggcaaaggacaatttcaggagaagctcttgg

SEQ ID NO: 88370 - DNA, 120 bp, Artificial Sequence
  ENSG00000086205_31 (sequence is synthesized)
ccgctgggttctcctggccaccatgaacttcaggaagtgggtgccatagcagcagcctgaactacagaatctgggcactggtgtagctctgtatgccctccgtgtcagatgctggagatg

SEQ ID NO: 88371 - DNA, 120 bp, Artificial Sequence
  ENSG00000086205_32 (sequence is synthesized)
tcatttgcattgccagagtttgccaagggtgcacacagaaagcagattgaaaagcaccctcttggaacatctctccaatgccttctactcacaaagtttaacatcattaacacgtgacaa

SEQ ID NO: 88372 - DNA, 120 bp, Artificial Sequence
  ENSG00000086205_33 (sequence is synthesized)
agaagaactatttaatgggcccagatctatttatgaagacaatcaagtgggagtttggagtggataacccaaatttggataactggtgaataataaaatgtatttatttctgctggtgta

SEQ ID NO: 88373 - DNA, 120 bp, Artificial Sequence
  ENSG00000086205_34 (sequence is synthesized)
caaggtctaatgactgcaggatctagctatccattgtttctggccgcctatgcgtgcactgggtgtctggcagagaggctggggtggtttataaaatcctccaatgaagctactaacatt

SEQ ID NO: 88374 - DNA, 120 bp, Artificial Sequence
  ENSG00000086205_35 (sequence is synthesized)
tgtacagcttggtacacaacctaacaaaagaggtactgtaaaatctgaggcaactagcgattggagtcgaccccccagcacaacacagcagccctgcagaaaagtggctagactgtttaa

SEQ ID NO: 88375 - DNA, 120 bp, Artificial Sequence
  ENSG00000086205_36 (sequence is synthesized)
atgtggggtgagcacccctcgagttaggaggagggtagctgggaacggtgcagggctgagttctcgacaagctgctggtaggacagtcactcaggttgagggtagaactgagagaacctg

SEQ ID NO: 88376 - DNA, 120 bp, Artificial Sequence
  ENSG00000086205_37 (sequence is synthesized)
ggacagtcactcaggttgagggtagaactgagagaacctgaaactgggcgtaggaaggttccaagtgctggagccctgcaagacagaggaagttttttttttgcttttgttttgttttgt

SEQ ID NO: 88377 - DNA, 120 bp, Artificial Sequence
  ENSG00000086205_38 (sequence is synthesized)
gtcatttattatttattgctatttcaagtgatccaatattctgtttatgtctataaatgtattttccattttatggatgctcacgtcttataatataaaaatataaataccttgtaaaac

SEQ ID NO: 88378 - DNA, 120 bp, Artificial Sequence
  ENSG00000086205_39 (sequence is synthesized)
ggcgctggtgctggcgggtggcttctttctcctcggcttcctcttcgtaacagaggcaagcttgggaactgtgtgaaccaggtcagcaatctggacaggtctttaccagcgggtcttttg

SEQ ID NO: 88379 - DNA, 120 bp, Artificial Sequence
  ENSG00000086205_40 (sequence is synthesized)
tgaatggtgcaggagaccctctcacaccaggttacccagcaaatggtgaatgatcaatccttgaatatcataggaaacttaacatttgaaagagactttattaaagaatttcctttggta

SEQ ID NO: 88380 - DNA, 120 bp, Artificial Sequence
  ENSG00000086205_41 (sequence is synthesized)
agcaaatgctcactaccactaataagaacatttctaaatctgatgttctgaggatttttagagcttatagtagcaaaaagaaaagggaaattctatccgagatgtcctttgttgtaggcc

SEQ ID NO: 88381 - DNA, 120 bp, Artificial Sequence
  ENSG00000086205_42 (sequence is synthesized)
taatgagaaaaggttgaagataaagttctggtactcatttaagtgtaatattgaaaattgatattaccgaatctggaacaaccaatttaaaataaggaaagaaagacactgtgttttcta

SEQ ID NO: 88382 - DNA, 120 bp, Artificial Sequence
  ENSG00000086232_0 (sequence is synthesized)
gtcggacggcgctagctgcagcatcggagtgtggcagtgctgggctggccggcgggctgggctgcggcccgcgcgcggccggcgatgcaggggggcaactccggggtccgcaagcgcgaa

SEQ ID NO: 88383 - DNA, 120 bp, Artificial Sequence
  ENSG00000086232_1 (sequence is synthesized)
agcgcgaagaggagggcgacggggctggggctgtggctgcgccgccggccatcgactttcccgccgagggcccggaccccgaatatgacgaatctgatgttccagcagaaatccaggtgt

SEQ ID NO: 88384 - DNA, 120 bp, Artificial Sequence
  ENSG00000086232_2 (sequence is synthesized)
taaaagaacccctacaacagccaaccttcccttttgcagttgcaaaccaactcttgctggtttctttgctggagcacttgagccacgtgcatgaaccaaacccacttcgttcaagacagg

SEQ ID NO: 88385 - DNA, 120 bp, Artificial Sequence
  ENSG00000086232_3 (sequence is synthesized)
tgtttaagctactttgccagacgtttatcaaaatggggctgctgtcttctttcacttgtagtgacgagtttagctcattgagactacatcacaacagagctattactcacttaatgaggt

SEQ ID NO: 88386 - DNA, 120 bp, Artificial Sequence
  ENSG00000086232_4 (sequence is synthesized)
ctgctaaagagagagttcgtcaggatccttgtgaggatatttctcgtatccagaaaatcagatcaagggaagtagccttggaagcacaaacttcacgttacttaaatgaatttgaagaac

SEQ ID NO: 88387 - DNA, 120 bp, Artificial Sequence
  ENSG00000086232_5 (sequence is synthesized)
ttgccatcttaggaaaaggtggatacggaagagtatacaaggtcaggaataaattagatggtcagtattatgcaataaaaaaaatcctgattaagggtgcaactaaaacagtttgcatga

SEQ ID NO: 88388 - DNA, 120 bp, Artificial Sequence
  ENSG00000086232_6 (sequence is synthesized)
aggtcctacgggaagtgaaggtgctggcaggtcttcagcaccccaatattgttggctatcacaccgcgtggatagaacatgttcatgtgattcagccacgagcagacagagctgccattg

SEQ ID NO: 88389 - DNA, 120 bp, Artificial Sequence
  ENSG00000086232_7 (sequence is synthesized)
agttgccatctctggaagtgctctccgaccaggaagaggacagagagcaatgtggtgttaaaaatgatgaaagtagcagctcatccattatctttgctgagcccaccccagaaaaagaaa

SEQ ID NO: 88390 - DNA, 120 bp, Artificial Sequence
  ENSG00000086232_8 (sequence is synthesized)
aacgctttggagaatctgacactgaaaatcagaataacaagtcggtgaagtacaccaccaatttagtcataagagaatctggtgaacttgagtcgaccctggagctccaggaaaatggct

SEQ ID NO: 88391 - DNA, 120 bp, Artificial Sequence
  ENSG00000086232_9 (sequence is synthesized)
tggctggtttgtctgccagttcaattgtggaacagcagctgccactcaggcgtaattcccacctagaggagagtttcacatccaccgaagaatcttccgaagaaaatgtcaactttttgg

SEQ ID NO: 88392 - DNA, 120 bp, Artificial Sequence
  ENSG00000086232_10 (sequence is synthesized)
gtcagacagaggcacagtaccacctgatgctgcacatccagatgcagctgtgtgagctctcgctgtgggattggatagtcgagagaaacaagcggggccgggagtatgtggacgagtctg

SEQ ID NO: 88393 - DNA, 120 bp, Artificial Sequence
  ENSG00000086232_11 (sequence is synthesized)
cctgtccttatgttatggccaatgttgcaacaaaaatttttcaagaattggtagaaggtgtgttttacatacataacatgggaattgtgcaccgagatctgaagccaagaaatatttttc

SEQ ID NO: 88394 - DNA, 120 bp, Artificial Sequence
  ENSG00000086232_12 (sequence is synthesized)
ttcatggccctgatcagcaagtaaaaataggagactttggtctggcctgcacagacatcctacagaagaacacagactggaccaacagaaacgggaagagaacaccaacacatacgtcca

SEQ ID NO: 88395 - DNA, 120 bp, Artificial Sequence
  ENSG00000086232_13 (sequence is synthesized)
gagtgggtacttgtctgtacgcttcacccgaacagttggaaggatctgagtatgatgccaagtcagatatgtacagcttgggtgtggtcctgctagagctctttcagccgtttggaacag

SEQ ID NO: 88396 - DNA, 120 bp, Artificial Sequence
  ENSG00000086232_14 (sequence is synthesized)
aaatggagcgagcagaagttctaacaggtttaagaactggtcagttgccggaatccctccgtaaaaggtgtccagtgcaagccaagtatatccagcacttaacgagaaggaactcatcgc

SEQ ID NO: 88397 - DNA, 120 bp, Artificial Sequence
  ENSG00000086232_15 (sequence is synthesized)
agagaccatctgccattcagctgctgcagagtgaacttttccaaaattctggaaatgttaacctcaccctacagatgaagataatagagcaagaaaaagaaattgcagaactaaagaagc

SEQ ID NO: 88398 - DNA, 120 bp, Artificial Sequence
  ENSG00000086232_16 (sequence is synthesized)
agctaaacctcctttctcaagacaaaggggtgagggatgacggaaaggatgggggcgtgggatgaaagtggacttaacttttaaggtagttaactggaatgtaaatttttaatctttatt

SEQ ID NO: 88399 - DNA, 120 bp, Artificial Sequence
  ENSG00000086232_17 (sequence is synthesized)
agggtatagttggtacaatgcttcgttgtatttagtaagcctttacaagacttgttaaagatgtcagagtgccccaagctgccgttccttcccttcctgccccacaagctccttttcctg

SEQ ID NO: 88400 - DNA, 120 bp, Artificial Sequence
  ENSG00000086232_18 (sequence is synthesized)
gaccctctgtctggtcttcctctagaaggtaccgcagaaattgatgtgtgctccctgccctcgtcactgcccaagcccgggcctgcacatactcactggactgttccagttttgacagct

SEQ ID NO: 88401 - DNA, 120 bp, Artificial Sequence
  ENSG00000086232_19 (sequence is synthesized)
gccagtcttcctgcccctttcacactgcagctgaagttcattacctgaaggacgcctcatcatttcattccttggctccaaaccttctgctgcctctaagataaaagctcaacttcttaa

SEQ ID NO: 88402 - DNA, 120 bp, Artificial Sequence
  ENSG00000086232_20 (sequence is synthesized)
cagtgtacagtgtgcaacttccaacctttttatctgttctctccaccttcagtttagcgtcattccaaaaccacacccttgcaaagctttgtactccgcaccccagatgatctccaggca

SEQ ID NO: 88403 - DNA, 120 bp, Artificial Sequence
  ENSG00000086232_21 (sequence is synthesized)
gctcagatctctttcctgcctttgccctgcactgttccccggtacttcctcctttattgtagcactcagctccccagccaatctgtacatccctcagaggcagcgatctgatgaattggt

SEQ ID NO: 88404 - DNA, 120 bp, Artificial Sequence
  ENSG00000086232_22 (sequence is synthesized)
ttttgaatcccagaaagggtctgccatggagttggcagtcatcacggtagatggcgtatgattttgctgaattttaaataaaatgaaaaccataaattacatgatgcttttattgacact

SEQ ID NO: 88405 - DNA, 120 bp, Artificial Sequence
  ENSG00000086232_23 (sequence is synthesized)
tgacaactggcctaaataaaaagactctgactctaatacaagtccccttactgataataggcatgaaagagcaccattcttaaaatctaaaccctttaaaatcagttacggcaattcact

SEQ ID NO: 88406 - DNA, 120 bp, Artificial Sequence
  ENSG00000086232_24 (sequence is synthesized)
taaggagcttgagggccgtgttaaaaggagccaggttttcacaagacctcatccacctctgcacattggctggcactgtcacactgcagcctccgatctgctggagtacagaccacagca

SEQ ID NO: 88407 - DNA, 120 bp, Artificial Sequence
  ENSG00000086232_25 (sequence is synthesized)
ccacgtctgctacggtgagttcattcccagcgagccaagggctcttcccaagagcagagttcatggagcggaaaacagcggctttttctttactgcttccctcttttaactgaaaaatcg

SEQ ID NO: 88408 - DNA, 120 bp, Artificial Sequence
  ENSG00000086232_26 (sequence is synthesized)
caatatctacccagctatctataagggttgcgttgacagcattatgcttctggccaaacagagagaacaagaaacgtgcaatgttcccttcgccttcgatggggcacatcgtctggatgc

SEQ ID NO: 88409 - DNA, 120 bp, Artificial Sequence
  ENSG00000086232_27 (sequence is synthesized)
tgaatttcatctgcgtcttcggcactgaaaagaaaaaacacgccaggtagcatcaccagagcagccctgagggaagtactcgcacagtggggaaggggacagtcaccaaacaccacagac

SEQ ID NO: 88410 - DNA, 120 bp, Artificial Sequence
  ENSG00000086232_28 (sequence is synthesized)
tgatgacatgggaaagggtgttttcaagaagaacatcacattttcagtctgtctctaagatgcttactactgaaaagggtttaagtgcaaactatgttaaaaaagtaaccaaagagtcat

SEQ ID NO: 88411 - DNA, 120 bp, Artificial Sequence
  ENSG00000086232_29 (sequence is synthesized)
tcctggtatttgattatgacacttctgaagctagaagggacctcagaccacctgctccaatccctgctgcctaaggttttgggggctgagggctggaaacccaggagctgcatctcccag

SEQ ID NO: 88412 - DNA, 120 bp, Artificial Sequence
  ENSG00000086232_30 (sequence is synthesized)
gctcttggcctcataatcgccttctgtgagactgagggcaattaagatatgaatgacatgaactcgcttatctccatatcaacataaaccagaagaggcatacatctgtgggatagtcaa

SEQ ID NO: 88413 - DNA, 120 bp, Artificial Sequence
  ENSG00000086232_31 (sequence is synthesized)
tacataacatcctatctttatatggccatatgagaagataacttcagtgtccctatgatggtaagttcttgaatgtgagggcaagatggctgtgatagccatgactccccgctttgcctg

SEQ ID NO: 88414 - DNA, 120 bp, Artificial Sequence
  ENSG00000086232_32 (sequence is synthesized)
gttggacagaacccccttccccaaatgctcacagtcccccccttgagctgtgtctcactcagagaccctaaattttgcagacgaacaagggcatctttgcgttgcttcatctctgctcct

SEQ ID NO: 88415 - DNA, 120 bp, Artificial Sequence
  ENSG00000086232_33 (sequence is synthesized)
cctctagaactatcccacaggctttctagacttagaatatctgacctgatgcaaatcgctatgtggccagtatgccacagaatgtcctaaacccttgctgcctcttatcaaaaccatgtt

SEQ ID NO: 88416 - DNA, 120 bp, Artificial Sequence
  ENSG00000086232_34 (sequence is synthesized)
gcacatctcatcatatagtacagctaacccttgaacagtgggggggttagggacactgacccccgactgctgtgcagtcgaaaatccacataaaacttctgactccttcaaaacttaagc

SEQ ID NO: 88417 - DNA, 120 bp, Artificial Sequence
  ENSG00000086232_35 (sequence is synthesized)
actaatagcctactattcatgggaagccttacccatcacagttgattaacacgttttgtatggtctgtatattatatgctatattcttacaataaacttgagaaaatgttaagaaaataa

SEQ ID NO: 88418 - DNA, 120 bp, Artificial Sequence
  ENSG00000086232_36 (sequence is synthesized)
gctggcaggactcactccccttggggtagcagctgtggcctcagcaggcacaggaggtatctgctggtgttcacaaagaggagcggagggctgggggccaaccccacagcgaaggccggt

SEQ ID NO: 88419 - DNA, 120 bp, Artificial Sequence
  ENSG00000086232_37 (sequence is synthesized)
taacctcaccctacagatgaagataatagagcaagaaaaagaaattgcagaactaaagaagcagctaaacctcctttctcaagacaaaggggcatgaaagagcaccattcttaaaatcta

SEQ ID NO: 88420 - DNA, 120 bp, Artificial Sequence
  ENSG00000086232_38 (sequence is synthesized)
aaaatgtgttaccaaaaaaagttgtactactgtgttttgagctaacatacaccttttgctaacattcccgttcttcagcctagagcttcttaggagctagacttccaacactatctgaaa

SEQ ID NO: 88421 - DNA, 120 bp, Artificial Sequence
  ENSG00000086232_39 (sequence is synthesized)
agctcttagtccggctgacttccctgaacatagtaaggagacatgtctttagctatattttacctctttggctagtttggattgtctaagctcagattaaaagaacctctttattcagtt

SEQ ID NO: 88422 - DNA, 120 bp, Artificial Sequence
  ENSG00000086232_40 (sequence is synthesized)
taaagatttaatagcaaaggtaagataaagatacaaagcaactgttgttctcttaggagctacactgcttcctcatagtaaatgttctttaatgttgacagcgctaactgcaatgtttaa

SEQ ID NO: 88423 - DNA, 120 bp, Artificial Sequence
  ENSG00000086232_41 (sequence is synthesized)
taaaaaatatactttgggtatgacaaaaatatactttaattttaagataattatattttaaagcactgtgaaattctgattataaaacaagtttttaaaagtataaactctaggccaggc

SEQ ID NO: 88424 - DNA, 62 bp, Artificial Sequence
  ENSG00000086232_42 (sequence is synthesized)
cgtacttgttttgacctactaccctaaataattgtgttttcagatattgttttcattattcg

SEQ ID NO: 88425 - DNA, 120 bp, Artificial Sequence
  ENSG00000086288_0 (sequence is synthesized)
ggagtttggggatgaggcagctgaagaacagagtcttgtgatggtggaaccaggacttcgttgttccttcattgtgtgggcagaagaggtggaggattttaggcgccacctggtcttgtc

SEQ ID NO: 88426 - DNA, 120 bp, Artificial Sequence
  ENSG00000086288_1 (sequence is synthesized)
cccactgcccagacaggcagggaatccctcttcttccttttgctgaatcagctggagaagaaagcccagcaggaggcctgctagcctcagcctcgggccctaccagggtcctaggtactg

SEQ ID NO: 88427 - DNA, 120 bp, Artificial Sequence
  ENSG00000086288_2 (sequence is synthesized)
gaatggaacttcgccgaggtcaccgctcaaacggccacaacgagggagccgatttagatcctctgggcctgttccttccttttctttaaacgtcccagtctagcttagaggaggacctgt

SEQ ID NO: 88428 - DNA, 120 bp, Artificial Sequence
  ENSG00000086288_3 (sequence is synthesized)
tttgttagataaatggcaagcaaaaaacgagaagtccagttacagacagtcatcaataatcaaagcctgtgggatgagatgttgcagaacaaaggcttaacagtgattgatgtttaccaa

SEQ ID NO: 88429 - DNA, 120 bp, Artificial Sequence
  ENSG00000086288_4 (sequence is synthesized)
gcctggtgtggaccttgcagagcaatgcaacctttattcagaaaattgaaaaatgaactgaacgaagacgaaattctgcattttgctgtcgcagaagctgacaacattgtgactttgcag

SEQ ID NO: 88430 - DNA, 120 bp, Artificial Sequence
  ENSG00000086288_5 (sequence is synthesized)
ccatttagagataaatgtgaacctgtttttctctttagtgttaatggcaaaattatcgaaaagattcagggtgcaaatgcaccgcttgttaataaaaaagttattaatttgatcgatgag

SEQ ID NO: 88431 - DNA, 120 bp, Artificial Sequence
  ENSG00000086288_6 (sequence is synthesized)
gagagaaaaattgcagcaggtgaaatggctcgacctcagtatcctgaaattccattagtagactcagattcagaagttagtgaagaatcaccatgtgaaagtgttcaggaattatacagt

SEQ ID NO: 88432 - DNA, 120 bp, Artificial Sequence
  ENSG00000086288_7 (sequence is synthesized)
attgctattatcaaaccggatgctgtgattagtaaaaaagttctagaaattaaaagaaaaattaccaaagctggatttattatagaagcagagcataagacagtgctcactgaagaacaa

SEQ ID NO: 88433 - DNA, 120 bp, Artificial Sequence
  ENSG00000086288_8 (sequence is synthesized)
gttgtcaacttctatagtcgaatagcagaccagtgtgacttcgaagagtttgtctcttttatgacaagtggcttaagctatattctagttgtatctcaaggaagtaaacacaatcctccc

SEQ ID NO: 88434 - DNA, 120 bp, Artificial Sequence
  ENSG00000086288_9 (sequence is synthesized)
ccgaacctaacgaacgatctgaggatcaacctgaggtcgaagcccaggttacacctggaatgatgaagaacaaacaagacagtttacaagaatatctggaaagacaacatttagctcagc

SEQ ID NO: 88435 - DNA, 120 bp, Artificial Sequence
  ENSG00000086288_10 (sequence is synthesized)
tctgtgacattgaagaggatgcagctaatgttgctaagttcatggatgctttcttccccgattttaaaaaaatgaaaagcatgaaattagaaaagacattggcattacttcgaccaaatc

SEQ ID NO: 88436 - DNA, 120 bp, Artificial Sequence
  ENSG00000086288_11 (sequence is synthesized)
tctttcatgaaaggaaagatgatgttttgcgtattattaaagatgaagacttcaaaatactggagcaaagacaagtagtattatcggaaaaagaagcacaagcactgtgcaaggaatatg

SEQ ID NO: 88437 - DNA, 120 bp, Artificial Sequence
  ENSG00000086288_12 (sequence is synthesized)
aaaatgaagactattttaataaacttatagaaaacatgaccagtggtccatctctagcccttgttttattgagagacaatggcttgcaatactggaaacaattactgggaccaagaactg

SEQ ID NO: 88438 - DNA, 120 bp, Artificial Sequence
  ENSG00000086288_13 (sequence is synthesized)
ttgaagaagccattgaatattttccagagagtttatgtgcacagtttgcgatggacagtttgccggtcaaccagttgtatggcagcgattcattagaaaccgctgaaagggaaatacagc

SEQ ID NO: 88439 - DNA, 120 bp, Artificial Sequence
  ENSG00000086288_14 (sequence is synthesized)
atttctttcctcttcaaagcactttaggcttgattaaacctcatgcaacaagtgaacaaagagagcagatcctgaagatagttaaggaggctggatttgatctgacacaggtgaagaaaa

SEQ ID NO: 88440 - DNA, 120 bp, Artificial Sequence
  ENSG00000086288_15 (sequence is synthesized)
tgttcctaactcctgagcaaatagagaaaatttatccaaaagtaacaggaaaagacttttataaagatttattggaaatgttatctgtgggtccatctatggtcatgattctgaccaagt

SEQ ID NO: 88441 - DNA, 120 bp, Artificial Sequence
  ENSG00000086288_16 (sequence is synthesized)
ggaatgctgttgcagaatggagacgattgatgggcccaacagacccagaagaagcaaaattactttcccctgactccatccgagcccagtttggaataagtaaattgaaaaacattgtcc

SEQ ID NO: 88442 - DNA, 120 bp, Artificial Sequence
  ENSG00000086288_17 (sequence is synthesized)
atggagcatctaacgcctatgaagcaaaagaggttgttaatagactctttgaggatcctgaggaaaactaaagtatatactgtgaaaactttgagaagataatacatatgttcacgtcaa

SEQ ID NO: 88443 - DNA, 120 bp, Artificial Sequence
  ENSG00000086288_18 (sequence is synthesized)
tatacaaccatttggcacagcttcctgggaggaataataagaaaaacatgctttggaggaaaactcaagatacaaaaatgaatggctatgcataataacaataaaaatgtattccccaaa

SEQ ID NO: 88444 - DNA, 120 bp, Artificial Sequence
  ENSG00000086288_19 (sequence is synthesized)
gaggcagctgaagaacagagtcttgtgatggtggaaccaggacttcgttgttccttcattgtgtgggcagaagaggtggaggattttaggcgccacctggtcttgtccccactgcccagt

SEQ ID NO: 88445 - DNA, 120 bp, Artificial Sequence
  ENSG00000086288_20 (sequence is synthesized)
atgatagtagataaatggcaagcaaaaaacgagaagtccagttacaggcagaagctgacaacattgtgactttgcagccatttagagataaatgtgaacctgtttttctctttagtgtta

SEQ ID NO: 88446 - DNA, 120 bp, Artificial Sequence
  ENSG00000086289_0 (sequence is synthesized)
agtgaaaaccgaagcggcagaaggcagtggcagcaggcagtggcagcaggcagtggcccaggcagaaatagctcccgcgcgattcactggagccttccccgggccctggtcccggctacc

SEQ ID NO: 88447 - DNA, 120 bp, Artificial Sequence
  ENSG00000086289_1 (sequence is synthesized)
gggactcgcgcgtccggatctcaaaagcggcagaggccaccgaagggacaggaagcactttggtccagaccacactcccggcacagtgcggaaagagccggcgggagccactctgatccc

SEQ ID NO: 88448 - DNA, 120 bp, Artificial Sequence
  ENSG00000086289_2 (sequence is synthesized)
ctgatcccggacgcctcagcgcccccttgggcttgggcttgccctcgggccggggaaggctgaccgcgatgccaggacgcgctcccctccgcaccgtcccgggcgccctgggtgcctggc

SEQ ID NO: 88449 - DNA, 120 bp, Artificial Sequence
  ENSG00000086289_3 (sequence is synthesized)
ggcctctgggcctggaccctgtgcggcctgtgcagcctgggggcggtgggagccccgcgcccgtgccaggcgccgcagcagtgggaggggcgccaggttatgtaccagcaaagtagcggg

SEQ ID NO: 88450 - DNA, 120 bp, Artificial Sequence
  ENSG00000086289_4 (sequence is synthesized)
cgcaacagccgcgccctgctctcctacgacgggctcaaccagcgcgtgcgggtgctggacgagaggaaggcgctgatcccctgcaagagattatttgaatatattttgctgtataaggat

SEQ ID NO: 88451 - DNA, 120 bp, Artificial Sequence
  ENSG00000086289_5 (sequence is synthesized)
ggagtgatgtttcagattgaccaagccaccaagcagtgctcaaagatgaccctgacacagccctgggatcctcttgacattcctcaaaactccacctttgaagaccagtactccatcggg

SEQ ID NO: 88452 - DNA, 120 bp, Artificial Sequence
  ENSG00000086289_6 (sequence is synthesized)
gggcctcaggagcagatcaccgtccaggagtggtcggacagaaagtcagctagatcctatgaaacctggattggcatctatacagtcaaggattgctatcctgtccaggaaacctttacc

SEQ ID NO: 88453 - DNA, 120 bp, Artificial Sequence
  ENSG00000086289_7 (sequence is synthesized)
ataaactacagtgtgatattgtctacgcggttttttgacatccagctgggtattaaagacccctcggtgtttacccctccaagcacgtgccagatggcccaactggagaagatgagcgaa

SEQ ID NO: 88454 - DNA, 120 bp, Artificial Sequence
  ENSG00000086289_8 (sequence is synthesized)
gactgctcctggtgagcctgtgcatagggaagcggcagcatcggatgtcagccccctgcggccccagctggagatggatatgagactagtcaagatgtgaatgctaattggagagaaata

SEQ ID NO: 88455 - DNA, 120 bp, Artificial Sequence
  ENSG00000086289_9 (sequence is synthesized)
taattttaggaagatgcacattgatgtggggttttgatgtgtctgattttgactactcaagctctgtttacagaagaaaattgaatggcgagggtgtggccatatgaactgactagatgg

SEQ ID NO: 88456 - DNA, 120 bp, Artificial Sequence
  ENSG00000086289_10 (sequence is synthesized)
gccttggcagcaagtatttattgttgacattattcagaattagtgataataaaaagcagagtgattttggtcaattttattattaattcttaaattccctgcagagaatgccccctttat

SEQ ID NO: 88457 - DNA, 120 bp, Artificial Sequence
  ENSG00000086289_11 (sequence is synthesized)
tgctgcaccagggttggcattgctcccactgagccctactccaccctgtccctgcactcccttggttgccaaaaaaatgataacttaaatcccttccagacttaagaattttatggcatg

SEQ ID NO: 88458 - DNA, 120 bp, Artificial Sequence
  ENSG00000086289_12 (sequence is synthesized)
gcccaattgatataaacatttagaaggaaatgaaaagctaaaataggaagtaattattcctctaaagaaacattttgagcaaggcagtttagagaatcctaatgtctacactggcatagc

SEQ ID NO: 88459 - DNA, 120 bp, Artificial Sequence
  ENSG00000086289_13 (sequence is synthesized)
acgagccatgtaagcttcttttttttctatgcaagagtattgatgtatgtgctgaatcttcacagacttgtcaatacacaggcagtattctaaaatagcactgaacagggagtcaggaga

SEQ ID NO: 88460 - DNA, 120 bp, Artificial Sequence
  ENSG00000086289_14 (sequence is synthesized)
ctattgtctcctaaacccaggactagagttccctcgtactgtcactcctttggtcattaaatgcactgggcttgcccgcactttggccttcctagaacactgcttcataacctctctgtc

SEQ ID NO: 88461 - DNA, 120 bp, Artificial Sequence
  ENSG00000086289_15 (sequence is synthesized)
tgacttctgcatctccttccaggtcagctcattcacaagagttgctcccaagcctggatgagttgcaccttgcatcttgagcatgcatttctcacaataattattaagctgtgtgataat

SEQ ID NO: 88462 - DNA, 120 bp, Artificial Sequence
  ENSG00000086289_16 (sequence is synthesized)
ttctgctttcaggacactcatccattatcttggctgtgagctccttgggtacgggtaccttgtatgtttacttttatatccctagcacaaagcaagtgcctggcacatagtcagtgccct

SEQ ID NO: 88463 - DNA, 120 bp, Artificial Sequence
  ENSG00000086289_17 (sequence is synthesized)
aagtattcgtagagtgaagaatgccagcctctcttgtccctggtttccttatgtgttgaatgtggttgagtttgtccattgctagggagagacttccagtaataaaatttactattctag

SEQ ID NO: 88464 - DNA, 120 bp, Artificial Sequence
  ENSG00000086289_18 (sequence is synthesized)
atgcttctactgttatgttttatctgcccatttatctttcttagttaccaggagaaatgtgtgacacctatattataatgaaaacaatctcattacttatagtttatctatattaaacaa

SEQ ID NO: 88465 - DNA, 120 bp, Artificial Sequence
  ENSG00000086289_19 (sequence is synthesized)
atttaattgcattttaaagcattctttgatactgttgcttttgcaataaatatggataatcttggttataagggagttaaaacaatgctgtaataaataaagtgcttcatgtgatcaaaa

SEQ ID NO: 88466 - DNA, 120 bp, Artificial Sequence
  ENSG00000086289_20 (sequence is synthesized)
cttctcccagagagatctttcgcgaggagggtctcttggggatagcatggtccgggactgggaggggcgctgcgcccaccgagggcggcctgctggcgggggactcagtaacacccagcg

SEQ ID NO: 88467 - DNA, 120 bp, Artificial Sequence
  ENSG00000086289_21 (sequence is synthesized)
tttggaaggcagacatgtggcccatctctgtagccatcactgagaaatctggattttcaaggcagaagctgacaacattgtgactttgcagccatttagagataaatgtgaacctgtttt

SEQ ID NO: 88468 - DNA, 120 bp, Artificial Sequence
  ENSG00000086300_0 (sequence is synthesized)
cgcggggctgcgctcgtgtgcgctcctgggcgctcgccgccgccgctgccgccgcgcgcctttgagtcagcaaactccgcggcccgcaagcccggctcggcccggccctgctctgttctg

SEQ ID NO: 88469 - DNA, 120 bp, Artificial Sequence
  ENSG00000086300_1 (sequence is synthesized)
cggctcggcccggccctgctctgttctgcccggaggagccgcccattgatcgtgtcctgtgctgaagatgtttccggaacaacagaaagaggaatttgtaagtgtctgggttcgagatcc

SEQ ID NO: 88470 - DNA, 120 bp, Artificial Sequence
  ENSG00000086300_2 (sequence is synthesized)
taggattcagaaggaggacttctggcattcttacattgactatgagatatgtattcatactaatagcatgtgttttacaatgaaaacatcctgtgtacgaagaagatatagagaattcgt

SEQ ID NO: 88471 - DNA, 120 bp, Artificial Sequence
  ENSG00000086300_3 (sequence is synthesized)
gtggctgaggcagagactccaaagtaatgcgttgctggtacaactgccagaacttccatctaaaaacctgtttttcaacatgaacaatcgccagcacgtggatcagcgtcgccagggtct

SEQ ID NO: 88472 - DNA, 120 bp, Artificial Sequence
  ENSG00000086300_4 (sequence is synthesized)
ggaagatttcctcagaaaagtcctacagaatgcacttttgctttcagatagcagccttcacctcttcttacagagccatctgaattcagaagacattgaggcgtgtgtttctgggcagac

SEQ ID NO: 88473 - DNA, 120 bp, Artificial Sequence
  ENSG00000086300_5 (sequence is synthesized)
taagtactctgtggaagaagcaattcacaagtttgccttaatgaatagacgtttccctgaagaagatgaagaaggaaaaaaagaaaatgatatagattatgattcagaaagttcatcctc

SEQ ID NO: 88474 - DNA, 120 bp, Artificial Sequence
  ENSG00000086300_6 (sequence is synthesized)
tgggcttggacacagtagtgatgacagcagttcacatggatgtaaagtaaatacagctccgcaggaatcctgaaaaataattctaatgttactatcttaggaatagcaaattatgtccag

SEQ ID NO: 88475 - DNA, 120 bp, Artificial Sequence
  ENSG00000086300_7 (sequence is synthesized)
tcatagagaagaaagcttcataataatacattcttacctaaagctcactgtcatgatgttaggtatttaaattcttaaagatgttgggttgtttattagtggtatttttatgttgtctta

SEQ ID NO: 88476 - DNA, 120 bp, Artificial Sequence
  ENSG00000086300_8 (sequence is synthesized)
ttttaggtaagcttctgtgtaaagctaaaaatcctgtgaatacaatactatcctttacaggcagacattattggtaaacaagatcttgccctccaatgaaatgacttacatgttttaaaa

SEQ ID NO: 88477 - DNA, 120 bp, Artificial Sequence
  ENSG00000086300_9 (sequence is synthesized)
aaccgagttggttttattgaatttaaaaagataggtaactaagtagcatttaaaatcaagatagagcattccttcttgtatcagtggggcagtgttaccataaacacggtgtatatgttg

SEQ ID NO: 88478 - DNA, 120 bp, Artificial Sequence
  ENSG00000086300_10 (sequence is synthesized)
agaccagactgcctctctcagatatgtgcctgatattttgtggatacctcccctgcactggcaaaacactatgcttttgggtgttagactgaaatattttaagagtatttaacctttcca

SEQ ID NO: 88479 - DNA, 120 bp, Artificial Sequence
  ENSG00000086300_11 (sequence is synthesized)
gtattctgtttcacgcttagatggaaatgtatcttatgaatagagacatattaaaataatgtttacatcttagaaaaaacatagatagtgctagtaatattacttataactgtaatatat

SEQ ID NO: 88480 - DNA, 120 bp, Artificial Sequence
  ENSG00000086300_12 (sequence is synthesized)
agattcagaaatacattttcattatccaaaatcagcttcaacaaatggtttctggagacaaataatttgttttcattatcattgtataatcaggttaatgatttattttttgactaaatg

SEQ ID NO: 88481 - DNA, 120 bp, Artificial Sequence
  ENSG00000086300_13 (sequence is synthesized)
tgcaatttcttatcactagataactttcagtatcagtggtggttacttattacttaaatcagaggaaggattttataaagattaataaatttaattttaccaataaatattcccataatt

SEQ ID NO: 88482 - DNA, 120 bp, Artificial Sequence
  ENSG00000086300_14 (sequence is synthesized)
tagaaaaggatgtcgacttgctaatttcagaaataattattcatttttaaaaagccccttttaaagcatctacttgaagattggtataattttcataaaatgtctttttttttagtgtcc

SEQ ID NO: 88483 - DNA, 120 bp, Artificial Sequence
  ENSG00000086300_15 (sequence is synthesized)
caaagatatcttagataaactattttgaagttcagatttcagatgaggcaacattttcttgagataattacccaagtttcatccatgttgaatggtacaaaatatttctgtgaaactaac

SEQ ID NO: 88484 - DNA, 120 bp, Artificial Sequence
  ENSG00000086300_16 (sequence is synthesized)
aggaagatattttcagataactaggataacttgttgctttgttacccagcctaattgaagagtggcagaggctactacaaaaagcaaccttttcattttcactaagagtttaaaagctat

SEQ ID NO: 88485 - DNA, 120 bp, Artificial Sequence
  ENSG00000086300_17 (sequence is synthesized)
tgtattattaaaaagtctttacaatgcttgtttcaaagaaccaacagaaaaaaaagctaagaaaactgagaactaacattaaaaaaattaaatttagaataagaatgatttctttaattt

SEQ ID NO: 88486 - DNA, 120 bp, Artificial Sequence
  ENSG00000086300_18 (sequence is synthesized)
gtcctttttttctttggtctaaaacattattaaatttttgtaaatattttgatttaatgtgtcttagatcctcattattttaatacaggaaaagaaaagatttagtaatttcttaccatg

SEQ ID NO: 88487 - DNA, 120 bp, Artificial Sequence
  ENSG00000086300_19 (sequence is synthesized)
ctaatatgtaaagttcatgccatccaggcatttaagagcgatcctcatcccttcagcaatatgtatttgagttcacactatttctgttttacagcagttttgaaaaacacatactatgcc

SEQ ID NO: 88488 - DNA, 120 bp, Artificial Sequence
  ENSG00000086300_20 (sequence is synthesized)
accaattgtcatattatttttagatgatgtaacatagccatcaaaattaatattatgtaatgcctaatacttagtatgtaaatgtcacgagatcatttttacattaaacgtgaaaaaaaa

SEQ ID NO: 88489 - DNA, 120 bp, Artificial Sequence
  ENSG00000086300_21 (sequence is synthesized)
atagttgaccagcttctgcaggggctcctcagtgagagaatggaggtgaggtcagggactcctgccttgcctctgccatcacttccagtgatgcctattcctaagattgatcgtgtcctg

SEQ ID NO: 88490 - DNA, 120 bp, Artificial Sequence
  ENSG00000086300_22 (sequence is synthesized)
aatggaaggcattggatgtatgaggcattcaagtcttacaagacagcctaagctgccctacaggagcttagcgtctgctagaggaggcctacaggaatttgtaagtgtctgggttcgaga

SEQ ID NO: 88491 - DNA, 120 bp, Artificial Sequence
  ENSG00000086300_23 (sequence is synthesized)
ttaacacctactcatctttactgtgctacaaagattcaaactaagctatgatggaaaattttaaaaaacacacctatcacaatggctaaaataaaaaatagtgataatccccctggaaac

SEQ ID NO: 88492 - DNA, 120 bp, Artificial Sequence
  ENSG00000086300_24 (sequence is synthesized)
actgcttatttccatcatcctggctgtcttcagggctgttatgttcctgggttatgtgcaagatttcagagtactggcataaatataaatatatgtttggtggtttaaatcctatttaga

SEQ ID NO: 88493 - DNA, 120 bp, Artificial Sequence
  ENSG00000086300_25 (sequence is synthesized)
aggacccagggcggaggacacagagggaaaaagaaggatttagctgctttgcttgaggttttgccttttaaaaagcacaaaggttttacttttccttctaatagaccagtaaagaatatt

SEQ ID NO: 88494 - DNA, 120 bp, Artificial Sequence
  ENSG00000086300_26 (sequence is synthesized)
ttctcaaactgtaaacctgctgaagcaaaggggacagctagattttggttttaatactgtgcatttttaggcatttttgcctttgttaagaaataattgttttattttgtagaaaaggat

SEQ ID NO: 88495 - DNA, 80 bp, Artificial Sequence
  ENSG00000086475_0 (sequence is synthesized)
gcacgccgccacccagcagccagggccgcctcttaaagggaggtggccggccttaaaggacccccgcgcgcccagccggc

SEQ ID NO: 88496 - DNA, 120 bp, Artificial Sequence
  ENSG00000086475_1 (sequence is synthesized)
ccgggcccccgccgccgccgccgccgccgggcgcggcatttttattcaggcgacgcttaagggagcccggccgcgcccggtgcattgtgggagcggcccgcggcccgttttcgggaggag

SEQ ID NO: 88497 - DNA, 120 bp, Artificial Sequence
  ENSG00000086475_2 (sequence is synthesized)
gggagcggcccgcggcccgttttcgggaggaggcggagggcgcaaagcgagccggtggatccataaagaacccagccaacccgcagagggaggggaggggctgagctgtgaggagagcgg

SEQ ID NO: 88498 - DNA, 120 bp, Artificial Sequence
  ENSG00000086475_3 (sequence is synthesized)
ggcccaagaaccatgtctacgcgggagtcctttaacccggaaagttacgaattggacaaaagcttccggctaaccagattcactgaactgaagggcacaggctgcaaagtgccccaagat

SEQ ID NO: 88499 - DNA, 120 bp, Artificial Sequence
  ENSG00000086475_4 (sequence is synthesized)
gtcctgcaaaaattgctggaatctttacaggagaaccacttccaagaagatgagcagtttctgggagccgttatgccaaggcttggcattggaatggatacttgtgtcattcctttgagg

SEQ ID NO: 88500 - DNA, 120 bp, Artificial Sequence
  ENSG00000086475_5 (sequence is synthesized)
cacggtgggctttccttggttcaaaccacagattacatttacccgatcgtagacgacccttacatgatgggcaggatagcgtgtgccaatgtcctcagtgacctctatgcaatgggggtc

SEQ ID NO: 88501 - DNA, 120 bp, Artificial Sequence
  ENSG00000086475_6 (sequence is synthesized)
acggaatgtgacaatatgctgatgctccttggagtcagtaataaaatgaccgacagggaaagggataaagtgatgcctctgattatccaaggttttaaagacgcagctgaggaagcagga

SEQ ID NO: 88502 - DNA, 120 bp, Artificial Sequence
  ENSG00000086475_7 (sequence is synthesized)
acatctgtaacaggcggccaaacagtactaaacccctggattgtcctgggaggagtggctaccactgtctgccaacccaatgaatttatcatgccagacaatgcagtgccaggggacgtg

SEQ ID NO: 88503 - DNA, 120 bp, Artificial Sequence
  ENSG00000086475_8 (sequence is synthesized)
ctggtgctgacaaaacccctggggacacaggtggcagtggctgtgcaccagtggctggatatccctgagaaatggaataagattaaactagtggtcacccaagaagatgtagagctggcc

SEQ ID NO: 88504 - DNA, 120 bp, Artificial Sequence
  ENSG00000086475_9 (sequence is synthesized)
taccaggaggcgatgatgaacatggcgaggctcaacaggacagctgcaggactcatgcacacgttcaatgcccacgccgccactgacatcacgggcttcgggattttgggccatgcgcag

SEQ ID NO: 88505 - DNA, 120 bp, Artificial Sequence
  ENSG00000086475_10 (sequence is synthesized)
aacctggccaagcagcagaggaacgaggtgtcgtttgtaattcacaacctcccggtgctggccaagatggctgcggtgagcaaggcctgcggaaacatgttcggcctcatgcacgggacc

SEQ ID NO: 88506 - DNA, 120 bp, Artificial Sequence
  ENSG00000086475_11 (sequence is synthesized)
tgcccggagacttcaggcggccttctgatctgtttaccacgtgagcaagcagctcggttctgtgcagagataaagtcccccaaatatggtgaaggccaccaagcatggattattgggatt

SEQ ID NO: 88507 - DNA, 120 bp, Artificial Sequence
  ENSG00000086475_12 (sequence is synthesized)
gtagagaagggcaaccgcacagccagaatcatagacaaaccccggatcatcgaggtcgcaccacaagtggccactcaaaatgtgaatcccacacccggggccacctcttaatctagacag

SEQ ID NO: 88508 - DNA, 120 bp, Artificial Sequence
  ENSG00000086475_13 (sequence is synthesized)
aatagatctatttcccttatcacttcaattaaagactataaacaacaaaaatctcattgtgtctacacatcggggtgaccttaggtcggtttgtaagtggatacaattaataaaataaaa

SEQ ID NO: 88509 - DNA, 120 bp, Artificial Sequence
  ENSG00000086475_14 (sequence is synthesized)
tccattgcctttttttcctgttacattaactgaagatgcacctaatcttgaggcagcttctgagttgagaattatattgttatccaatactgttgattcattttgaatctttagacactt

SEQ ID NO: 88510 - DNA, 120 bp, Artificial Sequence
  ENSG00000086475_15 (sequence is synthesized)
atctcttgccgcataggctttttaaaggtgctttcacatagcacaggcattacccgtagtcgtgtcaaatagcagttggtgtcttcattttatgtatatttatcatataagtctgatttt

SEQ ID NO: 88511 - DNA, 120 bp, Artificial Sequence
  ENSG00000086475_16 (sequence is synthesized)
tttttttaagcgtcttgaatggttttctggagagacagcattggtaagtggcacatgacggtatcccagtcataagagggttgcatgattcctttgagtgtttgatttgaaaagcctagt

SEQ ID NO: 88512 - DNA, 120 bp, Artificial Sequence
  ENSG00000086475_17 (sequence is synthesized)
cttgtctctcaagagcatctcggacccagaacattctccagtagtgcattcagttcaacacagcaagtgcttcattgcatggaaaacactttgaagacaaaaaagaaatcttatttcttt

SEQ ID NO: 88513 - DNA, 120 bp, Artificial Sequence
  ENSG00000086475_18 (sequence is synthesized)
ttttgtagccttcctgatatttacagtaataccattaactgttttatcgatagcaaaaaaggatactttttgcaatgttattagatgttctatagtgctacaaggaattgccttccgaat

SEQ ID NO: 88514 - DNA, 120 bp, Artificial Sequence
  ENSG00000086475_19 (sequence is synthesized)
ggaggttcatgtataatactcatttacaattcaatatataattacacaaataatttttaaatataatcaatagtaaagactgttctgtggatggtagtgtttaatacattttctattttg

SEQ ID NO: 88515 - DNA, 120 bp, Artificial Sequence
  ENSG00000086475_20 (sequence is synthesized)
tacagtgatttcaggccttttgttttcttaaaatcagcagctgtttggcctaattcttagcattattttgtcctttgcgccagtacttttttgtgcacgctttttgtgatctgtgttaaa

SEQ ID NO: 88516 - DNA, 120 bp, Artificial Sequence
  ENSG00000086475_21 (sequence is synthesized)
aacctgcattgccaacattgcagctcgaacttaaacttgttattcaaataaatatttaattttttaaattgctcttgtataatcagatgccccttttagtattattttagaagcgttggg

SEQ ID NO: 88517 - DNA, 120 bp, Artificial Sequence
  ENSG00000086475_22 (sequence is synthesized)
agggttttgcctaaagtacaatttatcgggaaaaactagattttagttttataaaacttttaagtctttcatgggacctatattttcttgaattaaattttgtagttctagaataaatag

SEQ ID NO: 88518 - DNA, 120 bp, Artificial Sequence
  ENSG00000086475_23 (sequence is synthesized)
gcaatctaaaaaggtgttctctgtgttatgtaaagtggaggcttccttatattttaacctactaagcaatgaggagggattcctgtcattaagcacaagggcgctggatcctcaagtgcc

SEQ ID NO: 88519 - DNA, 120 bp, Artificial Sequence
  ENSG00000086475_24 (sequence is synthesized)
catcttcgtgagagaaaaagcagcacatcctgcccatttctggtgctttctgctcacaggcaccaaagctgcacatgtaaactgacttcttgccaaaggaaatgacccctgggaagttca

SEQ ID NO: 88520 - DNA, 120 bp, Artificial Sequence
  ENSG00000086475_25 (sequence is synthesized)
agctcctggaagaggctttaactcggacgcgccctcctccaggaaccagtgggcagggcagccttcatgcatgtgtaactggacctccagccataagcatggtgtgcagtatggaagagc

SEQ ID NO: 88521 - DNA, 120 bp, Artificial Sequence
  ENSG00000086475_26 (sequence is synthesized)
ctgctacggaactgaaagtgattggacattttataggaattgatagagatgttggtcctcaaaagctacaaaccagtggtctgcaaaataaagtgtgttggaaacctctagtgagataaa

SEQ ID NO: 88522 - DNA, 120 bp, Artificial Sequence
  ENSG00000086475_27 (sequence is synthesized)
cggagctgcttttcagccctaggggcgtgctcaagaatcccccgttactctgatcaaaggacttgctaagtttagaaataaagcgctttacaaatcaaatgcattggaatggatacttgt

SEQ ID NO: 88523 - DNA, 120 bp, Artificial Sequence
  ENSG00000086475_28 (sequence is synthesized)
cgggttccttgctcccctccccggccgcctccgacgcgggcgtcctggagagcgcgccccattgtgcggggccggcggggaggtggatccataaagaacccagccaacccgcagagggag

SEQ ID NO: 88524 - DNA, 120 bp, Artificial Sequence
  ENSG00000086475_29 (sequence is synthesized)
gtgataaagcaaaagatatcaaaagattttgcggaaaagtcaccttagcgaggaccgccgctttctgaaccacagtgcttccaggttgacacatgaagtgcccagaggtgctgttctaat

SEQ ID NO: 88525 - DNA, 120 bp, Artificial Sequence
  ENSG00000086475_30 (sequence is synthesized)
gctgagtcctagaagaacctttgggatttgctgttcaaggtggcacggtgtcatgtgaacctgcaggctggccctcttgccacagttaaaaccacagtccagatgtcagattttacatag

SEQ ID NO: 88526 - DNA, 120 bp, Artificial Sequence
  ENSG00000086475_31 (sequence is synthesized)
atgtctgtgctgacgcagtcccgttatgaaaagatctattttgtcatatgcactgctgtggtgaatataagtggtcttgatgatttcagcccttgtcacattgacttttcgctgtcatgt

SEQ ID NO: 88527 - DNA, 120 bp, Artificial Sequence
  ENSG00000086504_0 (sequence is synthesized)
agatcggcttccggttccggtgggctctgaaccctgaaaggctcgcgatgcctctacacaagtatcccgtgtggctctggaagcggctgcagctgcgggagggcatctgttcccgcctgc

SEQ ID NO: 88528 - DNA, 120 bp, Artificial Sequence
  ENSG00000086504_1 (sequence is synthesized)
ccggccactacctgcgctccctggaggaggagcggacgcccactcccgtgcactataggcctcatggggccaagttcaagatcaaccccaagaacgggcagcgggagcgtgtggaggacg

SEQ ID NO: 88529 - DNA, 120 bp, Artificial Sequence
  ENSG00000086504_2 (sequence is synthesized)
tgcccattcccatctactttccccccgaatcccagcgggggttgtggggcggcgagggctggatcctgggccaaatatatgccaacaacgacaagctctccaagaggctgaagaaagtgt

SEQ ID NO: 88530 - DNA, 120 bp, Artificial Sequence
  ENSG00000086504_3 (sequence is synthesized)
ggaagccacagctgtttgagcgagagttctacagtgagatcctggacaagaagttcacagtgactgtgaccatgcggaccctggacctcatcgatgaggcttatgggctcgacttttaca

SEQ ID NO: 88531 - DNA, 120 bp, Artificial Sequence
  ENSG00000086504_4 (sequence is synthesized)
tcctcaagaccccgaaggaggacctgtgctccaagtttgggatggacctgaagcgagggatgctgctgcggcttgcccggcaggacccccagctgcaccccgaggaccccgagcggcggg

SEQ ID NO: 88532 - DNA, 120 bp, Artificial Sequence
  ENSG00000086504_5 (sequence is synthesized)
cagccatctacgacaagtacaaggaatttgccatcccagaggaggaggcagagtgggtgggcctcacgctggaggaggccattgagaagcagagacttttggaggagaaggaccctgtac

SEQ ID NO: 88533 - DNA, 120 bp, Artificial Sequence
  ENSG00000086504_6 (sequence is synthesized)
ccagtggccagtgaccacacagctcctccatgcctgaccaacaggcccagctttccctgccaggccctttgcactgaggacacagatcccggggagctgtgagggccaccggtgggcagt

SEQ ID NO: 88534 - DNA, 120 bp, Artificial Sequence
  ENSG00000086504_7 (sequence is synthesized)
gggtggatcctggtttcgtgtgctgcccatgcaccttccagcccggggccagcttggcagggatccccaggaggcctgggccgcccagaggctcctctcaggctgggccccgacgtttgc

SEQ ID NO: 88535 - DNA, 120 bp, Artificial Sequence
  ENSG00000086504_8 (sequence is synthesized)
ggcagtgttccttgtgcccgtggggccgggagcgagtaaagtctgggccaggctgtgtgtgtgtatctttgctttgaggactggtgttctctttggggatcctgatcctgtcacccctgc

SEQ ID NO: 88536 - DNA, 120 bp, Artificial Sequence
  ENSG00000086504_9 (sequence is synthesized)
ccttgctgcccctgagacctcggatgagccgtgggcattgactctggctgtgcccgtcccccggtgagctgcagagagcgaggttcaattctgtgttttgtgtttttttttcttttcttt

SEQ ID NO: 88537 - DNA, 78 bp, Artificial Sequence
  ENSG00000086504_10 (sequence is synthesized)
caggctggagtgcagtggcacgatctggactcactacaacctccacctccagagttcaagtgattggctatcatgtat

SEQ ID NO: 88538 - DNA, 120 bp, Artificial Sequence
  ENSG00000086504_11 (sequence is synthesized)
gtccacccaccccagcgttcctgggcccccctctgggagcttcctcttggtcccaggagctgcggtggtgtctgccccctgcactgggctctgtgccctgtgggtgttcaggagactgga

SEQ ID NO: 88539 - DNA, 120 bp, Artificial Sequence
  ENSG00000086504_12 (sequence is synthesized)
ctgtctctgctcctcatgcaaaccttgtgggggaagcaatgaccaggagcagcacctggcccctccctgaggcctgtgagtgtctcggatccgccctggagaagctcgcgatgcctctac

SEQ ID NO: 88540 - DNA, 120 bp, Artificial Sequence
  ENSG00000086504_13 (sequence is synthesized)
tccggcaaaggagcacgctgagtgaagaaccgcagttctggcaaacaggactgataaagtaggggtgaggtggggtgactcaggccgggggagcaaccagaggccgtggggagtcggggt

SEQ ID NO: 88541 - DNA, 120 bp, Artificial Sequence
  ENSG00000086504_14 (sequence is synthesized)
gaggcgagcagagcttcgaggcctgggccgcccagaggctcctctcaggctgggccccgacgtttgcggcagtgttccttgtgcccgtggggccgggagcgagtaaagtctgggccaggc

SEQ ID NO: 88542 - DNA, 120 bp, Artificial Sequence
  ENSG00000086504_15 (sequence is synthesized)
tgcacacagggtctgggatgggccagtcagactcacgggagccccaggtcagcatcacaccggggcacgctgacatctgcacaggagggtcactgggaaagcgtgagtggggccatgccc

SEQ ID NO: 88543 - DNA, 120 bp, Artificial Sequence
  ENSG00000086504_16 (sequence is synthesized)
ctttctggccagcaccagtggggtttcctgccttcaggagaggctgtcgctctgtgggtggctgacttgcccgtggggcctgagcgagcacagccgcccctttccctgcacttggacttg

SEQ ID NO: 88544 - DNA, 120 bp, Artificial Sequence
  ENSG00000086504_17 (sequence is synthesized)
tggggtgctgaggcggccccacccgggccttctctgtcctgtcctgggaccaccagcggctagagaggagccaggtgggttggctggaagggtaggtggggccctgccaccagcacctgg

SEQ ID NO: 88545 - DNA, 120 bp, Artificial Sequence
  ENSG00000086504_18 (sequence is synthesized)
tgagcagagcaggtgggagaggcgagcagagcaggtgggggaggcgagcagagcttcgaggctgcttgtggtggacttcctggcgggactgctgaagcctgtggggagacttgtgtcacc

SEQ ID NO: 88546 - DNA, 120 bp, Artificial Sequence
  ENSG00000086504_19 (sequence is synthesized)
tccaggttggaatgtgacaacctgtaaactgtggggtcgcacatgtttctgaaacacatgcagcaaccatgtgaccagggcgggaacgcccagcttgttggggagcagctgacttctggg

SEQ ID NO: 88547 - DNA, 120 bp, Artificial Sequence
  ENSG00000086504_20 (sequence is synthesized)
tacacagtcaggacccgggtcgggctggggcggcactgggctgggggccggcccagttagctctaggtccccagtctgacagcagtggttctgtgatggagcctccgggggggaggtgag

SEQ ID NO: 88548 - DNA, 120 bp, Artificial Sequence
  ENSG00000086506_0 (sequence is synthesized)
gcagggcgcggcgggttccagcgcggggatggcgctgtccgcggaggaccgggcgctggtgcgcgccctgtggaagaagctgggcagcaacgtcggcgtctacacgacagaggccctgga

SEQ ID NO: 88549 - DNA, 120 bp, Artificial Sequence
  ENSG00000086506_1 (sequence is synthesized)
aaggaccttcctggctttccccgccacgaagacctacttctcccacctggacctgagccccggctcctcacaagtcagagcccacggccagaaggtggcggacgcgctgagcctcgccgt

SEQ ID NO: 88550 - DNA, 120 bp, Artificial Sequence
  ENSG00000086506_2 (sequence is synthesized)
gcacgcgtgccagctgcgagtggacccggccagcttccagctcctgggccactgcctgctggtaaccctcgcccggcactaccccggagacttcagccccgcgctgcaggcgtcgctgga

SEQ ID NO: 88551 - DNA, 120 bp, Artificial Sequence
  ENSG00000086506_3 (sequence is synthesized)
caagttcctgagccacgttatctcggcgctggtttccgagtaccgctgaactgtgggtgggtggccgcgggatccccaggcgaccttccccgtgtttgagtaaagcctctcccaggagca

SEQ ID NO: 88552 - DNA, 120 bp, Artificial Sequence
  ENSG00000086544_0 (sequence is synthesized)
gaagcccgaaccgaaggagcgggcatgaggcgctgcccgtgccgtgggagcctgaacgaggcggaggccggggcgctgcccgcggcggcccgcatgggactggaggcgccgcgaggaggg

SEQ ID NO: 88553 - DNA, 80 bp, Artificial Sequence
  ENSG00000086544_1 (sequence is synthesized)
cggggcggccggaggggggcgggccctgggcccggacagaggggtccagcctccacagcgagcctgagagggccggcctc

SEQ ID NO: 88554 - DNA, 120 bp, Artificial Sequence
  ENSG00000086544_2 (sequence is synthesized)
agggccggcctcgggcctgcgccggggacagagagtccgcaggcagaattctggacagacggacagactgagcccgcggcagctggccttggagtagagaccgagaggcccaagcaaaag

SEQ ID NO: 88555 - DNA, 120 bp, Artificial Sequence
  ENSG00000086544_3 (sequence is synthesized)
acggagccagacaggtccagcctccggacgcatctagaatggagctggtcagagctggagacgacttgtctttggacggagaccgggacagatggcctttggactgatccgcacaggtcc

SEQ ID NO: 88556 - DNA, 120 bp, Artificial Sequence
  ENSG00000086544_4 (sequence is synthesized)
gacctccagtttcagcccgaggaggccagcccctggacacagccaggggttcatgggccctggacagagctggaaacgcatgggtcacagactcagccagagagggtcaagtcctgggct

SEQ ID NO: 88557 - DNA, 120 bp, Artificial Sequence
  ENSG00000086544_5 (sequence is synthesized)
gataacctctggacccaccagaacagttccagcctccagactcacccagaaggagcctgtccctcaaaagagccaagtgctgatggctcctggaaagaattgtatactgatggctccagg

SEQ ID NO: 88558 - DNA, 120 bp, Artificial Sequence
  ENSG00000086544_6 (sequence is synthesized)
acacaacaggatattgaaggtccctggacagagccatatactgatggctcccagaaaaaacaggatactgaagcagccaggaaacagcctggcactggtggtttccaaatacaacaggat

SEQ ID NO: 88559 - DNA, 120 bp, Artificial Sequence
  ENSG00000086544_7 (sequence is synthesized)
actgatggctcctggacacaacctagcactgacggttcccagacagcacctgggacagactgcctcttgggagagcctgaggatggcccattagaggaaccagagcctggagaattgctg

SEQ ID NO: 88560 - DNA, 120 bp, Artificial Sequence
  ENSG00000086544_8 (sequence is synthesized)
actcacctgtactctcacctgaagtgtagccccctgtgccctgtgccccgcctcatcattacccctgagacccctgagcctgaggcccagccagtgggacccccctcccgggttgagggg

SEQ ID NO: 88561 - DNA, 120 bp, Artificial Sequence
  ENSG00000086544_9 (sequence is synthesized)
ggcagcggcggcttctcctctgcctcttctttcgacgagtctgaggatgacgtggtggccgggggcggaggtgccagcgatcccgaggacaggtctgggagcaaaccctggaagaagctg

SEQ ID NO: 88562 - DNA, 120 bp, Artificial Sequence
  ENSG00000086544_10 (sequence is synthesized)
aagacagttctgaagtattcaccctttgtggtctccttccgaaaacactacccttgggtccagctttctggacatgctgggaacttccaggcaggagaggatggtcggattctgaaacgt

SEQ ID NO: 88563 - DNA, 120 bp, Artificial Sequence
  ENSG00000086544_11 (sequence is synthesized)
ttctgtcagtgtgagcagcgcagcctggagcagctgatgaaagacccgctgcgacctttcgtgcctgcctactatggcatggtgctgcaggatggccagaccttcaaccagatggaagac

SEQ ID NO: 88564 - DNA, 120 bp, Artificial Sequence
  ENSG00000086544_12 (sequence is synthesized)
ctcctggctgactttgagggcccctccattatggactgcaagatgggcagcaggacctatctggaagaggagctagtgaaggcacgggaacgtccccgtccccggaaggacatgtatgag

SEQ ID NO: 88565 - DNA, 120 bp, Artificial Sequence
  ENSG00000086544_13 (sequence is synthesized)
aagatggtggctgtggaccctggggcccctacccctgaggagcatgcccagggtgcagtcaccaagccccgctacatgcagtggagggaaaccatgagctccacctctaccctgggcttc

SEQ ID NO: 88566 - DNA, 120 bp, Artificial Sequence
  ENSG00000086544_14 (sequence is synthesized)
agaaggcagatgggacctgtaacaccaacttcaagaagacgcaggcactggagcaggtgacaaaagtgctggaggacttcgtggatggagaccacgtcatcctgcaaaagtacgtggcat

SEQ ID NO: 88567 - DNA, 120 bp, Artificial Sequence
  ENSG00000086544_15 (sequence is synthesized)
gcctagaagaacttcgtgaagctctggagatctcccccttcttcaagacccacgaggtggtaggcagctccctcctcttcgtgcacgaccacaccggcctggccaaggtctggatgatag

SEQ ID NO: 88568 - DNA, 120 bp, Artificial Sequence
  ENSG00000086544_16 (sequence is synthesized)
acttcggcaagacggtggccttgcccgaccaccagacgctcagccacaggctgccctgggctgagggcaaccgtgaggacggctacctctggggcctggacaacatgatctgcctcctgc

SEQ ID NO: 88569 - DNA, 120 bp, Artificial Sequence
  ENSG00000086544_17 (sequence is synthesized)
aggggctggcacagagctgagctgctcagccaccatcaggttaattggatggcgccagtctggctggaggagccctgagatgccatgggaggcctgaggttggccacgggggagctggcc

SEQ ID NO: 88570 - DNA, 120 bp, Artificial Sequence
  ENSG00000086544_18 (sequence is synthesized)
tccagggacgggagagattgtgtcatgtgccacacgagaccaacgtggaaaagtctgaagggccttgggagaccaggtagcacctggccccatcatgatgcaggggttttggggacctgg

SEQ ID NO: 88571 - DNA, 120 bp, Artificial Sequence
  ENSG00000086544_19 (sequence is synthesized)
aaggaaggtgatgaggcagtgagtcagaaaaaccagaacggggtccccggatctgccgggaaggcttctgaggggctgccctgagagcattcagttcacatgtcacagggtatggtgtga

SEQ ID NO: 88572 - DNA, 120 bp, Artificial Sequence
  ENSG00000086544_20 (sequence is synthesized)
cagggtgcctgtggacacatgaatcacttctaacctgcctccctgtcagcctccaggctgccagctggctgaggccagggactgggtcaggctcatctgtggcgcctcagagggtcagca

SEQ ID NO: 88573 - DNA, 120 bp, Artificial Sequence
  ENSG00000086544_21 (sequence is synthesized)
tcattggtgaacagatgcaggcgctgctggaccatctggggagagtgacagtccatgtcttcaccagggagccatttgagtgctgagcgacaagaggctcagagggcatgaccccatggg

SEQ ID NO: 88574 - DNA, 120 bp, Artificial Sequence
  ENSG00000086544_22 (sequence is synthesized)
actggatgcggcctgagggctgataccgctgggcggtatcctgccctgctgtggccctgtgggatcctccgtgttcctcggcggactctgctgacctcctgcagacccaaaccacagcca

SEQ ID NO: 88575 - DNA, 120 bp, Artificial Sequence
  ENSG00000086544_23 (sequence is synthesized)
catcccagcttctgtgccagcactgtgacagtacctcgctcctctgtgcaccagatccggcctcaggacttacacctcctgcctgacccccaggcttctctctcctttctcccagcaaac

SEQ ID NO: 88576 - DNA, 120 bp, Artificial Sequence
  ENSG00000086544_24 (sequence is synthesized)
tgcagtggcagaaaggaggttcagaggctgggaaagtgggcctccccttgcaactcagagctgctgcactcaggagggccccatccaatcccgggcccctgcagggaaaagcgctgggtg

SEQ ID NO: 88577 - DNA, 120 bp, Artificial Sequence
  ENSG00000086544_25 (sequence is synthesized)
tgtgtcagaggcgcagggtgggtggggctgccagccaggaccctggcctgcagcctgatccaaaccaaagactgtagaaccctggggtgtggctaacggcccctccagcacccatagcca

SEQ ID NO: 88578 - DNA, 120 bp, Artificial Sequence
  ENSG00000086544_26 (sequence is synthesized)
ggtcttcctggcccttgaggctgggctggcggacaggcacctacctcttccttaagctgaagctcccacactgtcttccagggctgaggagatgctctccttttctactgaccatcttga

SEQ ID NO: 88579 - DNA, 120 bp, Artificial Sequence
  ENSG00000086544_27 (sequence is synthesized)
tacttatttatacgagaggcagttgctggacggggtagtactgggaagcaggaggcagaatggctctgctgagcctcctacccatgacaacaccccaataaacagaacattcagagccaa

SEQ ID NO: 88580 - DNA, 120 bp, Artificial Sequence
  ENSG00000086548_0 (sequence is synthesized)
acagaaggaggaaggacagcagggccaacagtcacagcagccctgaccagagcattcctggagctcaagctcctctacaaagaggtggacagagaagacagcagagaccatgggaccccc

SEQ ID NO: 88581 - DNA, 120 bp, Artificial Sequence
  ENSG00000086548_1 (sequence is synthesized)
ctcagcccctccctgcagattgcatgtcccctggaaggaggtcctgctcacagcctcacttctaaccttctggaacccacccaccactgccaagctcactattgaatccacgccgttcaa

SEQ ID NO: 88582 - DNA, 120 bp, Artificial Sequence
  ENSG00000086548_2 (sequence is synthesized)
tgtcgcagaggggaaggaggttcttctactcgcccacaacctgccccagaatcgtattggttacagctggtacaaaggcgaaagagtggatggcaacagtctaattgtaggatatgtaat

SEQ ID NO: 88583 - DNA, 120 bp, Artificial Sequence
  ENSG00000086548_3 (sequence is synthesized)
aggaactcaacaagctaccccagggcccgcatacagtggtcgagagacaatataccccaatgcatccctgctgatccagaacgtcacccagaatgacacaggattctataccctacaagt

SEQ ID NO: 88584 - DNA, 120 bp, Artificial Sequence
  ENSG00000086548_4 (sequence is synthesized)
cataaagtcagatcttgtgaatgaagaagcaaccggacagttccatgtatacccggagctgcccaagccctccatctccagcaacaactccaaccccgtggaggacaaggatgctgtggc

SEQ ID NO: 88585 - DNA, 120 bp, Artificial Sequence
  ENSG00000086548_5 (sequence is synthesized)
cttcacctgtgaacctgaggttcagaacacaacctacctgtggtgggtaaatggtcagagcctcccggtcagtcccaggctgcagctgtccaatggcaacatgaccctcactctactcag

SEQ ID NO: 88586 - DNA, 120 bp, Artificial Sequence
  ENSG00000086548_6 (sequence is synthesized)
cgtcaaaaggaacgatgcaggatcctatgaatgtgaaatacagaacccagcgagtgccaaccgcagtgacccagtcaccctgaatgtcctctatggcccagatgtccccaccatttcccc

SEQ ID NO: 88587 - DNA, 120 bp, Artificial Sequence
  ENSG00000086548_7 (sequence is synthesized)
ctcaaaggccaattaccgtccaggggaaaatctgaacctctcctgccacgcagcctctaacccacctgcacagtactcttggtttatcaatgggacgttccagcaatccacacaagagct

SEQ ID NO: 88588 - DNA, 120 bp, Artificial Sequence
  ENSG00000086548_8 (sequence is synthesized)
ctttatccccaacatcactgtgaataatagcggatcctatatgtgccaagcccataactcagccactggcctcaataggaccacagtcacgatgatcacagtctctggaagtgctcctgt

SEQ ID NO: 88589 - DNA, 120 bp, Artificial Sequence
  ENSG00000086548_9 (sequence is synthesized)
cctctcagctgtggccaccgtcggcatcacgattggagtgctggccagggtggctctgatatagcagccctggtgtattttcgatatttcaggaagactggcagattggaccagaccctg

SEQ ID NO: 88590 - DNA, 120 bp, Artificial Sequence
  ENSG00000086548_10 (sequence is synthesized)
cctatatgctggagatggacaactcaatgaaaatttaaagggaaaaccctcaggcctgaggtgtgtgccactcagagacttcacctaactagagacagtcaaactgcaaaccatggtgag

SEQ ID NO: 88591 - DNA, 120 bp, Artificial Sequence
  ENSG00000086548_11 (sequence is synthesized)
aaattgacgacttcacactatggacagcttttcccaagatgtcaaaacaagactcctcatcatgataaggctcttacccccttttaatttgtccttgcttatgcctgcctctttcgcttg

SEQ ID NO: 88592 - DNA, 120 bp, Artificial Sequence
  ENSG00000086548_12 (sequence is synthesized)
gcaggatgatgctgtcattagtatttcacaagaagtagcttcagagggtaacttaacagagtgtcagatctatcttgtcaatcccaacgttttacataaaataagagatcctttagtgca

SEQ ID NO: 88593 - DNA, 120 bp, Artificial Sequence
  ENSG00000086548_13 (sequence is synthesized)
cccagtgactgacattagcagcatctttaacacagccgtgtgttcaaatgtacagtggtccttttcagagttggacttctagactcacctgttctcactccctgttttaattcaacccag

SEQ ID NO: 88594 - DNA, 120 bp, Artificial Sequence
  ENSG00000086548_14 (sequence is synthesized)
ccatgcaatgccaaataatagaattgctccctaccagctgaacagggaggagtctgtgcagtttctgacacttgttgttgaacatggctaaatacaatgggtatcgctgagactaagttg

SEQ ID NO: 88595 - DNA, 120 bp, Artificial Sequence
  ENSG00000086548_15 (sequence is synthesized)
tagaaattaacaaatgtgctgcttggttaaaatggctacactcatctgactcattctttattctattttagttggtttgtatcttgcctaaggtgcgtagtccaactcttggtattaccc

SEQ ID NO: 88596 - DNA, 120 bp, Artificial Sequence
  ENSG00000086548_16 (sequence is synthesized)
tcctaatagtcatactagtagtcatactccctggtgtagtgtattctctaaaagctttaaatgtctgcatgcagccagccatcaaatagtgaatggtctctctttggctggaattacaaa

SEQ ID NO: 88597 - DNA, 120 bp, Artificial Sequence
  ENSG00000086548_17 (sequence is synthesized)
actcagagaaatgtgtcatcaggagaacatcataacccatgaaggataaaagccccaaatggtggtaactgataatagcactaatgctttaagatttggtcacactctcacctaggtgag

SEQ ID NO: 88598 - DNA, 120 bp, Artificial Sequence
  ENSG00000086548_18 (sequence is synthesized)
cgcattgagccagtggtgctaaatgctacatactccaactgaaatgttaaggaagaagatagatccaattaaaaaaaattaaaaccaatttaaaaaaaaaaagaacacaggagattccag

SEQ ID NO: 88599 - DNA, 120 bp, Artificial Sequence
  ENSG00000086548_19 (sequence is synthesized)
tctacttgagttagcataatacagaagtcccctctactttaacttttacaaaaaagtaacctgaactaatctgatgttaaccaatgtatttatttctgtggttctgtttccttgttccaa

SEQ ID NO: 88600 - DNA, 120 bp, Artificial Sequence
  ENSG00000086548_20 (sequence is synthesized)
tttgacaaaacccactgttcttgtattgtattgcccagggggagctatcactgtacttgtagagtggtgctgctttaattcataaatcacaaataaaagccaattagctctataactaaa

SEQ ID NO: 88601 - DNA, 120 bp, Artificial Sequence
  ENSG00000086548_21 (sequence is synthesized)
taatctgttacctaacagcaggaaagcatgatctcacctgttcttgccctcaagtaggaacactgccctgggactatactgcagaccaccaggctgagccatccccagaggtcaggagct

SEQ ID NO: 88602 - DNA, 120 bp, Artificial Sequence
  ENSG00000086548_22 (sequence is synthesized)
tccaaccgggaacctttcatacactcttcaagcaacgtacagctccaccgacagtcacaataaaaattctaatatcttccctcctcctgttgctgatgtccatggtctctagcagcctga

SEQ ID NO: 88603 - DNA, 120 bp, Artificial Sequence
  ENSG00000086570_0 (sequence is synthesized)
ggagttttccaccatgactattgccctgctgggttttgccatattcttgctccattgtgcgacctgtgagaagcctctagaagggattctctcctcctctgcttggcacttcacacactc

SEQ ID NO: 88604 - DNA, 120 bp, Artificial Sequence
  ENSG00000086570_1 (sequence is synthesized)
ccattacaatgccaccatctatgaaaattcttctcccaagacctatgtggagagcttcgagaaaatgggcatctacctcgcggagccacagtgggcagtgaggtaccggatcatctctgg

SEQ ID NO: 88605 - DNA, 120 bp, Artificial Sequence
  ENSG00000086570_2 (sequence is synthesized)
ggatgtggccaatgtatttaaaactgaggagtatgtggtgggcaacttctgcttcctaagaataaggacaaagagcagcaacacagctcttctgaacagagaggtgcgagacagctacac

SEQ ID NO: 88606 - DNA, 120 bp, Artificial Sequence
  ENSG00000086570_3 (sequence is synthesized)
cctcatcatccaagccacagagaagaccttggagttggaagctttgacccgtgtggtggtccacatcctggaccagaatgacctgaagcctctcttctctccaccttcgtacagagtcac

SEQ ID NO: 88607 - DNA, 120 bp, Artificial Sequence
  ENSG00000086570_4 (sequence is synthesized)
catctctgaggacatgcccctgaagagccccatctgcaaggtgactgccacagatgctgatctaggccagaatgctgagttctattatgcctttaacacaaggtcagagatgtttgccat

SEQ ID NO: 88608 - DNA, 120 bp, Artificial Sequence
  ENSG00000086570_5 (sequence is synthesized)
ccatcccaccagcggtgtggtcactgtggctgggaagcttaacgtcacctggcgaggaaagcatgagctccaggtgctagctgtggaccgcatgcggaaaatctctgagggcaatgggtt

SEQ ID NO: 88609 - DNA, 120 bp, Artificial Sequence
  ENSG00000086570_6 (sequence is synthesized)
tggcagcctggctgcacttgtggttcatgtggagcctgccctcaggaagcccccagccattgcttcggtggtggtgactccaccagacagcaatgatggtaccacctatgccactgtact

SEQ ID NO: 88610 - DNA, 120 bp, Artificial Sequence
  ENSG00000086570_7 (sequence is synthesized)
ggtcgatgcaaatagctcaggagctgaagtggagtcagtggaagttgttggtggtgaccctggaaagcacttcaaagccatcaagtcttatgcccggagcaatgagttcagtttggtgtc

SEQ ID NO: 88611 - DNA, 120 bp, Artificial Sequence
  ENSG00000086570_8 (sequence is synthesized)
tgtcaaagacatcaactggatggagtaccttcatgggttcaacctcagcctccaggccaggagtgggagcggcccttatttttattcccagatcaggggctttcacctaccaccttccaa

SEQ ID NO: 88612 - DNA, 120 bp, Artificial Sequence
  ENSG00000086570_9 (sequence is synthesized)
actgtcttccctcaaattcgagaaggctgtttacagagtgcagcttagtgagttttcccctcctggcagccgcgtggtgatggtgagagtcaccccagccttccccaacctgcagtatgt

SEQ ID NO: 88613 - DNA, 120 bp, Artificial Sequence
  ENSG00000086570_10 (sequence is synthesized)
tctaaagccatcttcagagaatgtaggatttaaacttaatgctcgaactgggttgatcaccaccacaaagctcatggacttccacgacagagcccactatcagctacacatcagaacctc

SEQ ID NO: 88614 - DNA, 120 bp, Artificial Sequence
  ENSG00000086570_11 (sequence is synthesized)
accgggccaggcctccaccgtggtggtcattgacattgtggactgcaacaaccatgcccccctcttcaacaggtcttcctatgatggtaccttggatgagaacatccctccaggcaccag

SEQ ID NO: 88615 - DNA, 120 bp, Artificial Sequence
  ENSG00000086570_12 (sequence is synthesized)
tgttttggctgtgactgccactgaccgggatcatggggaaaatggatatgtcacctattccattgctggaccaaaagctttgccattttctattgacccctacctggggatcatctccac

SEQ ID NO: 88616 - DNA, 120 bp, Artificial Sequence
  ENSG00000086570_13 (sequence is synthesized)
ctccaaacccatggactatgaactcatgaaaagaatttataccttccgggtaagagcatcagactggggatccccttttcgccgggagaaggaagtgtccatttttcttcagctcaggaa

SEQ ID NO: 88617 - DNA, 120 bp, Artificial Sequence
  ENSG00000086570_14 (sequence is synthesized)
cttgaatgacaaccagcctatgtttgaagaagtcaactgtacagggtctatccgccaagactggccagtagggaaatcgataatgactatgtcagccatagatgtggatgagcttcagaa

SEQ ID NO: 88618 - DNA, 120 bp, Artificial Sequence
  ENSG00000086570_15 (sequence is synthesized)
cctaaaatacgagattgtatcaggcaatgaactagagtattttgatctaaatcatttctccggagtgatatccctcaaacgcccttttatcaatcttactgctggtcaacccaccagtta

SEQ ID NO: 88619 - DNA, 120 bp, Artificial Sequence
  ENSG00000086570_16 (sequence is synthesized)
ttccctgaagattacagcctcagatggcaaaaactatgcctcacccacaactttgaatattactgtggtgaaggaccctcattttgaagttcctgtaacatgtgataaaacaggggtatt

SEQ ID NO: 88620 - DNA, 120 bp, Artificial Sequence
  ENSG00000086570_17 (sequence is synthesized)
gacacaattcacaaagactatcctccactttattgggcttcagaaccaggagtccagtgatgaggaattcacttctttaagcacatatcagattaatcattacaccccacagtttgagga

SEQ ID NO: 88621 - DNA, 120 bp, Artificial Sequence
  ENSG00000086570_18 (sequence is synthesized)
ccacttcccccaatccattgatgtccttgagagtgtccctatcaacacccccttggcccgcctagcagccactgaccctgatgctggttttaatggcaaactggtctatgtgattgcaga

SEQ ID NO: 88622 - DNA, 120 bp, Artificial Sequence
  ENSG00000086570_19 (sequence is synthesized)
tggcaatgaggagggctgctttgacatagagctggagacagggctgctcactgtagctgctcccttggactatgaagccaccaatttctacatcctcaatgtaacagtatatgacctggg

SEQ ID NO: 88623 - DNA, 120 bp, Artificial Sequence
  ENSG00000086570_20 (sequence is synthesized)
cacaccccagaagtcctcctggaagctgctgacagtgaatgtgaaagactggaatgacaacgcacccagatttcctcccggtgggtaccagttaaccatctcggaggacacagaagttgg

SEQ ID NO: 88624 - DNA, 120 bp, Artificial Sequence
  ENSG00000086570_21 (sequence is synthesized)
aaccacaattgcagagctgacaaccaaagatgctgactcggaagacaatggcagggttcgctacaccctgctaagtcccacagagaagttctccctccaccctctcactggggaactggt

SEQ ID NO: 88625 - DNA, 120 bp, Artificial Sequence
  ENSG00000086570_22 (sequence is synthesized)
tgttacaggacacctggaccgcgaatcagagcctcggtacatactcaaggtggaggccagggatcagcccagcaaaggccaccagctcttctctgtcactgacctgataatcacattgga

SEQ ID NO: 88626 - DNA, 120 bp, Artificial Sequence
  ENSG00000086570_23 (sequence is synthesized)
ggatgtcaacgacaactctccccagtgcatcacagaacacaacaggctgaaggttccagaggacctgccccccgggactgtcttgacatttctggatgcctctgatcctgacctgggccc

SEQ ID NO: 88627 - DNA, 120 bp, Artificial Sequence
  ENSG00000086570_24 (sequence is synthesized)
cgcaggtgaagtgcgatatgttctgatggatggcgcccatgggaccttccgggtggacctgatgacaggggcgctcattctggagagagagctggactttgagaggcgagctgggtacaa

SEQ ID NO: 88628 - DNA, 120 bp, Artificial Sequence
  ENSG00000086570_25 (sequence is synthesized)
tctgagcctgtgggccagtgatggtgggaggcccctagcccgcaggactctctgccatgtggaggtgatcgtcctggatgtgaatgagaatctccaccctccccactttgcctccttcgt

SEQ ID NO: 88629 - DNA, 120 bp, Artificial Sequence
  ENSG00000086570_26 (sequence is synthesized)
gcaccagggccaggtgcaggagaacagcccctcgggaactcaggtgattgtagtggctgcccaggacgatgacagtggcttggatggggagctccagtacttcctgcgtgctggcactgg

SEQ ID NO: 88630 - DNA, 120 bp, Artificial Sequence
  ENSG00000086570_27 (sequence is synthesized)
actcgcagccttcagcatcaaccaagatacaggaatgattcagactctggcacccctggaccgagaatttgcatcttactactggttgacggtattagcagtggacaggggttctgtgcc

SEQ ID NO: 88631 - DNA, 120 bp, Artificial Sequence
  ENSG00000086570_28 (sequence is synthesized)
cctctcttctgtaactgaagtctacatcgaggttacggatgccaatgacaacccaccccagatgtcccaagctgtgttctacccctccatccaggaggatgctcccgtgggcacctctgt

SEQ ID NO: 88632 - DNA, 120 bp, Artificial Sequence
  ENSG00000086570_29 (sequence is synthesized)
gcttcaactggatgcctgggacccagactccagctccaaagggaagctgaccttcaacatcaccagtgggaactacatgggattctttatgattcaccctgttacaggtctcctatctac

SEQ ID NO: 88633 - DNA, 120 bp, Artificial Sequence
  ENSG00000086570_30 (sequence is synthesized)
agcccagcagctggacagagagaacaaggatgaacacatcctggaggtgactgtgctggacaatggggaaccctcactgaagtccacctccagggtggtggtaggcatcttggacgtcaa

SEQ ID NO: 88634 - DNA, 120 bp, Artificial Sequence
  ENSG00000086570_31 (sequence is synthesized)
tgacaatccacctatattctcccacaagctcttcaatgtccgccttccagagaggctgagccctgtgtcccctgggcctgtgtacaggctggtggcttcagacctggatgagggtcttaa

SEQ ID NO: 88635 - DNA, 120 bp, Artificial Sequence
  ENSG00000086570_32 (sequence is synthesized)
tggcagagtcacctacagtatcgaggacagcgatgaggaggccttcagtatcgacctggtcacaggtgtggtttcatccagcagcacttttacagctggagagtacaacatcctaacgat

SEQ ID NO: 88636 - DNA, 120 bp, Artificial Sequence
  ENSG00000086570_33 (sequence is synthesized)
caaggcaacagacagtgggcagccaccactctcagccagtgtccggctacacattgagtggatcccttggccccggccgtcctccatccctctggcctttgatgagacctactacagctt

SEQ ID NO: 88637 - DNA, 120 bp, Artificial Sequence
  ENSG00000086570_34 (sequence is synthesized)
tacggtcatggagacggaccctgtgaaccacatggtgggggtcatcagcgtagagggcagacccggactcttctggttcaacatctcaggtggggataaggacatggactttgacattga

SEQ ID NO: 88638 - DNA, 120 bp, Artificial Sequence
  ENSG00000086570_35 (sequence is synthesized)
gaagaccacaggcagcatcgtcattgccaggcctcttgataccaggagaaggtcgaactataacttgactgttgaggtgacagatgggtcccgcaccattgccacacaggtccacatctt

SEQ ID NO: 88639 - DNA, 120 bp, Artificial Sequence
  ENSG00000086570_36 (sequence is synthesized)
catgattgccaacattaaccaccatcggccccagtttctggaaactcgttatgaagtcagagttccccaggacaccgtgccaggggtagagctcctgcgagtccaggccatagatcaaga

SEQ ID NO: 88640 - DNA, 120 bp, Artificial Sequence
  ENSG00000086570_37 (sequence is synthesized)
caagggcaaaagcctcatctataccatacatggcagccaagacccaggaagtgccagcctcttccagctggacccaagcagtggtgtcctggtaacggtgggaaaattggacctcggctc

SEQ ID NO: 88641 - DNA, 120 bp, Artificial Sequence
  ENSG00000086570_38 (sequence is synthesized)
ggggccctcccagcacacactgacagtcatggtccgagaccaggaaatacctatcaagaggaacttcgtgtgggtgaccattcatgtggaggatggaaacctccacccaccccgcttcac

SEQ ID NO: 88642 - DNA, 120 bp, Artificial Sequence
  ENSG00000086570_39 (sequence is synthesized)
tcagctccattatgaggcaagtgttcctgacaccatagcccccggcacagagctgctgcaggtccgagccatggatgctgaccggggagtcaatgctgaggtccactactccctcctgaa

SEQ ID NO: 88643 - DNA, 120 bp, Artificial Sequence
  ENSG00000086570_40 (sequence is synthesized)
agggaacagcgaaggtttcttcaacatcaatgccctgctaggcatcattactctagctcaaaagcttgatcaggcaaatcatgccccacatactctgacagtgaaggcagaagatcaagg

SEQ ID NO: 88644 - DNA, 120 bp, Artificial Sequence
  ENSG00000086570_41 (sequence is synthesized)
ctccccacaatggcatgacctggctacagtgatcattcatgtctatccctcagataggagtgcccccatcttttcaaaatctgagtactttgtagagatccctgaatcaatccctgttgg

SEQ ID NO: 88645 - DNA, 120 bp, Artificial Sequence
  ENSG00000086570_42 (sequence is synthesized)
ttccccaatcctccttgtctctgctatgagcccctctgaagttacctatgagttaagagagggaaataaggatggagtcttctctatgaactcatattctggccttatttccacccagaa

SEQ ID NO: 88646 - DNA, 120 bp, Artificial Sequence
  ENSG00000086570_43 (sequence is synthesized)
gaaattggaccatgagaaaatctcgtcttaccagctgaaaatccgaggcagcaatatggcaggtgcatttactgatgtcatggtggtggttgacataattgatgaaaatgacaatgctcc

SEQ ID NO: 88647 - DNA, 120 bp, Artificial Sequence
  ENSG00000086570_44 (sequence is synthesized)
tatgttcttaaagtcaacttttgtgggccaaattagtgaagcagctccactgtatagcatgatcatggataaaaacaacaacccctttgtgattcatgcctctgacagtgacaaagaagc

SEQ ID NO: 88648 - DNA, 120 bp, Artificial Sequence
  ENSG00000086570_45 (sequence is synthesized)
taattccttgttggtctataaaattttggagccggaggccttgaagtttttcaaaattgatcccagcatgggaaccctaaccattgtatcagagatggattatgagagcatgccctcttt

SEQ ID NO: 88649 - DNA, 120 bp, Artificial Sequence
  ENSG00000086570_46 (sequence is synthesized)
ccaattctgtgtctatgtccatgaccaaggaagccctgtattatttgcacccagacctgcccaagtcatcattcatgtcagagatgtgaatgattcccctcccagattctcagaacagat

SEQ ID NO: 88650 - DNA, 120 bp, Artificial Sequence
  ENSG00000086570_47 (sequence is synthesized)
atatgaggtagcaatagtcgggcctatccatccaggcatggagcttctcatggtgcgggccagcgatgaagactcagaagtcaattatagcatcaaaactggcaatgctgatgaagctgt

SEQ ID NO: 88651 - DNA, 120 bp, Artificial Sequence
  ENSG00000086570_48 (sequence is synthesized)
taccatccatcctgtcactggtagcatatctgtgctgaatcctgctttcctgggactctctcggaagctcaccatcagggcttctgatggcttgtatcaagacactgcgctggtaaaaat

SEQ ID NO: 88652 - DNA, 120 bp, Artificial Sequence
  ENSG00000086570_49 (sequence is synthesized)
ttctttgacccaagtgcttgacaaaagcttgcagtttgatcaggatgtctactgggcagctgtgaaggagaacttgcaggacagaaaggcactggtgattcttggtgcccagggcaatca

SEQ ID NO: 88653 - DNA, 120 bp, Artificial Sequence
  ENSG00000086570_50 (sequence is synthesized)
tttgaatgacaccctttcctactttctcttgaatggcacagatatgtttcatatggtccagtcagcaggtgtgttgcagacaagaggtgtggcgtttgaccgggagcagcaggacactca

SEQ ID NO: 88654 - DNA, 120 bp, Artificial Sequence
  ENSG00000086570_51 (sequence is synthesized)
tgagttggcagtggaagtgagggacaatcggacacctcagcgggtggctcagggtttggtcagagtctctattgaggatgtcaatgacaatccccccaaatttaagcatctgccctatta

SEQ ID NO: 88655 - DNA, 120 bp, Artificial Sequence
  ENSG00000086570_52 (sequence is synthesized)
cacaatcatccaagatggcacagagccaggggatgtcctctttcaggtatctgccactgatgaggacttggggacaaatggggctgttacatatgaatttgcagaagattacacatattt

SEQ ID NO: 88656 - DNA, 120 bp, Artificial Sequence
  ENSG00000086570_53 (sequence is synthesized)
ccgaattgacccctatcttggggacatatcactcaagaaaccctttgattatcaagctttaaataaatatcacctcaaagtcattgctcgggatggaggaacgccatccctccagagtga

SEQ ID NO: 88657 - DNA, 120 bp, Artificial Sequence
  ENSG00000086570_54 (sequence is synthesized)
ggaagaggtacttgtcactgtgagaaataaatccaacccactgtttcagagtccttattacaaagtcagagtacctgaaaatatcaccctctataccccaattctccacacccaggcccg

SEQ ID NO: 88658 - DNA, 120 bp, Artificial Sequence
  ENSG00000086570_55 (sequence is synthesized)
gagtccagagggactccggctcatctacaacattgtggaggaagaacccttgatgctgttcaccactgacttcaagactggtgtcctaacagtaacagggcctttggactatgagtccaa

SEQ ID NO: 88659 - DNA, 120 bp, Artificial Sequence
  ENSG00000086570_56 (sequence is synthesized)
gaccaaacatgtgttcacagtcagagccacggatacagctctggggtcattttctgaagccacagtggaagtcctagtggaggatgtcaatgataaccctcccactttttcccaattggt

SEQ ID NO: 88660 - DNA, 120 bp, Artificial Sequence
  ENSG00000086570_57 (sequence is synthesized)
ctataccacttccatctcagaaggcttgcctgctcagacccctgtgatccaactgttggcttctgaccaggactcagggcggaaccgtgacgtctcttatcagattgtggaggatggctc

SEQ ID NO: 88661 - DNA, 120 bp, Artificial Sequence
  ENSG00000086570_58 (sequence is synthesized)
agatgtttccaagttcttccagatcaatgggagcacaggggagatgtccacagttcaagaactggattatgaagcccaacaacactttcatgtgaaagtcagggccatggataaaggaga

SEQ ID NO: 88662 - DNA, 120 bp, Artificial Sequence
  ENSG00000086570_59 (sequence is synthesized)
tcccccactcactggtgaaacccttgtggttgtcaatgtgtctgatatcaatgacaaccccccagagttcagacaacctcaatatgaagccaatgtcagtgaactggcaacctgtggaca

SEQ ID NO: 88663 - DNA, 120 bp, Artificial Sequence
  ENSG00000086570_60 (sequence is synthesized)
tccaggctattgaccctgacagcagagacacctcccgcctggagtacctgattctttctggcaatcaggacaggcacttcttcattaacagctcatcgggaataatttctatgttcaacc

SEQ ID NO: 88664 - DNA, 120 bp, Artificial Sequence
  ENSG00000086570_61 (sequence is synthesized)
tttgcaaaaagcacctggactcttcttacaatttgagggtaggtgcttctgatggagtcttccgagcaactgtgcctgtgtacatcaacactacaaatgccaacaagtacagcccagagt

SEQ ID NO: 88665 - DNA, 120 bp, Artificial Sequence
  ENSG00000086570_62 (sequence is synthesized)
tccagcagcacctttatgaggcagaattagcagagaatgcaatggttggaaccaaggtgattgatttgctagccatagacaaagatagtggtccctatggcactatagattatactatca

SEQ ID NO: 88666 - DNA, 120 bp, Artificial Sequence
  ENSG00000086570_63 (sequence is synthesized)
tcaataaactagcaagtgagaagttctccataaaccccaatggccagattgccactctgcagaaactggatcgggaaaattcaacagagagagtcattgctattaaggtcatggctcggg

SEQ ID NO: 88667 - DNA, 120 bp, Artificial Sequence
  ENSG00000086570_64 (sequence is synthesized)
atggaggaggaagagtagccttctgcacggtgaagatcatcctcacagatgaaaatgacaaccccccacagttcaaagcatctgagtacacagtatccattcaatccaatgtcagtaaag

SEQ ID NO: 88668 - DNA, 120 bp, Artificial Sequence
  ENSG00000086570_65 (sequence is synthesized)
actctccggttatccaggtgttggcctatgatgcagatgaaggtcagaacgcagatgtcacctactcagtgaacccagaggacctagttaaagatgtcattgaaattaacccagtcactg

SEQ ID NO: 88669 - DNA, 120 bp, Artificial Sequence
  ENSG00000086570_66 (sequence is synthesized)
gtgtggtcaaggtgaaagacagcctggtgggattggaaaatcagacccttgacttcttcatcaaagcccaagatggaggccctcctcactggaactctctggtgccagtacgacttcagg

SEQ ID NO: 88670 - DNA, 120 bp, Artificial Sequence
  ENSG00000086570_67 (sequence is synthesized)
tggttcctaaaaaagtatccttaccgaaattttctgaacctttgtatactttctctgcacctgaagaccttccagaggggtctgaaattgggattgttaaagcagtggcagctcaagatc

SEQ ID NO: 88671 - DNA, 120 bp, Artificial Sequence
  ENSG00000086570_68 (sequence is synthesized)
cagtcatctacagtctagtgcggggcactacacctgagagcaacaaggatggtgtcttctccctagacccagacacaggggtcataaaggtgaggaagcccatggaccacgaatccacca

SEQ ID NO: 88672 - DNA, 120 bp, Artificial Sequence
  ENSG00000086570_69 (sequence is synthesized)
aattgtaccagattgatgtgatggcacattgccttcagaacactgatgtggtgtccttggtctctgtcaacatccaagtgggagacgtcaatgacaataggcctgtatttgaggctgatc

SEQ ID NO: 88673 - DNA, 120 bp, Artificial Sequence
  ENSG00000086570_70 (sequence is synthesized)
catataaggctgtcctcactgagaatatgccagtggggacctcagtcattcaagtgactgccattgacaaggacactgggagagatggccaggtgagctacaggctgtctgcagaccctg

SEQ ID NO: 88674 - DNA, 120 bp, Artificial Sequence
  ENSG00000086570_71 (sequence is synthesized)
gtagcaatgtccatgagctctttgccattgacagtgagagtggttggatcaccacactccaggaacttgactgtgagacctgccagacttatcattttcatgtggtggcctatgaccacg

SEQ ID NO: 88675 - DNA, 120 bp, Artificial Sequence
  ENSG00000086570_72 (sequence is synthesized)
gacagaccatccagctatcctctcaggccctggttcaggtctccattacagatgagaatgacaatgctccccgatttgcttctgaagagtacagaggatctgtggttgagaacagtgagc

SEQ ID NO: 88676 - DNA, 120 bp, Artificial Sequence
  ENSG00000086570_73 (sequence is synthesized)
ctggcgaactggtggcgactctaaagaccctggatgctgacatttctgagcagaacaggcaggtcacctgctacatcacagagggagaccccctgggccagtttggcatcagccaagttg

SEQ ID NO: 88677 - DNA, 120 bp, Artificial Sequence
  ENSG00000086570_74 (sequence is synthesized)
gagatgagtggaggatttcctcaaggaagaccctggaccgcgagcatacagccaagtacttgctcagagtcacagcatctgatggcaagttccaggcttcggtcactgtggagatctttg

SEQ ID NO: 88678 - DNA, 120 bp, Artificial Sequence
  ENSG00000086570_75 (sequence is synthesized)
tcctggacgtcaatgataacagcccacagtgttcacagcttctctatactggcaaggttcatgaagatgtatttccaggacacttcattttgaaggtttctgccacagacttggacactg

SEQ ID NO: 88679 - DNA, 120 bp, Artificial Sequence
  ENSG00000086570_76 (sequence is synthesized)
ataccaatgctcagatcacatattctctgcatggccctggggcgcatgaattcaagctggatcctcatacaggggagctgaccacactcactgccctagaccgagaaaggaaggatgtgt

SEQ ID NO: 88680 - DNA, 120 bp, Artificial Sequence
  ENSG00000086570_77 (sequence is synthesized)
tcaaccttgttgccaaggcgacggatggaggtggccgatcgtgccaggcagacatcaccctccatgtggaggatgtgaatgacaatgccccgcggttcttccccagccactgtgctgtgg

SEQ ID NO: 88681 - DNA, 120 bp, Artificial Sequence
  ENSG00000086570_78 (sequence is synthesized)
ctgtcttcgacaacaccacagtgaagacccctgtggctgtagtatttgcccgggatcccgaccaaggcgccaatgcccaggtggtttactctctgccggattcagccgaaggccactttt

SEQ ID NO: 88682 - DNA, 120 bp, Artificial Sequence
  ENSG00000086570_79 (sequence is synthesized)
ccatcgacgccaccacgggggtgatccgcctggaaaagccgctgcaggtcaggccccaggcaccactggagctcacggtccgtgcctctgacctgggcaccccaataccgctgtccacgc

SEQ ID NO: 88683 - DNA, 120 bp, Artificial Sequence
  ENSG00000086570_80 (sequence is synthesized)
tgggcaccgtcacagtctcggtggtgggcctagaagactacctgcccgtgttcctgaacaccgagcacagcgtgcaggtgcccgaggacgccccacctggcacggaggtgctgcagctgg

SEQ ID NO: 88684 - DNA, 120 bp, Artificial Sequence
  ENSG00000086570_81 (sequence is synthesized)
ccaccctcactcgcccgggcgcagagaagaccggctaccgcgtggtcagcgggaacgagcaaggcaggttccgcctggatgctcgcacagggatcctgtatgtcaacgcaagcctggact

SEQ ID NO: 88685 - DNA, 120 bp, Artificial Sequence
  ENSG00000086570_82 (sequence is synthesized)
ttgagacaagccccaagtacttcctgtccattgagtgcagccggaagagctcctcttccctcagtgacgtgaccacagtcatggtcaacatcactgatgtcaatgaacaccggccccaat

SEQ ID NO: 88686 - DNA, 120 bp, Artificial Sequence
  ENSG00000086570_83 (sequence is synthesized)
tcccccaagatccatatagcacaagggtcttagagaatgcccttgtgggtgacgtcatcctcacggtatcagcgactgatgaagatggacccctaaatagtgacattacctatagcctca

SEQ ID NO: 88687 - DNA, 120 bp, Artificial Sequence
  ENSG00000086570_84 (sequence is synthesized)
taggagggaaccagcttgggcacttcaccattcaccccaaaaagggggagctacaggtggccaaggccctggaccgggaacaggcctctagttattccctgaagctccgagccacagaca

SEQ ID NO: 88688 - DNA, 120 bp, Artificial Sequence
  ENSG00000086570_85 (sequence is synthesized)
gtgggcagcctccactgcatgaggacacagacatcgctatccaagtggctgatgtcaatgataacccaccgagattcttccagctcaactacagcaccactgtccaggagaactccccca

SEQ ID NO: 88689 - DNA, 120 bp, Artificial Sequence
  ENSG00000086570_86 (sequence is synthesized)
ttggcagcaaagtcctgcagctgatcctgagtgacccagattctccagagaatggccccccctactcgtttcgaatcaccaaggggaacaacggctctgccttccgagtgaccccggatg

SEQ ID NO: 88690 - DNA, 120 bp, Artificial Sequence
  ENSG00000086570_87 (sequence is synthesized)
gatggctggtgactgctgagggcctaagcaggagggctcaggaatggtatcagcttcagatccaggcgtcagacagtggcatccctcccctctcgtctttgacgtctgtccgtgtccatg

SEQ ID NO: 88691 - DNA, 120 bp, Artificial Sequence
  ENSG00000086570_88 (sequence is synthesized)
tcacagagcagagccactatgcaccttctgctctcccactggagatcttcatcactgttggagaggatgagttccagggtggcatggtgggtaagatccatgccacagaccgagaccccc

SEQ ID NO: 88692 - DNA, 120 bp, Artificial Sequence
  ENSG00000086570_89 (sequence is synthesized)
aggacacgctgacctatagcctggcagaagaggagaccctgggcaggcacttctcagtgggtgcgcctgatggcaagattatcgccgcccagggcctgcctcgtggccactactcgttca

SEQ ID NO: 88693 - DNA, 120 bp, Artificial Sequence
  ENSG00000086570_90 (sequence is synthesized)
acgtcacggtcagcgatgggaccttcaccacgactgctggggtccatgtgtacgtgtggcatgtggggcaggaggctctgcagcaggccatgtggatgggcttctaccagctcacccccg

SEQ ID NO: 88694 - DNA, 120 bp, Artificial Sequence
  ENSG00000086570_91 (sequence is synthesized)
aggagctggtgagtgaccactggcggaacctgcagaggttcctcagccataagctggacatcaaacgggctaacattcacttggccagcctccagcctgcagaggccgtggctggtgtgg

SEQ ID NO: 88695 - DNA, 120 bp, Artificial Sequence
  ENSG00000086570_92 (sequence is synthesized)
atgtgctcctggtctttgaggggcattctggaaccttctacgagtttcaggagctagcatccatcatcactcactcagccaaggagatggagcattcagtgggggttcagatgcggtcag

SEQ ID NO: 88696 - DNA, 120 bp, Artificial Sequence
  ENSG00000086570_93 (sequence is synthesized)
ctatgcccatggtgccctgccaggggccaacctgccagggtcaaatctgccataacacagtgcatctggaccccaaggttgggcccacgtacagcaccgccaggctcagcatcctaaccc

SEQ ID NO: 88697 - DNA, 120 bp, Artificial Sequence
  ENSG00000086570_94 (sequence is synthesized)
cgcggcaccacctgcagaggagctgctcctgcaatggtactgctacaaggttcagtggtcagagctatgtgcggtacagggccccagcggctcggaactggcacatccatttctatctga

SEQ ID NO: 88698 - DNA, 120 bp, Artificial Sequence
  ENSG00000086570_95 (sequence is synthesized)
aaacactccagccacaggccattcttctattcaccaatgaaacagcgtccgtctccctgaagctggccagtggagtgccccagctggaataccactgtctgggtggtttctatggaaacc

SEQ ID NO: 88699 - DNA, 120 bp, Artificial Sequence
  ENSG00000086570_96 (sequence is synthesized)
tttcctcccagcgccatgtgaatgaccacgagtggcactccatcctggtggaggagatggacgcttccattcgcctgatggttgacagcatgggcaacacctcccttgtggtcccagaga

SEQ ID NO: 88700 - DNA, 120 bp, Artificial Sequence
  ENSG00000086570_97 (sequence is synthesized)
actgccgtggtctgaggcccgaaaggcacctcttgctgggcggcctcattctgttgcattcttcctcgaatgtctcccagggctttgaaggctgcctggatgctgtcgtggtcaacgaag

SEQ ID NO: 88701 - DNA, 120 bp, Artificial Sequence
  ENSG00000086570_98 (sequence is synthesized)
aggctctagatctgctggcccctggcaagacggtggcaggcttgctggagacacaagccctcacccagtgctgcctccacagtgactactgcagccagaacacatgcctcaatggtggga

SEQ ID NO: 88702 - DNA, 120 bp, Artificial Sequence
  ENSG00000086570_99 (sequence is synthesized)
agtgctcatggacccatggggcaggctatgtctgcaaatgtcccccacagttctctgggaagcactgtgaacaaggaagggagaactgtacttttgcaccctgcctggaaggtggaactt

SEQ ID NO: 88703 - DNA, 120 bp, Artificial Sequence
  ENSG00000086570_100 (sequence is synthesized)
gcatcctctcccccaaaggagcttcctgtaactgccctcatccttacacaggagacaggtgtgaaatggaggcgaggggttgttcagaaggacactgcctagtcactcccgagatccaaa

SEQ ID NO: 88704 - DNA, 120 bp, Artificial Sequence
  ENSG00000086570_101 (sequence is synthesized)
ggggggactgggggcagcaggagttactgatcatcacagtggccgtggcgttcattatcataagcactgtcgggcttctcttctactgccgccgttgcaagtctcacaagcctgtggcca

SEQ ID NO: 88705 - DNA, 120 bp, Artificial Sequence
  ENSG00000086570_102 (sequence is synthesized)
tggaggacccagacctcctggccaggagtgttggtgttgacacccaagccatgcctgccatcgagctcaacccattgagtgccagctcctgcaacaacctcaaccaaccggaacccagca

SEQ ID NO: 88706 - DNA, 120 bp, Artificial Sequence
  ENSG00000086570_103 (sequence is synthesized)
aggcctctgttccaaatgaactcgtcacatttggacccaattctaagcaacggccagtggtctgcagtgtgccccccagactcccgccagctgcggtcccttcccactctgacaatgagc

SEQ ID NO: 88707 - DNA, 120 bp, Artificial Sequence
  ENSG00000086570_104 (sequence is synthesized)
ctgtcattaagagaacctggtccagcgaggagatggtgtaccctggcggagccatggtctggccccctacttactccaggaacgaacgctgggaatacccccactccgaagtgactcagg

SEQ ID NO: 88708 - DNA, 120 bp, Artificial Sequence
  ENSG00000086570_105 (sequence is synthesized)
gccctctgccgccctcggctcaccgccactcaaccccagtcgtgatgccagagcctaatggcctctatgggggcttccccttccccctggagatggaaaacaagcgggcacctctcccac

SEQ ID NO: 88709 - DNA, 120 bp, Artificial Sequence
  ENSG00000086570_106 (sequence is synthesized)
cccgttacagcaaccagaacctggaagatctgatgccctctcggccccctagtccccgggagcgcctggttgccccctgtctcaatgagtacacggccatcagctactaccactcgcagt

SEQ ID NO: 88710 - DNA, 120 bp, Artificial Sequence
  ENSG00000086570_107 (sequence is synthesized)
tccggcagggagggggagggccctgcctggcagacgggggctacaagggggtgggtatgcgcctcagccgagctgggccctcttatgctgtctgtgaggtggagggggcacctcttgcag

SEQ ID NO: 88711 - DNA, 120 bp, Artificial Sequence
  ENSG00000086570_108 (sequence is synthesized)
gccagggccagccccgggtgccccccaactatgagggctctgacatggtggagagtgattatggcagctgtgaggaggtcatgttctagcttcccattcccagagcaaggcaggcgggag

SEQ ID NO: 88712 - DNA, 120 bp, Artificial Sequence
  ENSG00000086570_109 (sequence is synthesized)
gccaaggactggacttggcttatttcttcctgtctcgtagggggtgagttgagtgtggctgggagagtgggagggaagccctcagcccaggctgttgtcccttgaaatgtgctcttccaa

SEQ ID NO: 88713 - DNA, 120 bp, Artificial Sequence
  ENSG00000086570_110 (sequence is synthesized)
tcccccacctagtccctgagggtggagggaagctgaggatagagctccagaaacagcactagggtcccaggagaggggcatttctagagcagtgaccctggaaaaccaggaacaattgac

SEQ ID NO: 88714 - DNA, 120 bp, Artificial Sequence
  ENSG00000086570_111 (sequence is synthesized)
tcccggggtgggcgagagacaggagggctccctgatctgccggctctcagtccccggggcagagcctgattgactgtgctggctcaacttcaccaagatgcattctcatacctgcccaca

SEQ ID NO: 88715 - DNA, 120 bp, Artificial Sequence
  ENSG00000086570_112 (sequence is synthesized)
gctccattttggaggcaggcaggttggtgcctgacagacaaccactacgcgggccgtacagaggagctctagagggctgcgtggcatcctcctaggggctgagaggtgagcagcagggga

SEQ ID NO: 88716 - DNA, 120 bp, Artificial Sequence
  ENSG00000086570_113 (sequence is synthesized)
gcgggcacagtcccctctgcccctgcctcagtcgagcactcactgtgtctttgtcaagtgtctgctccacgtcaggcactgtgctttgcaccggggagaaaatggtgatggagggcaaca

SEQ ID NO: 88717 - DNA, 120 bp, Artificial Sequence
  ENSG00000086570_114 (sequence is synthesized)
aggactccgaggagcaccaccaggcctcgggccccagaggtcccactcctcagcctacacgcagaggaacgggcccacctcagagtcacaccactggctgccagtcagggcctgccagga

SEQ ID NO: 88718 - DNA, 120 bp, Artificial Sequence
  ENSG00000086570_115 (sequence is synthesized)
gtctacacagctctgaaccttctttgttaaagaattcagacctcatggaactctgggttcttcatcccaagtttcccaggcacttttggccaaaggaaggaaggaactaattcttcattt

SEQ ID NO: 88719 - DNA, 120 bp, Artificial Sequence
  ENSG00000086570_116 (sequence is synthesized)
taaaaattcttaggcactttttgaccttgctgtctggatgagtttcctcaatgggatttttcttccctagacacaaggaagtctgaactcctatttagggccggttggaagcagggagct

SEQ ID NO: 88720 - DNA, 120 bp, Artificial Sequence
  ENSG00000086570_117 (sequence is synthesized)
ggaccgcagtgtccaggctggacacctgccattgcctcctctccattgcagacgcctgcccatcaagtattacctgcggcgactcaaccctatgcatggagggtcaatgtgggcacatgt

SEQ ID NO: 88721 - DNA, 120 bp, Artificial Sequence
  ENSG00000086570_118 (sequence is synthesized)
ctacacatgtgggtgcccatggatagtacgtgtgtacacatgtgtagagtgtatgtagccaggagtggtggggaccagaagcctctgtggcctttggtgacctcaccactccctcccacc

SEQ ID NO: 88722 - DNA, 120 bp, Artificial Sequence
  ENSG00000086570_119 (sequence is synthesized)
cagtccctccctctggtccactgccttttcatatgtgttgtttctggagacagaagtcaaaaggaagagcagtggagccttgcccacagggctgctgcttcatgcgagagggagatgtgt

SEQ ID NO: 88723 - DNA, 120 bp, Artificial Sequence
  ENSG00000086570_120 (sequence is synthesized)
gggcgagagccaatttgtgtgagtggtttgtggctgtgtgtgtgactgtgagtgtgagtgacagatacatagtttcattggtcattttttttttaacaataaagtatctttttttactgt

SEQ ID NO: 88724 - DNA, 120 bp, Artificial Sequence
  ENSG00000086589_0 (sequence is synthesized)
agcctcggggcttgacgggattgtggcggtcctctctcccaattcggaagctacagctacctccggacgctctcaagatggcgacctctctgggttccaacacctacaacaggcagaact

SEQ ID NO: 88725 - DNA, 120 bp, Artificial Sequence
  ENSG00000086589_1 (sequence is synthesized)
gggaggatgcggacttccccattctgtgccagacatgtcttggagaaaacccatatatccgaatgaccaaagaaaagtatgggaaggaatgcaaaatctgtgccaggccattcacagtgt

SEQ ID NO: 88726 - DNA, 120 bp, Artificial Sequence
  ENSG00000086589_2 (sequence is synthesized)
ttcgctggtgccctggagtccgcatgcgtttcaagaagactgaagtgtgccaaacctgcagtaaattgaagaatgtctgtcagacctgcctcttagacctagagtatggcctgcccatcc

SEQ ID NO: 88727 - DNA, 120 bp, Artificial Sequence
  ENSG00000086589_3 (sequence is synthesized)
aggttcgtgacgcaggattgtcttttaaagatgacatgccaaagtcagatgtcaacaaagagtactatacacagaatatggagagagagatttctaactctgatggaacacggccagttg

SEQ ID NO: 88728 - DNA, 120 bp, Artificial Sequence
  ENSG00000086589_4 (sequence is synthesized)
gcatgctggggaaagccacatctaccagtgacatgctgctcaaactggcccggaccacaccctactacaaaaggaatcgaccccacatttgctccttctgggtgaaaggagagtgtaaga

SEQ ID NO: 88729 - DNA, 120 bp, Artificial Sequence
  ENSG00000086589_5 (sequence is synthesized)
gaggagaggaatgtccatacagacatgagaagcctacagatccagatgacccccttgctgatcagaatattaaagaccgttattacggaatcaatgatcctgtagctgacaagcttctaa

SEQ ID NO: 88730 - DNA, 120 bp, Artificial Sequence
  ENSG00000086589_6 (sequence is synthesized)
agcgggcttcaacaatgcctcggctggacccaccagaggataaaactatcaccacactatatgttggtggtctaggtgataccattactgagacagatttaagaaatcatttctaccagt

SEQ ID NO: 88731 - DNA, 120 bp, Artificial Sequence
  ENSG00000086589_7 (sequence is synthesized)
tcggagagatccggacgatcactgttgtgcagagacagcagtgtgctttcatccagtttgccacacggcaggctgcagaagtggctgctgagaagtcctttaataagttgattgtaaatg

SEQ ID NO: 88732 - DNA, 120 bp, Artificial Sequence
  ENSG00000086589_8 (sequence is synthesized)
gccgcagactgaatgtgaaatggggaagatcccaggcagccagaggaaaagaaaaagagaaagatggaactacagactctgggatcaaactagaacctgttccaggattgccaggagctc

SEQ ID NO: 88733 - DNA, 120 bp, Artificial Sequence
  ENSG00000086589_9 (sequence is synthesized)
agaagaagaagcctctgccaactacttcaacttgcccccaagtggtcctccagctgtggtgaacattgctctgccaccgccccctggcattgctccacccccacccccaggttttgggcc

SEQ ID NO: 88734 - DNA, 120 bp, Artificial Sequence
  ENSG00000086589_10 (sequence is synthesized)
acacatgttccacccaatgggaccaccccctcctttcatgcgggctccaggaccaatccactatccttctcaggaccctcagaggatgggagctcatgctggaaaacacagcagccccta

SEQ ID NO: 88735 - DNA, 120 bp, Artificial Sequence
  ENSG00000086589_11 (sequence is synthesized)
gcaccttgtcaccactctggggctctgtggaagaaagggcacttaaaactcccagtaaatcttggaataaatatatttttccttcccttgtagtttccatggtagctgaatgtgctcaga

SEQ ID NO: 88736 - DNA, 120 bp, Artificial Sequence
  ENSG00000086589_12 (sequence is synthesized)
tgtgagcagtcagagactgacagccatgctttcctatacttgttcaaaggatcgatggaccgtaaataagctgccattaacacatctggttactgctgtaacatgactaataaaaccgaa

SEQ ID NO: 88737 - DNA, 120 bp, Artificial Sequence
  ENSG00000086589_13 (sequence is synthesized)
cgcctgttccccttacccgtgtgggggacacgcagatgagtgaattggaatgtccagcagagttaccctcccaattatatgttcattttgtatattttttggtcgggggaaaaattgacc

SEQ ID NO: 88738 - DNA, 120 bp, Artificial Sequence
  ENSG00000086589_14 (sequence is synthesized)
tgcagtaaaaaaacctttgaccatttttatgtccattggatactttcctttttatcatcttaaaaaaagataactagtactaatcattgtagtggcctaagtgtgatttaactcttgaag

SEQ ID NO: 88739 - DNA, 120 bp, Artificial Sequence
  ENSG00000086589_15 (sequence is synthesized)
tcacaccctccgaaagatgagtagaaaccagcaccagcacagcccagatcttctctttcctctccttttcctcatttattcctaaaggaatctgaccattttacgtctctacggcccaaa

SEQ ID NO: 88740 - DNA, 120 bp, Artificial Sequence
  ENSG00000086589_16 (sequence is synthesized)
aaaagacaaaaataaaaattcctttttattcctgtcaactggatggaaacacaaatttcatggagctgtgtaccatcgaagaaacctggtgtctggcatgaaattactgtaaagaacttc

SEQ ID NO: 88741 - DNA, 120 bp, Artificial Sequence
  ENSG00000086589_17 (sequence is synthesized)
ctgtaaaacacgttctttaacaaactgaaatgaaaagcattggagcgtctgaatgaaagacgtgacctcctgctgggactctgatggtcttcagcattcaccttcgtgtgtcttcagtgt

SEQ ID NO: 88742 - DNA, 120 bp, Artificial Sequence
  ENSG00000086589_18 (sequence is synthesized)
ctcattgtcatccctgcttctgtttggtcttagagtgtttggatataactgaattgtagatggtaaaggaaatttgatgtgttttttgtttttaaataattaaaacgggtcaatttttca

SEQ ID NO: 88743 - DNA, 120 bp, Artificial Sequence
  ENSG00000086589_19 (sequence is synthesized)
acttcgggttcctgccgtgcctagttccccaccctcgcttcccgccccctcgccaccccaagtgtcactgaggtgtcagggtcttcggagggtggtcctcaaccagatttcccattttca

SEQ ID NO: 88744 - DNA, 120 bp, Artificial Sequence
  ENSG00000086589_20 (sequence is synthesized)
gctgccactttttggataaaaatcctaatgaattgacacagtctgtataatttatcttttgaatttgtcatccccacttagatttctaactctgatggaacacggccagttggcatgctg

SEQ ID NO: 88745 - DNA, 120 bp, Artificial Sequence
  ENSG00000086589_21 (sequence is synthesized)
ttggcttgtattatgcttggctagatgagacttctgggcagatagtaatggaaattacctcttccaaagagataaagtggagaagaaactcctgtaagtttataacctgcccttggtagc

SEQ ID NO: 88746 - DNA, 120 bp, Artificial Sequence
  ENSG00000086589_22 (sequence is synthesized)
ctgtctccattaaaccctatctaagtgagctagacaacccccaggggttggcagactttcgctgtaagaggctggatggtgaatattttaggcattgtgggccacatgcagtctctgtca

SEQ ID NO: 88747 - DNA, 120 bp, Artificial Sequence
  ENSG00000086589_23 (sequence is synthesized)
cgtattcttgttttaaactttcttggctcatgggccttgagagctatggtttgccaacctcttatctagggtttagggtctttaaagaacctattagaaccccctttcctccatgggaaa

SEQ ID NO: 88748 - DNA, 120 bp, Artificial Sequence
  ENSG00000086589_24 (sequence is synthesized)
aaaccctgagatgtttgagaacctttatttactcattatttttctttccttctctcaatcagcagcacccacagtaggacaagatatggggtggagacctgcgggtagttaggcagataa

SEQ ID NO: 88749 - DNA, 120 bp, Artificial Sequence
  ENSG00000086589_25 (sequence is synthesized)
ccttggggcccacctgcctagtggtgtgtcagtgaaagttaatccattttcagtctcctgggtacatcttttttaactcccactttcatttttctctgcctgtttcccttcagaaatcat

SEQ ID NO: 88750 - DNA, 120 bp, Artificial Sequence
  ENSG00000086589_26 (sequence is synthesized)
aaaaactgcaagaatgatcattctgtacaaaatacatttttctgtagtctctctattgttagtatcatgctgactggaatttttgtaaaattgtcctttatggtgccacagtaataatgt

SEQ ID NO: 88751 - DNA, 120 bp, Artificial Sequence
  ENSG00000086589_27 (sequence is synthesized)
ggatggaaggaggaggcgaagccgcgcaccttgcaagctggcaggacagggcctgcggcgcggccgaaggaataccggggaggagccagcgcggcggcctagcttggccggagcaggagg

SEQ ID NO: 88752 - DNA, 120 bp, Artificial Sequence
  ENSG00000086589_28 (sequence is synthesized)
gcggagggcgatcctcctgcgggcttgaagggagggggcttagccagggtcccgggaccagcaccctttccatccctgccccctccagcctattagagctggttttcttttctcccgccg

SEQ ID NO: 88753 - DNA, 120 bp, Artificial Sequence
  ENSG00000086598_0 (sequence is synthesized)
gagaaggcagcggggcggcggcggcggcggcggcggcggctgtggaggccgcagtccgggtcctggcttcggcctcagccccaccatggtgacgcttgctgaactgctggtgcttctggc

SEQ ID NO: 88754 - DNA, 120 bp, Artificial Sequence
  ENSG00000086598_1 (sequence is synthesized)
cgctctcctggccacggtctcgggctatttcgttagcatcgacgcccatgctgaagagtgcttctttgagcgggtcacctcgggcaccaagatgggcctcatcttcgaggtggcggaggg

SEQ ID NO: 88755 - DNA, 120 bp, Artificial Sequence
  ENSG00000086598_2 (sequence is synthesized)
cggcttcctggacatcgacgtggagattacaggaccagataacaaaggaatttacaaaggagacagagaatccagtgggaaatacacatttgctgctcacatggatggaacatacaaatt

SEQ ID NO: 88756 - DNA, 120 bp, Artificial Sequence
  ENSG00000086598_3 (sequence is synthesized)
ttgttttagtaaccggatgtccaccatgactccaaaaatagtgatgttcaccattgatattggggaggctccaaaaggacaagatatggaaacagaagctcaccagaacaagctagaaga

SEQ ID NO: 88757 - DNA, 120 bp, Artificial Sequence
  ENSG00000086598_4 (sequence is synthesized)
aatgatcaatgagctagcagtggcgatgacagctgtaaagcacgaacaggaatacatggaagtccgggagagaatacacagagccatcaacgacaacacaaacagcagagtggtcctttg

SEQ ID NO: 88758 - DNA, 120 bp, Artificial Sequence
  ENSG00000086598_5 (sequence is synthesized)
gtccttctttgaagctcttgttctagttgccatgacattgggacagatctactacctgaagagattttttgaagtccggagagttgtttaaaaagcctcttcctgatgatcccaactcag

SEQ ID NO: 88759 - DNA, 120 bp, Artificial Sequence
  ENSG00000086598_6 (sequence is synthesized)
aattcactgtttaccaaacaccttggtcataataatgtcattagtttctccatttttattttctgaactgtacattcacaacttatgtttctttgagattaatagatattgggggaaaaa

SEQ ID NO: 88760 - DNA, 120 bp, Artificial Sequence
  ENSG00000086598_7 (sequence is synthesized)
cgcctttttaggaaaattatagtgaaaatttgacagttgattggcataatttcttgtttgaatgctgcctccattatataggtccttccaggaactcaaacactgtaagtgaaatatggg

SEQ ID NO: 88761 - DNA, 120 bp, Artificial Sequence
  ENSG00000086598_8 (sequence is synthesized)
agtatagtttttattatttcttcttttccttttgttttcataatataatgcagtttgttcaggaaatcagcacaaagcctgatagtactttactaaaatgactgcattctttggattcct

SEQ ID NO: 88762 - DNA, 120 bp, Artificial Sequence
  ENSG00000086598_9 (sequence is synthesized)
tcagtctatggttcaagtcactaaagattcatttttgttgagtccttatgagaaacagcagtatgaatcttgacggtttctgcccgtcctaatggcagagctctctgacttgggtgtatg

SEQ ID NO: 88763 - DNA, 120 bp, Artificial Sequence
  ENSG00000086598_10 (sequence is synthesized)
tttgttttcttgttttgctttaaaactacgactcagcatacattttcccacatacatttttacattgtaccttaggactcagtcatctccacttaaattgatgacacaagcagctaataa

SEQ ID NO: 88764 - DNA, 120 bp, Artificial Sequence
  ENSG00000086598_11 (sequence is synthesized)
ccatttctgggtttctgcctaaccccctaattgtctgttaaagccaattctctgggtgtcccagtgagtggtggctttttttctttccacattggcacattcacttctcccactcttggc

SEQ ID NO: 88765 - DNA, 120 bp, Artificial Sequence
  ENSG00000086598_12 (sequence is synthesized)
atgtaagaaataagcatttacataattggaaaaatctggatttctgatgccaaagggttaaagcttcttggatttcatttcattgatatacagccactattttatttttgatcagtggcc

SEQ ID NO: 88766 - DNA, 120 bp, Artificial Sequence
  ENSG00000086598_13 (sequence is synthesized)
tttgggccactgttcagggtactgaccatcagtgtcagcattagggttttggtttttgtttcttttgggtctttcttttttggcacatgtgaatcttgttttgtgtaaaatgaaattact

SEQ ID NO: 88767 - DNA, 120 bp, Artificial Sequence
  ENSG00000086598_14 (sequence is synthesized)
ttctcttgttctctgatgatgggtttaaaattaaaagagcatccggttttggtatggggatgatccaggattatgttgtgactgatacatattagttacttgtgcttttttttttttttt

SEQ ID NO: 88768 - DNA, 120 bp, Artificial Sequence
  ENSG00000086598_15 (sequence is synthesized)
tggatctttgcaagggcaaaactacaagtaacgagttttatataattaatttaaatttgttacaggttttcatgttcaggataaaccatacttccaccttgggtgagaacacttgcaaca

SEQ ID NO: 88769 - DNA, 120 bp, Artificial Sequence
  ENSG00000086598_16 (sequence is synthesized)
gtttattaatgaggtgactttcaccttaggacaactgttgcatgccaagttttttgtgtgtgtgaaacacttcaaaactgatttaaaagatgtaaatttaaaattggttgtatctaatat

SEQ ID NO: 88770 - DNA, 120 bp, Artificial Sequence
  ENSG00000086598_17 (sequence is synthesized)
gccccaggttcggtaaataaacaattctttttaaaaacagtattctgtgttttatatattgacagctaatccacattttttacacaccaactttctgttcttatttgacatgagacatgt

SEQ ID NO: 88771 - DNA, 120 bp, Artificial Sequence
  ENSG00000086598_18 (sequence is synthesized)
tcatgttttctgagtatttatacctattacgtctgttactttttaattctataaacttgaggatagtgaatggtaccaagttttagtttctgcgtaggttttccagtgtggcttctctga

SEQ ID NO: 88772 - DNA, 120 bp, Artificial Sequence
  ENSG00000086598_19 (sequence is synthesized)
tggatcagtgctaaaatcttaagtatttttctatttgggaaaaaagggttgaattattttcacttgcccacgtagtttatgaatgtgggaaatagcttcaaagacagattaaatgatttg

SEQ ID NO: 88773 - DNA, 120 bp, Artificial Sequence
  ENSG00000086598_20 (sequence is synthesized)
cccaaggccacagaaaagagtgaaaggtggaaccggagactagatcaccacctgtagaaactgttcttcctctgtgaaactaacggcctgctggtaataaaagtagctaccatttcttga

SEQ ID NO: 88774 - DNA, 120 bp, Artificial Sequence
  ENSG00000086598_21 (sequence is synthesized)
gagatacctgggatgctcaccagaacaagctagaagaaatgatcaatgagctagcagtggcgatgacagctgtaaagcacgaacaggaatacatggaagtccgggagagaatacacagag

SEQ ID NO: 88775 - DNA, 120 bp, Artificial Sequence
  ENSG00000086598_22 (sequence is synthesized)
gattaattgggtctaaggagtttccatttgacagtgtactcagtagggctgggcacaagttacacaatacaagtgaaatccaaaaataaggggataacggaagggagagactcttacact

SEQ ID NO: 88776 - DNA, 120 bp, Artificial Sequence
  ENSG00000086598_23 (sequence is synthesized)
tagctaagaatttagcgatcaactattacagtctcgaagttatgcaagtgacatgcactttgaaagagcgactgacttgatcacagcctaacagctgatttgtagcagactgggatgaga

SEQ ID NO: 88777 - DNA, 120 bp, Artificial Sequence
  ENSG00000086598_24 (sequence is synthesized)
gtttgggtcttctcatttccaggctagtcctttcccctaagccttcaggcatctcagataaagcagaattccttcactgtttggcagtaatctggaaaaccttgaaatgtgataaaaatt

SEQ ID NO: 88778 - DNA, 120 bp, Artificial Sequence
  ENSG00000086598_25 (sequence is synthesized)
catcttgtttatattttaaaaaaccacaaacgtttattacctcatggtttctgtggccaggaattatggagaggcttagctgggtggttctggcttggagtatctcatgaggttgcaatc

SEQ ID NO: 88779 - DNA, 120 bp, Artificial Sequence
  ENSG00000086598_26 (sequence is synthesized)
aagatgtcaaccagggatgcagaaattctttattttaaagagatttcttttttcttgagttttgctatcagtcacagttccatgtttgttggtgatattaggccagttagagaccacatt

SEQ ID NO: 88780 - DNA, 120 bp, Artificial Sequence
  ENSG00000086598_27 (sequence is synthesized)
taaggtgagctttctgtttctgaggggtttaataaggataaataagacataaatgtcaggacctaaaggtgttttagaaagccatgaagtcaactcttattttataaagtgggagaattg

SEQ ID NO: 88781 - DNA, 120 bp, Artificial Sequence
  ENSG00000086598_28 (sequence is synthesized)
attgcagcccaaaatggttattatcacttaccgaagtgaagctaagtgaaagttacatattcttggtgaatttcttttttttttttttttttggaccaagtctcgctctgtcgcccaggc

SEQ ID NO: 88782 - DNA, 85 bp, Artificial Sequence
  ENSG00000086598_29 (sequence is synthesized)
attcttggtgaatttcttactgccattagacattacttataaagtctatgacttaatcttttgtgacattttatgcatttctctc

SEQ ID NO: 88783 - DNA, 120 bp, Artificial Sequence
  ENSG00000086619_0 (sequence is synthesized)
actcgcagctgccgggtgttggggaaagagtcgcctgcctccggactggagtgcagacctctgaccctggagtcgctcggccgctgggaaccgtccccttgggtcgtcgcctgggccgcc

SEQ ID NO: 88784 - DNA, 120 bp, Artificial Sequence
  ENSG00000086619_1 (sequence is synthesized)
cgtcgttccccggccccgaggggtccggctggccgcggtgtgggtagaggtcagcatgagccaaggggtccgccgggcaggcgctgggcagggggtagcggccgcggtgcagctgctggt

SEQ ID NO: 88785 - DNA, 120 bp, Artificial Sequence
  ENSG00000086619_2 (sequence is synthesized)
caccctgagcttcctgcggagcgtcgtcgaggcgcaggtcactggagttctggatgattgcttgtgtgatattgacagcatcgataacttcaatacctacaaaatcttccccaaaataaa

SEQ ID NO: 88786 - DNA, 120 bp, Artificial Sequence
  ENSG00000086619_3 (sequence is synthesized)
aaaattgcaagagagagactattttcgttattacaaggttaatctgaagcgaccttgtcctttctgggcagaagatggccactgttcaataaaagactgtcatgtggagccctgtccaga

SEQ ID NO: 88787 - DNA, 120 bp, Artificial Sequence
  ENSG00000086619_4 (sequence is synthesized)
gagtaaaattccggttggaataaaagctgggcattctaataagtacttgaaaatggcaaacaataccaaagaattagaagattgtgagcaagctaataaactgggagcaattaacagcac

SEQ ID NO: 88788 - DNA, 120 bp, Artificial Sequence
  ENSG00000086619_5 (sequence is synthesized)
attaagtaatcaaagcaaagaagctttcattgactgggcaagatatgatgattcacgggatcacttttgtgaacttgatgatgagagatctccagctgctcagtatgtagacctattgct

SEQ ID NO: 88789 - DNA, 120 bp, Artificial Sequence
  ENSG00000086619_6 (sequence is synthesized)
gaacccagagcgttacactggctataaagggacctctgcatggagagtgtggaacagcatctatgaagagaactgtttcaagcctcgatctgtttatcgtcctttaaatcctctggcgcc

SEQ ID NO: 88790 - DNA, 120 bp, Artificial Sequence
  ENSG00000086619_7 (sequence is synthesized)
tagccgaggcgaagatgatggagaatcattctacacatggctagaaggtttgtgtctggagaaaagagtcttctataagcttatatcgggacttcatgctagcatcaatttacatctatg

SEQ ID NO: 88791 - DNA, 120 bp, Artificial Sequence
  ENSG00000086619_8 (sequence is synthesized)
cgcaaattatcttttggaagaaacctggggtaagcccagttggggacctaatattaaagaattcaaacaccgctttgaccctgtggaaaccaagggagaaggtccaagaaggctcaagaa

SEQ ID NO: 88792 - DNA, 120 bp, Artificial Sequence
  ENSG00000086619_9 (sequence is synthesized)
tctttactttttatacttgattgagcttcgagctttgtcaaaggtggctccatattttgagcgctcaattgtcgatctttacactggaaatgcagaagaagatgctgacacaaaaactct

SEQ ID NO: 88793 - DNA, 120 bp, Artificial Sequence
  ENSG00000086619_10 (sequence is synthesized)
tctactgaatatctttcaagatacaaagtcctttcccatgcactttgatgagaaatccatgtttgcaggtgacaaaaaaggggccaagtcactaaaggaggaattccgattacatttcaa

SEQ ID NO: 88794 - DNA, 120 bp, Artificial Sequence
  ENSG00000086619_11 (sequence is synthesized)
gaatatctcccgtataatggactgtgttggatgtgacaaatgcagattatggggaaaattacagactcagggtttaggaactgccctgaagatattattctctgaaaaagaaatccaaaa

SEQ ID NO: 88795 - DNA, 120 bp, Artificial Sequence
  ENSG00000086619_12 (sequence is synthesized)
gcttccagagaatagtccatctaaaggcttccaactcacccgacaggaaatagttgctcttttaaatgcttttggaaggctttctacaagtataagagacttacagaattttaaagtctt

SEQ ID NO: 88796 - DNA, 120 bp, Artificial Sequence
  ENSG00000086619_13 (sequence is synthesized)
attacaacacagtaggtaataaaggcttttatgtgtctaactagagacataaagtgactgtggaaagccttttaattatggacattcatcagaaagacactaatctgacttcaagaattc

SEQ ID NO: 88797 - DNA, 120 bp, Artificial Sequence
  ENSG00000086619_14 (sequence is synthesized)
gacattcatcagaaagacactaatctgacttcaagaattctgaactattaaatagaaaatttaaatgctcacttgaatatttatgattcttaatagattattatcaactagagatattta

SEQ ID NO: 88798 - DNA, 120 bp, Artificial Sequence
  ENSG00000086619_15 (sequence is synthesized)
attttgtgtttaatttcatatgttttcatgtaatgaaaattctattttttttagaattggttttgtttttattctattatcctttatttccagttgtcaaactttaaatggctatgtctg

SEQ ID NO: 88799 - DNA, 120 bp, Artificial Sequence
  ENSG00000086619_16 (sequence is synthesized)
cattctaataacactgttcagtctgttatggaaaaggagaactagggaacaaatgttgctcagggctggtgtcagtgagaaaaatttatcaatgctttttaatgtgtttttacccttgcc

SEQ ID NO: 88800 - DNA, 120 bp, Artificial Sequence
  ENSG00000086619_17 (sequence is synthesized)
tcactgtgtgtgtgtcactttctataatataaagaaatactataatatttctagaatctggaactgtcaccatgatgaatggccctttcaatgcatagttacagaaattcctgaagattc

SEQ ID NO: 88801 - DNA, 120 bp, Artificial Sequence
  ENSG00000086619_18 (sequence is synthesized)
cccaggacttcaatttcattggtttttatttgcagtttttagttgctgtaattgttgctgtttccagtctaaaggacctcctttggtaaaggtgaacaagacctctcccctatgctaccc

SEQ ID NO: 88802 - DNA, 120 bp, Artificial Sequence
  ENSG00000086619_19 (sequence is synthesized)
agccagattttgtgtgtgtaatgggctggcccaagagtgttcttttacttagaactccttttgattttgcttttctctgcccctagaaattttagggacaaagacattttggaaattgtc

SEQ ID NO: 88803 - DNA, 120 bp, Artificial Sequence
  ENSG00000086619_20 (sequence is synthesized)
tgaatttataatgccaattgaaaatattatatacacaaaatttgctattttcacttaaagtaagcatttttaaaggatttattttagaatacaatctatgcaatcctcgaactcagtgtg

SEQ ID NO: 88804 - DNA, 120 bp, Artificial Sequence
  ENSG00000086619_21 (sequence is synthesized)
cttttccctgacaggatatataaaaaggtagattaggtcaaccctcctttaagcttactctcccctcaccttttcttttcactgtatataaacggtactttctgtgattcataccaacag

SEQ ID NO: 88805 - DNA, 120 bp, Artificial Sequence
  ENSG00000086619_22 (sequence is synthesized)
aggactttctgtgattcataccaacagtcctaaactgtcattttctaaatctgggatttaaaatctttagacaatatttaaaatcttgattttttttaaatgtcagcagatacaatttgg

SEQ ID NO: 88806 - DNA, 120 bp, Artificial Sequence
  ENSG00000086619_23 (sequence is synthesized)
aagattgcatctgtgtagaagtaatgcaggtacaagatctagagtttttccttagactctttagtcttttctgaattaaagaataagtgctcttaaatccatattttatcctgtcaaagt

SEQ ID NO: 88807 - DNA, 120 bp, Artificial Sequence
  ENSG00000086619_24 (sequence is synthesized)
ctgaaatgtgttcattgatgatttggtgacatctaaaaaattgtatttagttggcttggctcacccctcttaaaaatacttagccatctcttggtgggatgtggtgggggtattaaggtc

SEQ ID NO: 88808 - DNA, 120 bp, Artificial Sequence
  ENSG00000086619_25 (sequence is synthesized)
tcagagttatttattttctcacctaatttcaaacctttataaacttggggttttgttgttgatggtggtagtattttttgttaagttgtttaaaaggctgacttgattggagcctcctct

SEQ ID NO: 88809 - DNA, 120 bp, Artificial Sequence
  ENSG00000086619_26 (sequence is synthesized)
actttttcttgagggttgcaagtattgtatggtgggggaggggggccttaaggcaaactgtctaaaaagtgactatccaattaatttaactagtaaattagtaagaattattcttagtat

SEQ ID NO: 88810 - DNA, 120 bp, Artificial Sequence
  ENSG00000086619_27 (sequence is synthesized)
tcactcagagtttaagatgtgaaaaatctgcactttgtttatcactctaaatgtaaagaactttttgatagtgttatttcaccactccctcagttaaaggctattatttaaactgtttac

SEQ ID NO: 88811 - DNA, 120 bp, Artificial Sequence
  ENSG00000086619_28 (sequence is synthesized)
tggagaaaatcctcgctcatgtccatttattgtttttttctgtactgtgatttgtttcaagcttaggaaaactagtatattagagtatgttctaggaaattaaaagatctggttagagta

SEQ ID NO: 88812 - DNA, 120 bp, Artificial Sequence
  ENSG00000086619_29 (sequence is synthesized)
aaaagttctttttaaggttcttaactaattttttcacaactaagaaaataaatgaagtattcttaggctgaaattcatcttattttatcataaattagattgtaggggcagcctacattt

SEQ ID NO: 88813 - DNA, 120 bp, Artificial Sequence
  ENSG00000086619_30 (sequence is synthesized)
ttgtgtatgtgtttttatttcttaaatgattgtgtgagcctggtgacattttatggttcttgtgatctaaactgtttttccaattcacatcttttgtcgtgaagtgatattatactagag

SEQ ID NO: 88814 - DNA, 120 bp, Artificial Sequence
  ENSG00000086619_31 (sequence is synthesized)
tactgtttgcattgtaaaaatgctttgctggtgctctggcattttgtctttatctcatcacctaatttaaaaacccagcacttgataatataactgacagaaatgattgtacccactgat

SEQ ID NO: 88815 - DNA, 120 bp, Artificial Sequence
  ENSG00000086619_32 (sequence is synthesized)
gaagtaatgaaaatgaagaaaaggaaaatattccttccttcaatggcgtaagtttattttttacttaagtggcatctatgtaagttagacaaactatatattaaaattggtaaactttga

SEQ ID NO: 88816 - DNA, 120 bp, Artificial Sequence
  ENSG00000086619_33 (sequence is synthesized)
atgtttctcctgttttgattcttagattatgaggaggatcagacagaataagactccacacttttgaaatttgataagtcaaaacgttttattttgacatttttaacattgtgaattatt

SEQ ID NO: 88817 - DNA, 120 bp, Artificial Sequence
  ENSG00000086619_34 (sequence is synthesized)
cgatatttgtaatctctgtatgtatatgaaactctgccatgtttttcaactttgcctatgtgccactgtatataagaaaggacagctattttgatcttcatcagcattgccttcagctga

SEQ ID NO: 88818 - DNA, 120 bp, Artificial Sequence
  ENSG00000086619_35 (sequence is synthesized)
aaatttgggaacagttcacagtaaacctctcagtagtttgcaaactgaggtacctgcagaaaccatagctactcaccaaaatacacagattaggtgcatggtatcgtggaaattatttgg

SEQ ID NO: 88819 - DNA, 120 bp, Artificial Sequence
  ENSG00000086619_36 (sequence is synthesized)
taaaaaaacacacacacaaatctatgtgtactgtattttaaggaatatctacaggtgcagctttgattttgaacagaattccaaataatttactgttgtacccaccagaatctagaaaat

SEQ ID NO: 88820 - DNA, 120 bp, Artificial Sequence
  ENSG00000086619_37 (sequence is synthesized)
gtgaattaaagtacatgtttctgcaatcttttctgtcttgtttttccccgctattttaagtgtttctttttatggcatgagaatttgattgtaacctgtggagaagggagaaaatgtatt

SEQ ID NO: 88821 - DNA, 120 bp, Artificial Sequence
  ENSG00000086619_38 (sequence is synthesized)
tataagtagtctgaggttgtttcttatcataatggcaagcattggctggcattgtattaagggcttttacatgcatagtttggctttaaaagaatacaccgttaatcttcacaatagcac

SEQ ID NO: 88822 - DNA, 120 bp, Artificial Sequence
  ENSG00000086619_39 (sequence is synthesized)
tagtaggtaggtacaattacttctctgttttataagtaagaagactgaggataaaaaaggctaagtaacctgtccatagtcacaaattctaggttgtggagcaagaatttgagacgagaa

SEQ ID NO: 88823 - DNA, 120 bp, Artificial Sequence
  ENSG00000086619_40 (sequence is synthesized)
agactgattctagaacctttgtgacattttgtaagttggcctatttccattcagctacaaagtgggaacaattaaaagcattgtttgatttgtattgaatcataaagcttataaaatatg

SEQ ID NO: 88824 - DNA, 120 bp, Artificial Sequence
  ENSG00000086619_41 (sequence is synthesized)
ggagggccgggcagggccgggccagaaaagaggtgatttctggcgagcagaaaacccggggagcagagacctgaccgtccagtgcgggaaacatctgcgaaccgcccgcagggtgggggg

SEQ ID NO: 88825 - DNA, 120 bp, Artificial Sequence
  ENSG00000086619_42 (sequence is synthesized)
agataatcttctttgctaaaagtagggtttgttttgttgacaaaaaaaaattttatattgtatctgtactaacttagagaggccttaatgctgacaagtcagtttctctacaggtcatag

SEQ ID NO: 88826 - DNA, 120 bp, Artificial Sequence
  ENSG00000086619_43 (sequence is synthesized)
gaaaaactaagtttccaattgccagtgtttttcagtttgctgccttaattttgtaagggagatattcttctaatattctttttgcttggctataacttgttcaactacaatagcaggagt

SEQ ID NO: 88827 - DNA, 120 bp, Artificial Sequence
  ENSG00000086619_44 (sequence is synthesized)
aaggaatgtgtgattgagaaggtgataaaagaaaattaaaaccttcatctgctccttatttttcttaaattttcattactatttttttcttttctcacctttttcctgcactatgctctt

SEQ ID NO: 88828 - DNA, 120 bp, Artificial Sequence
  ENSG00000086619_45 (sequence is synthesized)
tatttctgaagctcagaggtcatttttctttcactcatttctacatgatttacttctgtatagagacatataatttgcttgcttgtttatatcaccagtggtttaaaaaataatttgaat

SEQ ID NO: 88829 - DNA, 120 bp, Artificial Sequence
  ENSG00000086619_46 (sequence is synthesized)
ttgccagcagagatacatgtaatgccaactgaggaatacagaacagaaggaaaagaatcacagaaaataatactatgcttccttggggaaaaagagaaaaaagtcaacttgaggaagaat

SEQ ID NO: 88830 - DNA, 120 bp, Artificial Sequence
  ENSG00000086666_0 (sequence is synthesized)
aataaacagcggacggaggggccggcggtggcggagccggagcaagcaggggttcggcggcattacctgtacccattcaccggcggctaccggcggcggcgcgcagcgtgtcaggcggag

SEQ ID NO: 88831 - DNA, 120 bp, Artificial Sequence
  ENSG00000086666_1 (sequence is synthesized)
agacccgccgccaggaatgaatctgaagtctgctgcagtaaaacacagaaggctttaaaatgttttcttgcataaaattcaaaacttttaagtagctgcttatgagaatagggaaggcag

SEQ ID NO: 88832 - DNA, 120 bp, Artificial Sequence
  ENSG00000086666_2 (sequence is synthesized)
aaagctaatgtctgtctcaagatacaggacagctgtttgctcatcaacctcaactgtgtgtgcaactgaggaacatggctcaagaaactaatcacagccaagtgcctatgctttgttcca

SEQ ID NO: 88833 - DNA, 120 bp, Artificial Sequence
  ENSG00000086666_3 (sequence is synthesized)
ctggctgtggattttatggaaaccctcgtacaaatggcatgtgttcagtatgctataaagaacatcttcaaagacagaatagtagtaatggtagaataagcccacctgcaacctctgtca

SEQ ID NO: 88834 - DNA, 120 bp, Artificial Sequence
  ENSG00000086666_4 (sequence is synthesized)
gtagtctgtctgaatctttaccagttcaatgcacagatggcagtgtgccagaagcccagtcagcattagactctacatcttcatctatgcagcccagccctgtatcaaatcagtcacttt

SEQ ID NO: 88835 - DNA, 120 bp, Artificial Sequence
  ENSG00000086666_5 (sequence is synthesized)
tatcagaatctgtagcatcttctcaattggacagtacatctgtggacaaagcagtacctgaaacagaagatgtgcaggcttcagtatcagacacagcacagcagccatctgaagagcaaa

SEQ ID NO: 88836 - DNA, 120 bp, Artificial Sequence
  ENSG00000086666_6 (sequence is synthesized)
gcaagtctcttgaaaaaccgaaacaaaaaaagaatcgctgtttcatgtgcaggaagaaagtgggacttactgggtttgaatgccggtgtggaaatgtttactgtggtgtacaccgttact

SEQ ID NO: 88837 - DNA, 120 bp, Artificial Sequence
  ENSG00000086666_7 (sequence is synthesized)
tacaaagccgatgctgctgagaaaatcagaaaagaaaatccagtagttgttggtgaaaagatccaaaagatttgaactcctgctggaatacaaaattcttgagcatctgcaaactaaaaa

SEQ ID NO: 88838 - DNA, 120 bp, Artificial Sequence
  ENSG00000086666_8 (sequence is synthesized)
ttgacttgaggttttttttttcctagtcattgggaatgtagagcagtgtatcttgcatgtcatcggaagaatagatttttgttttggttttgttttgaaaatgactctgaacatttattt

SEQ ID NO: 88839 - DNA, 120 bp, Artificial Sequence
  ENSG00000086666_9 (sequence is synthesized)
ccattgcaatttctgtggctgaggagacttaaactttacaagtattatccttttaagatcattttaattttagttgagtgcagagggcttttataacaaacgtgcagaaattttggaggg

SEQ ID NO: 88840 - DNA, 120 bp, Artificial Sequence
  ENSG00000086666_10 (sequence is synthesized)
ctgtgatttttccagtattaaacatgcatgcattaatcttgcagtttattttctcattgtgtatgtatatatcgcttttctctgcagcacgatttctcttttgataatgccctttagggc

SEQ ID NO: 88841 - DNA, 120 bp, Artificial Sequence
  ENSG00000086666_11 (sequence is synthesized)
acaactagttatcagtaactgaatgtatcttaatcattatggctgcttctgttttttcattaacaaaggttattcatatgttagcatatagtttctttgcacccactatttatgtctgaa

SEQ ID NO: 88842 - DNA, 120 bp, Artificial Sequence
  ENSG00000086666_12 (sequence is synthesized)
tcatttgtcacaagagagtgtgtgctgatgagattgtaagtttgtgtgtttaaacttttttttgagcgagggaagaaaaagctgtatgcatttcattgctgtctacaggtttctttcaga

SEQ ID NO: 88843 - DNA, 120 bp, Artificial Sequence
  ENSG00000086666_13 (sequence is synthesized)
ttatgttcatgggtttgtgtgtatacaatatgaagaatgatctgaagtaattgtgctgtatttatgtttattcaccagtctttgattaaataaaaaggaaaaccagaatgctcccttgta

SEQ ID NO: 88844 - DNA, 120 bp, Artificial Sequence
  ENSG00000086666_14 (sequence is synthesized)
cagatactttggtgttgaacatttgggatagaagagagaaatttaaaattaaaaattttccatatttctatcacaaatattggtgtgcaactgaggaacatggctcaagaaactaatcac

SEQ ID NO: 88845 - DNA, 120 bp, Artificial Sequence
  ENSG00000086666_15 (sequence is synthesized)
gctttggagtacagcttcaagtgaagttaatctgaggtgaagcaaacagaaaattgtggaggttttgttggtgtgcaactgaggaacatggctcaagaaactaatcacagccaagtgcct

SEQ ID NO: 88846 - DNA, 120 bp, Artificial Sequence
  ENSG00000086666_16 (sequence is synthesized)
taagttttagctacctaaaaaagtatgaaagaatattgtgtttgaaatctttttaacttggtttttaagtcacgtgctaactatcctacacagttgggacgctatgatttaccttcacat

SEQ ID NO: 88847 - DNA, 120 bp, Artificial Sequence
  ENSG00000086666_17 (sequence is synthesized)
ctcggaagttgtaaccagttgtgaggaagttaggaccttggggttacctaaagataatttatattaagttgttgggccataaaaactgggcagaattggccacgcgcggtgactcaacgc

SEQ ID NO: 88848 - DNA, 120 bp, Artificial Sequence
  ENSG00000086666_18 (sequence is synthesized)
gaagagagaaatttaaaattaaaaattttccatatttctatcacaaatattggtaatttgacaacatgtaatttgattgtcgtcttaataaaatttaatgttattgctaccaaatagaga

SEQ ID NO: 88849 - DNA, 120 bp, Artificial Sequence
  ENSG00000086666_19 (sequence is synthesized)
aaagtgggacttactggtaaggacctaaatcaaatgtttaaaattaaaatgatgttttataataatgcatagcttactgttgttgacttcaattaagattgttcctgttcccttgagagt

SEQ ID NO: 88850 - DNA, 120 bp, Artificial Sequence
  ENSG00000086666_20 (sequence is synthesized)
taatattggatatacttcaccttctgaattttcttaaggaaataaaaatagctttgattatacacctaaaagtgaaatgaatagcttttttaaaaaaagttttatttcagttgaatttag

SEQ ID NO: 88851 - DNA, 120 bp, Artificial Sequence
  ENSG00000086666_21 (sequence is synthesized)
ctgtggacaaagcagtacctgaaacagaagatgtgcaggggtttgaatgccggtgtggaaatgtttactgtggtgtacaccgttactcagatgtacacaattgctcttacaattacaaag

SEQ ID NO: 88852 - DNA, 120 bp, Artificial Sequence
  ENSG00000086666_22 (sequence is synthesized)
cccaatacctttttctgctctcacattatatttatattaccatattcatatcagtaaaatttctcattacacattgtgattataatcagtagtgaggagttaggaatgagtatcatcact

SEQ ID NO: 88853 - DNA, 120 bp, Artificial Sequence
  ENSG00000086666_23 (sequence is synthesized)
cattgaaaatactgtaaattcataccataatcttatttctgtggctgtggaattctgttactttatttagaggggacacctcaagtgtcttggaaagtaagggaagagagtgataaaaga

SEQ ID NO: 88854 - DNA, 120 bp, Artificial Sequence
  ENSG00000086666_24 (sequence is synthesized)
cgccggtagccacctaagataggaatgtcaatcagaagttttctagaatctatcttcagatgcaaacaatacagtggcctcttgttggagatccaaaggctcagaactcggaattactgt

SEQ ID NO: 88855 - DNA, 120 bp, Artificial Sequence
  ENSG00000086666_25 (sequence is synthesized)
atgcaacaggaaacactaatctcaagcacctatgccaagttaggtgtgcaactgaggaacatggctcaagaaactaatcacagccaagtgcctatgctttgttccactggctgtggattt

SEQ ID NO: 88856 - DNA, 120 bp, Artificial Sequence
  ENSG00000086666_26 (sequence is synthesized)
gttatttgagtattataggccagacactatcctaggtgcatgtataaaaaaattgccagcttaaaatacatgtttttctgttttccctatgaacacaatactttatatctttaagtattt

SEQ ID NO: 88857 - DNA, 120 bp, Artificial Sequence
  ENSG00000086666_27 (sequence is synthesized)
aattaacatgttggggagccatttcacacttacatgtaattttatcatcagcataaatgttgcaaattcaaaatttgtttagtttggaaaatataattaaatgaatgtgtggcagtgtta

SEQ ID NO: 88858 - DNA, 120 bp, Artificial Sequence
  ENSG00000086666_28 (sequence is synthesized)
acagcttcaagtgaagttaatctgaggtgaagcaaacagaaaattgtggaggttttgttggtggagataagtaattaacatttcgaaacaggaaatgaaaggatttatatttttaaaagc

SEQ ID NO: 88859 - DNA, 120 bp, Artificial Sequence
  ENSG00000086666_29 (sequence is synthesized)
ttgtcgaatgtctgctatgtggttggagacactgggataggcactgataatgggataaataggaccgatgtctcccctcaaagaattcaaagttaaaccaagttaagccaatgagggaat

SEQ ID NO: 88860 - DNA, 120 bp, Artificial Sequence
  ENSG00000086666_30 (sequence is synthesized)
tttaatatgaaaagtgctatacacagggtttcccaccccaaggttgttggagaggcagtggaggaagagctgattatataagcttaaacaagaaaaacaagttagagttagcctgataaa

SEQ ID NO: 88861 - DNA, 120 bp, Artificial Sequence
  ENSG00000086666_31 (sequence is synthesized)
aagagggacaggaggggcatagaaagagtattttgtatggaaagcacaacttatacaagagcccagaggcaaaagagagtttgatatgtccagggaaactgcaagtccttcagtatggct

SEQ ID NO: 88862 - DNA, 120 bp, Artificial Sequence
  ENSG00000086666_32 (sequence is synthesized)
gaatcatggagtactgttgaggaatagtgagagatgaggctagagaaagaaggatgaagaaaatcatgaaggacctctgggctttatcctggggggtagttgggagccattgaggaattc

SEQ ID NO: 88863 - DNA, 120 bp, Artificial Sequence
  ENSG00000086666_33 (sequence is synthesized)
taaacatcagagggaacaccattagattttcacttaaggcagatgattggatgcaatgtgtgaagcatggattgtagagggaactcatgaggtgcccagtatttggaaaaggtgttaagg

SEQ ID NO: 88864 - DNA, 120 bp, Artificial Sequence
  ENSG00000086666_34 (sequence is synthesized)
aaaatcagagtgagaagctacagagaattgagacaaggaaagggtatttgaccttggtcttgaaaaagaggaggacctagatcaaatggggaaaaaggaaaccctttggaatagattcta

SEQ ID NO: 88865 - DNA, 120 bp, Artificial Sequence
  ENSG00000086666_35 (sequence is synthesized)
agaagtgtgagcaaaggtacatggcatattcccagtgtagattaatggagcagtggatccctggggaaagtctagttggggataaaactggagaggttaagaatttgatccatgggaaat

SEQ ID NO: 88866 - DNA, 120 bp, Artificial Sequence
  ENSG00000086666_36 (sequence is synthesized)
tccaccattttagagcaaaatgtcacgtctgcaaggtcatattatatgattctgactctggcgacagcattcatgagggctagagtagttagcaactggagggaggcatgttaagatttc

SEQ ID NO: 88867 - DNA, 120 bp, Artificial Sequence
  ENSG00000086666_37 (sequence is synthesized)
agagtagtaatttaacccgaatcttggtaaatctggctttggtttccatacataaatgcatcaacttattatcttacaacattttaaagcttctttgcttcaatttgccttatttctaac

SEQ ID NO: 88868 - DNA, 120 bp, Artificial Sequence
  ENSG00000086666_38 (sequence is synthesized)
atttaaagtgcttttatgtgaaacattctgggaactttaaacatacttaatattccacagaatcttggtttcaccttttccctcctcgttctctgagagacctatgtcattctgaccccg

SEQ ID NO: 88869 - DNA, 120 bp, Artificial Sequence
  ENSG00000086666_39 (sequence is synthesized)
gtgccttttattgattaaatttgtagttactagaaaaattagaaagtacagttaaaacctaaagaaagtctataaaaccactgttaacatatcattacatattctagattattttctaca

SEQ ID NO: 88870 - DNA, 120 bp, Artificial Sequence
  ENSG00000086666_40 (sequence is synthesized)
tgcatatatacatacatttaacaaaaaggggtcatatttttgtaaacaactttgtaatttaatgactagttttctgtgctaataaattcctcagtatcctctgaataatagactagggag

SEQ ID NO: 88871 - DNA, 120 bp, Artificial Sequence
  ENSG00000086666_41 (sequence is synthesized)
cctcttggtgtgcaactgaggaacatggctcaagaaactaatcacagccaagtgcctatgctttgttccactggctgtggattttatggaaaccctcgtacaaatggcatgtgttcagta

SEQ ID NO: 88872 - DNA, 120 bp, Artificial Sequence
  ENSG00000086696_0 (sequence is synthesized)
acccactgggaatatgattatgcttaatctatgctcagttgaaaggggctggggctgctttctcccctcccttcttgactctctgttcacagaactcaggctgcctccagccagcctttg

SEQ ID NO: 88873 - DNA, 120 bp, Artificial Sequence
  ENSG00000086696_1 (sequence is synthesized)
cccgctagactcactggccctgagcacttgaaggtgcagcaagtcactgagaatgagcactttcttctcggacacagcatggatctgcctggctgtccccacagtactatgtgggacagt

SEQ ID NO: 88874 - DNA, 120 bp, Artificial Sequence
  ENSG00000086696_2 (sequence is synthesized)
attttgcaaatacaagaagagctcagggcagctgtggagctggatggtctgcctggcaggcctctgtgcagtctgcctgctcatcctgtcccctttttggggcttgatcctcttctcggt

SEQ ID NO: 88875 - DNA, 120 bp, Artificial Sequence
  ENSG00000086696_3 (sequence is synthesized)
gtcatgcttcctcatgtatacttacttatctggccaagaattgttacctgtggatcagaaggcagtcctggtgacaggtggtgattgcgggcttggccatgctttgtgcaagtatctgga

SEQ ID NO: 88876 - DNA, 120 bp, Artificial Sequence
  ENSG00000086696_4 (sequence is synthesized)
tgagctgggcttcacggtatttgccggagttttgaatgaaaatggcccaggagctgaggaattgcgaagaacctgctctccgcgcctctcggtgctccaaatggacatcacgaagccagt

SEQ ID NO: 88877 - DNA, 120 bp, Artificial Sequence
  ENSG00000086696_5 (sequence is synthesized)
tatgactgactacaaacaatgcatggccgtgaacttctttggaactgtggaggtcacaaagacgtttttgcctcttcttagaaaatccaaagggaggctggtgaatgtcagcagcatggg

SEQ ID NO: 88878 - DNA, 120 bp, Artificial Sequence
  ENSG00000086696_6 (sequence is synthesized)
aggaggggccccaatggaaaggctggcatcttatggctcatcaaaggcggctgtgaccatgttctcatcagttatgagactggagctttccaagtggggaattaaagttgcttccatcca

SEQ ID NO: 88879 - DNA, 120 bp, Artificial Sequence
  ENSG00000086696_7 (sequence is synthesized)
acctggaggcttcctaacaaatatcgcaggcaccagtgacaagtgggaaaagctggagaaggacattctggaccacctccccgctgaggtacaggaagactacggccaggactacatctt

SEQ ID NO: 88880 - DNA, 120 bp, Artificial Sequence
  ENSG00000086696_8 (sequence is synthesized)
agcacagcggaatttcctcctattgatcaactcgttagccagcaaggacttctctccggtgctgcgggacatccagcatgctatcttggcgaagagcccttttgcctattacacgccagg

SEQ ID NO: 88881 - DNA, 120 bp, Artificial Sequence
  ENSG00000086696_9 (sequence is synthesized)
gaaaggcgcttacttgtggatctgccttgctcactatttgcctattggcatatatgattactttgctaaaagacattttggccaagacaagcccatgcccagagctctaagaatgcctaa

SEQ ID NO: 88882 - DNA, 120 bp, Artificial Sequence
  ENSG00000086696_10 (sequence is synthesized)
ctacaagaaaaaggccacctaggcaatggaagccctcaaagaagtcggaatgtcatagtcttgaaatgaaagggaaactgggaaactgggtttctcattaaagttgtttcccactctgta

SEQ ID NO: 88883 - DNA, 120 bp, Artificial Sequence
  ENSG00000086696_11 (sequence is synthesized)
cttgaagaagacagtattttcctgtgagctagaggatcttcctgttattctccatgcagttcaaattctgtcaattattatccagttagtcatcgctccagaggtggactgtcattaaaa

SEQ ID NO: 88884 - DNA, 120 bp, Artificial Sequence
  ENSG00000086696_12 (sequence is synthesized)
gaaggtcctcttggtctgacagagcacacattgaacccctcattgttgtcaaagatgagcacagccagagatcagttaaaggggtgaaaacaggtttgattcagtaactgctgacagtag

SEQ ID NO: 88885 - DNA, 120 bp, Artificial Sequence
  ENSG00000086696_13 (sequence is synthesized)
gggaaagagctaagctccattctgatttgtgcgaaggtgttttaaacattttaaaaggaaaaccagggagaggggaaagcatggctcagtaagtcagattagtgaaaaagtacaagggtc

SEQ ID NO: 88886 - DNA, 120 bp, Artificial Sequence
  ENSG00000086696_14 (sequence is synthesized)
catcagtgtccatgcagaggggccagctgtgtctgccagctggcaattaaagaagtccagattctgtcttcccacagagacagagaaacagaggtctgatccttgatgattcagttccaa

SEQ ID NO: 88887 - DNA, 120 bp, Artificial Sequence
  ENSG00000086696_15 (sequence is synthesized)
aggaatggctctcagatcctggagagaaatgcttctgcattgcaagagctatatatttacaatttaaagttcttttttagtaagtatttcaggaaagggaagtcagggacctctcaggga

SEQ ID NO: 88888 - DNA, 120 bp, Artificial Sequence
  ENSG00000086696_16 (sequence is synthesized)
tgtcttggatagaacaaatagtaaaattttctggcaaggttgagccttcttaggcaggcattttagggaggggctggtgttatccaagggacagggccttatgctgctagaaactgtgct

SEQ ID NO: 88889 - DNA, 120 bp, Artificial Sequence
  ENSG00000086696_17 (sequence is synthesized)
ggagtttcgttaagtctcttagtgcagggggttgggaaggggttgtcatgcatccagagctctccagctctcagtgtccacccagcagggcttgggttgcatgggcctcttctaagtgcc

SEQ ID NO: 88890 - DNA, 120 bp, Artificial Sequence
  ENSG00000086696_18 (sequence is synthesized)
atgctctccatgtatggcttcacccctgcttcctttcacaaaggaattgcgttggcttataagtcatcagcaagcagaggccacactgggttagaaccctggtcccctggtgcctgctct

SEQ ID NO: 88891 - DNA, 120 bp, Artificial Sequence
  ENSG00000086696_19 (sequence is synthesized)
gagcgggacctttctgggacacacactccctccctcaatggtagagttgtatttggtctgtgggaacgcagctcaaaaatggtccctaactgactctcaccaattttgattattttcatt

SEQ ID NO: 88892 - DNA, 120 bp, Artificial Sequence
  ENSG00000086696_20 (sequence is synthesized)
gccccacccaaacctgtttaacaatgtataatccattagtttcatactaggtttctttatttggcttcagagcttattttcatctaaaagtttgagcagatagtcagagtaacatttatt

SEQ ID NO: 88893 - DNA, 120 bp, Artificial Sequence
  ENSG00000086696_21 (sequence is synthesized)
agtcttttgctgccattggccaagaaggtttccttccccagcttctttatatttcagaaacaatatttttctccttccctctgaagaatatgacccacctcccctccaccccaagaggag

SEQ ID NO: 88894 - DNA, 120 bp, Artificial Sequence
  ENSG00000086696_22 (sequence is synthesized)
aaggcccttctctccactcccctccctgcatatctgaactctgggaagaggcagcctaccccaaggctcagtcttcagttctgggccatcaaacatttaaccgatgattcaagtgaagat

SEQ ID NO: 88895 - DNA, 120 bp, Artificial Sequence
  ENSG00000086696_23 (sequence is synthesized)
gtaaaaagtatgtctaataaaagaccacagactgggaggtattgctaaatgcacgaaagaacaaaccctaaaggtttgaatgttatcccaaatgcaaaagataaaatctatacagaaata

SEQ ID NO: 88896 - DNA, 120 bp, Artificial Sequence
  ENSG00000086696_24 (sequence is synthesized)
ttgaaattttggcttgaaacacttgatagctgagaacctcctaaggttgcagagggggtgcaagactcagagaaagggacagagacccagagaaagggatatgggtcaacacgatgacag

SEQ ID NO: 88897 - DNA, 120 bp, Artificial Sequence
  ENSG00000086696_25 (sequence is synthesized)
gcaggaccagggcgatagaaatgcagagaagatgaagtcttgagatgggtttccaacttggggactccctgggttgggaggagaattgaggagaggagatggagaagagacatgggtcag

SEQ ID NO: 88898 - DNA, 120 bp, Artificial Sequence
  ENSG00000086696_26 (sequence is synthesized)
aggtgaagccaaatgtgctggttggactgagagactgggatacaaagagagggaagctgcttgagagctggtacaagagggaaatggtgaatttgattttgaatctggcaggaggattga

SEQ ID NO: 88899 - DNA, 120 bp, Artificial Sequence
  ENSG00000086696_27 (sequence is synthesized)
gtgtttggtgacacagcccaaagagaattccaacacacagatgtaaaattccatttagacgagagagcaatcctgcagttaggttatgattttggagattcagtataattgctatgcata

SEQ ID NO: 88900 - DNA, 120 bp, Artificial Sequence
  ENSG00000086696_28 (sequence is synthesized)
atagttctggagagctgttctcacccacttaccatacattctttactgatgttgatcttaatttttaaaatcgagaaatatataaacagaaaaaagcattatacgcacagggttcaacaa

SEQ ID NO: 88901 - DNA, 120 bp, Artificial Sequence
  ENSG00000086696_29 (sequence is synthesized)
attattataaatcctcttgtacttaacacccagatcaaaaaataaaacattaccaacacccagaagcccctatatgatcctctaccatcacagccctctccaacctcccaataggtaatc

SEQ ID NO: 88902 - DNA, 120 bp, Artificial Sequence
  ENSG00000086696_30 (sequence is synthesized)
acctcttactttttgtaatgatcatttatttgcttttctttgtagagtcacatccagcccacttaatagcatttgactttaactgcttttgcactttcaatggaatcaatatgtatgtat

SEQ ID NO: 88903 - DNA, 120 bp, Artificial Sequence
  ENSG00000086696_31 (sequence is synthesized)
ccttttgtgtctggcttctttcactcaatattctgattagacaatttatctgcactgtgtgtagctgtagtccactcatttcattgctgtgcagtattctgtgaatatgccatgattttc

SEQ ID NO: 88904 - DNA, 120 bp, Artificial Sequence
  ENSG00000086696_32 (sequence is synthesized)
tactgttgatgggatgtttgagtcccttctagtttgaacaagtatgaacaatgcagctatgaactttctggtacatgtactttggtttttgtgtgcttgaattttcccatgacacatgct

SEQ ID NO: 88905 - DNA, 120 bp, Artificial Sequence
  ENSG00000086696_33 (sequence is synthesized)
gcagagtgaaattgttaccaaaaagggctcctgatccagattccaagagagggtttttggatcttgtgtgagaaagaatttggggtgaatctgtagagtaaagtgaaagcaagtttatta

SEQ ID NO: 88906 - DNA, 120 bp, Artificial Sequence
  ENSG00000086696_34 (sequence is synthesized)
agaaagtaaaggaataaaagaatgcctacttcttaggcagagcagcagcatggactgcttgactgagtatacttatagttacttcttgattatattctagacaaggagtggattattcat

SEQ ID NO: 88907 - DNA, 120 bp, Artificial Sequence
  ENSG00000086696_35 (sequence is synthesized)
gagttttctgggaaagtgggagggatggcctggaactgtgggttcctcccccttttagaccatacagagcaacttctggacattgccatggcatttataaactgtcctggtgctggtgga

SEQ ID NO: 88908 - DNA, 120 bp, Artificial Sequence
  ENSG00000086696_36 (sequence is synthesized)
tcttttagcatgctaatgcattataagtagcatataatgagcagtgaggatgaccagaggtcactgttgttgccatcttgattttggtgggttttggctggctgctttaccacatcctgt

SEQ ID NO: 88909 - DNA, 120 bp, Artificial Sequence
  ENSG00000086696_37 (sequence is synthesized)
ctgttttatcagcagagttactatgacttgtatcttgtgataccaatcctgccaacctcttatctaatcctgtgattaagaatgcttaacctccagggaatgcagcccagcaggtctcat

SEQ ID NO: 88910 - DNA, 120 bp, Artificial Sequence
  ENSG00000086696_38 (sequence is synthesized)
tacccagcccctattcaagatggagttactcttgttcaaatgcctctgaaagaatgactagatcatagagttttcctgtcttcagctttactgaatcataccaacctgttttctaaaata

SEQ ID NO: 88911 - DNA, 120 bp, Artificial Sequence
  ENSG00000086696_39 (sequence is synthesized)
ctaaaatattgctccaatttatacctctaccctttctatgtatactccaatcaccacaactctgaggagcaggtttcattgacattattctccaggtgatggtgctgagttggggtggat

SEQ ID NO: 88912 - DNA, 120 bp, Artificial Sequence
  ENSG00000086696_40 (sequence is synthesized)
aacatgcccttgggtggggatctggtatcccacgtacaccgtgatggtggaaaatttgagatcagatcctgagatgcagtgcctgggttcttccttttatatcaggctgccccccagttt

SEQ ID NO: 88913 - DNA, 120 bp, Artificial Sequence
  ENSG00000086696_41 (sequence is synthesized)
tatttgatgagctctctcaaggcaagaagcccaagagcagaaggctgagaactcatgtttggagaatgacacttcatacttatatttatttgaaggtaggggcaagaaaaggaatcttca

SEQ ID NO: 88914 - DNA, 120 bp, Artificial Sequence
  ENSG00000086696_42 (sequence is synthesized)
gggacacagacaaggagcttctgaagacattctaagagacattccagatttttctggtgccctgaaataaagatagctaaatcatactgcatgctagattagcagattttaagtgcttta

SEQ ID NO: 88915 - DNA, 120 bp, Artificial Sequence
  ENSG00000086696_43 (sequence is synthesized)
tgtgcattatctcccttaatcctcacctgtgaagtaggcatcataatagccccatcttgcagtgagaaaatggaggctcagagaagttaaggaagttccaaagccatagagctgatagga

SEQ ID NO: 88916 - DNA, 120 bp, Artificial Sequence
  ENSG00000086696_44 (sequence is synthesized)
ggcagagatgggattttgatacaggtcatatcaataacttcattgtgtgcagcaccaaagtggcatgggagggatgggtagggagagtctgtcaaaagtgggagatgatgacggactgat

SEQ ID NO: 88917 - DNA, 120 bp, Artificial Sequence
  ENSG00000086696_45 (sequence is synthesized)
ggcaaaaggctgatggctttgtcactcacagagacagctttggggactctggataggttacccacaagagtggccagaaattccatgaggtgtttaaagaagaatgaggtgtcagcccac

SEQ ID NO: 88918 - DNA, 120 bp, Artificial Sequence
  ENSG00000086696_46 (sequence is synthesized)
gaagacagggacaggggagaggtaggaggaggaatagtagctcacgaaaacatgtttttcaggacctagaaacctccagagtaattgtcatgataatcatttctttaagcacggtgtgtg

SEQ ID NO: 88919 - DNA, 120 bp, Artificial Sequence
  ENSG00000086696_47 (sequence is synthesized)
ccttcctgaaaagaaaggagcaattgaaactccgtttgcatttccataagtataattggatttcactggcctacatttccaagtgagcatccctccttctctgcagtcctgatatccagg

SEQ ID NO: 88920 - DNA, 120 bp, Artificial Sequence
  ENSG00000086696_48 (sequence is synthesized)
agtcaccgaagctagcaagggctcatccccacagctatgtgaacaaccaagcactttgcaggagacagcgtgggagaccgcaagctttttggaaagtaatctggcagtagctattaaaat

SEQ ID NO: 88921 - DNA, 120 bp, Artificial Sequence
  ENSG00000086696_49 (sequence is synthesized)
tcaaaattaatgtgccttcgaccaggctgtactttgaggactcttgcctacagaaataaagccaaagtaaaaacgaataggtggtgaaagtcgatttactgcagcagtgcctgaaatgct

SEQ ID NO: 88922 - DNA, 120 bp, Artificial Sequence
  ENSG00000086696_50 (sequence is synthesized)
gaaacctataggaacaactggaaggtcattggatagggaagtgattggctaaaagctgttcaatgggaaattctgttgctctggtttaatccatagacattgacaagaagggaggtctgt

SEQ ID NO: 88923 - DNA, 120 bp, Artificial Sequence
  ENSG00000086696_51 (sequence is synthesized)
gatttattactaagccaaaacaaattcatggaaaatataaacaccatagtatgatcctttttgtttttgttatttcctggtaaaaaaaattaaaccaaattcttctatgtgtatgtatgt

SEQ ID NO: 88924 - DNA, 120 bp, Artificial Sequence
  ENSG00000086696_52 (sequence is synthesized)
ttgtatgaacaaggaaggaatgtagaagggcacacaaaactgttagttaccttagaggagattaattttaaaaatatgcacatctccttattattcactttatataatgaggaggcagag

SEQ ID NO: 88925 - DNA, 120 bp, Artificial Sequence
  ENSG00000086696_53 (sequence is synthesized)
gaggaggcagagctgctacattttaaagtaaataaattatttaattttatatgataagcaggtattgtctttattttaaaaatatatttatacttaattgcatgtagtttgtgtattaaa

SEQ ID NO: 88926 - DNA, 66 bp, Artificial Sequence
  ENSG00000086696_54 (sequence is synthesized)
aaaacataaatgaaaattatatccattaagtagattaaatatttaaaatcctgcgcagtggtgcga

SEQ ID NO: 88927 - DNA, 120 bp, Artificial Sequence
  ENSG00000086696_55 (sequence is synthesized)
caggcatgagccaccatgcccagcctaaaatcctatatttaattggtaggcattacttctatatcttaaaaaattatacgtgtgtatgcttatatgagtgtatatatactatattatata

SEQ ID NO: 88928 - DNA, 120 bp, Artificial Sequence
  ENSG00000086696_56 (sequence is synthesized)
tatacagtatatattatattgtagacattacatgatatattatatatgtaatagtcaccaaaagatgagtgtctgtggcagcagcatttctaaaggcccagttgaaaataagcgcagtgc

SEQ ID NO: 88929 - DNA, 120 bp, Artificial Sequence
  ENSG00000086696_57 (sequence is synthesized)
ccatcacagtatagtggataaataattcatggcatttttatgcaacggaatactatgctgaaaggagaatcaacacacagtgcatggatgaatgtcacaaatatactgttgaataaagaa

SEQ ID NO: 88930 - DNA, 120 bp, Artificial Sequence
  ENSG00000086696_58 (sequence is synthesized)
gctgatgctaaacaatgagtgctattcatacgattccatttatataaatgttcaaaaccagccaagatgaatctgtcctattaatcaggaaaatggttactgagaagtgggctgaaagga

SEQ ID NO: 88931 - DNA, 76 bp, Artificial Sequence
  ENSG00000086696_59 (sequence is synthesized)
ttaatcaggaaaatggttactgagaagtgggctgaaaggagagattttaaggctggtcccttaaaattggagtgta

SEQ ID NO: 88932 - DNA, 120 bp, Artificial Sequence
  ENSG00000086696_60 (sequence is synthesized)
aatagctcactgcatcctccaactcgtgggctcgaggggtcctcccacttcagtctcccgaatagctgggactagagataagcaccattgtgcccagctaaatttctgtgtatatgtcta

SEQ ID NO: 88933 - DNA, 89 bp, Artificial Sequence
  ENSG00000086696_61 (sequence is synthesized)
acacacacacacacacacacacagacacatatatatatatattttagagatgggatctcaggctcaagcgattccccttcctgggcctc

SEQ ID NO: 88934 - DNA, 120 bp, Artificial Sequence
  ENSG00000086696_62 (sequence is synthesized)
agtgctgagattacaggtatgagccacggtgcccagacttgttttgttcttgatctgtttgctagtcacatgggctatcagtttggaaaaatccaattacgtgtgcacttttctgtatgt

SEQ ID NO: 88935 - DNA, 120 bp, Artificial Sequence
  ENSG00000086696_63 (sequence is synthesized)
ttacgtgtgcacttttctgtatgtaggtttagaaatgataataaatgccattataaagcacacattttaaaaggcgtttgcaggccaggcgtggtggctcacgcctgaaatctcagcact

SEQ ID NO: 88936 - DNA, 71 bp, Artificial Sequence
  ENSG00000086696_64 (sequence is synthesized)
agaatcacttcaagcctgagagacagagaaagactctgtatcccaaaaataaaaaaataaaaaaataaata

SEQ ID NO: 88937 - DNA, 120 bp, Artificial Sequence
  ENSG00000086696_65 (sequence is synthesized)
aaaaaataaaaaaataaataaataaacgtcatttgcaaagggccatccttcccaacagagacaagcgcctgctccctgacttccttggccttcccaggatctgactcttccctttccttt

SEQ ID NO: 88938 - DNA, 120 bp, Artificial Sequence
  ENSG00000086696_66 (sequence is synthesized)
tgcccatcacaagacatggctcatggcattctatgtgggcgaacaaaaatgcagggcatgcaaaggcagggttgggtcaggattagtcaaattgtatataccctgttggtcttatcacaa

SEQ ID NO: 88939 - DNA, 120 bp, Artificial Sequence
  ENSG00000086696_67 (sequence is synthesized)
taatgtgactgccaacacacatggttggtagatttgtacaggaaatctcacattacaaataatgtcagcatttcaggcaacctgttttcaacacttcgtcaatttaacacactgtgttca

SEQ ID NO: 88940 - DNA, 120 bp, Artificial Sequence
  ENSG00000086696_68 (sequence is synthesized)
gttccctgtaagctgagtaggcaataccttccctctgtttgtgccatcaaacaaaagctgcctgctattgttaacccgaagattgtccccagtgttgagcagcctcaatccagctaggtc

SEQ ID NO: 88941 - DNA, 120 bp, Artificial Sequence
  ENSG00000086696_69 (sequence is synthesized)
aggatgtgatgacactggatagtttgtctctctctgtttccaagaacaaatagtacacaacttgagtcaagggctgaacagtcttgccttttcataaaaaatgcccatgcgtgtcatagc

SEQ ID NO: 88942 - DNA, 120 bp, Artificial Sequence
  ENSG00000086696_70 (sequence is synthesized)
atgccctcttttctgggacagacattttcaaactggggttccttgggctcttgttcagtttagggaagatccatcgacctgacttttgggtcactgggtcactgcagaggtgagagggaa

SEQ ID NO: 88943 - DNA, 120 bp, Artificial Sequence
  ENSG00000086696_71 (sequence is synthesized)
gccaaagggatgggctctggatcctaggatcctgccttcaaatagaggagtaccactcttcactgttggatcaattaattctaagtaaaatttcttaaaataaagggtatgactatgctg

SEQ ID NO: 88944 - DNA, 120 bp, Artificial Sequence
  ENSG00000086712_0 (sequence is synthesized)
gtttggctgctgccgtcacctcatggcgacgcgggtagaggaggcagcgcggggaagaggcggcggcgccgaagaggcgactgaggccggacggggcggacggcgacgcagcccgcggca

SEQ ID NO: 88945 - DNA, 120 bp, Artificial Sequence
  ENSG00000086712_1 (sequence is synthesized)
gaagtttgaaattggcacaatggaagaagctggaatttgtgggctaggggtgaaagcagatatgttgtgtaactctcaatcaaatgatattcttcaacatcaaggctcaaattgtggtgg

SEQ ID NO: 88946 - DNA, 120 bp, Artificial Sequence
  ENSG00000086712_2 (sequence is synthesized)
cacaagtaacaagcattcattggaagaggatgaaggcagtgactttataacagagaacaggaatttggtgagcccagcatactgcacgcaagaatcaagagaggaaatccctgggggaga

SEQ ID NO: 88947 - DNA, 120 bp, Artificial Sequence
  ENSG00000086712_3 (sequence is synthesized)
agctcgaacagatccccctgatggtcagcaagattcagagtgcaacaggaacaaagaaaaaactttaggaaaagaagttttattactgatgcaagccctaaacaccctttcaaccccaga

SEQ ID NO: 88948 - DNA, 120 bp, Artificial Sequence
  ENSG00000086712_4 (sequence is synthesized)
ggagaagctggcagctctctgtaagaaatatgctgatcttctggaggagagcaggagtgttcagaagcaaatgaagatcctgcagaagaagcaagcccagattgtgaaagagaaagttca

SEQ ID NO: 88949 - DNA, 120 bp, Artificial Sequence
  ENSG00000086712_5 (sequence is synthesized)
cttgcagagtgaacatagcaaggctatcttggcaagaagcaagctagaatctctttgcagagaacttcagcgtcacaataagacgttaaaggaggaaaatatgcagcaggcacgagagga

SEQ ID NO: 88950 - DNA, 120 bp, Artificial Sequence
  ENSG00000086712_6 (sequence is synthesized)
agaagaacgacgtaaagaagcaactgcacatttccagattaccttaaatgaaattcaagcccagctggagcagcatgacatccacaacgccaaactccgacaggaaaacattgagctggg

SEQ ID NO: 88951 - DNA, 120 bp, Artificial Sequence
  ENSG00000086712_7 (sequence is synthesized)
ggagaagctaaagaagctcatcgaacagtacgcactgagggaagagcacattgataaggtgttcaaacataaggaactgcaacagcagctcgtggatgccaaactgcagcaaacgacaca

SEQ ID NO: 88952 - DNA, 120 bp, Artificial Sequence
  ENSG00000086712_8 (sequence is synthesized)
actgataaaagaagctgatgaaaaacatcagagagagagagagtttttattaaaagaagcgacagaatcgaggcacaaatacgaacaaatgaaacagcaagaagtacaactaaaacagca

SEQ ID NO: 88953 - DNA, 120 bp, Artificial Sequence
  ENSG00000086712_9 (sequence is synthesized)
gctttctctttatatggataagtttgaagaattccagactaccatggcaaaaagcaatgaactgtttacaaccttcagacaggaaatggaaaagatgacaaagaaaattaaaaaactgga

SEQ ID NO: 88954 - DNA, 120 bp, Artificial Sequence
  ENSG00000086712_10 (sequence is synthesized)
aaaagaaacaataatttggcgtaccaaatgggaaaacaataataaagcacttctgcaaatggctgaagagaaaacagtccgtgataaagagtacaaggcccttcaaataaaactggaacg

SEQ ID NO: 88955 - DNA, 120 bp, Artificial Sequence
  ENSG00000086712_11 (sequence is synthesized)
gttagagaagctgtgcagggctcttcagacagaaaggaatgagctcaatgagaaggtggaagtcctgaaagagcaggtatccatcaaagcggccatcaaagcggcgaacagggatttagc

SEQ ID NO: 88956 - DNA, 120 bp, Artificial Sequence
  ENSG00000086712_12 (sequence is synthesized)
aacacctgtgatgcagccctgtactgccctggattctcacaaggagctgaacacttcctcgaaaagagccctgggagcgcacctggaggctgagcccaagagtcagagaagcgctgtgca

SEQ ID NO: 88957 - DNA, 120 bp, Artificial Sequence
  ENSG00000086712_13 (sequence is synthesized)
aaagcccccgtccacaggctctgctccggccatcgagtcggttgactaagatgaggtgtgatcactgtattgagagatatattttgtgtataactttctctgttagtagttaactattgg

SEQ ID NO: 88958 - DNA, 120 bp, Artificial Sequence
  ENSG00000086712_14 (sequence is synthesized)
ttttgtggtgaaaattttcttactttttctaccatatctgtattttcttagaactactggacttatgtggtacaggaggctgcttagcagttttgaatagtttaatctataaattttcct

SEQ ID NO: 88959 - DNA, 120 bp, Artificial Sequence
  ENSG00000086712_15 (sequence is synthesized)
cagctgtgttgcacatcagcctcgttctccctccactggaatgcatgtgttcattgccttgtcctttctctccctgctccttgcacattatcatcctaatgaaaatttcactgacagggc

SEQ ID NO: 88960 - DNA, 120 bp, Artificial Sequence
  ENSG00000086712_16 (sequence is synthesized)
cgaccattacaagggaactttgttctgacgatggttccttgatgtgaaaacaatattaatttaaacgtcttagcccccccccccataatattattcagaaaaacaaaataccaaggcgat

SEQ ID NO: 88961 - DNA, 120 bp, Artificial Sequence
  ENSG00000086712_17 (sequence is synthesized)
tagttttgtctaataacccatttaaatgccaagtaaaaataaaactcctagtgttgggtcagaagcatatttgattgaaattagctttttgaaaacatttatatctcgggacaaattgag

SEQ ID NO: 88962 - DNA, 120 bp, Artificial Sequence
  ENSG00000086712_18 (sequence is synthesized)
tataaagatgtcacttgtggacaaaatagtacatagaggcaaatcactagacaaataagcttagtgtttacgtgactgaacagtcatcctgctttggtttcaggtgtgggatttggacca

SEQ ID NO: 88963 - DNA, 120 bp, Artificial Sequence
  ENSG00000086712_19 (sequence is synthesized)
tgaggggctcccgtagaggatggcggtttgtgtttgattctgatttgggatttcagtacatattctccacttcccatagaaggccacttattctttgaaaactggtgttcatgtttgccg

SEQ ID NO: 88964 - DNA, 120 bp, Artificial Sequence
  ENSG00000086712_20 (sequence is synthesized)
ttcaatgaagtcccttgtcaaagacaaggacggtcaattcacgtgtcactttcactaggcagaagtttctccaataccttctggctacttgaaagttactacaaaaattccaccagcaaa

SEQ ID NO: 88965 - DNA, 120 bp, Artificial Sequence
  ENSG00000086712_21 (sequence is synthesized)
gtactccaggtttttcaaaagggaattttcattatggatcagtaccaaccgaaattgattttcatttccaaaacaaacactggcaccaacatttttactttgggaagacttggcagagtg

SEQ ID NO: 88966 - DNA, 120 bp, Artificial Sequence
  ENSG00000086712_22 (sequence is synthesized)
ttagtcatgatctgttacttacgtgttcagtctgttttctcacccccttcttagttaccatctcttttttaagaagaaaaaagaaaagccacagtattatcaaggtctctacacttggac

SEQ ID NO: 88967 - DNA, 120 bp, Artificial Sequence
  ENSG00000086712_23 (sequence is synthesized)
tgggggaaaatttgaaattaagcacataacttttgaattagttctttgtttcaatgttgaatgtggcgcagttatgcagatgattaatcaggctgcactgatggaagttttgactttgtc

SEQ ID NO: 88968 - DNA, 120 bp, Artificial Sequence
  ENSG00000086712_24 (sequence is synthesized)
cctggtataatttgcattgaaatgctttatgaaataaaaggttctactagaactgatgttagcacattccactgagcaaaactatcagactgacacttgttaaattgcttactggactga

SEQ ID NO: 88969 - DNA, 120 bp, Artificial Sequence
  ENSG00000086712_25 (sequence is synthesized)
ataaactctgttttgtccagttaaaagggttttctctttgttacaagtgttatttgtaaagtcctgtcacattcatggtcgaaactgggttgaaagaattgaaaattgtccaacagatag

SEQ ID NO: 88970 - DNA, 120 bp, Artificial Sequence
  ENSG00000086712_26 (sequence is synthesized)
atagataggaaaccgcctggagtggaggagggttgtatctaagcctccactatcagtcatgttaattcaaggggccacagtggaggaaaataaatccacaaagtagattatctaattacc

SEQ ID NO: 88971 - DNA, 120 bp, Artificial Sequence
  ENSG00000086712_27 (sequence is synthesized)
atcaaaatgagtcagaagcaaaaaacaccaccctccaacagcctcttaggagtacaccctgttctgctactaaaatactagactcatttccctggtggtgggggggaatgcaggtataga

SEQ ID NO: 88972 - DNA, 120 bp, Artificial Sequence
  ENSG00000086712_28 (sequence is synthesized)
tcagaaatataatccaccttaaaattagtactaatgatcacattatttcacaagaactctgctggatgtacagctcttaacattttattaagccatttgtgtagcccaccacgtttcttt

SEQ ID NO: 88973 - DNA, 120 bp, Artificial Sequence
  ENSG00000086712_29 (sequence is synthesized)
gtggtgcttgtcctgtgtggaagattgtaaatcttgggcctgttgcatacttccaagggctttaaagcaatgtgattaacagtacttggcctgctgcttttggcttactttgtattttta

SEQ ID NO: 88974 - DNA, 120 bp, Artificial Sequence
  ENSG00000086712_30 (sequence is synthesized)
gctagatgctattatagtgttgaaaggatatggattctgtctgggatgcatttgttgtcctttcagaacccttcctcccattaccctgtgaataaaaacaaatgggaccccctgagaagg

SEQ ID NO: 88975 - DNA, 120 bp, Artificial Sequence
  ENSG00000086712_31 (sequence is synthesized)
acatcttcctacagtgatcacctcaccagcccagtgttgtggctttgtagcgcaccccgtatctaccatattctagaacactgtaatgctactaggctggcccagaaaaggtttaaatgt

SEQ ID NO: 88976 - DNA, 120 bp, Artificial Sequence
  ENSG00000086712_32 (sequence is synthesized)
tgaattcacttaaattgcaattgttgcaccatcatggaatcgtgatgtgtattatttatattggcggtggactccaaggtgtagagaaaacttgggtcttgggtaatatggaccatttca

SEQ ID NO: 88977 - DNA, 120 bp, Artificial Sequence
  ENSG00000086712_33 (sequence is synthesized)
tcctcagacttgttaggagtacatttcttggtcttgagaccagtatttttcagttatgtatgcaactgcctttattacacctggttatcacaattcaattctcaggtgttgcagaaaaat

SEQ ID NO: 88978 - DNA, 120 bp, Artificial Sequence
  ENSG00000086712_34 (sequence is synthesized)
ctacctctttcagactgtagatggaaataactgtgaaaaaaatgatgcagatatcttctagtttgtgctaaacacactgctttatttttacagcccacgtctttcatgaggatacgaatt

SEQ ID NO: 88979 - DNA, 120 bp, Artificial Sequence
  ENSG00000086712_35 (sequence is synthesized)
gttaagaggcagtctcgttttgcttttcaaagacattttgtagagatttttcactaatgtgaatctgattttatctacttgattctgtatagattaagtaaatatgtatgataaacttaa

SEQ ID NO: 88980 - DNA, 120 bp, Artificial Sequence
  ENSG00000086712_36 (sequence is synthesized)
aaaaactggaaaaagaaacaataatttggcgtaccaaatgggaaaacaataataaagcacttctgcaaatggctgaagaggtgagatggtttcctgcgactaaggtgtagtcttagtcat

SEQ ID NO: 88981 - DNA, 120 bp, Artificial Sequence
  ENSG00000086717_0 (sequence is synthesized)
agaatctacctcttgaagattacaaatgagactgggaaaccctcttcaataagacctgtgtgatgatagattgtgtcctgagcccgcaggtcaggctgaaagagtcaacaaccagcaaag

SEQ ID NO: 88982 - DNA, 120 bp, Artificial Sequence
  ENSG00000086717_1 (sequence is synthesized)
tgaagatctaggagtctgttccccttgaacctgtgtggacctgatcaaacctcgagggaaaggctgggagaacacatccctggtcagctgtaggaaagccagagagcatttgagaagagg

SEQ ID NO: 88983 - DNA, 120 bp, Artificial Sequence
  ENSG00000086717_2 (sequence is synthesized)
ctgaagcttgaattttgcaaacacacaagccctctgcatttccccagagagaaggtttttttctcgtcttcatttcctttgaaacacctggggtgaggaaaaacctctacattggccaag

SEQ ID NO: 88984 - DNA, 120 bp, Artificial Sequence
  ENSG00000086717_3 (sequence is synthesized)
cagaagaaacagaatctatgactgaagaggatcggctaagagtggttcctcgcagcttaaagggaggcacttttcacactctgtcttaaaatcagaagttgaattcatgaacacatatga

SEQ ID NO: 88985 - DNA, 120 bp, Artificial Sequence
  ENSG00000086717_4 (sequence is synthesized)
tttagatagaagtcatgggatgcagcagttcttcaacgaaaaccaggagatctgacacatcactgagagctgcgttgatcatccagaactggtaccgaggttacaaagctcgactgaagg

SEQ ID NO: 88986 - DNA, 120 bp, Artificial Sequence
  ENSG00000086717_5 (sequence is synthesized)
ccagacaacactatgccctcaccatcttccagtccatcgaatatgctgatgaacaaggccaaatgcagttatccaccttcttttccttcatgttggaaaactacacacatatacataagg

SEQ ID NO: 88987 - DNA, 120 bp, Artificial Sequence
  ENSG00000086717_6 (sequence is synthesized)
aagagctagaattaagaaatcagtctcttgaaagcgaacaggacatgagggatagatgggattatgtggactcgatagatgtcccagactcctataatggtcctcggctacaatttcctc

SEQ ID NO: 88988 - DNA, 120 bp, Artificial Sequence
  ENSG00000086717_7 (sequence is synthesized)
tcacttgtacggatattgatttacttcttgaggccttcaaggaacaacagatacttcatgcccattatgtcttagaggtgctatttgaaaccaagaaagtcctgaagcaaatgccgaatt

SEQ ID NO: 88989 - DNA, 120 bp, Artificial Sequence
  ENSG00000086717_8 (sequence is synthesized)
tcactcacatacaaacttctccctccaaagaggtaacaatctgtggtgatttgcatgggaaactggatgatctttttttgatcttctacaagaatggtctcccctcagagaggaacccgt

SEQ ID NO: 88990 - DNA, 120 bp, Artificial Sequence
  ENSG00000086717_9 (sequence is synthesized)
atgtttttaatggtgactttgtagatcgaggaaagaattccatagagatcctaatgatcctgtgtgtgagttttcttgtctaccccaatgacctgcacttgaacagagggaaccacgaag

SEQ ID NO: 88991 - DNA, 120 bp, Artificial Sequence
  ENSG00000086717_10 (sequence is synthesized)
attttatgatgaatctgaggtatggcttcacgaaagaaattttgcataaatataagctacatggaaaaagaatcttacaaatcttggaagaattctatgcctggctcccaatcggtacaa

SEQ ID NO: 88992 - DNA, 120 bp, Artificial Sequence
  ENSG00000086717_11 (sequence is synthesized)
tcgttgacaatgaaatcctggtcatccatggtgggatatcagagaccacagacttgaatttactccaccgtgtagagaggaacaagatgaaatctgtgctgataccaccaacggaaacaa

SEQ ID NO: 88993 - DNA, 120 bp, Artificial Sequence
  ENSG00000086717_12 (sequence is synthesized)
tgacactgactcgaagcacaataaagtaggtgtgacttttaatgcacatggaagaatcaaaacaaatggatctcctactgaacacttaacagagcatgaatgggaacagattattgatat

SEQ ID NO: 88994 - DNA, 120 bp, Artificial Sequence
  ENSG00000086717_13 (sequence is synthesized)
tctgtggagtgatcccagaggcaaaaatggctgttttccaaatacgtgccgaggagggggctgctattttggaccagatgttacttccaagattcttaataaataccagttgaagatgct

SEQ ID NO: 88995 - DNA, 120 bp, Artificial Sequence
  ENSG00000086717_14 (sequence is synthesized)
catcaggtctcatgaatgtaagcccgaagggtatgaaatctgtcatgatgggaaggtggtgactatattttctgcttctaattattatgaagaaggcagcaatcgaggagcttacatcaa

SEQ ID NO: 88996 - DNA, 120 bp, Artificial Sequence
  ENSG00000086717_15 (sequence is synthesized)
actatgttctggtacaactcctcgatttttccagtaccaagtaactaaagcaacgtgctttcagcctcttcgccaaagagtggatactatggaaaacagcgccatcaagatattaagaga

SEQ ID NO: 88997 - DNA, 120 bp, Artificial Sequence
  ENSG00000086717_16 (sequence is synthesized)
gagagtgatttcacgaaaaagtgaccttactcgtgctttccaacttcaagaccacagaaaatcaggaaaactttctgtgagccagtgggctttttgcatggagaacattttggggctgaa

SEQ ID NO: 88998 - DNA, 120 bp, Artificial Sequence
  ENSG00000086717_17 (sequence is synthesized)
cttaccatggagatccctcagttcgaatctggtaaacatagaccaaaatggaaacgttgaatacatgtccagcttccagaatatccgcattgaaaaacctgtacaagaggctcattctac

SEQ ID NO: 88999 - DNA, 120 bp, Artificial Sequence
  ENSG00000086717_18 (sequence is synthesized)
tctagttgaaactctgtacagatacagatctgacctggaaatcatatttaatgccattgacactgatcactcaggcctgatctccgtggaagaatttcgtgccatgtggaaactttttag

SEQ ID NO: 89000 - DNA, 120 bp, Artificial Sequence
  ENSG00000086717_19 (sequence is synthesized)
ttctcactacaatgttcacattgatgattcccaagtcaataagcttgccaacataatggacttgaacaaagatggaagcattgactttaatgagtttttaaaggctttctatgtagtgca

SEQ ID NO: 89001 - DNA, 120 bp, Artificial Sequence
  ENSG00000086717_20 (sequence is synthesized)
tagatatgaagacttgatgaaacctgatgtcaccaaccttggctaaacacaaatgagagcttccctcaggctccctgaaacagctaggcccaaatcacaagtacagtcctttccaacacc

SEQ ID NO: 89002 - DNA, 120 bp, Artificial Sequence
  ENSG00000086717_21 (sequence is synthesized)
cctgaaattcatagtcagtagcagagaaaagcagatcccaattcatcccacaaacagatgcatagtatgggttttggaagtccctagcaagctgttattggtaagattaggttaaatgtc

SEQ ID NO: 89003 - DNA, 120 bp, Artificial Sequence
  ENSG00000086717_22 (sequence is synthesized)
agtaataggatttggtttcagcattagtacctacatattgccagtgagaaactgggttggacctagtggtgttgtcgtgagtgccacctaaccaggaggccagagcggtttgaaaacatc

SEQ ID NO: 89004 - DNA, 120 bp, Artificial Sequence
  ENSG00000086717_23 (sequence is synthesized)
ctgaaaggaactcatacagcacaagagaaaactactaagcttgacatctgtgagtgactgagggagacaggaggaataccaggttattcatggaataaagtctttccatctttaaactgt

SEQ ID NO: 89005 - DNA, 120 bp, Artificial Sequence
  ENSG00000086717_24 (sequence is synthesized)
tccaggccaggaacagagcagggctggggcagagagctgtgctcacggccagtgcattgtctcccagattcgtggctctgggcttgccttcccggctgaaaggcaaagcagcctggccct

SEQ ID NO: 89006 - DNA, 120 bp, Artificial Sequence
  ENSG00000086717_25 (sequence is synthesized)
cggctgaaaggcaaagcagcctggccctgttctagttatttctttgtgtatatatgtttgtttatttatttaagcaagagctctctctgcagagtggggtgtgtgtgtgtgtgtgtgtgt

SEQ ID NO: 89007 - DNA, 120 bp, Artificial Sequence
  ENSG00000086717_26 (sequence is synthesized)
attgctcaccattctcaagcttgaaaacccacctgcaatcatttgggcgggggggggggggcatctttaagcgcccaggtgaacttggtctgcaggcagcagctgtccttttctctggat

SEQ ID NO: 89008 - DNA, 120 bp, Artificial Sequence
  ENSG00000086717_27 (sequence is synthesized)
cttctgctgaggtcggtaggttgataagtgatactgattttgtggcaggaactcccttcagccaactcctgtcttcctgggaaggcctctggaagaaaccagtatcagaaagaatcttgt

SEQ ID NO: 89009 - DNA, 120 bp, Artificial Sequence
  ENSG00000086730_0 (sequence is synthesized)
agtgtcagtggtgttggcatcagcttgggcaggtgtgcgggctcaggatggggcggccgtggtgaggaaccctggactctcagagatggaatttcaccgtgttgcctaggctggtctgga

SEQ ID NO: 89010 - DNA, 90 bp, Artificial Sequence
  ENSG00000086730_1 (sequence is synthesized)
atcctggccaggcatcacaagaggcaacaccaggagccaacatgagctcggggactgaactgctgtggcccggagcagcgctgctggtgc

SEQ ID NO: 89011 - DNA, 120 bp, Artificial Sequence
  ENSG00000086730_2 (sequence is synthesized)
gggactgaactgctgtggcccggagcagcgctgctggtgctgttgggggtggcagccagtctgtgtgtgcgctgctcacgcccaggtgcaaagaggtcagagaaaatctaccagcagaga

SEQ ID NO: 89012 - DNA, 120 bp, Artificial Sequence
  ENSG00000086730_3 (sequence is synthesized)
agtctgcgtgaggaccaacagagctttacggggtcccggacctactccttggtcgggcaggcatggccaggacccctggcggacatggcacccacaaggaaggacaagctgttgcaattc

SEQ ID NO: 89013 - DNA, 120 bp, Artificial Sequence
  ENSG00000086730_4 (sequence is synthesized)
taccccagcctggaggatccagcatcttccaggtaccagaacttcagcaaaggaagcagacacgggtcggaggaagcctacatagaccccattgccatggagtattacaactgggggcgg

SEQ ID NO: 89014 - DNA, 120 bp, Artificial Sequence
  ENSG00000086730_5 (sequence is synthesized)
ttctcgaagcccccagaagatgatgatgccaattcctacgagaatgtgctcatttgcaagcagaaaaccacagagacaggtgcccagcaggagggcataggtggcctctgcagaggggac

SEQ ID NO: 89015 - DNA, 120 bp, Artificial Sequence
  ENSG00000086730_6 (sequence is synthesized)
ctcagcctgtcactggccctgaagactggccccacttctggtctctgtccctctgcctccccggaagaagatgaggaatctgaggattatcagaactcagcatccatccatcagtggcgc

SEQ ID NO: 89016 - DNA, 120 bp, Artificial Sequence
  ENSG00000086730_7 (sequence is synthesized)
gaggacggggaaccggattacgtgaatggggaggtggcagccacagaagcctagggcagaccaagaagaaaggagccaaggcaaagagggaccactgtgctcatggacccatcgctgcct

SEQ ID NO: 89017 - DNA, 120 bp, Artificial Sequence
  ENSG00000086730_8 (sequence is synthesized)
tccaaggaccatttcccagagctactcaacttttaagcccctgccatggttgctcctggaaggagaaccagccaccctgaggaccacctggccatgcgtgcacagcctgggaaaagacag

SEQ ID NO: 89018 - DNA, 120 bp, Artificial Sequence
  ENSG00000086730_9 (sequence is synthesized)
ttactcacgggagctgcaggcccgtcaccaagccctctcccgacccaggctttgtggggcaggcacctggtaccaagggtaacccggctcctggtatggacggatgcgcaggatttagga

SEQ ID NO: 89019 - DNA, 120 bp, Artificial Sequence
  ENSG00000086730_10 (sequence is synthesized)
taagctgtcacccagtccccataacaaaaccactgtccaacactggtatctgtgttcttttgtgctatgaatttggattcctaattgctattgttggttgctggggttttaaatgattga

SEQ ID NO: 89020 - DNA, 120 bp, Artificial Sequence
  ENSG00000086730_11 (sequence is synthesized)
taagcttgtacagttaacttatagagggggagccatatttaacattctggatttcagagtagagatttctgtgttgtctcctagaaagcattacatgtagtttatttcagcatccttgtt

SEQ ID NO: 89021 - DNA, 120 bp, Artificial Sequence
  ENSG00000086730_12 (sequence is synthesized)
gggtggggccctggctctcttcccctttggtgggacctcccctttctttgggcttcagttcactcaggaagaaatgaggctgtcgccatctttatgtgcttccagtggaaatgtcacttg

SEQ ID NO: 89022 - DNA, 120 bp, Artificial Sequence
  ENSG00000086730_13 (sequence is synthesized)
ctacagacaatagtgcatgagagtctagagaagtagtgaccagaacagggcagagtaggtcccctccatggccctgaatcctcctctgctccagggctggcctctgcagagctgattaaa

SEQ ID NO: 89023 - DNA, 120 bp, Artificial Sequence
  ENSG00000086730_14 (sequence is synthesized)
cagtgttgtgactgtctcatgggaagagctggggcccagagggaccttgagtcagaaatgttgccagaaaaagtatctcctccaaccaaaacatctcaataaaaccattttagttgaaaa

SEQ ID NO: 89024 - DNA, 120 bp, Artificial Sequence
  ENSG00000086730_15 (sequence is synthesized)
attatcttgctccctgtctattggagtgtatctctcttcctctctgtgtgactttttgtgtttatgtgtgtgtttagtgtgtgtccatattttcctgttctcttgtgtctctctgctgtg

SEQ ID NO: 89025 - DNA, 120 bp, Artificial Sequence
  ENSG00000086730_16 (sequence is synthesized)
tgatccacccgcctcggcctcccaaagtttttggattacaggtgtgagccacctcgcccggtcctatctctctttcttctctttctccctctcactttgtttctcttctctctctctctc

SEQ ID NO: 89026 - DNA, 120 bp, Artificial Sequence
  ENSG00000086730_17 (sequence is synthesized)
tctcccgcctccttcccccgtctcccctcccttccccccaccgccctcttcatagctgagcctgtccggcagtgcggcggatgtacggatgattcagtggctggcaggaagcccgccctg

SEQ ID NO: 89027 - DNA, 120 bp, Artificial Sequence
  ENSG00000086730_18 (sequence is synthesized)
gcatcctcctggctgcgaccttggaccaagtgacaacctcccagaacttagttcctcacttggtgcccacctctcagagaagacatcgcacacacggccgggcacggtggctcacgcctg

SEQ ID NO: 89028 - DNA, 85 bp, Artificial Sequence
  ENSG00000086730_19 (sequence is synthesized)
ctgtagtcccagttaggaaggcggaggttgcggtgagttaagatcacatgcactcaaccctgggtgacagagcgagactccgtct

SEQ ID NO: 89029 - DNA, 120 bp, Artificial Sequence
  ENSG00000086730_20 (sequence is synthesized)
cagcccagcaggcactcggtcaatgctggaaacagacaggaggcagggacgttgggaaatgtaacagtggctgagacgcgctgaggagccaccgcaggccagtgagatggtgcggcgcta

SEQ ID NO: 89030 - DNA, 120 bp, Artificial Sequence
  ENSG00000086730_21 (sequence is synthesized)
agcgctcacacgtgcaccatctcttagcacccaaagccacagagcagttaagccacctgcccaaggccacatcttgaagtaaggggaggaggagatggaatccccagtggtcagacatca

SEQ ID NO: 89031 - DNA, 120 bp, Artificial Sequence
  ENSG00000086730_22 (sequence is synthesized)
gacatcaaagcctaggctgggtctactgcttgggaagcacgatggacccccagagggccttgaaggctgcccaaagtccccatctgggagacccaggccgtcatctcagcgagcaggctg

SEQ ID NO: 89032 - DNA, 120 bp, Artificial Sequence
  ENSG00000086730_23 (sequence is synthesized)
gagggtggaaaccacagtgaacctgggtggtcaagagtcagccccagaggcaggtgcaggagtttgagccaaatgtgcagagccccacgtcattcattcaaccagtatccactgggcccc

SEQ ID NO: 89033 - DNA, 120 bp, Artificial Sequence
  ENSG00000086730_24 (sequence is synthesized)
tgctacgggcaagtcctgctctaggtgctgggaacaccaacataaagaacagcaaacccctgaccccttagaacttgcattctggtaggagagagaaaacagatagggctggacacagcg

SEQ ID NO: 89034 - DNA, 120 bp, Artificial Sequence
  ENSG00000086730_25 (sequence is synthesized)
ccagcacttcgggaggctgaggcgggaggatcctttgagcctctgagtttgaggccagcctgggcaacatagcaagacctctctctctacaaaaactttttttttttttttttgagacag

SEQ ID NO: 89035 - DNA, 120 bp, Artificial Sequence
  ENSG00000086730_26 (sequence is synthesized)
ctgggattacaggcacacgccaccatgtccagcctctataaaaacatttaaaattagccaggcatggtggtggatgccctagagtcccactgacttgggaggctgaggtgggaagatcac

SEQ ID NO: 89036 - DNA, 72 bp, Artificial Sequence
  ENSG00000086730_27 (sequence is synthesized)
tcccactgttgcaatgagccatggttgctgcagtgagctgtggtcgtgccactgcactcaagcctgggcaac

SEQ ID NO: 89037 - DNA, 120 bp, Artificial Sequence
  ENSG00000086730_28 (sequence is synthesized)
gtgagccaccgctcctggccagggtctgttcctagttgcaacagttcttggaaacccactcgagagggccacgcctccattcaccaggccacggtgggtggtgtgcgtatgttttgctga

SEQ ID NO: 89038 - DNA, 120 bp, Artificial Sequence
  ENSG00000086730_29 (sequence is synthesized)
ggcctggtcatcacgctgtggctccaaggctgggaccagccacagaccgagaagccggtcaggtgccagccagagattcagggctccctccctctgaacatcctgtctttagcccatcct

SEQ ID NO: 89039 - DNA, 120 bp, Artificial Sequence
  ENSG00000086730_30 (sequence is synthesized)
tggcatcccagctcatgtcatcccagccacctgcagcagtgccctagggccccatccctctgcggatcatgctcttgggccacctcctccaagaagccttccctgacctccctcctccca

SEQ ID NO: 89040 - DNA, 120 bp, Artificial Sequence
  ENSG00000086730_31 (sequence is synthesized)
ggggacagggagcactgcaaaggctcagacacgggaaatagctggccctgccttgggctgcagcacccgagctgggtgcaaagcaggggccaggggagaaagcaattagctgggtctttc

SEQ ID NO: 89041 - DNA, 120 bp, Artificial Sequence
  ENSG00000086758_0 (sequence is synthesized)
gactgagggctagcgaggggagcagggctggagcagggctggagcagggctggagcagggctgaagcagggctgaagcagggccgcggaccccgcacgctcctgcgggccccgcggagcc

SEQ ID NO: 89042 - DNA, 120 bp, Artificial Sequence
  ENSG00000086758_1 (sequence is synthesized)
attgcggccgaggcctcggcaggcgccagcggagagctagccgcatcttcgggggcagcccggcagctgccggcggcgcggcgagagagcggctgacagaggggatgcgaggtcctccag

SEQ ID NO: 89043 - DNA, 120 bp, Artificial Sequence
  ENSG00000086758_2 (sequence is synthesized)
cagcctgacctgagtgggttagtgatccagagaaaccagcaggccaacttggtcaggaaggttcgggaagctgttggagcagtgtggggaatttcccaccaggatgagtatgattggctg

SEQ ID NO: 89044 - DNA, 120 bp, Artificial Sequence
  ENSG00000086758_3 (sequence is synthesized)
tgattttagatcgtaaagctgaaaattgaaatcatgaaagtagacaggactaaactgaagaagacacctactgaggctcctgcagactgcagagccttaatagacaaactcaaagtttgt

SEQ ID NO: 89045 - DNA, 120 bp, Artificial Sequence
  ENSG00000086758_4 (sequence is synthesized)
aatgatgagcaacttctcttggaactgcagcagatcaaaacatggaacattggaaagtgcgagttatatcactgggtggacctgttggaccgcttcgatggaatactggcagatgctgga

SEQ ID NO: 89046 - DNA, 120 bp, Artificial Sequence
  ENSG00000086758_5 (sequence is synthesized)
cagacagtggagaatatgtcatggatgctcgtatgtgataggccagaaagagagcaactgaaaatgcttctcttggctgtgttgaacttcacagccttgctcattgagtacagcttttcc

SEQ ID NO: 89047 - DNA, 120 bp, Artificial Sequence
  ENSG00000086758_6 (sequence is synthesized)
cggcatctgtacagttccatagagcatttgacaactttattggcttcctctgatatgcaagtggtgctggcagtcctcaatctcctatatgtatttagcaaaagatcaaactacatcact

SEQ ID NO: 89048 - DNA, 120 bp, Artificial Sequence
  ENSG00000086758_7 (sequence is synthesized)
cgtctgggatctgacaagaggaccccgctgctaactcggctacaacatttggcagagagctggggtggaaaggagaatggctttggacttgcagaatgttgcagagacttgcatatgatg

SEQ ID NO: 89049 - DNA, 120 bp, Artificial Sequence
  ENSG00000086758_8 (sequence is synthesized)
aaatatccacccagtgcaactacactacactttgaattctatgcagatcctggggccgaggtcaaaattgagaaaaggacaactagtaacacactacattatattcacatagagcaactt

SEQ ID NO: 89050 - DNA, 120 bp, Artificial Sequence
  ENSG00000086758_9 (sequence is synthesized)
gacaagatttcagaaagcccttctgaaatcatggaatctcttaccaaaatgtacagcattcctaaggataagcagatgctgttatttacacacatacgactggcccatggcttttctaat

SEQ ID NO: 89051 - DNA, 120 bp, Artificial Sequence
  ENSG00000086758_10 (sequence is synthesized)
cacaggaagcgattgcaggcagttcaggccagactgcatgcaatatctatattagtgtattccaatgccttgcaggaatcagcaaacagtatcttgtataatggcttgatagaggagttg

SEQ ID NO: 89052 - DNA, 120 bp, Artificial Sequence
  ENSG00000086758_11 (sequence is synthesized)
gtagatgtccttcagataacggataagcagcttatggagattaaagcagcttctttacgaacattaacatcaattgtccacttggagagaactcccaaactcagcagtattattgactgt

SEQ ID NO: 89053 - DNA, 120 bp, Artificial Sequence
  ENSG00000086758_12 (sequence is synthesized)
actggaactgcctcctaccatggatttttgccagtgcttgtaaggaactgtatccaggccatgattgatccttccatggatccataccctcaccagtttgccactgctctcttctctttt

SEQ ID NO: 89054 - DNA, 120 bp, Artificial Sequence
  ENSG00000086758_13 (sequence is synthesized)
ttataccatctggccagctacgatgctggtggtgaagccttggtctcctgtggaatgatggaagccttattgaaggtcataaagtttcttggcgatgaacaggaccagataacatttgtc

SEQ ID NO: 89055 - DNA, 120 bp, Artificial Sequence
  ENSG00000086758_14 (sequence is synthesized)
accagagccgtcagagtggttgaccttatcaccaacctggatatggcagcttttcaatcccatagtggactttctatcttcatttatagacttgagcatgaagtagatttgtgccgaaaa

SEQ ID NO: 89056 - DNA, 120 bp, Artificial Sequence
  ENSG00000086758_15 (sequence is synthesized)
gaatgtccgtttgtgatcaagccaaagatccagagacccaatactacacaagaaggagaggaaatggaaactgatatggatggagtccagtgtattccacaacgagcagcacttctgaaa

SEQ ID NO: 89057 - DNA, 120 bp, Artificial Sequence
  ENSG00000086758_16 (sequence is synthesized)
tccatgttgaatttcctcaagaaggccatccaagaccctgctttctcagatggcatacgacatgtgatggatggttctctgcctacctccctgaaacacatcatcagcaatgcagaatac

SEQ ID NO: 89058 - DNA, 120 bp, Artificial Sequence
  ENSG00000086758_17 (sequence is synthesized)
tatggcccatcactcttcctcctagctactgaagtggtgactgtgtttgtatttcaagaaccatcactgctctcctcactccaggacaatggattgacagatgtcatgctgcatgcactg

SEQ ID NO: 89059 - DNA, 120 bp, Artificial Sequence
  ENSG00000086758_18 (sequence is synthesized)
cttatcaaagatgttcctgctacccgtgaagtccttggctccctcccaaatgtattcagtgcactctgtttgaatgcccgaggtcttcagtcttttgttcagtgtcagccttttgaacgc

SEQ ID NO: 89060 - DNA, 120 bp, Artificial Sequence
  ENSG00000086758_19 (sequence is synthesized)
ctcttcaaagttcttctgtctccagattacctcccagccatgcggaggaggagaagttctgatccccttggggatactgcatccaacctggggagtgctgtcgatgagctcatgagacat

SEQ ID NO: 89061 - DNA, 120 bp, Artificial Sequence
  ENSG00000086758_20 (sequence is synthesized)
cagcccacccttaaaacagatgcaacgactgccatcatcaagttacttgaagaaatctgtaatcttggaagggaccccaaatacatctgtcagaagccatcaatccagaaggcagatggc

SEQ ID NO: 89062 - DNA, 120 bp, Artificial Sequence
  ENSG00000086758_21 (sequence is synthesized)
actgccactgctcctcccccaaggtctaatcatgccgcagaagaagcctctagtgaggatgaggaggaagaggaagtacaggccatgcagagctttaattctacccagcaaaatgaaact

SEQ ID NO: 89063 - DNA, 120 bp, Artificial Sequence
  ENSG00000086758_22 (sequence is synthesized)
gagcctaatcagcaggttgttggtacagaggaacgtattcctattcccctcatggattacatccttaatgtgatgaaatttgtggaatctattctgagcaacaatacaacagatgaccac

SEQ ID NO: 89064 - DNA, 120 bp, Artificial Sequence
  ENSG00000086758_23 (sequence is synthesized)
tgccaggaatttgtgaatcagaaaggactgttgcctttggttaccattttgggtcttcccaatctgcccattgactttcccacatctgctgcctgtcaggctgttgcaggtgtctgcaaa

SEQ ID NO: 89065 - DNA, 120 bp, Artificial Sequence
  ENSG00000086758_24 (sequence is synthesized)
tccatattgacactgtcacatgaacccaaagtccttcaagagggtctccttcagttggactccatcctctcctccctggagcccttacaccgccccattgaatcccctgggggctcagtg

SEQ ID NO: 89066 - DNA, 120 bp, Artificial Sequence
  ENSG00000086758_25 (sequence is synthesized)
ttgttgcgagaactggcttgcgcaggcaatgttgctgatgctaccctctcagcccaggccacacctctgctgcatgcactcactgctgcccatgcctacatcatgatgtttgttcatact

SEQ ID NO: 89067 - DNA, 120 bp, Artificial Sequence
  ENSG00000086758_26 (sequence is synthesized)
tgcagagttggacagagtgaaattcgttccatctccgtaaaccagtggggctctcaattgggtctgagtgttttgagcaagctgagccagttatactgttccctggtgtgggaaagcact

SEQ ID NO: 89068 - DNA, 120 bp, Artificial Sequence
  ENSG00000086758_27 (sequence is synthesized)
gtcctcctctctctgtgtaccccaaacagcctaccatctgggtgtgaatttggccaggcagatatgcagaaactggttccaaaggatgagaaggcaggtacgacccagggcggaaaaaga

SEQ ID NO: 89069 - DNA, 120 bp, Artificial Sequence
  ENSG00000086758_28 (sequence is synthesized)
tcagatggggaacaggatggagcagctggaagtatggatgcttctacccagggcttattagaaggcattgggctagatggtgacacattggctcccatggagacagatgaacctactgct

SEQ ID NO: 89070 - DNA, 120 bp, Artificial Sequence
  ENSG00000086758_29 (sequence is synthesized)
tcagactctaagggcaaatctaaaatcacaccagcaatggctgccagaattaagcaaatcaagcctttgttatcagcttcctccagattaggccgagcacttgctgagctatttggactt

SEQ ID NO: 89071 - DNA, 120 bp, Artificial Sequence
  ENSG00000086758_30 (sequence is synthesized)
cttgttaaactttgtgtgggatctcctgtccgccagagaaggagccatcatgctgccagcaccactacagcaccgacacctgccgcgcgatcaacagcctcagctctcactaagctcttg

SEQ ID NO: 89072 - DNA, 120 bp, Artificial Sequence
  ENSG00000086758_31 (sequence is synthesized)
actaaggggttatcttggcagcccccaccatatacacctactccccgattcaggctgacattcttcatctgttcagttggtttcacatccccaatgctgtttgatgagaggaagtatccc

SEQ ID NO: 89073 - DNA, 120 bp, Artificial Sequence
  ENSG00000086758_32 (sequence is synthesized)
taccacctcatgctgcaaaaatttctctgctccggaggccacaatgctctttttgaaactttcaactgggctctgtccatgggaggtaaagttcctgtttctgagggattggaacactca

SEQ ID NO: 89074 - DNA, 120 bp, Artificial Sequence
  ENSG00000086758_33 (sequence is synthesized)
gacttgcctgatggcacaggagaattcctagatgcctggcttatgctggtggagaagatggtgaatcccaccacggtgcttgaatctccacattcgctgcctgccaaattgcctggaggt

SEQ ID NO: 89075 - DNA, 120 bp, Artificial Sequence
  ENSG00000086758_34 (sequence is synthesized)
gtccagaactttccccagttcagtgcactgcgcttccttgtggtaactcagaaagcagcctttacttgcatcaaaaacttatggaaccggaaacccctgaaggtatatggtggacgaatg

SEQ ID NO: 89076 - DNA, 120 bp, Artificial Sequence
  ENSG00000086758_35 (sequence is synthesized)
gctgaatcgatgctggccattctatgccacatcctccgaggagaacctgtgattcgagagagactaagcaaggagaaggaggggtctcgaggagaagaggatacagggcaagaggaaggt

SEQ ID NO: 89077 - DNA, 120 bp, Artificial Sequence
  ENSG00000086758_36 (sequence is synthesized)
ggctcccgccgggaacctcaagtcaaccagcaacaactgcaacagctcatggacatgggcttcacaagggaacatgcaatggaggcactgttgaacaccagcaccatggagcaggccaca

SEQ ID NO: 89078 - DNA, 120 bp, Artificial Sequence
  ENSG00000086758_37 (sequence is synthesized)
gagtaccttttaacccaccctcctccaatcatgggaggagttgttcgggatctcagcatgtctgaagaggaccagatgatgagagcaattgctatgtctctgggacaggatattccaatg

SEQ ID NO: 89079 - DNA, 120 bp, Artificial Sequence
  ENSG00000086758_38 (sequence is synthesized)
gatcaaagggcagagtcacctgaggaagttgcttgccggaaggaggaagaggaacggaaagctcgggaaaagcaggaggaggaagaggctaaatgtctagagaagttccaggatgctgac

SEQ ID NO: 89080 - DNA, 120 bp, Artificial Sequence
  ENSG00000086758_39 (sequence is synthesized)
ccgttggaacaagatgagctccacactttcacagatactatgttgccaggctgcttccaccttcttgatgagctgccagacacagtataccgtgtgtgtgacctgatcatgacagcaatc

SEQ ID NO: 89081 - DNA, 120 bp, Artificial Sequence
  ENSG00000086758_40 (sequence is synthesized)
aaacgtaatggagcagattatcgtgacatgattctgaagcaagtagtcaatcaggtgtgggaagctgctgatgtattgatcaaagctgctcttcccctgacaacaagtgacacaaaaacc

SEQ ID NO: 89082 - DNA, 120 bp, Artificial Sequence
  ENSG00000086758_41 (sequence is synthesized)
gtgtcagagtggataagtcagatggccacactgccccaggcctccaatttggctactagaatcttgcttttaacgctactttttgaggagttgaagctaccttgtgcttgggtggttgaa

SEQ ID NO: 89083 - DNA, 120 bp, Artificial Sequence
  ENSG00000086758_42 (sequence is synthesized)
tcaagtggcatccttaatgtcctaatcaaactcttggaagtggttcagccctgcctccaggcagccaaggagcagaaggaagtccagaccccaaagtggatcacaccagtgttgctcctg

SEQ ID NO: 89084 - DNA, 120 bp, Artificial Sequence
  ENSG00000086758_43 (sequence is synthesized)
attgatttctatgaaaagacagccatctcctcaaaaaggagagcccagatgactaagtacctgcaatccaacagcaacaactggcgctggtttgatgatcgctctgggcgttggtgtagt

SEQ ID NO: 89085 - DNA, 120 bp, Artificial Sequence
  ENSG00000086758_44 (sequence is synthesized)
tacagtgcaagcaacaatagcactattgattctgcctggaaatctggagagacaagcgtgcgattcactgcaggccgaagaagatacacggtccaattcactacaatggtgcaggttaat

SEQ ID NO: 89086 - DNA, 120 bp, Artificial Sequence
  ENSG00000086758_45 (sequence is synthesized)
gaggaaacagggaaccgacgccctgtgatgctgactctcctcagggtacctcggctgaataaaaattcaaaaaacagcaatggacaggaactagagaagacgctggaagaaagcaaagaa

SEQ ID NO: 89087 - DNA, 120 bp, Artificial Sequence
  ENSG00000086758_46 (sequence is synthesized)
atggatatcaaacgtaaagaaaataaaggcaatgatacccctttggccctagagagtacaaacactgaaaaggagacaagcctggaggaaacaaaaatcggggagatcctgatccagggc

SEQ ID NO: 89088 - DNA, 120 bp, Artificial Sequence
  ENSG00000086758_47 (sequence is synthesized)
ttgacagaagatatggtgactgttttaatccgggcctgcgtgagcatgctgggagtccctgtggacccagatactttgcatgccacccttcgtctctgtctgaggctcacccgggaccac

SEQ ID NO: 89089 - DNA, 120 bp, Artificial Sequence
  ENSG00000086758_48 (sequence is synthesized)
aaatatgccatgatgtttgcagaactgaagagtacccgcatgatcttgaatttgacccagagctcaggcttcaatgggtttactcccctggtcacccttctcttaagacacatcattgag

SEQ ID NO: 89090 - DNA, 120 bp, Artificial Sequence
  ENSG00000086758_49 (sequence is synthesized)
gacccctgtacccttcgtcataccatggaaaaggttgttcgctcagcagctacaagtggagctggtagcactacctctggtgttgtgtctggcagcctcggctctcgggagatcaactac

SEQ ID NO: 89091 - DNA, 120 bp, Artificial Sequence
  ENSG00000086758_50 (sequence is synthesized)
atccttcgtgtccttgggccagccgcatgccgcaatccagacatattcacagaagtggccaactgctgtatccgcatcgcccttcctgcccctcgaggctcaggaactgcttcagatgat

SEQ ID NO: 89092 - DNA, 120 bp, Artificial Sequence
  ENSG00000086758_51 (sequence is synthesized)
gaatttgagaatcttagaattaaaggccctaatgctgtacagctggtgaagaccacccctttgaagccctcacctctgcctgtcatccctgatactatcaaggaagtgatctatgatatg

SEQ ID NO: 89093 - DNA, 120 bp, Artificial Sequence
  ENSG00000086758_52 (sequence is synthesized)
ctgaatgctctggctgcataccatgctccagaggaagcagataaatctgatcctaaacctggggttatgacccaagaggttggccagctcctgcaagacatgggtgatgatgtataccag

SEQ ID NO: 89094 - DNA, 120 bp, Artificial Sequence
  ENSG00000086758_53 (sequence is synthesized)
cagtaccggtcacttacgcgtcagagcagtgactttgatacgcagtcaggtttttccattaatagtcaggtctttgctgcagatggtgcctccactgagacttccgcatctgggacctcc

SEQ ID NO: 89095 - DNA, 120 bp, Artificial Sequence
  ENSG00000086758_54 (sequence is synthesized)
caaggagaggcttcaactccagaggagtctcgagatgggaagaaagataaagaaggggaccgggcctctgaggaaggcaaacagaaaggcaagggcagcaaacctttaatgcctacctcc

SEQ ID NO: 89096 - DNA, 120 bp, Artificial Sequence
  ENSG00000086758_55 (sequence is synthesized)
actatccttcgtcttctggcagagttggtgaggtcctatgttggtattgctaccctgattgccaactacagctacactgtgggccagtctgaactgatcaaagaggactgcagtgtgcta

SEQ ID NO: 89097 - DNA, 120 bp, Artificial Sequence
  ENSG00000086758_56 (sequence is synthesized)
gcttttgttctggaccacctgctcccacatacccagaatgcagaagacaaggacacccctgccttggcccgcctgttcctcgcaagcctggctgctgcagggagtggcacagatgcccag

SEQ ID NO: 89098 - DNA, 120 bp, Artificial Sequence
  ENSG00000086758_57 (sequence is synthesized)
gtggccctagtgaatgaagtaaaagcagcccttggacgggcactggctatggctgagagtacagagaaacatgccaggcttcaggcagtgatgtgtatcatcagtactatcatggagtcc

SEQ ID NO: 89099 - DNA, 120 bp, Artificial Sequence
  ENSG00000086758_58 (sequence is synthesized)
tgcccctccacctccagcttctacagcagtgccacagcgaagacccagcacaatggcatgaacaacatcattcggcttttcctgaagaagggactggttaatgacctggccagagtacct

SEQ ID NO: 89100 - DNA, 120 bp, Artificial Sequence
  ENSG00000086758_59 (sequence is synthesized)
cacagcttagacctgtccagtcccaacatggccaacacagtcaatgctgctctgaagcctttggaaacactttcccggattgtgaaccagcccagtagcctttttggcagcaagagtgct

SEQ ID NO: 89101 - DNA, 120 bp, Artificial Sequence
  ENSG00000086758_60 (sequence is synthesized)
tctagcaagaacaagtctgagcaggatgcccaaggagcctctcaagattccagtagcaaccagcaggacccaggcgagcctggggaagcagaagtgcaggaggaggatcatgatgtcact

SEQ ID NO: 89102 - DNA, 120 bp, Artificial Sequence
  ENSG00000086758_61 (sequence is synthesized)
aagagatgcaggttgagaatgagctggaggacctgatagatgagttgcttgagagggatggcggatctgggaacagtacaattatagtgagcagaagtggagaggatgaatcacaagagg

SEQ ID NO: 89103 - DNA, 120 bp, Artificial Sequence
  ENSG00000086758_62 (sequence is synthesized)
acgtgctgatggatgaagctccttccaacctcagccaagcttccaccttgcaggccaaccgagaagattccatgaatatcctggaccctgaggatgaggaggagcacactcaggaagagg

SEQ ID NO: 89104 - DNA, 120 bp, Artificial Sequence
  ENSG00000086758_63 (sequence is synthesized)
acagcagtggcagtaacgaggatgaggatgatagtcaggatgaagaggaggaggaggaggaagatgaggaagatgatcaggaggatgatgaaggtgaagagggagatgaagacgatgacg

SEQ ID NO: 89105 - DNA, 120 bp, Artificial Sequence
  ENSG00000086758_64 (sequence is synthesized)
acgatggctctgagatggaattggatgaggattatcctgatatgaacgcttctcccttggtccgatttgagcgctttgaccgggaggatgatctcatcattgagtttgacaacatgttct

SEQ ID NO: 89106 - DNA, 120 bp, Artificial Sequence
  ENSG00000086758_65 (sequence is synthesized)
ccagtgctacagacatccccccatccccaggaaatatccctaccacccatccactgatggtgcgccatgcagaccacagttctctgacactgggcagtggctcttcaacaactcgtctca

SEQ ID NO: 89107 - DNA, 120 bp, Artificial Sequence
  ENSG00000086758_66 (sequence is synthesized)
cccagggcatcgggcgcagtcagaggaccctaaggcagctgacggccaatactggccacaccattcatgttcactaccctgggaatcgccagcccaaccctcctcttatactgcagaggt

SEQ ID NO: 89108 - DNA, 120 bp, Artificial Sequence
  ENSG00000086758_67 (sequence is synthesized)
tgcttggtccctcagctgctgctgacatccttcagctgagcagcagccttcccctacaaagccggggtcgggcccgcctcctggtaggcaacgatgacgtccacatcatcgcccgttctg

SEQ ID NO: 89109 - DNA, 120 bp, Artificial Sequence
  ENSG00000086758_68 (sequence is synthesized)
atgatgagctgctggatgactttttccatgatcagagcacagctaccagccaagcaggaaccctgtccagcatccccacagccctgacccgctggacagaagaatgcaaagttctcgatg

SEQ ID NO: 89110 - DNA, 120 bp, Artificial Sequence
  ENSG00000086758_69 (sequence is synthesized)
ctgagagcatgcatgactgtgtttcagtggttaaagtgtccattgtcaatcacctggaattcctgagggatgaggagctggaagaaaggcgagagaagcgcaggaaacaactggctgagg

SEQ ID NO: 89111 - DNA, 120 bp, Artificial Sequence
  ENSG00000086758_70 (sequence is synthesized)
aagaaacaaagataactgataaaggcaaagaagataaggagaacagggatcagagtgcacagtgtactgcatctaagtcaaatgactccactgaacagaatctctcagatgggacgccta

SEQ ID NO: 89112 - DNA, 120 bp, Artificial Sequence
  ENSG00000086758_71 (sequence is synthesized)
tgcctgacagctacccaacaaccccatcttcaactgatgcagctacatctgagtccaaggagacccttggcactctgcaatcctcacaacagcaaccaacactcccaaccccaccagctt

SEQ ID NO: 89113 - DNA, 120 bp, Artificial Sequence
  ENSG00000086758_72 (sequence is synthesized)
tgggagaggttcctcaggagctgcagtctccagctggagaagggggcagctctacacagctattgatgcctgtagagccagaggaattgggtcccacaaggccaagtggggaagcagaaa

SEQ ID NO: 89114 - DNA, 120 bp, Artificial Sequence
  ENSG00000086758_73 (sequence is synthesized)
caactcagatggagttatccccagctcccactataacctcactttccccagagagagctgaggattctgatgcactgacggctgtcagcagtcagctagaaggctctcctatggatacaa

SEQ ID NO: 89115 - DNA, 120 bp, Artificial Sequence
  ENSG00000086758_74 (sequence is synthesized)
gcagcctggcttcctgtaccttagaggaggctgtgggtgacacttcagcagctggcagttctgagcagcccagagcaggcagctccactcctggggatgccccaccagctgtggcggaag

SEQ ID NO: 89116 - DNA, 120 bp, Artificial Sequence
  ENSG00000086758_75 (sequence is synthesized)
tgcaaggcaggagtgatgggtcaggggaatctgcccagccacctgaggacagctccccacctgcatcctctgagagctcttccaccagagattctgccgtggccatttctggagcagatt

SEQ ID NO: 89117 - DNA, 120 bp, Artificial Sequence
  ENSG00000086758_76 (sequence is synthesized)
cccgaggaatcctagaagagccgttgccttcaacaagcagtgaagaagaagatccccttgcgggtatcagtctccctgaaggtgtggacccctcttttctggctgccctgcctgatgaca

SEQ ID NO: 89118 - DNA, 120 bp, Artificial Sequence
  ENSG00000086758_77 (sequence is synthesized)
tccgtcgggaagttctacagaaccagctaggcattcgtccaccaacccggactgccccctccacaaatagctcagcgcctgcagtggtggggaatcctggtgtgactgaagtgagccctg

SEQ ID NO: 89119 - DNA, 120 bp, Artificial Sequence
  ENSG00000086758_78 (sequence is synthesized)
agtttctggctgccctgcctccagccattcaggaggaagtactggcacagcagagagctgagcagcagcgacgagaactagcacagaatgccagctcagacacccctatggaccctgtga

SEQ ID NO: 89120 - DNA, 120 bp, Artificial Sequence
  ENSG00000086758_79 (sequence is synthesized)
ccttcatccagactctgccctcagacctgcgccgtagtgtcctagaggatatggaggacagtgtgttagctgtgatgccacctgacattgcagctgaggctcaagccctgagacgagagc

SEQ ID NO: 89121 - DNA, 120 bp, Artificial Sequence
  ENSG00000086758_80 (sequence is synthesized)
aagaagcccggcagcgacagctcatgcatgagcgtctgtttgggcacagtagcacctccgcactctctgctattctccgaagcccggctttcaccagtcgcttaagtggcaaccgtgggg

SEQ ID NO: 89122 - DNA, 120 bp, Artificial Sequence
  ENSG00000086758_81 (sequence is synthesized)
tccagtatactcgccttgctgtgcagagaggtggcaccttccagatggggggtagcagcagccataacaggccttctggcagtaatgtagatactctcctccgcctccgaggacggctcc

SEQ ID NO: 89123 - DNA, 120 bp, Artificial Sequence
  ENSG00000086758_82 (sequence is synthesized)
ttctggaccacgaagccctttcttgtctcttggtcctactttttgtggatgagccaaagctcaatactagccgtctacaccgagtactgagaaatctctgctaccatgcccagacccgcc

SEQ ID NO: 89124 - DNA, 120 bp, Artificial Sequence
  ENSG00000086758_83 (sequence is synthesized)
actgggtcatccgcagtctgctctccatcttgcagcgcagcagtgagagtgagctatgcattgaaacacccaaactcactacaagtgaggaaaagggcaaaaagtcgagcaagagctgtg

SEQ ID NO: 89125 - DNA, 120 bp, Artificial Sequence
  ENSG00000086758_84 (sequence is synthesized)
ggtcaagtagccatgagaaccgtcccctggacctgctacacaagatggagtcaaagagctccaaccagctttcctggctctcagtatccatggatgcagccctaggctgcaggactaata

SEQ ID NO: 89126 - DNA, 120 bp, Artificial Sequence
  ENSG00000086758_85 (sequence is synthesized)
tatttcagatccagcgttcaggggggcgtaaacataccgagaagcatgcaagcggtggctccaccgtccacatccatccccaagctgctcctgttgtctgcagacacgttttggatacac

SEQ ID NO: 89127 - DNA, 120 bp, Artificial Sequence
  ENSG00000086758_86 (sequence is synthesized)
tcattcaattggccaaggtatttcccagccacttcacacagcagcggaccaaagaaacaaactgtgagagtgatcgggaaaggggcaataaggcctgtagcccatgctcctcacagtcct

SEQ ID NO: 89128 - DNA, 120 bp, Artificial Sequence
  ENSG00000086758_87 (sequence is synthesized)
ccagcagtggcatttgcacagacttctgggacttattggtaaaactggacaacatgaatgtcagccggaaaggcaagaactccgtgaagtcagtgccagtgagcgctggcggtgaggggg

SEQ ID NO: 89129 - DNA, 120 bp, Artificial Sequence
  ENSG00000086758_88 (sequence is synthesized)
aaacctctccatacagcctcgaggcctctccactggggcagctcatgaacatgttgtcacacccagtcatccgccggagctctctcttaactgagaaactcctcagactcctttctctca

SEQ ID NO: 89130 - DNA, 120 bp, Artificial Sequence
  ENSG00000086758_89 (sequence is synthesized)
tctcaattgctctcccagaaaacaaggtgtcagaagcacaggctaattctggcagcggtgcttcctccaccaccactgccacctcaaccacatctaccaccaccaccactgccgcctcca

SEQ ID NO: 89131 - DNA, 120 bp, Artificial Sequence
  ENSG00000086758_90 (sequence is synthesized)
ccacgcccacaccccctactgcacccacccctgtcacttctgctccagccctggttgctgccacggctatttccaccattgtcgtagctgcttcgaccacagtgactacccccacgactg

SEQ ID NO: 89132 - DNA, 120 bp, Artificial Sequence
  ENSG00000086758_91 (sequence is synthesized)
ctaccactactgtttcaatttctcccactactaagggcagcaaatctccagcgaaggtgagtgatgggggcagcagcagtacagactttaagatggtgtcctctggcctcactgaaaacc

SEQ ID NO: 89133 - DNA, 120 bp, Artificial Sequence
  ENSG00000086758_92 (sequence is synthesized)
agctacagctctctgtagaggtgttgacatcccactcttgttctgaggaaggcttagaggatgcagccaacgtactactgcagctctcccggggggactctgggacccgggacactgttc

SEQ ID NO: 89134 - DNA, 120 bp, Artificial Sequence
  ENSG00000086758_93 (sequence is synthesized)
tcaagctgctactgaatggagcccgccatctgggttataccctttgtaaacaaataggtaccctgctggccgagctgcgggaatacaacctcgagcagcagcggcgagcccaatgtgaaa

SEQ ID NO: 89135 - DNA, 120 bp, Artificial Sequence
  ENSG00000086758_94 (sequence is synthesized)
ccctctctcctgatggcctgcctgaggagcagccacagaccaccaagctgaagggcaaaatgcagagcaggtttgacatggctgagaatgtggtaattgtggcatctcagaagcgacctt

SEQ ID NO: 89136 - DNA, 120 bp, Artificial Sequence
  ENSG00000086758_95 (sequence is synthesized)
tgggtggccgggagctccagctgccttctatgtccatgttgacatccaagacatctacccagaagttcttcttgagggtactacaggtcatcatccagctccgggacgacacgcgccggg

SEQ ID NO: 89137 - DNA, 120 bp, Artificial Sequence
  ENSG00000086758_96 (sequence is synthesized)
ctaacaagaaagccaagcagacaggcaggctaggttcctccggtttaggctcagctagcagcatccaggcagctgttcggcagctggaggctgaggctgatgccattatacaaatggtac

SEQ ID NO: 89138 - DNA, 120 bp, Artificial Sequence
  ENSG00000086758_97 (sequence is synthesized)
gtgagggtcaaagggcgcggagacagcaacaagcagcaacgtcggagtctagccagtcagaggcgtctgtccggagggaggaatcacccatggatgtggaccagccatctcccagtgctc

SEQ ID NO: 89139 - DNA, 120 bp, Artificial Sequence
  ENSG00000086758_98 (sequence is synthesized)
aagatactcaatccattgcctccgatggaaccccacagggggagaaggaaaaggaagaaagaccacctgagttacccctgctcagcgagcagctgagtttggacgagctgtgggacatgc

SEQ ID NO: 89140 - DNA, 120 bp, Artificial Sequence
  ENSG00000086758_99 (sequence is synthesized)
ttggggagtgtctaaaggaactagaggaatcccatgaccagcatgcggtgctagtgctacagcctgctgtcgaggccttctttctggtccatgccacagagcgggagagcaagcctcctg

SEQ ID NO: 89141 - DNA, 120 bp, Artificial Sequence
  ENSG00000086758_100 (sequence is synthesized)
tccgagacacccgtgagagccagctggcacacatcaaggacgagcctcctccactctcccctgcccccttaaccccagccacgccttcctcccttgacccattcttctcccgggagccct

SEQ ID NO: 89142 - DNA, 120 bp, Artificial Sequence
  ENSG00000086758_101 (sequence is synthesized)
catctatgcacatctcctcaagcctgccccctgacacacagaagttccttcgctttgcagagactcaccgcactgtgttaaaccagatcctacggcagtccacgacccaccttgctgatg

SEQ ID NO: 89143 - DNA, 120 bp, Artificial Sequence
  ENSG00000086758_102 (sequence is synthesized)
ggccttttgctgtcctggtagactacattcgtgtcctcgactttgatgtcaagcgcaaatatttccgccaagagctggagcgtttagatgaggggctccggaaagaagacatggctgtgc

SEQ ID NO: 89144 - DNA, 120 bp, Artificial Sequence
  ENSG00000086758_103 (sequence is synthesized)
atgtccgtcgtgaccatgtgtttgaagactcctatcgtgagctgcatcgcaaatcccccgaagaaatgaagaatcgattgtatatagtatttgaaggagaagaagggcaggatgctggtg

SEQ ID NO: 89145 - DNA, 120 bp, Artificial Sequence
  ENSG00000086758_104 (sequence is synthesized)
ggctcctgcgggagtggtatatgatcatctctcgagagatgtttaaccctatgtatgccttgttccgtacctcacctggtgatcgagtcacctacaccatcaatccatcttcccactgca

SEQ ID NO: 89146 - DNA, 120 bp, Artificial Sequence
  ENSG00000086758_105 (sequence is synthesized)
accccaaccacctcagctacttcaagtttgtcggacgcattgtggccaaagctgtatatgacaaccgtcttctggagtgctactttactcgatccttttacaaacacatcttgggcaagt

SEQ ID NO: 89147 - DNA, 120 bp, Artificial Sequence
  ENSG00000086758_106 (sequence is synthesized)
cagtcagatatacagatatggagagtgaagattaccacttctaccaaggtctggtttatctgctggaaaatgatgtctccacactaggctatgacctcaccttcagcactgaggtccaag

SEQ ID NO: 89148 - DNA, 120 bp, Artificial Sequence
  ENSG00000086758_107 (sequence is synthesized)
agtttggagtttgtgaagttcgtgacctcaaacccaatggggccaacatcttggtaacagaggagaataagaaggagtatgtacacctggtatgccagatgagaatgacaggagccatcc

SEQ ID NO: 89149 - DNA, 120 bp, Artificial Sequence
  ENSG00000086758_108 (sequence is synthesized)
gcaagcagttggcggctttcttagaaggcttctatgagatcattccaaagcgcctcatttccatcttcactgagcaggagttagagctgcttatatcaggactgcccaccattgacatcg

SEQ ID NO: 89150 - DNA, 120 bp, Artificial Sequence
  ENSG00000086758_109 (sequence is synthesized)
atgatctgaaatccaacactgaataccacaagtaccagtccaactctattcagatccagtggttctggagagcattgcgttctttcgatcaagctgaccgtgccaagttcctccagtttg

SEQ ID NO: 89151 - DNA, 120 bp, Artificial Sequence
  ENSG00000086758_110 (sequence is synthesized)
tcacaggtacttccaaggtacccctgcaaggctttgctgccctcgaaggcatgaatggcattcagaagtttcagatccatcgagatgacaggtccacagatcgcctgccttcagctcaca

SEQ ID NO: 89152 - DNA, 120 bp, Artificial Sequence
  ENSG00000086758_111 (sequence is synthesized)
catgttttaatcagctggatctgcctgcctatgagagctttgagaagctccgccacatgctactgttggctatccaggagtgctctgaaggctttgggctggcctaataaggccctgccc

SEQ ID NO: 89153 - DNA, 120 bp, Artificial Sequence
  ENSG00000086758_112 (sequence is synthesized)
aactccgtggggttttttttaccattgttggacctggggaggggggagttaaaaaaagaaccagaaagaaattgtcaaaaaccaataaatgaaatccaccaactcaccgtgtgtgtccca

SEQ ID NO: 89154 - DNA, 120 bp, Artificial Sequence
  ENSG00000086758_113 (sequence is synthesized)
gctgccccatcttccccagcgcatacctgttcctcttctcattctctccccgccgcctgtttcctcaccttctctcccctttccatgccgtccatgatccccaccccatgtgttttaaaa

SEQ ID NO: 89155 - DNA, 120 bp, Artificial Sequence
  ENSG00000086758_114 (sequence is synthesized)
aggcagtagcctttgcagggacctgtctgtcccaactgtttgaacagtgtgctcctcagattctgtgttcagaaggatttgctgcattgagacttgaaacctttggataggggaaaaaat

SEQ ID NO: 89156 - DNA, 120 bp, Artificial Sequence
  ENSG00000086758_115 (sequence is synthesized)
tatatatatatatatttttttgttctgtttgcatttcttaatttgtgcttggaatgtgttgatgtgcacagctaatgattcaatgcgagacaagattggcgtctgtgttgtggaggtttc

SEQ ID NO: 89157 - DNA, 120 bp, Artificial Sequence
  ENSG00000086758_116 (sequence is synthesized)
aaataaagagcactcttcataactcacttttcacaatggagtttttttcaaacttaaaaaaaaaaacaaaaaactcttaagcacatgctaggcatctggagaaaagatggattctccagg

SEQ ID NO: 89158 - DNA, 120 bp, Artificial Sequence
  ENSG00000086758_117 (sequence is synthesized)
aaaccatccctgccctacccgcttgcccacctgcctccaccactggtgcaacttcctccttcagagtcagtttctgcagtcaggagagatgagcagttcaccaggaattgggggtggggg

SEQ ID NO: 89159 - DNA, 120 bp, Artificial Sequence
  ENSG00000086758_118 (sequence is synthesized)
catctgttttttttttttagaatgggagctgcacttggggatggtgatggtgttagagattgcagcccaggacaaagcatcaccttgctcaaggggaacaaactgcagcaggttgtacaa

SEQ ID NO: 89160 - DNA, 120 bp, Artificial Sequence
  ENSG00000086758_119 (sequence is synthesized)
aacattcagagagctcacttgacccaaccgagggttttacttggtgagcctttctagtagtcttgagtctggggctcagttttagatttttatttcattaatgtttgtttatttctaata

SEQ ID NO: 89161 - DNA, 120 bp, Artificial Sequence
  ENSG00000086758_120 (sequence is synthesized)
aattttaataagcgagtaatttaactaggtcgccagaagaccattatttttgtttgtctatttttgttgtcgtcactccctctctcgtcatctgtctgccagtctgttcacagatcacct

SEQ ID NO: 89162 - DNA, 120 bp, Artificial Sequence
  ENSG00000086758_121 (sequence is synthesized)
tgtagtcccttgtggtttttactccatccagtgcttaaagctgatctaaggacttcgatggttccagccttcaaagaaaaaataatttaataaaaatttagttagaaaaaataaccccaa

SEQ ID NO: 89163 - DNA, 120 bp, Artificial Sequence
  ENSG00000086758_122 (sequence is synthesized)
tccgcccctcactgcttcgttaggttgtgcgtcatttgcttttcgcttcgcgtagggtgaagctgtagctacttcggctttggtgggagggaggaggggtctggaaagggctgggctcag

SEQ ID NO: 89164 - DNA, 120 bp, Artificial Sequence
  ENSG00000086758_123 (sequence is synthesized)
gcttttcccgtccggtagaggttctcgcgggatcgcgcggaggcggcggtggctcggttactgactgcagtagccgcggaggcggcggcaaggtcttcggctcgtgccgttctaagccgg

SEQ ID NO: 89165 - DNA, 120 bp, Artificial Sequence
  ENSG00000086758_124 (sequence is synthesized)
cacagtagcgatggcttgctctagcctcaaatttagggaggtgctgccctccctaataggaattccccataggaatctggttttagataatcttactgagttgtctcctatcttctgggc

SEQ ID NO: 89166 - DNA, 120 bp, Artificial Sequence
  ENSG00000086758_125 (sequence is synthesized)
ctgccctgctggctggccctttagctaagctacccaacaattcccagacagacaggaaagtctttggtgtttataaggatatacctgctggctttgcaatgagagctttaatattgctat

SEQ ID NO: 89167 - DNA, 120 bp, Artificial Sequence
  ENSG00000086758_126 (sequence is synthesized)
aaggaagcatcttgacttcttaaagctgtagcaggtgtttgtgagtgacatcacaaacaggaaaaccagaatttgcaggccatttcctagtttcacctttattaaaaaaaaaaaaaaaaa

SEQ ID NO: 89168 - DNA, 120 bp, Artificial Sequence
  ENSG00000086758_127 (sequence is synthesized)
gcctgtggcccctcattcatttgtctctccactcatccccccaccatgtcatcagtggggtttcattgcctttaccttgtatgcttttgcattaagtttgctatatgaatgcttctggac

SEQ ID NO: 89169 - DNA, 120 bp, Artificial Sequence
  ENSG00000086758_128 (sequence is synthesized)
acacacacacacacacacacacaacagaagaagacttgaagtctatatacaggaggctagttctgactggtcacaggtctggattgtagactgtaggaaatgtaagcatccaaggagctg

SEQ ID NO: 89170 - DNA, 120 bp, Artificial Sequence
  ENSG00000086758_129 (sequence is synthesized)
gctgttgggaaaagcttacaaaacacagtggagaaaagcagaagagttgggaaaggcatccttttgtcctggatagctacagttttccccacccaaatatgggaagcttctttgcaagct

SEQ ID NO: 89171 - DNA, 120 bp, Artificial Sequence
  ENSG00000086758_130 (sequence is synthesized)
gagcacaggctggatgttgaattaagggcatcaggttccagcagcagcactaacatctcttctggccccagccctggtcccagtcccggccccggcaccggccctggccccggccccggc

SEQ ID NO: 89172 - DNA, 120 bp, Artificial Sequence
  ENSG00000086758_131 (sequence is synthesized)
cccggccccggccctggccccggccccggccccggtcctggtcccggccctggccccggccctggccctggcccccgtcctggagtccagtgtattccacaacgagcagcacttctgaaa

SEQ ID NO: 89173 - DNA, 120 bp, Artificial Sequence
  ENSG00000086758_132 (sequence is synthesized)
agaattctcgcgggagcagggttacgtcctcgtgggattcgttggcggtggctgaggtagatctctgagaagagaggaaggagtgacaataccaaataaaaactttgtctaaggttcaat

SEQ ID NO: 89174 - DNA, 120 bp, Artificial Sequence
  ENSG00000086758_133 (sequence is synthesized)
tgattttaagagcattcacttaggcttcagcctattaggtgacatcttggttttcagacagccctttggagctctatggaaggggaagctagagtgttcagtgactccttacagctctct

SEQ ID NO: 89175 - DNA, 120 bp, Artificial Sequence
  ENSG00000086758_134 (sequence is synthesized)
tgtcttttttaattttagacaactagtaacacactacattatattcacatagagcaacttgacaaggtaagaggaatctttgactcttggctcgtttcttaatgtttggttcactttttg

SEQ ID NO: 89176 - DNA, 120 bp, Artificial Sequence
  ENSG00000086758_135 (sequence is synthesized)
tactttagacttttagtattggtaaaattaaaagtattagtaatttttccaatttcaaagcttaattaagtattcttcctaacattcagagacctcacttcgaatgtcttctaattttat

SEQ ID NO: 89177 - DNA, 120 bp, Artificial Sequence
  ENSG00000086758_136 (sequence is synthesized)
tatagtgtatttggatctcttaaaattttgttttatgtgcttgatcattgtggtttaatggcgaactcagcataattcttttgtctttcttcattgccaggagtccagtgtattccacaa

SEQ ID NO: 89178 - DNA, 120 bp, Artificial Sequence
  ENSG00000086758_137 (sequence is synthesized)
ctggaccttgggtaactcacaatttggtgtttctatggaggtgatgtttgagatgagatgtgctagacacagtgggggctggggagacactgtcaggtaaacagcaccacaagagagcat

SEQ ID NO: 89179 - DNA, 120 bp, Artificial Sequence
  ENSG00000086758_138 (sequence is synthesized)
ggtgtattccagggccagcgtgactggagcaaggaggagttgcagggagcaaaagtctaaagagctcagcagaggtccgattaccagtgactctgaaaaccaccttcaagtttgcacttt

SEQ ID NO: 89180 - DNA, 120 bp, Artificial Sequence
  ENSG00000086758_139 (sequence is synthesized)
agcctatgggcgagtgaggccagggtgtttaaggaggagtgacagggtcagatttttggttttggtgcctgatggccagtttgggagccagataaagggggacatactgggctgagacaa

SEQ ID NO: 89181 - DNA, 120 bp, Artificial Sequence
  ENSG00000086827_0 (sequence is synthesized)
agtcagcgttggttcccgtcttggccatggcctcgttcgtgacagaagttttggcacactccgggaggctggaaaaggaggatctggggacccggatcagccgcctgacccggcgggtgg

SEQ ID NO: 89182 - DNA, 120 bp, Artificial Sequence
  ENSG00000086827_1 (sequence is synthesized)
aggagatcaagggtgaggtgtgcaatatgattagcaagaagtacagtgaattcctgcctagcatgcagagcgcgcagggcctgattacccaggtggataagctatctgaagacattgacc

SEQ ID NO: 89183 - DNA, 120 bp, Artificial Sequence
  ENSG00000086827_2 (sequence is synthesized)
tgctgaaatccaggatagagagtgaggtccgccgggatcttcacgtatcaaccggtgaatttacagacttaaagcagcagttggaaagagactcagttgtcctaagtttgcttaaacagt

SEQ ID NO: 89184 - DNA, 120 bp, Artificial Sequence
  ENSG00000086827_3 (sequence is synthesized)
tgcaggagttttccactgctattgaagaatataattgtgcattaacagagaagaagtatgtcactggtgctcagcgtctggaagaggcacagaaatgcttgaagttattaaaatccagaa

SEQ ID NO: 89185 - DNA, 120 bp, Artificial Sequence
  ENSG00000086827_4 (sequence is synthesized)
aatgctttgatttaaaaatattgaaatctctcagcatggagctcacaatacagaaacagaacatactttatcaccttggagaagagtggcagaagctgattgtatggaagttcccaccat

SEQ ID NO: 89186 - DNA, 120 bp, Artificial Sequence
  ENSG00000086827_5 (sequence is synthesized)
caaaagataccagcagtttggaatcttacctacaaactgaacttcatttatacactgaacaatcgcacaaagaggagaagacccctatgccacccatcagttctgtcctcttggcatttt

SEQ ID NO: 89187 - DNA, 120 bp, Artificial Sequence
  ENSG00000086827_6 (sequence is synthesized)
ctgttcttggagaactacacagcaagcttaaatcatttggtcagatgctgctgaagtatatccttaggccgctggcatcttgcccatcccttcatgctgtgatagaaagccagcctaaca

SEQ ID NO: 89188 - DNA, 120 bp, Artificial Sequence
  ENSG00000086827_7 (sequence is synthesized)
tagttattattcgttttgaatctataatgactaacttggaatatccatcaccatctgaagtttttacaaagatcagactggtactagaagtgctccagaaacagcttctagatttgccac

SEQ ID NO: 89189 - DNA, 120 bp, Artificial Sequence
  ENSG00000086827_8 (sequence is synthesized)
ttgacactgacctggaaaatgaaaaaacatctactgtcccattggctgagatgcttggagacatgatctgggaggacttgtctgagtgcctcatcaaaaactgtttggtttattcgattc

SEQ ID NO: 89190 - DNA, 120 bp, Artificial Sequence
  ENSG00000086827_9 (sequence is synthesized)
caacaaatagcagcaaattacagcaatatgaagagatcatacagtccactgaagaatttgaaaatgccctaaaggaaatgagatttttaaaaggagatactacagatttgctgaaatacg

SEQ ID NO: 89191 - DNA, 120 bp, Artificial Sequence
  ENSG00000086827_10 (sequence is synthesized)
ctcgtaacatcaattctcattttgcaaacaaaaagtgccaggatgtgattgtggcagccagaaatctaatgacctcagaaattcataacactgtgaagattattcctgattctaagataa

SEQ ID NO: 89192 - DNA, 120 bp, Artificial Sequence
  ENSG00000086827_11 (sequence is synthesized)
cattccttttccttgcccacatgccgtatcagtgagtctgtgaagaaattaatggaactcgcctatcagactttactagaggcaacaaccagtagtgatcaatgtgctgttcaacttttc

SEQ ID NO: 89193 - DNA, 120 bp, Artificial Sequence
  ENSG00000086827_12 (sequence is synthesized)
tactcagtgaggaatatcttccatttgttccatgatgttgtaccaacatatcacaaggagaaccttcaaaaacttccccagttggctgctattcatcacaacaactgtatgtacattgct

SEQ ID NO: 89194 - DNA, 120 bp, Artificial Sequence
  ENSG00000086827_13 (sequence is synthesized)
caccacttgctgaccctcgggcatcagttcagattgcgtcttgcccccattctttgtgatggcactgctacttttgtggatcttgtacctggcttcaggagacttgggacagaatgcttt

SEQ ID NO: 89195 - DNA, 120 bp, Artificial Sequence
  ENSG00000086827_14 (sequence is synthesized)
ttggcccaaatgcgggcacagaaaggtgaacttctggaaagattatcaagtgctaggaacttttcaaatatggacgatgaagagaattattctgcagcaagtaaagcagtccggcaggta

SEQ ID NO: 89196 - DNA, 120 bp, Artificial Sequence
  ENSG00000086827_15 (sequence is synthesized)
ctgcaccaactaaagagacttggaattgtgtggcaggatgtcctgccagtgaatatatattgcaaggctatggggactttactcaatacagcaatttctgaggtcattggcaaaattact

SEQ ID NO: 89197 - DNA, 120 bp, Artificial Sequence
  ENSG00000086827_16 (sequence is synthesized)
gccctagaggacatatctactgaagatggtgataggttatattccttatgcaaaacagtgatggatgaaggaccccaagtatttgcacctttatctgaagaaagcaagaacaagaaatat

SEQ ID NO: 89198 - DNA, 120 bp, Artificial Sequence
  ENSG00000086827_17 (sequence is synthesized)
caagaagaggttccagtctatgtgccaaaatggatgccattcaaggaattgatgatgatgctacaagccagcttgcaagaaattggggatcggtgggcagatggaaaaggacccctggca

SEQ ID NO: 89199 - DNA, 120 bp, Artificial Sequence
  ENSG00000086827_18 (sequence is synthesized)
gctgcgttctcttccagtgaagtaaaagctttaattcgtgccttgtttcagaacacagaaagaagagcagctgcccttgctaaaattaaatagctccatcttcttaagaaagctatgtct

SEQ ID NO: 89200 - DNA, 120 bp, Artificial Sequence
  ENSG00000086827_19 (sequence is synthesized)
tgaatatgtggattcttcccttggcataattactcccttaaagacttctttgaatcgcccattggttttggtgaaccagtacatcttggaagtttgactttacagaagaacgtcttacct

SEQ ID NO: 89201 - DNA, 120 bp, Artificial Sequence
  ENSG00000086827_20 (sequence is synthesized)
cctggcctgtacgaggctttgtttaagaactgtttattaagataaattgtcaagtaaagcacctcaattcattgactttctagccatcttcctttgattagctaacaaactgtcaggcag

SEQ ID NO: 89202 - DNA, 120 bp, Artificial Sequence
  ENSG00000086827_21 (sequence is synthesized)
cattatttcatgctgcttccagagccctctgggagctatatacattgtaaatgcaggccctagctttggaacgaggaattgggagattccaggagtcagggtagagaatttctgagcaaa

SEQ ID NO: 89203 - DNA, 120 bp, Artificial Sequence
  ENSG00000086827_22 (sequence is synthesized)
tcggagatattttaggggtgtggaggaggggaagggaggaatgggccaccatatttggccttacaggaattaaggagacttcctgtaatatttctttccaataaatattgctttttacaa

SEQ ID NO: 89204 - DNA, 120 bp, Artificial Sequence
  ENSG00000086848_0 (sequence is synthesized)
gtcttttgtccctcggcggacaccgtttgccagccaaagctatgtctgcgcgctcaccgacttcatagggtgccgaattcttttttccccaggcttgccatggctagtcgaggggctcgg

SEQ ID NO: 89205 - DNA, 120 bp, Artificial Sequence
  ENSG00000086848_1 (sequence is synthesized)
cagcgcctgaagggcagcggggccagcagtggggatacggccccggctgcggacaagctgcgggagctgctgggcagccgagaggcgggcggcgcggagcaccggaccgagttatctggg

SEQ ID NO: 89206 - DNA, 120 bp, Artificial Sequence
  ENSG00000086848_2 (sequence is synthesized)
aacaaagcaggacaagtctgggcacctgaaggatctactgctttcaagtgtctgctttcagcaaggttatgtgctgctctcctgagcaacatctctgactgtgatgaaacattcaactac

SEQ ID NO: 89207 - DNA, 120 bp, Artificial Sequence
  ENSG00000086848_3 (sequence is synthesized)
tgggagccaacacactacctcatctatggggaagggtttcagacttgggaatattccccagcatatgccattcgctcctatgcttacctgttgcttcatgcctggccagctgcatttcat

SEQ ID NO: 89208 - DNA, 120 bp, Artificial Sequence
  ENSG00000086848_4 (sequence is synthesized)
gcaagaattctacaaactaataagattcttgtgttttactttttgcgatgtcttctggcttttgtgagctgtatttgtgaactttacttttacaaggctgtgtgcaagaagtttgggttg

SEQ ID NO: 89209 - DNA, 120 bp, Artificial Sequence
  ENSG00000086848_5 (sequence is synthesized)
cacgtgagtcgaatgatgctagccttcttggttctcagcactggcatgttttgctcatcatcagcattccttcctagtagcttctgtatgtacactacgttgatagccatgactggatgg

SEQ ID NO: 89210 - DNA, 120 bp, Artificial Sequence
  ENSG00000086848_6 (sequence is synthesized)
tatatggacaagacttccattgctgtgctgggagtagcagctggggctatcttaggctggccattcagtgcagctcttggtttacccattgcctttgatttgctggtcatgaaacacagg

SEQ ID NO: 89211 - DNA, 120 bp, Artificial Sequence
  ENSG00000086848_7 (sequence is synthesized)
tggaagagtttctttcattggtcgctgatggccctcatactatttctggtgcctgtggtggtcattgacagctactattatgggaagttggtgattgcaccactcaacattgttttgtat

SEQ ID NO: 89212 - DNA, 120 bp, Artificial Sequence
  ENSG00000086848_8 (sequence is synthesized)
aatgtctttactcctcatggacctgatctttatggtacagaaccctggtatttctatttaattaatggatttctgaatttcaatgtagcctttgctttggctctcctagtcctaccactg

SEQ ID NO: 89213 - DNA, 120 bp, Artificial Sequence
  ENSG00000086848_9 (sequence is synthesized)
acttctcttatggaatacctgctgcagagatttcatgttcagaatttaggccacccgtattggcttaccttggctccaatgtatatttggtttataattttcttcatccagcctcacaaa

SEQ ID NO: 89214 - DNA, 120 bp, Artificial Sequence
  ENSG00000086848_10 (sequence is synthesized)
gaggagagatttcttttccctgtgtatccacttatatgtctctgtggcgctgtggctctctctgcacttcagcacagttttctgtacttccagaaatgttaccactttgtgtttcaacga

SEQ ID NO: 89215 - DNA, 120 bp, Artificial Sequence
  ENSG00000086848_11 (sequence is synthesized)
tatcgcctggagcactatactgtgacatcgaattggctggcattaggaactgtcttcctgtttgggctcttgtcattttctcgctctgtggcactgttcagaggatatcacgggcccctt

SEQ ID NO: 89216 - DNA, 120 bp, Artificial Sequence
  ENSG00000086848_12 (sequence is synthesized)
gatttgtatccagaattttaccgaattgctacagacccaaccatccacactgtcccagaaggcagacctgtgaatgtctgtgtgggaaaagagtggtatcgatttcccagcagcttcctt

SEQ ID NO: 89217 - DNA, 120 bp, Artificial Sequence
  ENSG00000086848_13 (sequence is synthesized)
cttcctgacaattggcagcttcagttcattccatcagagttcagaggtcagttaccaaaaccttttgcagaaggacctctggccacccggattgttcctactgacatgaatgaccagaat

SEQ ID NO: 89218 - DNA, 120 bp, Artificial Sequence
  ENSG00000086848_14 (sequence is synthesized)
ctagaagagccatccagatatattgatatcagtaaatgccattatttagtggatttggacaccatgagagaaacaccccgggagccaaaatattcatccaataaagaagaatggatcagc

SEQ ID NO: 89219 - DNA, 120 bp, Artificial Sequence
  ENSG00000086848_15 (sequence is synthesized)
ttggcctatagaccattccttgatgcttctagatcttcaaagctgctgcgggcattctatgtccccttcctgtcagatcagtatacagtgtacgtaaactacaccatcctcaaaccccgg

SEQ ID NO: 89220 - DNA, 120 bp, Artificial Sequence
  ENSG00000086848_16 (sequence is synthesized)
aaagcaaagcaaatcaggaagaaaagtggaggttagcaacacacctgtggccccaaaggacaaccatcttgttaactattgattccagtgacctgactccctgcaagtcatcgcctgtaa

SEQ ID NO: 89221 - DNA, 120 bp, Artificial Sequence
  ENSG00000086848_17 (sequence is synthesized)
catttgtaataaaggtcttctgacatgaatactggaatctgggtgctctgggctagtcaaagtctatttcaaagtctaatcaaagtcacatttgctccctgtgtgtgtctctgttctgca

SEQ ID NO: 89222 - DNA, 120 bp, Artificial Sequence
  ENSG00000086848_18 (sequence is synthesized)
tgtaaactttttgcagctaggcagagaaaggccctaaagcacagatagatatattgctccacatctcattgtttttcctctgttcaattatttactagaccggagaagagcagaaccaac

SEQ ID NO: 89223 - DNA, 120 bp, Artificial Sequence
  ENSG00000086848_19 (sequence is synthesized)
ttacaggaagaattgaaaatcctggtactggatggctgtgataagctgttctccacactctggcctggcatctgagaactagcaagcctctcttaggccatatgggcttctccaccaaag

SEQ ID NO: 89224 - DNA, 120 bp, Artificial Sequence
  ENSG00000086848_20 (sequence is synthesized)
ctgtttggcagctcctagcagaccttcttattgaaatcctcatgctgaaaatgaacacagcctagttgccaacccacatgtccttttcacctccagcaagactaagcttctttaaagcac

SEQ ID NO: 89225 - DNA, 120 bp, Artificial Sequence
  ENSG00000086848_21 (sequence is synthesized)
ttcacaggactaggaccctgtcctggagctatctcaggaaaaaggtgaccatttgaggaactgtgacctaattttattataatgatgcctctaattttcatttcctttacaaccaactgt

SEQ ID NO: 89226 - DNA, 120 bp, Artificial Sequence
  ENSG00000086848_22 (sequence is synthesized)
aactataaggttgtattgcttttttgttcagttttagcatgctattttttgaattctagactcctccatgtgaagatatcaacagacaaaactacaactgtataggacatatttggagaa

SEQ ID NO: 89227 - DNA, 120 bp, Artificial Sequence
  ENSG00000086848_23 (sequence is synthesized)
aattctatcaattgatacatttggatgacatcacatttttaagtaatgtaatctgaggccattgctgaggaaattaagaattttcctttttttttaaccacccccagtgaaaaggatcag

SEQ ID NO: 89228 - DNA, 120 bp, Artificial Sequence
  ENSG00000086848_24 (sequence is synthesized)
tgtatatttatagcacctattttttagttctgtctgttgtgaggcacatcctgcatggggcacttctagtcaaataggcaatgataaggacctaattaaaatgtgataagtgtatactat

SEQ ID NO: 89229 - DNA, 120 bp, Artificial Sequence
  ENSG00000086848_25 (sequence is synthesized)
aggcactttcacagcatctcgtttgatcctcacagtcacaacatgtggtagacaaggcaggtgatttttatccccattttacagataaggaaacaggctgcgggtggggagtgaggggag

SEQ ID NO: 89230 - DNA, 120 bp, Artificial Sequence
  ENSG00000086848_26 (sequence is synthesized)
gtaaagatagttagttgcctaaggtcacacagccagtaagtaatagagctgggactggaacccaggtttccttactctcatctattgctcctccatattcctcactcaaccatgaaaaca

SEQ ID NO: 89231 - DNA, 120 bp, Artificial Sequence
  ENSG00000086848_27 (sequence is synthesized)
ttacttgaaaggactgatgaggttaaccagagacctaactgatattgtaactttctattttaaggaagaattgtgtctgtatttgagttctttggagcctccagtctgcctgtgtgttag

SEQ ID NO: 89232 - DNA, 120 bp, Artificial Sequence
  ENSG00000086848_28 (sequence is synthesized)
accagcacagcagtgctgtgtgatgcagcctgacctgtggcaggaaagtagtgcttctgtttggaagtcatgttcttttgcagccacacaggatccaaatatcagtactattcctgtagt

SEQ ID NO: 89233 - DNA, 120 bp, Artificial Sequence
  ENSG00000086848_29 (sequence is synthesized)
caatctggggtcacattataggtgccttatttccctaagggtaactgatctgaatatctgcaaataggatgaatctatttttcagaagttccatctttcatttttctttttttttttgag

SEQ ID NO: 89234 - DNA, 120 bp, Artificial Sequence
  ENSG00000086848_30 (sequence is synthesized)
tacaggcgtgagccaccgcacccagccccatctttcattttcaaagagaagggcattctaataggaactggtgccaagagagaagaaaagaagtgataacagaagaaatggctagttaca

SEQ ID NO: 89235 - DNA, 120 bp, Artificial Sequence
  ENSG00000086848_31 (sequence is synthesized)
tggctagttacaatattaaaaagctcctctttgagatctcctctgcaggaatatcagagacggagttgaagcgctggagaggtaataggtctagacagtacagaacaataactggggagt

SEQ ID NO: 89236 - DNA, 120 bp, Artificial Sequence
  ENSG00000086848_32 (sequence is synthesized)
gtgtgaggatagactgggctcccccttgcttgaaagatctctggcatttaattctcaattcttgattactattttccagtgtaaaactagcacatatgatctgactacaggacagagaat

SEQ ID NO: 89237 - DNA, 120 bp, Artificial Sequence
  ENSG00000086848_33 (sequence is synthesized)
tttaagtgaaacatttgccttacttgcagtaataatgtgctgttcttcacagtagctaaggccctctatgtttcccagaggtaaataagaatccaggaatggaggtccatctgtgatgaa

SEQ ID NO: 89238 - DNA, 120 bp, Artificial Sequence
  ENSG00000086848_34 (sequence is synthesized)
tggcttttttctaatcaaagtagtataatgctgttttatctgttttgtcatcttgtttttttttttttttaaaaaaacaaaaccttaattataatatagcgcaaagaaaggccaggactg

SEQ ID NO: 89239 - DNA, 120 bp, Artificial Sequence
  ENSG00000086848_35 (sequence is synthesized)
atgcagggattccttggaaatatcagttcctatcacttttaaaacctgattttggatctctctgttctatgtatgtctttagtgagagcacaatacatggcagaacgctgtgccaaatgt

SEQ ID NO: 89240 - DNA, 120 bp, Artificial Sequence
  ENSG00000086848_36 (sequence is synthesized)
tataggtaaggaatatagaaatgaatgttttttgttgtgaaggtgttttcatgtgatattttataaacacattttaaaaaatctccatcactttttagtataggaaggatagctttgcct

SEQ ID NO: 89241 - DNA, 120 bp, Artificial Sequence
  ENSG00000086848_37 (sequence is synthesized)
gggaaaaacagtttcaacacacctgctcagagtagcagttctccctcaaaaaagcagtgttcagcctgcactgactgttctgcttgccaaaaggaggaagcatgcaagatacttatttct

SEQ ID NO: 89242 - DNA, 120 bp, Artificial Sequence
  ENSG00000086848_38 (sequence is synthesized)
tgccaaaaggaggaagcatgcaagatacttatttctccatagattgtggagtatagagggatgtgggactacagattattattttttttccccgagacagagtcttgctctgtcgcccag

SEQ ID NO: 89243 - DNA, 65 bp, Artificial Sequence
  ENSG00000086848_39 (sequence is synthesized)
tcatccagataatttttaatagcctttgatcatggggtgagtgagggagtaggtatacttggcaa

SEQ ID NO: 89244 - DNA, 120 bp, Artificial Sequence
  ENSG00000086848_40 (sequence is synthesized)
ttgatcatggggtgagtgagggagtaggtatacttggcaaatgcatggttctctgatttctagctctaaagcagccttatctgaatccccaaatcttgtgatgctgagtaccattactga

SEQ ID NO: 89245 - DNA, 120 bp, Artificial Sequence
  ENSG00000086848_41 (sequence is synthesized)
accagtctgcacggtaggcatctgctaccaaaatttacctcctacctggtaggtgtcatctgataagaaagaagacaggttattttaattttttgagataatcacagaaaattgcagccc

SEQ ID NO: 89246 - DNA, 120 bp, Artificial Sequence
  ENSG00000086848_42 (sequence is synthesized)
atactctttattaccgaattcaagtttggaaatagaccctttgttttaaatcatgatgggtctttatcccaatcatttatctgggtcatttttccaactttggagttctaggaaagaacc

SEQ ID NO: 89247 - DNA, 120 bp, Artificial Sequence
  ENSG00000086848_43 (sequence is synthesized)
ttgaaaacctgatatgattctgcagcatgaggtctacggtgaccatttgggcaaagctccagtggcaatcatttattgtgttttgcatttcctgggatttattgaaataagaattcactg

SEQ ID NO: 89248 - DNA, 120 bp, Artificial Sequence
  ENSG00000086848_44 (sequence is synthesized)
tgattatgtagtcttctggctagtatcaggcagctctgcttttaatttggttaattttattttctctgaagagggagaagaggtacaatttaatcttggcctccacaagcatattaaagc

SEQ ID NO: 89249 - DNA, 120 bp, Artificial Sequence
  ENSG00000086848_45 (sequence is synthesized)
tcacgtgttaatcagtgcattcttatgctcctacattaaatgccttgggtaaatggataaatggacatgtgcccagctttaattttttttgcaacagaaagatcagacttccgtatggca

SEQ ID NO: 89250 - DNA, 120 bp, Artificial Sequence
  ENSG00000086848_46 (sequence is synthesized)
tcgttggatttcagaggctttctggtgtatctgtaaatctgaatgttgccttctgccagtctgtataaccaggtgattcatgctgcaaatgaaatcaggaagcagtaaagtgttaaagca

SEQ ID NO: 89251 - DNA, 120 bp, Artificial Sequence
  ENSG00000086848_47 (sequence is synthesized)
agagtattgtccaattcacttgtcttcctgatccttgtactttatttcacgtgtcggtgtttacattacatacttatatttcctgtgaaagaaagagttaaataaattgtagcagtttga

SEQ ID NO: 89252 - DNA, 87 bp, Artificial Sequence
  ENSG00000086848_48 (sequence is synthesized)
cctcccacctcagcctctcaaaatatattaacttctccttgactgggatcttcaaagctgctgcgggcattctatgtccccttcctg

SEQ ID NO: 89253 - DNA, 120 bp, Artificial Sequence
  ENSG00000086848_49 (sequence is synthesized)
ggagtgagaaaaataagagtcattgaacttcatttttttaaaaaagaatatcactttgctgtcctttctaatatagcatttccccaattatgtacctgtttattgacattttataatgta

SEQ ID NO: 89254 - DNA, 120 bp, Artificial Sequence
  ENSG00000086848_50 (sequence is synthesized)
ggtaaatttttaatcagtttttaattgatacctaattaacctcgagctcttgtcctcctgccttttttcacttctttactcttgcagcattccttcctagtagcttctgtatgtacacta

SEQ ID NO: 89255 - DNA, 120 bp, Artificial Sequence
  ENSG00000086848_51 (sequence is synthesized)
caaaatattcatccaataaagaagaatggatcagcttggcctatagaccattccttgatgcttctagttttgaaggctggaagaccaagatcacgatgccagtatagtcaagttctggta

SEQ ID NO: 89256 - DNA, 120 bp, Artificial Sequence
  ENSG00000086848_52 (sequence is synthesized)
aaggccatctttctggctgcagacagctgacttgtatcctcacatggctgcaagaagacaagctagctctctagcctcttcttataaggacattaatcccattgttgagtgctccactct

SEQ ID NO: 89257 - DNA, 120 bp, Artificial Sequence
  ENSG00000086848_53 (sequence is synthesized)
gctgcccccgggagggtcttagctgtggcgcgcggggctcagtccggcctggcctcaccgcgggaggcccgagctccctcttcagctaggtcctattggtcttcctgggcgggtcagcat

SEQ ID NO: 89258 - DNA, 120 bp, Artificial Sequence
  ENSG00000086848_54 (sequence is synthesized)
tcagtcttcgcccaccttagatccctccactgcgctgtaaaactgccttggagtgcggatctgtgatgctcctgggccaggcctagagtgggcacagcctctgtgggagatgtagacagg

SEQ ID NO: 89259 - DNA, 120 bp, Artificial Sequence
  ENSG00000086848_55 (sequence is synthesized)
atcaaagagtataccttttacggctgttcctcacagctccttttattctccctcaagtcccgaccctttactgggcccatccaacccgccatcacctcttcccaaaccctggaggctgca

SEQ ID NO: 89260 - DNA, 120 bp, Artificial Sequence
  ENSG00000086848_56 (sequence is synthesized)
ggttagaactgcattaagggagctgtcaacatatggaattggagtaggctatgtaccttgcacctaggcttctatctgaacataagggggaatgaataaagccatcaaaagcaatgacct

SEQ ID NO: 89261 - DNA, 77 bp, Artificial Sequence
  ENSG00000086848_57 (sequence is synthesized)
agaagaatggatcagcttggcctatagaccattccttgatgcttctaggtgttcactgcaacctccacctcctggac

SEQ ID NO: 89262 - DNA, 84 bp, Artificial Sequence
  ENSG00000086848_58 (sequence is synthesized)
gctagaatgtaaatgggacaagcagatgaaaacaaaatgggagatgcctgaatagctcaaactaagttccttatttttattttt

SEQ ID NO: 89263 - DNA, 66 bp, Artificial Sequence
  ENSG00000086848_59 (sequence is synthesized)
tacagaaccctggtatttctatttaattaatggatttctgaatttcaatgtagcctttgctttggc

SEQ ID NO: 89264 - DNA, 120 bp, Artificial Sequence
  ENSG00000086848_60 (sequence is synthesized)
gggaagttggtgattgcaccactcaacattgttttgtataatgtctttactcctcatggacctgatctttatgggacatggatggaactgaaagccattatcctcagcaaactaacacag

SEQ ID NO: 89265 - DNA, 84 bp, Artificial Sequence
  ENSG00000086848_61 (sequence is synthesized)
caacatacactggggcctgtggagggggcggagggagggagagagcatcaggataatagctaatgcatgctgggcttaatatct

SEQ ID NO: 89266 - DNA, 120 bp, Artificial Sequence
  ENSG00000086848_62 (sequence is synthesized)
ggaggaataggccatatgtagagacagatgtgagactgaagtcttttttacatataaataatgctgggagagaatgagaacatttctgtaaggtggaggttggggaagaacagagttcac

SEQ ID NO: 89267 - DNA, 120 bp, Artificial Sequence
  ENSG00000086967_0 (sequence is synthesized)
gtcctccctagggcctagcgggacgcggctgcggtcagaggagcaggaggaggtcccccgacatgcctgaggcaaaaccagcggccaaaaaggcccccaaaggcaaagatgcccccaaag

SEQ ID NO: 89268 - DNA, 120 bp, Artificial Sequence
  ENSG00000086967_1 (sequence is synthesized)
gagcccccaaggaggctccccctaaggaggctcctgcagaggcccccaaagaagccccacccgaggaccagtccccgactgcagaggagcccaccggcgttttcctgaagaagccggact

SEQ ID NO: 89269 - DNA, 120 bp, Artificial Sequence
  ENSG00000086967_2 (sequence is synthesized)
ccgtctcagtggagactgggaaggacgcagtggtcgtggccaaggtgaacgggaaggagctcccagacaaaccgaccatcaagtggttcaaggggaagtggctggagctgggcagcaaga

SEQ ID NO: 89270 - DNA, 120 bp, Artificial Sequence
  ENSG00000086967_3 (sequence is synthesized)
gtggcgcccgcttctccttcaaggagtcccacaactccgccagcaatgtgtacaccgtggagctgcacattgggaaggtggtactgggggaccgtgggtattaccgcctcgaggtcaaag

SEQ ID NO: 89271 - DNA, 120 bp, Artificial Sequence
  ENSG00000086967_4 (sequence is synthesized)
ccaaggacacctgtgacagctgtggcttcaacatcgatgtggaggcaccccgtcaggatgcctctgggcagagtctagaaagcttcaagcgtacgagtgaaaagaagtcggatactgcag

SEQ ID NO: 89272 - DNA, 120 bp, Artificial Sequence
  ENSG00000086967_5 (sequence is synthesized)
gtgagctggatttcagtggcctgttgaagaagagggaggtggtggaggaggagaagaagaagaaaaagaaagatgacgatgacctaggcatccccccggagatttgggagctcctgaaag

SEQ ID NO: 89273 - DNA, 120 bp, Artificial Sequence
  ENSG00000086967_6 (sequence is synthesized)
gggcaaagaagagcgagtacgagaaaatcgccttccagtatggcatcaccgacctccggggcatgctgaagcggctgaaaaaggctaaggtcgaggtcaagaagagtgcagcattcacaa

SEQ ID NO: 89274 - DNA, 120 bp, Artificial Sequence
  ENSG00000086967_7 (sequence is synthesized)
agaagctggatccagcctaccaagtggacagaggcaacaagatcaagttgatggtagagatcagcgacccagacctgaccctcaagtggttcaagaacggccaggagatcaaaccaagca

SEQ ID NO: 89275 - DNA, 120 bp, Artificial Sequence
  ENSG00000086967_8 (sequence is synthesized)
gcaagtacgtgtttgagaacgttggtaagaagcgaattcttaccatcaacaagtgcacgctggcggatgacgctgcctatgaagtagctgtcaaggatgagaagtgtttcaccgagctct

SEQ ID NO: 89276 - DNA, 120 bp, Artificial Sequence
  ENSG00000086967_9 (sequence is synthesized)
tcgtcaaagaacctccagtcctaattgtcacacctcttgaggaccagcaggtgtttgtgggtgaccgggtggaaatggcagtggaggtgtcagaagagggtgcccaggtgatgtggatga

SEQ ID NO: 89277 - DNA, 120 bp, Artificial Sequence
  ENSG00000086967_10 (sequence is synthesized)
aagatggtgtggaactgactcgggaggattccttcaaggcccggtaccgcttcaagaaggacgggaagcgccacatcctcatcttctcagacgtggtccaggaggacaggggtcgctatc

SEQ ID NO: 89278 - DNA, 120 bp, Artificial Sequence
  ENSG00000086967_11 (sequence is synthesized)
aggtcataaccaatggcggccagtgtgaggccgagctgattgtggaagagaaacagctggaggtcctgcaggacatcgcggatctgacggtgaaggcctcagaacaagctgtgttcaagt

SEQ ID NO: 89279 - DNA, 120 bp, Artificial Sequence
  ENSG00000086967_12 (sequence is synthesized)
gcgaggtgtctgatgagaaagtgacgggcaagtggtataagaatggggtcgaggtgcggcccagcaagaggatcaccatttcccatgtaggcaggttccacaagctggtgatcgatgacg

SEQ ID NO: 89280 - DNA, 120 bp, Artificial Sequence
  ENSG00000086967_13 (sequence is synthesized)
tccgccccgaggatgagggagactacacgtttgtgcctgacggctacgccctgtcgctctcggccaagctcaacttcctggaaatcaaggtggagtacgttcccaagcaagagccaccaa

SEQ ID NO: 89281 - DNA, 120 bp, Artificial Sequence
  ENSG00000086967_14 (sequence is synthesized)
agatccacttggattgctcggggaagacctcagagaatgcgattgtggttgtggctggaaacaagctgaggcttgacgtgtccatcacaggggagccccctcccgtcgctacctggctga

SEQ ID NO: 89282 - DNA, 120 bp, Artificial Sequence
  ENSG00000086967_15 (sequence is synthesized)
agatgaggtattcacgaccaccgagggcaggacccgcatcgagaagcgggtggactgcagcagctttgtgattgagagtgcgcagcgggaagacgagggccgctacaccatcaaggtcac

SEQ ID NO: 89283 - DNA, 120 bp, Artificial Sequence
  ENSG00000086967_16 (sequence is synthesized)
caaccccgtcggcgaggacgtggcttccatcttcctgcaagttgtagatgtcccagaccccccggaggctgtgcgcatcacctcggttggagaggattgggccatccttgtctgggagcc

SEQ ID NO: 89284 - DNA, 120 bp, Artificial Sequence
  ENSG00000086967_17 (sequence is synthesized)
accaatgtacgatggggggaagccagtcaccgggtacctcgtagagcggaagaagaagggctctcagcgctggatgaagctgaactttgaggtcttcacagagaccacctatgagtccac

SEQ ID NO: 89285 - DNA, 120 bp, Artificial Sequence
  ENSG00000086967_18 (sequence is synthesized)
caagatgatcgagggcatcctctatgagatgcgtgtcttcgccgtcaatgctataggggtctcccagcccagcatgaacaccaagccttttatgcctattgcacccacgagtgaacccct

SEQ ID NO: 89286 - DNA, 120 bp, Artificial Sequence
  ENSG00000086967_19 (sequence is synthesized)
gcacctgatagtggaggatgtgacagacaccaccaccacactcaagtggaggcctccgaacaggatcggggcaggtggcatcgatgggtacctggtggagtactgcctggaaggctccga

SEQ ID NO: 89287 - DNA, 120 bp, Artificial Sequence
  ENSG00000086967_20 (sequence is synthesized)
ggaatgggtccctgccaacaccgagcccgtggagcgctgtggcttcaccgtcaagaatctcccgaccggagccagaatcctcttccgagtagttggggtcaacatcgcggggcgcagcga

SEQ ID NO: 89288 - DNA, 120 bp, Artificial Sequence
  ENSG00000086967_21 (sequence is synthesized)
gccggccaccctggcccagccggtcaccatcagggagattgcggagccacccaagatccggcttccccgccatctccgccagacctacatccgcaaagtgggcgagcagctcaaccttgt

SEQ ID NO: 89289 - DNA, 120 bp, Artificial Sequence
  ENSG00000086967_22 (sequence is synthesized)
cgtccccttccagggaaagccccggccccaggtggtgtggaccaagggcggggccccgctggacacctcccgcgtgcacgtgcggaccagcgacttcgacaccgtgttcttcgtgcgcca

SEQ ID NO: 89290 - DNA, 120 bp, Artificial Sequence
  ENSG00000086967_23 (sequence is synthesized)
ggcggcccgctccgactccggggagtacgagctgagcgtgcagatcgagaacatgaaggacaccgccaccatccgcatccgcgttgtggaaaaggctgggccccccataaacgtgatggt

SEQ ID NO: 89291 - DNA, 120 bp, Artificial Sequence
  ENSG00000086967_24 (sequence is synthesized)
gaaggaggtgtggggcacgaacgcgctggtggagtggcaggcccccaaagatgatgggaacagtgagatcatggggtatttcgtccagaaagcagacaaaaaaaccatggagtggttcaa

SEQ ID NO: 89292 - DNA, 120 bp, Artificial Sequence
  ENSG00000086967_25 (sequence is synthesized)
cgtctatgaacgtaacaggcacactagctgtactgtgtccgaccttatcgtgggcaatgaatactatttccgagtttacaccgagaacatctgtgggctcagtgactcacctggtgtctc

SEQ ID NO: 89293 - DNA, 120 bp, Artificial Sequence
  ENSG00000086967_26 (sequence is synthesized)
caagaacacggcccgcatcctcaagacaggaatcaccttcaaaccgttcgagtataaggagcatgacttccggatggctcccaagttcctgacacctctcatagaccgcgtggtcgtggc

SEQ ID NO: 89294 - DNA, 120 bp, Artificial Sequence
  ENSG00000086967_27 (sequence is synthesized)
tgggtactcggcagccctcaactgtgctgtcagaggccacccgaagccgaaggtggtctggatgaagaacaagatggaaatccgtgaagatcccaagttcctgataaccaattaccaagg

SEQ ID NO: 89295 - DNA, 120 bp, Artificial Sequence
  ENSG00000086967_28 (sequence is synthesized)
agtcctgacgctgaacatccgtcgcccctcgcccttcgacgctgggacttacacctgccgggccgtcaacgagctgggcgaggcgctggctgagtgcaagctggaggtccgagtgccgca

SEQ ID NO: 89296 - DNA, 120 bp, Artificial Sequence
  ENSG00000086967_29 (sequence is synthesized)
gtgagacctgtcccctacctgccaagacaattggtggtggagtcctgaccccaatccccaacctcccaggactgtgttctttctggagttttcgctgagaacaaaacagtgttgtctgga

SEQ ID NO: 89297 - DNA, 120 bp, Artificial Sequence
  ENSG00000086967_30 (sequence is synthesized)
atctggcaagagggtggcagagcctagaacccagatcggcttcctgagccccattttgtcatcattgcccagggtctctctctaagttggcctcctctcccttgactctcaacagccgaa

SEQ ID NO: 89298 - DNA, 120 bp, Artificial Sequence
  ENSG00000086991_0 (sequence is synthesized)
actcagtctttgaccctcggtcctcgctcagcggcccggcaggccgcacaactgtaaccgctgccccggccgccgcccgctccttctcggtccggcgggcacagagcgcagcgcggcggg

SEQ ID NO: 89299 - DNA, 120 bp, Artificial Sequence
  ENSG00000086991_1 (sequence is synthesized)
gccggcggcatggctgtgtcctggaggagctggctcgccaacgaaggggttaaacacctctgcctgttcatctggctctccatgaatgtcctgcttttctggaaaaccttcttgctgtat

SEQ ID NO: 89300 - DNA, 120 bp, Artificial Sequence
  ENSG00000086991_2 (sequence is synthesized)
aaccaagggccagagtatcactacctccaccagatgttggggctaggattgtgtctaagcagagcctcagcatctgttcttaacctcaactgcagccttatccttttacccatgtgccga

SEQ ID NO: 89301 - DNA, 120 bp, Artificial Sequence
  ENSG00000086991_3 (sequence is synthesized)
acactcttggcttacctccgaggatcacagaaggttccaagcaggagaaccaggagattgttggataaaagcagaacattccatattacctgtggtgttactatctgtattttctcaggc

SEQ ID NO: 89302 - DNA, 120 bp, Artificial Sequence
  ENSG00000086991_4 (sequence is synthesized)
gtgcatgtggctgcccatctggtgaatgccctcaacttctcagtgaattacagtgaagactttgttgaactgaatgcagcaagataccgagatgaggatcctagaaaacttctcttcaca

SEQ ID NO: 89303 - DNA, 120 bp, Artificial Sequence
  ENSG00000086991_5 (sequence is synthesized)
actgttcctggcctgacaggggtctgcatggtggtggtgctattcctcatgatcacagcctctacatatgcaataagagtttctaactatgatatcttctggtatactcataacctcttc

SEQ ID NO: 89304 - DNA, 120 bp, Artificial Sequence
  ENSG00000086991_6 (sequence is synthesized)
tttgtcttctacatgctgctgacgttgcatgtttcaggagggctgctgaagtatcaaactaatttagatacccaccctcccggctgcatcagtcttaaccgaaccagctctcagaatatt

SEQ ID NO: 89305 - DNA, 120 bp, Artificial Sequence
  ENSG00000086991_7 (sequence is synthesized)
tccttaccagagtatttctcagaacattttcatgaacctttccctgaaggattttcaaaaccggcagagtttacccagcacaaatttgtgaagatttgtatggaagagcccagattccaa

SEQ ID NO: 89306 - DNA, 120 bp, Artificial Sequence
  ENSG00000086991_8 (sequence is synthesized)
gctaattttccacagacttggctttggatttctggacctttgtgcctgtactgtgccgaaagactttacaggtatatccggagcaataagccagtcaccatcatttcggtcatgagtcat

SEQ ID NO: 89307 - DNA, 120 bp, Artificial Sequence
  ENSG00000086991_9 (sequence is synthesized)
ccctcagatgtcatggaaatccgaatggtcaaagaaaattttaaagcaagacctggtcagtatattactctacattgtcccagtgtatctgcattagaaaatcatccatttaccctcaca

SEQ ID NO: 89308 - DNA, 120 bp, Artificial Sequence
  ENSG00000086991_10 (sequence is synthesized)
atgtgtccaactgaaaccaaagcaacatttggggttcatcttaaaatagtaggagactggacagaacgatttcgagatttactactgcctccatctagtcaagactccgaaattctgccc

SEQ ID NO: 89309 - DNA, 120 bp, Artificial Sequence
  ENSG00000086991_11 (sequence is synthesized)
ttcattcaatctagaaattatcccaagctgtatattgatggtccttttggaagtccatttgaggaatcactgaactatgaggtcagcctctgcgtggctggaggcattggagtaactcca

SEQ ID NO: 89310 - DNA, 120 bp, Artificial Sequence
  ENSG00000086991_12 (sequence is synthesized)
tttgcatcaatactcaacaccctgttggatgactggaaaccatacaagcttagaagactatactttatttgggtatgcagagatatccagtccttccgttggtttgcagatttactctgt

SEQ ID NO: 89311 - DNA, 120 bp, Artificial Sequence
  ENSG00000086991_13 (sequence is synthesized)
atgttgcataacaagttttggcaagagaacagacctgactatgtcaacatccagctgtacctcagtcaaacagatgggatacagaagataattggagaaaaatatcatgcactgaattca

SEQ ID NO: 89312 - DNA, 120 bp, Artificial Sequence
  ENSG00000086991_14 (sequence is synthesized)
agactgtttataggacgtcctcggtggaaacttttgtttgatgaaatagcaaaatataacagaggaaaaacagttggtgttttctgttgtggacccaattcactatccaagactcttcat

SEQ ID NO: 89313 - DNA, 120 bp, Artificial Sequence
  ENSG00000086991_15 (sequence is synthesized)
aaactgagtaaccagaacaactcatatgggacaagatttgaatacaataaagagtctttcagctgaaaacttttgccatgaagcaggactctaaagaaggaatgagtgcaatttctaaga

SEQ ID NO: 89314 - DNA, 120 bp, Artificial Sequence
  ENSG00000086991_16 (sequence is synthesized)
ctttgaaactcagcggaatcaatcagctgtgttatgccaaagaatagtaaggttttcttatttatgattatttaaaatggaaatgtgagaatgtggcaagatgaccgtcacattacatgt

SEQ ID NO: 89315 - DNA, 120 bp, Artificial Sequence
  ENSG00000086991_17 (sequence is synthesized)
aaagaaaactgttagatgcacactgttgattttcatggtggattcaagaactccctagtgaggagctgaacttgctcaatctaaggctgattgtcgtgttcctctttaaattgtttttgg

SEQ ID NO: 89316 - DNA, 120 bp, Artificial Sequence
  ENSG00000086991_18 (sequence is synthesized)
ttgaacaaatgcaagattgaacaaaattaaaaattcattgaagctgaaattccattttctgtgttgtgtataaacagagtagctttaatttgcaagcactccaggcaaatatattagatg

SEQ ID NO: 89317 - DNA, 120 bp, Artificial Sequence
  ENSG00000086991_19 (sequence is synthesized)
tttgaaaacacagcacaagactctgtattgatacgggtactttgtgtcaatatctaatcgtctccactacttatgctaatacctctatttgatatctgaagactatatgctaactgaacc

SEQ ID NO: 89318 - DNA, 120 bp, Artificial Sequence
  ENSG00000086991_20 (sequence is synthesized)
ttcctcaaatgttgttatagtatctatttttatatatttttttctttttattcctctctctagggaaatatgccttcccttagcatgcattagacataatgatttaataggtccctttca

SEQ ID NO: 89319 - DNA, 120 bp, Artificial Sequence
  ENSG00000086991_21 (sequence is synthesized)
atgcattagacataatgatttaataggtccctttcatcttcatttaaatctatcactattgcatggtaatgaaaatattcctactataaattataaagggatatatatatatggatatat

SEQ ID NO: 89320 - DNA, 120 bp, Artificial Sequence
  ENSG00000086991_22 (sequence is synthesized)
atatatatatatatatatatatacacatatactaataacttttcccttttttcagcatttttgtctctattattattattgtttttttcccaggtagggtttgtcttaggctgtagcctc

SEQ ID NO: 89321 - DNA, 120 bp, Artificial Sequence
  ENSG00000086991_23 (sequence is synthesized)
cctctaaggatagttagttaatttgcactttgagaccaaaggacatcatgtgtgtcagtagggactgaatataagatttatctcctttgccacacattggtttatgatggagacattgaa

SEQ ID NO: 89322 - DNA, 120 bp, Artificial Sequence
  ENSG00000086991_24 (sequence is synthesized)
agtctagtcatattcctgaacagtaaaacctgtattttaccttttaagtaagaggaaatatgatattcttattcaaacttaagtttagaatccagaatattactgtcgcactttttggta

SEQ ID NO: 89323 - DNA, 120 bp, Artificial Sequence
  ENSG00000086991_25 (sequence is synthesized)
tcctgagtttccatagggaactattgggtttaaagtcaccgttggaactacactgtgtgatcttataaacttatgttccctggctatcatattcttggctcagaacaatatttcccatta

SEQ ID NO: 89324 - DNA, 63 bp, Artificial Sequence
  ENSG00000086991_26 (sequence is synthesized)
tggctatcatattcttggctcagaacaatatttcccattactatcttaagaattaaggcattc

SEQ ID NO: 89325 - DNA, 90 bp, Artificial Sequence
  ENSG00000086991_27 (sequence is synthesized)
taaaaatacaaatattaggcctactcgggagactgaggcaaagaatcgcttgaacccggtgggcggaggttgcagtgagccaagattgca

SEQ ID NO: 89326 - DNA, 72 bp, Artificial Sequence
  ENSG00000086991_28 (sequence is synthesized)
ttcatacagtttagtgattttgtttagtagtcggctatcaattgctatcaaatataacactgctgaaatcag

SEQ ID NO: 89327 - DNA, 120 bp, Artificial Sequence
  ENSG00000086991_29 (sequence is synthesized)
ggctatcaattgctatcaaatataacactgctgaaatcagcagtgtgacttaccttgccattgttaaaatgttacataaaacataacatgatagatgctaaggcctttttttgctataat

SEQ ID NO: 89328 - DNA, 120 bp, Artificial Sequence
  ENSG00000086991_30 (sequence is synthesized)
tcaccaatagcaatcaagcatgctaacccatactgaatgatatttacttgtagatatttcttcctttccttgaaattctcctttctatggaaagaagatgaacccaaaaaagtgatagga

SEQ ID NO: 89329 - DNA, 120 bp, Artificial Sequence
  ENSG00000086991_31 (sequence is synthesized)
aatgtggaatgctcatgcagatttagctctgaaggcatatttaataactagtatgtcttgacaacagtctttagattaaaaagaattttcatggaaacatttaacagaaagaactagtaa

SEQ ID NO: 89330 - DNA, 120 bp, Artificial Sequence
  ENSG00000086991_32 (sequence is synthesized)
aaagacactttgagttagtccaggcttaatgtgcaatactgactctatactgatcataatttatttatgcgatcatattaatagacctaatttcattaaaacaggtagaagatttttcaa

SEQ ID NO: 89331 - DNA, 120 bp, Artificial Sequence
  ENSG00000086991_33 (sequence is synthesized)
aagaaagatgatgtttcaaagctggtctgccattctagatgagcctccttgcttatttaagttccagtaggtgttcaaatgttaaatgttaaacataggtcatctttgcttctgcagggc

SEQ ID NO: 89332 - DNA, 120 bp, Artificial Sequence
  ENSG00000086991_34 (sequence is synthesized)
ttcatcttgcatgtttaagagaactttgttttattttgagggattatttctctggggatcattcttataatacaagccttaaatcactaattttagtagcaataaatgttaaaattgaaa

SEQ ID NO: 89333 - DNA, 120 bp, Artificial Sequence
  ENSG00000086991_35 (sequence is synthesized)
gtgataggttgccatttgatacttacattctttatatcacagcaatttggtgggaagccgcagcaccagcagaaatgatgttagagaactggtttacttaactaaatatcgaataatgta

SEQ ID NO: 89334 - DNA, 120 bp, Artificial Sequence
  ENSG00000086991_36 (sequence is synthesized)
acacttctcactcttcactggacctctggtacaagattgagaggattcctattacttacaaacagactagttcatctggctctccatgaatgtcctgcttttctggaaaaccttcttgct

SEQ ID NO: 89335 - DNA, 120 bp, Artificial Sequence
  ENSG00000086991_37 (sequence is synthesized)
tacttctagtctagttggagaaacaacctagaaaatgcaccaacaaatggggcacaataactactctgagagagagtggcacacagtggacgcaaagaagaggttcctgatgcagctggg

SEQ ID NO: 89336 - DNA, 120 bp, Artificial Sequence
  ENSG00000086991_38 (sequence is synthesized)
cctagacaaaggggccggcgcggcggagcagactggtgcagcctgggccgcgcgctcagagcgctgggcgtctgggcagctgagtgggcagagctgacccggtgcgggtgggagtcaggg

SEQ ID NO: 89337 - DNA, 120 bp, Artificial Sequence
  ENSG00000086991_39 (sequence is synthesized)
cagagtatcactacctccaccagatgttgggggaactgtcttgaaacctatacatttcagatgggcacccagagagtaagacctcacctcgcccctcaagttgcttacaatataatggaa

SEQ ID NO: 89338 - DNA, 120 bp, Artificial Sequence
  ENSG00000086991_40 (sequence is synthesized)
atgcagttgtcaagttgagctttattccttttcagtagaaaatataagtaattactatttcatagtgtctcctgctgaaagtgagagttggtagaatgtctactttttatattgcaatgt

SEQ ID NO: 89339 - DNA, 120 bp, Artificial Sequence
  ENSG00000086991_41 (sequence is synthesized)
tcagatggttgccactcaggtctgcctctgactcccagcagcttttgtctaattcctatcattcagctgagagtgttgacagtgccgttacagggtaaaaatactttataattcacatac

SEQ ID NO: 89340 - DNA, 120 bp, Artificial Sequence
  ENSG00000086991_42 (sequence is synthesized)
tgggttttggggaaaagggaagaaaagtaggttgattttttgtgaatcctggacaaatcaatttatttgacttaaaaaatgttagtgagttttcatgattcattcatttaaaaacattcc

SEQ ID NO: 89341 - DNA, 120 bp, Artificial Sequence
  ENSG00000086991_43 (sequence is synthesized)
tcgaattaagtgatgttgaattcaattctgtagcaggcaatatctgacgtagagtgcttttctccatgtgaagccatccatgaaatgaaattatatttgcaaggtgcagcccagagcctg

SEQ ID NO: 89342 - DNA, 120 bp, Artificial Sequence
  ENSG00000086991_44 (sequence is synthesized)
atgaacagcacatgctcagccagttaggtctctgttggttgatgctttcatacagtcctcaggctgcctttgcttcacaatgccaagactacatcaaaaacaaactgttctgtcccattt

SEQ ID NO: 89343 - DNA, 120 bp, Artificial Sequence
  ENSG00000086991_45 (sequence is synthesized)
cagatttgttttcctctgagtggttttcagcttgctggttaattgaaaatgctttctgcagttactgatttaggttccattgaaagcactgtgtcgaagaatttacctgtggtttctatt

SEQ ID NO: 89344 - DNA, 120 bp, Artificial Sequence
  ENSG00000086991_46 (sequence is synthesized)
attctctgagcgtgcacgggtgggaagctggaagtggaagttttgtcttaattcgaacattctcaacttacaaaactttatgctggagataacaatgaacactccccctcccaccccctc

SEQ ID NO: 89345 - DNA, 120 bp, Artificial Sequence
  ENSG00000086991_47 (sequence is synthesized)
gcctgtcccccaaatgcatgagaatttttctgcacattgatgggagagatgtggaggaagagggaagaggtcattttccgtgaatacagcttttctttttaccctttaaacatttttgct

SEQ ID NO: 89346 - DNA, 120 bp, Artificial Sequence
  ENSG00000087008_0 (sequence is synthesized)
aaatgagaatggcgccgctggagatcctttcctgcttttggtttccctggcaggggttgaactgtggagtgtgtgggctcttatcacgcgatggcatccactgtggaaggaggcgacaca

SEQ ID NO: 89347 - DNA, 120 bp, Artificial Sequence
  ENSG00000087008_1 (sequence is synthesized)
gctctgctcccagaattccccagggggcccctcgatgcctaccgagcaagagcgtccttcagctggaaggagctggcgctgttcacggaaggggagggcatgctccgctttaagaaaacc

SEQ ID NO: 89348 - DNA, 120 bp, Artificial Sequence
  ENSG00000087008_2 (sequence is synthesized)
atcttctcagctcttgagaatgaccctcttttcgctcgttcccctggagccgatctgtccttggagaagtatcgcgagctgaacttccttcgatgcaagcggatcttcgagtatgacttc

SEQ ID NO: 89349 - DNA, 120 bp, Artificial Sequence
  ENSG00000087008_3 (sequence is synthesized)
ctcagtgtcgaagacatgttcaagagccctctgaaggtccccgccttgattcagtgcctgggcatgtatgactcttctctggctgccaagtacctcctccatagcttggtttttggatca

SEQ ID NO: 89350 - DNA, 120 bp, Artificial Sequence
  ENSG00000087008_4 (sequence is synthesized)
gcagtttacagttctggttctgaaagacatctcacatatattcaaaagatcttcaggatggagatttttggatgttttgctctgaccgaattaagccacggcagtaataccaaggccatt

SEQ ID NO: 89351 - DNA, 120 bp, Artificial Sequence
  ENSG00000087008_5 (sequence is synthesized)
cgcacaactgcccactacgatcctgccactgaggaattcatcatacattcccctgatttcgaagctgccaagttttgggttggcaacatgggcaagacagccactcacgcggtggtgttt

SEQ ID NO: 89352 - DNA, 120 bp, Artificial Sequence
  ENSG00000087008_6 (sequence is synthesized)
gctaagctgtgtgtgccaggggaccagtgccatgggctgcatccctttatcgtgcagatccgggacccgaagacccttcttcccatgcctggagtgatggttggcgacataggaaaaaaa

SEQ ID NO: 89353 - DNA, 120 bp, Artificial Sequence
  ENSG00000087008_7 (sequence is synthesized)
ctcgggcagaacggtctggataatggtttcgccatgttccacaaggtcagagttcctcgccagagccttctgaaccggatgggagacgtcacccccgagggcacctatgtcagccccttt

SEQ ID NO: 89354 - DNA, 120 bp, Artificial Sequence
  ENSG00000087008_8 (sequence is synthesized)
aaggacgtcaggcagcgctttggagcgtccctggggagcctgtcctcgggccgggtctccatcgtgagcctggccatccttaacctaaagctggccgtggccatcgctcttcgcttctca

SEQ ID NO: 89355 - DNA, 120 bp, Artificial Sequence
  ENSG00000087008_9 (sequence is synthesized)
gccactcggcgtcagtttggacccacagaggaggaggaaataccagtgcttgagtatccaatgcagcaatggcgcttgcttccatatctggcagctgtctacgccttagaccatttctcc

SEQ ID NO: 89356 - DNA, 120 bp, Artificial Sequence
  ENSG00000087008_10 (sequence is synthesized)
aagtcgctcttcctggacctggtggagctccagcgaggacttgcatcgggagaccgcagcgccagacaggcagagcttggacgtgagatccacgccctggcatcggccagcaagcccctg

SEQ ID NO: 89357 - DNA, 120 bp, Artificial Sequence
  ENSG00000087008_11 (sequence is synthesized)
gcacatacgaaggtgacaacaacatcctgctgcagcagacaagcaactatttgctgggtctcctggcacaccaggtccacgatggagcttgcttccgcagtccgctgaagtcagtggact

SEQ ID NO: 89358 - DNA, 120 bp, Artificial Sequence
  ENSG00000087008_12 (sequence is synthesized)
ttctggacgcctatcccggcatccttgaccagaagtttgaggtctccagtgttgccgactgcttggactctgcagtcgccctggcagcatacaagtggctggtttgctacctgctccgag

SEQ ID NO: 89359 - DNA, 120 bp, Artificial Sequence
  ENSG00000087008_13 (sequence is synthesized)
agacttatcaaaaattaaaccaagagaaaagatcaggaagcagtgactttgaagcaaggaacaaatgccaggtgtcccacggccgtccgttggcgctggccttcgtggagctcacggtgg

SEQ ID NO: 89360 - DNA, 120 bp, Artificial Sequence
  ENSG00000087008_14 (sequence is synthesized)
tccagaggttccacgagcacgtgcaccagccttccgtgccgccctcgctgcgggccgtgctggggcggctcagtgctctgtacgccctgtggtccctgagccgccacgcggccctgctct

SEQ ID NO: 89361 - DNA, 120 bp, Artificial Sequence
  ENSG00000087008_15 (sequence is synthesized)
accgaggaggatacttctccggtgagcaggcgggagaagtgttggagagcgccgtcctggctttgtgttcccagctgaaagacgatgcagttgccctggtagacgtgatcgctcctcctg

SEQ ID NO: 89362 - DNA, 120 bp, Artificial Sequence
  ENSG00000087008_16 (sequence is synthesized)
actttgttctggactcaccgattggcagagccgacggcgagctctacaaaaacctctggggcgctgtcctgcaggaaagcaaggtgttggagcgggcatcctggtggccagagttttctg

SEQ ID NO: 89363 - DNA, 120 bp, Artificial Sequence
  ENSG00000087008_17 (sequence is synthesized)
tgaacaaacctgtcataggaagtctgaaatcgaagctctagtgggactggcacacattcagccaagtctaatgaaacgaagggaactaatcagacgtggacctcaacttctgattccaga

SEQ ID NO: 89364 - DNA, 120 bp, Artificial Sequence
  ENSG00000087008_18 (sequence is synthesized)
acacgccggagattgctgctgctttctgagcccgcacctgtgcgcctaaactgctgattggcctcaactgcccaggcggacgggagggaggcacccggccggctggactaatctgggatc

SEQ ID NO: 89365 - DNA, 120 bp, Artificial Sequence
  ENSG00000087008_19 (sequence is synthesized)
gcggtgatttgcagcgtggaaaagaaatgcagatgatcatgtctacctgatgcgccgtgggttttttgataattagaatttcgcacattcagttttcagggttcagctcctttctctaaa

SEQ ID NO: 89366 - DNA, 120 bp, Artificial Sequence
  ENSG00000087008_20 (sequence is synthesized)
gtaaacagcccattgtcagggatcttctggtcagacaacctgtgattcatctagattttttaccgagctccacttcattgagaagtcaatgatgccagtctggttctttgtcaactctcc

SEQ ID NO: 89367 - DNA, 120 bp, Artificial Sequence
  ENSG00000087008_21 (sequence is synthesized)
ctcggctttgtcacataattgaattatgtcataaccttattaatttgcacatagatcatctgaatgtcgtggtttaagacttaaggaggaacatctgtttgattactttcttttgtggaa

SEQ ID NO: 89368 - DNA, 120 bp, Artificial Sequence
  ENSG00000087008_22 (sequence is synthesized)
ctggaaatttccatcgaggaaatgtttttttaaaaagtctaatgatttgaatgggcaattcagtctccaaccgcccccctccccctgccgccagttatatacaaatcactttattggtaa

SEQ ID NO: 89369 - DNA, 120 bp, Artificial Sequence
  ENSG00000087008_23 (sequence is synthesized)
atgggacggacggaggccgagaggcgtggcgggggagcagtggggccaggccagagacagctgcgctgtgcgggcagctagtcccagtactccgagtcggtcgcgggccgacaggcatcc

SEQ ID NO: 89370 - DNA, 120 bp, Artificial Sequence
  ENSG00000087008_24 (sequence is synthesized)
tccccagagtcagggcccccgtgttgtatctaggaagctgcttcctgcaccatcgtcctccttccacgggactcactgagcacggcggatggcgctgtggacagatgagaagcccagttc

SEQ ID NO: 89371 - DNA, 120 bp, Artificial Sequence
  ENSG00000087008_25 (sequence is synthesized)
cataatgagaagcatatggggcagagcagcgtcagggtggtgccgagaaacccaatttttctttcacttggggttcggttcagagaacacttccagaaggccccctcatgccaggcagcc

SEQ ID NO: 89372 - DNA, 120 bp, Artificial Sequence
  ENSG00000087008_26 (sequence is synthesized)
tgccgggctctgcagagagcagaagcccacccactaggtcccataaggcacagacagacacgagccaggagtgcctagacttgggaatactggaaggcttcctggaggagggggtgctgg

SEQ ID NO: 89373 - DNA, 120 bp, Artificial Sequence
  ENSG00000087008_27 (sequence is synthesized)
ggctgattcctggaggattggtgggaataggctaaaccaaagtttgtcaactttttgttcgtctttgccccccaggaagctttttaggtggtttttcccaatggctggcacccatgcatc

SEQ ID NO: 89374 - DNA, 120 bp, Artificial Sequence
  ENSG00000087008_28 (sequence is synthesized)
agaactcggcccctgagcagcacattccttgggtcacatctgggctggggacagcaatgacactgatgtgttcacccaaaacaggcctcctatatggccgatttggaaagtgcactcagg

SEQ ID NO: 89375 - DNA, 120 bp, Artificial Sequence
  ENSG00000087053_0 (sequence is synthesized)
ctccttccataagggtctggtccttcatccctcccgcttcaccagaccccctcaccctgggagccgccacctccctttccccaagaccagatgtcgcgcggccggacacagccagcacgg

SEQ ID NO: 89376 - DNA, 120 bp, Artificial Sequence
  ENSG00000087053_1 (sequence is synthesized)
agagtcgatgccggcgtctgagctgcgcagtggggtcttcccgctgcccagcagcctacaggcgcggtgcactctgggggaacatggccgcttccggtctccctcccgggccggcgctgg

SEQ ID NO: 89377 - DNA, 120 bp, Artificial Sequence
  ENSG00000087053_2 (sequence is synthesized)
cctgactgcggccccggtccgtagcactccgccctccgcttctcccgccctgtagccgcgaagactgcttcagcctttccctgtgctgcccctgccgcgcgatggagaagagctcgagct

SEQ ID NO: 89378 - DNA, 120 bp, Artificial Sequence
  ENSG00000087053_3 (sequence is synthesized)
gcgagagtcttggctcccagccggcggcggctcggccgcccagcgtggactccttgtccagtgcctccacttctcattcagagaattcagtgcatacaaaatcagcttctgttgtatcat

SEQ ID NO: 89379 - DNA, 120 bp, Artificial Sequence
  ENSG00000087053_4 (sequence is synthesized)
cagattccatttcaacttctgccgacaacttttctcctgatttgagggtcctgagggagtctaacaagttagcagaaatggaagaaccacccttgcttccaggagaaaatattaaagaca

SEQ ID NO: 89380 - DNA, 120 bp, Artificial Sequence
  ENSG00000087053_5 (sequence is synthesized)
tggccaaagatgtaacttatatatgtccattcactggcgctgtacgaggaactctgactgtcacgaattataggttatatttcaaaagcatggaacgggatcccccatttgttttagatg

SEQ ID NO: 89381 - DNA, 120 bp, Artificial Sequence
  ENSG00000087053_6 (sequence is synthesized)
cttcccttggtgtgataaatagagtagaaaaaattggtggtgcttctagtcgaggtgaaaattcttatggactagaaactgtgtgtaaggatattaggaatttacgatttgctcataaac

SEQ ID NO: 89382 - DNA, 120 bp, Artificial Sequence
  ENSG00000087053_7 (sequence is synthesized)
ctgaggggcggacaagaagatccatatttgagaatctaatgaaatatgcatttcctgtctctaataacctgcctctttttgcttttgaatacaaagaagtattccctgaaaatgggtgga

SEQ ID NO: 89383 - DNA, 120 bp, Artificial Sequence
  ENSG00000087053_8 (sequence is synthesized)
agctatatgaccctcttttagagtatagaaggcagggaattccaaatgaaagctggagaataacaaagataaatgaacgatatgaactttgtgatacataccctgccctcctggttgtgc

SEQ ID NO: 89384 - DNA, 120 bp, Artificial Sequence
  ENSG00000087053_9 (sequence is synthesized)
cagcaaatattcctgatgaagaattaaagagagtggcatccttcagatcaagaggccgtatcccagttttatcatggattcatcctgaaagtcaagccacaatcactcggtgtagccagc

SEQ ID NO: 89385 - DNA, 120 bp, Artificial Sequence
  ENSG00000087053_10 (sequence is synthesized)
ccatggttggagtgagtggaaagcgaagcaaagaagatgaaaaataccttcaagctatcatggattccaatgcccagtctcacaaaatctttatatttgatgcccggccaagtgttaatg

SEQ ID NO: 89386 - DNA, 120 bp, Artificial Sequence
  ENSG00000087053_11 (sequence is synthesized)
ctgttgccaacaaggcaaagggtggaggttatgaaagtgaagatgcctatcaaaatgctgaactagttttcctggatatccacaatattcatgttatgagagaatcattacgaaaactta

SEQ ID NO: 89387 - DNA, 120 bp, Artificial Sequence
  ENSG00000087053_12 (sequence is synthesized)
aggagattgtgtaccccaacattgaggaaacccactggttgtctaacttggaatctactcattggctagaacatattaagcttattcttgcaggggctcttaggattgctgacaaggtag

SEQ ID NO: 89388 - DNA, 120 bp, Artificial Sequence
  ENSG00000087053_13 (sequence is synthesized)
agtcagggaagacgtctgtggtagtgcattgcagtgatggttgggatcgcacagctcagctcacttcccttgccatgctcatgttggatggatactatcgaaccatccgaggatttgaag

SEQ ID NO: 89389 - DNA, 120 bp, Artificial Sequence
  ENSG00000087053_14 (sequence is synthesized)
tccttgtggagaaagaatggctaagttttggacatcgatttcaactaagagttggccatggagataagaaccatgcagatgcagacagatcgcctgtttttcttcaatttattgactgtg

SEQ ID NO: 89390 - DNA, 120 bp, Artificial Sequence
  ENSG00000087053_15 (sequence is synthesized)
tctggcagatgacaagacagtttcctaccgcatttgaattcaatgagtattttctcattaccattttggaccacctatacagctgcttattcggaacattcctctgtaatagtgaacaac

SEQ ID NO: 89391 - DNA, 120 bp, Artificial Sequence
  ENSG00000087053_16 (sequence is synthesized)
agagaggaaaagagaatcttcctaaaaggactgtgtcactgtggtcttacataaacagccagctggaagacttcactaatcctctctatgggagctattccaatcatgtcctttatccag

SEQ ID NO: 89392 - DNA, 120 bp, Artificial Sequence
  ENSG00000087053_17 (sequence is synthesized)
tagccagcatgcgccacctagagctctgggtgggatattacataaggtggaatccacggatgaaaccacaggaacctattcacaacagatacaaagaacttcttgctaaacgagcagagc

SEQ ID NO: 89393 - DNA, 120 bp, Artificial Sequence
  ENSG00000087053_18 (sequence is synthesized)
ttcagaaaaaagtagaggaactacagagagagatttctaaccgatcaacctcatcctcagagagagccagctctcctgcacagtgtgtcactcctgtccaaactgttgtataaaggactg

SEQ ID NO: 89394 - DNA, 120 bp, Artificial Sequence
  ENSG00000087053_19 (sequence is synthesized)
aagatcaggggcatcattgctatacactcttgattacactggcagctctatgagtagaaagtcttcggaatttagaacccatctatgagagaaagttcagtcactttatttattttaaat

SEQ ID NO: 89395 - DNA, 120 bp, Artificial Sequence
  ENSG00000087053_20 (sequence is synthesized)
ctctctaggatgagtttagaactgtagcagtgcaggtggcttaagtgaagtaactccatatgtaattacatgattatgatactaatcttttaagtatccaaagaatattaaaatacttca

SEQ ID NO: 89396 - DNA, 120 bp, Artificial Sequence
  ENSG00000087053_21 (sequence is synthesized)
atcctggattcacagtgggaacaagtttctattaaaaggcaaatgctgttacaaatttttggcatctggtaatattaaaaccattttagaaatacactctgtgctcactgtgcagaggaa

SEQ ID NO: 89397 - DNA, 120 bp, Artificial Sequence
  ENSG00000087053_22 (sequence is synthesized)
catcagttttcaaaccaacactgaaattctgtggcatcacatatattgggccttgatgtcatgacagatcaaaatcatttgatatccctttctccattctaggtttttctttttttcagt

SEQ ID NO: 89398 - DNA, 120 bp, Artificial Sequence
  ENSG00000087053_23 (sequence is synthesized)
aactgatttaccttgatcacttttcaacttccatattcttcatatagtaaaaggcaaagtgttgaagatactacggtgtggtagtagttgaaaattattgccgtcattatttacatactt

SEQ ID NO: 89399 - DNA, 120 bp, Artificial Sequence
  ENSG00000087053_24 (sequence is synthesized)
aagacatattagcaagttgatccaaaatgggaggccttatagatgtgcttgggggaaaatgaaggggagaaagtagccatacaggagttcaaagaattccatgcccttcagattagccca

SEQ ID NO: 89400 - DNA, 120 bp, Artificial Sequence
  ENSG00000087053_25 (sequence is synthesized)
attaccagaaacatcatgaaagatattttaaaaactaattatttactacagtgtatttcacttgtcttgtgtgtctgaacacacagaagctaattagcaagtttttaagaagtatttaaa

SEQ ID NO: 89401 - DNA, 120 bp, Artificial Sequence
  ENSG00000087053_26 (sequence is synthesized)
aatcttactaggattgacattttttctgaattctgtataaatagcttatagtgagaagtactgtgctcaaattttacatttttttcctttgcaaattctgtaatttcactcaacgattaa

SEQ ID NO: 89402 - DNA, 120 bp, Artificial Sequence
  ENSG00000087053_27 (sequence is synthesized)
gtctaccaaagaacacactgcatgtaaaagatgtattacaatctcaaagccagtaaaagaaatcttgcttcactgttcacctgctacaagtaagagtttggtgctggtagaaacatttga

SEQ ID NO: 89403 - DNA, 120 bp, Artificial Sequence
  ENSG00000087053_28 (sequence is synthesized)
ctctgatgtctattttattctacataagagccatatgtaatgtactgtaacaaaggagcttcttgtccccttggtcttttaattaaaagaaattccaactgacttttaaactttgttctt

SEQ ID NO: 89404 - DNA, 120 bp, Artificial Sequence
  ENSG00000087053_29 (sequence is synthesized)
gtccaaagttgccatttcttttttttccccagaaatatttggaaattattggaggaatatgcaccccagatgaaaatgttcagtttgtacccatttttccttaaccaacacccaaatcaa

SEQ ID NO: 89405 - DNA, 120 bp, Artificial Sequence
  ENSG00000087053_30 (sequence is synthesized)
acaattaaaatatacagtgtttttccactcactaattcactatacagagagtctgaaccttagcctccctcttggtcttgcagtgaggaagtttctattagtatatccaatttagcaaaa

SEQ ID NO: 89406 - DNA, 120 bp, Artificial Sequence
  ENSG00000087053_31 (sequence is synthesized)
ttggtaccaaaatgatttctttggtaattgtgtgaaatataagctttttaacagggcatttaagtggctagcaaatcagtaattaaaaattaagctttctactccaagtatttcacaaac

SEQ ID NO: 89407 - DNA, 120 bp, Artificial Sequence
  ENSG00000087053_32 (sequence is synthesized)
gcatctgccattttcctcatttaaaccttggttatcttggcctgataccacataaaagaatgtagaatggctgaagagatcaagaatttaaagcttctagtcttaacatacttgcatcca

SEQ ID NO: 89408 - DNA, 120 bp, Artificial Sequence
  ENSG00000087053_33 (sequence is synthesized)
cttcaaattcaaatcaaaagccagggaaatctaagtgcaaccctaccacttctctgctgagaaccttccagtggttcccctcaccttctgcagaagtctccaatatggagtacatgcact

SEQ ID NO: 89409 - DNA, 120 bp, Artificial Sequence
  ENSG00000087053_34 (sequence is synthesized)
tgggcatttaatatataccactggtgtgtgtgggagggagggaggaggaatactagccctttttatatatttacacaagcaaaacttttaaatatttgaattgacagttacatgtttcat

SEQ ID NO: 89410 - DNA, 120 bp, Artificial Sequence
  ENSG00000087053_35 (sequence is synthesized)
aactttgtatgtctattggttgtgcaggtgtaattttttccctttttgattagggttacaaaatttagagaccagtatgattaagttgaagctccttagcctccttcgacctagtctctg

SEQ ID NO: 89411 - DNA, 120 bp, Artificial Sequence
  ENSG00000087053_36 (sequence is synthesized)
catacctcaacttttacgtaccaatgctactctgctgttcacaattgcctcatgtaatctgcagattcctgcctccccactttggttcagtctgtcttgtgcacctggaacaactgttct

SEQ ID NO: 89412 - DNA, 120 bp, Artificial Sequence
  ENSG00000087053_37 (sequence is synthesized)
cccttgtgactaattcctattttctagagtttaggcatcatctcttcctttgggaagttatctgattcacgactgccttctctgacatccccaccttcctctgtgcccccatagcactgt

SEQ ID NO: 89413 - DNA, 120 bp, Artificial Sequence
  ENSG00000087053_38 (sequence is synthesized)
gtataccgctactaccactgcaattcacattatattggaatgaacaattcacatgtctaccacaagtctgtaaacataaccttatttgaaatgaattgcaataaagctctgttacaacgt

SEQ ID NO: 89414 - DNA, 120 bp, Artificial Sequence
  ENSG00000087053_39 (sequence is synthesized)
aaagtgctacgaatgaactgggtggaagaaagtacataggtctcccattcaagggttcatcagccttcactaaggaaatttaagtcaaagtagctgacagtgagtcagcattttggaagg

SEQ ID NO: 89415 - DNA, 120 bp, Artificial Sequence
  ENSG00000087053_40 (sequence is synthesized)
caggtagagatggtgaagaaataaggaaattcttctatgagtcatgatagatatttaagcttgttaaaaaatgtttttgactacctactccctttgcctacagagtccagttaaggaata

SEQ ID NO: 89416 - DNA, 120 bp, Artificial Sequence
  ENSG00000087053_41 (sequence is synthesized)
tcagaaaaatccctttatggtgtccttatggctttcctgtatcctaacagaaaaatcctagcagaagcatttcccctttacccagttcctgttctcttatcacagttctattcctccaca

SEQ ID NO: 89417 - DNA, 120 bp, Artificial Sequence
  ENSG00000087053_42 (sequence is synthesized)
ctcccttcctgctaggcacgggaatttgaaagggcagggaaaaatcggtgaaagtttgtcttctacttgggtaatccaacaccaccgcatccagtagtatataattctttttgcatgtat

SEQ ID NO: 89418 - DNA, 120 bp, Artificial Sequence
  ENSG00000087053_43 (sequence is synthesized)
acgcccagggccccgcccagcgtccgaaggggatggagaggggccggggacctgctggattgttgccccaattcgcggattctggtttctgaaggctacgccggaattccttccccggga

SEQ ID NO: 89419 - DNA, 120 bp, Artificial Sequence
  ENSG00000087053_44 (sequence is synthesized)
cttgggaaccacttctgcctccctccctggggcgtggaggctgaggaaaaggagttaatgtgttaagagccattgacatttgaagatcatcagaagtgaagataaaacatctcaaaaatt

SEQ ID NO: 89420 - DNA, 120 bp, Artificial Sequence
  ENSG00000087053_45 (sequence is synthesized)
agtttttcttagttattggccgcaggtgagccagattgcggaagatggaggaattaatgggattggagacagaaatttactgtttgatggtcctgagggagtctaacaagttagcagaaa

SEQ ID NO: 89421 - DNA, 120 bp, Artificial Sequence
  ENSG00000087053_46 (sequence is synthesized)
attctggttttgaaatcattggatagacttggtgaaggaaagaaaaaacttttttttgtatccatgatattatttctacctggatttaagtttcatgcttacgaaaatgaggatctgatt

SEQ ID NO: 89422 - DNA, 120 bp, Artificial Sequence
  ENSG00000087053_47 (sequence is synthesized)
tgaggcccatgcagtccagttcgggagctaagtcacttaaacactgtgtgatagttcctacacatctcattatagtttgtcctgagggagtctaacaagttagcagaaatggaagaacca

SEQ ID NO: 89423 - DNA, 120 bp, Artificial Sequence
  ENSG00000087053_48 (sequence is synthesized)
tctccgttctactgtgcagaatgttcagtactctcagcatacagagaataaactggctgtcagagacacctcctgtctggcagaactctttacctgcagtcttctcagcatcttagtgtg

SEQ ID NO: 89424 - DNA, 120 bp, Artificial Sequence
  ENSG00000087074_0 (sequence is synthesized)
gctcttatcggttcccatcccagttgttgatcttatgcaagacgctgcacgaccccgcgcccgcttgtcgccacggcacttgaggcagccggagatactctgagttactcggagcccgac

SEQ ID NO: 89425 - DNA, 120 bp, Artificial Sequence
  ENSG00000087074_1 (sequence is synthesized)
gcctgagggtgagatgaacgcgctggcctccctaaccgtccggacctgtgatcgcttctggcagaccgaaccggcgctcctgcccccggggtgacgcgcagctcccagccgcccagacac

SEQ ID NO: 89426 - DNA, 120 bp, Artificial Sequence
  ENSG00000087074_2 (sequence is synthesized)
atggccccaggccaagcaccccatcaggctaccccgtggagggatgcccaccctttcttcctcctgtccccagtgatgggcctcctcagccgcgcctggagccgcctgaggggcctggga

SEQ ID NO: 89427 - DNA, 120 bp, Artificial Sequence
  ENSG00000087074_3 (sequence is synthesized)
cctctagagccctggctggtggaagcagtaaaaggagcagctctggtagaagctggcctggagggagaagctaggactcctctggcaatcccccataccccttggggcagacgccctgaa

SEQ ID NO: 89428 - DNA, 120 bp, Artificial Sequence
  ENSG00000087074_4 (sequence is synthesized)
gaggaggctgaagacagtggaggccctggagaggacagagaaacactggggctgaaaaccagcagttcccttcctgaagcctggggacttttggatgatgatgatggcatgtatggtgag

SEQ ID NO: 89429 - DNA, 120 bp, Artificial Sequence
  ENSG00000087074_5 (sequence is synthesized)
cgagaggcaaccagtgtccctagagggcagggaagtcaatttgcagatggccagcgtgctcccctgtctcccagccttctgataaggacactgcaaggttctgataagaacccaggggag

SEQ ID NO: 89430 - DNA, 120 bp, Artificial Sequence
  ENSG00000087074_6 (sequence is synthesized)
gagaaagccgaggaagagggagttgctgaagaggagggagttaacaagttctcttatccaccatcacaccgggagtgttgtccagccgtggaggaggaggacgatgaagaagctgtaaag

SEQ ID NO: 89431 - DNA, 120 bp, Artificial Sequence
  ENSG00000087074_7 (sequence is synthesized)
aaagaagctcacagaacctctacttctgccttgtctccaggatccaagcccagcacttgggtgtcttgcccaggggaggaagagaatcaagccacggaggataaaagaacagaaagaagt

SEQ ID NO: 89432 - DNA, 120 bp, Artificial Sequence
  ENSG00000087074_8 (sequence is synthesized)
aaaggagccaggaagacctccgtgtccccccgatcttcaggctccgaccccaggtcctgggagtatcgttcaggagaggcgtccgaggagaaggaggaaaaggcacacaaagaaactggg

SEQ ID NO: 89433 - DNA, 120 bp, Artificial Sequence
  ENSG00000087074_9 (sequence is synthesized)
gccaacccagtgatgaagaggagggtgaggtcaaggctttgggggcagctgagaaggatggagaagctgagtgtcctccctgcatccccccaccaagtgccttcctgaaggcctgggtgt

SEQ ID NO: 89434 - DNA, 120 bp, Artificial Sequence
  ENSG00000087074_10 (sequence is synthesized)
attggccaggagaggacacagaggaagaggaagatgaggaagaagatgaggacagtgactctggatcagatgaggaagagggagaagctgaggcttcctcttccactcctgctacaggtg

SEQ ID NO: 89435 - DNA, 120 bp, Artificial Sequence
  ENSG00000087074_11 (sequence is synthesized)
tcttcttgaagtcctgggtctatcagccaggagaggacacagaggaggaggaagatgaggacagtgatacaggatcagccgaggatgaaagagaagctgagacttctgcttccacacccc

SEQ ID NO: 89436 - DNA, 120 bp, Artificial Sequence
  ENSG00000087074_12 (sequence is synthesized)
ctgcaagtgctttcttgaaggcctgggtgtatcggccaggagaggacacggaggaggaggaagatgaggatgtggatagtgaggataaggaagatgattcagaagcagccttgggagaag

SEQ ID NO: 89437 - DNA, 120 bp, Artificial Sequence
  ENSG00000087074_13 (sequence is synthesized)
ctgagtcagacccacatccctcccacccggaccagagggcccacttcaggggctggggatatcgacctggaaaagagacagaggaagaggaagctgctgaggactggggagaagctgagc

SEQ ID NO: 89438 - DNA, 120 bp, Artificial Sequence
  ENSG00000087074_14 (sequence is synthesized)
cctgccccttccgagtggccatctatgtacctggagagaagccaccgcctccctgggctcctcctaggctgcccctccgactgcaaaggcggctcaagcgcccagaaacccctactcatg

SEQ ID NO: 89439 - DNA, 120 bp, Artificial Sequence
  ENSG00000087074_15 (sequence is synthesized)
atccggaccctgagactcccctaaaggccagaaaggtgcgcttctccgagaaggtcactgtccatttcctggctgtctgggcagggccggcccaggccgcccgccagggcccctgggagc

SEQ ID NO: 89440 - DNA, 120 bp, Artificial Sequence
  ENSG00000087074_16 (sequence is synthesized)
agcttgctcgggatcgcagccgcttcgcacgccgcatcacccaggcccaggaggagctgagcccctgcctcacccctgctgcccgggccagagcctgggcacgcctcaggaacccacctt

SEQ ID NO: 89441 - DNA, 120 bp, Artificial Sequence
  ENSG00000087074_17 (sequence is synthesized)
tagcccccatccctgccctcacccagaccttgccttcctcctctgtcccttcgtccccagtccagaccacgcccttgagccaagctgtggccacaccttcccgctcgtctgctgctgcag

SEQ ID NO: 89442 - DNA, 120 bp, Artificial Sequence
  ENSG00000087074_18 (sequence is synthesized)
cggctgccctggacctcagtgggaggcgtggctgagaccaactggtttgcctataatttattaactatttattttttctaagtgtgggtttatataaggaataaagccttttgatttgta

SEQ ID NO: 89443 - DNA, 81 bp, Artificial Sequence
  ENSG00000087074_19 (sequence is synthesized)
actcccctaaaggccagaaaggtaggtgctgagagcccagattctattttttttttttttttaattgagttggagtcttgg

SEQ ID NO: 89444 - DNA, 120 bp, Artificial Sequence
  ENSG00000087074_20 (sequence is synthesized)
ttacaggcgtgagctaccacatctggctgagagcccagattcttgagtcttagaaagaaagggggctgggggccgagacttctgggtccctgtatgttgcagagggttgcatgtcatctc

SEQ ID NO: 89445 - DNA, 120 bp, Artificial Sequence
  ENSG00000087074_21 (sequence is synthesized)
catggagaaggctgtgtacgctgtcacgcaatcccttgtaagaggccaggcccctgggggaggagggagcagctgtggctcacagcagccccaggaaaccacctcttccttcagtgagtc

SEQ ID NO: 89446 - DNA, 120 bp, Artificial Sequence
  ENSG00000087074_22 (sequence is synthesized)
agatagatagagaatcccgtgacagtgacaggcaagtgactagccagatagaaagcatttttgtgtaataactaatttttgtttgcttctctctctctcttccccgccctccccatccgg

SEQ ID NO: 89447 - DNA, 120 bp, Artificial Sequence
  ENSG00000087076_0 (sequence is synthesized)
gatttgatgcgacggcctcacggggctttggaggtgaaagaggcccagagtagagagagagagagaccgacgtacacgggatggctacgggaacgcgctatgccgggaaggtggtggtcg

SEQ ID NO: 89448 - DNA, 120 bp, Artificial Sequence
  ENSG00000087076_1 (sequence is synthesized)
tgaccgggggcgggcgcggcatcggagctgggatcgtgcgcgccttcgtgaacagcggggcccgagtggttatctgcgacaaggatgagtctgggggccgggccctggagcaggagctcc

SEQ ID NO: 89449 - DNA, 120 bp, Artificial Sequence
  ENSG00000087076_2 (sequence is synthesized)
ctggagctgtctttatcctctgtgatgtgactcaggaagatgatgtgaagaccctggtttctgagaccatccgccgatttggccgcctggattgtgttgtcaacaacgctggccaccacc

SEQ ID NO: 89450 - DNA, 120 bp, Artificial Sequence
  ENSG00000087076_3 (sequence is synthesized)
cacccccacagaggcctgaggagacctctgcccagggattccgccagctgctggagctgaacctactggggacgtacaccttgaccaagctcgccctcccctacctgcggaagagtcaag

SEQ ID NO: 89451 - DNA, 120 bp, Artificial Sequence
  ENSG00000087076_4 (sequence is synthesized)
tgaccaaagctttggccctggatgaaagtccatatggtgtccgagtcaactgtatctccccaggaaacatctggaccccgctgtgggaggagctggcagccttaatgccagaccctaggg

SEQ ID NO: 89452 - DNA, 120 bp, Artificial Sequence
  ENSG00000087076_5 (sequence is synthesized)
ccacaatccgagagggcatgctggcccagccactgggccgcatgggccagcccgctgaggtcggggctgcggcagtgttcctggcctccgaagccaacttctgcacgggcattgaactgc

SEQ ID NO: 89453 - DNA, 120 bp, Artificial Sequence
  ENSG00000087076_6 (sequence is synthesized)
tcgtgacggggggtgcagagctggggtacgggtgcaaggccagtcggagcacccccgtggacgcccccgatatcccttcctgatttctctcatttctacttggggcccccttcctaggac

SEQ ID NO: 89454 - DNA, 120 bp, Artificial Sequence
  ENSG00000087076_7 (sequence is synthesized)
tctcccaccccaaactccaacctgtatcagatgcagcccccaagcccttagactctaagcccagttagcaaggtgccgggtcaccctgcaggttcccataaaaacgatttgcagccagaa

SEQ ID NO: 89455 - DNA, 120 bp, Artificial Sequence
  ENSG00000087076_8 (sequence is synthesized)
gccgcctggattgtgttgtcaacaacgctggccaccctcgccctcccctacctgcggaagagtcaagggaatgtcatcaacatctccagcctggtgggggcaatcggccaggcccaggca

SEQ ID NO: 89456 - DNA, 120 bp, Artificial Sequence
  ENSG00000087077_0 (sequence is synthesized)
agaaaaagttttcttttctggagtcccaaacgaggtgcgggacggaagagggggtgaaggccagaggctcggggcttcaagaccgctgtctggagtccccctttccaggccatgtcgggg

SEQ ID NO: 89457 - DNA, 120 bp, Artificial Sequence
  ENSG00000087077_1 (sequence is synthesized)
gctgcccccgaagcagccggagcccgccagagcccctcaggggagggcgatcccccgcggcaccccggggccaccaccggcccacggagcagcactccagccccaccccagggtcaattt

SEQ ID NO: 89458 - DNA, 120 bp, Artificial Sequence
  ENSG00000087077_2 (sequence is synthesized)
gtcaatttttgcccccttccatctgagcagtgttaccaggccccagggggaccggaggatcgggggccggcgtgggtggggtcccatggagtactccagcacacgcaggggctccctgca

SEQ ID NO: 89459 - DNA, 120 bp, Artificial Sequence
  ENSG00000087077_3 (sequence is synthesized)
gacagggggggccttcgccctggaagcctggacgccgagatagacttgctgagcagcacgctggccgagctgaatgggggtcggggtcatgcgtcacggcgaccagaccgacaggcatat

SEQ ID NO: 89460 - DNA, 120 bp, Artificial Sequence
  ENSG00000087077_4 (sequence is synthesized)
gagcccccgccacctcctgcctaccgcacgggctccctgaagccaaatccagcctcgccgctcccagcgtctccctatgggggccccactccagcctcttacactaccgccagcaccccg

SEQ ID NO: 89461 - DNA, 120 bp, Artificial Sequence
  ENSG00000087077_5 (sequence is synthesized)
gctggcccagccttccccgtgcaagtgaaggtggcacagccagtgaggggctgcggcccacccaggcggggagcctctcaggcctctgggcccctcccgggcccccactttcctctccca

SEQ ID NO: 89462 - DNA, 120 bp, Artificial Sequence
  ENSG00000087077_6 (sequence is synthesized)
ggccgaggtgaagtctgggggcctggctataggagccagagagagccagggccaggggccaaagaggaagctgctggggtctctggccctgcaggaagaggaagaggaggcgagcacggg

SEQ ID NO: 89463 - DNA, 120 bp, Artificial Sequence
  ENSG00000087077_7 (sequence is synthesized)
tgagccagcctccagaggatgagctggataggctgacgaagaagctggttcacgacatgaaccacccgcccagcggggagtactttggccagtgtggtggctgcggagaagatgtggttg

SEQ ID NO: 89464 - DNA, 120 bp, Artificial Sequence
  ENSG00000087077_8 (sequence is synthesized)
gggatggggctggggttgtggcccttgatcgcgtctttcacgtgggctgctttgtatgttctacatgccgggcccagcttcgcggccagcatttctacgccgtggagaggagggcatatt

SEQ ID NO: 89465 - DNA, 120 bp, Artificial Sequence
  ENSG00000087077_9 (sequence is synthesized)
gcgagggctgctacgtggccaccctggagaaatgtgccacgtgctcccagcccatcctggaccggatcctgcgggctatggggaaggcctaccaccctggctgcttcacctgcgtggtgt

SEQ ID NO: 89466 - DNA, 120 bp, Artificial Sequence
  ENSG00000087077_10 (sequence is synthesized)
gtcaccgcggcctcgacggcatccccttcacagtggatgctacgagccagatccactgcattgaggactttcacaggaagtttgccccaagatgctcagtgtgcggtggggccataatgc

SEQ ID NO: 89467 - DNA, 120 bp, Artificial Sequence
  ENSG00000087077_11 (sequence is synthesized)
ctgagccaggtcaggaggagactgtgagaattgttgctctggatcgaagttttcacattggctgttacaagtgcgaggagtgtgggctgctgctctcctctgagggcgagtgtcagggct

SEQ ID NO: 89468 - DNA, 120 bp, Artificial Sequence
  ENSG00000087077_12 (sequence is synthesized)
gctacccgctggatgggcacatcttgtgcaaggcctgcagcgcctggcgcatccaggagctctcagccaccgtcaccactgactgctgagtcttcctagaagtacctgctgggttctcag

SEQ ID NO: 89469 - DNA, 120 bp, Artificial Sequence
  ENSG00000087077_13 (sequence is synthesized)
ttccagttcccatcctttgattgatcactctccctgacatccacctgtatgactttgtcaccaaatgctgtcttctctttctccaatcaagaaataataatccctcgagtttacaaaaca

SEQ ID NO: 89470 - DNA, 120 bp, Artificial Sequence
  ENSG00000087077_14 (sequence is synthesized)
gtgggacgtgggaagggaggctgggagacagaggggacagtggcttcctgggtctgtgaagactgatgctgtttctccctgtcctcaggccagtgtggtggctgcggagaagatgtggtt

SEQ ID NO: 89471 - DNA, 120 bp, Artificial Sequence
  ENSG00000087077_15 (sequence is synthesized)
tgatcgatcccccatgtgtgtaatgtgcaccccagcatggaggaagcgtggctgcaagtaccaacatgtcagccacttgaggacgggaccttgtcaaatgcaaaaagcctgtgcttcccc

SEQ ID NO: 89472 - DNA, 120 bp, Artificial Sequence
  ENSG00000087077_16 (sequence is synthesized)
atgcagggggcttccatccaaggtggtaactagagcgtccaagaccaaaggaggaacggtgctaaaagccaggcgactgaaagtgatgtacaaacagggcggaattctgcaagtatcaag

SEQ ID NO: 89473 - DNA, 120 bp, Artificial Sequence
  ENSG00000087077_17 (sequence is synthesized)
caagtagcttaacactggtggctgaagggaaggacgcagctcttacaagtgtggagcatcttacagttaaagagaatgtgttagattcccatgacacccctgtgaggccaccctggagaa

SEQ ID NO: 89474 - DNA, 120 bp, Artificial Sequence
  ENSG00000087077_18 (sequence is synthesized)
aagttttcacattggctgttacaagtgcgaggtcaggggcccccagcacgtgcaaggggctggcagtgtctagggtgctgggtagagcatgagggggaacacagaggtctggggttgatg

SEQ ID NO: 89475 - DNA, 120 bp, Artificial Sequence
  ENSG00000087077_19 (sequence is synthesized)
gatcccccagaaccgagtctgagggacccaggacaggagaaggcctatggtgatttgcattcttcctgccctggctccatcctcaggggctccctgcagacagggggggccttcgccctg

SEQ ID NO: 89476 - DNA, 120 bp, Artificial Sequence
  ENSG00000087085_0 (sequence is synthesized)
ctccagctcccggcgcggcccggcccggcccggctcggccgcctcagacgccgcctgccctgcagccatgaggcccccgcagtgtctgctgcacacgccttccctggcttccccactcct

SEQ ID NO: 89477 - DNA, 120 bp, Artificial Sequence
  ENSG00000087085_1 (sequence is synthesized)
agtgtctgctgcacacgccttccctggcttccccactccttctcctcctcctctggctcctgggtggaggagtgggggctgagggccgggaggatgcagagctgctggtgacggtgcgtg

SEQ ID NO: 89478 - DNA, 120 bp, Artificial Sequence
  ENSG00000087085_2 (sequence is synthesized)
ggggccggctgcggggcattcgcctgaagacccccgggggccctgtctctgctttcctgggcatcccctttgcggagccacccatgggaccccgtcgctttctgccaccggagcccaagc

SEQ ID NO: 89479 - DNA, 120 bp, Artificial Sequence
  ENSG00000087085_3 (sequence is synthesized)
agccttggtcaggggtggtagacgctacaaccttccagagtgtctgctaccaatatgtggacaccctatacccaggttttgagggcaccgagatgtggaaccccaaccgtgagctgagcg

SEQ ID NO: 89480 - DNA, 120 bp, Artificial Sequence
  ENSG00000087085_4 (sequence is synthesized)
aggactgcctgtacctcaacgtgtggacaccatacccccggcctacatcccccacccctgtcctcgtctggatctatgggggtggcttctacagtggggcctcctccttggacgtgtacg

SEQ ID NO: 89481 - DNA, 120 bp, Artificial Sequence
  ENSG00000087085_5 (sequence is synthesized)
atggccgcttcttggtacaggccgagaggactgtgctggtgtccatgaactaccgggtgggagcctttggcttcctggccctgccggggagccgagaggccccgggcaatgtgggtctcc

SEQ ID NO: 89482 - DNA, 120 bp, Artificial Sequence
  ENSG00000087085_6 (sequence is synthesized)
tggatcagaggctggccctgcagtgggtgcaggagaacgtggcagccttcgggggtgacccgacatcagtgacgctgtttggggagagcgcgggagccgcctcggtgggcatgcacctgc

SEQ ID NO: 89483 - DNA, 120 bp, Artificial Sequence
  ENSG00000087085_7 (sequence is synthesized)
tgtccccgcccagccggggcctgttccacagggccgtgctgcagagcggtgcccccaatggaccctgggccacggtgggcatgggagaggcccgtcgcagggccacgcagctggcccacc

SEQ ID NO: 89484 - DNA, 120 bp, Artificial Sequence
  ENSG00000087085_8 (sequence is synthesized)
ttgtgggctgtcctccaggcggcactggtgggaatgacacagagctggtagcctgccttcggacacgaccagcgcaggtcctggtgaaccacgaatggcacgtgctgcctcaagaaagcg

SEQ ID NO: 89485 - DNA, 120 bp, Artificial Sequence
  ENSG00000087085_9 (sequence is synthesized)
ccttcgtgcctgtggtagatggagacttcctcagtgacaccccagaggccctcatcaacgcgggagacttccacggcctgcaggtgctggtgggtgtggtgaaggatgagggctcgtatt

SEQ ID NO: 89486 - DNA, 120 bp, Artificial Sequence
  ENSG00000087085_10 (sequence is synthesized)
ttctggtttacggggccccaggcttcagcaaagacaacgagtctctcatcagccgggccgagttcctggccggggtgcgggtcggggttccccaggtaagtgacctggcagccgaggctg

SEQ ID NO: 89487 - DNA, 120 bp, Artificial Sequence
  ENSG00000087085_11 (sequence is synthesized)
tggtcctgcattacacagactggctgcatcccgaggacccggcacgcctgagggaggccctgagcgatgtggtgggcgaccacaatgtcgtgtgccccgtggcccagctggctgggcgac

SEQ ID NO: 89488 - DNA, 120 bp, Artificial Sequence
  ENSG00000087085_12 (sequence is synthesized)
tggctgcccagggtgcccgggtctacgcctacgtctttgaacaccgtgcttccacgctctcctggcccctgtggatgggggtgccccacggctacgagatcgagttcatctttgggatcc

SEQ ID NO: 89489 - DNA, 120 bp, Artificial Sequence
  ENSG00000087085_13 (sequence is synthesized)
ccctggacccctctcgaaactacacggcagaggagaaaatcttcgcccagcgactgatgcgatactgggccaactttgcccgcacaggggatcccaatgagccccgagaccccaaggccc

SEQ ID NO: 89490 - DNA, 120 bp, Artificial Sequence
  ENSG00000087085_14 (sequence is synthesized)
cacaatggcccccgtacacggcgggggctcagcagtacgttagtctggacctgcggccgctggaggtgcggcgggggctgcgcgcccaggcctgcgccttctggaaccgcttcctcccca

SEQ ID NO: 89491 - DNA, 120 bp, Artificial Sequence
  ENSG00000087085_15 (sequence is synthesized)
aattgctcagcgccaccgacacgctcgacgaggcggagcgccagtggaaggccgagttccaccgctggagctcctacatggtgcactggaagaaccagttcgaccactacagcaagcagg

SEQ ID NO: 89492 - DNA, 120 bp, Artificial Sequence
  ENSG00000087085_16 (sequence is synthesized)
atcgctgctcagacctgtgaccccggcgggacccccatgtcctccgctccgcccggccccctagctgtatatactatttatttcagggctgggctataacacagacgagccccagactct

SEQ ID NO: 89493 - DNA, 120 bp, Artificial Sequence
  ENSG00000087085_17 (sequence is synthesized)
gcccatccccaccccaccccgacgtcccccggggctcccggtcctctgcatgtctcaggctgagctccctcccccgcggtgccttcgcccctctgggctgccaataaactgttacagcca

SEQ ID NO: 89494 - DNA, 120 bp, Artificial Sequence
  ENSG00000087085_18 (sequence is synthesized)
ctctcccctcatctttgccaacctgccccacctcctctgcagctgagcgataacccttgggccgacagtgccctaatctcctccctcctggcttctcgaccgacccttcaccctttccct

SEQ ID NO: 89495 - DNA, 120 bp, Artificial Sequence
  ENSG00000087085_19 (sequence is synthesized)
aggaagcaggcgccgcgcggtattgccgcatgcacctcggtcgtggggaccccgctgcagcagccctgtccacacgggtgaactcctggagggcggggcggggggcaatctgcgcgggtc

SEQ ID NO: 89496 - DNA, 120 bp, Artificial Sequence
  ENSG00000087085_20 (sequence is synthesized)
acgaaagtccgaagtcacccgtcagggaaccagcacagacccacccgcgggggttccagaagtttccactgccgccgcggagtgcggcctcgcccagcagccttgcgcgtgctaccacgc

SEQ ID NO: 89497 - DNA, 120 bp, Artificial Sequence
  ENSG00000087085_21 (sequence is synthesized)
tgtcctgccttctcagacgccgcctgccctgcagccatgaggcccccgcagtgtctgctgcacacgccttccctggcttccccactccttctcctcctcctctggctcctgggtggagga

SEQ ID NO: 89498 - DNA, 120 bp, Artificial Sequence
  ENSG00000087085_22 (sequence is synthesized)
agcacctgcccaggcttcacccatggggaggctgctccgaggcccggcctccccctgcccctcctcctcctccaccagcttctcctcctcttcctctcccacctccggcggctgtgaaca

SEQ ID NO: 89499 - DNA, 120 bp, Artificial Sequence
  ENSG00000087085_23 (sequence is synthesized)
cggcctcttcccctacggccacaggggcccctcctctaatgagtggtcggaccgtggggaagggccccactcagggatctcagacctagtgctcccttcctcctcaaaccgagagactca

SEQ ID NO: 89500 - DNA, 120 bp, Artificial Sequence
  ENSG00000087085_24 (sequence is synthesized)
cactggacagggcaggaggagggggccgtgcctcccacccttctcagggacccccacgcctttgttgtttgaatggaaatggaaaagccagtattcttttataaaattatcttttggaac

SEQ ID NO: 89501 - DNA, 120 bp, Artificial Sequence
  ENSG00000087085_25 (sequence is synthesized)
ctgagcctgacattggggggaagtgggaggccccggacggggtagcaccccccattggggctataacggtcaaccatttctgtctcttctttttcccccaacctccccctcctgtcccct

SEQ ID NO: 89502 - DNA, 120 bp, Artificial Sequence
  ENSG00000087085_26 (sequence is synthesized)
ctgttcccgtcttccggtcattcttttctcctcctctctccttcctgctgtccttctccggccccgcctctgccctcatcctccctctcgtctttcgcacattctcctgatcctcttgcc

SEQ ID NO: 89503 - DNA, 120 bp, Artificial Sequence
  ENSG00000087085_27 (sequence is synthesized)
accgtcccacgtggtcgcctgcatttctccgtgcgtcctccctgcactcatacccccccttcaacccgcccaaatgtccgatccccgaccttcctcgtgccgtcctcccctcccgcctcg

SEQ ID NO: 89504 - DNA, 80 bp, Artificial Sequence
  ENSG00000087085_28 (sequence is synthesized)
gtcagagtcggctcagcctgcgccggggaacatcggccgcctccagctcccggcgcggcccggcccggcccggctcggcc

SEQ ID NO: 89505 - DNA, 120 bp, Artificial Sequence
  ENSG00000087085_29 (sequence is synthesized)
gcatgagggcttctccaggcccattcccagaagtcccagaagtcctccctgagggctcagatcccagggtggtcagcagggcagacaggaaagccaccatgggtctattttctctttctc

SEQ ID NO: 89506 - DNA, 120 bp, Artificial Sequence
  ENSG00000087085_30 (sequence is synthesized)
tgcatccctcccctgatctcgtcctctctctgtccatggttccgggtctgtaactgttcatctctctggctctttgtctgtccatctgtttctgtctacttgtctgtctgtgcctgtcgc

SEQ ID NO: 89507 - DNA, 120 bp, Artificial Sequence
  ENSG00000087086_0 (sequence is synthesized)
gcagttcggcggtcccgcgggtctgtctcttgcttcaacagtgtttggacggaacagatccggggactctcttccagcctccgaccgccctccgatttcctctccgcttgcaacctccgg

SEQ ID NO: 89508 - DNA, 120 bp, Artificial Sequence
  ENSG00000087086_1 (sequence is synthesized)
gaccatcttctcggccatctcctgcttctgggacctgccagcaccgtttttgtggttagctccttcttgccaaccaaccatgagctcccagattcgtcagaattattccaccgacgtgga

SEQ ID NO: 89509 - DNA, 120 bp, Artificial Sequence
  ENSG00000087086_2 (sequence is synthesized)
ggcagccgtcaacagcctggtcaatttgtacctgcaggcctcctacacctacctctctctgggcttctatttcgaccgcgatgatgtggctctggaaggcgtgagccacttcttccgcga

SEQ ID NO: 89510 - DNA, 120 bp, Artificial Sequence
  ENSG00000087086_3 (sequence is synthesized)
cgtctcctgaagatgcaaaaccagcgtggcggccgcgctctcttccaggacatcaagaagccagctgaagatgagtggggtaaaaccccagacgccatgaaagctgccatggccctggag

SEQ ID NO: 89511 - DNA, 120 bp, Artificial Sequence
  ENSG00000087086_4 (sequence is synthesized)
aaaaagctgaaccaggcccttttggatcttcatgccctgggttctgcccgcacggacccccatctctgtgacttcctggagactcacttcctagatgaggaagtgaagcttatcaagaag

SEQ ID NO: 89512 - DNA, 120 bp, Artificial Sequence
  ENSG00000087086_5 (sequence is synthesized)
atgggtgaccacctgaccaacctccacaggctgggtggcccggaggctgggctgggcgagtatctcttcgaaaggctcactctcaagcacgactaagagccttctgagcccagcgacttc

SEQ ID NO: 89513 - DNA, 120 bp, Artificial Sequence
  ENSG00000087086_6 (sequence is synthesized)
tgaagggccccttgcaaagtaatagggcttctgcctaagcctctccctccagccaataggcagctttcttaactatcctaacaagccttggaccaaatggaaataaagctttttgatgca

SEQ ID NO: 89514 - DNA, 120 bp, Artificial Sequence
  ENSG00000087087_0 (sequence is synthesized)
ggagctttgtgcctcggaggcgtgggtgacgcaggcgcagcgcgggctgcgcgcgctactgcccatccccggttgtcccacttttgttcgcctctcttcggccctctactcaagagctcc

SEQ ID NO: 89515 - DNA, 120 bp, Artificial Sequence
  ENSG00000087087_1 (sequence is synthesized)
gtctccgtctcgccctcctcgaagtcctcgtcgcgcgcccgcgacccaggtcgccctgaaatctagcccgtccgagcgcgagtccaacggccgcggccgcaccaaggccccctcagaccg

SEQ ID NO: 89516 - DNA, 120 bp, Artificial Sequence
  ENSG00000087087_2 (sequence is synthesized)
tgccatgggtgacagtgatgacgagtacgatcgaaggcgcagggacaagttcagaagagagcgcagcgactacgaccgttcccgcgagagagatgaaagacgtcgaggggacgattggaa

SEQ ID NO: 89517 - DNA, 120 bp, Artificial Sequence
  ENSG00000087087_3 (sequence is synthesized)
tgacagagagtgggaccgtggccgtgagcgccgtagtcggggtgaatatcgggactatgaccggaatcggcgagagcgcttctcgccacctcgccacgaactcagcccgccacagaagcg

SEQ ID NO: 89518 - DNA, 120 bp, Artificial Sequence
  ENSG00000087087_4 (sequence is synthesized)
catgaggagagactgggatgagcacagctctgacccataccacagtggctatgagatgccctatgctggggggggtgggggcccaacttatggcccccctcagccctggggccaccctga

SEQ ID NO: 89519 - DNA, 120 bp, Artificial Sequence
  ENSG00000087087_5 (sequence is synthesized)
cgtccacatcatgcagcaccatgtcctgcctatccaggccaggctgggcagcattgcagagattgacctgggtgtgccgccgcccgtgatgaagaccttcaaggagtttctcctctccct

SEQ ID NO: 89520 - DNA, 120 bp, Artificial Sequence
  ENSG00000087087_6 (sequence is synthesized)
ggatgactcggtggatgagacggaggccgtcaagcgctataatgactacaagctggatttccggaggcaacagatgcaggatttcttcctggcgcacaaagatgaggagtggtttcggtc

SEQ ID NO: 89521 - DNA, 120 bp, Artificial Sequence
  ENSG00000087087_7 (sequence is synthesized)
taagtaccacccagatgaggtggggaagcgtcggcaggaggcccggggggccctgcaaaaccgactgagggtcttcctgtccctcatggagactggctggtttgataaccttctcctgga

SEQ ID NO: 89522 - DNA, 120 bp, Artificial Sequence
  ENSG00000087087_8 (sequence is synthesized)
catagacaaagctgatgccattgtcaagatgctggatgcagccgtgattaagatggaaggaggcacggagaatgatcttcgcatcctggagcaggaggaggaggaggagcaggcaggaaa

SEQ ID NO: 89523 - DNA, 120 bp, Artificial Sequence
  ENSG00000087087_9 (sequence is synthesized)
gcctggggagcccagcaagaaagaagaaggacgggctggagcaggcctaggggacggggagcgcaaaaccaacgacaaggatgagaagaaggaagacggcaagcaggctgagaatgacag

SEQ ID NO: 89524 - DNA, 120 bp, Artificial Sequence
  ENSG00000087087_10 (sequence is synthesized)
ttctaatgatgacaaaacaaagaagtcggagggtgatggggacaaggaagagaagaaagaagactccgagaaggaagccaaaaagagtagcaagaagcggaaccggaagcacagtggtga

SEQ ID NO: 89525 - DNA, 120 bp, Artificial Sequence
  ENSG00000087087_11 (sequence is synthesized)
cgacagctttgacgagggcagcgtgtcagagtctgagtcggagtcagagagcggccaggctgaggaggagaaggaggaggccgaagaagcgctcaaggagaaggagaagcccaaggaaga

SEQ ID NO: 89526 - DNA, 120 bp, Artificial Sequence
  ENSG00000087087_12 (sequence is synthesized)
agatcatctccctttgtaaaaggtacccaggctttatgcgggtggcgctctcagagccccagccagagaggaggtttttccgtcgtggctgggtgaccttcgaccgcagtgttaacatta

SEQ ID NO: 89527 - DNA, 120 bp, Artificial Sequence
  ENSG00000087087_13 (sequence is synthesized)
aagagatctgttggaacctgcagaacatccgtctccgggagtgtgagctgagccctggtgtgaacagggacctgacccggcgcgttcgcaacatcaacggcatcacccagcacaagcaga

SEQ ID NO: 89528 - DNA, 120 bp, Artificial Sequence
  ENSG00000087087_14 (sequence is synthesized)
ttgtgcgcaacgacatcaagctggcggccaagctgatccacacgctggatgacaggacacagctttgggcctcagaaccagggacgcctcccctgcccacgagcctgccctcgcaaaacc

SEQ ID NO: 89529 - DNA, 120 bp, Artificial Sequence
  ENSG00000087087_15 (sequence is synthesized)
cgatcttgaagaatatcaccgactacctgatcgaggaagtaagcgccgaggaggaggagctgctggggagcagcgggggcgctcctcctgaggagcctcctaaggaagggaacccggcag

SEQ ID NO: 89530 - DNA, 120 bp, Artificial Sequence
  ENSG00000087087_16 (sequence is synthesized)
agatcaacgtggagcgggatgagaagttgattaaggtcttggacaagctcctcctttacctgcgcatcgtgcattccttggattattacaacacctgtgagtaccccaacgaggacgaga

SEQ ID NO: 89531 - DNA, 120 bp, Artificial Sequence
  ENSG00000087087_17 (sequence is synthesized)
tgcccaatcgctgtgggatcatccacgttcgggggcccatgccacccaaccgcatcagtcacggggaagtgctggagtggcagaagacttttgaggagaagctcacgccgttgctgagtg

SEQ ID NO: 89532 - DNA, 120 bp, Artificial Sequence
  ENSG00000087087_18 (sequence is synthesized)
tgcgggagtcactctcagaggaagaggcccagaagatggggcgcaaagacccagagcaggaagtggagaagttcgtcacctccaacacgcaggaactgggcaaggataagtggctgtgtc

SEQ ID NO: 89533 - DNA, 120 bp, Artificial Sequence
  ENSG00000087087_19 (sequence is synthesized)
ctctcagtggcaagaaattcaagggtcctgagtttgtgcgcaaacatatcttcaacaagcatgcagagaaaattgaggaagtgaaaaaggaagtcgcgttttttaacaacttcctcactg

SEQ ID NO: 89534 - DNA, 120 bp, Artificial Sequence
  ENSG00000087087_20 (sequence is synthesized)
atgctaagcgcccagctctgcctgagatcaagccagcccagccacctggccccgcccagatactccccccaggtttgaccccaggactcccctacccacaccagactccccagggcctga

SEQ ID NO: 89535 - DNA, 120 bp, Artificial Sequence
  ENSG00000087087_21 (sequence is synthesized)
tgccctatggtcagccccggcccccgatcttgggctatggagctggtgctgtccgccctgcagtccccacaggaggccctccatacccccatgccccgtatggtgctggtcgagggaact

SEQ ID NO: 89536 - DNA, 120 bp, Artificial Sequence
  ENSG00000087087_22 (sequence is synthesized)
atgatgccttccgaggccagggaggttatcctgggaaacctcgcaacaggatggttcgtggagacccaagggccattgtggaatatcgggacctggatgccccagacgatgttgatttct

SEQ ID NO: 89537 - DNA, 120 bp, Artificial Sequence
  ENSG00000087087_23 (sequence is synthesized)
tttgagccgtcccccgttcctcagtcctgtatcatccatacttgtactaccttgtcctatgaagctctgagaattttttgtacgatcagccttactgctaataaaagcacttccacaggg

SEQ ID NO: 89538 - DNA, 120 bp, Artificial Sequence
  ENSG00000087087_24 (sequence is synthesized)
agggagatgaaggggcttggtgagtgtgtggctttgggagaagaaaacagaggatggaattgaggacatagttttgcaactcaacactgatctctgtcatagctggtgctgtccgccctg

SEQ ID NO: 89539 - DNA, 120 bp, Artificial Sequence
  ENSG00000087087_25 (sequence is synthesized)
gtgctgggggtgggactgtggggaagaggaagggagactctgtgccacacgggacctctgtgtgactttgttcatctgatagtttggttgttctgcacactctttgaccgttttgtctgg

SEQ ID NO: 89540 - DNA, 120 bp, Artificial Sequence
  ENSG00000087087_26 (sequence is synthesized)
ctacgttgtctctgggcaaggctctagggcgttagcatggacggaacctatgtggtccccgtccccagggagctcgcagtctgatcaatcgctggtgctcaagagggaagggtcttagag

SEQ ID NO: 89541 - DNA, 120 bp, Artificial Sequence
  ENSG00000087087_27 (sequence is synthesized)
tgggaactacacccgctcatcgacggagctcggagcaaacccacctccacccccaccatacccagcccatacatgagcccctgggctgagctgcgcggccccggccaggcagacaggcca

SEQ ID NO: 89542 - DNA, 120 bp, Artificial Sequence
  ENSG00000087087_28 (sequence is synthesized)
gctgtgcacaatgcagcggtttagctgaatgtgattgctcaggcagctagccagtcaggccccactgcggagtcccgcgtgggcatctcggccgggcgcccagccaggagccagccggtg

SEQ ID NO: 89543 - DNA, 120 bp, Artificial Sequence
  ENSG00000087087_29 (sequence is synthesized)
cttcgtgtgtgggtagcagcacctccagattccagcagaactggggggatgctagtgatcatttgtggctggggtggaacaaaagctaaaataaagacaaatctcaagggggcaaaaggt

SEQ ID NO: 89544 - DNA, 120 bp, Artificial Sequence
  ENSG00000087087_30 (sequence is synthesized)
gccatttatgtccggtgaactcctgtcccctcgctgctctttcacttgtggaaagtctcaggttacctcctctgaaggtcttctctgccttacttgcttctcttcctcccatcagagcct

SEQ ID NO: 89545 - DNA, 120 bp, Artificial Sequence
  ENSG00000087087_31 (sequence is synthesized)
agcagacagactgcttcccacttgttggtgttgggtcattgtcatccctgatcaccaggaccctgtgtggctgtggcgtcctcctaaagcgacgagtgaatccagacaagaaaagcaaag

SEQ ID NO: 89546 - DNA, 120 bp, Artificial Sequence
  ENSG00000087087_32 (sequence is synthesized)
atctcggtcgtttgacagaaaaagaattttaatttttttttccttttgtggatgttttaattttaatcaaccatcttttccccccttcctgctcctcctcctcctcatcctctttctgct

SEQ ID NO: 89547 - DNA, 120 bp, Artificial Sequence
  ENSG00000087087_33 (sequence is synthesized)
gaaatggctcattggaccgttttctgtggttcagcctatttgctgttggccaaataactagctgtggcttggtttttgaaattctctgcagatcagagctatagagctaagagtttgagt

SEQ ID NO: 89548 - DNA, 120 bp, Artificial Sequence
  ENSG00000087087_34 (sequence is synthesized)
tctcccgggccgagatcatctccgtgagtggggacccgtggagtcagggcagggctgatggagaagtggagggtagagggaaggcagtggggccctgcctgtgacagatgcccccgtttc

SEQ ID NO: 89549 - DNA, 120 bp, Artificial Sequence
  ENSG00000087087_35 (sequence is synthesized)
acctgctagggaggccccttccccaggttccatggcctccgaggactagtcctgatagcgccattggctttcaggtgctggtgttctgaagccctttagtggtttttccctgcccaagga

SEQ ID NO: 89550 - DNA, 120 bp, Artificial Sequence
  ENSG00000087088_0 (sequence is synthesized)
gcgctgcggccgcccgcgcggacccggcgagaggcggcggcgggagcggcggtgatggacgggtccggggagcagcccagaggcggggggcccaccagctctgagcagatcatgaagaca

SEQ ID NO: 89551 - DNA, 120 bp, Artificial Sequence
  ENSG00000087088_1 (sequence is synthesized)
ggggcccttttgcttcagggtttcatccaggatcgagcagggcgaatggggggggaggcacccgagctggccctggacccggtgcctcaggatgcgtccaccaagaagctgagcgagtgt

SEQ ID NO: 89552 - DNA, 120 bp, Artificial Sequence
  ENSG00000087088_2 (sequence is synthesized)
ctcaagcgcatcggggacgaactggacagtaacatggagctgcagaggatgattgccgccgtggacacagactccccccgagaggtctttttccgagtggcagctgacatgttttctgac

SEQ ID NO: 89553 - DNA, 120 bp, Artificial Sequence
  ENSG00000087088_3 (sequence is synthesized)
aaggtgccggaactgatcagaaccatcatgggctggacattggacttcctccgggagcggctgttgggctggatccaagaccagggtggttgggacggcctcctctcctactttgggacg

SEQ ID NO: 89554 - DNA, 120 bp, Artificial Sequence
  ENSG00000087088_4 (sequence is synthesized)
cccacgtggcagaccgtgaccatctttgtggcgggagtgctcaccgcctcactcaccatctggaagaagatgggctgaggcccccagctgccttggactgtgtttttcctccataaatta

SEQ ID NO: 89555 - DNA, 120 bp, Artificial Sequence
  ENSG00000087088_5 (sequence is synthesized)
tggcatttttctgggaggggtggggattgggggacgtgggcatttttcttacttttgtaattattggggggtgtggggaagagtggtcttgagggggtaataaacctccttcgggacaca

SEQ ID NO: 89556 - DNA, 120 bp, Artificial Sequence
  ENSG00000087088_6 (sequence is synthesized)
ccaagagtccaggtacctcttcccttcctttctcctctagggcccaccagctctgagcagatcatgaagacaggggcccttttgcttcaggggtgagtttgaggtctgattattgtggca

SEQ ID NO: 89557 - DNA, 120 bp, Artificial Sequence
  ENSG00000087088_7 (sequence is synthesized)
cagaagtccagccactgggctccttcaggacacaggactctcagccccgcattctcctcctcccctaagaactaggagtctgggccccacaactcagcgcaaacattccggactcccagc

SEQ ID NO: 89558 - DNA, 120 bp, Artificial Sequence
  ENSG00000087088_8 (sequence is synthesized)
cctcctctctgccaggatcttaaaaccctccttcagggagtcatttttcccaccttcctaaatgtctgtcttgtccccttcccttgtcccccgttggcctgttgcttttcatttcagcct

SEQ ID NO: 89559 - DNA, 120 bp, Artificial Sequence
  ENSG00000087088_9 (sequence is synthesized)
ggcttggggctcagtctccttatctttagtgtgcggtggatgcgggaattttccaccatcagcctgatgcctgctccccggcactggttctcctctctcctgcaggatgattgccgccgt

SEQ ID NO: 89560 - DNA, 120 bp, Artificial Sequence
  ENSG00000087088_10 (sequence is synthesized)
ccaccgcccctgccccaccgtccctgccccccgccactcctctgggaccctgggccttctggagcaggtcacagtggtgccctctccccatcttcagatcatcagatgtggtctataatg

SEQ ID NO: 89561 - DNA, 120 bp, Artificial Sequence
  ENSG00000087088_11 (sequence is synthesized)
cgttttccttacgtgtctgatcaatccccgattcatctaccctgctgacctcccagtgacccctgacctcactgtgaccttgacttgattagtgccttctgccctccctggagcctccac

SEQ ID NO: 89562 - DNA, 120 bp, Artificial Sequence
  ENSG00000087088_12 (sequence is synthesized)
cctccactgcctctggaattgctcaagttcattgatgaccctctgaccctagctctttcctttttttttttttccccactgagaaggggtctcgctatgttgcccaggttggtctcgaac

SEQ ID NO: 89563 - DNA, 89 bp, Artificial Sequence
  ENSG00000087088_13 (sequence is synthesized)
gtccagctctttaatgcccgttcatctcagtcccctgcccgcaatcctgccttctggcctcctccgtccctgatcccgcctctgcctgc

SEQ ID NO: 89564 - DNA, 120 bp, Artificial Sequence
  ENSG00000087088_14 (sequence is synthesized)
ccttctggcctcctccgtccctgatcccgcctctgcctgcccaggggctgcccctggccgagtcactgaagcgactgatgtccctgtctccaggacggcctcctctcctactttgggacg

SEQ ID NO: 89565 - DNA, 120 bp, Artificial Sequence
  ENSG00000087088_15 (sequence is synthesized)
gcagctgacatgttttctgacggcaacttcaactggggccgggttgtcgcccttttctactttgccagcaaactggtgctcaaggctggcgtgaaatggcgtgatctgggctcactgcaa

SEQ ID NO: 89566 - DNA, 120 bp, Artificial Sequence
  ENSG00000087088_16 (sequence is synthesized)
attttgcggggcggccacgtgaaggacgcacgttcagcggggctctcacgtgacccgggcgcgctgcggccgcccgcgcggacccggcgagaggcggcggcgggagcggcggtgatggac

SEQ ID NO: 89567 - DNA, 120 bp, Artificial Sequence
  ENSG00000087088_17 (sequence is synthesized)
gggtccggggagcagcccagaggcgggggtgaggcgggaggcagacgggcgggaggagggcgagccccctcgccggcccgtccgggatccttcctaccggcctggggctgtgcgatctcc

SEQ ID NO: 89568 - DNA, 120 bp, Artificial Sequence
  ENSG00000087088_18 (sequence is synthesized)
aagcactgaggggcagaaactcccggatcgggcgctgccagcctccagtcccctccgtcctcggaggttcctggctctctgatccccgtgtcccgatccctgcctctctggcgctctcgg

SEQ ID NO: 89569 - DNA, 120 bp, Artificial Sequence
  ENSG00000087088_19 (sequence is synthesized)
accctcgagaaccaggggatctcggaagccaagcccccgggcaggcccgggcttgtcgcccgcaccacttcctgcctctggcactggtgggaggggcgggtctcgcctctgccccctcag

SEQ ID NO: 89570 - DNA, 120 bp, Artificial Sequence
  ENSG00000087088_20 (sequence is synthesized)
gccaggggtctggatgcatatagcgttcccctagcctctttccccggggagaatgtaggatacaggcccagcctcctggcctttctccatcagggactcagttgtctgggcccccccgtc

SEQ ID NO: 89571 - DNA, 120 bp, Artificial Sequence
  ENSG00000087088_21 (sequence is synthesized)
ccagggtccccagctctgtcctccctcaggggccgtgagtctccacagtctcctgatcccctagaacccaagagtccaggtacctcttcccttcctttctcctctagggcccaccagctc

SEQ ID NO: 89572 - DNA, 120 bp, Artificial Sequence
  ENSG00000087088_22 (sequence is synthesized)
atggacgggtccggggagcagcccagaggcggggggcccaccagctctgagcagatcatgaagacaggggcccttttgcttcaggggatgattgccgccgtggacacagactccccccga

SEQ ID NO: 89573 - DNA, 120 bp, Artificial Sequence
  ENSG00000087095_0 (sequence is synthesized)
cttttggcaacccacacccttccacacacgctcaccccaaaattaaacaccaagatcctctaacttgtttggattgactgatgaagacataaagctctatgttttttgaggtggagtgag

SEQ ID NO: 89574 - DNA, 120 bp, Artificial Sequence
  ENSG00000087095_1 (sequence is synthesized)
tggtttttcttcatttttaaatggccaaatgacagcttgacccagtttgctttccaatcaaagggcatttattttgaatgtctctttgtggcgcaagagccaacgcaaaaatgatggcgg

SEQ ID NO: 89575 - DNA, 120 bp, Artificial Sequence
  ENSG00000087095_2 (sequence is synthesized)
cttacaatggcggtacatctgcagcagcagcaggtcaccaccaccaccatcaccaccaccttccacacctccctcctcctcacctgcaccaccaccaccaccctcaacaccatcttcatc

SEQ ID NO: 89576 - DNA, 120 bp, Artificial Sequence
  ENSG00000087095_3 (sequence is synthesized)
cggggtcggctgccgctgtacaccctgtacagcagcacacctcttcggcagctgcggcagccgcagcagcggctgcagctgcagccatgttaaaccctgggcaacaacagccatatttcc

SEQ ID NO: 89577 - DNA, 120 bp, Artificial Sequence
  ENSG00000087095_4 (sequence is synthesized)
catcaccggcaccggggcaggctcctggaccagctgcagcagccccagctcaggtacaggctgccgcagctgctacagttaaggcgcaccatcatcagcactcgcatcatccacagcagc

SEQ ID NO: 89578 - DNA, 120 bp, Artificial Sequence
  ENSG00000087095_5 (sequence is synthesized)
agctggatattgagccggatagacctattggatatggagcctttggtgttgtctggtcagtaacagatccaagagatggaaagagagtagcgctcaaaaagatgcccaacgtcttccaga

SEQ ID NO: 89579 - DNA, 120 bp, Artificial Sequence
  ENSG00000087095_6 (sequence is synthesized)
atctggtctcttgcaaaagggtcttccgggaattgaagatgttgtgtttttttaagcatgataatgtactctctgcccttgacatactccaacctccacacattgactattttgaagaaa

SEQ ID NO: 89580 - DNA, 120 bp, Artificial Sequence
  ENSG00000087095_7 (sequence is synthesized)
tatatgttgtcacagaattgatgcagagtgacctacataaaattatcgtctctcctcaaccactcagctcagatcatgtcaaagtttttctttatcagattttgcgaggtttgaaatatc

SEQ ID NO: 89581 - DNA, 120 bp, Artificial Sequence
  ENSG00000087095_8 (sequence is synthesized)
tccattcagctggcattttacatcgagacattaagccagggaatctccttgtgaacagcaactgtgttctaaagatttgtgattttggattggccagagtggaagaattagatgaatccc

SEQ ID NO: 89582 - DNA, 120 bp, Artificial Sequence
  ENSG00000087095_9 (sequence is synthesized)
gtcatatgactcaggaagttgttactcagtattatcgggctccagaaatcctgatgggcagccgtcattacagcaatgctattgacatctggtctgtgggatgtatctttgcagaactac

SEQ ID NO: 89583 - DNA, 120 bp, Artificial Sequence
  ENSG00000087095_10 (sequence is synthesized)
taggacgaagaatattgtttcaggcacagagtcccattcagcagttggatttgatcacggatctgttgggcacaccatcactggaagcaatgaggacagcttgtgaaggcgctaaggcac

SEQ ID NO: 89584 - DNA, 120 bp, Artificial Sequence
  ENSG00000087095_11 (sequence is synthesized)
atatactcaggggtcctcataaacagccatctcttcctgtactctataccctgtctagccaggctacacatgaagctgttcatctcctttgcaggatgttggtctttgatccatccaaaa

SEQ ID NO: 89585 - DNA, 120 bp, Artificial Sequence
  ENSG00000087095_12 (sequence is synthesized)
gaatatccgctaaggatgccttagcccacccctacctagatgaagggcgactacgatatcacacatgtatgtgtaaatgttgcttttccacctccactggaagagtttataccagtgact

SEQ ID NO: 89586 - DNA, 120 bp, Artificial Sequence
  ENSG00000087095_13 (sequence is synthesized)
ttgagcctgtcaccaatcccaaatttgatgacactttcgagaagaacctcagttctgtccgacaggttaaagaaattattcatcagttcattttggaacagcagaaaggaaacagagtgc

SEQ ID NO: 89587 - DNA, 120 bp, Artificial Sequence
  ENSG00000087095_14 (sequence is synthesized)
ttccactgttgctcagccatctgagatgcccccatctcctctggtgtgggagtgatggtggaagataatgtactactgaagatgtaatgtagctttccactggagtctgggatttgcaat

SEQ ID NO: 89588 - DNA, 120 bp, Artificial Sequence
  ENSG00000087095_15 (sequence is synthesized)
tctggaggttaatcatgcttgtactgtaattttactaatgaagttttaaattaacaaccactacttgtatgatatgaataatatttagaaatgttactagacttttaatcttgtaaagtg

SEQ ID NO: 89589 - DNA, 120 bp, Artificial Sequence
  ENSG00000087095_16 (sequence is synthesized)
gttgtgcttttagaagaaaaatattttacccagagttgcacatgttttatgaatttagtgcagctgttatggctcacctcagaacaaaagagaattgaaccaaatttgggagtttggggt

SEQ ID NO: 89590 - DNA, 78 bp, Artificial Sequence
  ENSG00000087095_17 (sequence is synthesized)
agaacaaaagagaattgaaccaaatttgggagtttggggttttatgttttgtttttcttttctaaaatgaagtgagat

SEQ ID NO: 89591 - DNA, 120 bp, Artificial Sequence
  ENSG00000087095_18 (sequence is synthesized)
gatttggggttttctaaaactaaagaatctaggaaccttgcctgcgaccaatcatggagccacgtgagctgatcgtggctgcacctggggggagggtagggaggaggggcatgccaccta

SEQ ID NO: 89592 - DNA, 120 bp, Artificial Sequence
  ENSG00000087095_19 (sequence is synthesized)
atgatcaagccctataattagcttctcattagagccgtgatggtgatgtgtgctgtctaaaatccaatgttgtgggtagagagaatgagtttgtgactaggagagactaaacttttgttt

SEQ ID NO: 89593 - DNA, 120 bp, Artificial Sequence
  ENSG00000087095_20 (sequence is synthesized)
tccttacccagtataaatatatatatatatatttaatctatttttattagaagtttttctgctctttcttacataaaagaaccccaagcatgcatctttcatgtgtgtaaataattcatt

SEQ ID NO: 89594 - DNA, 120 bp, Artificial Sequence
  ENSG00000087095_21 (sequence is synthesized)
tctgggctaatttcaaaagaatcccaatattgctgtatagaaagagaactagcttgcacattttaggtctgtgaaattttgtgagacttttcctgcactggacagtaaaaaaataataaa

SEQ ID NO: 89595 - DNA, 120 bp, Artificial Sequence
  ENSG00000087095_22 (sequence is synthesized)
agacaaaaacaaatttaaaaaaaaatttaagccacaaaaaaaggcacatagggaattatgtcaaatgtgtttgtgtccttaggcaaagctgtgggagtcttgaaatgtcacagtagtaaa

SEQ ID NO: 89596 - DNA, 120 bp, Artificial Sequence
  ENSG00000087095_23 (sequence is synthesized)
taacttattactttttgacaagttctttttttctgttggaacactgaattcttctgtgcatatgtacatatgaatacaaatcgaaggcctctacctcctggagttatacaacttggcttg

SEQ ID NO: 89597 - DNA, 120 bp, Artificial Sequence
  ENSG00000087095_24 (sequence is synthesized)
tttacctccacatgctgatgatgactattttttttttttgagttcagtgtggagacttgaaacttgaatgtcccttccaacttttatattaaaaataaaaagacaagaaaattgaagatc

SEQ ID NO: 89598 - DNA, 120 bp, Artificial Sequence
  ENSG00000087095_25 (sequence is synthesized)
atttttcacctgtacaaggaatactaatggatcgtcttaaaattggtctaggaaaaaaccttggtgtgtgttatggacaattaactgttaaagttattgtaagttatctgtatttagcag

SEQ ID NO: 89599 - DNA, 120 bp, Artificial Sequence
  ENSG00000087095_26 (sequence is synthesized)
agtattttcaacttgagtgatctgagctgaatttgaagactattaataagttatgtttggaagttttaacttcaatgaagtaattatttgctgtgaaagaaacaaacattgaattactaa

SEQ ID NO: 89600 - DNA, 120 bp, Artificial Sequence
  ENSG00000087095_27 (sequence is synthesized)
acaaagatggtgcaatatctttgttttttttttatgaggctcctgagaatcaacccaactgaagcatttcaattcacttgaatgagaaacgtgtttagtatcaaaagagcccaagaagac

SEQ ID NO: 89601 - DNA, 120 bp, Artificial Sequence
  ENSG00000087095_28 (sequence is synthesized)
actggtgtgaaaggtacaatctcagaggttggtcaattaccgtggcacactttctggtcactttgtacaatgtagatttgaagtacagtggtgaaaacattaaatgtgacatttgaaaaa

SEQ ID NO: 89602 - DNA, 120 bp, Artificial Sequence
  ENSG00000087095_29 (sequence is synthesized)
aacagccacagctggattctttgggggctctgctttgtgaaaagagctttgaagaagcagagcctgcaccataaaaaggaaacggttgctcttctagacataacaaagcatccgtatgaa

SEQ ID NO: 89603 - DNA, 120 bp, Artificial Sequence
  ENSG00000087095_30 (sequence is synthesized)
actagaaatgtggaaatctgtattgttaattttaactacaaacgaacttacttttggaaattacaggttcatgatcataaagtagataaagagtagagaataaaagtaacaatctgatga

SEQ ID NO: 89604 - DNA, 120 bp, Artificial Sequence
  ENSG00000087095_31 (sequence is synthesized)
ttctgcacccacttcttggtggttgaaactccatagcctataacgttgcaagtcattttgtacttagactcctgaaaagattatccaaattatgttcaaaaaaccacagcacaaaaaata

SEQ ID NO: 89605 - DNA, 120 bp, Artificial Sequence
  ENSG00000087095_32 (sequence is synthesized)
cttgttttattcttggggagaaatttcatgttatactgtccaatattaatttagaaaaaaagacagtttttttttttaaggcatttcagaaacattgccctttcaagcaagttagaacaa

SEQ ID NO: 89606 - DNA, 120 bp, Artificial Sequence
  ENSG00000087095_33 (sequence is synthesized)
tatccctcaacattaaataccatctttttagccatcagtaccactgggcatgtgtcataaaagagaaatgggggcagatatagctccctttcatatgctataccagaacaaaaatttgta

SEQ ID NO: 89607 - DNA, 120 bp, Artificial Sequence
  ENSG00000087095_34 (sequence is synthesized)
aaatgcataagtgcattaactgaatatgtttgaatttaaattctgggtttttaccttcaaagcacaggcagctgtagatacaaaaagtcctctaatggagtactggaatgtttcattgtc

SEQ ID NO: 89608 - DNA, 120 bp, Artificial Sequence
  ENSG00000087095_35 (sequence is synthesized)
ttcacaacttggagtgtcagagttttctctgccttctatattgtaaaactgagtgactattcttggtcgtttttattagatttattgatgtccaagcaatacaagaattaactgttcata

SEQ ID NO: 89609 - DNA, 120 bp, Artificial Sequence
  ENSG00000087095_36 (sequence is synthesized)
tactgtatgtttccttaacatgcttatttggtttctttgatggagattgtcaaggccaaagaaactttttcatttgtcatccaaccaataaatggacagaagctgttagaagctctttaa

SEQ ID NO: 89610 - DNA, 120 bp, Artificial Sequence
  ENSG00000087095_37 (sequence is synthesized)
attaacctgtagggtgttgatgctgatggctaccccatggtttagataagtgcagaaaatagtgctttatattcggcaagcccagaaccaggaaaagaagtgttctctagttggatttga

SEQ ID NO: 89611 - DNA, 120 bp, Artificial Sequence
  ENSG00000087111_0 (sequence is synthesized)
acggtggccggagcagccggaagctagcatggcggccgccggggctgcggctacacacctagaggtggcccggggcaagcgcgccgccctcttcttcgctgcggtggccatcgtgctggg

SEQ ID NO: 89612 - DNA, 120 bp, Artificial Sequence
  ENSG00000087111_1 (sequence is synthesized)
gctaccgctctggtggaagaccacggagacctaccgggcctcgttgccttactcccagatcagtggcctgaatgcccttcagctccgcctcatggtgcctgtcactgtcgtgtttacgcg

SEQ ID NO: 89613 - DNA, 120 bp, Artificial Sequence
  ENSG00000087111_2 (sequence is synthesized)
ggagtcagtgcccctggacgaccaggagaagctgcccttcaccgttgtgcatgaaagagagattcctctgaaatacaaaatgaaaatcaaatgccgtttccagaaggcctatcggagggc

SEQ ID NO: 89614 - DNA, 120 bp, Artificial Sequence
  ENSG00000087111_3 (sequence is synthesized)
tttggaccatgaggaggaggccctgtcatcgggcagtgtgcaagaggcagaagccatgttagatgagcctcaggaacaagcggagggctccctgactgtgtacgtgatatctgaacactc

SEQ ID NO: 89615 - DNA, 120 bp, Artificial Sequence
  ENSG00000087111_4 (sequence is synthesized)
ctcacttcttccccaggacatgatgagctacattgggcccaagaggacagcagtggtgcgggggataatgcaccgggaggcctttaacatcattggccgccgcatagtccaggtggccca

SEQ ID NO: 89616 - DNA, 120 bp, Artificial Sequence
  ENSG00000087111_5 (sequence is synthesized)
ggccatgtctttgactgaggatgtgcttgctgctgctctggctgaccaccttccagaggacaagtggagcgctgagaagaggcggcctctcaagtccagcttgggctatgagatcacctt

SEQ ID NO: 89617 - DNA, 120 bp, Artificial Sequence
  ENSG00000087111_6 (sequence is synthesized)
cagtttactcaacccagaccccaagtcccatgatgtctactgggacattgagggggctgtccggcgctatgtgcaacctttcctgaatgccctcggtgccgctggcaacttctctgtgga

SEQ ID NO: 89618 - DNA, 120 bp, Artificial Sequence
  ENSG00000087111_7 (sequence is synthesized)
ctctcagattctttactatgcaatgttgggggtgaatccccgctttgactcagcttcctccagctactatttggacatgcacagcctcccccatgtcatcaacccagtggagtcccggct

SEQ ID NO: 89619 - DNA, 120 bp, Artificial Sequence
  ENSG00000087111_8 (sequence is synthesized)
gggatccagtgctgcctccttgtaccctgtgctcaactttctactctacgtgcctgagcttgcacactcaccgctgtacattcaggacaaggatggcgctccagtggccaccaatgcctt

SEQ ID NO: 89620 - DNA, 120 bp, Artificial Sequence
  ENSG00000087111_9 (sequence is synthesized)
ccatagtccccgctggggtggcattatggtatataatgttgactccaaaacctataatgcctcagtgctgccagtgagagtcgaggtggacatggtgcgagtgatggaggtgttcctggc

SEQ ID NO: 89621 - DNA, 120 bp, Artificial Sequence
  ENSG00000087111_10 (sequence is synthesized)
gttgctctttgggattgctcagccccagctgcctccaaaatgcctgctttcagggcctacgagtgaagggctaatgacctgggagctagaccggctgctctgggctcggtcagtggagaa

SEQ ID NO: 89622 - DNA, 120 bp, Artificial Sequence
  ENSG00000087111_11 (sequence is synthesized)
cctggccacagccaccaccacccttacctccctggcgcagcttctgggcaagatcagcaacattgtcattaaggacgacgtggcatctgaggtgtacaaggctgtagctgccgtccagaa

SEQ ID NO: 89623 - DNA, 120 bp, Artificial Sequence
  ENSG00000087111_12 (sequence is synthesized)
gtcggcagaagagttggcgtctgggcacctggcatctgcctttgtcgccagccaggaagctgtgacatcctctgagcttgccttctttgacccgtcactcctccacctcctttatttccc

SEQ ID NO: 89624 - DNA, 120 bp, Artificial Sequence
  ENSG00000087111_13 (sequence is synthesized)
tgatgaccagaagtttgccatctacatcccactcttcctgcctatggctgtgcccatcctcctgtccctggtcaagatcttcctggagacccgcaagtcctggagaaagcctgagaagac

SEQ ID NO: 89625 - DNA, 120 bp, Artificial Sequence
  ENSG00000087111_14 (sequence is synthesized)
agactgagcagggcagcacctccataggaagccttcctttctggccaaggtgggcggtgttagattgtgaggcacgtacatggggcctgccggaatgacttaaatatttgtctccagtct

SEQ ID NO: 89626 - DNA, 120 bp, Artificial Sequence
  ENSG00000087111_15 (sequence is synthesized)
ccactgttggctctccagcaaccaaagtacaacactccaagatgggttcatcttttcttcctttcccattcacctggctcaatcctcctccaccaccaggggcctcaaaaggcacatcat

SEQ ID NO: 89627 - DNA, 120 bp, Artificial Sequence
  ENSG00000087111_16 (sequence is synthesized)
ccgggtctccttatcttgtttgataaggctgctgcctgtctccctctgtggcaaggactgtttgttcttttgccccatttctcaacatagcacacttgtgcactgagaggagggagcatt

SEQ ID NO: 89628 - DNA, 120 bp, Artificial Sequence
  ENSG00000087111_17 (sequence is synthesized)
atgggaaagtccctgccttccacacctctctctagtccctgtgggacagccctagcccctgctgtcatgaaggggccaggcattggtcacctgtgggaccttctccctcactcccctccc

SEQ ID NO: 89629 - DNA, 120 bp, Artificial Sequence
  ENSG00000087111_18 (sequence is synthesized)
gtgggaccttctccctcactcccctccctcctagttggctttgtctgtcaggtgcagtctggcgggagtccaggaggcagcagctcaggacatggtgctgtgtgtgtgtgtgtgtgtgtg

SEQ ID NO: 89630 - DNA, 120 bp, Artificial Sequence
  ENSG00000087111_19 (sequence is synthesized)
aagttccagatttggaatcaaacagtcctgaattcaaatccttgtttttgcacttattgtctggagagctttggataaggtattgaatctctctgagcctcagtttttcatttgttcaaa

SEQ ID NO: 89631 - DNA, 120 bp, Artificial Sequence
  ENSG00000087111_20 (sequence is synthesized)
tggcactgatgatgtctcccttacaagatggttgtgaggagtaaatgtgatcagcatgtaaagtgtctggcgtgtagtaggctcttaataaacactggctgaatatgaattggaatgata

SEQ ID NO: 89632 - DNA, 120 bp, Artificial Sequence
  ENSG00000087111_21 (sequence is synthesized)
atggtaatagtcacactacgcagaccccagagcccatgcttctgggacaggcaggtgtccctgaaactgtgttccttctgttttccttctggtgtcctccatggcccagcctgtgggagg

SEQ ID NO: 89633 - DNA, 120 bp, Artificial Sequence
  ENSG00000087111_22 (sequence is synthesized)
ggcaggcaccaggaaggtgagggtgctatgtgctcatgcccctcttctgccggccccacttttgtttccgccagtgttttctatactgtgaccctttgcccttacctaggatcattctgt

SEQ ID NO: 89634 - DNA, 120 bp, Artificial Sequence
  ENSG00000087111_23 (sequence is synthesized)
gtccatcttagatcttcgccttatttgtgggagtcttgcaaggttgggagccttgtctcccttgttagactggaagtttctcatgggggagaattctaaaatgggataagaaaaaaatat

SEQ ID NO: 89635 - DNA, 120 bp, Artificial Sequence
  ENSG00000087111_24 (sequence is synthesized)
gttctacaggactttcaagggggtaattgggataatgtatttaatgctctccgtagtaggtactcaaaaaatattagctataccatgaggtttatagcttctaaagagcacagaatatgt

SEQ ID NO: 89636 - DNA, 120 bp, Artificial Sequence
  ENSG00000087111_25 (sequence is synthesized)
tgcaaagtggaatcaagtcttacctggcagggatatcttggctgtgcctagagccccagggaaaccaagaaaagtttctaaggatcccatcatccttctaagaaggactagtaggtgaca

SEQ ID NO: 89637 - DNA, 63 bp, Artificial Sequence
  ENSG00000087111_26 (sequence is synthesized)
aggatcccatcatccttctaagaaggactagtaggtgacaaaatcatgccattttggctcact

SEQ ID NO: 89638 - DNA, 120 bp, Artificial Sequence
  ENSG00000087111_27 (sequence is synthesized)
caggcgtgagccactgtgcccagccagcaaaaccagttttaagaaaaatagactcatgaatgtcaggtccatggagtgtgattagggctgcttaagaaaatagctgttaattcttatgct

SEQ ID NO: 89639 - DNA, 120 bp, Artificial Sequence
  ENSG00000087111_28 (sequence is synthesized)
gggctgcttaagaaaatagctgttaattcttatgctgcctgatggattgagagtggctgcctgaggctctgtgttgaggattctaaggctgtatctgggctcattaggaaagagtattct

SEQ ID NO: 89640 - DNA, 120 bp, Artificial Sequence
  ENSG00000087111_29 (sequence is synthesized)
tctgattgactagcagtgtctctcacggatgcaggcttagagaagcacagcacatgtgccttggcaaaggcagtcctggatcatcccttaatgctaagtcccattggccccatttgttca

SEQ ID NO: 89641 - DNA, 120 bp, Artificial Sequence
  ENSG00000087111_30 (sequence is synthesized)
tcttggaaatctaatgtagaaacaggtaaaagcagaaacacctgttgaagcagcgtttggggccaacttgtttggtgttgccccttatgcccccaagaccctgaggtacttccctttaac

SEQ ID NO: 89642 - DNA, 120 bp, Artificial Sequence
  ENSG00000087111_31 (sequence is synthesized)
ccctatggttctgggtaagattgaaaatcactggctcaggacagatatttgagaaatcttagccatgatctcccgccttgtggtctcagccaccttgatcttactccgatgttcctacag

SEQ ID NO: 89643 - DNA, 120 bp, Artificial Sequence
  ENSG00000087111_32 (sequence is synthesized)
agctctgcccccacggtggccggagcagccggaagctagcatggcggccgccggggctgcggctacacacctaggtgcggtgggcttcgggtggggggcctgcagctagctgatggcaag

SEQ ID NO: 89644 - DNA, 120 bp, Artificial Sequence
  ENSG00000087111_33 (sequence is synthesized)
ggaggaatagcaggggtggggattgtggtgtgcgagaggtcccgcggacggggggctcgggggtctcttcagacgagattcccttcaggcttgggccgggtcccttcgcacggagatccc

SEQ ID NO: 89645 - DNA, 120 bp, Artificial Sequence
  ENSG00000087111_34 (sequence is synthesized)
aatgaacgcgggcccctggaggccggtggttggggcttctccgcgtcggggatggggccggtaccctagcccgtttccagcgcctcagtcggttccccatgccctcagaggtggcccggg

SEQ ID NO: 89646 - DNA, 120 bp, Artificial Sequence
  ENSG00000087111_35 (sequence is synthesized)
cagtgttcctcatcccagttttgtcctccttttggttccatgatggaaagcagccccattccagaggagaaacaagttcagctcagctgggagtacaggctgcccctcttctttgatcca

SEQ ID NO: 89647 - DNA, 120 bp, Artificial Sequence
  ENSG00000087111_36 (sequence is synthesized)
ggaggccctgtcatcgggcagtgtgcaaggtatgggaagggatgagcacaccattttaatgtgaagccctctttttccttctgatctctaagtgcatagttcccatgctttggcttactt

SEQ ID NO: 89648 - DNA, 120 bp, Artificial Sequence
  ENSG00000087111_37 (sequence is synthesized)
tcccagatcagtggcctgaatgcccttcagacaaaatgaaaatcaaatgccgtttccagaaggcctatcggagggctttggaccatgaggaggaggccctgtcatcgggcagtgtgcaag

SEQ ID NO: 89649 - DNA, 120 bp, Artificial Sequence
  ENSG00000087111_38 (sequence is synthesized)
tatatactcatagctcagaaatgctgagttaatagctcatgaatctcaagagaggtgcaaacctgttggtcattggcaaaggggcagattcggaacagtaggagccagggtgctttttgg

SEQ ID NO: 89650 - DNA, 120 bp, Artificial Sequence
  ENSG00000087111_39 (sequence is synthesized)
gatgcagacaagtgagagagcttaggcattcaggaagctcagagtagtttagtgtggctgaaatgtgagtgagtgaccaaagatgaagccggttaggcaggcaggagccaggtcataaag

SEQ ID NO: 89651 - DNA, 120 bp, Artificial Sequence
  ENSG00000087111_40 (sequence is synthesized)
gaccatgttaaggagtttgaactttaacctgatatgggtggctagtgattgagggatattaagcagggaactgacataaggtcagatttctggtttgcataaaactatctgtagtaatat

SEQ ID NO: 89652 - DNA, 120 bp, Artificial Sequence
  ENSG00000087111_41 (sequence is synthesized)
gggtacattgtgggagtggccaagaaagctgtcgtagacagtcaaggggcctttgaggagggagaattcgggggtgttttggagctaaggactatgtttccatcggtatggcacatctcg

SEQ ID NO: 89653 - DNA, 120 bp, Artificial Sequence
  ENSG00000087111_42 (sequence is synthesized)
ggagaacattctgaagccctttactagagacaccctggacaggaggatatcctaatgattgttagttggggaatcagtcccagagtgagtgaccagcaagttagaggccgacctgggact

SEQ ID NO: 89654 - DNA, 120 bp, Artificial Sequence
  ENSG00000087111_43 (sequence is synthesized)
tgcggggctagaagtgtgttctacagggaagcggggaacttcgttccagcagcgccgaaacccgcacggcccctaggctgtccctccgcgcccgggtgacttcctttcagatccccagcg

SEQ ID NO: 89655 - DNA, 120 bp, Artificial Sequence
  ENSG00000087111_44 (sequence is synthesized)
aagctcccagcggagccctcccacccctcgcccgcttgctcccgtctgcgggtctggagtagcgctcgcgattggccccgatcaccgccgcggtcctgccccctcgttgcagagattccg

SEQ ID NO: 89656 - DNA, 120 bp, Artificial Sequence
  ENSG00000087111_45 (sequence is synthesized)
gattggcttacccaagcctgaccactgtgtcagctgaatgtgagtgaaggggtgggttaggcattctttggggctggggggagatggaatggtgttttgctcttggtgtaccacctgttc

SEQ ID NO: 89657 - DNA, 120 bp, Artificial Sequence
  ENSG00000087116_0 (sequence is synthesized)
gccctgcggtgctgcagctgcgggcggctccagctgcccccagatgtgggctgggcggctcgcggggaactttcgcgccggctgcgagtgcggggccccggctgcagtccggctgccatg

SEQ ID NO: 89658 - DNA, 120 bp, Artificial Sequence
  ENSG00000087116_1 (sequence is synthesized)
gggaactttcgcgccggctgcgagtgcggggccccggctgcagtccggctgccatggatccgccggcgggagccgctcgccgcctgctctgccccgcgctgctgctgctgctgctgctgc

SEQ ID NO: 89659 - DNA, 120 bp, Artificial Sequence
  ENSG00000087116_2 (sequence is synthesized)
cgccgccgccgaccccccaggcgggcccctggggcacggagcggagcgcatcctggcggtgcccgtgcgcactgacgcccagggccgcttggtgtcccacgtggtgtcggcagctacgtc

SEQ ID NO: 89660 - DNA, 120 bp, Artificial Sequence
  ENSG00000087116_3 (sequence is synthesized)
ggcagctacgtccagagcaggggtacgagcccgcagggccgccccggtccggaccccgagcttccccggaggcaacgaggaggagcctggcagtcacctcttctacaatgtcacggtctt

SEQ ID NO: 89661 - DNA, 120 bp, Artificial Sequence
  ENSG00000087116_4 (sequence is synthesized)
tggccgagacctgcacctgcggctgcggcccaacgcccgcctcgtggcgcccggggccactatggagtggcagggcgagaagggcaccacccgcgtggagcccctgctcgggagctgtct

SEQ ID NO: 89662 - DNA, 120 bp, Artificial Sequence
  ENSG00000087116_5 (sequence is synthesized)
ctacgtcggagacgtggccggcctagccgaagcctcctctgtggcgctcagcaactgcgatgggctggctggtctgatccggatggaggaggaggagttcttcatcgaacccttggagaa

SEQ ID NO: 89663 - DNA, 120 bp, Artificial Sequence
  ENSG00000087116_6 (sequence is synthesized)
ggggctggcggcgcaggaggctgagcaaggccgtgtgcatgtggtgtatcgccggccacccacgtcccctcctctcggggggccacaggccctggacacaggggcctccctggacagcct

SEQ ID NO: 89664 - DNA, 120 bp, Artificial Sequence
  ENSG00000087116_7 (sequence is synthesized)
ggacagcctcagccgcgccctgggcgtcctagaggagcacgccaacagctcgaggcggagggcacgcaggcatgctgcggacgatgactacaacatcgaggtcctgctgggcgtggatga

SEQ ID NO: 89665 - DNA, 120 bp, Artificial Sequence
  ENSG00000087116_8 (sequence is synthesized)
ctctgtggtgcagttccacgggaaggagcacgtacagaagtacctgctgacactcatgaacattgtcaatgaaatctaccatgacgagtccttgggtgcccacatcaacgtggtcctggt

SEQ ID NO: 89666 - DNA, 120 bp, Artificial Sequence
  ENSG00000087116_9 (sequence is synthesized)
gcggatcatcctcctgagctatggaaagtccatgagcctcatcgagatcgggaacccctctcagagcctggagaatgtctgccgctgggcctacctccagcagaagccagacacgggcca

SEQ ID NO: 89667 - DNA, 120 bp, Artificial Sequence
  ENSG00000087116_10 (sequence is synthesized)
cgatgaataccacgatcacgccatcttcctcacacggcaggactttgggccttccggcatgcaaggctatgctcctgtcaccggcatgtgccatccggtccgcagctgcaccctgaacca

SEQ ID NO: 89668 - DNA, 120 bp, Artificial Sequence
  ENSG00000087116_11 (sequence is synthesized)
tgaggacggcttctcctcagcgtttgtggtggcccatgagactggccacgtgctgggcatggagcacgacgggcagggcaaccgctgtggcgacgaggtgcggctgggcagcatcatggc

SEQ ID NO: 89669 - DNA, 120 bp, Artificial Sequence
  ENSG00000087116_12 (sequence is synthesized)
gcccctggtgcaggccgccttccaccgcttccactggtcccgctgcagccagcaggagctgagccgctacctgcactcctatgactgcctgctggatgaccccttcgcccacgactggcc

SEQ ID NO: 89670 - DNA, 120 bp, Artificial Sequence
  ENSG00000087116_13 (sequence is synthesized)
ggcgctgccccagctcccgggactgcactactccatgaacgagcaatgccgctttgacttcggcctgggctacatgatgtgcacggcgttccggacctttgacccctgcaagcagctgtg

SEQ ID NO: 89671 - DNA, 120 bp, Artificial Sequence
  ENSG00000087116_14 (sequence is synthesized)
gtgcagccatcctgacaacccctacttttgcaagaccaagaaggggccccccttggacgggactatgtgtgcacctggcaagcattgttttaaaggacactgcatctggctgacacctga

SEQ ID NO: 89672 - DNA, 120 bp, Artificial Sequence
  ENSG00000087116_15 (sequence is synthesized)
catcctcaaacgggacggcagctggggcgcttggagtccgtttggctcctgctcacgtacctgtggcacgggcgtgaagttcaggacccgccagtgtgacaacccacacccggccaacgg

SEQ ID NO: 89673 - DNA, 120 bp, Artificial Sequence
  ENSG00000087116_16 (sequence is synthesized)
gggccgcacctgctcgggccttgcctacgacttccagctctgcagccgccaggactgccccgactccctggctgacttccgcgaggagcagtgccgccagtgggacctgtacttcgagca

SEQ ID NO: 89674 - DNA, 120 bp, Artificial Sequence
  ENSG00000087116_17 (sequence is synthesized)
cggcgacgcccagcaccactggctgccccacgagcaccgggatgccaaggagagatgccacctgtactgcgagtccagggagaccggggaggtggtgtccatgaagcgcatggtgcatga

SEQ ID NO: 89675 - DNA, 120 bp, Artificial Sequence
  ENSG00000087116_18 (sequence is synthesized)
cgggacgcgctgctcctacaaggacgccttcagcctctgtgtgcgcggggactgcaggaaggtgggctgtgacggtgtgatcggctccagcaagcaggaagacaagtgtggcgtgtgcgg

SEQ ID NO: 89676 - DNA, 120 bp, Artificial Sequence
  ENSG00000087116_19 (sequence is synthesized)
aggggacaacagccactgcaaagtggtcaagggcacgttcacacggtcacccaagaagcatggttacatcaagatgtttgagatccctgcaggagccagacacctgctcattcaggaggt

SEQ ID NO: 89677 - DNA, 120 bp, Artificial Sequence
  ENSG00000087116_20 (sequence is synthesized)
agacgccaccagccaccatctggccgtcaagaacctggagacaggcaagttcatcttaaatgaagagaatgacgtggatgccagttccaaaaccttcattgccatgggcgtggagtggga

SEQ ID NO: 89678 - DNA, 120 bp, Artificial Sequence
  ENSG00000087116_21 (sequence is synthesized)
gtacagagacgaggacggccgggagacgctgcagaccatgggccccctccacggcaccatcaccgttctggtcatcccggtgggagacacccgggtctcactgacgtacaaatacatgat

SEQ ID NO: 89679 - DNA, 120 bp, Artificial Sequence
  ENSG00000087116_22 (sequence is synthesized)
ccatgaggactcactgaatgtcgacgacaacaacgtcctggaagaggactctgtggtctacgagtgggccctgaagaagtggtctccgtgctccaagccctgtggcggagggtcccagtt

SEQ ID NO: 89680 - DNA, 120 bp, Artificial Sequence
  ENSG00000087116_23 (sequence is synthesized)
caccaagtatggctgccgccggaggctggaccacaagatggtacaccgtggcttctgtgccgccctctcgaagcccaaagccatccgcagagcgtgcaacccacaggaatgctcccagcc

SEQ ID NO: 89681 - DNA, 120 bp, Artificial Sequence
  ENSG00000087116_24 (sequence is synthesized)
agtgtgggtcacaggcgaatgggagccatgtagccagacctgtgggcggacaggcatgcaggtgcgctccgtgcgctgcattcagccgctacacgacaacaccacccgctccgtgcacgc

SEQ ID NO: 89682 - DNA, 120 bp, Artificial Sequence
  ENSG00000087116_25 (sequence is synthesized)
caagcactgcaatgacgcccggcccgagagccgccgggcctgcagccgcgagctctgccctggtcgttggcgagccgggccctggtcccagtgctcagtaacctgtggcaacggcaccca

SEQ ID NO: 89683 - DNA, 120 bp, Artificial Sequence
  ENSG00000087116_26 (sequence is synthesized)
ggagcggccagtgctctgccgcaccgcggacgacagcttcggcatctgccaggaggagcgtcctgagacagcgaggacctgcaggcttggcccctgtccccgaaacatctcagatccctc

SEQ ID NO: 89684 - DNA, 120 bp, Artificial Sequence
  ENSG00000087116_27 (sequence is synthesized)
caagaagagctacgtagttcagtggctgtcccgcccggaccccgactcgcccatccggaagatctcgtcaaagggccactgccaaggcgacaagtcaatattctgtaggatggaagtctt

SEQ ID NO: 89685 - DNA, 120 bp, Artificial Sequence
  ENSG00000087116_28 (sequence is synthesized)
caacctcaccaacgtggagggcaggatagagccaccgcctgggaagcacaacgacattgacgtgttcatgcctaccctcccagtgcccactgtagccatggaggtgcggccatcaccaag

SEQ ID NO: 89686 - DNA, 120 bp, Artificial Sequence
  ENSG00000087116_29 (sequence is synthesized)
cacccccctggaggtccctctcaatgcctccagcaccaatgccacagaggatcacccagaaaccaatgccgtagatgaaccctacaaaatccatggcctggaagatgaagtccagccacc

SEQ ID NO: 89687 - DNA, 120 bp, Artificial Sequence
  ENSG00000087116_30 (sequence is synthesized)
caacctaatccctcgacgaccgagcccctatgaaaagaccagaaaccaaagaatccaagagctcattgatgagatgcggaagaaagagatgctcggaaagttctaataaaatggaaagat

SEQ ID NO: 89688 - DNA, 120 bp, Artificial Sequence
  ENSG00000087116_31 (sequence is synthesized)
agcatccctagcatttttttcttgcttatagagatattccatgggatagcaaatcctgtgtcatggagatgaagtcaaaattcctgattccaaaaggttttgagaaaacaaagaggggga

SEQ ID NO: 89689 - DNA, 120 bp, Artificial Sequence
  ENSG00000087116_32 (sequence is synthesized)
atgacgtaagaaagataggcatgagcatgtggtaactaggttagcacgtgtgcttcccagcccaggagcgaccaaatactgtggtggcgtcaggtgtgcagtggagaggaatatagaggc

SEQ ID NO: 89690 - DNA, 120 bp, Artificial Sequence
  ENSG00000087116_33 (sequence is synthesized)
tgtatggcctccctcagtgagggcagggcaagagggatcactctgagagaacaaaaataggccccaagttgctaagcagtgattgggaaccttcctttccttggcggagatgcatgacat

SEQ ID NO: 89691 - DNA, 120 bp, Artificial Sequence
  ENSG00000087116_34 (sequence is synthesized)
tccctaccgatccccagacacagcctgtgggactcttaggagaaatggtgatttactgaataactgacccgttgccgagatgagtacaatgaagtggaggtgatgaactcaaatcgtctt

SEQ ID NO: 89692 - DNA, 120 bp, Artificial Sequence
  ENSG00000087116_35 (sequence is synthesized)
ccagggccaggcggctgaccggggtgagcgtagtggcccgctggggaccatggccgccctgacagccacacccacctggagctgacttggttctggctgttgctgccactgtgaaatctg

SEQ ID NO: 89693 - DNA, 120 bp, Artificial Sequence
  ENSG00000087116_36 (sequence is synthesized)
tatctctctccatctctgctctactatccccggccttgccagacagtgttctttttcggaagaagtctagatttttgcatgaaaaaaactcaatctttaaaggtcgactcagaacatttt

SEQ ID NO: 89694 - DNA, 120 bp, Artificial Sequence
  ENSG00000087116_37 (sequence is synthesized)
aaggaggcctccacttggtctgatgcagtcttgctaattaagaactaaaggccttctgaccttcttggtgctcatgctgtacggcatctgaatgtctcgaccgagtctgagccgtgcagc

SEQ ID NO: 89695 - DNA, 120 bp, Artificial Sequence
  ENSG00000087116_38 (sequence is synthesized)
tgtcctccacctgcgaaagtaatgagaatcctatcacgggacataaggataggtctaaacagggtccatgccaagaaaacagtggggtgctctcccaggcctctcccctgtccactaacc

SEQ ID NO: 89696 - DNA, 120 bp, Artificial Sequence
  ENSG00000087116_39 (sequence is synthesized)
ctggccttgccggctgccttccaggctctgggggaagagctcctgcattcttccctggccaccttggctccagggctccccagagagcctcttccctccccaagtacctgagaaagatga

SEQ ID NO: 89697 - DNA, 120 bp, Artificial Sequence
  ENSG00000087116_40 (sequence is synthesized)
gagaggcacgtgctctgctgggaaggtccagtgagcggttcaagggcctggaatctccctacggccaagtctaagggttctgggattctgggctttgtgggctttgcttgcttgctggga

SEQ ID NO: 89698 - DNA, 120 bp, Artificial Sequence
  ENSG00000087116_41 (sequence is synthesized)
atgggctttccctgtcccgccctgccccacctcgcctctgtctctcagaagctccagaacccagcagtgacctgcaaaatgtggcctctgatgggggcttagggtgggagatggggagag

SEQ ID NO: 89699 - DNA, 120 bp, Artificial Sequence
  ENSG00000087116_42 (sequence is synthesized)
cctacattgtcttttgctccttgaaaactttaatagctcctattttccagagaatggtgctttgtgagcaacatgcgagtaagagagaaataggaggaagggggagtaggggcggatggg

SEQ ID NO: 89700 - DNA, 120 bp, Artificial Sequence
  ENSG00000087116_43 (sequence is synthesized)
agaagagtggctcatttttacctctcactgccttgacattttgtgaacgtgaagcttaaactttctgggcttacaagacccaggggcacgtcagctccttagatgggctcagcctgacac

SEQ ID NO: 89701 - DNA, 120 bp, Artificial Sequence
  ENSG00000087116_44 (sequence is synthesized)
ataattcttaaacctttcctgtttaagaaacttctagaggctgtgtactctcaccaatcctcttcgagaatttgttcatgtgtatttccccattatatggatgaggctcaggataacagc

SEQ ID NO: 89702 - DNA, 120 bp, Artificial Sequence
  ENSG00000087116_45 (sequence is synthesized)
atagtggctaccttctactgagttttgaggtgctaataagtatgtttgtctgaggctgcacatgtgggtggctctgtgtgtatgatccaagggacaaaatgacgatgtaggaaccagcaa

SEQ ID NO: 89703 - DNA, 120 bp, Artificial Sequence
  ENSG00000087116_46 (sequence is synthesized)
gaacggaatctgggctgatgcttcagtctccacctgggtgatggctagcctcccgccctccaccaccgcatcccacacgtgctgcgcactgtccccgtgtctcctggagaaccaaactgg

SEQ ID NO: 89704 - DNA, 120 bp, Artificial Sequence
  ENSG00000087116_47 (sequence is synthesized)
agaaaacctttctgagtatctctcatagtaccccttccttaagaagatgtggtttagagcatgtgtgcaatcctgcctctgtaattaggaaacggagcccgaggctttccattgttggtt

SEQ ID NO: 89705 - DNA, 120 bp, Artificial Sequence
  ENSG00000087116_48 (sequence is synthesized)
gaacccaggacagctggtgctattcacaggctgaagaactgggcagttcttacttgggtctgtcctaggatgtggaggaagttcaggactaacgctaggcagagagtatgactcggttta

SEQ ID NO: 89706 - DNA, 120 bp, Artificial Sequence
  ENSG00000087116_49 (sequence is synthesized)
cccagcctaggggcctctggatgggaacactccattccaagatctcagcagagcagggcttcctggcttgaggctggaagcctttgggaagaggcccagctgggacattccctgggcacc

SEQ ID NO: 89707 - DNA, 120 bp, Artificial Sequence
  ENSG00000087116_50 (sequence is synthesized)
tgtcttccgctgaagggagcaaggtgccctctgggactgacagccatgaccctctgtgccatcctcaatccttgagccatatatcaagagtcctctagagccggatggtcctcaaaagtc

SEQ ID NO: 89708 - DNA, 120 bp, Artificial Sequence
  ENSG00000087116_51 (sequence is synthesized)
tgtccaaggaatgccaacgttcaccgggctctgagaaacgacgcaaatctctgagctggggaccacttggagaaccggcttagtaacagtcctgatcttcgcaagccagcttcttctgca

SEQ ID NO: 89709 - DNA, 120 bp, Artificial Sequence
  ENSG00000087116_52 (sequence is synthesized)
tctgaggggctcctggcgcccagaggaggcagacagatgtcttctagctgagtttctaaccgcatgatgagactcagaccttccgctgcactagaaaatctgcaacagtgtccctgagtc

SEQ ID NO: 89710 - DNA, 120 bp, Artificial Sequence
  ENSG00000087116_53 (sequence is synthesized)
acttctccttagtgggcagactcgtgttagatttgtggaacccagctctctgatttactccttttggaaaacccatggaatttcatgtataaggctttcatttgtattttaaggtttttc

SEQ ID NO: 89711 - DNA, 120 bp, Artificial Sequence
  ENSG00000087116_54 (sequence is synthesized)
tgtttgttttgagtatatacatggtgctcaatagcaacatcttagcagatgaagcagtttatgattccactccctcctgtatgacaggtagccactatactgaatcaaggtgctgaactc

SEQ ID NO: 89712 - DNA, 120 bp, Artificial Sequence
  ENSG00000087116_55 (sequence is synthesized)
aaatcacaaaattctggcttaccgatacaacaaccaatacatctttgttctgtaatgtaaaatttgactccttacttttataacttattaaagttaaaatgtctgtgtttttgcaaatca

SEQ ID NO: 89713 - DNA, 120 bp, Artificial Sequence
  ENSG00000087116_56 (sequence is synthesized)
cgccctgtggagcttgccttgggcccccctcctctctgtctatggaaagctcccctgactctgcgggcgcgctctggggtgaccgttttctcccgggcctctgagctcggcgtccgctcc

SEQ ID NO: 89714 - DNA, 120 bp, Artificial Sequence
  ENSG00000087116_57 (sequence is synthesized)
gggccgcgctgcctgctggcgggggctcgggcctctgctggggccgaacctggttggtgatggcttgtaaaggggcaaagatctgtcgtggttgcaggaggggccggtggccaaagggcg

SEQ ID NO: 89715 - DNA, 120 bp, Artificial Sequence
  ENSG00000087116_58 (sequence is synthesized)
ccgtcccggcccgggggggttcgcggtctcgcggcgtcgtgcggggaccccaccccgagtttccggcactgccaggtgcttcccggctgccaccgccgtcgctgctgccgccgacccttt

SEQ ID NO: 89716 - DNA, 120 bp, Artificial Sequence
  ENSG00000087116_59 (sequence is synthesized)
ctgccgccgaccctttgctgagcgtgtccttctgactcgtggaactatggcccgcttccgcccggccttcgcgcagctcacagccccgcgcggccctgtcctgcgggggtccggtcgcgg

SEQ ID NO: 89717 - DNA, 120 bp, Artificial Sequence
  ENSG00000087116_60 (sequence is synthesized)
aggcggcggaggggcgcggggacactccccacctccactgtccgcccgtcggccccggtggccttttctcgcctcgcgcacagctcccccgccgcagggctgagagagagagtggccgtc

SEQ ID NO: 89718 - DNA, 120 bp, Artificial Sequence
  ENSG00000087116_61 (sequence is synthesized)
tggtgcgcgcgtgcctcgcccacgcgtgtgaaccactacagaattacctcaatttttattgcttttttgcttagaaaaactatgtagaagatgccttaaagttgaaaggtaacgggattg

SEQ ID NO: 89719 - DNA, 120 bp, Artificial Sequence
  ENSG00000087116_62 (sequence is synthesized)
gctgccaactccagcttcagagggggaacgtgggccagtagaaggcagggaaggtgtaggggagccggtgcgttcatccaccttttgccaaggttgaggtttccaagtgcagacggcttc

SEQ ID NO: 89720 - DNA, 120 bp, Artificial Sequence
  ENSG00000087116_63 (sequence is synthesized)
tctccttgggctgagcggtgcgcaccgtccgtctccgcggactggagtctgccctgatgccccactggccagtcggcgctgactgttgcatggagcccccgagggtgctccacagcgcgg

SEQ ID NO: 89721 - DNA, 120 bp, Artificial Sequence
  ENSG00000087116_64 (sequence is synthesized)
ccttacacccagggggcgaccccctgggccctgagccgcgatccatgtagcactcctccccgcccctccaccccagccaccgcctctgttcacaccgcacccctgccgggcggccggccc

SEQ ID NO: 89722 - DNA, 120 bp, Artificial Sequence
  ENSG00000087116_65 (sequence is synthesized)
ctactcccgcggctctgaccgccgttctgtaaataactggtgtgcacctgcgtactaatctcacgactgttaacttccaactttgacgaggccatgcgagcgacacgcgcgactggggaa

SEQ ID NO: 89723 - DNA, 120 bp, Artificial Sequence
  ENSG00000087116_66 (sequence is synthesized)
ggtgcaatactgtcctgggcatatgcactttggtttatcagggatattttattagtgttttgtatgtatttaatgacgtattctataggttccattgtcgttgcttttctggtttttttt

SEQ ID NO: 89724 - DNA, 120 bp, Artificial Sequence
  ENSG00000087116_67 (sequence is synthesized)
atgagacgttagcgtgtgccaaagtgactgtgaaaatgacctttcattcttactaatgatggaaagacctcctgtcatgcatcccacaaataaactcaataaaagttccatgaaactggg

SEQ ID NO: 89725 - DNA, 61 bp, Artificial Sequence
  ENSG00000087116_68 (sequence is synthesized)
gcactttgggaggccaaggtaggtggatcgcctgaggtcagaagttcaagacaagtctggt

SEQ ID NO: 89726 - DNA, 84 bp, Artificial Sequence
  ENSG00000087116_69 (sequence is synthesized)
tgaaaatcgtttgagtcgctgctctccagtctggatcacacagcaagaccctgtctcaaaaaataaaaataaaagtgaagtgca

SEQ ID NO: 89727 - DNA, 120 bp, Artificial Sequence
  ENSG00000087116_70 (sequence is synthesized)
gaatgacgcttccccaggaccccgggagacccggagcctctctgcctggggtgggggccccagcctggtgccctgcggccgcagcccctctctcctccctctaggaaacatctcagatcc

SEQ ID NO: 89728 - DNA, 120 bp, Artificial Sequence
  ENSG00000087128_0 (sequence is synthesized)
acttggatgtagacctcgaccttcacaggactcttcattgctggttggcaatgatgtatcggccagatgtggtgagggctaggaaaagagtttgttgggaaccctgggttatcggcctcg

SEQ ID NO: 89729 - DNA, 120 bp, Artificial Sequence
  ENSG00000087128_1 (sequence is synthesized)
tcatcttcatatccctgattgtcctggcagtgtgcattggactcactgttcattatgtgagatataatcaaaagaagacctacaattactatagcacattgtcatttacaactgacaaac

SEQ ID NO: 89730 - DNA, 120 bp, Artificial Sequence
  ENSG00000087128_2 (sequence is synthesized)
tatatgctgagtttggcagagaggcttctaacaattttacagaaatgagccagagacttgaatcaatggtgaaaaatgcattttataaatctccattaagggaagaatttgtcaagtctc

SEQ ID NO: 89731 - DNA, 120 bp, Artificial Sequence
  ENSG00000087128_3 (sequence is synthesized)
aggttatcaagttcagtcaacagaagcatggagtgttggctcatatgctgttgatttgtagatttcactctactgaggatcctgaaactgtagataaaattgttcaacttgttttacatg

SEQ ID NO: 89732 - DNA, 120 bp, Artificial Sequence
  ENSG00000087128_4 (sequence is synthesized)
aaaagctgcaagatgctgtaggaccccctaaagtagatcctcactcagttaaaattaaaaaaatcaacaagacagaaacagacagctatctaaaccattgctgcggaacacgaagaagta

SEQ ID NO: 89733 - DNA, 120 bp, Artificial Sequence
  ENSG00000087128_5 (sequence is synthesized)
aaactctaggtcagagtctcaggatcgttggtgggacagaagtagaagagggtgaatggccctggcaggctagcctgcagtgggatgggagtcatcgctgtggagcaaccttaattaatg

SEQ ID NO: 89734 - DNA, 120 bp, Artificial Sequence
  ENSG00000087128_6 (sequence is synthesized)
ccacatggcttgtgagtgctgctcactgttttacaacatataagaaccctgccagatggactgcttcctttggagtaacaataaaaccttcgaaaatgaaacggggtctccggagaataa

SEQ ID NO: 89735 - DNA, 120 bp, Artificial Sequence
  ENSG00000087128_7 (sequence is synthesized)
ttgtccatgaaaaatacaaacacccatcacatgactatgatatttctcttgcagagctttctagccctgttccctacacaaatgcagtacatagagtttgtctccctgatgcatcctatg

SEQ ID NO: 89736 - DNA, 120 bp, Artificial Sequence
  ENSG00000087128_8 (sequence is synthesized)
agcacaggtgactctcatagacgctacaacttgcaatgaacctcaagcttacaatgacgccataactcctagaatgttatgtgctggctccttagaaggaaaaacagatgcatgccaggg

SEQ ID NO: 89737 - DNA, 120 bp, Artificial Sequence
  ENSG00000087128_9 (sequence is synthesized)
tgactctggaggaccactggttagttcagatgctagagatatctggtaccttgctggaatagtgagctggggagatgaatgtgcgaaacccaacaagcctggtgtttatactagagttac

SEQ ID NO: 89738 - DNA, 120 bp, Artificial Sequence
  ENSG00000087128_10 (sequence is synthesized)
ggccttgcgggactggattacttcaaaaactggtatctaagagagaaaagcctcatggaacagataacatttttttttgttttttgggtgtggaggccatttttagagatacagaattgg

SEQ ID NO: 89739 - DNA, 120 bp, Artificial Sequence
  ENSG00000087128_11 (sequence is synthesized)
agaagacttgcaaaacagctagatttgactgatctcaataaactgtttgcttgatgcatgtattttcttcccagctctgttccgcacataagcatcctgcttctgccagatcaactctgt

SEQ ID NO: 89740 - DNA, 120 bp, Artificial Sequence
  ENSG00000087128_12 (sequence is synthesized)
catctgtgagcaatagttgaaactttatgtacatagagaaatagataatacaatattacattacagcctgtattcatttgttctctagaagttttgtcagaattttgacttgttgacata

SEQ ID NO: 89741 - DNA, 120 bp, Artificial Sequence
  ENSG00000087128_13 (sequence is synthesized)
aatttgtaatgcatatatacaatttgaagcactccttttcttcagttcctcagctcctctcatttcagcaaatatccattttcaaggtgcagaacaaggagtgaaagaaaatataagaag

SEQ ID NO: 89742 - DNA, 120 bp, Artificial Sequence
  ENSG00000087128_14 (sequence is synthesized)
aaaaaaatcccctacattttattggcacagaaaagtattaggtgtttttcttagtggaatattagaaatgatcatattcattatgaaaggtcaagcaaagacagcagaataccaatcact

SEQ ID NO: 89743 - DNA, 120 bp, Artificial Sequence
  ENSG00000087128_15 (sequence is synthesized)
tcatcatttaggaagtatgggaactaagttaaggaaatccagaaagaagccaagatatatccttattttcatttccaaacaactactatgataaatgtgaagaagattctgtttttttgt

SEQ ID NO: 89744 - DNA, 120 bp, Artificial Sequence
  ENSG00000087128_16 (sequence is synthesized)
gacctataataattatacaaacttcatgcaatgtacttgttctaagcaaattaaagcaaatatttatttaacattgttactgaggatgtcaacatataacaataaaatataaatcaccca

SEQ ID NO: 89745 - DNA, 120 bp, Artificial Sequence
  ENSG00000087152_0 (sequence is synthesized)
tgctgcctcctatagacccagactctgattggcagtggagtccagggcctgagctcaggcctgggaaagactaggccccctttaggtttcaggccttgaaggaccatccagacttaggga

SEQ ID NO: 89746 - DNA, 120 bp, Artificial Sequence
  ENSG00000087152_1 (sequence is synthesized)
gcctgggccttggggagggagagaccctgatgccaggactgagctttgggcagcgaggtggggagggaaggtggccgcattcagaggtgccttggactcacaacaacacccccacccccg

SEQ ID NO: 89747 - DNA, 120 bp, Artificial Sequence
  ENSG00000087152_2 (sequence is synthesized)
tgtgtgcagccgtgttgccgcccgctgtgctatgagcagtcagagcgccgtctccacaagagtttacaaatgaaaatggaggaaatgtctttgtctggcctggataacagcaaactagag

SEQ ID NO: 89748 - DNA, 120 bp, Artificial Sequence
  ENSG00000087152_3 (sequence is synthesized)
gccatcgctcaggagatatacgcggacctggtcgaggattcttgtttgggattctgctttgaggtacaccgggctgtcaagtgtggctacttcttcttggacgacacggaccctgatagc

SEQ ID NO: 89749 - DNA, 120 bp, Artificial Sequence
  ENSG00000087152_4 (sequence is synthesized)
atgaaggattttgagatcgtggaccagccgggcttggacatctttggacaggttttcaaccagtggaagagcaaggagtgtgtttgccccaattgcagtcgcagcattgccgcctcccgc

SEQ ID NO: 89750 - DNA, 120 bp, Artificial Sequence
  ENSG00000087152_5 (sequence is synthesized)
tttgctccccatctggagaagtgcctgggaatgggtcggaacagcagccgaatcgccaaccgccggattgccaatagcaacaatatgaataagtctgagagtgaccaagaagataatgat

SEQ ID NO: 89751 - DNA, 120 bp, Artificial Sequence
  ENSG00000087152_6 (sequence is synthesized)
gacatcaatgacaacgactggtcctatggctcggagaagaaagccaagaagagaaagtcagacaagaaccccaattcccctcgaagatccaagtcattaaaacacaaaaatggggaactt

SEQ ID NO: 89752 - DNA, 120 bp, Artificial Sequence
  ENSG00000087152_7 (sequence is synthesized)
agcaattcggatccttttaagtataacaattcaactgggatcagctatgagaccctggggccggaggagcttcgcagcctgctaaccacgcaatgtggggtgatttctgaacacaccaag

SEQ ID NO: 89753 - DNA, 120 bp, Artificial Sequence
  ENSG00000087152_8 (sequence is synthesized)
aagatgtgcacaaggtccctgcgctgcccacagcacacagatgagcagaggcgaaccgtacggatttattttctcgggccctcggctgtccttccagaggtcgagagctccctggataat

SEQ ID NO: 89754 - DNA, 120 bp, Artificial Sequence
  ENSG00000087152_9 (sequence is synthesized)
gacagctttgacatgactgacagccaggccctgatcagccggcttcagtgggacggctcctctgacctctcaccctctgattcaggctcctccaagacgagtgaaaatcagggatggggt

SEQ ID NO: 89755 - DNA, 120 bp, Artificial Sequence
  ENSG00000087152_10 (sequence is synthesized)
ctaggtaccaacagctctgagtcacggaaaaccaagaaaaagaaatcccatctgagcctggtagggactgcctccggcctaggttccaacaagaagaagaagccaaagccaccggcaccc

SEQ ID NO: 89756 - DNA, 120 bp, Artificial Sequence
  ENSG00000087152_11 (sequence is synthesized)
ccgacgcccagcatctatgatgacatcaactgacttgggtgcaagggatagcctttggctgagcagagccctctctcctgacccccacccaggtggcatagcctggcaaatggacggctg

SEQ ID NO: 89757 - DNA, 120 bp, Artificial Sequence
  ENSG00000087152_12 (sequence is synthesized)
ctgggggttggggcttgggaagcttggtgggccaggcaggcagaggatccgattatgcgcccctggggggtgtcaaagtcctctgcaatggagcacgactcctcggcgtgcaggactcag

SEQ ID NO: 89758 - DNA, 120 bp, Artificial Sequence
  ENSG00000087152_13 (sequence is synthesized)
acctggacatattatgccttggacataagtttggtggggaggcggttttcctatttattctgtgagttactggatgtccagctaggccaggggcctgacctgggcactgtgccagggcac

SEQ ID NO: 89759 - DNA, 120 bp, Artificial Sequence
  ENSG00000087152_14 (sequence is synthesized)
tgcctgccccccaccccaggaactggactaagccctgctgaggggcaatgtggcgacccgggaggctgtgggttggaagctgagcctggagggggcctgcctcggccgccctcagcaatg

SEQ ID NO: 89760 - DNA, 120 bp, Artificial Sequence
  ENSG00000087152_15 (sequence is synthesized)
aggcaggcacagagtgctgtctgctgaggtgggcgtccagaactgccgccaccttccctgcccctcacaggggcagccctttcccctcagtccccatgggcctccttggcagcaggagct

SEQ ID NO: 89761 - DNA, 120 bp, Artificial Sequence
  ENSG00000087152_16 (sequence is synthesized)
gtccttttgttgggtgccaggaaagggcctccagcctctacagcttcaaggaatgggaaagggagggtaggaagagggagaagtgtcagaattcctccccctgcctctcctccctgaccc

SEQ ID NO: 89762 - DNA, 120 bp, Artificial Sequence
  ENSG00000087152_17 (sequence is synthesized)
agggctggtgaggagtggggccccaaggtgagagggaacggtgctgctttatttgaaatgttttcttacctcattccctgccccaggaagggacccagcctcaccctcctggggtggccc

SEQ ID NO: 89763 - DNA, 120 bp, Artificial Sequence
  ENSG00000087152_18 (sequence is synthesized)
cgtgttcctcctgcccaccctgccccactgccctaccggggcagcccaggttcccaactgctgcttccacccccttcaccttgactggcttcagttcctctcagcgctcctgcctccaaa

SEQ ID NO: 89764 - DNA, 120 bp, Artificial Sequence
  ENSG00000087152_19 (sequence is synthesized)
gcgtgccctgtttcccttccttagcgcttttaagttatttattctgtacttgtggtttggggctctgaggaaaatcctaatcttgtgcctctccccctttgctaggagttgggtgggaag

SEQ ID NO: 89765 - DNA, 120 bp, Artificial Sequence
  ENSG00000087152_20 (sequence is synthesized)
agagggtggcctctgtgccccaggttgtcagtggaggggaaggggtgtcactgcccctctgtgggactgtcatgccagtgtgcccacctgcctggtctacatcctaaagagatgtaccgt

SEQ ID NO: 89766 - DNA, 120 bp, Artificial Sequence
  ENSG00000087152_21 (sequence is synthesized)
cccccctccatgcgggcaccaccactcccaggagccaagctggaggaccgcgacctgggctgggagcagagctgactgacatgggtggaggtgaccctgagccaagttctctggcacttg

SEQ ID NO: 89767 - DNA, 120 bp, Artificial Sequence
  ENSG00000087152_22 (sequence is synthesized)
ctggacatgtcccctaccctcttcccaagaggagccatcccacatttgggtagttagtacccaggactggttggactgatcgggttagggaccctagagggttaagggaacaacagagat

SEQ ID NO: 89768 - DNA, 120 bp, Artificial Sequence
  ENSG00000087152_23 (sequence is synthesized)
ggggctgcaatgccctgtctggaactccgctctcccgctggggtggttctgattgtggctcatgcctggttgcaaattggtttttaacccacaaattgtgattattttttaaaaagccaa

SEQ ID NO: 89769 - DNA, 120 bp, Artificial Sequence
  ENSG00000087152_24 (sequence is synthesized)
acagattttggcaggagttagaataaatcccggggcctgggcttctctattcttggccctccgtagtctccctccgagaggaggccagagggagaggaggatctcagcaggcctctagcc

SEQ ID NO: 89770 - DNA, 120 bp, Artificial Sequence
  ENSG00000087152_25 (sequence is synthesized)
gcttccagatgcagtctggggagtgggctgaaggtgaagggaggaaggctgtgggccactctcccttctgagaggcagctgcagctcaggccctaatacactctttgccctgtggcctct

SEQ ID NO: 89771 - DNA, 120 bp, Artificial Sequence
  ENSG00000087152_26 (sequence is synthesized)
cccttttccccccttctggttggaggagggagaagtgggaagtagcttgggaactggtttgtccacataaacttccccattgttccttggcccgccctcagggcagagccccctgcccag

SEQ ID NO: 89772 - DNA, 120 bp, Artificial Sequence
  ENSG00000087152_27 (sequence is synthesized)
gctgggtaagagatgggcttggtccagcagggaccctgagggaacaaacccttttccttctggggagagagtgccccccctaccatgtagttgaacaggggctaggagctccccactccc

SEQ ID NO: 89773 - DNA, 120 bp, Artificial Sequence
  ENSG00000087152_28 (sequence is synthesized)
ctccctctaacagcaggctgtgtgggtttcaattcccatccttcccaccccggctaggtgtcgtccaccctgtatcctgtgtctgagtgtgtgtgggggggttctgtactaatttccatg

SEQ ID NO: 89774 - DNA, 120 bp, Artificial Sequence
  ENSG00000087152_29 (sequence is synthesized)
gccggtggcttttccttccatgcatcactcccccccgcatgcccaggggccacccgcctggcattaccgcatgctggggtcattgggggaggggggtggggctcacgctgtcctgtggtc

SEQ ID NO: 89775 - DNA, 120 bp, Artificial Sequence
  ENSG00000087152_30 (sequence is synthesized)
ttgagatttttatttttgcatatgtaatccattctgtacaggtagctaactttgtaaacgctgtgtattccctctgcccccatggctgctggtgtaaataaactgcatctcccgttggta

SEQ ID NO: 89776 - DNA, 120 bp, Artificial Sequence
  ENSG00000087152_31 (sequence is synthesized)
agacaggcctcctactggggaggaagagtaggaatttgaggatgctgctttgtcaaatcttttttccttccctgggttctcggctcccccttttcgttaccctttccccaaagctatggt

SEQ ID NO: 89777 - DNA, 120 bp, Artificial Sequence
  ENSG00000087152_32 (sequence is synthesized)
aggtttcccggcccatagtgtcctgggaccatctgctctggacacctttgggccatctctgcttgtgctatctagcatttatacagaaagaaacatctaacatctagagtaggttccttc

SEQ ID NO: 89778 - DNA, 80 bp, Artificial Sequence
  ENSG00000087152_33 (sequence is synthesized)
ctggagtggggggcggggggaggggcgcgcggacggcgcgcggactgcgcgcgggcggggtgaggtgaggaggaggaggc

SEQ ID NO: 89779 - DNA, 80 bp, Artificial Sequence
  ENSG00000087152_34 (sequence is synthesized)
tgaggtgaggaggaggaggcggcgacgggacaagaagggaggggaaggggccatggccgcccggtgaggcggccaggcgg

SEQ ID NO: 89780 - DNA, 80 bp, Artificial Sequence
  ENSG00000087152_35 (sequence is synthesized)
gggagaggcgaggacggaccgacggacatggggctccggagcagccgccgccgtcgccgccgccggaggacgcggccctg

SEQ ID NO: 89781 - DNA, 120 bp, Artificial Sequence
  ENSG00000087152_36 (sequence is synthesized)
gtcattaaaacacaaaaatggggaacttagcaattcggatccttttaagtataacaattcaactgggatcagctatgagaccctggggccggaggagcttcgcagcctgctaaccacgct

SEQ ID NO: 89782 - DNA, 80 bp, Artificial Sequence
  ENSG00000087152_37 (sequence is synthesized)
ccctcccggactcctctccccggccggccggggctgctggcgggcggggaaggagaggggctgggacgcgtcccactctc

SEQ ID NO: 89783 - DNA, 120 bp, Artificial Sequence
  ENSG00000087152_38 (sequence is synthesized)
cacaaaaatggtaagtggagccggagcaatgggaatgcttctagctgtgtcttctgggactcattgccggggggtggaggtggggcccggggataggggaattgagggagggcctgtgat

SEQ ID NO: 89784 - DNA, 120 bp, Artificial Sequence
  ENSG00000087152_39 (sequence is synthesized)
aactgggatcagctatgagaccctggggccggaggagcttcgcagcctgctaaccacgcaatgtggggtgatttctgaacacaccaagaagatgtgcacaaggtgagcacagaacctaga

SEQ ID NO: 89785 - DNA, 120 bp, Artificial Sequence
  ENSG00000087152_40 (sequence is synthesized)
aagggggccaggcgcttcctgcacactcaccatgggcatgggttgggagtacccctggacttgagcaatggggctcctgcccttccccttccctcctctaatgatgaggcctttggccac

SEQ ID NO: 89786 - DNA, 120 bp, Artificial Sequence
  ENSG00000087152_41 (sequence is synthesized)
aggggaggggctttacctgagttcctcagaaccctccctgccttgcctcaccaccaggtccctgcgctgcccacagcacacagatgagcagaggcgaaccgtacggatttattttctcgg

SEQ ID NO: 89787 - DNA, 120 bp, Artificial Sequence
  ENSG00000087152_42 (sequence is synthesized)
gccctcggcgtaagtggccctacaggaagggtggggggttgtgaccagttagggcgatgatcactatctctaaagcccttctttggctcatcccctttccagtgtccttccagaggtcga

SEQ ID NO: 89788 - DNA, 120 bp, Artificial Sequence
  ENSG00000087157_0 (sequence is synthesized)
ggaagcggcgagtctccatggcggtggcggcggcagctgcggcgggacccgtgttctggaggcgactgctgggcctcctgcctggccgcccagggctggccgcgctcctgggacgcctgt

SEQ ID NO: 89789 - DNA, 120 bp, Artificial Sequence
  ENSG00000087157_1 (sequence is synthesized)
ccgaccgcctcggcaggaaccgggaccgccagcgcaggaggtcaccatggctgttattggctcccttgctgtccccagctgttccccaggtcacctccccaccttgctgcctgtgtccag

SEQ ID NO: 89790 - DNA, 120 bp, Artificial Sequence
  ENSG00000087157_2 (sequence is synthesized)
aaggcgtgcaccggttccagtggatcagaaacctggttccagaatttggagtctccagttctcacgttagggtgctttcttccccggcagagtttttcgagctcatgaaggggcagataa

SEQ ID NO: 89791 - DNA, 120 bp, Artificial Sequence
  ENSG00000087157_3 (sequence is synthesized)
gagtagccaagaggcgggtcgtgatggcatccctctacctggggacaggtcctttggaacaggagctggtggactgcctggaaagtactctagaaaagtcactccaagcaaagtttcctt

SEQ ID NO: 89792 - DNA, 120 bp, Artificial Sequence
  ENSG00000087157_4 (sequence is synthesized)
caaatctcaaggtctccattctcttagacttcacgcggggctcacgaggccggaagaactcccgcacaatgctgctcccactcctgcggaggttcccagagcaggtccgagtctccctct

SEQ ID NO: 89793 - DNA, 120 bp, Artificial Sequence
  ENSG00000087157_5 (sequence is synthesized)
ttcacacgccgcacctccgtgggctgcttcggctcctcatccctgagcgcttcaacgagaccatcggcctccagcacattaaggtgtacctcttcgacaacagcgtcatcttgagcggtg

SEQ ID NO: 89794 - DNA, 120 bp, Artificial Sequence
  ENSG00000087157_6 (sequence is synthesized)
caaacctgagtgactcctacttcaccaaccgccaggaccgctacgtgttcctgcaggactgtgcggagattgccgacttcttcacggagctggtggacgcggtgggggatgtgtccctgc

SEQ ID NO: 89795 - DNA, 120 bp, Artificial Sequence
  ENSG00000087157_7 (sequence is synthesized)
agctgcagggggacgacacggtgcaggtggtggatgggatggtgcatccttacaaaggggaccgggccgagtactgcaaggcagccaataagagggtcatggatgtgatcaactcagcca

SEQ ID NO: 89796 - DNA, 120 bp, Artificial Sequence
  ENSG00000087157_8 (sequence is synthesized)
ggacccgccagcagatgctgcatgcccagaccttccacagcaactctcttttgacccaggaagatgcagcagctgctggggatcgcagaccagcccctgacacctggatttatccgctga

SEQ ID NO: 89797 - DNA, 120 bp, Artificial Sequence
  ENSG00000087157_9 (sequence is synthesized)
gagattcaaatcgatgagattgtcactgagaccctgttgactgaggcggagcgcggggcaaaggtctacctcaccactggctatttcaacctgacccaggcctacatggacctggtcttg

SEQ ID NO: 89798 - DNA, 120 bp, Artificial Sequence
  ENSG00000087157_10 (sequence is synthesized)
ggcactcgggctgagtaccagatcctgctggcctcaccagaggtgaatggcttctttggggccaagggggtggccggcgccatcccagcggcctatgtgcacatcgagcgacagttcttc

SEQ ID NO: 89799 - DNA, 120 bp, Artificial Sequence
  ENSG00000087157_11 (sequence is synthesized)
agtgaggtgtgcagcctgggacagcaggagcgggtccagcttcaggagtactggcggaggggctggacgttccacgccaaaggcctctggctgtacctggcagggagcagcctgccctgt

SEQ ID NO: 89800 - DNA, 120 bp, Artificial Sequence
  ENSG00000087157_12 (sequence is synthesized)
ctcacgctgattggctctcctaattttgggtacaggtcagttcaccgggacctggaggcccagattgcgatcgtgacggagaaccaggccctgcagcagcagcttcaccaggagcaagag

SEQ ID NO: 89801 - DNA, 120 bp, Artificial Sequence
  ENSG00000087157_13 (sequence is synthesized)
cagctctacctgaggtcaggtgtggtgtcctctgccaccttcgagcagccgagtcgccaggtgaagctgtgggtgaagatggtgactccactgatcaagaacttcttctgaggacagaca

SEQ ID NO: 89802 - DNA, 120 bp, Artificial Sequence
  ENSG00000087157_14 (sequence is synthesized)
ggaatggccttgatgaagatgacaggcatggccggggtcagctctttcagccgcgcttcagcgatgactccagtctgggtgtcccagcgagcccctgcagggacagtatggctgagggtc

SEQ ID NO: 89803 - DNA, 120 bp, Artificial Sequence
  ENSG00000087157_15 (sequence is synthesized)
aggtgtgctgccagtaagtgagggaggggctggcaggaagggtggggtcctcacactccccgccctctgcagagctgggctctaccccaaaaggcttcaggccagctgccacggctggaa

SEQ ID NO: 89804 - DNA, 120 bp, Artificial Sequence
  ENSG00000087157_16 (sequence is synthesized)
gcagaggccttcgtaggtgatggcctgcatgttgtaactaccccgtcccgctgggctcaaggaacagctcagctaaagccctcgggttccatccgtttaaatctgtggcattttcagagc

SEQ ID NO: 89805 - DNA, 120 bp, Artificial Sequence
  ENSG00000087157_17 (sequence is synthesized)
ctcatctgtcagccttaatgtcagtggcaggaagtcataactccagctaaaaattacagagtaaagttccctgattcttaatgtgtaatgtctgccctatgtgtacatacacaatataat

SEQ ID NO: 89806 - DNA, 120 bp, Artificial Sequence
  ENSG00000087157_18 (sequence is synthesized)
tatacatctgtgcatataaatattgcctttaaccagactgctattatttctactcgccctatttaatggtgtttttatttcctgtctgaaatctcaaaataaacaaacatggagagctta

SEQ ID NO: 89807 - DNA, 120 bp, Artificial Sequence
  ENSG00000087157_19 (sequence is synthesized)
cttctgccctgggctgactgctccgtggcagggaaagcctgggcttttcagcgcttttcatcacgtcggagctgctctctcacaagctctgctgttttcattaaagcagaggccaggtga

SEQ ID NO: 89808 - DNA, 120 bp, Artificial Sequence
  ENSG00000087157_20 (sequence is synthesized)
atcacctctcagcacgattttcccgagagttcacaggtggggcaggtggttgttctgactcaaccagagcttccagagggctctttgatccctttctcagttaaacacagagcagcatct

SEQ ID NO: 89809 - DNA, 120 bp, Artificial Sequence
  ENSG00000087157_21 (sequence is synthesized)
tcaggggtatggcagctgtcctcaaagttagaagctggatgctaaattaggcagtctgttcactttccatctggtacccactccactaagtcccaaggcgcctgtgctggggtcggcagt

SEQ ID NO: 89810 - DNA, 120 bp, Artificial Sequence
  ENSG00000087157_22 (sequence is synthesized)
ggcagcctgtagtccccttctgctctcccttcccagggggtcctgaagaagccctggggcaagggctcagggatgagggggcagaaaggcagattgagcccctccaagctgagcacactg

SEQ ID NO: 89811 - DNA, 120 bp, Artificial Sequence
  ENSG00000087157_23 (sequence is synthesized)
gtgcaggagatgtagacgtgggaggaggggagcacgtttgctcgtgagagtggctctggcttgctgccctggccggctgtagtgcacagggtggggcgtcggtagagccagaccgtgggc

SEQ ID NO: 89812 - DNA, 120 bp, Artificial Sequence
  ENSG00000087157_24 (sequence is synthesized)
tgctgcctggacgcctcgctgacatccctgtgctgcggttacagagctgcgcccttctagactctggaagttgagtaacaggacctgctctgcccacccaggaggggcctgccgcttcac

SEQ ID NO: 89813 - DNA, 120 bp, Artificial Sequence
  ENSG00000087157_25 (sequence is synthesized)
ggtccgggcagggggtggctgccattaaaggtggggtctttgctgagtgaccttttgtgtcctggatccctcagggcctggactgcactccgggtggggtcaggctcccgaggcccctgc

SEQ ID NO: 89814 - DNA, 120 bp, Artificial Sequence
  ENSG00000087157_26 (sequence is synthesized)
tctctggttctggatgttgtgggtagttctgttgctttggatggctgggcctttggatggtggcttgtggggaagggacggtgaggagtcaaagatgagccaggacccatgtggccggca

SEQ ID NO: 89815 - DNA, 120 bp, Artificial Sequence
  ENSG00000087157_27 (sequence is synthesized)
catgcgctagtgccggcatctcatgtgtgcagcgtgggctcccttagtgcctggcaccttagtgctctgctaagtctcattgtttaaaaatgtgtagtttatctgcagcttttcctagtt

SEQ ID NO: 89816 - DNA, 120 bp, Artificial Sequence
  ENSG00000087157_28 (sequence is synthesized)
attttaattacttttcattttatttgaatagtgtgtgcaaatgtagagagtaaaacaatactgcggccatttcctgccctcccttcccccaggcagccactcttggcttgtttcttctga

SEQ ID NO: 89817 - DNA, 120 bp, Artificial Sequence
  ENSG00000087157_29 (sequence is synthesized)
tgtgcacacgtgtccgtatttctaaataacgtgcatatcctgctgtcttcccccaaaatgtgtacttaaccaaaacagcaccagtgtcactcctgaaacaaaaattaccaagaatgtctt

SEQ ID NO: 89818 - DNA, 120 bp, Artificial Sequence
  ENSG00000087157_30 (sequence is synthesized)
agtatcatcaaatacctaaatggtgttcacaattccacttgccttaaaattaattttttcgattatttgacttgaagtccaattaaggactacaccttgtgattgttttttccctagcaa

SEQ ID NO: 89819 - DNA, 120 bp, Artificial Sequence
  ENSG00000087157_31 (sequence is synthesized)
tttattttttgaagaatgaactttatttttattggatctacttaaaacatttttgtgtcacctagtagcaggggattttgaatacatgtcatgtgtgtttataaagccagctctccatat

SEQ ID NO: 89820 - DNA, 120 bp, Artificial Sequence
  ENSG00000087157_32 (sequence is synthesized)
cccccagtgtctccaggagctgcttttgtgacctcactgcctgatctctttatcatcttcaggtgcttgacccttgcacagagagaagcttcctgggctacagggcatggcagcctgtcc

SEQ ID NO: 89821 - DNA, 120 bp, Artificial Sequence
  ENSG00000087157_33 (sequence is synthesized)
tttcggggagtgagattagatttagtccctgcactttgcctctctagaagcagcttctcgcctttccctcccgagggctggcaggagtcactgtcacccttcatggggtctgaaaggttg

SEQ ID NO: 89822 - DNA, 120 bp, Artificial Sequence
  ENSG00000087157_34 (sequence is synthesized)
cataggctcacctggtcttagacaaggacagttgcagcttccgcaccaggcagacctgcagtttgagtggctggggataggtggagcggcggcctggccacagtgccctggacagcagca

SEQ ID NO: 89823 - DNA, 120 bp, Artificial Sequence
  ENSG00000087157_35 (sequence is synthesized)
catcacatcagttaacactgtttgccttccaactagttattacggtgtcctgtgggacaattagactggaggagccaaaggaatgtgcaggggcactgggtttctgtttggagagaggct

SEQ ID NO: 89824 - DNA, 120 bp, Artificial Sequence
  ENSG00000087157_36 (sequence is synthesized)
ctcggtaaacagagttcgcattcctccagattctgtgggaccagagtaaatatcattatgccacagccaggcttaagcaatctatctgcagtgccgttcccgcagcgcacactgctccct

SEQ ID NO: 89825 - DNA, 120 bp, Artificial Sequence
  ENSG00000087157_37 (sequence is synthesized)
ctgtctctgctgatgaccttcgaggctgtcctaggcaggttctccctgaggagctccccacaccaagcctccctaactctgcaaagcagccggagcaacagagagcagcgggcggcgggc

SEQ ID NO: 89826 - DNA, 77 bp, Artificial Sequence
  ENSG00000087157_38 (sequence is synthesized)
cctggccgcccagggctggccgcgctcctgggacgcctgtccgaccgcctcggcaggaaccgggaccgccagcgcag

SEQ ID NO: 89827 - DNA, 120 bp, Artificial Sequence
  ENSG00000087157_39 (sequence is synthesized)
gccgcccagggctggccgcgctcctgggacgcctgtccgaccgcctcggcaggaaccgggaccgccagcgcaggagagtcttgttctgtcactcaggctggagtgcagtggtctgatctc

SEQ ID NO: 89828 - DNA, 120 bp, Artificial Sequence
  ENSG00000087191_0 (sequence is synthesized)
gcttccgcgcttgcgcgccaagacggctcggatgccggcggtctctgctgaagagagaagatggcgcttgacggaccagagcagatggagctggaggaggggaaggcaggcagcggactc

SEQ ID NO: 89829 - DNA, 120 bp, Artificial Sequence
  ENSG00000087191_1 (sequence is synthesized)
cgccaatattatctgtccaagattgaagaactccagctgattgtgaatgataagagccaaaacctccggaggctgcaggcacagaggaacgaactaaatgctaaagttcgcctattgcgg

SEQ ID NO: 89830 - DNA, 120 bp, Artificial Sequence
  ENSG00000087191_2 (sequence is synthesized)
gaggagctacagctgctgcaggagcagggctcctatgtgggggaagtagtccgggccatggataagaagaaagtgttggtcaaggtacatcctgaaggtaaatttgttgtagacgtggac

SEQ ID NO: 89831 - DNA, 120 bp, Artificial Sequence
  ENSG00000087191_3 (sequence is synthesized)
aaaaacattgacatcaatgatgtgacacccaattgccgggtggctctaaggaatgacagctacactctgcacaagatcctgcccaacaaggtagacccattagtgtcactgatgatggtg

SEQ ID NO: 89832 - DNA, 120 bp, Artificial Sequence
  ENSG00000087191_4 (sequence is synthesized)
gagaaagtaccagattcaacttatgagatgattggtggactggacaaacagatcaaggagatcaaagaagtgatcgagctgcctgttaagcatcctgagctcttcgaagcactgggcatt

SEQ ID NO: 89833 - DNA, 120 bp, Artificial Sequence
  ENSG00000087191_5 (sequence is synthesized)
gggagtgctgctgtatggacctccaggcactgggaagacactgttggcccgggctgtggctcatcatacggactgtacctttattcgtgtctctggctctgaactggtacagaaattcat

SEQ ID NO: 89834 - DNA, 120 bp, Artificial Sequence
  ENSG00000087191_6 (sequence is synthesized)
aggggaaggggcaagaatggtgagggagctgtttgtcatggcacgggaacatgctccatctatcatcttcatggacgaaatcgactccatcggctcctcgcggctggaggggggttctgg

SEQ ID NO: 89835 - DNA, 120 bp, Artificial Sequence
  ENSG00000087191_7 (sequence is synthesized)
aggggacagtgaagtgcagcgcacgatgctggagttgctcaaccagctcgacggctttgaggccaccaagaacatcaaggttatcatggctactaataggattgatatcctggactcggc

SEQ ID NO: 89836 - DNA, 120 bp, Artificial Sequence
  ENSG00000087191_8 (sequence is synthesized)
actgcttcgcccagggcgcattgacagaaaaattgaattcccaccccccaatgaggaggcccggctggacattttgaagattcattctcggaagatgaacctgacccgggggatcaacct

SEQ ID NO: 89837 - DNA, 120 bp, Artificial Sequence
  ENSG00000087191_9 (sequence is synthesized)
gagaaaaattgctgagctcatgccaggagcatcaggggctgaagtgaagggcgtgtgcacagaagctggcatgtatgccctgcgagaacggcgagtccatgtcactcaggaggactttga

SEQ ID NO: 89838 - DNA, 120 bp, Artificial Sequence
  ENSG00000087191_10 (sequence is synthesized)
gatggcagtagccaaggtcatgcagaaggacagtgagaaaaacatgtccatcaagaaattatggaagtgagtggacagcctttgtgtgtatctctccaataaagctctgtgggccaagtc

SEQ ID NO: 89839 - DNA, 120 bp, Artificial Sequence
  ENSG00000087191_11 (sequence is synthesized)
ggatgccggcggtctctgctgaagagagaagatggcgcttgacggaccagagcaggtatggcgggtgcagtggcggcccggcaggttacggggctgggtgcggagcgagcgtgatctgag

SEQ ID NO: 89840 - DNA, 120 bp, Artificial Sequence
  ENSG00000087191_12 (sequence is synthesized)
tggagagcgggccggggcaggagcgtcgggtgggtcggaggtgcctggaccagtccatgctggacgctgcctgcgaccggatctgctgtgtcagcgccgccctcggtgagtcagggcaag

SEQ ID NO: 89841 - DNA, 120 bp, Artificial Sequence
  ENSG00000087191_13 (sequence is synthesized)
tgggagaggaagacgcggtagaagcggagtgagtgagggaagcgatgggcgcgggaatggccggcccacgggtcgcaggagacgggacgccagtcctttggctccgttccgctggctcct

SEQ ID NO: 89842 - DNA, 120 bp, Artificial Sequence
  ENSG00000087191_14 (sequence is synthesized)
tcgtcagtactgacacctcgggcttgtagagcacttcacgcagtgcaaagcgccccccgtctatatcatatcgcctctcggtcctcctaaaagtcgtatgagactcactctgtgtcttca

SEQ ID NO: 89843 - DNA, 120 bp, Artificial Sequence
  ENSG00000087191_15 (sequence is synthesized)
tggagagcgggccggggcaggagcgtcgggtgggtccatggattttcaatttcaccctaaccccctgcgttgttcaagtgtcaactgtaatataaattggatgggggaaagccacaaaag

SEQ ID NO: 89844 - DNA, 120 bp, Artificial Sequence
  ENSG00000087191_16 (sequence is synthesized)
acaattctgaattccaagtgcatttgcaggtattatgtttagtttaccatttttgaatgctttttcatgtgtttttattcgttcaccttagtagtcttgaagcagggtagctgatgctat

SEQ ID NO: 89845 - DNA, 120 bp, Artificial Sequence
  ENSG00000087191_17 (sequence is synthesized)
acccatgtgccgtttggtaacagatctagatttttaaaaatagattgtcttacctttactttgcttttgattgacagcggctgggctagaactcaggtttctcacctaacaatctttcca

SEQ ID NO: 89846 - DNA, 120 bp, Artificial Sequence
  ENSG00000087191_18 (sequence is synthesized)
ccaggtgttgttgccttcctgcaagaaatttggtgttacatgagccagctgtaacttttctccattagattctgttactcctggaccagtattggacaagcagccttctttgatggctgc

SEQ ID NO: 89847 - DNA, 120 bp, Artificial Sequence
  ENSG00000087191_19 (sequence is synthesized)
tgtaaggtccagagggactcttgaaggacagggcagggtcattaggatcatactggagaatctgaaacaacatgcaggtgccctgtgcccttccctcagctcattcagacctgtgaggtc

SEQ ID NO: 89848 - DNA, 120 bp, Artificial Sequence
  ENSG00000087191_20 (sequence is synthesized)
aacgaactaaatgctaaaggtgagtggagaaagatgggaagccgcatgtgggcagtttgtctgaggtctgtccttatctccctgcactgtgtcttcacagcagtgcttactgttttctcc

SEQ ID NO: 89849 - DNA, 120 bp, Artificial Sequence
  ENSG00000087191_21 (sequence is synthesized)
atgaattttgacctttggccttcctttaataagagtgatgcttagctcatgcacgtagaattgggtcctggagactccaaaggagtagctaggtgaccactgtgtctgtttgccatctag

SEQ ID NO: 89850 - DNA, 120 bp, Artificial Sequence
  ENSG00000087191_22 (sequence is synthesized)
ttcgcctattgcgggaggagctacagctgctgcaggagcagggctcctatgtgggggaagtagtccgggccatggataagaagaaagtgttggtcaaggtaaaagcagcatgaccccagg

SEQ ID NO: 89851 - DNA, 120 bp, Artificial Sequence
  ENSG00000087191_23 (sequence is synthesized)
gaccagctcggtctccactgcattcccacccctttgtgtgtagcctcgggagacagggttctgtgttctgtcaaggtattgtgggattctcataggtcttcctgggtaggattagtgatt

SEQ ID NO: 89852 - DNA, 120 bp, Artificial Sequence
  ENSG00000087191_24 (sequence is synthesized)
taataagctccctaacaccagctcggcctccacacaggggcaagaatggtgagggagctgtttgtcatggcacgggaacatgctccatctatcatcttcatggacgaaatcgactccatc

SEQ ID NO: 89853 - DNA, 120 bp, Artificial Sequence
  ENSG00000087191_25 (sequence is synthesized)
actaataggattgatatcctggactcggcactgcttcgcccagggcgcattgacagaaaaattgaattcccaccccccaatgaggaggtttgtgatggacactgtgcaaagtggctctgg

SEQ ID NO: 89854 - DNA, 120 bp, Artificial Sequence
  ENSG00000087191_26 (sequence is synthesized)
ctgtgggggtggggtgtggggctcaggcttttccttgccatctccaggcccggctggacattttgaagattcattctcggaagatgaacctgacccgggggatcaacctgagaaaaattg

SEQ ID NO: 89855 - DNA, 120 bp, Artificial Sequence
  ENSG00000087191_27 (sequence is synthesized)
ttccgcgcttgcgcgccaagacggctcggatgccggcggtctctgctgaagagagaagatggcgcttgacggaccagagcaggtatggcgggtgcctggaccagtccatgctggacgctg

SEQ ID NO: 89856 - DNA, 120 bp, Artificial Sequence
  ENSG00000087191_28 (sequence is synthesized)
gaccttgatgttccttttttttttttgtatccctaacatctagcaagggacccagcactcggtaaatgttcactgaatgaaatgaggggtgtagctttctgccctgagtcctgctgttcc

SEQ ID NO: 89857 - DNA, 120 bp, Artificial Sequence
  ENSG00000087191_29 (sequence is synthesized)
actccaggtgaggacggactccagagggagctaggaagggtgatgatgggggatggaaacggacttccacaaatccatctaattcctttgggagtgcagtggaagaagctgctgcttctc

SEQ ID NO: 89858 - DNA, 120 bp, Artificial Sequence
  ENSG00000087191_30 (sequence is synthesized)
ctttcttgtttgtttcttagctagtagggtgtatgtatcagaagtaagcaatctcttgttctcctccagtcccatctctttgagggtcttagtgttcacagtttgttacacatcttcgag

SEQ ID NO: 89859 - DNA, 120 bp, Artificial Sequence
  ENSG00000087191_31 (sequence is synthesized)
tcaaatcttaatagtaaaggtacctctagccaaaggtcaacccttttggaagaagcccgaatgaaaaggattcttataaaagggaaacataagctcaggagttgaaatttatcaccaaga

SEQ ID NO: 89860 - DNA, 120 bp, Artificial Sequence
  ENSG00000087191_32 (sequence is synthesized)
ggttgggtgagggtgaagtgagaatgtgaggaagggcatcattgagggatctggacaatgctaattccatagagactgaatgaaagaaattgggcaacccagagccctagcctaaagcgc

SEQ ID NO: 89861 - DNA, 120 bp, Artificial Sequence
  ENSG00000087191_33 (sequence is synthesized)
taaaccatagaaaaaggaccgtttatgttgttaatcaaatgtttgtgttaccagtaaggcttccagcagtaaggtatggcttccagtagtaagccttacagacaacataaacagtagtct

SEQ ID NO: 89862 - DNA, 120 bp, Artificial Sequence
  ENSG00000087191_34 (sequence is synthesized)
tgaagagagaagatggcgcttgacggaccagagcagatggagctggaggaggggaaggcaggcagcggactccgccaatattatctgtccaagattgaagaactccagttcgcctattgc

SEQ ID NO: 89863 - DNA, 120 bp, Artificial Sequence
  ENSG00000087191_35 (sequence is synthesized)
tccgccattttgagtgtggccctagattgttctcaatactctgtccttgggttttgtcccaatcctccgcttccgcgcttgcgcgccaagacggctcggatgccggcggtctctgctgaa

SEQ ID NO: 89864 - DNA, 120 bp, Artificial Sequence
  ENSG00000087191_36 (sequence is synthesized)
ccgtctatatcatatcgcctctcggtcctcctaaaagtcgtatgaggtaggcggcgttcccattcttttattttagtcctgggaaaatggagggttccaagggagggagggattagaacc

SEQ ID NO: 89865 - DNA, 120 bp, Artificial Sequence
  ENSG00000087191_37 (sequence is synthesized)
cagatcctgagcctccgaagtccaaactttttctactacgcaaagctacctggtgtcaagccttattcaaagtgccctgcaagtggctttaccccctcggatgtttaacctgtcgtttaa

SEQ ID NO: 89866 - DNA, 120 bp, Artificial Sequence
  ENSG00000087206_0 (sequence is synthesized)
gggctcgggatgcggggctgggaccctcccgattccggggcggattccggacgccgggaccggccattactggtgccgggttgggcttctccagatgccggggctgggtccttcccaagg

SEQ ID NO: 89867 - DNA, 120 bp, Artificial Sequence
  ENSG00000087206_1 (sequence is synthesized)
ttgagacaaaaggatgccacggagaaagaaaaaagttaaagaagtctccgaatctcggaacctggagaagaaggatgtggaaactaccagttctgtcagtgtgaagaggaagcgtagact

SEQ ID NO: 89868 - DNA, 120 bp, Artificial Sequence
  ENSG00000087206_2 (sequence is synthesized)
tgaggatgcattcattgtgatatccgatagtgatggagaggaaccaaaggaggaaaatgggttgcagaaaacgaagacaaaacagtcgaatagagcaaagtgtttggccaaaagaaaaat

SEQ ID NO: 89869 - DNA, 120 bp, Artificial Sequence
  ENSG00000087206_3 (sequence is synthesized)
cgcacagatgacagaagaagaacagtttgctctggctctcaaaatgagtgagcaggaagctagggaggtgaacagccaggaggaggaagaagaggagctcttgaggaaagccattgctga

SEQ ID NO: 89870 - DNA, 120 bp, Artificial Sequence
  ENSG00000087206_4 (sequence is synthesized)
aagcctgaatagttgccggccttctgatgcttccgctaccagatctcgacctctggccactggaccgtcttcccagtcccatcaagagaaaaccacagactctgggctcactgaaggcat

SEQ ID NO: 89871 - DNA, 120 bp, Artificial Sequence
  ENSG00000087206_5 (sequence is synthesized)
atggcagctggtacctccatcactgtttaaaggctcacatatcagtcagggaaacgaggctgaggaaagagaggagccttgggaccacactgaaaaaactgaagaggagccggtctctgg

SEQ ID NO: 89872 - DNA, 120 bp, Artificial Sequence
  ENSG00000087206_6 (sequence is synthesized)
cagctcaggaagctgggaccagtcaagccagccagtgtttgagaatgtgaacgttaaatcttttgacagatgtactggccactcggctgagcacacacagtgtgggaagccacaggaaag

SEQ ID NO: 89873 - DNA, 120 bp, Artificial Sequence
  ENSG00000087206_7 (sequence is synthesized)
tactgggaggggttctgcttttctcaaagctgtccagggtagcggggacacatctaggcactgtctacctaccctagcagatgccaaaggtctccaggacactgggggcactgtgaacta

SEQ ID NO: 89874 - DNA, 120 bp, Artificial Sequence
  ENSG00000087206_8 (sequence is synthesized)
tttctggggtattccattctgccctgatggagtagaccctaaccagtataccaaggtcattctctgccagttggaggtttatcaaaagagcctgaaaatggctcagaggcagctccttaa

SEQ ID NO: 89875 - DNA, 120 bp, Artificial Sequence
  ENSG00000087206_9 (sequence is synthesized)
taaaaaaggttttggggaaccagtgttacctagacctccttctctgatccagaatgaatgtggccaaggagagcaggctagtgagaaaaatgaatgcatctcagaagatatgggagatga

SEQ ID NO: 89876 - DNA, 120 bp, Artificial Sequence
  ENSG00000087206_10 (sequence is synthesized)
ccaaggatttccaggaaagctcaattaaaagcttgaaagagaaacttttgttggaggaagaaccaacaaccagtcatggtcagtcttcccaagggattgttgaagaaacttctgaagagg

SEQ ID NO: 89877 - DNA, 120 bp, Artificial Sequence
  ENSG00000087206_11 (sequence is synthesized)
gaaactctgtacctgcttcacaaagtgttgctgctttgaccagtaagagaagcttagtccttatgccagagagttctgcagaagaaatcactgtttgtcctgagacccagctaagttcct

SEQ ID NO: 89878 - DNA, 120 bp, Artificial Sequence
  ENSG00000087206_12 (sequence is synthesized)
ctgaaacttttgaccttgaaagagaagtctctccaggtagcagagatatcttggatggagtcagaataataatggcagataaggaggttggtaacaaggaagatgctgagaaggaagtag

SEQ ID NO: 89879 - DNA, 120 bp, Artificial Sequence
  ENSG00000087206_13 (sequence is synthesized)
ctatttctaccttctcatccagtaaccaggtatcctgcccgctatgtgaccaatgctttccacccacaaagattgaacgacatgccatgtactgcaatggtctgatggaggaagatacag

SEQ ID NO: 89880 - DNA, 120 bp, Artificial Sequence
  ENSG00000087206_14 (sequence is synthesized)
tattgactcggagacaaaaagaggccaagaccaagagtgacagtgggacagctgcccagacttctctagacattgacaagaatgagaagtgttacctctgtaaatccctggtcccattta

SEQ ID NO: 89881 - DNA, 120 bp, Artificial Sequence
  ENSG00000087206_15 (sequence is synthesized)
gagagtatcagtgtcatgtggactcctgtctccagcttgcaaaggctgaccaaggagatggacctgaagggagtggaagagcatgttcaactgtggaggggaagtggcagcagaggctga

SEQ ID NO: 89882 - DNA, 120 bp, Artificial Sequence
  ENSG00000087206_16 (sequence is synthesized)
agaacccaaaggaaaaaggccacagtgaaggccgactccttagtttcttggaacagtctgagcacaagacttcagatgcagacatcaagtcttcagaaacaggagccttcagggtgcctt

SEQ ID NO: 89883 - DNA, 120 bp, Artificial Sequence
  ENSG00000087206_17 (sequence is synthesized)
caccagggatggaagaggcaggctgcagcagagagatgcagagttctttcacacgtcgtgacttaaatgaatctcccgtcaagtcttttgtttccatttcagaagccacagattgcttag

SEQ ID NO: 89884 - DNA, 120 bp, Artificial Sequence
  ENSG00000087206_18 (sequence is synthesized)
tggactttaaaaagcaagttactgtccagccaggtagtcggacacggaccaaagctggcagaggaagaaggagaaaattctgaatttctagggtccaaaagttgacaaaaccattagtag

SEQ ID NO: 89885 - DNA, 120 bp, Artificial Sequence
  ENSG00000087206_19 (sequence is synthesized)
gaggggtgggccatgttcattaagccatagtggtccctagttcattgttgagcaagttttagccctgcagttttcaccaccagcacctacccagcattctggtttttatgttttttatga

SEQ ID NO: 89886 - DNA, 120 bp, Artificial Sequence
  ENSG00000087206_20 (sequence is synthesized)
tctatgcagacaactgtgtattctgttttataacagtttgtttgaatttacttacagttaaaaaatttaaatatatttatgtttgtacgaaatcttatttcaatagatggaaattttaat

SEQ ID NO: 89887 - DNA, 120 bp, Artificial Sequence
  ENSG00000087206_21 (sequence is synthesized)
gcccgccccgagagcgtgtctctggcatcggacgcgcgcgcccctccccctccccccgcgctcccaacgtgtggcggctcgcgacccccggcaacccggagaaggtctacagagcggcct

SEQ ID NO: 89888 - DNA, 120 bp, Artificial Sequence
  ENSG00000087206_22 (sequence is synthesized)
actctccgggaggggcgcttcccgacgccaagtcttactgttgctcaggctggaatgcagtggtgcgctctcggctcactgcaacctctcccttctgggttcaagcgattctcgtgcctc

SEQ ID NO: 89889 - DNA, 120 bp, Artificial Sequence
  ENSG00000087206_23 (sequence is synthesized)
agtagctgggattacagacaaaaggatgccacggagaaagaaaaaagttaaagaagtctccgaatctcggaacctggagaagaaggatgtggaaactaccagttctgtcagtgtgaagag

SEQ ID NO: 89890 - DNA, 120 bp, Artificial Sequence
  ENSG00000087206_24 (sequence is synthesized)
caaaagacttccctagagctgtggcccccacaccttttctcttctatgaacacgtgtgatctgggctgtggaagttgtattttagactctgacatgaagtaaccttttcatctgtttttc

SEQ ID NO: 89891 - DNA, 120 bp, Artificial Sequence
  ENSG00000087206_25 (sequence is synthesized)
tctgttacaggaaaaaggccacagtgaaggccgactccttagtttcttggaacagtctgagcacaagacttcagatgcagacatcaagtcttcagaaacaggagccttcaggtgaattgg

SEQ ID NO: 89892 - DNA, 120 bp, Artificial Sequence
  ENSG00000087206_26 (sequence is synthesized)
ggaactattatgacctctctctcagtatgactctgtgctccccatttagctaaagattggataactcaattcattcattgtgttaaaacaaacagagtgaaagttatgtcttattcttct

SEQ ID NO: 89893 - DNA, 120 bp, Artificial Sequence
  ENSG00000087206_27 (sequence is synthesized)
gtacctctctatccccatccaaccctggttttctgacctggattctcaagcagcttgggaatttggatctcagttctcattctctcaatggccagctttaagtagtatatgatttaccca

SEQ ID NO: 89894 - DNA, 120 bp, Artificial Sequence
  ENSG00000087206_28 (sequence is synthesized)
ttgatcagctatatttttgacttctgtggtgttgtagttgcattaggaactagctgtagtcatttatagggttttcacctaacaaaaattcccatagtaattttttaaagtctgtgttga

SEQ ID NO: 89895 - DNA, 120 bp, Artificial Sequence
  ENSG00000087206_29 (sequence is synthesized)
agttttcttccaccccatggattttttagttcatggttgaaagaattatcataagttgacagcttctgaaaagacttactgaataccaagaaccagaaggcagcaagataagatgctaac

SEQ ID NO: 89896 - DNA, 120 bp, Artificial Sequence
  ENSG00000087206_30 (sequence is synthesized)
ttctctagtattgtgggagagcaaagggaatgagaactagaggtggattatgggaagaaagaatgggcagttttaaaaaaataatgaaataaagttaaattgtcatttgaatatgcacaa

SEQ ID NO: 89897 - DNA, 66 bp, Artificial Sequence
  ENSG00000087206_31 (sequence is synthesized)
tagccacctcgcccagcctgaaatgattttaaatgtgaaggatacttgccagtggcaggtcctgaa

SEQ ID NO: 89898 - DNA, 120 bp, Artificial Sequence
  ENSG00000087206_32 (sequence is synthesized)
gcttattttgctttgctacctctggtacctcagagcgtgtgccgtggattcggaaacctgtcgctgattccgcagcagtgacccccccctcccggagaggctcgtgtggttttggctcat

SEQ ID NO: 89899 - DNA, 120 bp, Artificial Sequence
  ENSG00000087206_33 (sequence is synthesized)
aacgtgtggcggctcgcgacccccggcaacccggagaaggtctacagagcggcctgcgccagcgagttgaagaaaaaaaacaacaacctaggatcagtttggggagaattgatatgttta

SEQ ID NO: 89900 - DNA, 120 bp, Artificial Sequence
  ENSG00000087206_34 (sequence is synthesized)
ccctgggatgccagtagtatggctcagtggaagtctgaaggcctgaggacaaggggaaccaaaggaggaaaatgggttgcagaaaacgaagacaaaacagtcgaatagagcaaagtgttt

SEQ ID NO: 89901 - DNA, 120 bp, Artificial Sequence
  ENSG00000087206_35 (sequence is synthesized)
ggggatctgtgctacctggataggcctgatgagaagcagtgcctagagcacggaagcaaaagatcagtgagaagtgctatgattaccaacactactaccaacattattattttttctttt

SEQ ID NO: 89902 - DNA, 120 bp, Artificial Sequence
  ENSG00000087237_0 (sequence is synthesized)
gggccacttacacaccactgcctgataaccatgctggctgccacagtcctgaccctggccctgctgggcaatgcccatgcctgctccaaaggcacctcgcacgaggcaggcatcgtgtgc

SEQ ID NO: 89903 - DNA, 120 bp, Artificial Sequence
  ENSG00000087237_1 (sequence is synthesized)
cgcatcaccaagcctgccctcctggtgttgaaccacgagactgccaaggtgatccagaccgccttccagcgagccagctacccagatatcacgggcgagaaggccatgatgctccttggc

SEQ ID NO: 89904 - DNA, 120 bp, Artificial Sequence
  ENSG00000087237_2 (sequence is synthesized)
caagtcaagtatgggttgcacaacatccagatcagccacttgtccatcgccagcagccaggtggagctggtggaagccaagtccattgatgtctccattcagaacgtgtctgtggtcttc

SEQ ID NO: 89905 - DNA, 120 bp, Artificial Sequence
  ENSG00000087237_3 (sequence is synthesized)
aaggggaccctgaagtatggctacaccactgcctggtggctgggtattgatcagtccattgacttcgagatcgactctgccattgacctccagatcaacacacagctgacctgtgactct

SEQ ID NO: 89906 - DNA, 120 bp, Artificial Sequence
  ENSG00000087237_4 (sequence is synthesized)
ggtagagtgcggaccgatgcccctgactgctacctgtctttccataagctgctcctgcatctccaaggggagcgagagcctgggtggatcaagcagctgttcacaaatttcatctccttc

SEQ ID NO: 89907 - DNA, 120 bp, Artificial Sequence
  ENSG00000087237_5 (sequence is synthesized)
accctgaagctggtcctgaagggacagatctgcaaagagatcaacgtcatctctaacatcatggccgattttgtccagacaagggctgccagcatcctttcagatggagacattggggtg

SEQ ID NO: 89908 - DNA, 120 bp, Artificial Sequence
  ENSG00000087237_6 (sequence is synthesized)
gacatttccctgacaggtgatcccgtcatcacagcctcctacctggagtcccatcacaagggtcatttcatctacaagaatgtctcagaggacctccccctccccaccttctcgcccaca

SEQ ID NO: 89909 - DNA, 120 bp, Artificial Sequence
  ENSG00000087237_7 (sequence is synthesized)
ctcccgcatgctgtacttctggttctctgagcgagtcttccactcgctggccaaggtagctttccaggatggccgcctcatgctcagcctgatgggagacgagttcaaggcagtgctgga

SEQ ID NO: 89910 - DNA, 120 bp, Artificial Sequence
  ENSG00000087237_8 (sequence is synthesized)
gacctggggcttcaacaccaaccaggaaatcttccaagaggttgtcggcggcttccccagccaggcccaagtcaccgtccactgcctcaagatgcccaagatctcctgccaaaacaaggg

SEQ ID NO: 89911 - DNA, 120 bp, Artificial Sequence
  ENSG00000087237_9 (sequence is synthesized)
agtcgtggtcaattcttcagtgatggtgaaattcctctttccacgcccagaccagcaacattctgtagcttacacatttgaagaggatatcgtgactaccgtccaggcctcctattctaa

SEQ ID NO: 89912 - DNA, 120 bp, Artificial Sequence
  ENSG00000087237_10 (sequence is synthesized)
gaaaaagctcttcttaagcctcttggatttccagattacaccaaagactgtttccaacttgactgagagcagctccgagtccgtccagagcttcctgcagtcaatgatcaccgctgtggg

SEQ ID NO: 89913 - DNA, 120 bp, Artificial Sequence
  ENSG00000087237_11 (sequence is synthesized)
catccctgaggtcatgtctcggctcgaggtagtgtttacagccctcatgaacagcaaaggcgtgagcctcttcgacatcatcaaccctgagattatcactcgagatggcttcctgctgct

SEQ ID NO: 89914 - DNA, 120 bp, Artificial Sequence
  ENSG00000087237_12 (sequence is synthesized)
gcagatggactttggcttccctgagcacctgctggtggatttcctccagagcttgagctagaagtctccaaggaggtcgggatggggcttgtagcagaaggcaagcaccaggctcacagc

SEQ ID NO: 89915 - DNA, 120 bp, Artificial Sequence
  ENSG00000087237_13 (sequence is synthesized)
tggaaccctggtgtctcctccagcgtggtggaagttgggttaggagtacggagatggagattggctcccaactcctccctatcctaaaggcccactggcattaaagtgctgtatccaaga

SEQ ID NO: 89916 - DNA, 120 bp, Artificial Sequence
  ENSG00000087237_14 (sequence is synthesized)
atgagacacacgttgggccatctcattccattttccgtgtctcttagttgctctgtcgtgttttccatctcttttatctctatcctaaattctggatagtttcttcaagtatctttttag

SEQ ID NO: 89917 - DNA, 120 bp, Artificial Sequence
  ENSG00000087237_15 (sequence is synthesized)
gtatctttttagttcattaattctttttacagctgtgtcttatttgtttacttacccactgagattttcattttattttatttaattaattaatttatttatttttgagacagagtctcg

SEQ ID NO: 89918 - DNA, 88 bp, Artificial Sequence
  ENSG00000087237_16 (sequence is synthesized)
tcagctcactgcaacctacgcctcctgtttggctggggttacaggggtgcaccactgtgcccagctcatttttttgtatttttagtag

SEQ ID NO: 89919 - DNA, 120 bp, Artificial Sequence
  ENSG00000087237_17 (sequence is synthesized)
tgagctcccgcaccccgccggccctttctttcttttgagctgagctatgtatttaatgaaaccttttcttgtgtatccagcggttcagtggtttcttggggcatgtgatctccttgagcc

SEQ ID NO: 89920 - DNA, 120 bp, Artificial Sequence
  ENSG00000087237_18 (sequence is synthesized)
cagtcccacaggctgtaatcgaaggtcctcaggccacactccccagccccgctggctgcctgcgcattccttatcttggccatgttccttccacagggctcttgtccacactgtcccctc

SEQ ID NO: 89921 - DNA, 120 bp, Artificial Sequence
  ENSG00000087237_19 (sequence is synthesized)
tgccagaatggtttgccctcccccatgccatctgctcctcctcctgccacctcagggaaggcctctcccacctccctgactaggtcaggtcccctcgtgccacagcctggtgtgtctctc

SEQ ID NO: 89922 - DNA, 120 bp, Artificial Sequence
  ENSG00000087237_20 (sequence is synthesized)
cccacccctagcccagctgctacagcagcttccctcggagggttaccatgcagtaggtcctgttctaagctctttccacagattatctcattccatcctcaggacaaccctatgaggtag

SEQ ID NO: 89923 - DNA, 120 bp, Artificial Sequence
  ENSG00000087237_21 (sequence is synthesized)
gatctatgattatccccattttacagatgaggaaagtgaggcccagaaggctaagtgaaggcatcctcagcacatcctgagagaggagttcagggtaggaatagcttcactagcacacag

SEQ ID NO: 89924 - DNA, 120 bp, Artificial Sequence
  ENSG00000087237_22 (sequence is synthesized)
atgagaaactgaggcccagagaggacaagagtcctaatttgcacagcctggggcctgggcactaccccgagctacttccttttccccagccctggggcccggagccagctttgtccttcc

SEQ ID NO: 89925 - DNA, 120 bp, Artificial Sequence
  ENSG00000087237_23 (sequence is synthesized)
agtgcatctgtctgccctgccaggggtcttttcatggacacccactatgccaggagcctccctggcctgaagccagccctgaagccggctgccacactagcccagagagaggagtgccct

SEQ ID NO: 89926 - DNA, 120 bp, Artificial Sequence
  ENSG00000087245_0 (sequence is synthesized)
gctgcatccagacttcctcaggcggtggctggaggctgcgcatctggggctttaaacatacaaagggattgccaggacctgcggcggcggcggcggcggcgggggctggggcgcgggggc

SEQ ID NO: 89927 - DNA, 120 bp, Artificial Sequence
  ENSG00000087245_1 (sequence is synthesized)
cggaccatgagccgctgagccgggcaaaccccaggccaccgagccagcggaccctcggagcgcagccctgcgccgcggagcaggctccaaccaggcggcgaggcggccacacgcaccgag

SEQ ID NO: 89928 - DNA, 120 bp, Artificial Sequence
  ENSG00000087245_2 (sequence is synthesized)
ccagcgacccccgggcgacgcgcggggccagggagcgctacgatggaggcgctaatggcccggggcgcgctcacgggtcccctgagggcgctctgtctcctgggctgcctgctgagccac

SEQ ID NO: 89929 - DNA, 120 bp, Artificial Sequence
  ENSG00000087245_3 (sequence is synthesized)
gccgccgccgcgccgtcgcccatcatcaagttccccggcgatgtcgcccccaaaacggacaaagagttggcagtgcaatacctgaacaccttctatggctgccccaaggagagctgcaac

SEQ ID NO: 89930 - DNA, 120 bp, Artificial Sequence
  ENSG00000087245_4 (sequence is synthesized)
ctgtttgtgctgaaggacacactaaagaagatgcagaagttctttggactgccccagacaggtgatcttgaccagaataccatcgagaccatgcggaagccacgctgcggcaacccagat

SEQ ID NO: 89931 - DNA, 120 bp, Artificial Sequence
  ENSG00000087245_5 (sequence is synthesized)
gtggccaactacaacttcttccctcgcaagcccaagtgggacaagaaccagatcacatacaggatcattggctacacacctgatctggacccagagacagtggatgatgcctttgctcgt

SEQ ID NO: 89932 - DNA, 120 bp, Artificial Sequence
  ENSG00000087245_6 (sequence is synthesized)
gccttccaagtctggagcgatgtgaccccactgcggttttctcgaatccatgatggagaggcagacatcatgatcaactttggccgctgggagcatggcgatggatacccctttgacggt

SEQ ID NO: 89933 - DNA, 120 bp, Artificial Sequence
  ENSG00000087245_7 (sequence is synthesized)
aaggacggactcctggctcatgccttcgccccaggcactggtgttgggggagactcccattttgatgacgatgagctatggaccttgggagaaggccaagtggtccgtgtgaagtatggg

SEQ ID NO: 89934 - DNA, 120 bp, Artificial Sequence
  ENSG00000087245_8 (sequence is synthesized)
aacgccgatggggagtactgcaagttccccttcttgttcaatggcaaggagtacaacagctgcactgataccggccgcagcgatggcttcctctggtgctccaccacctacaactttgag

SEQ ID NO: 89935 - DNA, 120 bp, Artificial Sequence
  ENSG00000087245_9 (sequence is synthesized)
aaggatggcaagtacggcttctgtccccatgaagccctgttcaccatgggcggcaacgctgaaggacagccctgcaagtttccattccgcttccagggcacatcctatgacagctgcacc

SEQ ID NO: 89936 - DNA, 120 bp, Artificial Sequence
  ENSG00000087245_10 (sequence is synthesized)
actgagggccgcacggatggctaccgctggtgcggcaccactgaggactacgaccgcgacaagaagtatggcttctgccctgagaccgccatgtccactgttggtgggaactcagaaggt

SEQ ID NO: 89937 - DNA, 120 bp, Artificial Sequence
  ENSG00000087245_11 (sequence is synthesized)
gccccctgtgtcttccccttcactttcctgggcaacaaatatgagagctgcaccagcgccggccgcagtgacggaaagatgtggtgtgcgaccacagccaactacgatgatgaccgcaag

SEQ ID NO: 89938 - DNA, 120 bp, Artificial Sequence
  ENSG00000087245_12 (sequence is synthesized)
tggggcttctgccctgaccaagggtacagcctgttcctcgtggcagcccacgagtttggccacgccatggggctggagcactcccaagaccctggggccctgatggcacccatttacacc

SEQ ID NO: 89939 - DNA, 120 bp, Artificial Sequence
  ENSG00000087245_13 (sequence is synthesized)
tacaccaagaacttccgtctgtcccaggatgacatcaagggcattcaggagctctatggggcctctcctgacattgaccttggcaccggccccacccccacgctgggccctgtcactcct

SEQ ID NO: 89940 - DNA, 120 bp, Artificial Sequence
  ENSG00000087245_14 (sequence is synthesized)
tcgctcagatccgtggtgagatcttcttcttcaaggaccggttcatttggcggactgtgacgccacgtgacaagcccatggggcccctgctggtggccacattctggcctgagctcccgg

SEQ ID NO: 89941 - DNA, 120 bp, Artificial Sequence
  ENSG00000087245_15 (sequence is synthesized)
aaaagattgatgcggtatacgaggccccacaggaggagaaggctgtgttctttgcagggaatgaatactggatctactcagccagcaccctggagcgagggtaccccaagccactgacca

SEQ ID NO: 89942 - DNA, 120 bp, Artificial Sequence
  ENSG00000087245_16 (sequence is synthesized)
gcctgggactgccccctgatgtccagcgagtggatgccgcctttaactggagcaaaaacaagaagacatacatctttgctggagacaaattctggagatacaatgaggtgaagaagaaaa

SEQ ID NO: 89943 - DNA, 120 bp, Artificial Sequence
  ENSG00000087245_17 (sequence is synthesized)
tggatcctggcttccccaagctcatcgcagatgcctggaatgccatccccgataacctggatgccgtcgtggacctgcagggcggcggtcacagctacttcttcaagggtgcctattacc

SEQ ID NO: 89944 - DNA, 120 bp, Artificial Sequence
  ENSG00000087245_18 (sequence is synthesized)
tgaagctggagaaccaaagtctgaagagcgtgaagtttggaagcatcaaatccgactggctaggctgctgagctggccctggctcccacaggcccttcctctccactgccttcgatacac

SEQ ID NO: 89945 - DNA, 120 bp, Artificial Sequence
  ENSG00000087245_19 (sequence is synthesized)
cgggcctggagaactagagaaggacccggaggggcctggcagccgtgccttcagctctacagctaatcagcattctcactcctacctggtaatttaagattccagagagtggctcctccc

SEQ ID NO: 89946 - DNA, 120 bp, Artificial Sequence
  ENSG00000087245_20 (sequence is synthesized)
ggtgcccaagaatagatgctgactgtactcctcccaggcgccccttccccctccaatcccaccaaccctcagagccacccctaaagagatactttgatattttcaacgcagccctgcttt

SEQ ID NO: 89947 - DNA, 120 bp, Artificial Sequence
  ENSG00000087245_21 (sequence is synthesized)
gggctgccctggtgctgccacacttcaggctcttctcctttcacaaccttctgtggctcacagaacccttggagccaatggagactgtctcaagagggcactggtggcccgacagcctgg

SEQ ID NO: 89948 - DNA, 120 bp, Artificial Sequence
  ENSG00000087245_22 (sequence is synthesized)
cacagggcagtgggacagggcatggccaggtggccactccagacccctggcttttcactgctggctgccttagaacctttcttacattagcagtttgctttgtatgcactttgttttttt

SEQ ID NO: 89949 - DNA, 120 bp, Artificial Sequence
  ENSG00000087245_23 (sequence is synthesized)
ctttgggtcttgttttttttttccacttagaaattgcatttcctgacagaaggactcaggttgtctgaagtcactgcacagtgcatctcagcccacatagtgatggttcccctgttcact

SEQ ID NO: 89950 - DNA, 120 bp, Artificial Sequence
  ENSG00000087245_24 (sequence is synthesized)
ctacttagcatgtccctaccgagtctcttctccactggatggaggaaaaccaagccgtggcttcccgctcagccctccctgcccctcccttcaaccattccccatgggaaatgtcaacaa

SEQ ID NO: 89951 - DNA, 120 bp, Artificial Sequence
  ENSG00000087245_25 (sequence is synthesized)
gtatgaataaagacacctactgagtggccgtgtttgccatctgttttagcagagcctagacaagggccacagacccagccagaagcggaaacttaaaaagtccgaatctctgctccctgc

SEQ ID NO: 89952 - DNA, 120 bp, Artificial Sequence
  ENSG00000087245_26 (sequence is synthesized)
agggcacaggtgatggtgtctgctggaaaggtcagagcttccaaagtaaacagcaagagaacctcagggagagtaagctctagtccctctgtcctgtagaaagagccctgaagaatcagc

SEQ ID NO: 89953 - DNA, 120 bp, Artificial Sequence
  ENSG00000087245_27 (sequence is synthesized)
aattttgttgctttattgtggcatctgttcgaggtttgcttcctctttaagtctgtttcttcattagcaatcatatcagttttaatgctactactaacaatgaacagtaacaataatatc

SEQ ID NO: 89954 - DNA, 120 bp, Artificial Sequence
  ENSG00000087245_28 (sequence is synthesized)
cccctcaattaatagagtgctttctatgtgcaaggcacttttcacgtgtcacctattttaacctttccaaccacataaataaaaaaggccattattagttgaatcttattgatgaagaga

SEQ ID NO: 89955 - DNA, 120 bp, Artificial Sequence
  ENSG00000087245_29 (sequence is synthesized)
acatccgagatgaacccagcccttggtgttcaaaatcactttaaggggaagtagagctttttctttcatgtacctggaccagtagttcacttactctgaaagtcaagaggccccatggac

SEQ ID NO: 89956 - DNA, 120 bp, Artificial Sequence
  ENSG00000087245_30 (sequence is synthesized)
tgcccagcccagctgctgtggaatgtggcagagaaagagggtgagagggcctggatgactcccatgctgggagtattatgcaaacgtgggagaaaaaaacatgcttcctctcctggccta

SEQ ID NO: 89957 - DNA, 120 bp, Artificial Sequence
  ENSG00000087245_31 (sequence is synthesized)
caggagcgcttgaaagcctgctcatctgcaagccctagggctggactctacatcacagcagtggatactccatctccattgagaacccgatgactggtcactgcccagccccaccctcga

SEQ ID NO: 89958 - DNA, 120 bp, Artificial Sequence
  ENSG00000087245_32 (sequence is synthesized)
cccaaccaggatgaagaatgggcaagccagatagctacagtaatcgacagacagacaaacaagagcatcgtatgacccaggggccaacaagtcccaccccagtgacaccatctcactttt

SEQ ID NO: 89959 - DNA, 120 bp, Artificial Sequence
  ENSG00000087245_33 (sequence is synthesized)
gcagagctcttgctcgcaaagtgcagctaggagaacccaggcctcctgatgacaaatgctccttctttctgccccccacgtgccaagagcgaggagggaagatagctgctggctcactgt

SEQ ID NO: 89960 - DNA, 120 bp, Artificial Sequence
  ENSG00000087245_34 (sequence is synthesized)
aatgcatgcctgccctcctgggaatgaagcacagcaggtctcagcctcatcttacccagccccccactcaagatggaggtgcctggtttgaacacctctgacaaatggaagtctgtgttg

SEQ ID NO: 89961 - DNA, 120 bp, Artificial Sequence
  ENSG00000087245_35 (sequence is synthesized)
tccagaggcaatgcagtgggggcttaagaagataactctggacttagaccgcttggcttcaaatcaaagagtgcatgaaccaaccagctggcctagtgatgatgttaggcaagtgacttc

SEQ ID NO: 89962 - DNA, 120 bp, Artificial Sequence
  ENSG00000087245_36 (sequence is synthesized)
tcagtttcttcatctgcaaactgggaaatttcctatctcagggttaaaagagaggtaatcttaggtgcttacctagcacatgcaatacctgaacaccttctatggctgccccaaggagag

SEQ ID NO: 89963 - DNA, 120 bp, Artificial Sequence
  ENSG00000087245_37 (sequence is synthesized)
gtgcagggtgtcctagccaagccggcgtccctcctagtagtaccgctgctctctaacctcaggacgtcaagggcctagagcgacagatgtttcccagcagggggttctgaggctgtgcgc

SEQ ID NO: 89964 - DNA, 120 bp, Artificial Sequence
  ENSG00000087250_0 (sequence is synthesized)
acacacggcaggggcgggcgacagatgcagtgcgtgcgccggagcccaagcgcacaaacggaaagagcgggcgcggtgcgcaggggcgggcgcccagcgggcttggcatgcgcgcccccg

SEQ ID NO: 89965 - DNA, 120 bp, Artificial Sequence
  ENSG00000087250_1 (sequence is synthesized)
cccgaggctataaaagcatcgccacctgctgccactagccaagccgcgcgtccagttgcttggagaagcccgttcaccgcctccagctgctgctctcctcgacatggaccctgagacctg

SEQ ID NO: 89966 - DNA, 120 bp, Artificial Sequence
  ENSG00000087250_2 (sequence is synthesized)
cctgctgccctgcggagtgtgagaagtgtgccaaggactgtgtgtgcaaaggcggagaggcagctgaggcagaagcagagaagtgcagctgctgccagtgagaaggcacccctccgtgtg

SEQ ID NO: 89967 - DNA, 120 bp, Artificial Sequence
  ENSG00000087250_3 (sequence is synthesized)
gagcacgtggagatagtgccaggtggctcagtgccacctatgcctgtggtgaagtgtggctggtgtccccttcccctgctgaccttggaggaatgacaataaatcccatgaacagcatga

SEQ ID NO: 89968 - DNA, 120 bp, Artificial Sequence
  ENSG00000087250_4 (sequence is synthesized)
ggatgcaaatgcacctcctgcaagaagagtgagtgcggggacccttcccctctgccgccgccccctctgctctgcggagtcggtgtctcaccacgcaggatgtggagagacagccaggcc

SEQ ID NO: 89969 - DNA, 120 bp, Artificial Sequence
  ENSG00000087250_5 (sequence is synthesized)
cgtgggacgagaggtttttgtaaatccccagaagactccaatggcagctgggattgaggactgccacactggtccaacctttcccgacccatccctcaaaaactccccaaaacctgggga

SEQ ID NO: 89970 - DNA, 120 bp, Artificial Sequence
  ENSG00000087250_6 (sequence is synthesized)
agccattagtgaggctgcggctcagctctggagttccggtcccttggcctctctccggccttacggatcctctcagtttgatctcaaaatctccccagctcacggcagtgtaatatgcat

SEQ ID NO: 89971 - DNA, 120 bp, Artificial Sequence
  ENSG00000087250_7 (sequence is synthesized)
gcttggagaagcccgttcaccgcctccagctgctgctctcctcgacatggaccctgagacctgcccctgcccttctggcgtggggacccgagttcgtccacattaacccttcctgtggcg

SEQ ID NO: 89972 - DNA, 120 bp, Artificial Sequence
  ENSG00000087250_8 (sequence is synthesized)
ttcagcaacccgtctgaacagatctggcgtcctggagaattctagaatgaaggggaagagaggcagggaagagctgggaaatacgcaaagcgcctttttctccactttcggagatggtgg

SEQ ID NO: 89973 - DNA, 120 bp, Artificial Sequence
  ENSG00000087250_9 (sequence is synthesized)
cgtccagttgcttggagaagcccgttcaccgcctccagctgctgctctcctcgacatggaccctgagacctgcccctgcccttctggtgagcccccgcccccgctcgcatcctgcgcact

SEQ ID NO: 89974 - DNA, 120 bp, Artificial Sequence
  ENSG00000087250_10 (sequence is synthesized)
gcgcgcccttgtacctgcaaagaaacccacgccctgcgccttcgctcaaggacacttgggggaagggcccctgattccctattcttcacctcgtgaagggcgggcatgcctgtgtcgcgg

SEQ ID NO: 89975 - DNA, 120 bp, Artificial Sequence
  ENSG00000087250_11 (sequence is synthesized)
ccaagtttatcctttgaggcccctttcaaggtcgtttaccctgtgatgctttctccttaaggcctagtacccacctaagctgggcttaagcccaccagcccccaggacttcctggcatcc

SEQ ID NO: 89976 - DNA, 120 bp, Artificial Sequence
  ENSG00000087250_12 (sequence is synthesized)
acccaaggggctctggtcatttcctgggtacctcactcctgtggaggtgcaggatgccactgccgcgacatagatgctgagtcaaagcaggtgtgagactaagaagggggctgcgactag

SEQ ID NO: 89977 - DNA, 120 bp, Artificial Sequence
  ENSG00000087250_13 (sequence is synthesized)
ccctggctgaatgaaccaggatgactccccacccagcacccttccctcccctttgatggggacgaattgggggagtgtgcatcagagagtggtcatcttccattttatctgcaggctgct

SEQ ID NO: 89978 - DNA, 120 bp, Artificial Sequence
  ENSG00000087250_14 (sequence is synthesized)
ttcagcaacccgtctgaacagatctggcgtcctggagaattctagaatgaaggggaagagaggcagggaagagctgggaaatacgcaaagcgcctttttctccactttcggagatgccaa

SEQ ID NO: 89979 - DNA, 120 bp, Artificial Sequence
  ENSG00000087253_0 (sequence is synthesized)
agaggctccccagcgtcgccctaggctgggactctagtaggtcttcggctcagttttggctgcagcgcccgcgtagatcgcttcggccgggttctacgcccggctcaactatgagccggt

SEQ ID NO: 89980 - DNA, 120 bp, Artificial Sequence
  ENSG00000087253_1 (sequence is synthesized)
cggtgcgcccaggcggcggaagtggcggccacagtgccaggtgccggcgtcgggaacgtggggctgcggccgcccatggtgccccgtcaggcgtccttcttcccgccgccggtgccgaac

SEQ ID NO: 89981 - DNA, 120 bp, Artificial Sequence
  ENSG00000087253_2 (sequence is synthesized)
tcgtgcagcagacgcagatcggctccgcgaggcgggtccagattgtccttcttgggattatcttgcttccaattcgtgtcttattggttgcgttaattttattacttgcatggccatttg

SEQ ID NO: 89982 - DNA, 120 bp, Artificial Sequence
  ENSG00000087253_3 (sequence is synthesized)
ctgcaatttcaacagtatgctgtcctgaaaagctgacccacccaataactggttggaggaggaaaattactcaaacagctttgaaatttctgggtcgtgctatgttcttttcaatgggat

SEQ ID NO: 89983 - DNA, 120 bp, Artificial Sequence
  ENSG00000087253_4 (sequence is synthesized)
ttatagttgctgtaaaaggaaagattgcaagtcctttggaagcaccagtttttgttgctgcccctcattcaacattctttgatggaattgcctgtgttgtagctgggttaccttctatgg

SEQ ID NO: 89984 - DNA, 120 bp, Artificial Sequence
  ENSG00000087253_5 (sequence is synthesized)
tatctcgaaatgagaatgcacaagtccctctgattggcagactgttacgggctgtgcaaccagttttggtgtcccgtgtagatccggattcccgaaaaaacacaataaatgaaataataa

SEQ ID NO: 89985 - DNA, 120 bp, Artificial Sequence
  ENSG00000087253_6 (sequence is synthesized)
agcgaacaacatcaggaggagaatggccccagatactagttttcccagaaggtacttgtactaatcgttcctgtttgattacttttaaaccaggagccttcattccaggagttccagtgc

SEQ ID NO: 89986 - DNA, 120 bp, Artificial Sequence
  ENSG00000087253_7 (sequence is synthesized)
agccagtcctcctcagatacccaaacaagctggatactgtgacctggacatggcaaggatatacattcattcagctttgtatgcttactttctgccagctcttcacaaaggtagaagttg

SEQ ID NO: 89987 - DNA, 120 bp, Artificial Sequence
  ENSG00000087253_8 (sequence is synthesized)
agtttatgccagttcaagtaccaaatgatgaagaaaaaaatgatcctgtcctttttgccaataaagtccggaatttaatggcagaagctctgggaataccagtaacagatcatacctatg

SEQ ID NO: 89988 - DNA, 120 bp, Artificial Sequence
  ENSG00000087253_9 (sequence is synthesized)
aagactgcagattgatgatttcagcaggacagctaacattgcctatggaagctgggctggtggaatttactaaaattagccgaaaattgaaattagattgggatggtgttcgtaagcatt

SEQ ID NO: 89989 - DNA, 120 bp, Artificial Sequence
  ENSG00000087253_10 (sequence is synthesized)
tggatgaatatgcatctattgcgagttcctcaaaaggaggaagaattggaattgaagaattcgccaagtatttaaagttgcctgtttcagatgtcttgagacaactttttgcactctttg

SEQ ID NO: 89990 - DNA, 120 bp, Artificial Sequence
  ENSG00000087253_11 (sequence is synthesized)
acaggaaccatgatggcagcattgacttccgagagtatgtgattggcctggctgtcttgtgcaacccttccaacacagaggagatcatccaggtggcatttaagctgtttgacgttgatg

SEQ ID NO: 89991 - DNA, 120 bp, Artificial Sequence
  ENSG00000087253_12 (sequence is synthesized)
aggatggctacataacggaggaagagttctccaccattctacaggcttcccttggagtgcctgaccttgatgtttctggtctcttcaaggaaatagcccaaggggactcaatttcctatg

SEQ ID NO: 89992 - DNA, 120 bp, Artificial Sequence
  ENSG00000087253_13 (sequence is synthesized)
aggaatttaaaagttttgccttaaagcatccagaatatgctaagatatttacaacatacctagacctccagacgtgccatgtgttttcattaccaaaagaagtccagacaaccccctcca

SEQ ID NO: 89993 - DNA, 120 bp, Artificial Sequence
  ENSG00000087253_14 (sequence is synthesized)
ccgccagtaataaagtcagccctgaaaagcatgaagagagtacctcagacaaaaaagatgactgaaagcagtatttccaataaggaaaacacagtagcttttgcttgaaattgtaaaggc

SEQ ID NO: 89994 - DNA, 120 bp, Artificial Sequence
  ENSG00000087253_15 (sequence is synthesized)
aggcacttattgataatacttttaatgtgttggtaatgatgtttaaaattgaaagatttttaaaacaaaaatgatagattttcttactaaaaatgtttttattaaccttgcttttattgg

SEQ ID NO: 89995 - DNA, 120 bp, Artificial Sequence
  ENSG00000087253_16 (sequence is synthesized)
aatcaagcaatatttcgttttcttttgtgttatattgtactttactgattcatttactggtgatacatatgtttttatggattttccagtttaatttgcatatacaaatgaatgcaatgg

SEQ ID NO: 89996 - DNA, 120 bp, Artificial Sequence
  ENSG00000087253_17 (sequence is synthesized)
tctattggtgagcattgagcaacactgtataaagttttaaaaatgtaaacactttttaatctactttcctctaaaaatcaataatattctattatttctaatccttttccacttgggaaa

SEQ ID NO: 89997 - DNA, 120 bp, Artificial Sequence
  ENSG00000087253_18 (sequence is synthesized)
taacaatgaagaatctgagaatttgacatctataactttacagattcatttttccatttaaatttcagtttcttggatcactgaatatgggaagggagagcttcactaattagacgcagc

SEQ ID NO: 89998 - DNA, 83 bp, Artificial Sequence
  ENSG00000087253_19 (sequence is synthesized)
ctgaatatgggaagggagagcttcactaattagacgcagcttcttaagaacttatattctctttgacatacatctctattgta

SEQ ID NO: 89999 - DNA, 120 bp, Artificial Sequence
  ENSG00000087253_20 (sequence is synthesized)
ttacatgaactacaggtttagaacttggttttaagacaactgctatggccagaaggtaaatgggaattgccttattgaaggtaacattgattgcctaataagaaaatgaattgtttgcca

SEQ ID NO: 90000 - DNA, 120 bp, Artificial Sequence
  ENSG00000087253_21 (sequence is synthesized)
cagagttgaatttaatttgagttagatagttcagaatgtagcacttgccctataaatgaatcagatttgttctatttatataatattagaattaatatattatcatgtaagtgggaattt

SEQ ID NO: 90001 - DNA, 120 bp, Artificial Sequence
  ENSG00000087253_22 (sequence is synthesized)
tattttgttaagtggactctcaaattttagaacttgtgtgaaatatctcccagaaaacacaaaaggtttcaaggtatcacccaaagctagggaatcaacaaacgtactttattaatgcaa

SEQ ID NO: 90002 - DNA, 120 bp, Artificial Sequence
  ENSG00000087253_23 (sequence is synthesized)
gaccacaatttaagccccaggcaggaatccaacagtaacatttttcctttaggttaagcagtaatttttttgaattgtcatttttaatgggtctcacacatgcatattgctaatatcatt

SEQ ID NO: 90003 - DNA, 120 bp, Artificial Sequence
  ENSG00000087253_24 (sequence is synthesized)
catgtttgaggttttcaacaaagaaccaatttattaatataatgtacaaaaatagttggttcattttctgaattcagtctttgaaataaaactccttgttttggccgtgtttctgaatgt

SEQ ID NO: 90004 - DNA, 120 bp, Artificial Sequence
  ENSG00000087253_25 (sequence is synthesized)
attggtgattcacccccaagctaattttttaaagtcatttttgaagttgggaagtctcatgagagatgttgaagtatgtatttaatcaagagtcatgatttcaaactagttttacatatt

SEQ ID NO: 90005 - DNA, 120 bp, Artificial Sequence
  ENSG00000087253_26 (sequence is synthesized)
aagcagttagtgttctaatttaatgggtaaatgtgtgtttggataaatatctgaaaattttatccttaagtatatataattatttgcctcttatatgtcttaaagctatttaaacaaggt

SEQ ID NO: 90006 - DNA, 120 bp, Artificial Sequence
  ENSG00000087253_27 (sequence is synthesized)
gttaaatgagccaaaacaattaagtaattagaacagtacatttttatcagagtgtctgtcatatgcaatgaatgtatgtaatactaaaaaatcatgactacttttatcaaagaaaaacca

SEQ ID NO: 90007 - DNA, 120 bp, Artificial Sequence
  ENSG00000087253_28 (sequence is synthesized)
cacattaatcctattaatcatgaaagcgtagcattgtaaattaaaggttttctttgaggctcttgaaagtgatcccattgctttcctgttttaaaaatattttatgctctttatttccac

SEQ ID NO: 90008 - DNA, 120 bp, Artificial Sequence
  ENSG00000087253_29 (sequence is synthesized)
ttctgtgaatgtgatatttctattttgtgattatgttactgaataaacaaacttgctacataaaattcttagcaattaaaaaaattctgattctgccattttgtctcaaatgtaatatac

SEQ ID NO: 90009 - DNA, 120 bp, Artificial Sequence
  ENSG00000087253_30 (sequence is synthesized)
ccttttaatatcatatgtttacatatttatgaatgattaatcatttttgtttgcattaaactttatgaaatgtcagaaatgattttactctaatgaaactcaaattttgcccaaagtagc

SEQ ID NO: 90010 - DNA, 120 bp, Artificial Sequence
  ENSG00000087253_31 (sequence is synthesized)
aatattcttaaagatgttgaattttgactggttgaattttatatagtaacacacaagtcgtgatcatcaatattattgcagaccaggactctgcttatatgccttgctaacaaagatttc

SEQ ID NO: 90011 - DNA, 120 bp, Artificial Sequence
  ENSG00000087253_32 (sequence is synthesized)
tttcacagaggcttttctcctctcaagacttaaagtaagaattacattttattaagtcagttaaatgcaccatggcttcatatagtaatataaaaaaactctttgaagtgagaaatatta

SEQ ID NO: 90012 - DNA, 120 bp, Artificial Sequence
  ENSG00000087253_33 (sequence is synthesized)
tatcctaaaacctctaaaccacaaacattcaattgaaagagttctgttgaaggataatgacatactgactgcttacagaccaagttgcttgcattttgtatgtttagccctcctttgcca

SEQ ID NO: 90013 - DNA, 120 bp, Artificial Sequence
  ENSG00000087253_34 (sequence is synthesized)
ctgcttttagagccttggaaggctaagtgtgatagtaatgctagctctaatgcatatttaaaggagactgcctcgcttttagaagacatctggtctgctctctgcatgaggcacagcagt

SEQ ID NO: 90014 - DNA, 120 bp, Artificial Sequence
  ENSG00000087253_35 (sequence is synthesized)
aaagctctttgattcccagaatcaagaactctccccttcagactattaccgaatgcaaggtggttaattgaaggccactaattgatgctcaaatagaaggatattgactatattggaaca

SEQ ID NO: 90015 - DNA, 120 bp, Artificial Sequence
  ENSG00000087253_36 (sequence is synthesized)
gatggagtctctactacaaaagtctttgggtatttgtttcttacatagaaaatgctaacatgaatagaaagatactggtgcaagaccattcccgggaaagtagacatacttacatttttt

SEQ ID NO: 90016 - DNA, 120 bp, Artificial Sequence
  ENSG00000087253_37 (sequence is synthesized)
tccttttctgctcatttgaatgaactcaattttatgttaaattgttatatcagagtgacaaataagtgctatggcttgatagaagtgaagctcttcacatatattcaaaatacatatcac

SEQ ID NO: 90017 - DNA, 120 bp, Artificial Sequence
  ENSG00000087253_38 (sequence is synthesized)
aaactttggtaaataggatagtaatctgaagaacttttgccctttttaccccatttactgtaactcttgtttctaggtaatcgttctctctcaacaaacttctcaagcgtctgtgtaaca

SEQ ID NO: 90018 - DNA, 120 bp, Artificial Sequence
  ENSG00000087253_39 (sequence is synthesized)
agccacatgttctaacaaattgtctccatcgcacttcaacagccaggtccctattttttataacgtattaaccttattattttcttattattttaaaagaatctatgcacattagcaaaa

SEQ ID NO: 90019 - DNA, 120 bp, Artificial Sequence
  ENSG00000087253_40 (sequence is synthesized)
aaagatagagaaaaatataaacagaaaaaattatgtttacttctaccaccctaaatcaactattatcaattttatacatattttactccatcttttttcaaagtttcttacattttccaa

SEQ ID NO: 90020 - DNA, 120 bp, Artificial Sequence
  ENSG00000087253_41 (sequence is synthesized)
ccaatgtcattaaaattctctgtgaatgtaaattttaaaaactgtacctactgttttttggaaatctgtaacaagctatgtgtaatcattcttctaatattaaacatattgtgtccagaa

SEQ ID NO: 90021 - DNA, 120 bp, Artificial Sequence
  ENSG00000087253_42 (sequence is synthesized)
gtgatcttagccctctttttagagttgaaatggttcatcaaagttaaatgacatactagttaacacacaagcagacccagggcttagaaacagatctcctgagtacaagcccagtgcccc

SEQ ID NO: 90022 - DNA, 120 bp, Artificial Sequence
  ENSG00000087253_43 (sequence is synthesized)
attacctcatataacctatgttctagaaaggtagatgattcaatatattgataatgtataaattaatttacttggcatttaatgtcttaggcttaagacattgttatggaaaggtatatt

SEQ ID NO: 90023 - DNA, 120 bp, Artificial Sequence
  ENSG00000087253_44 (sequence is synthesized)
aaggctgagcctatggtttaattgcatgattttgtttttttctccttaatagtaatattaataattgtgtgtgtgtattgtaacatttattatactgtcatatataataaaatatcatat

SEQ ID NO: 90024 - DNA, 120 bp, Artificial Sequence
  ENSG00000087253_45 (sequence is synthesized)
tcttcgaagatttaaaagaagaattacacaaagaactagaactgcacatttgttaagattgtccttttaaaattattttctgttacaaggaaaaaataaaagattgattatagtgtcata

SEQ ID NO: 90025 - DNA, 120 bp, Artificial Sequence
  ENSG00000087253_46 (sequence is synthesized)
tactaaatcaatataagaagagttcatcatagtttagtcagtgatctaactgctgttagataaaactattttatctgcctactcaataataaattttacagttttatctgcctactcaat

SEQ ID NO: 90026 - DNA, 120 bp, Artificial Sequence
  ENSG00000087253_47 (sequence is synthesized)
aataaataatttatttttatttctcatatgaaatacgtagaaattactgcccaaatgccaactacattatgataatcttctaaaagttataattgcctaatgttaaaatattttgttttc

SEQ ID NO: 90027 - DNA, 120 bp, Artificial Sequence
  ENSG00000087253_48 (sequence is synthesized)
tgagttattgccaaatgcgatacatccctagttcggaaagatacccaactactatacttgaaaccactgaagctacaaaataccttgctctcagttttcacatttgcttttctccctcta

SEQ ID NO: 90028 - DNA, 120 bp, Artificial Sequence
  ENSG00000087253_49 (sequence is synthesized)
gaaatacacaaaataactctttagcttgctctgagcatttttttcttttctgatagcaactttttaacgttgtggatccacagaacttactgctttgctttctcttttggggtcataatt

SEQ ID NO: 90029 - DNA, 120 bp, Artificial Sequence
  ENSG00000087253_50 (sequence is synthesized)
cctctccccttggagtgtccactccatgcatgtgcacttaggatgtgtggctgtgtgtgtgtttgggaaccctcacggacacataaggttctatgtcatcaagtagaaaacctatctcat

SEQ ID NO: 90030 - DNA, 120 bp, Artificial Sequence
  ENSG00000087253_51 (sequence is synthesized)
tatcattataatgtcttcagatgctttctaaggttcacctcttttttaacattagaagtcagtgaatgcagctttcattataatttttaatactttaaaatgtttttgtattagctgcca

SEQ ID NO: 90031 - DNA, 120 bp, Artificial Sequence
  ENSG00000087253_52 (sequence is synthesized)
gaatgctcagcagcaaagttatgactcacttctagcaagtgtggtagttcttgcttcaagcatttggtttcatgtagcttttcttcttattttttctttgtcttgattttatcattactt

SEQ ID NO: 90032 - DNA, 120 bp, Artificial Sequence
  ENSG00000087253_53 (sequence is synthesized)
aaaacaattctgttgaatattaacacttggaaaatgaaaaaaagtggagaaataaatcaatgaataaacaaatattttaagtggcataggcacagcatttaatattttgcttcagtagtt

SEQ ID NO: 90033 - DNA, 120 bp, Artificial Sequence
  ENSG00000087253_54 (sequence is synthesized)
cttaattaaaaaaaaaaaatccctcattttggtaagcactagggatttaccaacatttagcaaatgatttctgttacacatactcttaaaatattcagtctatttatactatttattaat

SEQ ID NO: 90034 - DNA, 79 bp, Artificial Sequence
  ENSG00000087253_55 (sequence is synthesized)
tattgtagattttcttaactacttgctaaggaaatcatatccttttacatgaactacaggtttagaacttggttttaag

SEQ ID NO: 90035 - DNA, 120 bp, Artificial Sequence
  ENSG00000087258_0 (sequence is synthesized)
ctctctccctctccctcgagctcccggctggctgcggctccctggcgctctccctctctctccggtaggctcaccgagcgatgcgagctctgggagacagcgacgccgcctcccgctaga

SEQ ID NO: 90036 - DNA, 120 bp, Artificial Sequence
  ENSG00000087258_1 (sequence is synthesized)
gacctgcccctcggcccggccccctgcccaaccctgcccagcgcgcgggggtcggcgaaggcgccgcggacgcaccgacggctgaagagcggcgatgcacatgcactagcagcaccccct

SEQ ID NO: 90037 - DNA, 120 bp, Artificial Sequence
  ENSG00000087258_2 (sequence is synthesized)
ccctaactcactccctccacatcccgcgccgccgccgccgcctcctccacctcctcctccgccgccgccgcctcctcctcctccggcagccgcggcagcaggacccaccctgccccccac

SEQ ID NO: 90038 - DNA, 120 bp, Artificial Sequence
  ENSG00000087258_3 (sequence is synthesized)
ccctctgtcggctccggctgcggctccagcctcgactattattttatttattttgggtcgtgcacaagcctcagtgcctgcagtccgcgcctcctcggcccgcgggcgcctcctcccttg

SEQ ID NO: 90039 - DNA, 120 bp, Artificial Sequence
  ENSG00000087258_4 (sequence is synthesized)
gctccggagccccagaccccggccaccctcgattcgacaaccccagacccctgccagctgccgcgagtctccgctgctggaatcttgttagcggctgtctttttggagggttctggtttc

SEQ ID NO: 90040 - DNA, 120 bp, Artificial Sequence
  ENSG00000087258_5 (sequence is synthesized)
ccgacatttttgtttccagcccaggagaggatatcgtgattttccccccttgagcccaggctctgctctctgggggggtggggggcgctccaagccggggagccgtgccagccgagtcgt

SEQ ID NO: 90041 - DNA, 120 bp, Artificial Sequence
  ENSG00000087258_6 (sequence is synthesized)
gcgggctgtggcagggaaggggccaccatgggatgtactctgagcgcagaggagagagccgccctcgagcggagcaaggcgattgagaaaaacctcaaagaggatggcatcagcgccgcc

SEQ ID NO: 90042 - DNA, 120 bp, Artificial Sequence
  ENSG00000087258_7 (sequence is synthesized)
aaagacgtgaaattactcctgctcggggctggagaatcaggaaaaagcaccattgtgaagcagatgaagatcatccatgaagatggcttctccggagaagacgtgaaacagtacaagcct

SEQ ID NO: 90043 - DNA, 120 bp, Artificial Sequence
  ENSG00000087258_8 (sequence is synthesized)
gttgtctacagcaacactatccagtccctggcagccatcgtccgggccatggacactttgggcatcgaatatggtgataaggagagaaaggctgacgccaagatggtgtgtgatgtggtg

SEQ ID NO: 90044 - DNA, 120 bp, Artificial Sequence
  ENSG00000087258_9 (sequence is synthesized)
agtcggatggaagacaccgagcccttctctgcagagctgctttctgccatgatgcggctctggggcgactcaggaatccaagagtgcttcaaccggtcccgggagtatcagctcaacgac

SEQ ID NO: 90045 - DNA, 120 bp, Artificial Sequence
  ENSG00000087258_10 (sequence is synthesized)
tctgccaaatactacctggacagcctggatcggattggggccgccgactaccagcccaccgagcaggacatcctccgaaccagggtcaaaaccactggcatcgtagaaacccacttcaca

SEQ ID NO: 90046 - DNA, 120 bp, Artificial Sequence
  ENSG00000087258_11 (sequence is synthesized)
ttcaagaacctccacttcaggctgtttgacgtcggaggccagcgatctgaacgcaagaagtggatccattgcttcgaggacgtcacggccatcattttctgtgtcgcgctcagcggctat

SEQ ID NO: 90047 - DNA, 120 bp, Artificial Sequence
  ENSG00000087258_12 (sequence is synthesized)
gaccaggtgctccacgaagacgaaaccacgaaccgcatgcacgagtctctcatgctcttcgactccatctgtaacaacaagttcttcatcgatacctccatcattctcttcctcaacaag

SEQ ID NO: 90048 - DNA, 120 bp, Artificial Sequence
  ENSG00000087258_13 (sequence is synthesized)
aggccccaatacctatgaagacgcagccgcctacatccaagcacaatttgaaagcaaaaaccgctcacccaacaaagaaatatattgtcacatgacttgtgccacagacacgaataacat

SEQ ID NO: 90049 - DNA, 120 bp, Artificial Sequence
  ENSG00000087258_14 (sequence is synthesized)
ccaggtggtgttcgacgccgtcaccgacatcatcattgccaacaacctccggggctgcggcttgtactgacctcttgtcctgtatagcaacctatttgactgcttcacggactctttgct

SEQ ID NO: 90050 - DNA, 120 bp, Artificial Sequence
  ENSG00000087258_15 (sequence is synthesized)
gttgacgttgatctcctggtagcatgaccttttggcctttgtaagacacacagcctttctgtatcaagcccctgtctaacctacgaccccagagtgactgacggctgtgtatttctgtag

SEQ ID NO: 90051 - DNA, 120 bp, Artificial Sequence
  ENSG00000087258_16 (sequence is synthesized)
aatgctgtagaatccggttttagttgagtcttcacatttagaatttgaaaggaaaaacagaacatttctcatgtgctttgtagcttaaaaaaaggaaaactcaccatttcatccatattt

SEQ ID NO: 90052 - DNA, 120 bp, Artificial Sequence
  ENSG00000087258_17 (sequence is synthesized)
ctttttcttgcaaaacaaacatacccatctgcaccgacgcctgcccccgtcccacctcgcggcgcagcccctggagctcctgctggggggcagggcccatctgccgcctggggctccggt

SEQ ID NO: 90053 - DNA, 120 bp, Artificial Sequence
  ENSG00000087258_18 (sequence is synthesized)
gcggtgcactggtccgaggagtgtgctcaggccgggctttccagaaggccacaggccactgcaaaccctgctgcctgccggccgcccagacaccacagacgccacctggcggccctaagc

SEQ ID NO: 90054 - DNA, 120 bp, Artificial Sequence
  ENSG00000087258_19 (sequence is synthesized)
cactcccgccacacgctcactccaggttcgtatagaaaaagcacagctctcactggccagtagctgccaaaaagaacacccatcgtataaggaaatccagccccatagaaaacaatctgc

SEQ ID NO: 90055 - DNA, 120 bp, Artificial Sequence
  ENSG00000087258_20 (sequence is synthesized)
ccaccgaccccctttctaaggatagcctttgtaggggttttttggttccttttttttttttttcagtttttgtttttacttttgtcccgccgagtactatgtattaccagccccccaccc

SEQ ID NO: 90056 - DNA, 120 bp, Artificial Sequence
  ENSG00000087258_21 (sequence is synthesized)
cacagatcagttttcctagtctttgggaaacgggttgtgttttttttcctttgccgtgttggatttccggtcccggctgacacctcccttcgtgtgtgcgcccctccccacccctgcctt

SEQ ID NO: 90057 - DNA, 120 bp, Artificial Sequence
  ENSG00000087258_22 (sequence is synthesized)
tgtttcggtgccctgtgtccgctctctcatgtggggatgtttgtgctgcagacaaaaagaacaaaaaaaaatttttaaataccacaagatggaaaaaaaaaacaaaaaaatttaaaaaga

SEQ ID NO: 90058 - DNA, 120 bp, Artificial Sequence
  ENSG00000087258_23 (sequence is synthesized)
tggaatgtagtgtttacattaaagccgccgttttcatgaccaatcctatgtcatttctactttgactaatacccaaaccctaaacctcttcacggtttcacttttaagacttaatctttg

SEQ ID NO: 90059 - DNA, 120 bp, Artificial Sequence
  ENSG00000087258_24 (sequence is synthesized)
ttcacggtttcacttttaagacttaatctttgctgaagaagaccagtcacagccatttcaaataaagaggaggcaaaaagacaaaacacacaaaaaattaaaaaaaaaaacttaaaaaaa

SEQ ID NO: 90060 - DNA, 120 bp, Artificial Sequence
  ENSG00000087258_25 (sequence is synthesized)
ttgtaagcctttctattcccaatcggtgaggtttctgtgatatcttacacactgccagtctacttctctgactaatggaaaattcctgtgtagctcaataaaagagaatgtttgtctgta

SEQ ID NO: 90061 - DNA, 120 bp, Artificial Sequence
  ENSG00000087258_26 (sequence is synthesized)
tatatatatatacaaatatatatttaaaaaatctttttagtttgtactagaaagagctgcggacagaactgaccaccatcccatagctcatggaggttttcctgggacggcacgtgagca

SEQ ID NO: 90062 - DNA, 120 bp, Artificial Sequence
  ENSG00000087258_27 (sequence is synthesized)
tgcacgtgtgtgtgtgtacacacactcacacatgtccagatgggagcttggtttgggagtccctccttttgaggatagccccggggtgttcctctcagccccatttctgagaacaggtga

SEQ ID NO: 90063 - DNA, 120 bp, Artificial Sequence
  ENSG00000087258_28 (sequence is synthesized)
atggcagaacagccctggccttggcccagccagctctctgtgttgcgcccttagagcctctgcgccctcagttccgtcctgctcttggcaaattccagaccctttcagaaatggccgaag

SEQ ID NO: 90064 - DNA, 120 bp, Artificial Sequence
  ENSG00000087258_29 (sequence is synthesized)
ccctaagcctctcctcactctgcactcccaaaaacagaacaatttaaggatgcttctctttcgggtggtggtggttgttaatttcaggaatttagaagaatcattgctccgaccaatcca

SEQ ID NO: 90065 - DNA, 120 bp, Artificial Sequence
  ENSG00000087258_30 (sequence is synthesized)
ctgtctcctgagttttctttattcatgttaagatggcaagaatcagagaacagggagacttggtctgctttctaaaagcagctgacaggaggggactcaagttcacctgcagagttgaaa

SEQ ID NO: 90066 - DNA, 120 bp, Artificial Sequence
  ENSG00000087258_31 (sequence is synthesized)
ccagccccgctccaagagggcatgtgggaaggtggggagcgaggggaacaggcgtggcggggagggccggacttgtgggcctgacccgagtcagggtctcaggggggggccaggcttccc

SEQ ID NO: 90067 - DNA, 120 bp, Artificial Sequence
  ENSG00000087258_32 (sequence is synthesized)
caggtgcccgggatgggcttcaatggggttcctgacccctcgtgctgctgccccatctcgcccaaccccagcagtagtcaaaatgttctagggttttttggttggttggttggtttttaa

SEQ ID NO: 90068 - DNA, 120 bp, Artificial Sequence
  ENSG00000087258_33 (sequence is synthesized)
ctttttgacagcatctgcaacaacaaatggttcacagacacgtccatcatcctgtttcttaacaagaaggacatatttgaagagaagatcaagaagtccccgctcaccatctgctttcct

SEQ ID NO: 90069 - DNA, 120 bp, Artificial Sequence
  ENSG00000087258_34 (sequence is synthesized)
gaatatacaggccccagcgccttcacagaagccgtggcttacatccaggcccagtacgagagcaagaacaagtcagcccacaaagagatctacacccacgtcacctgcgccacggacacc

SEQ ID NO: 90070 - DNA, 120 bp, Artificial Sequence
  ENSG00000087258_35 (sequence is synthesized)
aacaacatccagtttgtctttgatgctgtgacggacgtcatcatcgccaaaaacctgcggggctgtggactctactgagcccagccgccctgcccggcacccttgccctgcctggcctgc

SEQ ID NO: 90071 - DNA, 120 bp, Artificial Sequence
  ENSG00000087258_36 (sequence is synthesized)
cgccccccctcccctggaaccaggctccaccactctcagaccactctttgcacttgaggaagaagacctcagaggctggcaccaagggagggaggagggagcatcctccacccgcacccc

SEQ ID NO: 90072 - DNA, 120 bp, Artificial Sequence
  ENSG00000087258_37 (sequence is synthesized)
ccaacagaacttgtggtaacgcaggggcggggcggggctgctgagtgcatgctgcaaggccaggagactccacgctcacagcctctgtgtcatctctgagtgcttgatcgggaagctggg

SEQ ID NO: 90073 - DNA, 120 bp, Artificial Sequence
  ENSG00000087258_38 (sequence is synthesized)
gggacagggcagggcccagatgggcacaccctgcacctgatgactcactggaagcctcggagtgtcctcctgtcatcttgggtggtgcaggggcgcagatggccctgcagcagggtgctg

SEQ ID NO: 90074 - DNA, 120 bp, Artificial Sequence
  ENSG00000087258_39 (sequence is synthesized)
gcagggtggggtcataggagccatccttcagctttgcctggggtctctggtggagggcagttccgtcaacaaaagccagggtgggatcaggccaacttggtgtgggttggaggactcagg

SEQ ID NO: 90075 - DNA, 120 bp, Artificial Sequence
  ENSG00000087258_40 (sequence is synthesized)
ccttggcgatggcctccgtctccctgctccctcccctgggtctcagcccttccttctctgggtcatcctcccttgcctttgctctcccagagaactcccatccctgactcctccgagttc

SEQ ID NO: 90076 - DNA, 120 bp, Artificial Sequence
  ENSG00000087258_41 (sequence is synthesized)
tggaaatgcttcttgagactgatttatggctcagatagatggtggcgtggagcggggggagggagagatgggaggtgcggggaagggaggtggaagctcctgtgtcacctgggctggggc

SEQ ID NO: 90077 - DNA, 120 bp, Artificial Sequence
  ENSG00000087258_42 (sequence is synthesized)
ctcccgcccagtcctcgcaggccaaagggtgacccatttcttttttccagtcaccaggagctcggatggtcactctgaggtgtgaatagatatgtttttccttcagtccacactgaattc

SEQ ID NO: 90078 - DNA, 120 bp, Artificial Sequence
  ENSG00000087258_43 (sequence is synthesized)
aactcaaaccagcaaaggcctttgggctggggattctgtggttgcagaggtctagagggggtggacttttgcagccagtgcctccgcctcaccgtcttggtgaagaaatcagcgagtttg

SEQ ID NO: 90079 - DNA, 120 bp, Artificial Sequence
  ENSG00000087258_44 (sequence is synthesized)
ttcacagccgttggtgtcttcccagcccctggggacagaggacagcagggggatggagctgacaccctggagtatttggacccaggccagcacaaacacacccccctgtccccaactcta

SEQ ID NO: 90080 - DNA, 120 bp, Artificial Sequence
  ENSG00000087258_45 (sequence is synthesized)
aagggagagtcctaggactccttagaggaggcttcactgcggagatccctgagcagaagggggcggggtagcttctcccggtgacggtgacgcaggtctggctggccttgggcaaccaac

SEQ ID NO: 90081 - DNA, 120 bp, Artificial Sequence
  ENSG00000087258_46 (sequence is synthesized)
acacctctcccactccaagatgcctccaggtggctgaggccaacgcccacacccaggccagtcgtgtgcttgtacagcaggctgtgcctggggacctagatgtgccatgggagggaggag

SEQ ID NO: 90082 - DNA, 120 bp, Artificial Sequence
  ENSG00000087258_47 (sequence is synthesized)
actgacaggcctctgcctccctcctcaagccctctgttctccctgcccccactctggacactgcttagtccccagccaggcagggcccctgggtttccacttgcagcccccggactgccc

SEQ ID NO: 90083 - DNA, 120 bp, Artificial Sequence
  ENSG00000087258_48 (sequence is synthesized)
cagagccgggaagcaccagtgccaacagctctggacttgttggacccacaggcacagagctctgagtggtgcccaggagacccaggaaccttccctagtgccaaatgcctgcagggaccg

SEQ ID NO: 90084 - DNA, 120 bp, Artificial Sequence
  ENSG00000087258_49 (sequence is synthesized)
gtgcctggggagcctctggcagccggactgcaggagccaccccatcagcccaagtccacctctgttttgttcacctcggtcatgttttggaccttgcaccaggtgctgggacgtggcaga

SEQ ID NO: 90085 - DNA, 120 bp, Artificial Sequence
  ENSG00000087258_50 (sequence is synthesized)
ggacaggccctgggaaccaacagtgtcctaccatggacagccagggccagctaagctaagccatcccgcccaacacagaagacatggcagttatttctcagcagcaccacgctgggtgag

SEQ ID NO: 90086 - DNA, 120 bp, Artificial Sequence
  ENSG00000087258_51 (sequence is synthesized)
gccagttgttccgcttactctgctccgaactgtaaccccaggctcagaagcagccggcaaaagggggatgctggccacgccccacctctaaggccatcaccctggaggtggaagtcactg

SEQ ID NO: 90087 - DNA, 120 bp, Artificial Sequence
  ENSG00000087258_52 (sequence is synthesized)
ggctggagggctctccatgtcccccagcagccgccctcagaacacagtggccagagcaccaggctgggtccaggcctccaatccaggccttccctgtccctagaactggggctggaggag

SEQ ID NO: 90088 - DNA, 120 bp, Artificial Sequence
  ENSG00000087258_53 (sequence is synthesized)
tgggtgctcagcccttcctgccctccatccccagcctgcctttctcttcctttggatgctccatcctccttggtttcttgcactgctctcaatcctcccaccctagcctgggggtggtcc

SEQ ID NO: 90089 - DNA, 120 bp, Artificial Sequence
  ENSG00000087258_54 (sequence is synthesized)
ttggtcctcaggggtatccggggagaaattctctccctgtgcatgacacctgtcatccatgtcgtaaccagcggctccatcttgtggggtggtgactgagggtgacaaatgagatttggc

SEQ ID NO: 90090 - DNA, 120 bp, Artificial Sequence
  ENSG00000087258_55 (sequence is synthesized)
tccgtcgtggatgtggatgtgggaggaatgttgcgagtgacacgtgtgggtttctaatccacagtggtcctgcgtgtgccctgaggggccatggtaacctctccgatggctcggatttag

SEQ ID NO: 90091 - DNA, 120 bp, Artificial Sequence
  ENSG00000087258_56 (sequence is synthesized)
caggccaagcagaaactgatttctacgaagagcgtctttgccaaactcatgaaaattgtgcctgccactttcatgcctatgggccagttttgtgacctgcgccgctgaccatcctaagaa

SEQ ID NO: 90092 - DNA, 120 bp, Artificial Sequence
  ENSG00000087258_57 (sequence is synthesized)
ccaggtcttggccttccctctgagcactgatagaggtccccaaggctctctggcctgaggagggtgtggggtctgcccagccccaagcagagagcacagtctgggcccctgaccaacagc

SEQ ID NO: 90093 - DNA, 120 bp, Artificial Sequence
  ENSG00000087258_58 (sequence is synthesized)
tttggcattctgggttccatggggaccctagagctcaggcacaagaacaacaccatacctgctgccaggacgcagctgtctcccaggccctccccacagcccagctcccactggcaggaa

SEQ ID NO: 90094 - DNA, 120 bp, Artificial Sequence
  ENSG00000087258_59 (sequence is synthesized)
ctggacacatccctgccctccatggtctgcactggtcttctctgagtattcttaggagcagaggcagccccaagttccaacttgcaagccctgtaactaagctgtctataaaccccagca

SEQ ID NO: 90095 - DNA, 120 bp, Artificial Sequence
  ENSG00000087258_60 (sequence is synthesized)
gggaaggccaagggatggtctcacccatgcccttccctttggccaacatgagtcctgcagtggggagcttagcccctgctcccacctaacactctacagttagcacccaggggttgattc

SEQ ID NO: 90096 - DNA, 120 bp, Artificial Sequence
  ENSG00000087258_61 (sequence is synthesized)
aggaagttcttcctttttctagcctgcatccttcctggccaccccctttatttctcagtctgacctggtgcactcttggcaagtgagtccattgcagtcccaggtggatatttaatgagc

SEQ ID NO: 90097 - DNA, 120 bp, Artificial Sequence
  ENSG00000087258_62 (sequence is synthesized)
actcggactgtttcctccaagtcagctagtggcctgccctcctccttttcaagaagtctggggcacagagcctcctctggctgcctcttctcttctctgagcctctgggagccttcaggc

SEQ ID NO: 90098 - DNA, 120 bp, Artificial Sequence
  ENSG00000087258_63 (sequence is synthesized)
aaaacctggcagttctcaggaacccagacctgaggctccagctccgcggccaccagagattcagtgtgcagtgccgaaggcagtcacccccaggcagttcctgctgtcaggccgcaagcc

SEQ ID NO: 90099 - DNA, 120 bp, Artificial Sequence
  ENSG00000087258_64 (sequence is synthesized)
tagagcgcaggatcccagcagcccagggaacagggccggcgtgtgagctgctgccgtggggtctgtggtagggctccccatctcccacccctcagcaagaagagtcctgacccctgaccc

SEQ ID NO: 90100 - DNA, 120 bp, Artificial Sequence
  ENSG00000087258_65 (sequence is synthesized)
caccctgcccagagaggagctggggcctccagacagaccccactgcagccagatgaaggcccctgtcaaagaaggggcaggctgggggaaaagcagaaagaatggcccccagtccaaact

SEQ ID NO: 90101 - DNA, 120 bp, Artificial Sequence
  ENSG00000087258_66 (sequence is synthesized)
cctggatcccctccatgagagaggggctccccctggaacagaagctctcatccccaggcccagtgcacaagaccaccagcagagacccaccgcccttcctggcagagcaccacttcctgg

SEQ ID NO: 90102 - DNA, 120 bp, Artificial Sequence
  ENSG00000087258_67 (sequence is synthesized)
cagtgcagctccgaggcaccactactgtcctccccttccctccccacccctcccctccctttccctcctctcccctcccctccacacctgccctgttactcccacagctctgggcagcca

SEQ ID NO: 90103 - DNA, 120 bp, Artificial Sequence
  ENSG00000087258_68 (sequence is synthesized)
ggccctcccctcctgcctcctggtcttctctactccgctggttctgacccatcccctggctctgcccgccgtcccccaccctgcccctgctgagtatcttcttcctccccacgcaccccc

SEQ ID NO: 90104 - DNA, 120 bp, Artificial Sequence
  ENSG00000087258_69 (sequence is synthesized)
ctcccccatctaggcgaggtgggctcgggcgtcccaggccctccttagaaaagccgtctctctcgagtgcagtggtcccacctcccaaccccatcactgctgcccaccccatattaactg

SEQ ID NO: 90105 - DNA, 120 bp, Artificial Sequence
  ENSG00000087258_70 (sequence is synthesized)
taattttgtaagaagagtgacttgttggtttaataaatctctagttattgtaataatttattggctgccataatgtatttattagtcgcctaccgttaataaaaagtgcccgctttccta

SEQ ID NO: 90106 - DNA, 120 bp, Artificial Sequence
  ENSG00000087258_71 (sequence is synthesized)
actccacagtcagtccttggttgttcagacctcctgttccttatggtgcttctggtttggtggcctggaacacccctgagcgtccctgagttttgggtggacatgaattcagaatctagc

SEQ ID NO: 90107 - DNA, 120 bp, Artificial Sequence
  ENSG00000087258_72 (sequence is synthesized)
cctgagttttgggtggacatgaattcagaatctagcttgatctccctttgataccctggctttgcagtcataagaaatctagtaggtccccaccctgacacacacacacacacacacaca

SEQ ID NO: 90108 - DNA, 120 bp, Artificial Sequence
  ENSG00000087258_73 (sequence is synthesized)
tttagtgagtgctctggagagggacaggtctggtgcatctgtgtactcctgactcatgtagttatgtcccactttatccaagcactgtctggagctcaaccctatgccaggagatatggg

SEQ ID NO: 90109 - DNA, 120 bp, Artificial Sequence
  ENSG00000087258_74 (sequence is synthesized)
aagaaagcagagataggtgagatgtggtgctttaattttaaaaattaaaaattagtaaacaagtcttctgggagatgatctctgattattattgttatcagggtacaaaatatgtacctt

SEQ ID NO: 90110 - DNA, 120 bp, Artificial Sequence
  ENSG00000087258_75 (sequence is synthesized)
ttagtcatgtctctgttggttctaagtggcagaagcccaaatcaaattagcttattcaaaattgagagggaattatttggctcatatcactcaaaagtatggggtgggcttcaggcatgg

SEQ ID NO: 90111 - DNA, 120 bp, Artificial Sequence
  ENSG00000087258_76 (sequence is synthesized)
ttggacccaggggctcaaatgatgtttctgggacttgattctgcactcaatcgctcagctatgtagatgaacagcccacctggggctgctgcaatgtgagatgccactgactgttgctaa

SEQ ID NO: 90112 - DNA, 120 bp, Artificial Sequence
  ENSG00000087258_77 (sequence is synthesized)
acagcccctcggggagtttaaataaggtgctgcggcacttgagttctgcaaaagacacctattcgctgaccagacaaagatgcttagccacaactcacaactctcagggtgcagttcgaa

SEQ ID NO: 90113 - DNA, 120 bp, Artificial Sequence
  ENSG00000087258_78 (sequence is synthesized)
gaggaggaagcagcatggcatataaagctcatgctcccttgaaggctggtgattgagacaagttatgtcttctagcatttgactccctcaaagagattgcaggacttccctctgattgca

SEQ ID NO: 90114 - DNA, 120 bp, Artificial Sequence
  ENSG00000087258_79 (sequence is synthesized)
ggtggctcaatccactcagatcacctagaaacttgatagagatttagaatcttaaagaagacagaagcttagacagagcatgtagcccagcccatcaacagatgaagaagttgaatcctg

SEQ ID NO: 90115 - DNA, 120 bp, Artificial Sequence
  ENSG00000087258_80 (sequence is synthesized)
ggattctcggctgaggtcacgcctgccgggagatgttctcccataggtagagggtgtcaggaaggaatgagaaggggcctctcttcctgcaccccaggaggagaaagaggccagaggagg

SEQ ID NO: 90116 - DNA, 120 bp, Artificial Sequence
  ENSG00000087258_81 (sequence is synthesized)
cagaggacgcaagagacaaccaaacagtggaaattcccagagggccgggaccttgtcactggcttgtcctggagagtgcctggcactgcaaaaagacagctttcaagtgtagcagctttg

SEQ ID NO: 90117 - DNA, 120 bp, Artificial Sequence
  ENSG00000087258_82 (sequence is synthesized)
tttttttatagggagcccctgaccgcataaatacaaaccaaaacaacagccatataggcagaaaagaaatggtgccattttgttttattttagaaaaaataataagctttccattcccca

SEQ ID NO: 90118 - DNA, 120 bp, Artificial Sequence
  ENSG00000087258_83 (sequence is synthesized)
acactttctcaataaggagcctcgcccctcctttccacttgcaggctcgcttcttgccctatccactcggcagttcctggtgatcccacaggatcatccatgaagatggcttctccggag

SEQ ID NO: 90119 - DNA, 120 bp, Artificial Sequence
  ENSG00000087258_84 (sequence is synthesized)
tactctgtaccgagcaccatcttaagtgttgtaactgagcaagacacacaaaatctctgccctcctggagtgttctgacattcttgttaggggagacaggcaataaataaggaaaataca

SEQ ID NO: 90120 - DNA, 120 bp, Artificial Sequence
  ENSG00000087258_85 (sequence is synthesized)
ctggagaatcaggaaaaagcaccattgtgaagcagatgaagtaagtccctgtggcattgggattcgtacttttattaagaataatttttaaatcgtttttattacattgcttactccaca

SEQ ID NO: 90121 - DNA, 120 bp, Artificial Sequence
  ENSG00000087258_86 (sequence is synthesized)
atattcccaccacagctggtttcaagctacccatctggccagtgagtgatgcaacgttagctcttgtgagccagcacaactcactccagcacaccactgggtcaggccatggaagataga

SEQ ID NO: 90122 - DNA, 120 bp, Artificial Sequence
  ENSG00000087258_87 (sequence is synthesized)
agcaagaaggactgaagagcattccatggctttgctctgagcacctgggtagatggggatgccgtctactgaggatcatccatgaagatggcttctccggagaagacgtgaaacagtaca

SEQ ID NO: 90123 - DNA, 120 bp, Artificial Sequence
  ENSG00000087258_88 (sequence is synthesized)
gagcaaacccaggaaggaatagactgagaggagggtcctcatgcgaggaggactctcagaggcacttcctgggggtggctcaggtgcgccctcttagtaaaatgctcctcagatgcaagg

SEQ ID NO: 90124 - DNA, 120 bp, Artificial Sequence
  ENSG00000087258_89 (sequence is synthesized)
gcaggtctttgagtcatgatctgtgagcacagccagtcccaggacagactccaggggtagtgcctggggatggcagtgatccagctgtctgtcatcacctggagtgacaaggtcttctag

SEQ ID NO: 90125 - DNA, 120 bp, Artificial Sequence
  ENSG00000087258_90 (sequence is synthesized)
tgagggcttttagcaaggctctgagcaccatggcccccatcctctgcctctcagcgtgctcacagcttaatccccaggcagccctcacctgcctggaccctgcgcctaccagctccctgc

SEQ ID NO: 90126 - DNA, 120 bp, Artificial Sequence
  ENSG00000087258_91 (sequence is synthesized)
aacctccggggctgcggcttgtactgacctcttgtcctgtatagcaacctatttggtaatgattccagcacccacagaacagcttgcgtgcgcgcgcatacacacacacacacacacaca

SEQ ID NO: 90127 - DNA, 120 bp, Artificial Sequence
  ENSG00000087258_92 (sequence is synthesized)
ctcacccccgagacgctattccctggtgtctgcttccaactcgggattaattcgaggatctcttagtcctcagttaatgtttcccaactgaatgcgtgcacccttccaaccttgctgtca

SEQ ID NO: 90128 - DNA, 120 bp, Artificial Sequence
  ENSG00000087258_93 (sequence is synthesized)
aaaccgaatgagaccctggtagagaaatctgcatgagcagggttccgcgcagatgcgttcggtggtggttgcggcccctgcgctgtacgtgcatggtgcatgtcctctccgtgagctgga

SEQ ID NO: 90129 - DNA, 120 bp, Artificial Sequence
  ENSG00000087258_94 (sequence is synthesized)
gcctctccagtgacctcactgcccccacctggggccagctctctttggaagggggcagcatcccccaaccctgcccggccctgctccgccccgccctgcctgcgtgtggaatgaaacagg

SEQ ID NO: 90130 - DNA, 120 bp, Artificial Sequence
  ENSG00000087258_95 (sequence is synthesized)
accacgtcccgtctgtccttgtgggtcctcccgtctccgtcctggtggtctccgtcccggtggtgcatccagccacattggtggaccttccctttgcttgtcccgctgtgtcattggccg

SEQ ID NO: 90131 - DNA, 120 bp, Artificial Sequence
  ENSG00000087258_96 (sequence is synthesized)
tcgcatgccttagtccccccctccccctgttcccttaagctgacactcaccagtttttccccactgtctgtgtcccaacaggggctggagaatcaggaaaaagcaccattgtgaagcaga

SEQ ID NO: 90132 - DNA, 120 bp, Artificial Sequence
  ENSG00000087258_97 (sequence is synthesized)
gcgccatgatggtagggagtagcgactcggagacaattttcccatctgcttgacatgttcttatttttattcgagagctccctggggctttcttcgcagagccccccttggctcgccgca

SEQ ID NO: 90133 - DNA, 120 bp, Artificial Sequence
  ENSG00000087258_98 (sequence is synthesized)
cccttctgagccaggggtaatttagcttggggcttctcttgagcttgtgcaacccaaattgatggggaggcggggcctggggaattgccctttgcaacaaggtgcatgttgcatctgtct

SEQ ID NO: 90134 - DNA, 120 bp, Artificial Sequence
  ENSG00000087258_99 (sequence is synthesized)
ggagcccttgcagatctgtaaatgcaagccgcgccacccctttctcccgaggggggacgttttaaaacttcagaagtctgtaatcagcagtggcggactcggagcccagtagaagcccca

SEQ ID NO: 90135 - DNA, 120 bp, Artificial Sequence
  ENSG00000087258_100 (sequence is synthesized)
gccacctgagctggatgaggtttcaggcgttgcaagtggtggacagcgcccagccgaggccggaaaagtcgatggggctcagttcggcgacgctcggctaggatcatccatgaagatggc

SEQ ID NO: 90136 - DNA, 120 bp, Artificial Sequence
  ENSG00000087258_101 (sequence is synthesized)
cagatgaagcaatatgttctttctgtctggaagcttttaagattttgtgttcatcttgaagtttagcagttgtaccaaggatcatccatgaagatggcttctccggagaagacgtgaaac

SEQ ID NO: 90137 - DNA, 120 bp, Artificial Sequence
  ENSG00000087258_102 (sequence is synthesized)
ttaaatgaacgagaagagactccgctatgtttgaaagatatatggtggcacagtcaccaacctaagccattgcatccacccctctggcaaactcccagcaaactcaccaactttgcaagt

SEQ ID NO: 90138 - DNA, 120 bp, Artificial Sequence
  ENSG00000087258_103 (sequence is synthesized)
tgcagatgaggaagagttggtgacagttctaaattggagctgccacaacactgtctaagtacctgtccttgggcaattaacttgtacagaaaaaaatatgtattaaacaaaacaagcctt

SEQ ID NO: 90139 - DNA, 120 bp, Artificial Sequence
  ENSG00000087258_104 (sequence is synthesized)
gtctggccaccatctcccctccttagaagaactttccttgccttgttgtggagtgaggatagccatttgaattgactgcctttcctcttttacaccaagggctatgttttctgcctcccc

SEQ ID NO: 90140 - DNA, 120 bp, Artificial Sequence
  ENSG00000087258_105 (sequence is synthesized)
tgggtaagtatgaggacctacagggctctccttcctgtagaaagtcagtgtcctagaacagggactgtttgggggtaacatttccagtcttctattaagtggtgaatggaataagtacta

SEQ ID NO: 90141 - DNA, 120 bp, Artificial Sequence
  ENSG00000087258_106 (sequence is synthesized)
tataaaagcctctaatttgcaaacatttatattaactgttaagactgaactatatacagctacactggcaaggctaaataaaaggagggagggagagagggagaggagaaaatagcctca

SEQ ID NO: 90142 - DNA, 120 bp, Artificial Sequence
  ENSG00000087258_107 (sequence is synthesized)
gaattctttccagaagcagctctttgtccctgtttgggactgaatctcagtgatcctccctctgggacctggagattggagaagggggcggagggcaggtacagcctccaagcacctggg

SEQ ID NO: 90143 - DNA, 120 bp, Artificial Sequence
  ENSG00000087258_108 (sequence is synthesized)
ctctgcatctgagcctctggatggagagcattcatctctgattgctgtgtgatttgattgtctattatacacatgtcctgtctttgctaaaaatcatcttcctcacagaggaaaactgtc

SEQ ID NO: 90144 - DNA, 120 bp, Artificial Sequence
  ENSG00000087263_0 (sequence is synthesized)
gtaccctcaggaaggtagcgtcttgatctgcgtggcgtggttctgtgccttgggaagagatgaatgggaagcggccagcggagcccggcccagcccgggtgggaaaaaagggaaagaagg

SEQ ID NO: 90145 - DNA, 120 bp, Artificial Sequence
  ENSG00000087263_1 (sequence is synthesized)
aggtgatggcggagttttcggacgctgttacggaagaaaccttgaaaaagcaggtggctgaggcctggagccgcaggacgccgttcagtcacgaagtcattgtcatggacatggaccctt

SEQ ID NO: 90146 - DNA, 120 bp, Artificial Sequence
  ENSG00000087263_2 (sequence is synthesized)
ttcttcactgtgtgatcccaaacttcatccaaagccaagacttcttagaagggcttcagaaggaactgatgaacttggacttccatgagaagtataatgatttatataagttccagcagt

SEQ ID NO: 90147 - DNA, 120 bp, Artificial Sequence
  ENSG00000087263_3 (sequence is synthesized)
ctgatgatttgaagaagagaagagagcctcacatctccactttaaggaaaattctgtttgaagatttccggtcctggctttctgatatttctaaaattgacctggaatcaaccattgaca

SEQ ID NO: 90148 - DNA, 120 bp, Artificial Sequence
  ENSG00000087263_4 (sequence is synthesized)
tgtcctgtgctaaatatgaattcactgatgccctgctgtgccatgatgatgagctggaagggcgccggattgccttcatcctgtacctggttcctccctgggacaggagcatgggtggta

SEQ ID NO: 90149 - DNA, 120 bp, Artificial Sequence
  ENSG00000087263_5 (sequence is synthesized)
ccctggacctgtacagcattgatgaacactttcagccgaagcagattgtcaagtctcttatcccttcgtggaacaaactggttttctttgaagtatctcctgtgtcctttcaccaggtgt

SEQ ID NO: 90150 - DNA, 120 bp, Artificial Sequence
  ENSG00000087263_6 (sequence is synthesized)
ctgaagtgctgtctgaagaaaagtcacgtttgtctataagtggctggtttcatggtccatcattgactcggcctcccaactactttgaaccccccatacctcggagccctcacatcccac

SEQ ID NO: 90151 - DNA, 120 bp, Artificial Sequence
  ENSG00000087263_7 (sequence is synthesized)
aagatcatgagattttgtatgattggatcaaccctacttatctggacatggattaccaagttcaaattcaagaagagtttgaagaaagttctgaaattctcctgaaggagtttcttaagc

SEQ ID NO: 90152 - DNA, 120 bp, Artificial Sequence
  ENSG00000087263_8 (sequence is synthesized)
ctgagaaattcacgaaagtctgtgaggccttggagcatggacatgtggaatggagcagccgaggtccccctaacaaaaggttttatgagaaagctgaggagagtaagcttcctgagatat

SEQ ID NO: 90153 - DNA, 120 bp, Artificial Sequence
  ENSG00000087263_9 (sequence is synthesized)
tgaaggagtgcatgaagttatttcgctctgaggcactattcttgctgctctccaacttcacaggcctgaagcttcatttcttggccccttcggaagaagatgagatgaatgataaaaaag

SEQ ID NO: 90154 - DNA, 120 bp, Artificial Sequence
  ENSG00000087263_10 (sequence is synthesized)
aggcagaaaccactgatatcactgaagaagggactagccatagtcctcctgagccagagaataatcagatggccatcagcaacaacagccaacagagcaatgagcagacagacccagagc

SEQ ID NO: 90155 - DNA, 120 bp, Artificial Sequence
  ENSG00000087263_11 (sequence is synthesized)
cagaggaaaatgaaacaaagaaagaatcaagtgttcccatgtgccaaggggaactgaggcattggaagaccggtcactacactttaattcatgaccatagcaaggctgaatttgccctag

SEQ ID NO: 90156 - DNA, 120 bp, Artificial Sequence
  ENSG00000087263_12 (sequence is synthesized)
acttaattctgtactgtggctgtgaaggctgggagccagaatatggcggttttacttcttacattgccaaaggtgaagatgaagagctgctaacagtgaatccagaaagcaattctttgg

SEQ ID NO: 90157 - DNA, 120 bp, Artificial Sequence
  ENSG00000087263_13 (sequence is synthesized)
cattggtctacagagacagagagactctgaaatttgtcaagcatattaaccaccgaagcctggaacaaaagaaaaccttcccaaacagaacaggtttctgggacttttcattcatctatt

SEQ ID NO: 90158 - DNA, 120 bp, Artificial Sequence
  ENSG00000087263_14 (sequence is synthesized)
atgaatgacagcactgggcaaagctgaacaaaaatgtgacccttcgtaattactgggaagtctgaaagagctaagcatggagtcaaggagaactacatggtagcttgcctgacagtgttc

SEQ ID NO: 90159 - DNA, 120 bp, Artificial Sequence
  ENSG00000087263_15 (sequence is synthesized)
ttaaaactggttgtcttttactaggactcataatgattgtcctcaaccgagaccttgagcttgcagctaagtacttatctcttgattaaaaaaaaaaagttggcttttttttttttaaca

SEQ ID NO: 90160 - DNA, 120 bp, Artificial Sequence
  ENSG00000087263_16 (sequence is synthesized)
tttagtcctttttccatattggcttcttcagtgaatttttaagttcaatttgtttttattgaggtaaaatatttataacataaaactgaccagcttacccatttttaaatatgcaattca

SEQ ID NO: 90161 - DNA, 120 bp, Artificial Sequence
  ENSG00000087263_17 (sequence is synthesized)
gtggattaagtacattctcattgttgtccagccatcaccatcatccatctccagaagttttccatcttcccaaattctgtgcccattgaacaataactccccacctccccttcccctagc

SEQ ID NO: 90162 - DNA, 120 bp, Artificial Sequence
  ENSG00000087263_18 (sequence is synthesized)
aacagccataccttttgtctctatcatcaacttcactactcatatttctcatgtaagtggaatcatacagtatttgtccttttgtgactggtttcacttagcataaagtctttaagatgc

SEQ ID NO: 90163 - DNA, 62 bp, Artificial Sequence
  ENSG00000087263_19 (sequence is synthesized)
gtctttaagatgcatccatgtttccagtgtttcggtttttttagaaaaactcatacgtgatc

SEQ ID NO: 90164 - DNA, 80 bp, Artificial Sequence
  ENSG00000087263_20 (sequence is synthesized)
gaaaaaaacataagtgattgcagaattttgttcttctcataatttctggtttagaaaattatggagccttacatcctgat

SEQ ID NO: 90165 - DNA, 120 bp, Artificial Sequence
  ENSG00000087263_21 (sequence is synthesized)
aatttctggtttagaaaattatggagccttacatcctgatcatgctgggccttagaattctgacacagtgagtcatcacatttcctcccactgcctgtggccttgttccaccatgactct

SEQ ID NO: 90166 - DNA, 120 bp, Artificial Sequence
  ENSG00000087263_22 (sequence is synthesized)
cacagtacagtgtaggcttagtgtagtattattcccttggaaagggtctggcctaccatcacatgccccaagaaacttctggttggtaaagaagataggctgcttattgccatgtgtagt

SEQ ID NO: 90167 - DNA, 120 bp, Artificial Sequence
  ENSG00000087263_23 (sequence is synthesized)
cacttccaagtgcccactgcctttccatcctgcaattgtggcctgtgtataattaaatgattttagcctcacgtgttgcttctgttttcctaaatactgtagggtcaactatataactaa

SEQ ID NO: 90168 - DNA, 120 bp, Artificial Sequence
  ENSG00000087263_24 (sequence is synthesized)
ttgctttttattttaagagacggaatgctaaaaccacatcagaatgccaagaggctgtgcatcttgttaatttttttcttgaactgttccagggagttacatcataattacctgtgtgtg

SEQ ID NO: 90169 - DNA, 120 bp, Artificial Sequence
  ENSG00000087263_25 (sequence is synthesized)
ggtatgcatgggtggatgaaagatgctgttctcattccatcccaatagagtcttctgtttcctttctcttttttacatttatttttagcttttgcagtagtgtttagtgtgggttttact

SEQ ID NO: 90170 - DNA, 120 bp, Artificial Sequence
  ENSG00000087263_26 (sequence is synthesized)
aattaatagaaaaagcactgggcctttaaacttcttaactactcttctctttcatctcctaaaacttttgagtattcattcttttctgaagtttgcatttaaatgaaaatgactttcgct

SEQ ID NO: 90171 - DNA, 120 bp, Artificial Sequence
  ENSG00000087263_27 (sequence is synthesized)
ttggcttttaggtttagtttcaaaaaggtttaattctgcaccctagccagttaagaaatgttttagcaggtatgcccttgatatggatatttatatattttacacatgtagtaatattat

SEQ ID NO: 90172 - DNA, 120 bp, Artificial Sequence
  ENSG00000087263_28 (sequence is synthesized)
ttctataacttactgttataaaacactaatttttaaatgatgagataaaaagaaatatctagaactagttctaacattgtcttcccctatgcatatggtaacgaaccattttacaccata

SEQ ID NO: 90173 - DNA, 75 bp, Artificial Sequence
  ENSG00000087263_29 (sequence is synthesized)
cttcccctatgcatatggtaacgaaccattttacaccatactattttggagaccacaattttttttgcgcatgat

SEQ ID NO: 90174 - DNA, 120 bp, Artificial Sequence
  ENSG00000087263_30 (sequence is synthesized)
attttttaaccacagtgtagcaacactcaagtgggattgcgaatactgttactaatggttaatgtcacagcttgccttttctatattccagctgactaaaggtcatctcactcacttgcc

SEQ ID NO: 90175 - DNA, 120 bp, Artificial Sequence
  ENSG00000087263_31 (sequence is synthesized)
ttctgatgtgttttcatgagttgaggggaaagggtgtcagtggcataacttcaggaagacccagggaaaagtgcttgggtaggtgaaactgtcatgtgtgccaagcttggaaaatagttt

SEQ ID NO: 90176 - DNA, 120 bp, Artificial Sequence
  ENSG00000087263_32 (sequence is synthesized)
gagactcatggctgtaggcaccatccaaggccaattttccaattctggaaagccaaatctgaatcttagaatacctcacaagtgttaaaatgtgctttttagtgtctcctttatctcagt

SEQ ID NO: 90177 - DNA, 120 bp, Artificial Sequence
  ENSG00000087263_33 (sequence is synthesized)
gtgtttatgatctgtcaacacataatcatcttttatacactacaaaaagggactcgggtgtctgaggggagagaatccctaggagcccaactctgatgttgctgtcagttacatcatcta

SEQ ID NO: 90178 - DNA, 120 bp, Artificial Sequence
  ENSG00000087263_34 (sequence is synthesized)
cagcagcacctcttagattgtgaaggatggtgtaacttaaaagattgtgtttctgcactgaagatagatacacagtgatagtgaagtttgttttccttatagtacttcattttgcatctt

SEQ ID NO: 90179 - DNA, 120 bp, Artificial Sequence
  ENSG00000087263_35 (sequence is synthesized)
gattgctttttagggcctggggccaatgtcaacaactcttaggtagcaaaagaagaattagaacatgggcatcttttttatacctctttcagataaaagctatgatgttcacctgtaaaa

SEQ ID NO: 90180 - DNA, 120 bp, Artificial Sequence
  ENSG00000087263_36 (sequence is synthesized)
tacaacattgtgtatgtcatataattcttgttgacattgttaacccactttgtagaggaggaaagagaccgagaaattgagtttgcatagcttaaaattaagggagctagcatacaaacc

SEQ ID NO: 90181 - DNA, 120 bp, Artificial Sequence
  ENSG00000087263_37 (sequence is synthesized)
taagtctgtctgattccaaggcccaagttctcagtgataaaatgctcaatcttgttagtaatcaaggaaacagaagttaacactggagataccatttttcacatgttaggttggtaaata

SEQ ID NO: 90182 - DNA, 120 bp, Artificial Sequence
  ENSG00000087263_38 (sequence is synthesized)
agtctttgtatcacctccctgaagtctaccttggccaacctgtttataattgcaaaccactccccaggcttagcactccccattctttccctgggtttctttttttcctttatgcacttc

SEQ ID NO: 90183 - DNA, 120 bp, Artificial Sequence
  ENSG00000087263_39 (sequence is synthesized)
tcaccatctttatactaatctgctttttgtgtctgttgtctatctccctcaatgggcatagaaactagactataataacgacttaagtatttgtttaatgaataaagcacagagggtaat

SEQ ID NO: 90184 - DNA, 120 bp, Artificial Sequence
  ENSG00000087263_40 (sequence is synthesized)
aagatgccctgctgtgccatgatgatgagctggaagggcgccggattgccttcatcctgtacctggttcctccctgggacaggagcatgggtggtaccctggacctgtacagcattgatg

SEQ ID NO: 90185 - DNA, 120 bp, Artificial Sequence
  ENSG00000087263_41 (sequence is synthesized)
ctgtctatgaagtcattgaatacctttagacttgaggttttagggtgggtttgccttgaacagtccttgcattgacattcttaagagcatgccttcatttaaccaagcttactgagtgtt

SEQ ID NO: 90186 - DNA, 120 bp, Artificial Sequence
  ENSG00000087263_42 (sequence is synthesized)
aactatgtgttaagtgctataattatatggaagccttagacagtgcctgccctgtaagactttaaaatctagtgttcaaagtgcaagctctgtactctcaaagacttctcagtttcttca

SEQ ID NO: 90187 - DNA, 120 bp, Artificial Sequence
  ENSG00000087263_43 (sequence is synthesized)
ctttctgtctttggaccttatacacatgactgaattaaccaggataaatacatgaaagatatgactcttaataattcagaaagctgaaaactaaactgctttccatggaaaattctgttt

SEQ ID NO: 90188 - DNA, 120 bp, Artificial Sequence
  ENSG00000087266_0 (sequence is synthesized)
cagccgggtgacccaggccgaggccggcagaagacagcctgatgccttgaagacttcctcttgcacttttgttggagggtgctggtttgctaaaagcagagagtatttttctttttattt

SEQ ID NO: 90189 - DNA, 120 bp, Artificial Sequence
  ENSG00000087266_1 (sequence is synthesized)
attttgtttttaattttttaattttagctccagctcagttgcccagactggagagcagtggccaatcatagcttactgcctcctggaactcctggctcaatcgatcctcctggataagcc

SEQ ID NO: 90190 - DNA, 120 bp, Artificial Sequence
  ENSG00000087266_2 (sequence is synthesized)
tcctccgggtactatagcttcatggcggctgaagagatgcattggcctgtccctatgaaggccattggtgcccagaacctgctaaccatgcctgggggcgtggccaaggctggctacctg

SEQ ID NO: 90191 - DNA, 120 bp, Artificial Sequence
  ENSG00000087266_3 (sequence is synthesized)
cacaagaagggcggtacccagctgcagctgctgaaatggcccctgcgctttgtcatcatccacaaacgctgcgtctactacttcaagagtagcacctctgcctccccgcagggcgccttc

SEQ ID NO: 90192 - DNA, 120 bp, Artificial Sequence
  ENSG00000087266_4 (sequence is synthesized)
tccctgagtggctataaccgggtgatgcgggcggctgaggagaccacgtccaacaacgttttccccttcaagatcatccatatcagcaagaagcaccgcacgtggttcttctcggcctcc

SEQ ID NO: 90193 - DNA, 120 bp, Artificial Sequence
  ENSG00000087266_5 (sequence is synthesized)
tccgaggaggagcgcaagagctggatggccttgctgcgcagggagattggccacttccacgaaaagaaagacctgcccttggacaccagcgactccagctcggacacagacagcttctac

SEQ ID NO: 90194 - DNA, 120 bp, Artificial Sequence
  ENSG00000087266_6 (sequence is synthesized)
ggcgcagttgagcggcctgtggatatcagcctttccccgtaccccacggacaatgaagactatgagcacgacgatgaggatgactcctacctggagcctgactccccggagcccggaagg

SEQ ID NO: 90195 - DNA, 120 bp, Artificial Sequence
  ENSG00000087266_7 (sequence is synthesized)
cttgaggatgccctgatgcacccaccggcttacccaccacccccagtgcccacgcccaggaagccagccttctctgacatgccccgggcccactcctttacctccaagggccccggtccc

SEQ ID NO: 90196 - DNA, 120 bp, Artificial Sequence
  ENSG00000087266_8 (sequence is synthesized)
ctactgccacccccgccccctaagcacggcctcccagatgttggcctggctgctgaggactccaagagggacccactgtgcccgaggcgggctgagccttgccccagggtacctgctacc

SEQ ID NO: 90197 - DNA, 120 bp, Artificial Sequence
  ENSG00000087266_9 (sequence is synthesized)
ccccgaaggatgagcgatccccctctgagcaccatgcccaccgcacccggcctccggaaacccccttgcttccgggagagtgccagccccagcccggagccctggacccctggccacggg

SEQ ID NO: 90198 - DNA, 120 bp, Artificial Sequence
  ENSG00000087266_10 (sequence is synthesized)
gcctgctccacttccagtgctgccatcatggccactgccacctccagaaactgtgacaaactcaagtccttccacctgtccccccgaggaccacccacatctgagcccccacctgtgcca

SEQ ID NO: 90199 - DNA, 120 bp, Artificial Sequence
  ENSG00000087266_11 (sequence is synthesized)
gccaacaagcccaagttcctgaagatagctgaagaggaccccccaagggaggcagccatgcccggactctttgtgccccccgtggctccccggcctcctgcgctgaagctgccagtgcct

SEQ ID NO: 90200 - DNA, 120 bp, Artificial Sequence
  ENSG00000087266_12 (sequence is synthesized)
gaggccatggcgcggcccgcagtcctgcccaggccagagaagccgcagctcccgcacctccagcgatcaccccccgatgggcagagtttcaggagcttctcctttgaaaagccccggcaa

SEQ ID NO: 90201 - DNA, 120 bp, Artificial Sequence
  ENSG00000087266_13 (sequence is synthesized)
ccctcacaggctgacactggcggggacgactcggacgaggactatgagaaggtgccactgcccaactcggtcttcgtcaacaccacggagtcctgcgaagtggaaaggttgttcaaggct

SEQ ID NO: 90202 - DNA, 120 bp, Artificial Sequence
  ENSG00000087266_14 (sequence is synthesized)
acaagcccccggggagagccccaggatggactctactgcatccggaactcctctaccaagtcggggaaggtcctggttgtgtgggacgaaacctctaacaaagtgaggaactatcgcatt

SEQ ID NO: 90203 - DNA, 120 bp, Artificial Sequence
  ENSG00000087266_15 (sequence is synthesized)
tttgagaaggactctaagttctacctggagggcgaggtcctgtttgtgagtgtgggcagcatggtggagcactaccacacccacgtgctgcccagccaccagagcctgctgctgcggcac

SEQ ID NO: 90204 - DNA, 120 bp, Artificial Sequence
  ENSG00000087266_16 (sequence is synthesized)
ccctacggctacactgggcctaggtgatggcagtccatgtggctgccaggccaaggcagtcacaggggccctgaccccaggccacacagacggacatgggcccacatgggagggtgagca

SEQ ID NO: 90205 - DNA, 120 bp, Artificial Sequence
  ENSG00000087266_17 (sequence is synthesized)
ggagcaaggctgtgcttgcctagggcctctgtgatggacatctcgtaggacccagccagtctcatccagcaggttgggttctagggctgaaccaggcgccaggctccagaggacgaaggg

SEQ ID NO: 90206 - DNA, 120 bp, Artificial Sequence
  ENSG00000087266_18 (sequence is synthesized)
actctgttgccccacactaacttgccctgtcccaatcccagaaacccaggaccaagctgtgcctgggctccaaggacaggaacactggtccccccatcacactcacccctaagtgggctg

SEQ ID NO: 90207 - DNA, 120 bp, Artificial Sequence
  ENSG00000087266_19 (sequence is synthesized)
ggagccaggcagggccagggcagctgggtgggggccggggctggccctgggacccccaggaacgctaagacacaggctccagtaggggctgttgcctccaataaagcagcagtgagcttt

SEQ ID NO: 90208 - DNA, 120 bp, Artificial Sequence
  ENSG00000087266_20 (sequence is synthesized)
gccttggtggctggggcttgattgggaaggaggggattaccagcttactgggtgcccatgctgatgtctaagtggtgaccgcagcagtacccgggaaccccaacagttggttgtcttgtc

SEQ ID NO: 90209 - DNA, 120 bp, Artificial Sequence
  ENSG00000087266_21 (sequence is synthesized)
ttccagggtgcaggtcactgagtgacttccccagggtgcacagcgagtaacagatcaggacccaaacttgggcagtctgggctgggagcccacaccccactcaccagttctgctgcctca

SEQ ID NO: 90210 - DNA, 120 bp, Artificial Sequence
  ENSG00000087266_22 (sequence is synthesized)
ggtcaggccagggcagtgctgctgcagagctagaaggccctgcagctacagctgcttcattccctgcattagtgcctggttactgggtacctcctgagtggctgtccccgttccagaact

SEQ ID NO: 90211 - DNA, 120 bp, Artificial Sequence
  ENSG00000087266_23 (sequence is synthesized)
tgcatacactgagcgggctacagagctagaaggccctgcagctacagctgcttcattccctgcattagcgagcagttattgggtacctcctgcatgcctggtcccattccagacaggggc

SEQ ID NO: 90212 - DNA, 120 bp, Artificial Sequence
  ENSG00000087266_24 (sequence is synthesized)
ctctggcctggctgagttcacagcccagtctggggacagctgggtatgaggtgcttacggcacagtgtccagggcagctgggtgtgcagggactgggggctcccggaagattttttggag

SEQ ID NO: 90213 - DNA, 120 bp, Artificial Sequence
  ENSG00000087266_25 (sequence is synthesized)
gaagtaacagctacgatgggatgggaacagtggaccctaagcaggccaagggtgcgtagggacggtggtacccagatgcccaagtcttccaggcaatacctggctcaggcccagccccaa

SEQ ID NO: 90214 - DNA, 120 bp, Artificial Sequence
  ENSG00000087266_26 (sequence is synthesized)
tccatccccttactttctgccatggagttccagcaggtcactctccctggcacaccttccaggctggatttttaatgaaacagactcagggaggtaggggctggcagggaccctagaatc

SEQ ID NO: 90215 - DNA, 120 bp, Artificial Sequence
  ENSG00000087266_27 (sequence is synthesized)
cttgtgatttttcttagcaccttatgtcagggaaacctaaactgaggtcagcacttgggcccactgacagtgactgactgggggagaaggtcctgcagcccccttcccctgggtgtgttc

SEQ ID NO: 90216 - DNA, 120 bp, Artificial Sequence
  ENSG00000087266_28 (sequence is synthesized)
tggggacctgtggtttgctggcggaaacaagtgatgaggctggttagcggatgtgggaggctgtgaccccagggggccatagggtgcggtggaactgcaggccctgcagatgacggcagc

SEQ ID NO: 90217 - DNA, 120 bp, Artificial Sequence
  ENSG00000087266_29 (sequence is synthesized)
cagctgcttccaggaaccaggtgtccaaggccacctctgcaggggtttcctcttcagcctgcctggggtgagaggtcagtgcaccacagccgaggctggagcacagggagcttctgttgt

SEQ ID NO: 90218 - DNA, 120 bp, Artificial Sequence
  ENSG00000087266_30 (sequence is synthesized)
tctgatctatctctggaaaaccagccattcctcctccctgcagtcagaattctttgccctgtctgacctgaacttgcttagggagtcatgccactccccactgtggccatagtttctctt

SEQ ID NO: 90219 - DNA, 86 bp, Artificial Sequence
  ENSG00000087266_31 (sequence is synthesized)
gggagtcatgccactccccactgtggccatagtttctcttcctgtaaaattttattattttagttttttgtttttgagatgtccgt

SEQ ID NO: 90220 - DNA, 78 bp, Artificial Sequence
  ENSG00000087266_32 (sequence is synthesized)
cctgtaaaatttttaaatggagaattgggtgcgagatgtggtttccagcctggtgcctggggtgctgagctagtgagt

SEQ ID NO: 90221 - DNA, 120 bp, Artificial Sequence
  ENSG00000087266_33 (sequence is synthesized)
tggtttccagcctggtgcctggggtgctgagctagtgagtggtgcagtccaggacacctttgctttatgtcacttacacggtcacctggagccggctcaagtggctaaagcatcctgggg

SEQ ID NO: 90222 - DNA, 120 bp, Artificial Sequence
  ENSG00000087266_34 (sequence is synthesized)
cccagagccaggtgataggtccctctggccaactggacagttgaggcctgtggttacccgaagcccagctggggccctggtccagcctcgcctcccagactctgcacctgctagcacagc

SEQ ID NO: 90223 - DNA, 120 bp, Artificial Sequence
  ENSG00000087266_35 (sequence is synthesized)
tgtccacgtctgtgtgagctgctctaggccgagggcctcagtttcaagagtgtgttggggtgggatggggcaggccgtggtcctccagcatgaagaaggagccatgaggagttcccatga

SEQ ID NO: 90224 - DNA, 120 bp, Artificial Sequence
  ENSG00000087266_36 (sequence is synthesized)
cctcccgagacttgccataagtgttctagtccacatataagggtagggttgggattaccatttactgaccacatctgtgaggtgccgagctgggtgcttgacatcatttgcttggagaag

SEQ ID NO: 90225 - DNA, 120 bp, Artificial Sequence
  ENSG00000087266_37 (sequence is synthesized)
accctatctatccttcactgctctgagcctagaccctggcccctgcctggctccctgccaggctccctgccacccctcacgacctctgatggtcgttgtgggggtctcttgcctggctcc

SEQ ID NO: 90226 - DNA, 120 bp, Artificial Sequence
  ENSG00000087266_38 (sequence is synthesized)
cagggctagggttagggctctggaggtgctttcactcaaccaagggggccacagcactggggagtgaaactgccccgcctcaccctgcgttgccctctgggtctgtgagggtgggctggc

SEQ ID NO: 90227 - DNA, 120 bp, Artificial Sequence
  ENSG00000087266_39 (sequence is synthesized)
aggaggcctaggccttgccctaggggcagtcctgcttcctcattttatagatagggaaactgaggctttgggaggactcactgacatacctaccttcaagatgagttcaggtgggctcag

SEQ ID NO: 90228 - DNA, 120 bp, Artificial Sequence
  ENSG00000087266_40 (sequence is synthesized)
ttctggggcttgggaaaagggccccagtggctttgggaagcacccccagcccagggtgaaacatgcttcttctcttcctgtggttccatccgaaggattgtggtgagccccgtgccttca

SEQ ID NO: 90229 - DNA, 120 bp, Artificial Sequence
  ENSG00000087266_41 (sequence is synthesized)
gttaataaagatttgtattgtgaaaagattttttcttttttttttgggacacagtctcactctgtcgcccaggctagagtggattggcgtgatctcggctcaatgcaaatctccagggtt

SEQ ID NO: 90230 - DNA, 120 bp, Artificial Sequence
  ENSG00000087266_42 (sequence is synthesized)
gcaaatctccagggttcaatcgattctcctgcctcaccctcccatgtagctgggattacagctgcctgccaaatttttgtatttttagtggaaccggggtttcaccatgttggccaggct

SEQ ID NO: 90231 - DNA, 120 bp, Artificial Sequence
  ENSG00000087266_43 (sequence is synthesized)
cctcccaagtgctgggattacaggcgcgagccacggcgcccagccttgaaaagatgtttttagaaccagaagaaacctcggttcccactgatccttctgggccacgttgtgcggagctcc

SEQ ID NO: 90232 - DNA, 120 bp, Artificial Sequence
  ENSG00000087266_44 (sequence is synthesized)
ctgggccacgttgtgcggagctcccctgctggttggggctcagcgcagccccagggaggtgcttcctgcacctcaggatgggcgagggtgggcattgggggagagggggacctgggacct

SEQ ID NO: 90233 - DNA, 120 bp, Artificial Sequence
  ENSG00000087266_45 (sequence is synthesized)
gcggcttagttccctgaggcaggcagggcttattggggccatttcatagaaaggcagattgaagctcagcagggaagaggcttttgagggtgatccaggcgctggagggatggcctagga

SEQ ID NO: 90234 - DNA, 120 bp, Artificial Sequence
  ENSG00000087266_46 (sequence is synthesized)
caccagggtcacaccaggaacatgggagggccgtgcttgtctctagacgaggggaatgggggaagggccacaacctctgtttctgtgacccagcagcatcaagcccctcgctgggcacct

SEQ ID NO: 90235 - DNA, 120 bp, Artificial Sequence
  ENSG00000087266_47 (sequence is synthesized)
cgcacacaccccctgccttatctctgcctgcacgccctgttccctccacctagactgcctgctgagggggcagtgccaggaggttgcctgtccttggggaagaggggcagtgaccctgtg

SEQ ID NO: 90236 - DNA, 120 bp, Artificial Sequence
  ENSG00000087266_48 (sequence is synthesized)
aagatgcttgacagacaacccccaccacctcagaagtgtgtgtgagtggtgaacccttttaagccatcttccagccattctcactggagggagatttgatgggtacagagcagaccccta

SEQ ID NO: 90237 - DNA, 120 bp, Artificial Sequence
  ENSG00000087266_49 (sequence is synthesized)
cctgtctaccctccttcggacccctaggaagcttcgcaggccttccaggctgccagacagctgccctggcgttgccgtctgcttcttccctggccccactctgaggggctcagagctgag

SEQ ID NO: 90238 - DNA, 120 bp, Artificial Sequence
  ENSG00000087266_50 (sequence is synthesized)
gcagaatccctttttcattcatttcctgcagaataaaacaacatacagaaaagtgaataaaacataaatgcacaacctaacacactgttaggaagtgaacgatctgcaaccaccatcagg

SEQ ID NO: 90239 - DNA, 120 bp, Artificial Sequence
  ENSG00000087266_51 (sequence is synthesized)
aaatagttttgccagcacccaagtgccctcccctcacagtgtcacttccggcctctctgccctggcttatgtgagtcttgtgttcttgtttttctaaaaagtcttcagcacccaattatg

SEQ ID NO: 90240 - DNA, 120 bp, Artificial Sequence
  ENSG00000087266_52 (sequence is synthesized)
caggcattgcagtattttcctgtttctgtgctttatccccttgaatcatacagatgcaaattctggcagctggcttctttggctcgttattatgtctgtgagatttattcatgttgctgt

SEQ ID NO: 90241 - DNA, 120 bp, Artificial Sequence
  ENSG00000087266_53 (sequence is synthesized)
gcgtagtatagtttgtgcatgttcattgctaaaaacttccattgtttggctgtatcgtagttcacagattcatttcactgtcagtcaagcttgtccaatgcatgcagcccaggatgcctt

SEQ ID NO: 90242 - DNA, 120 bp, Artificial Sequence
  ENSG00000087266_54 (sequence is synthesized)
caaatttgtaaactttcttaaaacattataaagatttttgtttgcgatttttttttttagctcatcagctatagttagtggtagtgtattttatgcgtgacccgagacagttcttccggt

SEQ ID NO: 90243 - DNA, 120 bp, Artificial Sequence
  ENSG00000087266_55 (sequence is synthesized)
agacagttcttccggtatggtccatggaagccaaaagattggacatgcctgctgtagatggacagttggtttgtttctagtttggggtaactacacacaatgctgctagcaacagttttg

SEQ ID NO: 90244 - DNA, 120 bp, Artificial Sequence
  ENSG00000087266_56 (sequence is synthesized)
tccatgtctctgatgcacgtgtgttttttgcaaatggtgcacaaatttttctagggtttgtactcaggagtctgactcctgggttctagggtatgaagatctttctaaatattgttctag

SEQ ID NO: 90245 - DNA, 120 bp, Artificial Sequence
  ENSG00000087266_57 (sequence is synthesized)
tttacgtgcccaccagcagtaaaacagaattcccttgccttcccatccttggcagacatttcacttttgccagtctggtggggtgtatagttatggccttaatttgcatttagctaatta

SEQ ID NO: 90246 - DNA, 120 bp, Artificial Sequence
  ENSG00000087266_58 (sequence is synthesized)
ccaaggagattgagcatatttttatgtttttattaaccattttgattttgtctcctgtgaagtgtctatcatcttttgcccattttttaacttgttgtctttttctttttcttttctttt

SEQ ID NO: 90247 - DNA, 120 bp, Artificial Sequence
  ENSG00000087266_59 (sequence is synthesized)
caagcccagctaattttttgtatttttaagtagagacgggtttcatcatgttatgcaggctgctctcaaactcttgagctcaagcgatctgctggcctcagcctcccaaagttgggatta

SEQ ID NO: 90248 - DNA, 120 bp, Artificial Sequence
  ENSG00000087266_60 (sequence is synthesized)
ctcagcctcccaaagttgggattataggcgtgagctaccagattttttcttattaatctaataattctttgtatagtcttgatattatccataatgtgtattgcaaatatcttctctaac

SEQ ID NO: 90249 - DNA, 81 bp, Artificial Sequence
  ENSG00000087266_61 (sequence is synthesized)
gatattatccataatgtgtattgcaaatatcttctctaactctggcttgactgtttatggtgtcctttttttttggggggg

SEQ ID NO: 90250 - DNA, 120 bp, Artificial Sequence
  ENSG00000087266_62 (sequence is synthesized)
agtcctcccacctcagcctcctgagtagccggaactacagtcacgcacttccatgtccagataattttttttttttttttagagataggatcttactatgccccagctggtctcaaactc

SEQ ID NO: 90251 - DNA, 81 bp, Artificial Sequence
  ENSG00000087266_63 (sequence is synthesized)
atgccagttcttatttttaatgcagttgaattgatcagtgttttcattttggttagtgctttttgtggcttaagaaattct

SEQ ID NO: 90252 - DNA, 90 bp, Artificial Sequence
  ENSG00000087266_64 (sequence is synthesized)
tgccagttcttatttttaatgcagttgaattgatcagtgttttcattttggttagtgctttttgtggcttaagaaattctttccgccagc

SEQ ID NO: 90253 - DNA, 77 bp, Artificial Sequence
  ENSG00000087266_65 (sequence is synthesized)
tgattgtgccactgcacttcagcctgtgagacagagtgagaccctatgaaattatttccactccaaggtcatgaaga

SEQ ID NO: 90254 - DNA, 120 bp, Artificial Sequence
  ENSG00000087266_66 (sequence is synthesized)
accactgaaattatttccactccaaggtcatgaagatagtctcttagattatattctgaaatccttataaatgtaaatttcatatttaggcctttaattcacctagatttggttttttgc

SEQ ID NO: 90255 - DNA, 120 bp, Artificial Sequence
  ENSG00000087266_67 (sequence is synthesized)
atatggtgtgaggtaaggattcactttcatttttttctctccatagggttacacacctgtcctatcattgtttgtaatctaactttctgcgcccatctgcaatgccacctctgtcatatg

SEQ ID NO: 90256 - DNA, 120 bp, Artificial Sequence
  ENSG00000087266_68 (sequence is synthesized)
tccacatatgacatatgtagatctgttgttggattctttcctctgttccattagtctgtctgttcttgtgccaatatcaagctgtcttcattattatcaattatgtattgagatctgata

SEQ ID NO: 90257 - DNA, 120 bp, Artificial Sequence
  ENSG00000087266_69 (sequence is synthesized)
aagtaagtcttttccaccttatttttcttctttgagagtgtcttgactattctggctctttgtattttcatgtaaggtttttctcccatataagttttaaaatcagcttgtcaattccaa

SEQ ID NO: 90258 - DNA, 120 bp, Artificial Sequence
  ENSG00000087266_70 (sequence is synthesized)
caacaatgatgcacttgatagtttgggaatttattatagctatcaatcagttttgggaaaattgacgtctttacaatattgagttttctgattcatgaacatggtttacctctctttcca

SEQ ID NO: 90259 - DNA, 120 bp, Artificial Sequence
  ENSG00000087266_71 (sequence is synthesized)
tttgggtcttctttaaggtttaccaataggattttatatttttgtccattgtggtcttgcttatcttaagtttgatttgtaaatattttatgtttcttttagtctattgtaaattgtgta

SEQ ID NO: 90260 - DNA, 120 bp, Artificial Sequence
  ENSG00000087266_72 (sequence is synthesized)
tttttaatttcatttttttttttgttaatagcatataaaacacaccttgtcttttaactggagcattttgtccattgtgtatttaatgtaattaaatctaccatcttattttatgctaca

SEQ ID NO: 90261 - DNA, 120 bp, Artificial Sequence
  ENSG00000087266_73 (sequence is synthesized)
agaagcagcaggagtgagctgtgggcacagctgtggggcagccaggcgcgtcaggcctcacatgtctgggagatgtaggctgcctgggctggtggcccctgagccgcatggcctccctgg

SEQ ID NO: 90262 - DNA, 120 bp, Artificial Sequence
  ENSG00000087266_74 (sequence is synthesized)
gcaccaggctggacctgccttgggggctcgctggtcctggggcgctggcctctcagccccgggcaaagagaaggtgtggctgggacacaggcagctgggtgggtgctgccccagctccat

SEQ ID NO: 90263 - DNA, 120 bp, Artificial Sequence
  ENSG00000087266_75 (sequence is synthesized)
ccccatgcccagagcctggtgccagcgcccacacaaggaacatgctgtcctgggaggtgcccctgtgggctgaggggagccacacagccatgttgtatccagccgggtcgcctcctctga

SEQ ID NO: 90264 - DNA, 120 bp, Artificial Sequence
  ENSG00000087266_76 (sequence is synthesized)
aaagccgcccactggcgctgattcacactgaagtgtgacatgggccggtgatgcaatgtgtagaattgtttccacaaccgcctgaaggcagggcccacagcctcctccttgccgaagcaa

SEQ ID NO: 90265 - DNA, 120 bp, Artificial Sequence
  ENSG00000087266_77 (sequence is synthesized)
ggccctgcttggtttcccggcccccgatcacagatcgtgctggaactgctggccccaacgccctgaggtgactggccctttcttcatggattccggtcacatctggtccatctttgtcag

SEQ ID NO: 90266 - DNA, 120 bp, Artificial Sequence
  ENSG00000087266_78 (sequence is synthesized)
ctggcctctgggaagaatgtgggctcggccacctggagcagttgcctggggagatcagaggagccctgaggggttggcagagcgccctcgtggtatccatacccccatccctgtagctga

SEQ ID NO: 90267 - DNA, 120 bp, Artificial Sequence
  ENSG00000087266_79 (sequence is synthesized)
gtgtgtgtgtgcatgtccgcatgttgctctgtgtgtgtgcatgtccgcgtgttgcttgtgtttgtgtgtgcgtgtccgtgtgtcgctcgtctgtgtgtgaacatgtgtgcttgtcctgta

SEQ ID NO: 90268 - DNA, 120 bp, Artificial Sequence
  ENSG00000087266_80 (sequence is synthesized)
tctgtgtttatctgtatacttccatgtctgtgtgacagagtccttgtgtctgtgtgtctacatgtctgcgcgtgtccctgtgtctttgtgtatatatatccatgcctgtgtgcctgtgtt

SEQ ID NO: 90269 - DNA, 120 bp, Artificial Sequence
  ENSG00000087266_81 (sequence is synthesized)
cctgcgtgtgcttgtgtgtgcacgtgtgcatttgtgtgtttgtcagagtatgtgtgcatgtgtgtgtctgtcagcgtatccatgtgtgcatgtgtgtgtctgtcagcgtatccgtgtgtg

SEQ ID NO: 90270 - DNA, 120 bp, Artificial Sequence
  ENSG00000087266_82 (sequence is synthesized)
catgtgtgtgtctgtcagcttaaccatgtgtgcatgtgtttgtcagtgtatccgtgtgtgcatctgtgtatctgtccatgtatccgcgtgtgcctgtgtgtacctttgtgtgagcatcaa

SEQ ID NO: 90271 - DNA, 120 bp, Artificial Sequence
  ENSG00000087266_83 (sequence is synthesized)
gacaccgcagcagcatggtgacaggtccccccagggtgtctgcctctacagaggaagggactgaagcacccagagagctggcaggtgccgttttgcagaggccactttcccgagggagct

SEQ ID NO: 90272 - DNA, 120 bp, Artificial Sequence
  ENSG00000087266_84 (sequence is synthesized)
ggttgcaagggcccggcgggatgggacctgggcggggcctcagagccgaggctcccgcgccggccgtggatttccaaccaagctgtgtggactggcaggtgttgggggagtggagcggga

SEQ ID NO: 90273 - DNA, 120 bp, Artificial Sequence
  ENSG00000087266_85 (sequence is synthesized)
catcgaaggcttcttgattccaggctgcaccaacagatgtgggcctcctgtcccaagcgcccaccaacctccttgcagcgtggggaaactgaggcccgcagggggctcacgtgcctcccg

SEQ ID NO: 90274 - DNA, 80 bp, Artificial Sequence
  ENSG00000087266_86 (sequence is synthesized)
gccgggatcctcacctgcccgcccagtcccccgccgagaggggaggagccggcggctgccaggccagggccggcgggcat

SEQ ID NO: 90275 - DNA, 120 bp, Artificial Sequence
  ENSG00000087266_87 (sequence is synthesized)
tccctgagtggctataaccggcagcccagaccccagccagcccaggccctgtcccaaacagaggctgggccctaggattccctgctccagggtcctcccaggccgggatcagtttccagc

SEQ ID NO: 90276 - DNA, 120 bp, Artificial Sequence
  ENSG00000087266_88 (sequence is synthesized)
agcgcctggcggccgagtcaagccgccgcctcgacccagggcccgcgggccaggagagcgctcggcgggctgacccttggccctctgcctgccctgctggctggctcccactcatcctgc

SEQ ID NO: 90277 - DNA, 120 bp, Artificial Sequence
  ENSG00000087266_89 (sequence is synthesized)
aaatgctgctctgtgctgggcctgacacccagggtgcaggttgtttcatggtttgctagggagaagccgagtattcagaggtggccctgcggggaggcagcagggagcttcctcccaggg

SEQ ID NO: 90278 - DNA, 120 bp, Artificial Sequence
  ENSG00000087266_90 (sequence is synthesized)
acggggcctgggaaactccaaagccggcgtcaggtcatcgaggcctccgggctgattaggactaatggcgctcaggggtgcagcctcagcctccacccgccacccgtacccgccctgcct

SEQ ID NO: 90279 - DNA, 120 bp, Artificial Sequence
  ENSG00000087266_91 (sequence is synthesized)
caggacttcgttcctgctgtacccctgctggctgcctgtccccacaggtggctccttcctccccaccggaggagctgctcccaggcgggaccctgggggtggaatctctgaaatgccttc

SEQ ID NO: 90280 - DNA, 120 bp, Artificial Sequence
  ENSG00000087266_92 (sequence is synthesized)
ttgctctgtgtttgtgtgtgcatgtctgcgtgttgctctgtgtttgtgtgtgcatgtccgcgtgttgctctgtgtgtgtgcatgtccacgtgttgctctgtgtttgtgtgtgcatgtccg

SEQ ID NO: 90281 - DNA, 120 bp, Artificial Sequence
  ENSG00000087266_93 (sequence is synthesized)
cgtgttgctctgtgtgtgtgcatgtccgcgtgttgctgtttgtgtgtgcatgtctgcgtgttgctctgtgtgtgtgtgcatgtccgcgtgttgctctgtgtgtgtgtgtgtgcatgtctg

SEQ ID NO: 90282 - DNA, 120 bp, Artificial Sequence
  ENSG00000087266_94 (sequence is synthesized)
catgttgctctgtgtgtgtgtgcatgtctgtgtgttgctctgtgtttgtgtgtgcatgtctgcgtgttgctctgtgtgtgtgtgcatgtccacgtgttgctctgtgtgtgtgcatgtcct

SEQ ID NO: 90283 - DNA, 120 bp, Artificial Sequence
  ENSG00000087266_95 (sequence is synthesized)
tctgtgtccctctcactagcttccgtgttggggagttgctggcacaagttcatggccctgcgtgcagcagaaaccagaggagtggacctccctgctctgtcccatgcccagctggcaccc

SEQ ID NO: 90284 - DNA, 120 bp, Artificial Sequence
  ENSG00000087266_96 (sequence is synthesized)
tggctggccagggctctgctgggctgcttctgtcagcctcacggcagcccgacgtgctcagctcctgagacctacaacagcgagaggacagaaagccaggcttgggagcggggcgggaag

SEQ ID NO: 90285 - DNA, 120 bp, Artificial Sequence
  ENSG00000087266_97 (sequence is synthesized)
gcctggcaaggggcagggcagaatctccctgatgaggcataggcagcgggtagactgagactggcacctccaggataccgccctccccttcccctccaccatcgctcaccccccacccct

SEQ ID NO: 90286 - DNA, 120 bp, Artificial Sequence
  ENSG00000087266_98 (sequence is synthesized)
cctgctcagcctccctcctctcgtggcctacctttgtcctccactgaccctagtggggatgggcggtcagccatagaccctgggttgcttgtcttgtctttttctttttgcggggacagg

SEQ ID NO: 90287 - DNA, 87 bp, Artificial Sequence
  ENSG00000087266_99 (sequence is synthesized)
tgggttgcttgtcttgtctttttctttttgcggggacaggggtctcactgtctttctcaggctggtttcaaattctgcagtgctggg

SEQ ID NO: 90288 - DNA, 120 bp, Artificial Sequence
  ENSG00000087266_100 (sequence is synthesized)
cctgaccttgtctgaagtgctctgggtgcaggctcctggacatggaggacggaggggaagtgaggtgggaacatggagagcacaggcctgatgcggaggccaccttgggggcaccaccga

SEQ ID NO: 90289 - DNA, 120 bp, Artificial Sequence
  ENSG00000087266_101 (sequence is synthesized)
cagccaggggccagcctggtgatgccgctgttgatgctgctgccttgttttacagacggggagactgaggcctagagccgcagagtggcctggccctgctgacgctcccccttctcttcc

SEQ ID NO: 90290 - DNA, 120 bp, Artificial Sequence
  ENSG00000087266_102 (sequence is synthesized)
caagcccccggggagagccccaggatggactctactgcatccggaactcctctaccaagtcggggaagcccatggtctcccgaggctggtcccgctgtttctcagggagccgtcagcctc

SEQ ID NO: 90291 - DNA, 120 bp, Artificial Sequence
  ENSG00000087269_0 (sequence is synthesized)
cctgtctctcttcgggtctcgggcccttgggcgcagcggggcgcgcgccatggcgaaggcgaagaaggtcggggcgcgaaggaaggcctccggggcgccggcgggagcgcgagggggccc

SEQ ID NO: 90292 - DNA, 120 bp, Artificial Sequence
  ENSG00000087269_1 (sequence is synthesized)
ggcgaaggccaactccaatccgttcgaggtgaaagttaacaggcagaagttccagatcctgggccggaagacgcgccacgacgtgggactgcccggggtgtctcgcgcacgggccctcag

SEQ ID NO: 90293 - DNA, 120 bp, Artificial Sequence
  ENSG00000087269_2 (sequence is synthesized)
gaagcgtacacagactttactaaaagagtacaaagaaagggataaatccaatgtattcagagataaacgcttcggagaatacaacagcaacatgagccccgaggagaagatgatgaagag

SEQ ID NO: 90294 - DNA, 120 bp, Artificial Sequence
  ENSG00000087269_3 (sequence is synthesized)
gtttgctctggaacagcagcgacatcatgagaaaaaaagcatctacaatctaaatgaagatgaagaattgactcattatggccagtctttggcagacatcgagaagcataatgacattgt

SEQ ID NO: 90295 - DNA, 120 bp, Artificial Sequence
  ENSG00000087269_4 (sequence is synthesized)
ggacagtgacagcgatgctgaggatcgaggaacgttgtctgctgagctgactgctgcccactttggaggaggcggtgggctccttcacaagaagactcaacaggaaggcgaggagcggga

SEQ ID NO: 90296 - DNA, 120 bp, Artificial Sequence
  ENSG00000087269_5 (sequence is synthesized)
gaaaccgaagtcccggaaagagctgattgaagagctcattgccaagtcaaaacaagagaagagggagagacaagctcaacgagaagatgccctcgagctcacggagaagctagaccaaga

SEQ ID NO: 90297 - DNA, 120 bp, Artificial Sequence
  ENSG00000087269_6 (sequence is synthesized)
ctggaaagaaattcagactctcctgtcccacaaaactcccaagtcagagaacagagacaaaaaggaaaaacccaagcccgatgcatatgacatgatggttcgcgagcttggctttgaaat

SEQ ID NO: 90298 - DNA, 120 bp, Artificial Sequence
  ENSG00000087269_7 (sequence is synthesized)
gaaggcgcagccctctaacaggatgaagacggaggcagaattggcaaaggaagagcaggagcacctcaggaagctggaggctgagagacttcgaagaatgcttggaaaggatgaggatga

SEQ ID NO: 90299 - DNA, 120 bp, Artificial Sequence
  ENSG00000087269_8 (sequence is synthesized)
aaatgttaagaaaccaaaacatatgtcagcagatgatctgaatgatggcttcgtgctagataaagatgacaggcgtttgctttcctacaaagatggaaagatgaatgtcgaggaagatgt

SEQ ID NO: 90300 - DNA, 120 bp, Artificial Sequence
  ENSG00000087269_9 (sequence is synthesized)
ccaggaagagcaaagcaaggaagccagtgaccctgagagcaacgaggaagaaggtgacagttcaggcggggaggacacagaggagagcgacagcccagatagccacttggacctggaatc

SEQ ID NO: 90301 - DNA, 120 bp, Artificial Sequence
  ENSG00000087269_10 (sequence is synthesized)
caacgtggagagtgaggaagaaaacgagaagccagcaaaagagcagaggcagactcctgggaaagggttgataagcggcaaggaaagagctggaaaagctaccagagacgagctgcccta

SEQ ID NO: 90302 - DNA, 120 bp, Artificial Sequence
  ENSG00000087269_11 (sequence is synthesized)
cacgttcgcagcccctgaatcctatgaggaactgagatctctgttgttaggaagatcgatggaagagcagcttttggtggtggagagaattcagaagtgcaaccacccgagtctcgcaga

SEQ ID NO: 90303 - DNA, 120 bp, Artificial Sequence
  ENSG00000087269_12 (sequence is synthesized)
agcaaaattagaaaaactgtttggctttcttttggaatacgttggcgatttggctacagatgacccaccagacctcacagtcattgataagttggttgtgcacttatatcatctttgcca

SEQ ID NO: 90304 - DNA, 120 bp, Artificial Sequence
  ENSG00000087269_13 (sequence is synthesized)
gatgtttcctgaatctgcaagtgacgctatcaaatttgttctccgagatgcgatgcatgagatggaagaaatgattgagaccaaaggccgggcggcattgccagggttggatgtgctcat

SEQ ID NO: 90305 - DNA, 120 bp, Artificial Sequence
  ENSG00000087269_14 (sequence is synthesized)
ttatttgaaaatcactgggctgctatttccaacttccgacttctggcacccagtggtgacccctgccctcgtgtgcctcagtcagctgctcaccaagtgccccatcctgtccctccagga

SEQ ID NO: 90306 - DNA, 120 bp, Artificial Sequence
  ENSG00000087269_15 (sequence is synthesized)
cgtggtgaagggcctgttcgtgtgctgcctgttcctggagtatgtggctttgtcccagaggtttatacctgagcttattaattttcttcttgggattctttacatagcaactccaaacaa

SEQ ID NO: 90307 - DNA, 120 bp, Artificial Sequence
  ENSG00000087269_16 (sequence is synthesized)
agcaagccaaggttccactctggtgcaccctttcagagcgcttgggaagaactcggaactgctcgtggtgtctgctagagaggatgtggccacgtggcagcagagcagcctctccctccg

SEQ ID NO: 90308 - DNA, 120 bp, Artificial Sequence
  ENSG00000087269_17 (sequence is synthesized)
ctgggcgagtagactgagggccccaacttcgacagaggccaatcacatccgactgtcctgcctggctgtgggcctggccctgctgaagcgctgcgtgctcatgtacgggtccctgccatc

SEQ ID NO: 90309 - DNA, 120 bp, Artificial Sequence
  ENSG00000087269_18 (sequence is synthesized)
cttccacgccatcatggggcctctccaagccctcctcacggatcacctggcggactgcagccacccgcaggagctccaggagctgtgtcagagcacactgaccgaaatggaaagccagaa

SEQ ID NO: 90310 - DNA, 120 bp, Artificial Sequence
  ENSG00000087269_19 (sequence is synthesized)
gcagctctgccggccgctgacctgtgagaagagcaagcctgtcccactgaagcttttcacaccccggctggtcaaagtcctcgagtttggaagaaaacaaggcagtagtaaggaggaaca

SEQ ID NO: 90311 - DNA, 120 bp, Artificial Sequence
  ENSG00000087269_20 (sequence is synthesized)
ggaaaggaagaggctgatccacaaacacaagcgtgaatttaaaggggccgttcgagaaatccgcaaggacaatcagttcctggcgaggatgcaactctcagaaatcatggaacgggatgc

SEQ ID NO: 90312 - DNA, 120 bp, Artificial Sequence
  ENSG00000087269_21 (sequence is synthesized)
ggaaagaaagcggaaagtaaagcagctttttaacagcctggctacacaggaaggcgaatggaaggctctgaagaggaaaaagttcaaaaaataaattacattttataaataagctccccc

SEQ ID NO: 90313 - DNA, 120 bp, Artificial Sequence
  ENSG00000087269_22 (sequence is synthesized)
cacccgctgcctgcggttttgtttctgttaaaacgtcacctgatgaaatagaatgaatcctgaaatgcacctctgggatcgggaatggtctgtgtgttatcagctgcgactggttcactg

SEQ ID NO: 90314 - DNA, 120 bp, Artificial Sequence
  ENSG00000087269_23 (sequence is synthesized)
cgtctggacaagcctcatggggactggggattctggccagtgtaatttctgtcaaccacggacgtttgccttcatgtgtagaatttactgttgttatgcaaattatattttcaattataa

SEQ ID NO: 90315 - DNA, 84 bp, Artificial Sequence
  ENSG00000087269_24 (sequence is synthesized)
taaggcaaggaactggacattacctcacatctgcaattccaaccctctgggaggccaaggcaggaagattgcttcaagaccccg

SEQ ID NO: 90316 - DNA, 120 bp, Artificial Sequence
  ENSG00000087269_25 (sequence is synthesized)
caactactcgggaggctgaagcaggaggactgcttgagctgagtccaaggttacagtgagccgtgattgagccactgcactccagcctcggccacagtgcaagactgtgtcgcttaaaaa

SEQ ID NO: 90317 - DNA, 120 bp, Artificial Sequence
  ENSG00000087269_26 (sequence is synthesized)
tcccactgaagcttttcacaccccggctggtctcgaattcccgacctcaggtaatccacctgccttggccccccaattataggtgtgagccacagcacccagccaaaaaagtaatttttt

SEQ ID NO: 90318 - DNA, 80 bp, Artificial Sequence
  ENSG00000087274_0 (sequence is synthesized)
ccgctgctgcgggccaggggacgggggcggagccggagccggagccgacgggcggtggccgcactgggaccccggaatcc

SEQ ID NO: 90319 - DNA, 120 bp, Artificial Sequence
  ENSG00000087274_1 (sequence is synthesized)
gcactgggaccccggaatcccgcgcgctgcccacgattcgcttctgaggaacctagaaagattgtacaatgaatggtgattctcgtgctgcggtggtgacctcaccacccccgaccacag

SEQ ID NO: 90320 - DNA, 120 bp, Artificial Sequence
  ENSG00000087274_2 (sequence is synthesized)
cccctcacaaggagaggtacttcgaccgagtagatgagaacaacccagagtacttgagggagaggaacatggcaccagaccttcgccaggacttcaacatgatggagcaaaagaagaggg

SEQ ID NO: 90321 - DNA, 120 bp, Artificial Sequence
  ENSG00000087274_3 (sequence is synthesized)
tgtccatgattctgcaaagccctgctttctgtgaagaattggaatcaatgatacaggagcaatttaagaaggggaagaaccccacaggcctattggcattacagcagattgcagatttta

SEQ ID NO: 90322 - DNA, 120 bp, Artificial Sequence
  ENSG00000087274_4 (sequence is synthesized)
tgaccacgaatgtaccaaatgtctacccagcagctccgcaaggagggatggctgccttaaacatgagtcttggtatggtgactcctgtgaacgatcttagaggatctgattctattgcgt

SEQ ID NO: 90323 - DNA, 120 bp, Artificial Sequence
  ENSG00000087274_5 (sequence is synthesized)
atgacaaaggagagaagttattacggtgtaaattggcagcgttttatagactagcagatctctttgggtggtctcagcttatctacaatcatatcacaaccagagtgaactccgagcagg

SEQ ID NO: 90324 - DNA, 120 bp, Artificial Sequence
  ENSG00000087274_6 (sequence is synthesized)
aacacttcctcattgtcccttttgggcttctttacagtgaagtgactgcatccagtttggttaagatcaatctacaaggagatatagtagatcgtggaagcactaatctgggagtgaatc

SEQ ID NO: 90325 - DNA, 120 bp, Artificial Sequence
  ENSG00000087274_7 (sequence is synthesized)
aggccggcttcaccttacactctgcaatttatgctgcacgcccggacgtgaagtgcgtcgtgcacattcacaccccagcaggggctgcggtctctgcaatgaaatgtggcctcttgccaa

SEQ ID NO: 90326 - DNA, 120 bp, Artificial Sequence
  ENSG00000087274_8 (sequence is synthesized)
tctccccggaggcgctttcccttggagaagtggcttatcatgactaccatggcattctggttgatgaagaggaaaaagttttgattcagaaaaatctggggcctaaaagcaaggttctta

SEQ ID NO: 90327 - DNA, 120 bp, Artificial Sequence
  ENSG00000087274_9 (sequence is synthesized)
ttctccggaaccatgggctcgtgtcagttggagagagcgttgaggaggccttctattacatccataaccttgtggttgcctgtgagatccaggttcgaactctggccagtgcaggaggac

SEQ ID NO: 90328 - DNA, 120 bp, Artificial Sequence
  ENSG00000087274_10 (sequence is synthesized)
cagacaacttagtcctgctgaatcctgagaagtacaaagccaagtcccgttccccagggtctccggtaggggaaggcactggatcgcctcccaagtggcagattggtgagcaggaatttg

SEQ ID NO: 90329 - DNA, 120 bp, Artificial Sequence
  ENSG00000087274_11 (sequence is synthesized)
aagccctcatgcggatgctcgataatctgggctacagaactggctacccttatcgataccctgctctgagagagaagtctaaaaaatacagcgatgtggaggttcctgctagtgtcacag

SEQ ID NO: 90330 - DNA, 120 bp, Artificial Sequence
  ENSG00000087274_12 (sequence is synthesized)
gttactcctttgctagtgacggtgattcgggcacttgctccccactcagacacagttttcagaagcagcagcgggagaagacaagatggctgaactctggccggggcgacgaagcttccg

SEQ ID NO: 90331 - DNA, 120 bp, Artificial Sequence
  ENSG00000087274_13 (sequence is synthesized)
aggaagggcagaatggaagcagtcccaagtcgaagactaaggtgtggacgaacattacacacgatcacgtgaaacccttgctgcagtctctctcgtccggtgtctgcgtgccaagctgta

SEQ ID NO: 90332 - DNA, 120 bp, Artificial Sequence
  ENSG00000087274_14 (sequence is synthesized)
ttaccaactgcttgtggactaaagaggatggacatagaacttccacctctgctgtccctaacctgtttgttccattgaacactaacccaaaagaggtccaggagatgaggaacaagatcc

SEQ ID NO: 90333 - DNA, 120 bp, Artificial Sequence
  ENSG00000087274_15 (sequence is synthesized)
gagagcagaatttacaggacattaagacggctggccctcagtcccaggttttgtgtggtgtagtgatggacaggagcctcgtccagggagagctggtgacggcctccaaggccatcattg

SEQ ID NO: 90334 - DNA, 120 bp, Artificial Sequence
  ENSG00000087274_16 (sequence is synthesized)
ccgcagggaggtggagaggaagcagaagggctctgaagagaatctggacgaggctagagaacagaaagaaaagagtcctccagaccagcctgcggtcccccacccgcctcccagcactcc

SEQ ID NO: 90335 - DNA, 120 bp, Artificial Sequence
  ENSG00000087274_17 (sequence is synthesized)
catcaagctggaggaagaccttgtgccggagccgactactggagatgacagtgatgctgccacctttaagccaactctccccgatctgtcccctgatgaaccttcagaagcactcggctt

SEQ ID NO: 90336 - DNA, 120 bp, Artificial Sequence
  ENSG00000087274_18 (sequence is synthesized)
cccaatgttagagaaggaggaggaagcccatagacccccaagccccactgaggcccctactgaggccagccccgagccagccccagacccagccccggtggctgaagaggctgccccctc

SEQ ID NO: 90337 - DNA, 120 bp, Artificial Sequence
  ENSG00000087274_19 (sequence is synthesized)
agctgtcgaggagggggccgccgcggaccctggcagcgatgggtctccaggcaagtccccgtccaaaaagaagaagaagttccgtaccccgtcctttctgaagaagagcaagaagaagag

SEQ ID NO: 90338 - DNA, 120 bp, Artificial Sequence
  ENSG00000087274_20 (sequence is synthesized)
tgactcctgaaagccctgcgctaacactgtcctgtccggagcgaccctggctctgccagcgtccccggccacgtctgtgctctgtccttgtgtaatggaatgcaaaaaagccaagccctc

SEQ ID NO: 90339 - DNA, 120 bp, Artificial Sequence
  ENSG00000087274_21 (sequence is synthesized)
cgcctagaggtcccctcacgtgaccagccccgtgtagccccgggctgacccagtgtgtgctcagcagccccaccccaccctgccccttgtcctctcagagcctcagcttctgggggagac

SEQ ID NO: 90340 - DNA, 120 bp, Artificial Sequence
  ENSG00000087274_22 (sequence is synthesized)
atgctctccccacaggggggaggcactaagtcatggtcctggctggaaggtactgaaggcttctgcagctttggctgcacgtcaccctcctgagcctcacctttcctgccgtccctcctg

SEQ ID NO: 90341 - DNA, 120 bp, Artificial Sequence
  ENSG00000087274_23 (sequence is synthesized)
ttgtgaaatcaccacattctgtctctgcttggcttcccctccaccctaaagtctcaggtgacggactcagactcctggcttcatgtggcattctctctgctcagtgatctcacttaaatc

SEQ ID NO: 90342 - DNA, 120 bp, Artificial Sequence
  ENSG00000087274_24 (sequence is synthesized)
tatatacaaagccttggtcccgtgaaaacactcgtgtgcccaccagcggccttgaagaggcaggtctgggccagatgctgggcaggaaaccccagcggcagatgggcctgtgtgcaccca

SEQ ID NO: 90343 - DNA, 120 bp, Artificial Sequence
  ENSG00000087274_25 (sequence is synthesized)
acgtgatgctatgcatgtctgaccgacgatccctcgaccagaatcagattcaggagctcagtttctttttcacttgggtctctggattcctgtcatagggaaggtatatcaggaggggaa

SEQ ID NO: 90344 - DNA, 120 bp, Artificial Sequence
  ENSG00000087274_26 (sequence is synthesized)
gaggcctttctagaattttctttgagcaggtttacaatttagcttacatttttcgactgtgaacgtgaataggctgctttttgctttcttctttccagaccccacagtagagcacttttc

SEQ ID NO: 90345 - DNA, 120 bp, Artificial Sequence
  ENSG00000087274_27 (sequence is synthesized)
acttatttgggggaggcttcaggggactgttctcaccttaactcagccagaaagatgccctagttgtgatcaaaggtaactcgaggtggagggtagccctggggcccctcgacatcaccg

SEQ ID NO: 90346 - DNA, 120 bp, Artificial Sequence
  ENSG00000087274_28 (sequence is synthesized)
tcattgatggagcctgaaccgtgtgctcctcggcagatgctgttgttgttacttccctccaagaggctggaaaagggctcagagctgctgagcaggaaccggagggtgacccatttcagg

SEQ ID NO: 90347 - DNA, 120 bp, Artificial Sequence
  ENSG00000087274_29 (sequence is synthesized)
aggtgccggtaccagcctgactaggtacaggcaagcttgtgtgggcccaacaggcccttggtagagctggtgccagatgtgggctcagatcctgggcatgatgggccgagccacctcgga

SEQ ID NO: 90348 - DNA, 120 bp, Artificial Sequence
  ENSG00000087274_30 (sequence is synthesized)
tcccactgattggccagccgagcgagaaccaggctgctgcatggcactgaccgccgcttccagcttcctctgagccgcagggcctgctacgcgggcaagcgtgctgcctctcttctgtgt

SEQ ID NO: 90349 - DNA, 120 bp, Artificial Sequence
  ENSG00000087274_31 (sequence is synthesized)
cgttttgttgccaaggcagaatgaaaagtccttaaccgtggactcttcctttatcccctcctttaccccacatatgcaatgacttttaattttcacttttgtagtttaatcctttgtatt

SEQ ID NO: 90350 - DNA, 120 bp, Artificial Sequence
  ENSG00000087274_32 (sequence is synthesized)
acaacatgaaatatagttgcatatatggacaccgacttgggaggacaggtcctgaatgtcctttctccagtgtaacatgttttactcacaaataaaattctttcagcaagttccttgtct

SEQ ID NO: 90351 - DNA, 120 bp, Artificial Sequence
  ENSG00000087274_33 (sequence is synthesized)
gcggggaggccgctgcggcgccgagggcgtcttggaggggtccccgcggggccttcggcctgggccgagccggggagcgagggcgccgcagatctttcatcgggataggaccccggggac

SEQ ID NO: 90352 - DNA, 120 bp, Artificial Sequence
  ENSG00000087274_34 (sequence is synthesized)
ggactaggcttttcccgggccgctcgttcctggccggcttgtgggctgcaggggtgggggcggaggaggacgaccctggctggacgctggtcagcatcctgcttgtgagaccggttccgc

SEQ ID NO: 90353 - DNA, 120 bp, Artificial Sequence
  ENSG00000087274_35 (sequence is synthesized)
ggtccgcagcgctggtggctgcaaggtttgtgtacggacgcatctgtcggctctcgtatttaaaaacgacggcttctgccaaaagagaaaagccatatctgccgacggacgctcgagaga

SEQ ID NO: 90354 - DNA, 120 bp, Artificial Sequence
  ENSG00000087274_36 (sequence is synthesized)
taatcgtggaactttatcagcgatggggctgttggtcacctttgccctccctctcttttcttttttcttaatcttttattttcgttttttgggagatgtcagagggcctttccctgttag

SEQ ID NO: 90355 - DNA, 120 bp, Artificial Sequence
  ENSG00000087274_37 (sequence is synthesized)
gatgacttttatctttgctcttgtaatggctcaagatagttgggaggtaatttgcattcactttatgcatacccaccttgaaaaacgtattttggttcgcctgaaactgttgttggtttg

SEQ ID NO: 90356 - DNA, 120 bp, Artificial Sequence
  ENSG00000087274_38 (sequence is synthesized)
agcataatttatgtttagaaagacaaaaagcaattgtcatatctccaaagaccaaagacatagctgatagctgtatgcattactggggccttttgagcagctgcttctgcaagaggacat

SEQ ID NO: 90357 - DNA, 120 bp, Artificial Sequence
  ENSG00000087274_39 (sequence is synthesized)
ccggagacacaggaatagaaatgatccgatcagagtaattaaaggcttttaactgagctctgaggtcccaaacagggcacactccgtcagcctaaagctgtgaagaagaaccttcaacat

SEQ ID NO: 90358 - DNA, 120 bp, Artificial Sequence
  ENSG00000087274_40 (sequence is synthesized)
tccaggatgcacctctctctgactgtacggaaactatcgaagggctcgagcttacagagcagacctttagtcccgctaaatctctctcttttagaaagggagagctggtgacggcctcca

SEQ ID NO: 90359 - DNA, 120 bp, Artificial Sequence
  ENSG00000087274_41 (sequence is synthesized)
tgtgttcaacttttgtggatgtttccacatgattttccaaagtgaaaccctgttttgagatctggaatattgactgtctttcactctccttggaccctagggctacagaactggctaccc

SEQ ID NO: 90360 - DNA, 88 bp, Artificial Sequence
  ENSG00000087274_42 (sequence is synthesized)
agccggagccgacgggcggtggccgcactgggaccccggaatcccgcgcgctgcccacgattcgcttctgagactgagttttgctctc

SEQ ID NO: 90361 - DNA, 120 bp, Artificial Sequence
  ENSG00000087274_43 (sequence is synthesized)
tcaccgcaaccttcgcctcccagttctggaggccagaagtttgaaaacaatatcactggaccaaaatcaaggtgtcactagggctgtgcattcttcctctggaggtcgtatgggagaatc

SEQ ID NO: 90362 - DNA, 120 bp, Artificial Sequence
  ENSG00000087274_44 (sequence is synthesized)
caggtcttatgccctgttgtatgagtggcatagttcattgatcttatcacaggaaatcagtgccttgagtatacgtatatggttgttgaaagaattcagttcagttcatgttatcagaca

SEQ ID NO: 90363 - DNA, 120 bp, Artificial Sequence
  ENSG00000087274_45 (sequence is synthesized)
tcataaatgaaaaatcttcagtgtcgtaaaggataggaagtgttaatttctcctttttactcttgtgacttttctagagggtccttatatattggggcaatttttaaattacaattaaaa

SEQ ID NO: 90364 - DNA, 120 bp, Artificial Sequence
  ENSG00000087274_46 (sequence is synthesized)
ggcttcctctctcggtggcacttagctgatggcttggcctgcccattctgatgtcagtggaatgctgtcaaggctttgcacctgcagaacctggcaggtgcttgttcaactccattctgg

SEQ ID NO: 90365 - DNA, 120 bp, Artificial Sequence
  ENSG00000087274_47 (sequence is synthesized)
gcatctaatctggtatttaaattacagcagaaagaagaataaagcaaaggaccagtcttcctgcccagctccacagagcattcatgcttcccctcaggttcttattctccggaaccatgg

SEQ ID NO: 90366 - DNA, 120 bp, Artificial Sequence
  ENSG00000087274_48 (sequence is synthesized)
gctcgtgtcagttggagagagcgttgaggaggccttctattacatccataaccttgtggttgcctgtgagatccaggtaggggacagccattccagtcactctgcagtttatttagatgt

SEQ ID NO: 90367 - DNA, 120 bp, Artificial Sequence
  ENSG00000087274_49 (sequence is synthesized)
gtctggggttcacatagatttttttttgatacttatcgagtaggagaggagtctttgagcaatctctttgccaaagataagctcatggatttgggacttgatcaggacaaatgctgtttc

SEQ ID NO: 90368 - DNA, 120 bp, Artificial Sequence
  ENSG00000087274_50 (sequence is synthesized)
actgattgaagttggcaaaggattactgggcttttcatttctaatttttaaattttcaaatatgtcagtcactaccatttatggagtactggtgtgtataggcctggcatcaggtgctta

SEQ ID NO: 90369 - DNA, 120 bp, Artificial Sequence
  ENSG00000087274_51 (sequence is synthesized)
gtgtgtgtcatcgcatatgtgatgtcacgtgacccccacagtactctttgaaaaagcaggtatacagaagtagagactcagagacttgcctgcagcttacagctgtgagttcccctccgc

SEQ ID NO: 90370 - DNA, 120 bp, Artificial Sequence
  ENSG00000087274_52 (sequence is synthesized)
tccgtcagccgttagttcacgttctcccctctgcttcttgacttatgtctgtggcgtagtgaagtcccaagtcctttgtaggatcctgaaaggtgctgtgttttctcatttctctgccaa

SEQ ID NO: 90371 - DNA, 120 bp, Artificial Sequence
  ENSG00000087274_53 (sequence is synthesized)
ctttggtgcccaatatttttgtcatgctaaagaaatacttctgaaagtaactttgtgatcagtctgtcactatccattctacattttttattcttacactctagagatttggtttctttt

SEQ ID NO: 90372 - DNA, 120 bp, Artificial Sequence
  ENSG00000087274_54 (sequence is synthesized)
tgcggatgctcgataatctggtaagaatggtgccaccacttgatgataaaccttttgttctaaaagcatcagtgttggtgttcttacagcaagtgcgattgctgtcttttatgcagtatc

SEQ ID NO: 90373 - DNA, 120 bp, Artificial Sequence
  ENSG00000087274_55 (sequence is synthesized)
tgaataccttcaccttcaaagtcatgaagaagcactagggttgtttaacttctgaggtaaattacaataaaatgtagaggtgaaggattcctggtattgttttattttttaaagataacc

SEQ ID NO: 90374 - DNA, 120 bp, Artificial Sequence
  ENSG00000087274_56 (sequence is synthesized)
ttgtgtttggactcagtggggacaagagcacagagaatgcgtaggcagctggatgaccagctgtgtcagctcagtccccaccatcccacaagcaagcgagagaggtggcacttttgaaat

SEQ ID NO: 90375 - DNA, 120 bp, Artificial Sequence
  ENSG00000087274_57 (sequence is synthesized)
cggtcagtcaggtatttaggcttttgtcttaacagcaaatcctggctgtctggggcctgatgactgtgttccatgggtatccactccctgtccacagcgtgggagcccctcagctgctta

SEQ ID NO: 90376 - DNA, 120 bp, Artificial Sequence
  ENSG00000087274_58 (sequence is synthesized)
ttgcagggacacagagcccggcatggtccagaaggcgggcttatggggcctgcagcacacagggaaagtgagcccacactgtgataggagggcagacacacaggatgtgttctgtgttac

SEQ ID NO: 90377 - DNA, 120 bp, Artificial Sequence
  ENSG00000087274_59 (sequence is synthesized)
agggttgccgtgaagaatttcattcttttgcaaggactggagagaaaattttatgtggaaggtagcccttggaaatgacctcaaagaataggtaggatcttagcctgcgtttgaaagcct

SEQ ID NO: 90378 - DNA, 120 bp, Artificial Sequence
  ENSG00000087274_60 (sequence is synthesized)
ggaaaaaaacaggatgacaggatgaagaggccacagcacagctgcagacaatgggagtggggagatgggaacatgcaacgtacggtgcacctttcaggttcatcttgactttaccaggat

SEQ ID NO: 90379 - DNA, 120 bp, Artificial Sequence
  ENSG00000087274_61 (sequence is synthesized)
agagctgtattagaacactgcccttggggtctcagtcccgcagccacatcatcagacacagggctctggaacagatcccttccatgctgcacatcagacctcttagatgggggtcacgat

SEQ ID NO: 90380 - DNA, 120 bp, Artificial Sequence
  ENSG00000087274_62 (sequence is synthesized)
ggtccgtcctaacgccacatgacctcaagtggtgtagatgtgaggacatgtcagtgtggggaaagaaggcctcagaggggccagtatccttgtatgctgccagccagtactggacaagtg

SEQ ID NO: 90381 - DNA, 120 bp, Artificial Sequence
  ENSG00000087274_63 (sequence is synthesized)
ggcacgttccagcctaagacaggcgtggcccttggaccagatcacagatgagatgggtggcttcaggaagcagggtggcttcaggaggcaggaagtttaactttcctgaaggtttggaat

SEQ ID NO: 90382 - DNA, 120 bp, Artificial Sequence
  ENSG00000087274_64 (sequence is synthesized)
aaaaagtattcataggtctgattcaggctatgttaaatgttcttactgaaattctttgcacttgggatgaatattgtccgctagaaaggaggaactgagggttttctgcctgggcgcgat

SEQ ID NO: 90383 - DNA, 120 bp, Artificial Sequence
  ENSG00000087274_65 (sequence is synthesized)
agtcagtcagtggagtagactcaatcagtgacacagggacgaacagagaaggcagagtctagcgtaactttttgagttcatataatcagtgaggttgattgcattaattgactgtctact

SEQ ID NO: 90384 - DNA, 120 bp, Artificial Sequence
  ENSG00000087274_66 (sequence is synthesized)
gttgagtcatgaacaggacacagttcttgccctcaggagtttatgacctaataagagagatggacaaacgattcccaaatgagccctgcccctgtgatctgtgcagtcataggcatgatg

SEQ ID NO: 90385 - DNA, 120 bp, Artificial Sequence
  ENSG00000087274_67 (sequence is synthesized)
agagcttgcaggcagaggtgggtgccgattggtcaaggaggtaggaagaggagcaaaagctcatgaagaaggctgaagaagcagttagagttgggtggccagccagggtagtgaagctgc

SEQ ID NO: 90386 - DNA, 120 bp, Artificial Sequence
  ENSG00000087274_68 (sequence is synthesized)
agggactcatagatggagaaagcttgagagtggggcagccatggcccaggtgtgcgtcaggagccaggtcatccagcatggctgtgcaaggtaaggagggctgaggttggcccagtcaca

SEQ ID NO: 90387 - DNA, 120 bp, Artificial Sequence
  ENSG00000087274_69 (sequence is synthesized)
cagcccctgcctcctggtaaatacggcgacattttgctgctcttctacttacagtcagtgtgagggaggagagaggggggtcagaatgcacagcagccaccaaagactgtgctgaaagca

SEQ ID NO: 90388 - DNA, 120 bp, Artificial Sequence
  ENSG00000087274_70 (sequence is synthesized)
catcctagaaggcggagagggggaagtcaaaatcaggtagaaactctgatttggtagggaaggaagataaggatgaatgattaataagtaaaacattcattacaaaaagcatgatgaatg

SEQ ID NO: 90389 - DNA, 120 bp, Artificial Sequence
  ENSG00000087274_71 (sequence is synthesized)
tttactcagtgtccttaatgtgtacagattgttttaatattagaaggccatatagtttataagaaataaactagacagcaatcactaatcatagtccatgttttaatttagcatcggggt

SEQ ID NO: 90390 - DNA, 120 bp, Artificial Sequence
  ENSG00000087274_72 (sequence is synthesized)
tggcatatatgttgtttgctaataactgagtagagaatagttgccaatttccacactataatatatgttgcagccgagcacagtggctcactcctgtgatcccagcacttcaggaggctg

SEQ ID NO: 90391 - DNA, 120 bp, Artificial Sequence
  ENSG00000087274_73 (sequence is synthesized)
aggtgggagaccaggagcttaagaccagcctgggcaacatagcgagattcctctccacaaaaaataaaaaaatttcaaaaagagagataatatttcatttgaacttctacagttagaaaa

SEQ ID NO: 90392 - DNA, 120 bp, Artificial Sequence
  ENSG00000087274_74 (sequence is synthesized)
aaaatgctaaattgtcccccccccaaaaaaaatcaagatataatttcagtttctcaaagaaggaacaaatccatatatattttctctttctttttttttttggagagacaggatgtcatc

SEQ ID NO: 90393 - DNA, 84 bp, Artificial Sequence
  ENSG00000087274_75 (sequence is synthesized)
gggtgtaaactaccacgcctgacccaaatccatgtttttaactacaagccagatagtagttctgaggtctgagtattacttctg

SEQ ID NO: 90394 - DNA, 120 bp, Artificial Sequence
  ENSG00000087274_76 (sequence is synthesized)
caagccagatagtagttctgaggtctgagtattacttctggttttggtttaacagcatttaaaggggaagaataaagaaaaatccatatggtttcaggataaaatgatgttgatgagtcc

SEQ ID NO: 90395 - DNA, 120 bp, Artificial Sequence
  ENSG00000087274_77 (sequence is synthesized)
tgggtggtttattctgaagttgtggagattactgagttctggctctttaagcaaaaggaaacttgaattaataagaactgtgtttttctgcagatagtctttatggcagagtcattctct

SEQ ID NO: 90396 - DNA, 120 bp, Artificial Sequence
  ENSG00000087274_78 (sequence is synthesized)
tttattattcctcaacaaagcatgctcagaaatgggaaaactgccagtacacacatttaccttatctttctgaggacaattatgaaaataaaacccaaaacaactccattcatgattgtt

SEQ ID NO: 90397 - DNA, 79 bp, Artificial Sequence
  ENSG00000087274_79 (sequence is synthesized)
tatgaaaataaaacccaaaacaactccattcatgattgttattacctttttaaaaaaatgtaggccggtcacgatggct

SEQ ID NO: 90398 - DNA, 70 bp, Artificial Sequence
  ENSG00000087274_80 (sequence is synthesized)
gaggttgcagtgagccaaggtcgagccacggaggccgggcgtggtggctcatatctataatcccagcact

SEQ ID NO: 90399 - DNA, 70 bp, Artificial Sequence
  ENSG00000087274_81 (sequence is synthesized)
gaggtcaggagattgagaccgtcctggctaatacagtgaaactccgtctctactaaaaatgcaaaaaatt

SEQ ID NO: 90400 - DNA, 120 bp, Artificial Sequence
  ENSG00000087274_82 (sequence is synthesized)
tttggtgttggatgattttcagagcagtgaaccaatggtctctgaggggcctcccctgctggtcccagggttatggggctcagctctgtcgtcagcctaccttatgacccagattcagct

SEQ ID NO: 90401 - DNA, 120 bp, Artificial Sequence
  ENSG00000087274_83 (sequence is synthesized)
gggctttccagatggtggttttccatcagtcatgactttgacttccagcattaactggtctttatgtggctgcatcctgctcccatggcgactctgctgagtgacccagattagatgtgg

SEQ ID NO: 90402 - DNA, 120 bp, Artificial Sequence
  ENSG00000087274_84 (sequence is synthesized)
tcattggttcagtcctctctgtgatgttcagtgcatgaccagatgtgagataaactgaatagattggatgctatgtcacttattgttgtcataattctgacttttcaactgttcttgata

SEQ ID NO: 90403 - DNA, 120 bp, Artificial Sequence
  ENSG00000087274_85 (sequence is synthesized)
tgtgaccgcctgctccaaagttattctgaaattgagagagtgactttatgaggtaagtattctaggcaaccagttacctttgttaaaaccttcatgatgagaaacggttcaggcactttt

SEQ ID NO: 90404 - DNA, 120 bp, Artificial Sequence
  ENSG00000087274_86 (sequence is synthesized)
cgttgagttctagaaggagcgagcatgctgagggctgtgtccacccctctggtcatgccccttgtaatgcatgcatatgtgagggtggcacatacaccaccagctttggggctcagattc

SEQ ID NO: 90405 - DNA, 120 bp, Artificial Sequence
  ENSG00000087274_87 (sequence is synthesized)
ggcccgggttcagcagcgttctgtgtaaggcgctaggagagggtgggtttagggactcttgttctggtacatattgctgtctgcaacaaagtgctgcttgggttgcagaggggtgggtgc

SEQ ID NO: 90406 - DNA, 120 bp, Artificial Sequence
  ENSG00000087274_88 (sequence is synthesized)
ctgtaagtgtggtgcacatttacacacatttctacaaaatgactctaccttgtggcacattgaagataattgtgtaagtagttatctctgaaaactaatatgccacctaatgctttaaca

SEQ ID NO: 90407 - DNA, 120 bp, Artificial Sequence
  ENSG00000087274_89 (sequence is synthesized)
cctgactctgcaggggtagacgattgttggatttgtccagccgtggtcctggtttcgtgttcagtgtctgcacgtcctgccatcatcactgccacacttactgttgacagctgtccctgc

SEQ ID NO: 90408 - DNA, 120 bp, Artificial Sequence
  ENSG00000087274_90 (sequence is synthesized)
cattatataccactgaaggctgcagctcagcctaggcctcgggcccatggcagtgcagtctcaggggtctctgctcctggaaagcctcctgcccccgccctgcctgcagcctgcctggga

SEQ ID NO: 90409 - DNA, 88 bp, Artificial Sequence
  ENSG00000087274_91 (sequence is synthesized)
acgatcttggctccctgcaacctctgtctcccagactgagttttgctctccggctcaccgcaaccttcgcctcccagttctggaggcc

SEQ ID NO: 90410 - DNA, 120 bp, Artificial Sequence
  ENSG00000087274_92 (sequence is synthesized)
tactggctgcttaactgtgttgtgccttatctgcagaaaaaatgagttaaaacacacatagtgagcagtgataactgtagctgtgattatttgaaaggggccttttgagcagctgcttct

SEQ ID NO: 90411 - DNA, 120 bp, Artificial Sequence
  ENSG00000087274_93 (sequence is synthesized)
ttactgttcatagttagatgacgtagagcaagttgggtagctggggcttcggaggctttgggaatccagcctttctgacccaggtgtaaagcgaaccttccttattcactttcttgtagt

SEQ ID NO: 90412 - DNA, 120 bp, Artificial Sequence
  ENSG00000087274_94 (sequence is synthesized)
ctgaacctaagtccactgaatgcattactaaaattcggataatactatctgcttgaaactgcttaagatgtaatgtaactccgcagtagttccagtatatctccgtatatagcaaaaata

SEQ ID NO: 90413 - DNA, 120 bp, Artificial Sequence
  ENSG00000087274_95 (sequence is synthesized)
tacaataatttacatgtattaacctacaaataggagctcttcttatttaattcaaattatattcagggactcttaatacttcatgcacaaaaagacacttcagtcctaaacctgtatttt

SEQ ID NO: 90414 - DNA, 120 bp, Artificial Sequence
  ENSG00000087274_96 (sequence is synthesized)
agtgttgtgaactccagtggtttcaagtcactaaagtttcttaagtcttcagtgttttcttaagcagttttcccttgtggctccctggcgtgttctctgctgactcttgtcccctgccct

SEQ ID NO: 90415 - DNA, 120 bp, Artificial Sequence
  ENSG00000087274_97 (sequence is synthesized)
tagtgttattcccctgctttctatcccaaagcctccgaatgcacacccccagctgccctctgcatggactgttgcatgtgagtagacggccatagtggcgagtcaccttctgactcctgt

SEQ ID NO: 90416 - DNA, 120 bp, Artificial Sequence
  ENSG00000087274_98 (sequence is synthesized)
gtgaccaggtaggaaggccggcctcgggggtcggaacccaccatggttgctggtgtccacgttgcccattgctcgcacactcctcgtgccgtgttgtcatgcagatgccaccttcggagg

SEQ ID NO: 90417 - DNA, 120 bp, Artificial Sequence
  ENSG00000087274_99 (sequence is synthesized)
tgccctccgctgtgtgagccacacgccggctgcctctcagccaccgtgtgtctgtggtgtgtgatcccgggtgtctgtccctcggtctcgtacatccatgtctctcgtgaagcccgtggc

SEQ ID NO: 90418 - DNA, 120 bp, Artificial Sequence
  ENSG00000087274_100 (sequence is synthesized)
tcttcttctgtaacctgatggctgtgactgaatgcatagattctctccttgtgcttttttctccctgtggctgcgtcacaagcaggagacggatgcgctagagagtacctgttaccctaa

SEQ ID NO: 90419 - DNA, 120 bp, Artificial Sequence
  ENSG00000087274_101 (sequence is synthesized)
taatgttcttgggttgaaagttacgcagacagtgcattctgatgctgtcatttactttaatgcaaaactttggtgatgcccactcttgcctcacggtgcaggctcctccctaaccctggg

SEQ ID NO: 90420 - DNA, 120 bp, Artificial Sequence
  ENSG00000087274_102 (sequence is synthesized)
gagatgaggaacaagatccgagagcagaatttacaggacattaagacggctggccctcagtcccaggttttgtgtggtgtagtgatggacaggagcctcgtccagagaatctggacgagg

SEQ ID NO: 90421 - DNA, 120 bp, Artificial Sequence
  ENSG00000087274_103 (sequence is synthesized)
ataatactggaatgaacatacaaatgaatcagtctttgagcacttccttgaatgtttccttaaaatagattcctaagagtagaattcctgttcagagttttaagcttttattgtattaaa

SEQ ID NO: 90422 - DNA, 120 bp, Artificial Sequence
  ENSG00000087274_104 (sequence is synthesized)
ttactttctagaaaagaatgtaccagtttatattctcagcagtaatgtgtgagaatatccgtttgcctttccagcactggatgaaaacaaaaattggtctatgtgatagctacttctgac

SEQ ID NO: 90423 - DNA, 120 bp, Artificial Sequence
  ENSG00000087299_0 (sequence is synthesized)
gctaaagagcgcgggtcctcggccgtggagggtcaagtggcttcttctgagcgctgagggaggggagcgtgcgtaggggatggtgccagcgctgcgttatttggttggtgcctgcggacg

SEQ ID NO: 90424 - DNA, 120 bp, Artificial Sequence
  ENSG00000087299_1 (sequence is synthesized)
ggcccgcgggcttttcgccggtggctcccctggggcgtgcgggttcgcgtctgggaggccaagaccgctgtgtggaggtagccgcagcgccagcaccagctcatttgatatagtcatcgt

SEQ ID NO: 90425 - DNA, 120 bp, Artificial Sequence
  ENSG00000087299_2 (sequence is synthesized)
tggtggcggaattgtggggcttgcctctgccagagcactcatcctgcgacatccatcactttctattggtgttctggaaaaggagaaagatttagctgttcaccagactggacataacag

SEQ ID NO: 90426 - DNA, 120 bp, Artificial Sequence
  ENSG00000087299_3 (sequence is synthesized)
tggtgtcatacatagtggaatttattataaacctgagtctctgaaagccaaattatgtgtacaaggtgcagccctcctctatgagtactgtcagcaaaagggaatttcctacaagcagtg

SEQ ID NO: 90427 - DNA, 120 bp, Artificial Sequence
  ENSG00000087299_4 (sequence is synthesized)
tggcaagcttatagtagctgttgaacaagaagaaattcccagacttcaggccctatatgagaaaggcctccagaatggtgtcccgggcctgaggctgatccagcaggaggatataaaaaa

SEQ ID NO: 90428 - DNA, 120 bp, Artificial Sequence
  ENSG00000087299_5 (sequence is synthesized)
gaaggagccatattgtaggggtctaatggctattgattgtccacatactggcattgtggactatcggcaggtggctttgtcatttgcccaggatttccaagaagcaggtggctctgtctt

SEQ ID NO: 90429 - DNA, 120 bp, Artificial Sequence
  ENSG00000087299_6 (sequence is synthesized)
gaccaattttgaagtaaaaggtattgaaatggctaaagaaagtccttcaagaagtatagatggaatgcaatatccaattgttataaagaatacaaagggagaggaaattcgatgtcagta

SEQ ID NO: 90430 - DNA, 120 bp, Artificial Sequence
  ENSG00000087299_7 (sequence is synthesized)
tgttgtgacatgtgcaggactttactcagaccgtatttcagagttgagtggctgcactcctgatcctcgaattgtaccattccggggagattacctgcttttgaagccagaaaaatgtta

SEQ ID NO: 90431 - DNA, 120 bp, Artificial Sequence
  ENSG00000087299_8 (sequence is synthesized)
tcttgtaaaaggaaatatttatccggtcccagatagccggtttcctttcctaggagttcacttcacaccaaggatggatggcagtatttggctagggcctaatgcagttcttgcctttaa

SEQ ID NO: 90432 - DNA, 120 bp, Artificial Sequence
  ENSG00000087299_9 (sequence is synthesized)
acgagagggttacagaccctttgacttcagtgccacagatgttatggatataattatcaatagtggcttgattaaactggcatcccagaatttttcctatggagttactgaaatgtataa

SEQ ID NO: 90433 - DNA, 120 bp, Artificial Sequence
  ENSG00000087299_10 (sequence is synthesized)
agcatgttttcttggtgcaacagtgaagtatcttcaaaaattcatccctgaaattactatcagtgatatacttaggggcccagctggagtaagagcccaggccctggatagagatggaaa

SEQ ID NO: 90434 - DNA, 120 bp, Artificial Sequence
  ENSG00000087299_11 (sequence is synthesized)
tctggtagaagattttgtatttgatgcaggagttggggatattggaaatcgcattcttcatgtgagaaatgcaccttctcctgctgctacttcttccattgcaatttctggaatgattgc

SEQ ID NO: 90435 - DNA, 120 bp, Artificial Sequence
  ENSG00000087299_12 (sequence is synthesized)
agatgaagtacaacaaagatttgaattataaataatgaaaggagctaggtatgcactgtaatcttcatgtcagcaacaagaatgtactaattgcattctttaatttaaaaaatggttttt

SEQ ID NO: 90436 - DNA, 120 bp, Artificial Sequence
  ENSG00000087299_13 (sequence is synthesized)
tctttaatttaaaaaatggtttttaaactttagtttttaggtcaaagataaccactgcattgttaaaatgatgtaacatagaaataataattttctacaaaaattagccaggcatggtgg

SEQ ID NO: 90437 - DNA, 71 bp, Artificial Sequence
  ENSG00000087299_14 (sequence is synthesized)
ggaggtgagctgaataataataataataattttcaaaatgttaggctgggggccgtggccagcactttggg

SEQ ID NO: 90438 - DNA, 120 bp, Artificial Sequence
  ENSG00000087299_15 (sequence is synthesized)
gacagagcaagaaaataataataataataattttcaaaatgttaggctgggggccgtggccagcactttgggaagccaaggcaggtagattgtagcccaggagtttgagaacagcctggg

SEQ ID NO: 90439 - DNA, 87 bp, Artificial Sequence
  ENSG00000087299_16 (sequence is synthesized)
gtctaggctgcagtgagcttatgttcatgacactgcattccaggctggatgatagagcaagatcttgtctcaaaaaaaaaaaaaaaa

SEQ ID NO: 90440 - DNA, 79 bp, Artificial Sequence
  ENSG00000087299_17 (sequence is synthesized)
ctgcagtgagcttatgttcatgacactgcattccaggctggatgatagagcaagactgggcaacatagtgaatgaaacc

SEQ ID NO: 90441 - DNA, 120 bp, Artificial Sequence
  ENSG00000087299_18 (sequence is synthesized)
gtgtgtgcctgtagtcccagctacttgggggctgaggcaggaggatcgcttgagcccgggagatcaaggctacagtgagctgtgttcatgccactataccccagcctgggcaacaaagtg

SEQ ID NO: 90442 - DNA, 120 bp, Artificial Sequence
  ENSG00000087299_19 (sequence is synthesized)
agtccctgactcaaaaaataaaaacaacaacaaaaaataaattccatgcttatttactttgcgaataaagaggcaaggtacagttttatctgtccgaatccctgacttttatttattttt

SEQ ID NO: 90443 - DNA, 120 bp, Artificial Sequence
  ENSG00000087299_20 (sequence is synthesized)
caaaatgctgggattacaggtgcgagccatcatgctcagccctgaatccctgactttgttaatgacctgtccttaccaaccatgacctagagaagatttggctttttaagagttttggag

SEQ ID NO: 90444 - DNA, 120 bp, Artificial Sequence
  ENSG00000087299_21 (sequence is synthesized)
ttttggagaaagatggcataaaaatagattatttccttaaatcaattttttagcattacgctacctaagctcgtttggtctctcatagacaagaaaatacattatattgtaggttacatt

SEQ ID NO: 90445 - DNA, 120 bp, Artificial Sequence
  ENSG00000087299_22 (sequence is synthesized)
cttttaattttgaagagtcacaaaactcacattatttagagcaacaatatttgtatttggaaattaaaaattcatgatttcaagaaaatacataaaatttacatttttgagtagtttgaa

SEQ ID NO: 90446 - DNA, 120 bp, Artificial Sequence
  ENSG00000087299_23 (sequence is synthesized)
tatcatcatgaaatctaaacagtggtacactgagtggttgtcctgttcttcaatctctgtggctgagaactgaaataacttagaagagacagatttttatgagagcagttttagaatcct

SEQ ID NO: 90447 - DNA, 120 bp, Artificial Sequence
  ENSG00000087299_24 (sequence is synthesized)
gacactgatgtatagaactccaatttaaaaaagttatttatctattatatctctgatctttagtcacactaaggctctcaaaatgttggccaagattggtaatgattcatacgtacttga

SEQ ID NO: 90448 - DNA, 120 bp, Artificial Sequence
  ENSG00000087299_25 (sequence is synthesized)
tttttcagggctcctataaacttgtatagggatatttttccatttttgataaatatctaactttgaggcattcacttttgtaaaccgcgaaagtgccttacattcacctcatgagtattt

SEQ ID NO: 90449 - DNA, 120 bp, Artificial Sequence
  ENSG00000087299_26 (sequence is synthesized)
taagttgatgcccagtgctgtggtatatcctgtatatatgtgttttgtggtatctatcgaaattattcttataatttagaaagttagaaaatagaaattgtaaatgaaaatgtggcgacc

SEQ ID NO: 90450 - DNA, 120 bp, Artificial Sequence
  ENSG00000087299_27 (sequence is synthesized)
tgactgcagaactttgagtactgaaccacatttaggtgaggcattttcatccattctctctgatttgctctctcaggattcatcttctactgtgtatgtcttctttcctcttagctctcc

SEQ ID NO: 90451 - DNA, 120 bp, Artificial Sequence
  ENSG00000087299_28 (sequence is synthesized)
aaagctgtatgatggatgggtgagaaggatgtgcattttggttgataggaaaaatgtttctgttttcttccttttcccctcacttcaagcattgatgattacattgattgagctacctca

SEQ ID NO: 90452 - DNA, 120 bp, Artificial Sequence
  ENSG00000087299_29 (sequence is synthesized)
tccattaatttgaaaggctacacttcatcagctcatgtttaagaagtagcacatcccaggtaaacagagtaggccattattcaactcttaggatgagtatattaaaagcattcagatatc

SEQ ID NO: 90453 - DNA, 120 bp, Artificial Sequence
  ENSG00000087299_30 (sequence is synthesized)
aatgacagaagaaacaagccctaatgtttctttataacagctgattcctgcaagaaatgcaaacacaggatatttttctgttccattacaagattactaagagatggaaaatattatcat

SEQ ID NO: 90454 - DNA, 120 bp, Artificial Sequence
  ENSG00000087299_31 (sequence is synthesized)
tctgtattttgtcagtagtacgattgcatacatactaagttgtaaacattgaattacaaaaaatgattgtcctaattgaagcagtcctcaatccatttgagtctgtacaataccctgaaa

SEQ ID NO: 90455 - DNA, 120 bp, Artificial Sequence
  ENSG00000087299_32 (sequence is synthesized)
tgttgaaagtgttttgaatatgtaggttattctgcttgtaaaacgttttatatgtatgtcaatagggtttttttgtttaatactgatataataaagttttatgtatttctgacagaagaa

SEQ ID NO: 90456 - DNA, 120 bp, Artificial Sequence
  ENSG00000087299_33 (sequence is synthesized)
atgtatattaatatttaaaatattttaatgagccttggtgttgtagagaacatattttttagttccataaaaacttttatgcaaataaatttttttatgtgtaaaacataaactgtttgc

SEQ ID NO: 90457 - DNA, 120 bp, Artificial Sequence
  ENSG00000087299_34 (sequence is synthesized)
tttagatagatagcagccaacctttttaaaaaactcatttctgtgttagtatataatacaaaatgaggttgagtcatttatattttgggtaaaaagtggagcattttagattttaacttc

SEQ ID NO: 90458 - DNA, 120 bp, Artificial Sequence
  ENSG00000087299_35 (sequence is synthesized)
agagtgtttgtgaggaactcttgatgtaccagcaagtatatttttggtgtttcatgttacgtagcttaactcttttatccatacatatatgtgtatatcaaagtccttcccttgatcctc

SEQ ID NO: 90459 - DNA, 120 bp, Artificial Sequence
  ENSG00000087299_36 (sequence is synthesized)
tcagcattagcactgtttggggagttgcctttactgttggcagaattccactttccctgaggccatttggaaatctacctagtagcctgtgggataaccttaactcttagaactttcttc

SEQ ID NO: 90460 - DNA, 120 bp, Artificial Sequence
  ENSG00000087299_37 (sequence is synthesized)
aaaggatggtggtgagaatggggtatactgccaggccctggcctacgggagtttgtagggcctacttttggaggcaatccaaccctgatggctgtacctatgagctatccctgtaaacac

SEQ ID NO: 90461 - DNA, 120 bp, Artificial Sequence
  ENSG00000087299_38 (sequence is synthesized)
aggagacatggtgtctatattgtttaaggactggctctgccctcctgggcccttaatctgtgtctagacttcttggtcagaggtttcctcatctttctgcgcatacactattatctaaag

SEQ ID NO: 90462 - DNA, 120 bp, Artificial Sequence
  ENSG00000087299_39 (sequence is synthesized)
atcttgtaaacatttttgagttgtaatcgtaaagtcagtttctaagcttttctaacacactcaaagggagtttttgaaatctcttcatcagggcttaaggtagaaggacagggtgaaatg

SEQ ID NO: 90463 - DNA, 120 bp, Artificial Sequence
  ENSG00000087299_40 (sequence is synthesized)
gttgggaaagcaaaagctgcctcgagatgttttcaaatagtttgtactcattaaatagcttaagaatggaaataaaccctgaagccctgaagggaagaacagtgttgataccaaccaact

SEQ ID NO: 90464 - DNA, 120 bp, Artificial Sequence
  ENSG00000087299_41 (sequence is synthesized)
ctacttttctggcctcaaatcctagaaagtattgtgggtttgttgttgttgttgatgttgttaattgcttgtattttctgcttatgggaaggatctcacattaaagttatcttattttaa

SEQ ID NO: 90465 - DNA, 120 bp, Artificial Sequence
  ENSG00000087299_42 (sequence is synthesized)
cgcagcgccagcaccagaagaaacagtttgtgtgaaggctgtaaggcttggagaggttttggctattttgacgactagaaggtgggccatatgagtgtgactgaagtttagtggaagaca

SEQ ID NO: 90466 - DNA, 120 bp, Artificial Sequence
  ENSG00000087299_43 (sequence is synthesized)
atgaaagtgagtgataacaacatttattgtttcctgtggcgttgctttgctttgctattgactggtagcgcttgtagctttaaataaattgaggaagtatgagagagtaaatggaagaaa

SEQ ID NO: 90467 - DNA, 120 bp, Artificial Sequence
  ENSG00000087299_44 (sequence is synthesized)
aattttgaagtaaaaggtattgaaatggctaaagaaagtccttcaagaagtatagatgctgaataacgagcaagaatttcagattaacaaagatgtcaggtggaaagcttcattggttta

SEQ ID NO: 90468 - DNA, 120 bp, Artificial Sequence
  ENSG00000087301_0 (sequence is synthesized)
gagtcggtggcggctgcaggctgggagggagaagtgctacgcctttgcaggttggcgaagtggttccaggctacccggctagtctggcacggccccgtcttctgcctcctcctccgtcgc

SEQ ID NO: 90469 - DNA, 120 bp, Artificial Sequence
  ENSG00000087301_1 (sequence is synthesized)
gtggcggcgggaactgttggccgcgcggcctcgggaacggcccaggtccccgcccgcaggtcccgggcagataacatagatcatcagtagaaaacttcttgaagttgttcaagaaaaatt

SEQ ID NO: 90470 - DNA, 120 bp, Artificial Sequence
  ENSG00000087301_2 (sequence is synthesized)
tgaaagtagcaaaatagaaaataaagaattaacagcagatacagaggacagcatggaagtgttgtcttaggaaacagaacacagcagtgaaaaaacagacaaaatccgctcagatacaac

SEQ ID NO: 90471 - DNA, 120 bp, Artificial Sequence
  ENSG00000087301_3 (sequence is synthesized)
tgcagctgataatgttttccggcttcaatgtctttagagttgggatctcttttgtcataatgtgcattttttacatgccaacagtaaactctttaccagaactgagtcctcagaaatatt

SEQ ID NO: 90472 - DNA, 120 bp, Artificial Sequence
  ENSG00000087301_4 (sequence is synthesized)
ttagtacattgcaaccaggaaaagcctctttagcttatttttgtcaagctgattccccaagaacatctgtatttcttgaagaactgaatgaggctgttagacctctgcaggactatggaa

SEQ ID NO: 90473 - DNA, 120 bp, Artificial Sequence
  ENSG00000087301_5 (sequence is synthesized)
tttcagttgccaaggttaattgtgtcaaagaagaaatatcaagatactgtggaaaagaaaaggatttgatgaaagcatatttattcaagggcaacatattgctcagagaattccctactg

SEQ ID NO: 90474 - DNA, 120 bp, Artificial Sequence
  ENSG00000087301_6 (sequence is synthesized)
acaccttgtttgatgtgaatgccattgtcgcccatgttctctttgctcttctttttagtgaagtgaaatatattaccaacctggaagaccttcagaacatagaaaatgctctgaaaggaa

SEQ ID NO: 90475 - DNA, 120 bp, Artificial Sequence
  ENSG00000087301_7 (sequence is synthesized)
aagcaaatattatattctcatatgtaagagccattggaataccagagcacagagcagtcatggaagccgcttttgtgtatgggactacataccaatttgtcttaaccacagaaattgccc

SEQ ID NO: 90476 - DNA, 120 bp, Artificial Sequence
  ENSG00000087301_8 (sequence is synthesized)
ttttggaaagtattggctctgaggatgtggaatatgcacatctctacttttttcattgtaaactagtcttggacttgacccagcaatgtagaagaacactaatggaacagccattgacta

SEQ ID NO: 90477 - DNA, 120 bp, Artificial Sequence
  ENSG00000087301_9 (sequence is synthesized)
cactgaacattcacctgtttattaagacaatgaaagcacctctgttgactgaagttgctgaagatcctcaacaagtttcaactgtccatctccaactgggcttaccactggtttttattg

SEQ ID NO: 90478 - DNA, 120 bp, Artificial Sequence
  ENSG00000087301_10 (sequence is synthesized)
ttagccaacaggctacttatgaagctgatagaagaactgcagaatgggttgcttggcgtcttctgggaaaagcaggagttctactcttgttaagggactctttggaagtgaacattcctc

SEQ ID NO: 90479 - DNA, 120 bp, Artificial Sequence
  ENSG00000087301_11 (sequence is synthesized)
aagatgctaatgtggtcttcaaaagagcagaagagggagttccagtggaatttttggtattacatgatgttgatttaataatatctcatgtggaaaataatatgcacattgaggaaatac

SEQ ID NO: 90480 - DNA, 120 bp, Artificial Sequence
  ENSG00000087301_12 (sequence is synthesized)
aagaagatgaagacaatgacatggaaggtccagatatagatgttcaggatgatgaagtggcagaaactgttttcagagataggaagagaaaattacctttggaacttacagtggaactaa

SEQ ID NO: 90481 - DNA, 120 bp, Artificial Sequence
  ENSG00000087301_13 (sequence is synthesized)
cagaagaaacatttaatgcaacagtgatggcttctgacagcatagtactcttctatgctggttggcaagcagtatccatggcatttttgcaatcctatattgatgtggcagttaaactga

SEQ ID NO: 90482 - DNA, 120 bp, Artificial Sequence
  ENSG00000087301_14 (sequence is synthesized)
aaggcacatctactatgcttcttactagaataaactgtgcagattggtctgatgtatgtactaagcaaaatgttactgaatttcctatcataaagatgtacaagaaaggcgagaacccag

SEQ ID NO: 90483 - DNA, 120 bp, Artificial Sequence
  ENSG00000087301_15 (sequence is synthesized)
tatcttatgctggaatgttaggaaccgaagatctcctaaaatttatccagctcaacaggatttcatatccagtgaatataacatcgatccaagaagcagaagaatatttaagtggggaat

SEQ ID NO: 90484 - DNA, 120 bp, Artificial Sequence
  ENSG00000087301_16 (sequence is synthesized)
tatataaagacctcatcttgtattctagtgtgtcagtattgggactatttagtccaaccatgaaaacagcaaaagaagattttagtgaagcaggaaactacctaaaaggatatgttatca

SEQ ID NO: 90485 - DNA, 120 bp, Artificial Sequence
  ENSG00000087301_17 (sequence is synthesized)
ctggaatttattctgaagaagatgttttgctactgtcaaccaaatatgctgcaagtcttccagccctgctgcttgccagacacacagaaggcaaaatagagagcatcccactagctagca

SEQ ID NO: 90486 - DNA, 120 bp, Artificial Sequence
  ENSG00000087301_18 (sequence is synthesized)
tcagtgatggcactgtaaatcctcagtataaaaaagcaatattgacactggtaaagcagaaatacttggattcatttactccatgctggttaaatctaaagaatactccagtggggagag

SEQ ID NO: 90487 - DNA, 120 bp, Artificial Sequence
  ENSG00000087301_19 (sequence is synthesized)
gaatcttgagggcatattttgatcctctgcctccccttcctcttcttgttttggtgaatctgcattcaggtggccaagtatttgcatttccttcagaccaggctataattgaagaaaacc

SEQ ID NO: 90488 - DNA, 120 bp, Artificial Sequence
  ENSG00000087301_20 (sequence is synthesized)
ttgtattgtggctgaagaaattagaagcaggactagaaaatcatatcacaattttacctgctcaagaatggaaacctcctcttccagcttatgattttctaagtatgatagatgccgcaa

SEQ ID NO: 90489 - DNA, 120 bp, Artificial Sequence
  ENSG00000087301_21 (sequence is synthesized)
catctcaacgtggcactaggaaagttcccaagtgtatgaaagaaacagatgtgcaggagaatgataaggaacaacatgaagataaatcggcagtcagaaaagaaccgattgaaactctga

SEQ ID NO: 90490 - DNA, 120 bp, Artificial Sequence
  ENSG00000087301_22 (sequence is synthesized)
gaataaagcattggaatagaagtaattggtttaaagaagcagaaaaatcatttagacgtgataaagagttaggatgctcaaaagtgaactaattttatagggctgtggtttccaaaattt

SEQ ID NO: 90491 - DNA, 120 bp, Artificial Sequence
  ENSG00000087301_23 (sequence is synthesized)
ttttggcatgatagacttaatttatttccttaaagaataatattaaatcatttcaagtttgcagactagtgccatccaatagaattataatataagtcacatattttatttaaaattttc

SEQ ID NO: 90492 - DNA, 120 bp, Artificial Sequence
  ENSG00000087301_24 (sequence is synthesized)
tagtaactacattaaacaaagtaaaagtgagcagggcaaaataattttgatattacttttcacccagtagtatacccaaaatagcgaaatatagaaattattaatgagatattttacatc

SEQ ID NO: 90493 - DNA, 120 bp, Artificial Sequence
  ENSG00000087301_25 (sequence is synthesized)
cttttttgtaccaagtcttctaaatgcagtacatattttatacttactgcatttcttacttccgagtagccatatttcaagtgttccttgccacatgtggcctgtgactactgtattgga

SEQ ID NO: 90494 - DNA, 120 bp, Artificial Sequence
  ENSG00000087301_26 (sequence is synthesized)
cagttcagtactagacaaaaactagcataattaacttagttctagccatgatttctatttggattaaaattaaactctaatcacagttaactccacagtgcattcatgcagctgacagtt

SEQ ID NO: 90495 - DNA, 120 bp, Artificial Sequence
  ENSG00000087301_27 (sequence is synthesized)
atatttgttttattggagtcatgatattaaaatcagcgtttgtcaacctcaggggatatttagcaattgtcgggagacatttttgatgtcatgactagggcagttattgacatttagtga

SEQ ID NO: 90496 - DNA, 120 bp, Artificial Sequence
  ENSG00000087301_28 (sequence is synthesized)
gtagaggccagggatcctgctaaataacctgcattggacagcgccccacaacaaagaattatcctgcccgaaatggtagtcgtgccaaggctgagtaaccttgtgttaaaagtaacctgt

SEQ ID NO: 90497 - DNA, 120 bp, Artificial Sequence
  ENSG00000087301_29 (sequence is synthesized)
ggcagactaggtttccagaatttcctggttctgctcacgtatcatgtttgaaaaaattttggctattaaagatatgtattagatggtcttatcctgattattacctggatacaacttgat

SEQ ID NO: 90498 - DNA, 120 bp, Artificial Sequence
  ENSG00000087301_30 (sequence is synthesized)
cttttctaatattttcagaaagtgatgggataaccctagaagaggactcagaatgatatttatattttaagtgagtcttaaaacctcctcttatttctacaagttatatggctaaatttc

SEQ ID NO: 90499 - DNA, 120 bp, Artificial Sequence
  ENSG00000087301_31 (sequence is synthesized)
agattgaacagggattcagcattctgccatctcctcatggaaagagaggctccctcatctgaagcgtctctgaaatctacccttgcaagcttcagacaaatcagttgatctccctgagcc

SEQ ID NO: 90500 - DNA, 120 bp, Artificial Sequence
  ENSG00000087301_32 (sequence is synthesized)
acacggcctcattctgtgagggagggaaagattagccaaagagttaattttcattccaaatcacttagctgttagactgatctgtttgtagcagttgtttgtctcatttttgctctgtgc

SEQ ID NO: 90501 - DNA, 120 bp, Artificial Sequence
  ENSG00000087301_33 (sequence is synthesized)
attttttgagacatttgttgagaatattctatttggtgctctactgtatttttctttttaatatctacttgatatcttgttctttaaattttcttcacatatggtttgcctgatacaact

SEQ ID NO: 90502 - DNA, 120 bp, Artificial Sequence
  ENSG00000087301_34 (sequence is synthesized)
gatttttataactgaaatttaaggaatctaacagctaaaactcagtaagtgcatatatttccttataacatagacccgttgctactctcagcaccctctcctcaattttttttcctgtag

SEQ ID NO: 90503 - DNA, 120 bp, Artificial Sequence
  ENSG00000087301_35 (sequence is synthesized)
catgtgatgcctgattaaactcattttcatttgcttttatttctaatatgggaacaatgagagtgaactctaaatataggttgtagtaataaaacatcattagcctaattattagaaaat

SEQ ID NO: 90504 - DNA, 120 bp, Artificial Sequence
  ENSG00000087301_36 (sequence is synthesized)
gctaattaagtaccagcacatagaaacatgaaattgcttagtcattgtacctttgtcagcaattttgacagtcattaatgtttgtcataattttaaataaagtgtctgggtttcagaata

SEQ ID NO: 90505 - DNA, 120 bp, Artificial Sequence
  ENSG00000087301_37 (sequence is synthesized)
gtgaggaaatctgagagccaaagccaagattcaacataaaaatgagatccttaatttctgaagaactgagtactccactttctggctacaactacctacaaacacttacaaaaatggcaa

SEQ ID NO: 90506 - DNA, 120 bp, Artificial Sequence
  ENSG00000087301_38 (sequence is synthesized)
aatgttactaaagcaaaagaagattttagtgaagcaggaaactacctaaaaggatatgttatcactggaatttattctgaagaagatgttttgctactgtcaaccaaatatgctgcaagt

SEQ ID NO: 90507 - DNA, 120 bp, Artificial Sequence
  ENSG00000087302_0 (sequence is synthesized)
ctctcgccgcgtcgccggtgcctgcgcctcccgctccacctcgcttcttctctcccggccgaggcccgggggaccagagcgagaagcggggaccatgttccgacgcaagttgacggctct

SEQ ID NO: 90508 - DNA, 120 bp, Artificial Sequence
  ENSG00000087302_1 (sequence is synthesized)
cgactaccacaaccccgccggcttcaactgcaaagatgaaacagaatttagaaacttcatcgtttggcttgaagaccagaaaatcaggcactacaagattgaagacagagggaatttaag

SEQ ID NO: 90509 - DNA, 120 bp, Artificial Sequence
  ENSG00000087302_2 (sequence is synthesized)
aaacatccacagcagcgactggcccaagttctttgaaaagtatctcagagatgttaactgtcctttcaagattcaagatcgacaagaagctattgactggcttcttggtttagctgttag

SEQ ID NO: 90510 - DNA, 120 bp, Artificial Sequence
  ENSG00000087302_3 (sequence is synthesized)
acttgaatatggagataatgctgaaaaatacaaggatttagtacctgataattcaaaaactgctgacaatgcaactaaaaatgcagaaccattgatcaatttggatgtaaataatcctga

SEQ ID NO: 90511 - DNA, 120 bp, Artificial Sequence
  ENSG00000087302_4 (sequence is synthesized)
ttttaaggctggtgtgatggctttggctaacctgcttcagattcagcgtcatgatgattacctggtaatgcttaaggcaattcggattttggttcaggagcgcctgacacaggatgcagt

SEQ ID NO: 90512 - DNA, 120 bp, Artificial Sequence
  ENSG00000087302_5 (sequence is synthesized)
tgctaaggcaaatcaaacaaaagagggcttacctgttgctttagacaaacatattcttggttttgacacaggagatgcagttcttaatgaagctgctcaaattctgcgattgctgcacat

SEQ ID NO: 90513 - DNA, 120 bp, Artificial Sequence
  ENSG00000087302_6 (sequence is synthesized)
agaggagctcagagagctacagacaaaaatcaacgaagccatagtagctgttcaggcaattattgctgatccaaagacagaccacagactgggaaaagttggaagatgaacacttgagga

SEQ ID NO: 90514 - DNA, 120 bp, Artificial Sequence
  ENSG00000087302_7 (sequence is synthesized)
cttcagcttctcacctacttagtacagttgggaaccatacacttctggcatgtttggaaatcaaaatgtcacattctcgggggaggaagcccagaaaattgggtatgttctagagattta

SEQ ID NO: 90515 - DNA, 120 bp, Artificial Sequence
  ENSG00000087302_8 (sequence is synthesized)
ccaccattgcttattgcttttttctttaataaagtttaggaaagtagaatttttattatgtactgtatgtttgcataaatcacctttctcctttgtggttaaggcatatatgccaacccc

SEQ ID NO: 90516 - DNA, 120 bp, Artificial Sequence
  ENSG00000087302_9 (sequence is synthesized)
cagctttgtcctagagacaatatagatccttaagtcataggaaaacttaaaacactttattggagtaatctagaaaattttaaaattgttacatctttggtatttataaatgtgatactt

SEQ ID NO: 90517 - DNA, 120 bp, Artificial Sequence
  ENSG00000087302_10 (sequence is synthesized)
tactttctgtgggtacttctatagaggcactacaggatcagaaaatgcaaattgaatcattttagcaccttttgatataaatagaaatgcactgatgcagaggtaaaaaatcttagaact

SEQ ID NO: 90518 - DNA, 120 bp, Artificial Sequence
  ENSG00000087302_11 (sequence is synthesized)
tttgttgggaaactataaataattggtcctttcccatcagttctgcattggcttctccaactgtcaaggtttaggattatattgttatattgatcacatgtgctttaatttcttggccag

SEQ ID NO: 90519 - DNA, 120 bp, Artificial Sequence
  ENSG00000087302_12 (sequence is synthesized)
aaggaatccatggcaaaaatcaggtttagagtcttaaactctaattcttagttgaatgaatttgatcttttaaatattaatgataaatgtttacaagaagttgctttaataagcaacagt

SEQ ID NO: 90520 - DNA, 120 bp, Artificial Sequence
  ENSG00000087302_13 (sequence is synthesized)
taaaattctgttacctttttaaacttgcaataacaaccttcatttttaaaaatacagtagtaaagattgaggtatcagcttttcacaaaagtctttttgcactacaaaatgttcatcttg

SEQ ID NO: 90521 - DNA, 120 bp, Artificial Sequence
  ENSG00000087302_14 (sequence is synthesized)
gatgctcaggaacgtctaatggccaattccttttttactttctttgcctttgcagtcactgttctttagggtccaggttctgattgtaaactccaagtcttcctttacattactgtactt

SEQ ID NO: 90522 - DNA, 120 bp, Artificial Sequence
  ENSG00000087302_15 (sequence is synthesized)
actttcttcctgtgagagaagagcaggggtgggacagggtggtgggtgagtatattgtaaccaagttgcaacagcaagtctttgcattttgtgtataaactaggtagatttaaggtagta

SEQ ID NO: 90523 - DNA, 120 bp, Artificial Sequence
  ENSG00000087302_16 (sequence is synthesized)
aagactggccctcagggcaggaagaaggcaatggtggcagtgtcacaggcagcaggggtaatcaaataccatatatatcccttctctaccctgctaatttaaaggagcatcctaaagcat

SEQ ID NO: 90524 - DNA, 120 bp, Artificial Sequence
  ENSG00000087302_17 (sequence is synthesized)
actttttacctgttgggcagtaggggtagactgcagttatcccgtagaggtgagatcgttgttctgggagatactcatcagtaaactggccactatgtttatttactgatacaacaccat

SEQ ID NO: 90525 - DNA, 120 bp, Artificial Sequence
  ENSG00000087302_18 (sequence is synthesized)
ccctggtaacagaaaggaagagtgaattcagggacagtcatttactagataaagaagtcagtcagccacagaaaatcagttgcaatagaggaaaatttctggcagccttctctgtcccag

SEQ ID NO: 90526 - DNA, 120 bp, Artificial Sequence
  ENSG00000087302_19 (sequence is synthesized)
ggctggtgctaaagccatactgaagtttgaagaccattgctctaaatccattgctcatctctagctgcatgttagaatcacatgatgagctatcaaatcagagttgtagggcatggtgta

SEQ ID NO: 90527 - DNA, 120 bp, Artificial Sequence
  ENSG00000087302_20 (sequence is synthesized)
aagggcttagactttaatgttccacagttcctcatttgagaactagtctaaatagtatttttcggtccctcagacaatatgtccacagtgtcaaaagccaacttaagccctgtaatatag

SEQ ID NO: 90528 - DNA, 120 bp, Artificial Sequence
  ENSG00000087302_21 (sequence is synthesized)
ctcatggtatcaagggtagtcttattctctaaagaacatatttagattaatatgctcccttttgagacattatccaatagctttgctactttttaagctatatgtgagcaataccattcg

SEQ ID NO: 90529 - DNA, 120 bp, Artificial Sequence
  ENSG00000087302_22 (sequence is synthesized)
atttctgggtgaagtaaaaggatgatttcaaaaacatgaaaggatgaaaaacatccttgaaggatcttatctgccaatgaggaggtgatgaaacaaaagcctcagagggcttaatgagtc

SEQ ID NO: 90530 - DNA, 120 bp, Artificial Sequence
  ENSG00000087302_23 (sequence is synthesized)
aagtcaggtactgacttttggtaaaacaagtggtgtgtcctctggaacagttggccttttcaggcttgtccagaatttgtggggctcacctcctccagtctgtgtggtagaagtgatctg

SEQ ID NO: 90531 - DNA, 120 bp, Artificial Sequence
  ENSG00000087302_24 (sequence is synthesized)
catagcttacgatgctgaaggggtacttgaggttgttttgaatgacacgccgtccagttccatcaggtagtgtacactccagttttttggttccttttaaaacaaagggggaaaatgagg

SEQ ID NO: 90532 - DNA, 120 bp, Artificial Sequence
  ENSG00000087302_25 (sequence is synthesized)
tccttcagctgctttgccaaaaatgatagtgacatagtgatagtgacacagtgatagaatggggaaataggatattttacttccattacagtcatagattagcaactgtaaaattacctg

SEQ ID NO: 90533 - DNA, 120 bp, Artificial Sequence
  ENSG00000087302_26 (sequence is synthesized)
tcctattactagtctccagtttttagtagagattcaaactttcaatccttttttggaagacaggattgcatttactgaaatctggtaagtttctgccaaagtagggcattaaacataatt

SEQ ID NO: 90534 - DNA, 120 bp, Artificial Sequence
  ENSG00000087302_27 (sequence is synthesized)
atttttataatttgtgtgatttcaagccttagcttataaattataacatctgggtaaatacttgccctttgtaagctatgtctataattactgaggcaaccttttaaccaaaatccttag

SEQ ID NO: 90535 - DNA, 120 bp, Artificial Sequence
  ENSG00000087302_28 (sequence is synthesized)
tatttttaaaatattttctaggtaggaggaaaaaagtgactaaaatggtaacataactcatatttcaatgtaaaggaatcagtcttaaaaatttttacaatagctaaaccattcaagaat

SEQ ID NO: 90536 - DNA, 120 bp, Artificial Sequence
  ENSG00000087302_29 (sequence is synthesized)
tttaagaaatgtaacttgttttaaacaactgggttataaaagtgacctatgtacattaggcccttttattagattacaaattcaagaacagtctttttcatattctttagtatagaacta

SEQ ID NO: 90537 - DNA, 120 bp, Artificial Sequence
  ENSG00000087302_30 (sequence is synthesized)
gacacacagcattttttcagttgtgctgataaaagcaaacaaatgtaggttgctaatacccatgttattactgaaggaagctaccctgctacaatgctttccaaagaatgtccttagcat

SEQ ID NO: 90538 - DNA, 120 bp, Artificial Sequence
  ENSG00000087302_31 (sequence is synthesized)
tataacagatgtttataggtaagttatagtgaccctctccccgcataagaataacttcacttaagtttgtcaattcaacaatggctaattcttttaactgttaaaaatatgccaggcact

SEQ ID NO: 90539 - DNA, 120 bp, Artificial Sequence
  ENSG00000087302_32 (sequence is synthesized)
catggtcaggcaagcagtacaaacttactgcttgatatatccttccctccacccaaaccccagaaagttcattttaagactcatttactagtacttaaatttactagtacttaaaagttt

SEQ ID NO: 90540 - DNA, 120 bp, Artificial Sequence
  ENSG00000087302_33 (sequence is synthesized)
acagaccaaagaaaggagatctaagtgatgggatttcattttgtagtaaaatctgttagtgctcacattcactgtgatgagaggttatctatttgcattccatcagtagtattacctgca

SEQ ID NO: 90541 - DNA, 120 bp, Artificial Sequence
  ENSG00000087302_34 (sequence is synthesized)
tctgcccagcagagcagtttagagaaagggtcaaaggttaagccattgggcaatccaatgtctgtattgatcagaattcttctgttttctccatctaaagatgacgtttcaattttagga

SEQ ID NO: 90542 - DNA, 120 bp, Artificial Sequence
  ENSG00000087302_35 (sequence is synthesized)
gcttctctattccagtctgtccagtacaagttgctgtaagttaaaaatcaagattgtaaaagaatagccatgtagcctgtggtaggcagcatctaagcagcccccagtgatctccatctc

SEQ ID NO: 90543 - DNA, 120 bp, Artificial Sequence
  ENSG00000087302_36 (sequence is synthesized)
ctcatgtattatagccttaagcaatccccttgagtttgggctgcattagtagtgtcttgcttcttctagtgcatagagtatagcagaagtgataggctatcactgccgatattcggtctc

SEQ ID NO: 90544 - DNA, 120 bp, Artificial Sequence
  ENSG00000087302_37 (sequence is synthesized)
aaaaaactggtttctgccttaggggctctctcttgctccctttgagggaagctggatgccatgttgcaagctaccctgtaaaggggaacatgtgccaaggaactgatgtccttgagggct

SEQ ID NO: 90545 - DNA, 120 bp, Artificial Sequence
  ENSG00000087302_38 (sequence is synthesized)
gttggccagagacattagtcttgcctgtagcccatgtgagcatgcttgggctgtgtcttccccgagctgagccttgtgatcactgcagtttggccattacctgattgcagccttgtgaga

SEQ ID NO: 90546 - DNA, 120 bp, Artificial Sequence
  ENSG00000087302_39 (sequence is synthesized)
gactccatgcctgagggagctcggtgaagacacacttggattcctgactcacagaaactgtgagactaaatgttatcttacactgctgagggtttgggcaatttcttacacagcagtagg

SEQ ID NO: 90547 - DNA, 120 bp, Artificial Sequence
  ENSG00000087302_40 (sequence is synthesized)
taactaatacacagccatattccacttttacctgtatcacaaggttttctgattattgtcactatgtgggagaagtcattactaagttactatcagaatccctgcctccaagatacccct

SEQ ID NO: 90548 - DNA, 120 bp, Artificial Sequence
  ENSG00000087302_41 (sequence is synthesized)
tgactcaactgccccaaaaccctccgtttgttgaagtcttgaattggatcttgggttttagaatagaaacaaatacagctgttaggaatggcttcgatacaaactatggaacttgaagag

SEQ ID NO: 90549 - DNA, 120 bp, Artificial Sequence
  ENSG00000087302_42 (sequence is synthesized)
atgtggaccagggatttgagaaggaaactgttctttcttctgccaaaaatacaatttggtacttgaaggggtacctggcacccagggatggaaacattttaagttaagcactttaccttt

SEQ ID NO: 90550 - DNA, 120 bp, Artificial Sequence
  ENSG00000087302_43 (sequence is synthesized)
taaatgccacgttaaaaatgaaatatattcataacagatactaacgaggaaatatggtcctattaagtggaaataggttataaggaaacaaacaggtttatcgttagagcagaaataatg

SEQ ID NO: 90551 - DNA, 120 bp, Artificial Sequence
  ENSG00000087302_44 (sequence is synthesized)
ttgaaagcactttttataaaatactattttataaaagctatagaagctttgaataaatcagttgggctacagagaacctcagtgagaggagaggaagaaaccataggtttcccctgttgc

SEQ ID NO: 90552 - DNA, 120 bp, Artificial Sequence
  ENSG00000087302_45 (sequence is synthesized)
gaatttcatcccttatgcccaacagatgaagcagagagaagctgagagcaaaagctagaaagcagtttccactttgcgctaaggtggaggtggccagagggtacagcatgcatatcattg

SEQ ID NO: 90553 - DNA, 120 bp, Artificial Sequence
  ENSG00000087302_46 (sequence is synthesized)
cttcatcgcttctgatcagtctcctccccaaaatgatttaatatcatcaacaacaataagtctgaaacaagctcacacagatatttggtgtaaattatttggggattgccagaggaagaa

SEQ ID NO: 90554 - DNA, 120 bp, Artificial Sequence
  ENSG00000087302_47 (sequence is synthesized)
agttgtaaaggtgaaatctatagaaagcaaatgagaaatatgcaggaaggcttgacaaccattctgttacgcagttgaaggagatgtaattacatgtgttatattgcaacctggttcaag

SEQ ID NO: 90555 - DNA, 120 bp, Artificial Sequence
  ENSG00000087302_48 (sequence is synthesized)
gtgggttttctttttattaaaaattcaagtcctttagcatttatatttgctgtctggataagaaagttctactttcatatttaaactcatggctgtgatgtggatttcagcttaaaagta

SEQ ID NO: 90556 - DNA, 120 bp, Artificial Sequence
  ENSG00000087302_49 (sequence is synthesized)
tgctttttccccagactccagagacatggccaaagtttcattgcctacaagatggcagctctccccagttttcaggtcaagcaccaagaaggaataaggggccgggcgcagtggctcata

SEQ ID NO: 90557 - DNA, 88 bp, Artificial Sequence
  ENSG00000087302_50 (sequence is synthesized)
tagtcagccgagactgtgccactgcaccccagcctcggcaacaaagcaagaccttgtctcaaaaaaaagaaaaaaaaaagaaaaaagg

SEQ ID NO: 90558 - DNA, 120 bp, Artificial Sequence
  ENSG00000087302_51 (sequence is synthesized)
aaaagaaaaaaaaaagaaaaaaggaccttccaaatgtccaaatgtcagaaaggcaagcctatgcaaagagtttttaagagggctattaattcctgttaagtcaactggaatagagaagga

SEQ ID NO: 90559 - DNA, 120 bp, Artificial Sequence
  ENSG00000087302_52 (sequence is synthesized)
ctggaatagagaaggatacaggtacttttcctgtgtgtagaacccaaagtttgaaaccacctttgaggcactgcactaagtatttcatagtcaaaaagcacttacctgaaaattaaagct

SEQ ID NO: 90560 - DNA, 120 bp, Artificial Sequence
  ENSG00000087302_53 (sequence is synthesized)
gaaggttttctttactgatttgaagggcatctgggaatttcatttcgtagaaactccacttaaacatggcaagagtttctcaagatataaaaattctccctgattgtaacaagtactgag

SEQ ID NO: 90561 - DNA, 120 bp, Artificial Sequence
  ENSG00000087302_54 (sequence is synthesized)
acagtgaacaaatcctgtatgtcacatttgatgaccttagcaattatacagacagggaaaatgtttatcttgatttctgctacagcaacactgaagccagaggtgtctgagctttggcta

SEQ ID NO: 90562 - DNA, 120 bp, Artificial Sequence
  ENSG00000087302_55 (sequence is synthesized)
atgtcacttgatgtaggtcagccctactgtgagcgtcaaccctggtttctaaatgtgctgctggaggaatcccacttcacttccagtttaagtgtcagctgaggcctcgcctgatcattt

SEQ ID NO: 90563 - DNA, 120 bp, Artificial Sequence
  ENSG00000087302_56 (sequence is synthesized)
gattcagagtagccctagttctcacaacactatctgaattttctacatatcacatcacagactaatattgtttataccagtcttgtttcctcctaataaaatataagtgccatgaaagaa

SEQ ID NO: 90564 - DNA, 120 bp, Artificial Sequence
  ENSG00000087302_57 (sequence is synthesized)
gcctttagaaatgttaatgaaaagatatttgtgtcacatagtccagtaattgctttagcttaatcaaaaagatagttacattgtctttttacattttctatagcaaaaattaagcttgat

SEQ ID NO: 90565 - DNA, 120 bp, Artificial Sequence
  ENSG00000087302_58 (sequence is synthesized)
tgaatgaattgttttatgcttatacaggttaagcatccctaatccgagaatctgaaatcctaaatgctccaaaatccaaaactttttgagcactgacatgaggacacaagtagaaatttc

SEQ ID NO: 90566 - DNA, 120 bp, Artificial Sequence
  ENSG00000087302_59 (sequence is synthesized)
cacacataagcacttaacacaaactttatttcatgcacaaaattattaaaaatattatatgaaattaccttcaggctatgtgtataagttgtacattgaacataaaaatgaattttgtgt

SEQ ID NO: 90567 - DNA, 120 bp, Artificial Sequence
  ENSG00000087302_60 (sequence is synthesized)
gaaactcaacctgtaatcattttggctcagttaaatttggtaaatagcagtagtcattttaccttgagttgcagttgtacaaattatatttttgcctgtttttatagctgaaaaatacaa

SEQ ID NO: 90568 - DNA, 120 bp, Artificial Sequence
  ENSG00000087302_61 (sequence is synthesized)
atagggaaaactcgctaatcacaatcatcacaaagcaaatataaacaaaattcctagttcccttgcccatgcagctaaaagagttaagacaccagaatagctaggtgcttttcagtttca

SEQ ID NO: 90569 - DNA, 120 bp, Artificial Sequence
  ENSG00000087302_62 (sequence is synthesized)
tttaataccccggaagacccattgtaaagctgaaaaattgtagttggaaccactgtaagttcagattttcctcatcttgcactagggttacatcccactgaactcattgtaaggtcaaaa

SEQ ID NO: 90570 - DNA, 120 bp, Artificial Sequence
  ENSG00000087302_63 (sequence is synthesized)
aattacaagtctaaccatcctaagttggggaccgtctcatacagtaataggaaaaccattttatcttaccaatttatttaattgttgatagtctacagggctttcttttttctcttgtga

SEQ ID NO: 90571 - DNA, 120 bp, Artificial Sequence
  ENSG00000087303_0 (sequence is synthesized)
ggagagtgggctggaggccggggcgggacgcgttgtgcagcgggtaagcgcacggccgagcgagcatggagggggaccgggtggccgggcggccggtgctgtcgtcgttaccagtgctac

SEQ ID NO: 90572 - DNA, 120 bp, Artificial Sequence
  ENSG00000087303_1 (sequence is synthesized)
tgctgctgccgttgctaatgttgcgggccgcggcgctgcacccagacgagctcttcccacacggggagtcgtggggggaccagctcctgcaggaaggcgacgacgaaagctcagccgtgg

SEQ ID NO: 90573 - DNA, 120 bp, Artificial Sequence
  ENSG00000087303_2 (sequence is synthesized)
tgaagctggcgaatcccctgcacttctacgaagcccgattcagcaacctctacgtgggcaccaacggcatcatctccactcaggacttccccagggaaacgcagtatgtggactatgatt

SEQ ID NO: 90574 - DNA, 120 bp, Artificial Sequence
  ENSG00000087303_3 (sequence is synthesized)
tccccaccgacttcccggccatcgccccttttctggcggacatcgacacgagccacggcagaggccgagtcctgtaccgagaggacacctcccccgcagtgctgggcctggccgcccgct

SEQ ID NO: 90575 - DNA, 120 bp, Artificial Sequence
  ENSG00000087303_4 (sequence is synthesized)
atgtgcgcgctggcttcccgcgctctgcgcgctttacccccacccacgccttcctggccacctgggagcaggtaggcgcttacgaggaggtcaagcgcggggcgctgccctcgggagagc

SEQ ID NO: 90576 - DNA, 120 bp, Artificial Sequence
  ENSG00000087303_5 (sequence is synthesized)
tgaacactttccaggcagttttggcatctgatgggtctgatagctacgccctctttctttatcctgccaacggcctgcagttccttggaacccgccccaaagagtcttacaatgtccagc

SEQ ID NO: 90577 - DNA, 120 bp, Artificial Sequence
  ENSG00000087303_6 (sequence is synthesized)
ttcagcttccagctcgggtgggcttctgccgaggggaggctgatgatctgaagtcagaaggaccatatttcagcttgactagcactgaacagtctgtgaaaaatctctatcaactaagca

SEQ ID NO: 90578 - DNA, 120 bp, Artificial Sequence
  ENSG00000087303_7 (sequence is synthesized)
acctggggatccctggagtgtgggctttccatatcggcagcacttccccgttggacaatgtcaggccagctgcagttggagacctttccgctgcccactcttctgttcccctgggacgtt

SEQ ID NO: 90579 - DNA, 120 bp, Artificial Sequence
  ENSG00000087303_8 (sequence is synthesized)
ccttcagccatgctacagccctggaaagtgactataatgaggacaatttggattactatgatgtgaatgaggaggaagctgaataccttccgggtgaaccagaggaggcattgaatggcc

SEQ ID NO: 90580 - DNA, 120 bp, Artificial Sequence
  ENSG00000087303_9 (sequence is synthesized)
acagcagcattgatgtttccttccaatccaaagtggatacaaagcctttagaggaatcttccaccttggatcctcacaccaaagaaggaacatctctgggagaggtagggggcccagatt

SEQ ID NO: 90581 - DNA, 120 bp, Artificial Sequence
  ENSG00000087303_10 (sequence is synthesized)
taaaaggccaagttgagccctgggatgagagagagaccagaagcccagctccaccagaggtagacagagattcactggctccttcctgggaaaccccaccaccgtaccccgaaaacggaa

SEQ ID NO: 90582 - DNA, 120 bp, Artificial Sequence
  ENSG00000087303_11 (sequence is synthesized)
gcatccagccctacccagatggagggccagtgccttcggaaatggatgttcccccagctcatcctgaagaagaaattgttcttcgaagttaccctgcttcaggtcacactacacccttaa

SEQ ID NO: 90583 - DNA, 120 bp, Artificial Sequence
  ENSG00000087303_12 (sequence is synthesized)
gtcgagggacgtatgaggtgggactggaagacaacataggttccaacaccgaggtcttcacgtataatgctgccaacaaggaaacctgtgaacacaaccacagacaatgctcccggcatg

SEQ ID NO: 90584 - DNA, 120 bp, Artificial Sequence
  ENSG00000087303_13 (sequence is synthesized)
ccttctgcacggactatgccactggcttctgctgccactgccaatccaagttttatggaaatgggaagcactgtctgcctgaaggggcacctcaccgagtgaatgggaaagtgagtggcc

SEQ ID NO: 90585 - DNA, 120 bp, Artificial Sequence
  ENSG00000087303_14 (sequence is synthesized)
acctccacgtgggccatacacccgtgcacttcactgatgtggacctgcatgcgtatatcgtgggcaatgatggcagagcctacacggccatcagccacatcccacagccagcagcccagg

SEQ ID NO: 90586 - DNA, 120 bp, Artificial Sequence
  ENSG00000087303_15 (sequence is synthesized)
ccctcctccccctcacaccaattggaggcctgtttggctggctctttgctttagaaaaacctggctctgagaacggcttcagcctcgcaggtgctgcctttacccatgacatggaagtta

SEQ ID NO: 90587 - DNA, 120 bp, Artificial Sequence
  ENSG00000087303_16 (sequence is synthesized)
cattctacccgggagaggagacggttcgtatcactcaaactgctgagggacttgacccagagaactacctgagcattaagaccaacattcaaggccaggtgccttacgtctcagcaaatt

SEQ ID NO: 90588 - DNA, 120 bp, Artificial Sequence
  ENSG00000087303_17 (sequence is synthesized)
tcacagcccacatctctccctacaaggagctgtaccactactccgactccactgtgacctctacaagttccagagactactctctgacttttggtgcaatcaaccaaacatggtcctacc

SEQ ID NO: 90589 - DNA, 120 bp, Artificial Sequence
  ENSG00000087303_18 (sequence is synthesized)
gcatccaccagaacatcacttaccaggtgtgcaggcacgcccccagacacccgtccttccccaccacccagcagctgaacgtggaccgggtctttgccttgtataatgacgaagaaagag

SEQ ID NO: 90590 - DNA, 120 bp, Artificial Sequence
  ENSG00000087303_19 (sequence is synthesized)
tgcttagatttgctgtgaccaatcaaattggcccggtcaaagaggattcagaccccactccggggaatccttgctatgatgggagccacatgtgtgacacaacagcacggtgccatccag

SEQ ID NO: 90591 - DNA, 120 bp, Artificial Sequence
  ENSG00000087303_20 (sequence is synthesized)
aaatgaatgtgcaactggctttcatcgctgtggccccaactctgtatgtatcaacttgcctggaagctacaggtgtgagtgccggagtggttatgagtttgcagatgaccggcatacttg

SEQ ID NO: 90592 - DNA, 120 bp, Artificial Sequence
  ENSG00000087303_21 (sequence is synthesized)
catcttgatcaccccacctgccaacccctgtgaggatggcagtcatacctgtgctcctgctgggcaggcccggtgtgttcaccatggaggcagcacgttcagctgtgcctgcctgcctgg

SEQ ID NO: 90593 - DNA, 120 bp, Artificial Sequence
  ENSG00000087303_22 (sequence is synthesized)
ttatgccggcgatgggcaccagtgcactgatgtagatgaatgctcagaaaacagatgtcaccctgcagctacctgctacaatactcctggttccttctcctgccgttgtcaacccggata

SEQ ID NO: 90594 - DNA, 120 bp, Artificial Sequence
  ENSG00000087303_23 (sequence is synthesized)
ttatggggatggatttcagtgcatacctgactccacctcaagcctgacaccctgtgaacaacagcagcgccatgcccaggcccagtatgcctaccctggggcccggttccacatccccca

SEQ ID NO: 90595 - DNA, 120 bp, Artificial Sequence
  ENSG00000087303_24 (sequence is synthesized)
atgcgacgagcagggcaacttcctgcccctacagtgtcatggcagcactggtttctgctggtgcgtggaccctgatggtcatgaagttcctggtacccagactccacctggctccacccc

SEQ ID NO: 90596 - DNA, 120 bp, Artificial Sequence
  ENSG00000087303_25 (sequence is synthesized)
gcctcactgtggaccatcaccagagcccacccagaggcccccgaccatctgtgagcgctggagggaaaacctgctggagcactacggtggcaccccccgggatgaccagtacgtgcccca

SEQ ID NO: 90597 - DNA, 120 bp, Artificial Sequence
  ENSG00000087303_26 (sequence is synthesized)
gtgcgatgacctgggccacttcatccccctgcagtgccacggaaagagcgacttctgctggtgtgtggacaaagatggcagagaggtgcagggcacccgctcccagccaggcaccacccc

SEQ ID NO: 90598 - DNA, 120 bp, Artificial Sequence
  ENSG00000087303_27 (sequence is synthesized)
tgcgtgtatacccaccgtcgctccacccatggtccggcccacgccccggccagatgtgacccctccatctgtgggcaccttcctgctctatactcagggccagcagattggctacttacc

SEQ ID NO: 90599 - DNA, 120 bp, Artificial Sequence
  ENSG00000087303_28 (sequence is synthesized)
cctcaatggcaccaggcttcagaaggatgcagctaagaccctgctgtctctgcatggctccataatcgtgggaattgattacgactgccgggagaggatggtgtactggacagatgttgc

SEQ ID NO: 90600 - DNA, 120 bp, Artificial Sequence
  ENSG00000087303_29 (sequence is synthesized)
tggacggacaatcagccgtgctggtctggaactgggagcagagcctgagacgatcgtgaattcaggtctgataagccctgaaggacttgccatagaccacatccgcagaacaatgtactg

SEQ ID NO: 90601 - DNA, 120 bp, Artificial Sequence
  ENSG00000087303_30 (sequence is synthesized)
gacggacagtgtcctggataagatagagagcgccctgctggatggctctgagcgcaaggtcctcttctacacagatctggtgaatccccgtgccatcgctgtggatccaatccgaggcaa

SEQ ID NO: 90602 - DNA, 120 bp, Artificial Sequence
  ENSG00000087303_31 (sequence is synthesized)
cttgtactggacagactggaatagagaagctcctaaaattgaaacgtcatctttagatggagaaaacagaagaattctgatcaatacagacattggattgcccaatggcttaacctttga

SEQ ID NO: 90603 - DNA, 120 bp, Artificial Sequence
  ENSG00000087303_32 (sequence is synthesized)
ccctttctctaaactgctctgctgggcagatgcaggaaccaaaaaactggagtgtacactacctgatggaactggacggcgtgtcattcaaaacaacctcaagtaccccttcagcatcgt

SEQ ID NO: 90604 - DNA, 120 bp, Artificial Sequence
  ENSG00000087303_33 (sequence is synthesized)
aagctatgcagatcacttctaccacacagactggaggagggatggtgttgtatcagtaaataaacatagtggccagtttactgatgagtatctcccagaacaacgatctcacctctacgg

SEQ ID NO: 90605 - DNA, 120 bp, Artificial Sequence
  ENSG00000087303_34 (sequence is synthesized)
gataactgcagtctacccctactgcccaacaggaagaaagtaagtacagtaatgtaaaggaagacttggagtttacaatcagaacctggaccctaaagaacagtgactgcaaaggcaaag

SEQ ID NO: 90606 - DNA, 120 bp, Artificial Sequence
  ENSG00000087303_35 (sequence is synthesized)
aaagtaaaaaaggaattggccattagacgttcctgagcatccaagatgaacattttgtagtgcaaaaagacttttgtgaaaagctgatacctcaatctttactactgtatttttaaaaat

SEQ ID NO: 90607 - DNA, 120 bp, Artificial Sequence
  ENSG00000087303_36 (sequence is synthesized)
gaaggttgttattgcaagtttaaaaaggtaacagaattttaactgttgcttattaaagcaacttcttgtaaacatttatcattaatatttaaaagatcaaattcattcaactaagaatta

SEQ ID NO: 90608 - DNA, 120 bp, Artificial Sequence
  ENSG00000087303_37 (sequence is synthesized)
gagtttaagactctaaacctgatttttgccatggattccttctggccaagaaattaaagcacatgtgatcaatataacaatataatcctaaaccttgacagttggagaagccaatgcaga

SEQ ID NO: 90609 - DNA, 120 bp, Artificial Sequence
  ENSG00000087303_38 (sequence is synthesized)
actgatgggaaaggaccaattatttatagtttcccaacaaaagttctaagattttttacctctgcatcagtgcatttctatttatatcaaaaggtgctaaaatgattcaatttgcatttt

SEQ ID NO: 90610 - DNA, 120 bp, Artificial Sequence
  ENSG00000087303_39 (sequence is synthesized)
ctgatcctgtagtgcctctatagaagtacccacagaaagtaaagtatcacatttataaataccaaagatgtaacaattttaaaattttctagattactccaataaagtgttttaagtttt

SEQ ID NO: 90611 - DNA, 120 bp, Artificial Sequence
  ENSG00000087303_40 (sequence is synthesized)
gccttagaaaagttaacgagaaccagatgtggtggccactgccgaactttctcagagccggtgattggtccccagccgagggcctcagccaattagcttgctgggtgggcctggagtccc

SEQ ID NO: 90612 - DNA, 120 bp, Artificial Sequence
  ENSG00000087303_41 (sequence is synthesized)
ctattgaagggcttactgtatgccaattactgattaggacactttacaagcacttatagtattaatttttatagcaaccatatgaggcaggtacactattggcctcattttgcaaatgag

SEQ ID NO: 90613 - DNA, 120 bp, Artificial Sequence
  ENSG00000087303_42 (sequence is synthesized)
acaaacgcatagaggttaaatgcccaaagccacatggctactaagtggctgagcctagatttcacccgagtgcccacatgtccagctactctgctctgttgcctgcaggatcacagtgca

SEQ ID NO: 90614 - DNA, 120 bp, Artificial Sequence
  ENSG00000087303_43 (sequence is synthesized)
gtgttgctcactgcagctgtgcatgagcaaggcagctgagtgtgaacaaaggggaaatgtaacctaattcttctaattctatgatttgatgcacaaagggctccataatcgtgggaattg

SEQ ID NO: 90615 - DNA, 120 bp, Artificial Sequence
  ENSG00000087303_44 (sequence is synthesized)
tgagccccacaaattctggacaagcctgaaaaggccaactgttccagaggacacaccacttgttttaccaaaagtcagtacctgacttgactcattaagccctctgaggcttttgtttca

SEQ ID NO: 90616 - DNA, 120 bp, Artificial Sequence
  ENSG00000087303_45 (sequence is synthesized)
tcacctcctcattggcagataagatccttcaaggatgtttttcatcctttcatgtttttgaaatcatccttttacttcacccagaaatcgaatggtattgctcacatatagcttaaaaag

SEQ ID NO: 90617 - DNA, 120 bp, Artificial Sequence
  ENSG00000087303_46 (sequence is synthesized)
tagcaaagctattggataatgtctcaaaagggagcatattaatctaaatatgttctttagagaataagactacccttgataccatgagctatattacagggcttaagttggcttttgaca

SEQ ID NO: 90618 - DNA, 120 bp, Artificial Sequence
  ENSG00000087303_47 (sequence is synthesized)
ctgtggacatattgtctgagggaccgaaaaatactatttagactagttctcaaatgaggaactgtggaacattaaagtctaagccctttacaccatgccctacaactctgatttgatagc

SEQ ID NO: 90619 - DNA, 120 bp, Artificial Sequence
  ENSG00000087303_48 (sequence is synthesized)
tcatcatgtgattctaacatgcagctagagatgagcaatggatttagagcaatggtcttcaaacttcagtatggctttagcaccagccctgggacagagaaggctgccagaaattttcct

SEQ ID NO: 90620 - DNA, 120 bp, Artificial Sequence
  ENSG00000087303_49 (sequence is synthesized)
ctattgcaactgattttctgtggctgactgacttctttatctagtaaatgactgtccctgaattcactcttcctttctgttaccagggatggtgttgtatcagtaaataaacatagtggc

SEQ ID NO: 90621 - DNA, 120 bp, Artificial Sequence
  ENSG00000087303_50 (sequence is synthesized)
ctactaatgcagcccaaactcaaggggattgcttaaggctataatacatgaggagatggagatcactgggggctgcttagatgctgcctaccacaggctacatggctattcttttacaat

SEQ ID NO: 90622 - DNA, 120 bp, Artificial Sequence
  ENSG00000087338_0 (sequence is synthesized)
gctttgttgcgaaagcgagggggcgaggtgctgcggtgctagagcgcggcgcgaccggacgctgcgggcggggaagaggatggagactgtggcgtccgctgcaacggttggggctgcgcg

SEQ ID NO: 90623 - DNA, 120 bp, Artificial Sequence
  ENSG00000087338_1 (sequence is synthesized)
tgagaaggtggcggtgtaggcacctgcgctcggggaaggctggcggcggcggccgagccatggcgggagacccccttctctgggctccctgaagtctcggggagccgtgacccatgggat

SEQ ID NO: 90624 - DNA, 120 bp, Artificial Sequence
  ENSG00000087338_2 (sequence is synthesized)
cgttgagcagccgggtgctgcgccagccaagaccagcccttgcccagcaggcgcagggtgccagggcggggggctcggcccggaggccggacactggagacgatgcggcgggccacggat

SEQ ID NO: 90625 - DNA, 120 bp, Artificial Sequence
  ENSG00000087338_3 (sequence is synthesized)
tctgttactgtgcgggcagccacaagcgcaagcggagcagcgggtccttctgctactgtcaccctgactcggagacggacgaggatgaggaggagggggacgagcagcagcggctcctca

SEQ ID NO: 90626 - DNA, 120 bp, Artificial Sequence
  ENSG00000087338_4 (sequence is synthesized)
acacccctcgaaggaaaaaattaaagagtacatctaaatatatttatcaaacattatttttgaatggtgaaaacagtgacattaagatttgtgctctaggagaagaatggagcttacaca

SEQ ID NO: 90627 - DNA, 120 bp, Artificial Sequence
  ENSG00000087338_5 (sequence is synthesized)
aaatatatttatgtcaatctggctacttttctagtatgttcagtggttcttggaaagaatccagcatgaatattattgaactggagattcctgaccagaacattgatgtagaagcactgc

SEQ ID NO: 90628 - DNA, 120 bp, Artificial Sequence
  ENSG00000087338_6 (sequence is synthesized)
aggttgcatttggttcactgtatcgagatgatgtcttgataaagcccagtcgagttgttgccattttggcagcagcttgtttgctgcagttggacggtttaatacagcagtgtggtgaga

SEQ ID NO: 90629 - DNA, 120 bp, Artificial Sequence
  ENSG00000087338_7 (sequence is synthesized)
caatgaaggaaacagttaatgtgaaaactgtatgtggctattacacatcagcagggacctatggattagattctgtaaagaaaaagtgccttgaatggcttctaaacaatttgatgactc

SEQ ID NO: 90630 - DNA, 120 bp, Artificial Sequence
  ENSG00000087338_8 (sequence is synthesized)
accagaatgttgaactttttaaagaactcagtataaatgtcatgaaacagctcattggttcatctaacttatttgtgatgcaagtggagatggatatatacactgctctaaaaaagtgga

SEQ ID NO: 90631 - DNA, 120 bp, Artificial Sequence
  ENSG00000087338_9 (sequence is synthesized)
tgttccttcaacttgtgccttcttggaatggatctttaaaacagcttttgacagaaacagatgtctggttttctaaacagaggaaagattttgaaggtatggcctttcttgaaactgaac

SEQ ID NO: 90632 - DNA, 120 bp, Artificial Sequence
  ENSG00000087338_10 (sequence is synthesized)
aaggaaaaccatttgtgtcagtattcagacatttaaggttacaatatattatcagtgatctggcttctgcaagaattattgaacaagatgctgtagtaccttcagaatggctctcttctg

SEQ ID NO: 90633 - DNA, 120 bp, Artificial Sequence
  ENSG00000087338_11 (sequence is synthesized)
tgtataaacagcagtggtttgctatgctgcgggcagaacaggacagtgaggtggggcctcaagaaatcaataaagaagaactagagggaaacagcatgaggtgtggtagaaagcttgcca

SEQ ID NO: 90634 - DNA, 120 bp, Artificial Sequence
  ENSG00000087338_12 (sequence is synthesized)
aagatggtgaatactgctggcgttggacaggttttaacttcggcttcgacctacttgtaacttacaccaatcgatacatcattttcaaacgcaatacactgaatcagccatgtagcggat

SEQ ID NO: 90635 - DNA, 120 bp, Artificial Sequence
  ENSG00000087338_13 (sequence is synthesized)
ctgtcagtttacagcctcgaaggagcatagcatttagattacgtttggcttcttttgatagtagtggaaaactaatatgtagtagaacaactggctatcaaatacttacacttgaaaagg

SEQ ID NO: 90636 - DNA, 120 bp, Artificial Sequence
  ENSG00000087338_14 (sequence is synthesized)
atcaggaacaagtggtgatgaacttggacagcaggcttctgatcttccctttatatatctgctgtaacttcttgtatatatcaccagaaaaaaagaattgaaaataatcgtcacccagaa

SEQ ID NO: 90637 - DNA, 120 bp, Artificial Sequence
  ENSG00000087338_15 (sequence is synthesized)
aatccagaaaactgaagatttcatcagttggaaacagtagcactttgaaaactttttaggccagctttaatttaatggccctactgatattcacatcgaaggtgactaacaatgacaaag

SEQ ID NO: 90638 - DNA, 120 bp, Artificial Sequence
  ENSG00000087338_16 (sequence is synthesized)
gccttatgaactgtacagacaatacagaagattattcttatcctcattgcatttctatgcatatgcgtaagaacattttaaagccaagaaaatatctgtcaaaccatttctgttagaacg

SEQ ID NO: 90639 - DNA, 120 bp, Artificial Sequence
  ENSG00000087338_17 (sequence is synthesized)
tttaatttttagcttaaactttgtttctaccttatgttagtggacctcagttatccatctgtaaatttctttttatttggctaaaataatctaaaagaataatttggttggccaattaga

SEQ ID NO: 90640 - DNA, 120 bp, Artificial Sequence
  ENSG00000087338_18 (sequence is synthesized)
aatgcctttttcagttggtgtattgaaagctttcctttaacattttcacctgctcattgtgattcctccttttagtctaatatctttccaggtcatacttgtttttaatcattaaatatt

SEQ ID NO: 90641 - DNA, 120 bp, Artificial Sequence
  ENSG00000087338_19 (sequence is synthesized)
ttcttcctggttttggagactaagctgataaactttttttaaaacttaagcattgtcattgctattttttttaatttgactttcctaggagtttaagaacagtgaaagttagctttgcac

SEQ ID NO: 90642 - DNA, 120 bp, Artificial Sequence
  ENSG00000087338_20 (sequence is synthesized)
cttcaaatgatcttgaatgagggaaaaatcagtttgattccaaggatatttcttgccttacatggtcttttctttgacagtctgtacacctttattattaggttttgaattatttatgta

SEQ ID NO: 90643 - DNA, 120 bp, Artificial Sequence
  ENSG00000087338_21 (sequence is synthesized)
ccagatattatagttttaaacattttaatattctctgatctttagaattatttatgttcaaattttagttgggaactttgtttcctacttaagctcaggactttttaccctctgaattga

SEQ ID NO: 90644 - DNA, 120 bp, Artificial Sequence
  ENSG00000087338_22 (sequence is synthesized)
gtgcctttgagtgacacatgctaatagaaatttcatagtaaatgtaaataaggtcagaggatgtaatatggagcctgatgatgaagcattaatgtaaaaatggaacttatttttgtcaaa

SEQ ID NO: 90645 - DNA, 120 bp, Artificial Sequence
  ENSG00000087338_23 (sequence is synthesized)
aatgagatgtacacttgtcatgatttatgtatgttgaccttttgtgtttattactgttttgaaaatagccatgttcattttctttccagttagagtaagtacttctgtggttaatgtata

SEQ ID NO: 90646 - DNA, 120 bp, Artificial Sequence
  ENSG00000087338_24 (sequence is synthesized)
tttttattatggtttttaaaatgggaatcatttttatgtatctgtgcaaataataaatgcccatttggaaaaagagtaagctcttacataaaatggaccaaaaaatcccccttaattgaa

SEQ ID NO: 90647 - DNA, 120 bp, Artificial Sequence
  ENSG00000087338_25 (sequence is synthesized)
accaaaattttttctttctagttaggtttttttcccaactccttttaacttttggaatttattaataatttttttcttttttaatgatatgcccataggttcataaattgcttttgttct

SEQ ID NO: 90648 - DNA, 120 bp, Artificial Sequence
  ENSG00000087338_26 (sequence is synthesized)
tttaaaattcatccatttggtttaacttaaaggaaccttttaaatgcctcacccttgaccctcagagctggaatttaaatgtttctaatacagtgatttggctgttatcaagaggttaca

SEQ ID NO: 90649 - DNA, 77 bp, Artificial Sequence
  ENSG00000087338_27 (sequence is synthesized)
gtttctaatacagtgatttggctgttatcaagaggttacatttcagctgggtgtcagccaggtgtggtggctcacac

SEQ ID NO: 90650 - DNA, 72 bp, Artificial Sequence
  ENSG00000087338_28 (sequence is synthesized)
ctactgtacttatttttatatttgactacattaggtctttttcacgggaagctgttgttttctttccgtctc

SEQ ID NO: 90651 - DNA, 120 bp, Artificial Sequence
  ENSG00000087338_29 (sequence is synthesized)
aggtctttttcacgggaagctgttgttttctttccgtctcattactgtataagagtttccttaccctttatgtattgaaaaatatataaattccaaacttaaattatttggataattaag

SEQ ID NO: 90652 - DNA, 120 bp, Artificial Sequence
  ENSG00000087338_30 (sequence is synthesized)
tttttgcagatcttggaagtaaagataatgttttgatcatattaatgaataaagttaactgtttcatttcacttacataagttaactggccaaattggatttatatgtggtttcatccat

SEQ ID NO: 90653 - DNA, 120 bp, Artificial Sequence
  ENSG00000087338_31 (sequence is synthesized)
tggttctgtcctggccaagttgcttatgtcatccatagacaggataattctttcttcaatcacaagtaggttaatgttcttatttgagaagttgataattgtcaggtagtaattcacact

SEQ ID NO: 90654 - DNA, 120 bp, Artificial Sequence
  ENSG00000087338_32 (sequence is synthesized)
ggtagtaaagatgtgcttttgttttcttaccaaatatttttatgtgtttccagagttcttttcaatagaaatattttcaataaagtgttaatagtgtaagataaagtattgtataaacca

SEQ ID NO: 90655 - DNA, 120 bp, Artificial Sequence
  ENSG00000087338_33 (sequence is synthesized)
tattgtagttattttaaacttgatcactttctgctaatgcatactgttagtttagtcccatcacatggttaactgactatgtagacttcttaatttaaaaagaaatggcaaaacagacaa

SEQ ID NO: 90656 - DNA, 120 bp, Artificial Sequence
  ENSG00000087338_34 (sequence is synthesized)
aatgctgctaaagaaatttgcaaaggtctcagacaggggaagaatagaaaagaaaaagaatagcagtattcattctctaccttactactcccccccaccttccattttcaaattccaagt

SEQ ID NO: 90657 - DNA, 120 bp, Artificial Sequence
  ENSG00000087338_35 (sequence is synthesized)
atttagttgaatacttgctgaacttttttcagtatttttattggacttgttaaaaaaaaaaaaaaaaacttaggtttgctgcacttaatgagttttctttcttttctttcttcttttttt

SEQ ID NO: 90658 - DNA, 120 bp, Artificial Sequence
  ENSG00000087338_36 (sequence is synthesized)
gaagtgctcttgctgctcccctcattggtggtccacatggaagtacctggtgcgatacaaaggcaaagaaatactttagttaagaatatttacagcctgtaatcccagcacgttgggagg

SEQ ID NO: 90659 - DNA, 120 bp, Artificial Sequence
  ENSG00000087338_37 (sequence is synthesized)
gttttgggtggtaagccttaagaaaaagtcactgacaaaaagtcgaccacccatgagggaaatacttggaatgagttagagacaaaaagacattttgaattttttattttctacttgcta

SEQ ID NO: 90660 - DNA, 120 bp, Artificial Sequence
  ENSG00000087365_0 (sequence is synthesized)
gcgcgccttcctgcggctaagatggcgacggagcatcccgagcctcccaaagcagaattgcagctgccgccgccgccacctccaggccactatggcgcctgggctgcccaggagcttcag

SEQ ID NO: 90661 - DNA, 120 bp, Artificial Sequence
  ENSG00000087365_1 (sequence is synthesized)
gccaagttggcagagatcggagctccgatccagggtaatcgcgaggagctggtggagcggctgcagagctacacccgccagactggcatcgtgctgaatcggccggttttgagaggggaa

SEQ ID NO: 90662 - DNA, 120 bp, Artificial Sequence
  ENSG00000087365_2 (sequence is synthesized)
gatggggacaaagccgctccacctcccatgtcggcacagctccctggaattcccatgccaccaccacctttgggactcccccctctgcagcctcctccgccacccccaccacctccacca

SEQ ID NO: 90663 - DNA, 120 bp, Artificial Sequence
  ENSG00000087365_3 (sequence is synthesized)
ggccttggccttggctttcctatggcccacccaccaaatttggggcccccgcctcctctccgtgtgggtgagccagtggcactgtcagaggaggagcggctgaagttggctcagcagcag

SEQ ID NO: 90664 - DNA, 120 bp, Artificial Sequence
  ENSG00000087365_4 (sequence is synthesized)
gcggcattgctgatgcagcaggaggagcgtgccaagcagcagggagatcattcgctgaaggaacatgagctcttggagcagcagaagcgggcagctgtgttactggagcaggaacgacag

SEQ ID NO: 90665 - DNA, 120 bp, Artificial Sequence
  ENSG00000087365_5 (sequence is synthesized)
caggagattgccaagatgggcaccccagtccctcggcccccacaagacatgggccagattggtgtgcgcactcctctgggtcctcgagtagctgctccagtgggcccagtgggccccact

SEQ ID NO: 90666 - DNA, 120 bp, Artificial Sequence
  ENSG00000087365_6 (sequence is synthesized)
cctacagttttgcccatgggagcccctgttccccggcctcgtggtcccccaccgccccctggagatgagaacagagagatggatgacccctctgtgggccccaagatcccccaggctttg

SEQ ID NO: 90667 - DNA, 120 bp, Artificial Sequence
  ENSG00000087365_7 (sequence is synthesized)
gagaagatcctgcagctgaaggagagccgccaggaagagatgaattctcagcaggaggaagaggaaatggaaacagatgctcgctcgtccctgggccagtcagcgtcagagactgaggag

SEQ ID NO: 90668 - DNA, 120 bp, Artificial Sequence
  ENSG00000087365_8 (sequence is synthesized)
gacacagtgtccgtatctaaaaaggagaaaaaccggaagcgtaggaaccgaaagaagaagaaaaagccccagcgggtgcgaggggtgtcctctgagagctctggggaccgggagaaagac

SEQ ID NO: 90669 - DNA, 120 bp, Artificial Sequence
  ENSG00000087365_9 (sequence is synthesized)
tcaacccggtcccgtggctctgattccccagcagctgatgttgagattgagtatgtgactgaagaacctgaaatttacgagcccaactttatcttctttaagaggatctttgaggctttt

SEQ ID NO: 90670 - DNA, 120 bp, Artificial Sequence
  ENSG00000087365_10 (sequence is synthesized)
aagctcactgatgatgtgaagaaggagaaagagaaggagccagagaaacttgacaaactggagaactctgcagcccccaagaagaagggatttgaagaggagcacaaggacagtgatgat

SEQ ID NO: 90671 - DNA, 120 bp, Artificial Sequence
  ENSG00000087365_11 (sequence is synthesized)
gacagcagtgatgacgagcaggaaaagaagccagaagcccccaagctgtccaagaagaagttgcgccgaatgaaccgcttcactgtggctgaactcaagcagctggtggctcggcccgat

SEQ ID NO: 90672 - DNA, 120 bp, Artificial Sequence
  ENSG00000087365_12 (sequence is synthesized)
gtcgtggagatgcacgatgtgacagcgcaggaccctaagctcttggttcacctcaaggccactcggaactctgtgcctgtgccacgccactggtgttttaagcgcaaatacctgcagggc

SEQ ID NO: 90673 - DNA, 120 bp, Artificial Sequence
  ENSG00000087365_13 (sequence is synthesized)
gccagacttcatcaaacgcacaggcatccaggagatgcgagaggccctgcaggagaaggaagaacagaagaccatgaagtcaaaaatgcgagagaaagttcggcctaagatgggcaaaat

SEQ ID NO: 90674 - DNA, 120 bp, Artificial Sequence
  ENSG00000087365_14 (sequence is synthesized)
tgacatcgactaccagaaactgcatgatgccttcttcaagtggcagaccaagccaaagctgaccatccatggggacctgtactatgaggggaaggagttcgagacacgactgaaggagaa

SEQ ID NO: 90675 - DNA, 120 bp, Artificial Sequence
  ENSG00000087365_15 (sequence is synthesized)
gaagccaggagatctgtctgatgagctaaggatttccttggggatgccagtaggaccaaatgcccacaaggtccctcccccatggctgattgccatgcagcgatatggaccacccccatc

SEQ ID NO: 90676 - DNA, 120 bp, Artificial Sequence
  ENSG00000087365_16 (sequence is synthesized)
gtatcccaacctgaaaatccctgggctgaactcgcccatccctgagagctgttcctttgggtaccatgctggtggctggggcaaacctccagtggatgagactgggaaaccgctctatgg

SEQ ID NO: 90677 - DNA, 120 bp, Artificial Sequence
  ENSG00000087365_17 (sequence is synthesized)
ggacgtgtttggaaccaatgctgctgaatttcagaccaagactgaggaagaagagattgatcggaccccttggggggaactggaaccatctgatgaagaatcctcagaagaagaggaaga

SEQ ID NO: 90678 - DNA, 120 bp, Artificial Sequence
  ENSG00000087365_18 (sequence is synthesized)
ggaagaaagtgatgaagacaaaccagatgagacaggctttattacccctgcagacagtggccttatcactcctggaggcttttcatcagtgcctgctggaatggagacccctgaactcat

SEQ ID NO: 90679 - DNA, 120 bp, Artificial Sequence
  ENSG00000087365_19 (sequence is synthesized)
tgagctgaggaagaagaagattgaggaggcgatggacggaagtgagacacctcagctcttcactgtgttgccagagaagagaacagccactgttggaggggccatgatgggatcaaccca

SEQ ID NO: 90680 - DNA, 120 bp, Artificial Sequence
  ENSG00000087365_20 (sequence is synthesized)
catttatgacatgtccacggttatgagccggaagggcccggctcctgagctgcaaggtgtggaagtggcgctggcgcctgaagagttggagctggatcctatggccatgacccagaagta

SEQ ID NO: 90681 - DNA, 120 bp, Artificial Sequence
  ENSG00000087365_21 (sequence is synthesized)
tgaggagcatgtgcgggagcagcaggctcaagtagagaaggaggacttcagtgacatggtggctgagcacgctgccaaacagaagcaaaaaaaacggaaagctcagccccaggacagccg

SEQ ID NO: 90682 - DNA, 120 bp, Artificial Sequence
  ENSG00000087365_22 (sequence is synthesized)
tgggggcagcaagaaatataaggagttcaagttttaggtcccctcacactagccctttttttggccctacgtctggatgcctgggcttcacacaagaaccacctctcccgcagttcccaa

SEQ ID NO: 90683 - DNA, 120 bp, Artificial Sequence
  ENSG00000087365_23 (sequence is synthesized)
ggacttgtcatttcatgttcttattttagacctgttttgtaaataaagctgtttcccaaggaaagagatgaatatttaacactcctgagcctccctcatctccttttagccccttcttgc

SEQ ID NO: 90684 - DNA, 120 bp, Artificial Sequence
  ENSG00000087365_24 (sequence is synthesized)
aaaaggactaaaatagtctctttctacaatcactgggctgccccagtaaccacgaacataaactgggattagacggcgcatttgactggtggtgacgccaaccccaggctgaaatctgtg

SEQ ID NO: 90685 - DNA, 120 bp, Artificial Sequence
  ENSG00000087365_25 (sequence is synthesized)
tttcaccactgccctgctttgtaggaaggcttgggggaagtacctctaggtctggtttgaccttactactttgtccttggggagtaaaaatagccagattagcgccctagcgcggcagag

SEQ ID NO: 90686 - DNA, 120 bp, Artificial Sequence
  ENSG00000087365_26 (sequence is synthesized)
gaagtaacagtgggcttgggaagtaggccagggcaggccttcccaactgaccttgtgaccagaagttcaagtccttacctgtgcgacaacatagctcaaaagctaaattgtcttgagtcc

SEQ ID NO: 90687 - DNA, 120 bp, Artificial Sequence
  ENSG00000087365_27 (sequence is synthesized)
agcaggaggagcgtgccaagcagcagggagatcattcgctgaaggaacatgagctcttggagcagcagaagcgggtaatacccctccccctaacctttgacctcgtggtccagtcagttg

SEQ ID NO: 90688 - DNA, 120 bp, Artificial Sequence
  ENSG00000087365_28 (sequence is synthesized)
ttcaatttttcttgaagttcaggaattgacaaactatgacctgtggcctgcatgtgtatggcctatgagctaaaaataactttaaaattttttaagggttataagaaaacccaaaccaaa

SEQ ID NO: 90689 - DNA, 120 bp, Artificial Sequence
  ENSG00000087365_29 (sequence is synthesized)
cagtaagtaatagcttctattttgtgccaatttccgccctcagcatcttatagatatttttcatttaattgctttgagttccaagtactatacgtgcctacattttacagctgaaaaagc

SEQ ID NO: 90690 - DNA, 120 bp, Artificial Sequence
  ENSG00000087365_30 (sequence is synthesized)
tatcatttttcctctgcctgaagggcttcctttaacatttcttaagttagggggcgtggtggcttaagcctgtaatctcagtactctcagtactttgggagaaggctgaggtggtaggat

SEQ ID NO: 90691 - DNA, 120 bp, Artificial Sequence
  ENSG00000087365_31 (sequence is synthesized)
catagtgagaccccatttctacaaaatattaaaaaaacatttcttgtattgtgggtctgctggttttgaatttgttctgcttgagtagtcttaaaaattctttatttggccttcattttt

SEQ ID NO: 90692 - DNA, 120 bp, Artificial Sequence
  ENSG00000087365_32 (sequence is synthesized)
gtagtcttaaaaattctttatttggccttcatttttgaaagatctttgccaggtttaggattctaggttgacaatcttttttctttcaacacttttttttttcttctttgagatggaatc

SEQ ID NO: 90693 - DNA, 64 bp, Artificial Sequence
  ENSG00000087365_33 (sequence is synthesized)
gtgatcttggctcactaagattacatgtgcataccatcacacccagctaatttttatattttta

SEQ ID NO: 90694 - DNA, 120 bp, Artificial Sequence
  ENSG00000087365_34 (sequence is synthesized)
ggattacatgtgtgagtgaccgcatcagccttctttcagtacttttaagatgttgctccagtgtcttctttcttgcattgtttctagtgagaaaactgctgtcattcttacctttgttcc

SEQ ID NO: 90695 - DNA, 120 bp, Artificial Sequence
  ENSG00000087365_35 (sequence is synthesized)
tgtgtacataatgtgtcatttttatttggctgtttttaagattttatcactagttctaacaatttgactacaatgtgccttggtgtagtttctgaatgtttctttgcttggggtttttta

SEQ ID NO: 90696 - DNA, 120 bp, Artificial Sequence
  ENSG00000087365_36 (sequence is synthesized)
agcatcttagatctgggtttttagtttttattaatttggggaaaattttgtcatgatttctgcagatattttctctgttcccttctctttcctttgggaactcaaattattcctctatta

SEQ ID NO: 90697 - DNA, 120 bp, Artificial Sequence
  ENSG00000087365_37 (sequence is synthesized)
atgaaataataaatgaaaaaataaatgaagagctcactgatgctcttcatttttaaagaaattcttctctctttgtatttcactttagaaaatttctattgctatatgttcaagtttact

SEQ ID NO: 90698 - DNA, 120 bp, Artificial Sequence
  ENSG00000087365_38 (sequence is synthesized)
attattttcttctgtaatttctgatctaacagtaatcccatacaatataattctcctttctagaagtttgatttcgggtcttttaaatctattctttctctcttaactttttgaacatgt

SEQ ID NO: 90699 - DNA, 120 bp, Artificial Sequence
  ENSG00000087365_39 (sequence is synthesized)
tctttctctcttaactttttgaacatgtggaatgcagttataacaatattttatttttatgttattttattttattttatgacggagtcttgccctgttgcctaggctggagtgcagtgg

SEQ ID NO: 90700 - DNA, 80 bp, Artificial Sequence
  ENSG00000087365_40 (sequence is synthesized)
cgtgatctcggcttactgcaacctctgccacccaggttccagcaattcttgtgccccacccagctaatttttttgtattt

SEQ ID NO: 90701 - DNA, 65 bp, Artificial Sequence
  ENSG00000087365_41 (sequence is synthesized)
taacaacattttaatgtattgtctgctaactctaacatctgtgccatttctgggttgactgccat

SEQ ID NO: 90702 - DNA, 120 bp, Artificial Sequence
  ENSG00000087365_42 (sequence is synthesized)
ctaactctaacatctgtgccatttctgggttgactgccattagttgattcattttcctcattatggattgtattttcctactcttttgcacgcctggtaatttttttttcttttcctttc

SEQ ID NO: 90703 - DNA, 71 bp, Artificial Sequence
  ENSG00000087365_43 (sequence is synthesized)
ctcttttgcacgcctggtaatttttttttcttttcctttctttttttgagagaggtatcctgcctcagctt

SEQ ID NO: 90704 - DNA, 120 bp, Artificial Sequence
  ENSG00000087365_44 (sequence is synthesized)
tccagtgcctggtaattttttattgaatgctaggctttgtgaaatttaccttgttgggtccaagatatttttgtattcctgtacattttcttcagctcattcgggaatatagttatatgg

SEQ ID NO: 90705 - DNA, 120 bp, Artificial Sequence
  ENSG00000087365_45 (sequence is synthesized)
ctacccaccaccctgtgaatcaggaggtttttccggctggctagtgggagttactctattcccagttctgagtgagcagcagttgctgttatgaatccttttgggtgcttctttccctgt

SEQ ID NO: 90706 - DNA, 120 bp, Artificial Sequence
  ENSG00000087365_46 (sequence is synthesized)
ccttggtaggcatgtgctgcttagtactcccctgcatacttgaggaccttctgtaggtctcgagttctctctctgctcttttctccagtactctatcctgtgaactctagctgccttgat

SEQ ID NO: 90707 - DNA, 120 bp, Artificial Sequence
  ENSG00000087365_47 (sequence is synthesized)
ctccctggactttcagtttcatcctcccaactcacggagtcctcagggctctccatgagtctcccctctgttctgtggcctgcaaactctcaggtgtggtatgctggggcagttgaaggg

SEQ ID NO: 90708 - DNA, 120 bp, Artificial Sequence
  ENSG00000087365_48 (sequence is synthesized)
ctcatcacatttgtttcctgtctcgcaggaatcactgtgctttgttgccccatgtgtagtgtcttgaaaaccactgtttcatatattttgcccattttttttggttgtttcaggcaggag

SEQ ID NO: 90709 - DNA, 120 bp, Artificial Sequence
  ENSG00000087365_49 (sequence is synthesized)
ggtgtatctggttcctcttgctccttgtcaggaagcagaagtctcaagctttgcatattcaaggaagaaaaataaagaagggtactgtggacagagtatagtgaggagggcttgggtaag

SEQ ID NO: 90710 - DNA, 120 bp, Artificial Sequence
  ENSG00000087365_50 (sequence is synthesized)
ggaccaggctatgaaccctttaggtcatggtaaggagtttggattttattcagataatgatcagaagcctcagagggttttgagcaaaggtctgacaggacccgacatccgttttaaggt

SEQ ID NO: 90711 - DNA, 120 bp, Artificial Sequence
  ENSG00000087365_51 (sequence is synthesized)
attttctctggctcctgtgtggacaatagattgtcacctcttccagcgggagaggtggagatgatgggcatagtctggggtgatagtggtagatttgctcttgttcctagtgtaatcctt

SEQ ID NO: 90712 - DNA, 120 bp, Artificial Sequence
  ENSG00000087365_52 (sequence is synthesized)
gaaattagtggtgaaactggctgtggatggctcttgcgttggaaggcctggaagtgtgaattacatacatgagaactccaggcatgacattcttcgggtgggaactgttgtcgcctgctc

SEQ ID NO: 90713 - DNA, 120 bp, Artificial Sequence
  ENSG00000087365_53 (sequence is synthesized)
tatcttgccagcttctctgtaccaaagttcttttggaaactttgagcctctctgaccttttgacccttatgtgcatgtgggagtcctggtctgtgatcccttgacttgattcagggggcc

SEQ ID NO: 90714 - DNA, 120 bp, Artificial Sequence
  ENSG00000087365_54 (sequence is synthesized)
ccttagctccatctgtgttccctggagtcagcactgtgccacccccccgcccaattcttttctgtcatgggcagaactgcagaggctgcatccttggggagctcagaagctctccaaggc

SEQ ID NO: 90715 - DNA, 120 bp, Artificial Sequence
  ENSG00000087365_55 (sequence is synthesized)
gctgagtggaggtgccacctgtatcttttgtttccgcttctggagacccttttgtcccttgctttttgggcctgatcccattgtccttcgcagaagtgagacacctcagctcttcactgt

SEQ ID NO: 90716 - DNA, 120 bp, Artificial Sequence
  ENSG00000087365_56 (sequence is synthesized)
gcacgctgccaaacagaaggtaggcgcttccaggggcgctgggctgggtgagagccagggaccctggcctgccgttttcagtggcatggtgccctctagtggtgagagtgagggtggcct

SEQ ID NO: 90717 - DNA, 120 bp, Artificial Sequence
  ENSG00000087365_57 (sequence is synthesized)
ctgcttgctgctctgtgcttccttagatttggaagtcttagaaatcctccagtgggctgccctctttaaggacgatgagggggaggaactcagccaagtctgagagggagctcgaagaga

SEQ ID NO: 90718 - DNA, 120 bp, Artificial Sequence
  ENSG00000087365_58 (sequence is synthesized)
attcagattcagcgcctttcccacagacttctatgtctatgtcaggctgcccacccttgttttgggggtccgggggtggttcaacctgtcttaacctgtgtctctttctccctatacagc

SEQ ID NO: 90719 - DNA, 120 bp, Artificial Sequence
  ENSG00000087365_59 (sequence is synthesized)
caggtggcagccctggccttggactcattaggtccctgaaggggcagtggagccttagagaaagctgggtcctagaactaaggcttctgggaaggtcgggactaaagattggaacatggg

SEQ ID NO: 90720 - DNA, 120 bp, Artificial Sequence
  ENSG00000087365_60 (sequence is synthesized)
ccaggagaccttatataccccatcacggctcggtcttcattctttctttatctcggcacagcaaggcggaggcttgccctttttagcttgttcttgcctttgccagcttagttgtaattt

SEQ ID NO: 90721 - DNA, 120 bp, Artificial Sequence
  ENSG00000087365_61 (sequence is synthesized)
cttgtatccatcttggtcctcttcagtgcccagccagagcgctggcagacaggcactgggtacgttttgttgaatgaattgggagcgaacgtcgtttagtgaaacagctagttttggact

SEQ ID NO: 90722 - DNA, 120 bp, Artificial Sequence
  ENSG00000087365_62 (sequence is synthesized)
gacctagagtcctttctcttttgcagactggcatcgtgctgaatcggccggttttgagaggggaagatggggacaaagccgctccacctcccatgtcggcacaggtagggagattcttct

SEQ ID NO: 90723 - DNA, 120 bp, Artificial Sequence
  ENSG00000087365_63 (sequence is synthesized)
gttttttaagattccatctgctgatccttttgtagttcatgagcatgatgattgggtgttcacgtgcatgtgtgagatgtgacacccttgcacattactcgcctgacctgagtggggaaa

SEQ ID NO: 90724 - DNA, 120 bp, Artificial Sequence
  ENSG00000087365_64 (sequence is synthesized)
aaaaaagattccatatgttcagggtagcccttcctctcacttgcagttgttgggcagggaggtactgccatgacagaattgtgagctcttcagttctctctttgatgctgacacttgcct

SEQ ID NO: 90725 - DNA, 120 bp, Artificial Sequence
  ENSG00000087365_65 (sequence is synthesized)
ccttttccactgtctgcttctccaaaagcagcttgtggccgggtgcagtggcgcatgcctgtaatcccaccacttcgggatgcttagatgggacgatcgcttgaagccaggagttcgaga

SEQ ID NO: 90726 - DNA, 120 bp, Artificial Sequence
  ENSG00000087365_66 (sequence is synthesized)
ccagcctgggcaacatagtgagactctgttactacaaaaaattttaaaaattagctgggcacggtggcacgcgcctataaagtccctataaagaggctcaaggattgctggagccctggg

SEQ ID NO: 90727 - DNA, 120 bp, Artificial Sequence
  ENSG00000087365_67 (sequence is synthesized)
gttggaggctgcagtgagctctggttgcgccactgtactccatgtactccatcctgggtgacagaatgagactttgcttctttaaaaaaaaaaggggggaggtgatgggggaggggctgg

SEQ ID NO: 90728 - DNA, 120 bp, Artificial Sequence
  ENSG00000087365_68 (sequence is synthesized)
gagagtgtcagaaaaaatagctaatgcatgccaggcttaatacttaggcagtgggttgataggtgcagcaaaccaccatagcacacatttacctatgtaacaaacctgcgcatactgcac

SEQ ID NO: 90729 - DNA, 120 bp, Artificial Sequence
  ENSG00000087365_69 (sequence is synthesized)
ctatgtaacaaacctgcgcatactgcacatgtacccgaaaacttacaataaaataaaattaaaccaaaaaataggaaaaaaaaaaaagaggcagggcgtggtggctcatgtctgtaatcc

SEQ ID NO: 90730 - DNA, 120 bp, Artificial Sequence
  ENSG00000087365_70 (sequence is synthesized)
gcacctacacatgccttggggccctcagcctcagatgacctgccctgggctctccagttacagggagcagaagagccttcctttgggctagaaagtaatcatttattgggcgcctcttga

SEQ ID NO: 90731 - DNA, 120 bp, Artificial Sequence
  ENSG00000087365_71 (sequence is synthesized)
acgccaggcgatgcgagactgaaaatgatcaagtccctgctcacatttttgggatagaggcatcggctccagcctcccgcttggcgcccgcaacgcggggccgccggggaaatgagtctc

SEQ ID NO: 90732 - DNA, 120 bp, Artificial Sequence
  ENSG00000087365_72 (sequence is synthesized)
ctccctgggagcgtaagcgttcgaggatctgaccggagggccgggccggaaagcttgagagccttcgctcccgcaggtgaggcgcagaaaacactccctcggggaagtgccagccctcct

SEQ ID NO: 90733 - DNA, 120 bp, Artificial Sequence
  ENSG00000087365_73 (sequence is synthesized)
cgcagccccgccctccggcccgccgccggccttcggggccgtagcggcgcgcagggcccgcagagaccgagacctgcgcactacaactcccaggaggcctcgcgaccagaccgccgaggg

SEQ ID NO: 90734 - DNA, 120 bp, Artificial Sequence
  ENSG00000087365_74 (sequence is synthesized)
gccactagagaaaggtgcgtctgcggcgaatcccgtcgcccagcgcacggcagcgggtgtgcctgagtgcgcgtcgcctcccaaccagagaggacgtggcatacggcgccaccggaagtt

SEQ ID NO: 90735 - DNA, 120 bp, Artificial Sequence
  ENSG00000087365_75 (sequence is synthesized)
tctgcctgagtgggctgacaagctggagggaagggcgctgtttttctgtcttcgttactgtcctttccgggtttggcttctcctctgggagtgtggctgcaggagcctcccatagtgata

SEQ ID NO: 90736 - DNA, 120 bp, Artificial Sequence
  ENSG00000087365_76 (sequence is synthesized)
ttgatggaaaggggaaaggtcaaggtttgggtaggaggaagaggacttcccacccagtgctaggattaatcatttattgggcgcctcttgaacgccaggcgatgcgagactgaaaatgat

SEQ ID NO: 90737 - DNA, 120 bp, Artificial Sequence
  ENSG00000087365_77 (sequence is synthesized)
ggttctgagacgcacagtaatttacccaaaggcatacagcttgtgagtggcagaactttggagtctgactccaaggccccttcgcagctacttcatgagatggcctccttgggaaaagcc

SEQ ID NO: 90738 - DNA, 120 bp, Artificial Sequence
  ENSG00000087365_78 (sequence is synthesized)
tgactgttgaactgtgggggagaatgggggaggagtttaggggttggggtgctggcacagtgcttggattccctgacccagctggttttcctcctcttgacagaaaaaccggaagcgtag

SEQ ID NO: 90739 - DNA, 120 bp, Artificial Sequence
  ENSG00000087448_0 (sequence is synthesized)
cccggaaccggcgcgcgcgtaggggctgggaggccggcgcgcagatctggcggtgagcgctgccgccccggggcccccagccatgtcggccgaggagatggtgcagatccgcctggagga

SEQ ID NO: 90740 - DNA, 120 bp, Artificial Sequence
  ENSG00000087448_1 (sequence is synthesized)
agatccgcctggaggaccgctgctacccggtgagcaagaggaagctcatcgagcagagcgactacttccgcgccctctaccgctccggcatgcgcgaggccctgagccaggaggccggcg

SEQ ID NO: 90741 - DNA, 120 bp, Artificial Sequence
  ENSG00000087448_2 (sequence is synthesized)
cgcggcctcagcgcgccgggcctgcggctggtgctggacttcatcaacgccggcggggcccgcgaaggctggctcctgggcccgcgcggggaaaagggcggcggggtggacgaggacgag

SEQ ID NO: 90742 - DNA, 120 bp, Artificial Sequence
  ENSG00000087448_3 (sequence is synthesized)
gcggggtggacgaggacgaggagatggatgaggtgagcctgctgtccgagctggtggaggcggcctccttcctgcaggtcacgtccctgctgcagctgctgctgtcccaggtgcggctca

SEQ ID NO: 90743 - DNA, 120 bp, Artificial Sequence
  ENSG00000087448_4 (sequence is synthesized)
ataactgcctggagatgtaccgcctggcgcaggtgtacgggctgcccgacctgcaggaggcctgcctgcgcttcatggtcgtccacttccacgaggtgctgtgcaagccccagttccacc

SEQ ID NO: 90744 - DNA, 120 bp, Artificial Sequence
  ENSG00000087448_5 (sequence is synthesized)
tcctggggtctcctccccaagctccaggggatgtcagcctgaagcagaggctgagggaggcccggatgactgggactcctgtcctcgtggccctcggggacttcctggggggacccctgg

SEQ ID NO: 90745 - DNA, 120 bp, Artificial Sequence
  ENSG00000087448_6 (sequence is synthesized)
cccctcacccctaccagggggagcccccgtccatgctcaggtacgaggagatgactgagcgttggttcccgctggccaacaaccttcctcccgacctggtcaatgtcaggggctatgggt

SEQ ID NO: 90746 - DNA, 120 bp, Artificial Sequence
  ENSG00000087448_7 (sequence is synthesized)
ctgccatcctggacaactacctcttcatagtgggcgggtacaggatcactagccaggagatctccgctgcgcattcctacaaccccagcaccaacgagtggctccaggtggcctccatga

SEQ ID NO: 90747 - DNA, 120 bp, Artificial Sequence
  ENSG00000087448_8 (sequence is synthesized)
accagaagaggtctaacttcaaacttgtggctgttaattcaaaactctatgccatcggagggcaggccgtttctaacgttgagtgttacaaccccgagcaggatgcgtggaattttgtgg

SEQ ID NO: 90748 - DNA, 120 bp, Artificial Sequence
  ENSG00000087448_9 (sequence is synthesized)
cgcccttacccaatcctctggctgagttctctgcctgtgagtgtaagggaaaaatttatgtcattggaggatacactaccagagaccggaacatgaacattttgcagtactgcccctctt

SEQ ID NO: 90749 - DNA, 120 bp, Artificial Sequence
  ENSG00000087448_10 (sequence is synthesized)
ccgacatgtggacgctctttgaaacatgtgacgtccacattcgcaagcagcagatggtgtctgtggaagagaccatctacatcgtgggggggtgtctccacgagctggggcccaaccgca

SEQ ID NO: 90750 - DNA, 120 bp, Artificial Sequence
  ENSG00000087448_11 (sequence is synthesized)
ggagcagccagagcgaggacatgctcaccgtgcagtcctacaacaccgtcacccgccagtggctctacctcaaggagaacacgtccaaatcgggtcttaacttgacttgtgcgctccata

SEQ ID NO: 90751 - DNA, 120 bp, Artificial Sequence
  ENSG00000087448_12 (sequence is synthesized)
acgacggcatctacatcatgagcagagacgtcaccctgtcgaccagcttggaacaccgagtgttcctcaagtacaacatcttttcagatagttgggaagcatttcggcgttttccagctt

SEQ ID NO: 90752 - DNA, 120 bp, Artificial Sequence
  ENSG00000087448_13 (sequence is synthesized)
ttggacataacttgctggtttcttctctttatctgcccaataaagcagaaacatgactgaattgaattggtagatgaaaaaaacctggttcaagttttttttaaaatgtggtgtcccatt

SEQ ID NO: 90753 - DNA, 120 bp, Artificial Sequence
  ENSG00000087448_14 (sequence is synthesized)
ccaagggagaccaattcctaaagggtaaagaagggttaaagtaggtcacatatatacagtagcagctgtaaataagcttacttgaactaattacttgaaaactggtggaaaaaagagacc

SEQ ID NO: 90754 - DNA, 120 bp, Artificial Sequence
  ENSG00000087448_15 (sequence is synthesized)
aactttgttattttttaaattattgatttttaaattatgggagcaaatccatctccaaacatgatactcttgggccaatgacggatcatcaaaatgtagattcattgtgtctgtgtggta

SEQ ID NO: 90755 - DNA, 120 bp, Artificial Sequence
  ENSG00000087448_16 (sequence is synthesized)
aagggccaaagtcaataattgggacaaatggtaaagatgattttaaaatctgttgtatttaggtcccttgacatatcattagcaccttaagtgagaggttttctttttcttatcagtgtc

SEQ ID NO: 90756 - DNA, 120 bp, Artificial Sequence
  ENSG00000087448_17 (sequence is synthesized)
cttgacaagcattcatattaacatattcattctctcttctccatcacccatacccacacatacatctagtatgtttagggttctgtgttcagatattttgtttgcacactactttttagg

SEQ ID NO: 90757 - DNA, 120 bp, Artificial Sequence
  ENSG00000087448_18 (sequence is synthesized)
aaacttataatgatggagccctacagtgaatccttaccagtgttcagtcctccccaaaacttgcataaaaatattcttagctatttttccagccttttttgcagttacaaatgctggata

SEQ ID NO: 90758 - DNA, 120 bp, Artificial Sequence
  ENSG00000087448_19 (sequence is synthesized)
aatagactgataaaacctcttattttatttatgtggcaggttgcatatttatgtggacacataggttgcactgctaggcattctgtattgttttaaagaggatatattatttagaaaaat

SEQ ID NO: 90759 - DNA, 120 bp, Artificial Sequence
  ENSG00000087448_20 (sequence is synthesized)
ggacatatgaatattattaaaaattgagtcttaaatttaaatgggaagggaagaaaacaccaaataagaaaaaaatttgcctttaagagttacttttgttgaatgtatttgacttagttc

SEQ ID NO: 90760 - DNA, 120 bp, Artificial Sequence
  ENSG00000087448_21 (sequence is synthesized)
ttattttaaggctaaaaaaactttgtcatatttaagtcggcagctttctaatttaatcttagctttgtaattcatgttttgcttttgtggactaaggtaaggacagcatttaaatatttg

SEQ ID NO: 90761 - DNA, 120 bp, Artificial Sequence
  ENSG00000087448_22 (sequence is synthesized)
tgctggagtgaggggaagaagctgttacagaagtggaatggtttctggtggtatttctgaagttaggtaaagtgctttacttgccttggttgttaattgaaatagaattcagctcaagca

SEQ ID NO: 90762 - DNA, 120 bp, Artificial Sequence
  ENSG00000087448_23 (sequence is synthesized)
gttgttttcagtgagtgagttaacaataaaagcttctgccaatcatagatcaacattcctcaaaaatacatacactcatacttatggaaattttattttgattgaaaacactctgaaatt

SEQ ID NO: 90763 - DNA, 120 bp, Artificial Sequence
  ENSG00000087448_24 (sequence is synthesized)
atctgatattttgtaatggcatcagttaaactgtgagctggattccatctttctgcagtaacagcgggcagaaccatttcagttagcatgtgcctcactttaagaaagtcctgtagggga

SEQ ID NO: 90764 - DNA, 120 bp, Artificial Sequence
  ENSG00000087448_25 (sequence is synthesized)
aaaaaaaaactgtcagagcgaattcatgcattcaacaaacacttatgagtgcctggagtatgccgtccactgtgcagatgtaggacaggggctaatcacttagagttcttcagtttatta

SEQ ID NO: 90765 - DNA, 120 bp, Artificial Sequence
  ENSG00000087448_26 (sequence is synthesized)
gaggagtgactacaggttttctttacaaccatggcctctagtatacttaaaataagcgtccagttataaaaagcctatttgcacaactttttgggaatacttctattaactaaaatgagg

SEQ ID NO: 90766 - DNA, 120 bp, Artificial Sequence
  ENSG00000087448_27 (sequence is synthesized)
ttttggacatagaaacagatctttgtatcttgtcaccaaataatcttacctctagtctacttacaactttgtaagggtttctaagctatgcccatttattcccaaatattaagcccttaa

SEQ ID NO: 90767 - DNA, 120 bp, Artificial Sequence
  ENSG00000087448_28 (sequence is synthesized)
aaaaataaaacctctgaaccaaaatcttcccaggaatagtacttaatagattttaatgttaatttatattcattgtagaattgaatttccagtgacctgtaatttcattacatatatttt

SEQ ID NO: 90768 - DNA, 120 bp, Artificial Sequence
  ENSG00000087448_29 (sequence is synthesized)
aaaatctatttattttagatggtgttaacttttcgttgctgaagagcttaactttttaaaggctttgtcctatacatttagaagatgagtcagttgaattagtactggacaaacagttgg

SEQ ID NO: 90769 - DNA, 120 bp, Artificial Sequence
  ENSG00000087448_30 (sequence is synthesized)
agattagtttgcaaataagcatatcatatcaaatacaatattccagccaaccagttaattctcttcctggttacattcattgggtctatttgcctaatgttgacaattagattcttggac

SEQ ID NO: 90770 - DNA, 120 bp, Artificial Sequence
  ENSG00000087448_31 (sequence is synthesized)
tctatttgcctaatgttgacaattagattcttggaccaagtgagggtgtactctgatccacaaagctcttttataaaccaggtttgaggttgtgtgtgtgtgtgggggtgtgtgtgtgtg

SEQ ID NO: 90771 - DNA, 120 bp, Artificial Sequence
  ENSG00000087448_32 (sequence is synthesized)
gacagacatctaaaaagattttggttattctgggctgccagcagtacgtgggaaaggtggaatgtgcaataggaacagatctgtgcattttgtgacatcgtccttcctgctgtgcacatc

SEQ ID NO: 90772 - DNA, 120 bp, Artificial Sequence
  ENSG00000087448_33 (sequence is synthesized)
agctgtgatgacattttgagggtagttttaatttagctcggttctcttgttggtgccagtattacattgaagactacctatgatagaggcaatgttgctttgaaaatctcccttcaggcg

SEQ ID NO: 90773 - DNA, 90 bp, Artificial Sequence
  ENSG00000087448_34 (sequence is synthesized)
ctgggcgacagtaaaaaagaaaatcccccttcatcccccaggactgtcctttactctttgatagtatccctctattttcttcccaattct

SEQ ID NO: 90774 - DNA, 120 bp, Artificial Sequence
  ENSG00000087448_35 (sequence is synthesized)
ttactctttgatagtatccctctattttcttcccaattctctaaatgctttatcattttttcctgagatgcttctgagggatgctgacctcccactatggggaaaagggttgcttggagg

SEQ ID NO: 90775 - DNA, 120 bp, Artificial Sequence
  ENSG00000087448_36 (sequence is synthesized)
acctggggtggcagccccccgaccagaagcaccctattttatagatagcagtctgaatggtagagagtcctgtgtgtgggttgttagaaggttggttcttcctgttattctctctggctt

SEQ ID NO: 90776 - DNA, 120 bp, Artificial Sequence
  ENSG00000087448_37 (sequence is synthesized)
tcctttcaacccacttattttcagaggcctctccccttagcatcctttaaaaggttttctgatgaatgtgtgaaagagttgattatttcaacagtattggttaagtcacaacgacgaagt

SEQ ID NO: 90777 - DNA, 120 bp, Artificial Sequence
  ENSG00000087448_38 (sequence is synthesized)
gctgagaaggttatgggtaccaggaagaaacaaacagaagtcttaagattagaatgagaaccaaagagaatttaaccctgccatttttttttttttaacaccaagatcctaagtaattcc

SEQ ID NO: 90778 - DNA, 120 bp, Artificial Sequence
  ENSG00000087448_39 (sequence is synthesized)
aaatgccttagatatcaatgaaagctacacaccattgagatgggcaaaattctttctctacaaagggagtaatcaagtaaatacctgttctctttcaatggactgttgcctattgagcat

SEQ ID NO: 90779 - DNA, 120 bp, Artificial Sequence
  ENSG00000087448_40 (sequence is synthesized)
tgtggatgatgtgttttcagatttccaggtgaagttctgaccctacctgtttggccaaagacgtaaattgagaggaaaggccttggtcttcctgatcaaccagcatttaacgaacagtgg

SEQ ID NO: 90780 - DNA, 120 bp, Artificial Sequence
  ENSG00000087448_41 (sequence is synthesized)
cttaatgcagatcactcaagaggcagcatagcaatgtaaaaggaatataagtaggtgttggatgcctttttcctagaccaggaatggggaatatataacacctgtgccaccgctctttta

SEQ ID NO: 90781 - DNA, 120 bp, Artificial Sequence
  ENSG00000087448_42 (sequence is synthesized)
aggaggcattatgaatgagtgcagcattcctgtcctctgtgccaggatttggtcttagaatccatgtcagattggtgcttccagacatctattcccagtccatcagagtgaaatgaaggc

SEQ ID NO: 90782 - DNA, 120 bp, Artificial Sequence
  ENSG00000087448_43 (sequence is synthesized)
tatttgccatccctgccttagacagaggagtgaaagaattaagtgggtagacaccaaccaaaatgactttgaaagcagtgagctgattgagctccagttctgtggttaccagaaatactg

SEQ ID NO: 90783 - DNA, 120 bp, Artificial Sequence
  ENSG00000087448_44 (sequence is synthesized)
agtgtctgtcatgtgcaagacaatgctaagaacagaatacagacataaataagtcacggcccatgaccttgaagagcttacggccttataaagaggttcactgtaattgtcttcaccagg

SEQ ID NO: 90784 - DNA, 120 bp, Artificial Sequence
  ENSG00000087448_45 (sequence is synthesized)
gcgtccttctcaaagatgcccacttttgtctggcacattggggctcggtggtctggtggtcccttcggtcttggccctgtccgtcctttgtttttgtgatttactaacaatcatcacgaa

SEQ ID NO: 90785 - DNA, 120 bp, Artificial Sequence
  ENSG00000087448_46 (sequence is synthesized)
ccagttttgtttttcttttaaatttgaacatcacatcttgtgttttagttttttgctctatgatttttttctcactgcttttcagtcttctctgtacttcatttttgtgaaaaagtgaaa

SEQ ID NO: 90786 - DNA, 120 bp, Artificial Sequence
  ENSG00000087448_47 (sequence is synthesized)
atcacatataatctttatttaaaaatgctcaccaagcactgcagactttggagttagggattcagcagcttgttccagtgaaaaggaggagtgaagctggggaagttagtatctaagagg

SEQ ID NO: 90787 - DNA, 120 bp, Artificial Sequence
  ENSG00000087448_48 (sequence is synthesized)
ggcaagctgattgcatgtgcatttatacctatgcctttaaaacattcccataaaaagtattaataaagaaatttccattccacactagtactgatgaaaaggtggttgattttgccttgt

SEQ ID NO: 90788 - DNA, 120 bp, Artificial Sequence
  ENSG00000087448_49 (sequence is synthesized)
gataattatcaaaggatagtttttcatccttagattttattcacatgagagattttttttattttctctgttgacttaggaacacatcataaattcacaccaactgacacgttgctgacg

SEQ ID NO: 90789 - DNA, 120 bp, Artificial Sequence
  ENSG00000087448_50 (sequence is synthesized)
tctgtacttgacataaccatttttattcatacaggaagcattaaatataaaagatggtcagttttgaagagcaaagggtgctgaaatgacttgtacggttggctggtgctttctcaaatg

SEQ ID NO: 90790 - DNA, 120 bp, Artificial Sequence
  ENSG00000087448_51 (sequence is synthesized)
gattgccatagttcattactagtaaagaaaaggaaaatgtgatttacgttgtcatttttcctattaaaaaaaacccttaagaatggggcacttgagctgtccctgcaatgttttcatatc

SEQ ID NO: 90791 - DNA, 120 bp, Artificial Sequence
  ENSG00000087448_52 (sequence is synthesized)
tagtagtcattttagggaaagtgataatctgtagaatgaatagttatgttttgatatgactgatactttctttgttaaaaggttgtattaagtcttcaatttcaagtctagcttaaaagt

SEQ ID NO: 90792 - DNA, 120 bp, Artificial Sequence
  ENSG00000087448_53 (sequence is synthesized)
gtaaacattatgtgattcatttgaatacaagaatgcctatgaaatacccactataacagcattccttttgtgtttagaactatagaagaaaatgtcttcaaataaagtagttttcagtca

SEQ ID NO: 90793 - DNA, 80 bp, Artificial Sequence
  ENSG00000087448_54 (sequence is synthesized)
cctggcgccgcccgggagagcccgcgcgaggacgcccgccgcgctccgccggcccttttttggcgctgagggaaaggaga

SEQ ID NO: 90794 - DNA, 120 bp, Artificial Sequence
  ENSG00000087448_55 (sequence is synthesized)
aagtgaagggaccaggtaggtggtctgcccatgtgtaggcgtcagcagtctgggaagggcaagagggtgtcagaggaagccccgacatatccgagtgtcatgttatgctttaatagtgta

SEQ ID NO: 90795 - DNA, 120 bp, Artificial Sequence
  ENSG00000087448_56 (sequence is synthesized)
cacttacacatctggaaggaagagagttccatatggcagggatgattgggacaggagggatcttttgataactttgtgtgagcatgaaaatcgaatggggaagggagagctgtgaaaaaa

SEQ ID NO: 90796 - DNA, 120 bp, Artificial Sequence
  ENSG00000087448_57 (sequence is synthesized)
cattgccctgcactttagctctgaaaatggagttggagtgagtcctcctgttccatgtgtgaatacagcaaggctgagagagagactttaataaacaagtgtctcctggcagagatggaa

SEQ ID NO: 90797 - DNA, 120 bp, Artificial Sequence
  ENSG00000087448_58 (sequence is synthesized)
ttgcagttgtcagccttagcgtttgctgagctgtcccttctcctctcagccaatgtttaccatttttggagcatttctgtggttgatgttgtagtagagcctgggaatagtgcaagaaag

SEQ ID NO: 90798 - DNA, 120 bp, Artificial Sequence
  ENSG00000087448_59 (sequence is synthesized)
aaaactgtacgtctattcacactcccccccaactccccatttaattttggccaacagtttaaattgctttttgcatctttgcttttggagtttcttagagctgggcataggttgcaacaa

SEQ ID NO: 90799 - DNA, 120 bp, Artificial Sequence
  ENSG00000087448_60 (sequence is synthesized)
tggcagaaggcaagtagatgaaggggaaagaggagacaaaaggacctggatggcccacagacttaagcagtcgtgttctgagtggttgagaaaggacttttgaaaggatcttggcatttt

SEQ ID NO: 90800 - DNA, 80 bp, Artificial Sequence
  ENSG00000087460_0 (sequence is synthesized)
cgcttttggctcggggcggcggcgggggcccggccgaggcaataagagcggcggcggcggcagcggcggcagcagctccc

SEQ ID NO: 90801 - DNA, 80 bp, Artificial Sequence
  ENSG00000087460_1 (sequence is synthesized)
cagctcccgcagctcctgctctggtccgcctcggcccggcggcggccatcagccccctcggcctcggctcgaggggcggg

SEQ ID NO: 90802 - DNA, 120 bp, Artificial Sequence
  ENSG00000087460_2 (sequence is synthesized)
cccgccgccgccgcagcccggccgcgccccgccgccgccgccgccgccatgggctgcctcgggaacagtaagaccgaggaccagcgcaacgaggagaaggcgcagcgtgaggccaacaaa

SEQ ID NO: 90803 - DNA, 120 bp, Artificial Sequence
  ENSG00000087460_3 (sequence is synthesized)
gcgtgaggccaacaaaaagatcgagaagcagctgcagaaggacaagcaggtctaccgggccacgcaccgcctgctgctgctgggtgctggagaatctggtaaaagcaccattgtgaagca

SEQ ID NO: 90804 - DNA, 120 bp, Artificial Sequence
  ENSG00000087460_4 (sequence is synthesized)
gatgaggatcctgcatgttaatgggtttaatggagagggcggcgaagaggacccgcaggctgcaaggagcaacagcgatggtgagaaggcaaccaaagtgcaggacatcaaaaacaacct

SEQ ID NO: 90805 - DNA, 120 bp, Artificial Sequence
  ENSG00000087460_5 (sequence is synthesized)
gaaagaggcgattgaaaccattgtggccgccatgagcaacctggtgccccccgtggagctggccaaccccgagaaccagttcagagtggactacatcctgagtgtgatgaacgtgcctga

SEQ ID NO: 90806 - DNA, 120 bp, Artificial Sequence
  ENSG00000087460_6 (sequence is synthesized)
ctttgacttccctcccgaattctatgagcatgccaaggctctgtgggaggatgaaggagtgcgtgcctgctacgaacgctccaacgagtaccagctgattgactgtgcccagtacttcct

SEQ ID NO: 90807 - DNA, 120 bp, Artificial Sequence
  ENSG00000087460_7 (sequence is synthesized)
ctgcttcgctgccgtgtcctgacttctggaatctttgagaccaagttccaggtggacaaagtcaacttccacatgtttgacgtgggtggccagcgcgatgaacgccgcaagtggatccag

SEQ ID NO: 90808 - DNA, 120 bp, Artificial Sequence
  ENSG00000087460_8 (sequence is synthesized)
tgcttcaacgatgtgactgccatcatcttcgtggtggccagcagcagctacaacatggtcatccgggaggacaaccagaccaaccgcctgcaggaggctctgaacctcttcaagagcatc

SEQ ID NO: 90809 - DNA, 120 bp, Artificial Sequence
  ENSG00000087460_9 (sequence is synthesized)
tggaacaacagatggctgcgcaccatctctgtgatcctgttcctcaacaagcaagatctgctcgctgagaaagtccttgctgggaaatcgaagattgaggactactttccagaatttgct

SEQ ID NO: 90810 - DNA, 120 bp, Artificial Sequence
  ENSG00000087460_10 (sequence is synthesized)
cgctacactactcctgaggatgctactcccgagcccggagaggacccacgcgtgacccgggccaagtacttcattcgagatgagtttctgaggatcagcactgccagtggagatgggcgt

SEQ ID NO: 90811 - DNA, 120 bp, Artificial Sequence
  ENSG00000087460_11 (sequence is synthesized)
cactactgctaccctcatttcacctgcgctgtggacactgagaacatccgccgtgtgttcaacgactgccgtgacatcattcagcgcatgcaccttcgtcagtacgagctgctctaagaa

SEQ ID NO: 90812 - DNA, 120 bp, Artificial Sequence
  ENSG00000087460_12 (sequence is synthesized)
gggaacccccaaatttaattaaagccttaagcacaattaattaaaagtgaaacgtaattgtacaagcagttaatcacccaccatagggcatgattaacaaagcaacctttcccttccccc

SEQ ID NO: 90813 - DNA, 120 bp, Artificial Sequence
  ENSG00000087460_13 (sequence is synthesized)
gagtgattttgcgaaacccccttttcccttcagcttgcttagatgttccaaatttagaaagcttaaggcggcctacagaaaaaggaaaaaaggccacaaaagttccctctcactttcagt

SEQ ID NO: 90814 - DNA, 120 bp, Artificial Sequence
  ENSG00000087460_14 (sequence is synthesized)
aaaaataaataaaacagcagcagcaaacaaataaaatgaaataaaagaaacaaatgaaataaatattgtgttgtgcagcattaaaaaaaatcaaaataaaaattaaatgtgagcaaagaa

SEQ ID NO: 90815 - DNA, 80 bp, Artificial Sequence
  ENSG00000087460_15 (sequence is synthesized)
gctccccggcggggacactcagtcgcgtcggcaccgcggagcgggctgcgtcaggtggctggccggcgcggcgctcccct

SEQ ID NO: 90816 - DNA, 120 bp, Artificial Sequence
  ENSG00000087460_16 (sequence is synthesized)
agacgcatctagagttccctgattcctaaaattatttatcttaaatcctgtttgccctaaccttcttaaggcatcagctttgagttacaaatgtaaccaacacacaagcaaatgtgccat

SEQ ID NO: 90817 - DNA, 120 bp, Artificial Sequence
  ENSG00000087460_17 (sequence is synthesized)
cccaaagcctcgcgctctctcaaggtcaagaaggtacccctggcggagaagcgcagacagatgcgcaaagaagccctggagaagcgggcccagaagcgcgcagagaagaaacgcagtaag

SEQ ID NO: 90818 - DNA, 120 bp, Artificial Sequence
  ENSG00000087460_18 (sequence is synthesized)
cgcaggctgcaaggagcaacagcgatggaatataatatccctagatgatggctacagtttctcatcttcccggctatgtcctatcacaatttgcatgctggaattgctcggtcttaggaa

SEQ ID NO: 90819 - DNA, 120 bp, Artificial Sequence
  ENSG00000087460_19 (sequence is synthesized)
gaatactattctgttatctgaggggggaggggggatggggcccctgctacctgaccttaaacgatgattgaaaaaacgaaaaatgaactgaaatccttaattggcagaaatgtagtatga

SEQ ID NO: 90820 - DNA, 120 bp, Artificial Sequence
  ENSG00000087460_20 (sequence is synthesized)
caactatccaaaaaggcatctctataagaaatgactaattgacaatctgctgtaccaaaagttggcatttgagcaagatatgacaagtccttagtgagcaacctactgtgtactagatgt

SEQ ID NO: 90821 - DNA, 120 bp, Artificial Sequence
  ENSG00000087460_21 (sequence is synthesized)
cctgctaaacccttgaaccctactaataccttggcctgcacgtctctctcactctgttctgcaagtcaatataagtattaacattcgtgataaataaaaattctctgcatgtttcagcaa

SEQ ID NO: 90822 - DNA, 120 bp, Artificial Sequence
  ENSG00000087460_22 (sequence is synthesized)
gcgcgccggagctgacctctcccggcggcgggcggttaggggaaagtacctgggggaaaggtagaggaggtaaggggacccttggggatgcccctacgggctaccagggttgaacgcaca

SEQ ID NO: 90823 - DNA, 120 bp, Artificial Sequence
  ENSG00000087460_23 (sequence is synthesized)
ggcatggtcacgtcggggtattgccaagcttttggcgcagctggtcgggtggccaggctgcatgcggcttagcaggagacgtcctgggctgtttgcgcaggacctctggaggccctcgag

SEQ ID NO: 90824 - DNA, 120 bp, Artificial Sequence
  ENSG00000087460_24 (sequence is synthesized)
actttgcacgccgcccagggctacaccactcaccgaaaattgggaggcaggtgctggagaatctggtaaaagcaccattgtgaagcagatgaggatcctgcatgttaatgggtttaatgg

SEQ ID NO: 90825 - DNA, 120 bp, Artificial Sequence
  ENSG00000087460_25 (sequence is synthesized)
cccgaatcggaatctgaccacgagcacgaggaggcagaccttgagctgtccctccccgagtgcctagagtacgaggaagagttcgactacgagaccgagagcgagaccgagtccgaaatc

SEQ ID NO: 90826 - DNA, 120 bp, Artificial Sequence
  ENSG00000087460_26 (sequence is synthesized)
gagtccgagaccgacttcgagaccgagcctgagaccgcccccaccactgagcccgagaccgagcctgaagacgatcgcggcccggtggtgcccaagcactccaccttcggccagtccctc

SEQ ID NO: 90827 - DNA, 120 bp, Artificial Sequence
  ENSG00000087460_27 (sequence is synthesized)
ccccgacgcctccccaagtcgcgcgccgcccagcactcaggagccccagagccccagggaaggggaggagctcaagcccgaggacaaagatccaagggaccccgaagagtcgaaggagcc

SEQ ID NO: 90828 - DNA, 120 bp, Artificial Sequence
  ENSG00000087460_28 (sequence is synthesized)
caaggaggagaagcagcggcgtcgctgcaagccaaagaagcccacccgccgtgacgcgtccccggagtccccttccaaaaagggacccatccccatccggcgtcactaatggaggacgcc

SEQ ID NO: 90829 - DNA, 120 bp, Artificial Sequence
  ENSG00000087460_29 (sequence is synthesized)
gttatgggcgtgcgcaactgcctctacggcaataatatgtcaggacaacgcgatatcccccctgaaatcggggaacagcccgagcaaccacctttggaggccccaggggcagctgccccc

SEQ ID NO: 90830 - DNA, 120 bp, Artificial Sequence
  ENSG00000087460_30 (sequence is synthesized)
ggtgctgggcctagcccagccgaagagatggagaccgaaccgcctcacaacgagcccatccccgtcgagaatgatggcgaggcctgtggacccccagaggtctccagacccaactttcag

SEQ ID NO: 90831 - DNA, 120 bp, Artificial Sequence
  ENSG00000087460_31 (sequence is synthesized)
gtcctcaacccggcattcagggaagctggagcccatggaagctacagcccacctcctgaggaagcaatgcccttcgaggctgaacagcccagcttgggaggcttctggcctacactggag

SEQ ID NO: 90832 - DNA, 120 bp, Artificial Sequence
  ENSG00000087460_32 (sequence is synthesized)
cagcctggattccccagtggggtccatgcaggccttgaggccttcggcccagcactcatggagcccggagccttcagtggtgccagaccaggcctgggaggatacagccctccaccagaa

SEQ ID NO: 90833 - DNA, 120 bp, Artificial Sequence
  ENSG00000087460_33 (sequence is synthesized)
gaagctatgccctttgagtttgaccagcctgcccagagaggctgcagtcaacttctcttacaggtcccagaccttgctccaggaggcccaggtgctgcaggggtccccggagctcctccc

SEQ ID NO: 90834 - DNA, 120 bp, Artificial Sequence
  ENSG00000087460_34 (sequence is synthesized)
gaggagccccaagccctcaggcctgcaaaggctggctccagaggaggctacagccctccccctgaggagactatgccatttgagcttgatggagaaggatttggggacgacagcccaccc

SEQ ID NO: 90835 - DNA, 120 bp, Artificial Sequence
  ENSG00000087460_35 (sequence is synthesized)
ccggggctttcccgagttatcgcacaagtcgacggcagcagccagttcgcggcagtcgcggcctcgagtgcggtccgcctcactcccgccgcgaacgcgcctcccctctgggtcccaggc

SEQ ID NO: 90836 - DNA, 120 bp, Artificial Sequence
  ENSG00000087460_36 (sequence is synthesized)
gccatcggcagcccatcccaagaggctgtcagacctccttctaacttcacgggcagcagcccctggatggagatctccggacccccgttcgagattggcagcgcccccgctggggtcgac

SEQ ID NO: 90837 - DNA, 120 bp, Artificial Sequence
  ENSG00000087460_37 (sequence is synthesized)
gacactcccgtcaacatggacagccccccaatcgcgcttgacggcccgcccatcaaggtctccggagccccagataagagagagcgagcagagagacccccagttgaggaggaagcagca

SEQ ID NO: 90838 - DNA, 120 bp, Artificial Sequence
  ENSG00000087460_38 (sequence is synthesized)
gagatggaaggagccgctgatgccgcggagggaggaaaagtaccctctccggggtacggatcccctgccgccggggcagcctcagcggataccgctgccagggcagcccctgcagcccca

SEQ ID NO: 90839 - DNA, 120 bp, Artificial Sequence
  ENSG00000087460_39 (sequence is synthesized)
gccgatcctgactccggggcaaccccagaagatcccgactccgggacagcaccagccgatcctgactccggggcattcgcagccgatcccgactccggggcagcccctgccgccccagcc

SEQ ID NO: 90840 - DNA, 80 bp, Artificial Sequence
  ENSG00000087460_40 (sequence is synthesized)
gatcccgactccggggcggcccctgacgccccagccgatcccgactccggggcggcccctgacgccccagccgatccaga

SEQ ID NO: 90841 - DNA, 120 bp, Artificial Sequence
  ENSG00000087460_41 (sequence is synthesized)
gctgagacccgggcagcccatgtcgccccagctgcgccagacgcaggggctcccactgccccagccgcttctgccacccgggcagcccaagtccgccgggcggcctctgcagcccctgcc

SEQ ID NO: 90842 - DNA, 120 bp, Artificial Sequence
  ENSG00000087460_42 (sequence is synthesized)
tccggggccagacgcaagatccatctcagaccccccagccccgagatccaggctgccgatccgcctactccgcggcctactcgcgcgtctgcctggcggggcaagtccgagagcagccgc

SEQ ID NO: 90843 - DNA, 120 bp, Artificial Sequence
  ENSG00000087460_43 (sequence is synthesized)
ggccgccgcgtgtactacgatgaaggggtggccagcagcgacgatgactccagcggagacgagtccgacgatgggacctccggatgcctccgctggtttcagcatcggcgaaatcgccgc

SEQ ID NO: 90844 - DNA, 120 bp, Artificial Sequence
  ENSG00000087460_44 (sequence is synthesized)
attcggccgggcgggggctcaaaaacggggcggggggccgtggcgacgcgggcgcgggtccccctcccccggcctgcccgctcagtgtctctctcttgctctcgctctcgctctccccct

SEQ ID NO: 90845 - DNA, 120 bp, Artificial Sequence
  ENSG00000087460_45 (sequence is synthesized)
cggaggcacctctctcgagtcttaggctgcggaatctaagactcagcgagaggagcccgggaggagacagaactttccccttttttcccatcccttcttcttgctcagagaggcaagcaa

SEQ ID NO: 90846 - DNA, 120 bp, Artificial Sequence
  ENSG00000087460_46 (sequence is synthesized)
agagctgacaattaagccgcgggacctccgcgccagtgcctccagctgccgtgcgccagccttggccgccacagcccgcctcccgtcgctcgcgggacagagaccgcctcaaagagcgtg

SEQ ID NO: 90847 - DNA, 120 bp, Artificial Sequence
  ENSG00000087460_47 (sequence is synthesized)
aaaagatgggctacatgtgtacgcaccgcctgctgcttctagggagaaaagtggtgccgagcgacactgagggtcgtttccggctggacaggccagcgccagcaaccgtaagctggacag

SEQ ID NO: 90848 - DNA, 120 bp, Artificial Sequence
  ENSG00000087460_48 (sequence is synthesized)
gcaggggcttcaggtgagccaggaactgccggggaggggccccggggccccgggactcccctggctaggctggtggggtccacggtgggctggggtcattggggaaggcgcgccccgcct

SEQ ID NO: 90849 - DNA, 120 bp, Artificial Sequence
  ENSG00000087460_49 (sequence is synthesized)
cgcctggcacggctgcttggactcagacagcttgtcgttggtgtgtgttggtgtccatattctgtgttcgcctgtgcatgatacgctgaagtgtcccctgttcctatcccggcaccccca

SEQ ID NO: 90850 - DNA, 120 bp, Artificial Sequence
  ENSG00000087460_50 (sequence is synthesized)
aattacccgccgactgtgtacttgtacttgggaacgggctgtgttgtggtttgcgccatggcccgggcaaaaaactttcgctgttcgcacactctggtggtacctgcgcccgggcgctct

SEQ ID NO: 90851 - DNA, 120 bp, Artificial Sequence
  ENSG00000087460_51 (sequence is synthesized)
gcggcaagcggtgcggaggacacgcggggaaggtggcggggcctcccgggaaataagcggggcccttggcctgggggagcggggaatcgcttttcgccggcctccgcgtaaccttgtttc

SEQ ID NO: 90852 - DNA, 120 bp, Artificial Sequence
  ENSG00000087460_52 (sequence is synthesized)
tgtatgtctttctctctttttccttttgcgctaagcgtttcctcacttctcattcgttcgccaaaccctcccgcctttacagttgaaaaaccagacacacaggtatctggggcgcccggg

SEQ ID NO: 90853 - DNA, 120 bp, Artificial Sequence
  ENSG00000087460_53 (sequence is synthesized)
gctgcacacctcagttcggtattctgcacacacacagctcgcctggtcgggggatgggggaaaggggaaacacaacctgctgtaggcaagtccggatcccaaaccacttgggggctggtt

SEQ ID NO: 90854 - DNA, 120 bp, Artificial Sequence
  ENSG00000087460_54 (sequence is synthesized)
ccaagggggtgggcgtggctgtgtttaaaaaatatgaaataatttttcttcctagcgaagagcccgaggtaagccaatcatttttacaaagagtacagtaggaggggcttggtttaaaaa

SEQ ID NO: 90855 - DNA, 120 bp, Artificial Sequence
  ENSG00000087460_55 (sequence is synthesized)
gatgggggttatgtgttgtgagtggaatgtcacctttgtgtttgaaatgcaactaaaataaaagttttcaaaaaatgctctgagtgtatttgaagtgtgtggacaaagtatggcaaaacc

SEQ ID NO: 90856 - DNA, 120 bp, Artificial Sequence
  ENSG00000087460_56 (sequence is synthesized)
gtgaatatgacttgtgaaaacaagtaaatgtttgcatgtgaattttttcaggcagctttagctgggggcaaagaggcttgtcaaaggtaaggtcttctgcaaattggctctggatacaaa

SEQ ID NO: 90857 - DNA, 120 bp, Artificial Sequence
  ENSG00000087460_57 (sequence is synthesized)
aaatatataaaggtattttgattacagaagttaaaaatcatgatattcttgtcaggagggtattttggtggccttctaccttccccctcctcctctgctcacatttccccacctctcggt

SEQ ID NO: 90858 - DNA, 120 bp, Artificial Sequence
  ENSG00000087460_58 (sequence is synthesized)
gccctcccctctccaggatccccctcctcaccccacagcaagaccctctcctgtatctcccagtctttccctggccattcccagttccccaccctccccccagccccccaagacttctta

SEQ ID NO: 90859 - DNA, 120 bp, Artificial Sequence
  ENSG00000087460_59 (sequence is synthesized)
acttcaaatctggggcattaaatatttttgccacatttaaacaaagcatcaattagcaatggtctgaatatgtggtttaaatgaaaacttccaaacaaacttcacaagcttaatttttac

SEQ ID NO: 90860 - DNA, 120 bp, Artificial Sequence
  ENSG00000087460_60 (sequence is synthesized)
attttattctctaagactttctctaagaccttccaagggatttcaagatcacagtttttaaggctgcgctacatttgttaaatatgttagaatgtgtgatggttttttattaatggcatt

SEQ ID NO: 90861 - DNA, 120 bp, Artificial Sequence
  ENSG00000087460_61 (sequence is synthesized)
ctcttggctttgctctctttggttaagatgtgactgccatcatcttcgtggtggccagcagcagctacaacatggtcatccgggaggacaaccagaccaaccgcctgcaggaggctctga

SEQ ID NO: 90862 - DNA, 120 bp, Artificial Sequence
  ENSG00000087460_62 (sequence is synthesized)
agatttgttgggagagggaaagaggggaagaaaggggcgaggagaggagggggtgacgctggggggcgccgtggtggcggagggggcctcgccaaagggaggctttggcggggagaagtg

SEQ ID NO: 90863 - DNA, 120 bp, Artificial Sequence
  ENSG00000087460_63 (sequence is synthesized)
ttgatgaaaactggacatggctagcatttttcaaagatgcagcagccactgtttaccttagcttgagtcggatggaagctaagtcacctttgaaataaattactgacagcttcattacag

SEQ ID NO: 90864 - DNA, 120 bp, Artificial Sequence
  ENSG00000087460_64 (sequence is synthesized)
attgccctaaaatttaaaaatttttatagaaaggattctcctccctaagcgagccagcctgtaacaccaggcaagggttttaaaccagaacttctcttttctgttttctttttggaaaga

SEQ ID NO: 90865 - DNA, 120 bp, Artificial Sequence
  ENSG00000087460_65 (sequence is synthesized)
ggaagcaacattcccagtttgccttctttgcagacaagggcacagatacgttaaatttagcctgtgagagggtttacaggggtattcctcatgggagcctagataccttatttttatctc

SEQ ID NO: 90866 - DNA, 120 bp, Artificial Sequence
  ENSG00000087460_66 (sequence is synthesized)
atccaactgcctccttttttctttttcctcactgcggtattgcaacaaaagctatttccttcttaactaggaattccctatgagacagtgacatctgtccctaaagggtggtctgggtgg

SEQ ID NO: 90867 - DNA, 120 bp, Artificial Sequence
  ENSG00000087460_67 (sequence is synthesized)
tacagggttcttcctccctgatcttgcgttttgttagggctcggctgagctattaaatttgccttaactctctgcgggctgccatgctgattacatttttaagagtaagataatactgat

SEQ ID NO: 90868 - DNA, 120 bp, Artificial Sequence
  ENSG00000087460_68 (sequence is synthesized)
ttgaccttcagaaatacagaggttggatgcggattttctaactcaaaactaactctgtttcttacatttagtgccaggaacaaaacaaaaacaaaacataaacaccattaacattggttg

SEQ ID NO: 90869 - DNA, 120 bp, Artificial Sequence
  ENSG00000087460_69 (sequence is synthesized)
gttgaactaagctaatcaattaccaaactgtagaatgctgcccttcggccttcaaggaggaattcctactgtttatgaagatcgggtttgggtttttggttttttttttctttttctttt

SEQ ID NO: 90870 - DNA, 120 bp, Artificial Sequence
  ENSG00000087460_70 (sequence is synthesized)
gtggtggtggtgggtgggcttttgttctttttgttttttctgtggtggtggtgggtgggcttttgttctttgaaattttttttgctacatcacagtccagacatagtttaatgacaattt

SEQ ID NO: 90871 - DNA, 120 bp, Artificial Sequence
  ENSG00000087460_71 (sequence is synthesized)
atggggaacaattatttataaataaaaccattttataggtagtttccttccactgcaagaagtgaggtcattagttttgcaggaaatcctgggcagaaatctcccccgtttatgccttta

SEQ ID NO: 90872 - DNA, 120 bp, Artificial Sequence
  ENSG00000087460_72 (sequence is synthesized)
tgccttaagttacaaccttgggaagattctgacctgggagaattaggagccttatgcgctgccatattctccaaagaattgtgagataaatcactgctttagctccctaatgcgtgtacg

SEQ ID NO: 90873 - DNA, 120 bp, Artificial Sequence
  ENSG00000087460_73 (sequence is synthesized)
tttagtgaaagcacaagaaaacaattatccatccctcctgtctccgaccagagtctccagagagctctgttaatactgcagcaaaggtgtgggattcttcccccatggcctgcagtctca

SEQ ID NO: 90874 - DNA, 120 bp, Artificial Sequence
  ENSG00000087460_74 (sequence is synthesized)
tttgctcttggctgatggttgaggaatgtagagagactgtgtggggtttgtgtgacactgcggtgccttgcagattaggtgagctttcaatctctctttaaaaggggcggcgaagaggac

SEQ ID NO: 90875 - DNA, 120 bp, Artificial Sequence
  ENSG00000087460_75 (sequence is synthesized)
ggattacaggtgtgagccaccgcacccgggctcctgtaatgaactattataaacaccaccacctgtgctcactggttctctcagtatgctagcaactgagttaattccaagtcaaaccat

SEQ ID NO: 90876 - DNA, 120 bp, Artificial Sequence
  ENSG00000087460_76 (sequence is synthesized)
tgagttaattccaagtcaaaccatgggactgttttgttccaccccaacctcatagtgacctatcactccagcctcacccctacccagatgttgataggaccaggagaagcctttaggaag

SEQ ID NO: 90877 - DNA, 120 bp, Artificial Sequence
  ENSG00000087460_77 (sequence is synthesized)
tgttagtatgtagtgtgggggcttcaaacccatgaaagattaaatgagctgcatgcaacttctggtacagtcatgattgctaaggcaatttgctaatctgccccgattgggcgtgtcctc

SEQ ID NO: 90878 - DNA, 120 bp, Artificial Sequence
  ENSG00000087460_78 (sequence is synthesized)
agggcacatttgggaggttataatttgcaactatgtttattcagctacctccaatctttgcacagatccgaacccacaactccctgaagaacagaatactatgctttttagtcgggatgt

SEQ ID NO: 90879 - DNA, 120 bp, Artificial Sequence
  ENSG00000087460_79 (sequence is synthesized)
gggtattttaaccatgaaacatctgacaacaaattatgtgtctagatatgtttatgtgtgaatgttcatgtatcagggattcagtttcacagttttaacttcaattttcttgtttacccc

SEQ ID NO: 90880 - DNA, 120 bp, Artificial Sequence
  ENSG00000087460_80 (sequence is synthesized)
acaaatgacaaaattgcgtcattccttctctttgcccctttccaacaccaccccacaattttttaaacaatcaaaagaaaaattaaaaccagcaaaccttaaattcttgtttgttatttg

SEQ ID NO: 90881 - DNA, 120 bp, Artificial Sequence
  ENSG00000087460_81 (sequence is synthesized)
tgcttctatggaaaaacaaaacaacaacagcagacctccctgcccaaagtgttaaaatgcctccttcataacctgagacttactttcattttctaggtgctggagaatctggtaaaagca

SEQ ID NO: 90882 - DNA, 120 bp, Artificial Sequence
  ENSG00000087460_82 (sequence is synthesized)
gaaagtccttgctgggaaatcgaagattgaggactactttccagaatttgctcgctacactactcctgaggatggtgtgtatggcttccactcttgctggctgttcattgcggtggttct

SEQ ID NO: 90883 - DNA, 120 bp, Artificial Sequence
  ENSG00000087460_83 (sequence is synthesized)
ttttcaaacggtcaggctgaaaacccccatccccctcccaccaccaaaccataaaggatctataagagaagcaagaaaaacgcactcccactaattctcatatggaaaaatcagggtttt

SEQ ID NO: 90884 - DNA, 120 bp, Artificial Sequence
  ENSG00000087460_84 (sequence is synthesized)
atgggctgcctcgggaacagtaagaccgaggaccagcgcaacgaggagaaggcgcagcgtgaggccaacaaaaagatcgagaagcagctgcaggaggctctgaacctcttcaagagcatc

SEQ ID NO: 90885 - DNA, 120 bp, Artificial Sequence
  ENSG00000087460_85 (sequence is synthesized)
actgcttgaaaatttagtaaccctgctcctaatcccgtgcactgctatatcctagtgtgcggcgggacacttgagagttttgaaagaaccctcaaacaagttcacgttccgtaaactact

SEQ ID NO: 90886 - DNA, 120 bp, Artificial Sequence
  ENSG00000087460_86 (sequence is synthesized)
tttccctctgttccagagcccccagggcgcccaggcaaggccgccacctctcccacctgggaggacgcctcgagcaccgactccacagccacggccaccgctcctcggctcccgtgacac

SEQ ID NO: 90887 - DNA, 120 bp, Artificial Sequence
  ENSG00000087460_87 (sequence is synthesized)
cggcgcgcctgctgcttcgagcaggggaggctttgcactcccatcgcacttttctcgtccgaagatacgaaactccgtccgggcgtcgcaaataattcgaattcggctctctgacaccta

SEQ ID NO: 90888 - DNA, 120 bp, Artificial Sequence
  ENSG00000087460_88 (sequence is synthesized)
tgccatggtaacatgctggaggccagggcggctggggagctatttctggactggtgctgtaatcttcctggacaagatcgacgtgatcaagcaggctgactatgtgccgagcgatcagga

SEQ ID NO: 90889 - DNA, 120 bp, Artificial Sequence
  ENSG00000087460_89 (sequence is synthesized)
atgctgaagatggccatgaagctcaaagcccgggcggcggagagcgagaagaagacggccgcggcggctgccgaggtggctgccgaagctgcggcggcggctgcggcgttggccgagccg

SEQ ID NO: 90890 - DNA, 120 bp, Artificial Sequence
  ENSG00000087460_90 (sequence is synthesized)
agagagccgctcgcgccgcggaagagcggggaccccgagaagctcgcgaagaaccccaagaacccggcgcgggaggcgctccccgaaaagttcctaacagacaaggagcgcaagaagctc

SEQ ID NO: 90891 - DNA, 120 bp, Artificial Sequence
  ENSG00000087460_91 (sequence is synthesized)
gagaagaagctgctggagcagaggcgaaaggaggagaagaagaaggagaaggagaggaagaagatggagaagatgctgaagaagaagaagaagaaggtgccagaagcccaggaggaggcc

SEQ ID NO: 90892 - DNA, 120 bp, Artificial Sequence
  ENSG00000087460_92 (sequence is synthesized)
cgccgacgacgacgagggcgccgaggagggcgccgtcgggggcgccgaggagggcgccgccgccgggggcacgagtagggcctgggctgactgggacacggactcgagcgacgaggacga

SEQ ID NO: 90893 - DNA, 120 bp, Artificial Sequence
  ENSG00000087460_93 (sequence is synthesized)
gccgctcaaggctggcgcgctgagcgcccacctgcccctcgtggtgttcctggtcttctcggtgcgcagcccctcgtgggtgctcaacttcctgctgcagaagcgcacggagcagggccg

SEQ ID NO: 90894 - DNA, 120 bp, Artificial Sequence
  ENSG00000087460_94 (sequence is synthesized)
cggctgcggcttcgtgttcggggcgacctgctgcttccgagtgttcctgggctgcgccttcttctcctacttgggcggccgcgccaagcgcagaggccgcgggcgctccggggccagagg

SEQ ID NO: 90895 - DNA, 120 bp, Artificial Sequence
  ENSG00000087460_95 (sequence is synthesized)
cgccttcggctcgggccatggcgcccggcgccgggggcgcgaggagcggctcatctagtcagaccccccaccccgccaccgccaccagacaccaccatcgctgtgtagtgtgctggagaa

SEQ ID NO: 90896 - DNA, 120 bp, Artificial Sequence
  ENSG00000087460_96 (sequence is synthesized)
aaagactccaaatcagtcagggagaggagtggaaggagccaaaacgtccctgcgaggcctgcgctcaccagcccccttacccaaagtcccgggcccctggcgccaggagcaggctcctgg

SEQ ID NO: 90897 - DNA, 120 bp, Artificial Sequence
  ENSG00000087460_97 (sequence is synthesized)
agccggagccagctcggcactggaaccggcgtcctctggtggcagagagagagcgctactggcgattttcggaccgaatcggcacgctcgtcagatccaagcaggcgggactggcctgga

SEQ ID NO: 90898 - DNA, 120 bp, Artificial Sequence
  ENSG00000087460_98 (sequence is synthesized)
gcaaaaagaaagagagaggagggcgtaaggatagaccaaggaagaggggctggggggcagcctgggggcatgaaaagtggccaggaaggagccaagactccaccagcaacaattgagttg

SEQ ID NO: 90899 - DNA, 120 bp, Artificial Sequence
  ENSG00000087460_99 (sequence is synthesized)
cttcagcctcagtctagggttccttccaggccttgaaccccccaacctcacaagggttggaaagtgaggccggtgaactttccagctggtactttgattttaaaataataataataattt

SEQ ID NO: 90900 - DNA, 80 bp, Artificial Sequence
  ENSG00000087460_100 (sequence is synthesized)
gaaaattgggaggcaggtctgggaggcggggttgagcgcccaccgccttgggcgcgcccgcgccccccgccatcgcggcc

SEQ ID NO: 90901 - DNA, 120 bp, Artificial Sequence
  ENSG00000087460_101 (sequence is synthesized)
gcagccgcgctgtagagacaccgttgaaatgtgcggaaagtaatctgaatgggaatgggcgagaactctagagactgaccacccgggagggaagtcacgcgcgcgcggcgcctaagcagc

SEQ ID NO: 90902 - DNA, 120 bp, Artificial Sequence
  ENSG00000087460_102 (sequence is synthesized)
ccgggccagcttctcacctcatagggtgtacctttcccggctccagcagccaatgtgcttcggagccactctctgcagagccagagggcaggccggcttctcggtgtgtgcctaagagga

SEQ ID NO: 90903 - DNA, 120 bp, Artificial Sequence
  ENSG00000087460_103 (sequence is synthesized)
tggatcggaggtcccgggctcagcagtggcgccgagctcgccataattacaacgacctgtgcccgcccataggccgccgggcagccaccgcgctcctctggctctcctgctccatcgcgc

SEQ ID NO: 90904 - DNA, 120 bp, Artificial Sequence
  ENSG00000087460_104 (sequence is synthesized)
ctggaataaccagctgtcctcctccccaccagcatgtttgacgtgggtggccagcgcgatgaacgccgcaagtggatccagtgcttcaacgatgtgactgccatcatcttcgtggtggcc

SEQ ID NO: 90905 - DNA, 120 bp, Artificial Sequence
  ENSG00000087460_105 (sequence is synthesized)
agcacctatggccctccctgagaagacaggattttgctatatagacttcgcaaaccttctctctgcctgagagactgctgtgtggaaggttaaggaggaagaaagctgaaacttcagtgt

SEQ ID NO: 90906 - DNA, 120 bp, Artificial Sequence
  ENSG00000087470_0 (sequence is synthesized)
gtgggccccggccccattcattgccgtggccggcgggcactggggccccgtgttttcagagtcatggaggcgctaattcctgtcataaacaagctccaggacgtcttcaacacggtgggc

SEQ ID NO: 90907 - DNA, 120 bp, Artificial Sequence
  ENSG00000087470_1 (sequence is synthesized)
gccgacatcatccagctgcctcaaatcgtcgtagtgggaacgcagagcagcggaaagagctcagtgctagaaagcctggtggggagggacctgcttcccagaggtactggaattgtcacc

SEQ ID NO: 90908 - DNA, 120 bp, Artificial Sequence
  ENSG00000087470_2 (sequence is synthesized)
cggagacctctcattctgcaactggtccatgtttcacaagaagataaacggaaaacaacaggagaagaaaatggggtggaagcagaagaatggggtaaatttcttcacaccaaaaataag

SEQ ID NO: 90909 - DNA, 120 bp, Artificial Sequence
  ENSG00000087470_3 (sequence is synthesized)
ctttacacggattttgatgaaattcgacaagaaattgaaaatgaaacagaaagaatttcaggaaataataagggagtaagccctgaaccaattcatcttaagattttttcacccaacgtt

SEQ ID NO: 90910 - DNA, 120 bp, Artificial Sequence
  ENSG00000087470_4 (sequence is synthesized)
gtcaatttgacacttgtggatttgccaggaatgaccaaggtgcctgtaggtgatcaacctaaggatattgagcttcaaatcagagagctcattcttcggttcatcagtaatcctaattcc

SEQ ID NO: 90911 - DNA, 120 bp, Artificial Sequence
  ENSG00000087470_5 (sequence is synthesized)
attatcctcgctgtcactgctgctaatacagatatggcaacatcagaggcacttaaaatttcaagagaggtagatccagatggtcgcagaaccctagctgtaatcactaaacttgatctc

SEQ ID NO: 90912 - DNA, 120 bp, Artificial Sequence
  ENSG00000087470_6 (sequence is synthesized)
atggatgcgggtactgatgccatggatgtattgatgggaagggttattccagtcaaacttggaataattggagtagttaacaggagccagctagatattaacaacaagaagagtgtaact

SEQ ID NO: 90913 - DNA, 120 bp, Artificial Sequence
  ENSG00000087470_7 (sequence is synthesized)
gattcaatccgtgatgagtatgcttttcttcaaaagaaatatccatctctggccaatagaaatggaacaaagtatcttgctaggactctaaacaggttactgatgcatcacatcagagat

SEQ ID NO: 90914 - DNA, 120 bp, Artificial Sequence
  ENSG00000087470_8 (sequence is synthesized)
tgtttaccagagttgaaaacaagaataaatgttctagctgctcagtatcagtctcttctaaatagctacggtgaacccgtggatgataaaagtgctactttactccaacttattaccaaa

SEQ ID NO: 90915 - DNA, 120 bp, Artificial Sequence
  ENSG00000087470_9 (sequence is synthesized)
tttgccacagaatattgtaacactattgaaggaactgcaaaatatattgaaacttcggagctatgcggtggtgctagaatttgttatattttccatgagacttttgggcgaaccttagaa

SEQ ID NO: 90916 - DNA, 120 bp, Artificial Sequence
  ENSG00000087470_10 (sequence is synthesized)
tctgttgatccacttggtggccttaacactattgacattttgactgccattagaaatgctactggtcctcgtcctgctttatttgtgcctgaggtttcatttgagttactggtgaagcgg

SEQ ID NO: 90917 - DNA, 120 bp, Artificial Sequence
  ENSG00000087470_11 (sequence is synthesized)
caaatcaaacgtctagaagagcccagcctccgctgtgtggaactggttcatgaggaaatgcaaaggatcattcagcactgtagcaattacagtacacaggaattgttacgatttcctaaa

SEQ ID NO: 90918 - DNA, 120 bp, Artificial Sequence
  ENSG00000087470_12 (sequence is synthesized)
cttcatgatgccatagttgaagtggtgacttgtcttcttcgtaaaaggttgcctgttacaaatgaaatggtccataacttagtggcaattgaactggcttatatcaacacaaaacatcca

SEQ ID NO: 90919 - DNA, 120 bp, Artificial Sequence
  ENSG00000087470_13 (sequence is synthesized)
gactttgctgatgcttgtgggctaatgaacaataatatagaggaacaaaggagaaacaggctagccagagaattaccttcagctgtatcacgagacaagtcttctaaagttccaagtgct

SEQ ID NO: 90920 - DNA, 120 bp, Artificial Sequence
  ENSG00000087470_14 (sequence is synthesized)
ttggcacctgcctcccaggagccctcccccgctgcttctgctgaggctgatggcaagttaattcaggacagcagaagagaaactaaaaatgttgcatctggaggtggtggggttggagat

SEQ ID NO: 90921 - DNA, 120 bp, Artificial Sequence
  ENSG00000087470_15 (sequence is synthesized)
ggtgttcaagaaccaaccacaggcaactggagaggaatgctgaaaacttcaaaagctgaagagttattagcagaagaaaaatcaaaacccattccaattatgccagccagtccacaaaaa

SEQ ID NO: 90922 - DNA, 120 bp, Artificial Sequence
  ENSG00000087470_16 (sequence is synthesized)
ggtcatgccgtgaacctgctagatgtgccagttcctgttgcacgaaaactatctgctcgggaacagcgagattgtgaggttattgaacgactcattaaatcatattttctcattgtcaga

SEQ ID NO: 90923 - DNA, 120 bp, Artificial Sequence
  ENSG00000087470_17 (sequence is synthesized)
aagaatattcaagacagtgtgccaaaggcagtaatgcattttttggttaatcatgtgaaagacactcttcagagtgagctagtaggccagctgtataaatcatccttattggatgatctt

SEQ ID NO: 90924 - DNA, 120 bp, Artificial Sequence
  ENSG00000087470_18 (sequence is synthesized)
tcaaattattgctgaaatccgggagactcatctttggtgaagagaactatgtaatactgagactttgttgactcaaaacttgctagttactgcctacctgagtagaatcttatttatgaa

SEQ ID NO: 90925 - DNA, 120 bp, Artificial Sequence
  ENSG00000087470_19 (sequence is synthesized)
ctcctgtgtattgcaatggtatgaatctgctcatgtggagactggctataaactgaaaagtgtattccaaattgcagaacacatcacacatttaatccaaataataaatggctgtttcta

SEQ ID NO: 90926 - DNA, 120 bp, Artificial Sequence
  ENSG00000087470_20 (sequence is synthesized)
aagtttcccagtatatataaaatacatcaagtctgtcttgtgacagtttcatctgaacttaacttaaaaacaactgttaatgttctagttgtgcaaagcagtttgcctgtggataagatg

SEQ ID NO: 90927 - DNA, 120 bp, Artificial Sequence
  ENSG00000087470_21 (sequence is synthesized)
acctgtgtaataatctttgttagtagtcttaaagctgctgccatagtcctccaagaagaaagcaccaagacaacatttcatatgactataatgcatgtactatataagctgatctggctt

SEQ ID NO: 90928 - DNA, 120 bp, Artificial Sequence
  ENSG00000087470_22 (sequence is synthesized)
tgaaagatgtgagttggcaagttcctcacatagagtcattgtattccacctgtccttcaatttagttttttctgagcttctttgcagcctttgatgtgtttttaagaaagctgaatgcac

SEQ ID NO: 90929 - DNA, 120 bp, Artificial Sequence
  ENSG00000087470_23 (sequence is synthesized)
aagaggatctgtgacactgacatggctgtggtgtgcatactgtgtagttacatagcccttccaattctgggtccatttgcactagcaaattaaaatatgctttgattcatacttaaacct

SEQ ID NO: 90930 - DNA, 120 bp, Artificial Sequence
  ENSG00000087470_24 (sequence is synthesized)
gaaagcaggaatgcctacattaattcctacattaaaaacagccatctacccttgattatctagaaagacttggtaatgatggtcagttccttttagatttcagaaaatcaaatgatgacc

SEQ ID NO: 90931 - DNA, 120 bp, Artificial Sequence
  ENSG00000087470_25 (sequence is synthesized)
taaatttcccttaatttgcaaatacagtagtaattaaggtacatctctaaagtggagcacttacaccaggctctaagattcactttgaggtggaacttaaaaccagtgtactgtatgtat

SEQ ID NO: 90932 - DNA, 120 bp, Artificial Sequence
  ENSG00000087470_26 (sequence is synthesized)
gcattggtaatagctacttttgcttcatagcttcataccaacaaaatatatttattagaatagtatgaaagtactggaggagctgaaagaaaaacacccaaggctgggcgtggtggcaca

SEQ ID NO: 90933 - DNA, 120 bp, Artificial Sequence
  ENSG00000087470_27 (sequence is synthesized)
gcgaaactccgtctcaaaaaaaaaaaataaaacaacacccagatagatacacatactccttcagacttacagacctaagctgcatttatggggtagtgatgaggtttagaacatatacat

SEQ ID NO: 90934 - DNA, 120 bp, Artificial Sequence
  ENSG00000087470_28 (sequence is synthesized)
atatacatattttgttaaaattccccagatgattcttggtatgaacgactatattataaattttaagatgtacttagaaatccttaagacatctagccccgtctctaatagacaacacat

SEQ ID NO: 90935 - DNA, 120 bp, Artificial Sequence
  ENSG00000087470_29 (sequence is synthesized)
ttatattgcagatattacttttttttcagtttatgaccaggtatttatgaaggactattggcagggaaaatatgaatatgttaactttagcttatggcatcaatttactaaggaacaaca

SEQ ID NO: 90936 - DNA, 120 bp, Artificial Sequence
  ENSG00000087470_30 (sequence is synthesized)
ggctcaccaactgatgtcaaacataaaaacccccacatcagtctgatacgatatggtactactttgaatctgttactagtaccatcttgacagaggatacatgctcccaaaacgtttgtt

SEQ ID NO: 90937 - DNA, 120 bp, Artificial Sequence
  ENSG00000087470_31 (sequence is synthesized)
accacacttaaaaatcactgccatcattaagcatcagtttcaaaattatagccattcatgatttactttttccagatgactatcattattctagtcctttgaatttgtaaggggaaaaaa

SEQ ID NO: 90938 - DNA, 120 bp, Artificial Sequence
  ENSG00000087470_32 (sequence is synthesized)
aacaaaaacaaaaacttacgatgcacttttctccagcacatcagatttcaaattgaaaattaaagacatgctatggtaatgcacttgctagtactacacactttgtacaacaaaaaacag

SEQ ID NO: 90939 - DNA, 120 bp, Artificial Sequence
  ENSG00000087470_33 (sequence is synthesized)
aggcaagaaacaacggaaagagaaaagccttcctttgttggcccttaaactgagtcaagatctgaaatgtagagatgatctctgacgatacctgtatgttcttattgtgtaaataaaatt

SEQ ID NO: 90940 - DNA, 120 bp, Artificial Sequence
  ENSG00000087470_34 (sequence is synthesized)
gctggtatgaaatgacactaaagtttgtcaaaaaatgaattcttaacttttctcccagagaaagggagacaaaaggagctttttaatacctaatctactttggaacataaccgtatagag

SEQ ID NO: 90941 - DNA, 120 bp, Artificial Sequence
  ENSG00000087470_35 (sequence is synthesized)
attgacacattgtaaaatttttccttgagtcatatgtgtacatctgttacatatgttttttgcactactcagtgggattcttaatttttcttcttagctactaactttattttcgtcaga

SEQ ID NO: 90942 - DNA, 120 bp, Artificial Sequence
  ENSG00000087470_36 (sequence is synthesized)
aaactgcttttatatgtaagattttcaaaactaaagaatattccttttactgtaatataactacacaaaaaaatatgaagagaaataaacaattttatttgcaaaatctagatttcaact

SEQ ID NO: 90943 - DNA, 120 bp, Artificial Sequence
  ENSG00000087470_37 (sequence is synthesized)
gtgggaagacctgtgagcagctctgcctgaagttggtcatgtttttgaaatacaccatacaatttttaaaatataatttagcagaaaatacaattttagaaaaatataatttagcagacc

SEQ ID NO: 90944 - DNA, 120 bp, Artificial Sequence
  ENSG00000087470_38 (sequence is synthesized)
ttaaaatacttgttaacttgtacttaatggcaaaattaaatacaagttaagaagtgttttattatgttgcctttttgaattcctaaagataaaaagtagtttccatagtttccaataaat

SEQ ID NO: 90945 - DNA, 120 bp, Artificial Sequence
  ENSG00000087470_39 (sequence is synthesized)
gagtttttcttttttccaggggtggaagcagaagaatggggtaaatttcttcacaccaaaaataagctttacacggattttgatgaaattcgacaagaaattgaaaatgaaacagaaaga

SEQ ID NO: 90946 - DNA, 120 bp, Artificial Sequence
  ENSG00000087470_40 (sequence is synthesized)
ggtttcctttatccatttgcttttgaccctttttttctcttatgcctgcatgtgtgcttatgtactattacaggctgtgtgtatttttttttcttccatttttatttgcccatccacatt

SEQ ID NO: 90947 - DNA, 120 bp, Artificial Sequence
  ENSG00000087470_41 (sequence is synthesized)
gattgcaggttttagtggttcttgttattttttttggcattgcatcaaaatgcaagcttttttggtggtgaatgtaatttattttatttttatttttgaagacatgcttgtgaagccaag

SEQ ID NO: 90948 - DNA, 120 bp, Artificial Sequence
  ENSG00000087470_42 (sequence is synthesized)
aagggaaaacagtcttgaccctgggggaaaatcaccttgaaagtgtgtgtaaattacaaagcagctagctctataataatgagagagctctttaaaggaacagcaagttgtggctctaca

SEQ ID NO: 90949 - DNA, 120 bp, Artificial Sequence
  ENSG00000087470_43 (sequence is synthesized)
cccccaaccccaaatctatgaaacatctcttctttcccaaatcacggagtaagccctgaaccaattcatcttaagattttttcacccaacgttgtcaatttgacacttgtggatttgcca

SEQ ID NO: 90950 - DNA, 120 bp, Artificial Sequence
  ENSG00000087470_44 (sequence is synthesized)
gtagatttggttacctagattgctaggtcacttttccttttgtgaagatgacttcagctcagattatctgattaagatttattttctataaaacaaaaatataactttgtagagataata

SEQ ID NO: 90951 - DNA, 120 bp, Artificial Sequence
  ENSG00000087470_45 (sequence is synthesized)
atgaccaaggataccacactctacaggtttatctccagtctcactggccactccttttcagtctcttttgctgtttcttctcatctccccaatgtctaaacagtgcctgtaggtgatcaa

SEQ ID NO: 90952 - DNA, 120 bp, Artificial Sequence
  ENSG00000087470_46 (sequence is synthesized)
ctggctagcccggcgggtcccggggacaggagagggaaggatggggccggcgggcggaactggagtccgctgggaccgggcgcggcctcgtccgcgtgccgctgcctccaagggcacctg

SEQ ID NO: 90953 - DNA, 120 bp, Artificial Sequence
  ENSG00000087470_47 (sequence is synthesized)
ggggacgcgcggggcactcgggtctcgctgggctcggtgggctggctgttcccatcactgttggctttcgtgagacgggtgttttatttccctccttgccttgcccagggactgcggagt

SEQ ID NO: 90954 - DNA, 120 bp, Artificial Sequence
  ENSG00000087470_48 (sequence is synthesized)
agcactgtagcaattacagtacacaggaattgttacgatttcctaaacttcatgatgccatagttgaagtggtgacttgtcttcttcgtaaaaggttgcctgttacaaatgaaatgtgca

SEQ ID NO: 90955 - DNA, 120 bp, Artificial Sequence
  ENSG00000087470_49 (sequence is synthesized)
tcagttggaatataattatcaagtaatttaggcataagtttcctgtactttttcggtattgtctgtttcataagttttatatataaatttctcaaagtaaaatatggttgatgtattttt

SEQ ID NO: 90956 - DNA, 120 bp, Artificial Sequence
  ENSG00000087470_50 (sequence is synthesized)
ctgatggcaaggtctgttctgattcttaatctaagcctgcatgccttgttctctggtacaacataatcttctggaaacaatacactgaatagaagaatattaatatgggatactgtgcta

SEQ ID NO: 90957 - DNA, 120 bp, Artificial Sequence
  ENSG00000087470_51 (sequence is synthesized)
aggtcagatcactttagtctaatatatattttaaaattatataacaatgcaatgcatagtttatattgttgacatgcttttgcttgcaatatagaagatgcacacagaaaaagtaattta

SEQ ID NO: 90958 - DNA, 120 bp, Artificial Sequence
  ENSG00000087470_52 (sequence is synthesized)
gccttgcaaacaacttagagcagaacttctttattatttagataggtcagggttccagttatacatgctacctagtgtctccttctgacctcattatctgtctgaataaacttcagatgg

SEQ ID NO: 90959 - DNA, 120 bp, Artificial Sequence
  ENSG00000087470_53 (sequence is synthesized)
gtactggatgtatattgactactgtcaaataaaatgaactttgttttagttaaggtcagatatgatgtggttggtatgttttggaacatgttttttcaggttgcatctggaggtggtggg

SEQ ID NO: 90960 - DNA, 120 bp, Artificial Sequence
  ENSG00000087470_54 (sequence is synthesized)
tcccaatacctaaagatagattgatgagctcagaatattactcagtcctaggagtaattttttcttcttttcctccctttaacactccattggaactaactgagtaaaggcatacaagtt

SEQ ID NO: 90961 - DNA, 120 bp, Artificial Sequence
  ENSG00000087470_55 (sequence is synthesized)
gagttattagcagaagaaaaatcaaaacccattccaattatgccagccagtccacaaaaaggtcatgccgtgaacctgctagatgtggtaagccatgacaatttggtttaggtaataagg

SEQ ID NO: 90962 - DNA, 120 bp, Artificial Sequence
  ENSG00000087470_56 (sequence is synthesized)
taggtgaccaagttagtaggaaaacgattagacagaaagaactaaaagtctcaaaaacttacataactttcagatgttaaagctgccattttagtgtcacaaaagtaatattttttcccc

SEQ ID NO: 90963 - DNA, 120 bp, Artificial Sequence
  ENSG00000087494_0 (sequence is synthesized)
cctgcatctttttggaaggattctttttataaatcagaaagtgttcgaggttcaaaggtttgcctcggagcgtgtgaacattcctccgctcggttttcaactcgcctccaacctgcgccg

SEQ ID NO: 90964 - DNA, 120 bp, Artificial Sequence
  ENSG00000087494_1 (sequence is synthesized)
cccggccagcatgtctccccgcccgtgaagcggggctgccgcctccctgccgctccggctgccactaacgacccgccctcgccgccacctggccctcctgatcgacgacacacgcacttg

SEQ ID NO: 90965 - DNA, 120 bp, Artificial Sequence
  ENSG00000087494_2 (sequence is synthesized)
aaacttgttctcagggtgtgtggaatcaactttccggaagcaaccagcccaccagaggaggtcccgagcgcgagcggagacgatgcagcggagactggttcagcagtggagcgtcgcggt

SEQ ID NO: 90966 - DNA, 120 bp, Artificial Sequence
  ENSG00000087494_3 (sequence is synthesized)
gttcctgctgagctacgcggtgccctcctgcgggcgctcggtggagggtctcagccgccgcctcaaaagagctgtgtctgaacatcagctcctccatgacaaggggaagtccatccaaga

SEQ ID NO: 90967 - DNA, 120 bp, Artificial Sequence
  ENSG00000087494_4 (sequence is synthesized)
tttacggcgacgattcttccttcaccatctgatcgcagaaatccacacagctgaaatcagagctacctcggaggtgtcccctaactccaagccctctcccaacacaaagaaccaccccgt

SEQ ID NO: 90968 - DNA, 120 bp, Artificial Sequence
  ENSG00000087494_5 (sequence is synthesized)
ccgatttgggtctgatgatgagggcagatacctaactcaggaaactaacaaggtggagacgtacaaagagcagccgctcaagacacctgggaagaaaaagaaaggcaagcccgggaaacg

SEQ ID NO: 90969 - DNA, 120 bp, Artificial Sequence
  ENSG00000087494_6 (sequence is synthesized)
caaggagcaggaaaagaaaaaacggcgaactcgctctgcctggttagactctggagtgactgggagtgggctagaaggggaccacctgtctgacacctccacaacgtcgctggagctcga

SEQ ID NO: 90970 - DNA, 120 bp, Artificial Sequence
  ENSG00000087494_7 (sequence is synthesized)
tgccttggcttggacaaacctagaattttctccctttatgtatctctatcgattgtgtagcaattgacagagaataactcagaatattgtctgccttaaagcagtacccccctaccacac

SEQ ID NO: 90971 - DNA, 120 bp, Artificial Sequence
  ENSG00000087494_8 (sequence is synthesized)
acacccctgtcctccagcaccatagagaggcgctagagcccattcctctttctccaccgtcacccaacatcaatcctttaccactctaccaaataatttcatattcaagcttcagaagct

SEQ ID NO: 90972 - DNA, 120 bp, Artificial Sequence
  ENSG00000087494_9 (sequence is synthesized)
agtgaccatcttcataatttgctggagaagtgtgtttcttccccttactctcacacctgggcaaactttcttcagtgtttttcatttcttacgttctttcacttcaagggagaatataga

SEQ ID NO: 90973 - DNA, 120 bp, Artificial Sequence
  ENSG00000087494_10 (sequence is synthesized)
agcatttgatattatctacaaacactgcagaacagcatcatgtcataaacgattctgagccattcacactttttatttaattaaatgtatttaattaaatctcaaatttattttaatgta

SEQ ID NO: 90974 - DNA, 120 bp, Artificial Sequence
  ENSG00000087494_11 (sequence is synthesized)
aagaacttaaattatgttttaaacacatgccttaaatttgtttaattaaatttaactctggtttctaccagctcatacaaaataaatggtttctgaaaatgtttaagtattaacttacaa

SEQ ID NO: 90975 - DNA, 120 bp, Artificial Sequence
  ENSG00000087494_12 (sequence is synthesized)
ggatataggtttttctcatgtatctttttgttcattggcaagatgaaataatttttctagggtaatgccgtaggaaaaataaaacttcacatttatgtggcttgtttatccttagctcac

SEQ ID NO: 90976 - DNA, 120 bp, Artificial Sequence
  ENSG00000087494_13 (sequence is synthesized)
agattgaggtaataatgacactcctagactttgggatcaaataacttagggccaagtcttgggtctgaatttatttaagttcacaacctagggcaagttactctgcctttctaagactca

SEQ ID NO: 90977 - DNA, 120 bp, Artificial Sequence
  ENSG00000087494_14 (sequence is synthesized)
cttacatcttctgtgaaatataattgtaccaacctcatagagtttggtgtcaactaaatgagattatatgtggactaaatatctgtcatatagtaaacactcaataaattgcaacatatt

SEQ ID NO: 90978 - DNA, 120 bp, Artificial Sequence
  ENSG00000087494_15 (sequence is synthesized)
aagcaaccagcccaccagaggaggtagacagacagctatgtatatatatgtgggtttcgctacaagtggctctggaacgaaagggcctggttcgcaaagaagctgacttcagagggggaa

SEQ ID NO: 90979 - DNA, 120 bp, Artificial Sequence
  ENSG00000087494_16 (sequence is synthesized)
actttcttcttttaggaggcggttagccctgttccacgaacccaggagaactgctggccagattaattagacattgctatgggagacgtgtaaacacactacttatcattgatgcatata

SEQ ID NO: 90980 - DNA, 120 bp, Artificial Sequence
  ENSG00000087494_17 (sequence is synthesized)
taaaaccattttattttcgctattatttcagaggaagcgcctctgatttgtttcttttttccctttttgctctttctggctgtgtggtttggagaaagcacagttggagtagccggttgc

SEQ ID NO: 90981 - DNA, 120 bp, Artificial Sequence
  ENSG00000087494_18 (sequence is synthesized)
cgccagcccgcctgcgccctcgctcgccccgcgcgcgttcctagggcgccacctctttgcgactagctcacttctccggcaggtttgcctcggagcgtgtgaacattcctccgctcggtt

SEQ ID NO: 90982 - DNA, 120 bp, Artificial Sequence
  ENSG00000087494_19 (sequence is synthesized)
attgaaattttcagcagagaccttccaaggacatattgcaggattctgtaatagtgaacatatggaaagtattagaaatatttattgtctgtaaatactgtaaatgcattggaataaaac

SEQ ID NO: 90983 - DNA, 120 bp, Artificial Sequence
  ENSG00000087494_20 (sequence is synthesized)
tgtctcccccattgctctatgaaactgcacattggtcattgtgaatattttttttttgccaaggctaatccaattattattatcacatttaccataatttattttgtccattgatgtatt

SEQ ID NO: 90984 - DNA, 120 bp, Artificial Sequence
  ENSG00000087494_21 (sequence is synthesized)
tattttgtaaatgtatcttggtgctgctgaatttctatattttttgtaacataatgcactttagatatacatatcaagtatgttgataaatgacacaatgaagtgtctctattttgtggt

SEQ ID NO: 90985 - DNA, 120 bp, Artificial Sequence
  ENSG00000087494_22 (sequence is synthesized)
gtctctattttgtggttgattttaatgaatgcctaaatataattatccaaattgattttcctttgtgcatgtaaaaataacagtattttaaatttgtaaagaatgtctaataaaatataa

SEQ ID NO: 90986 - DNA, 120 bp, Artificial Sequence
  ENSG00000087494_23 (sequence is synthesized)
aataaacagggcagcttggaagaggtacctgctttctaataattgcctttagtgggaacagaagtctcctttcaagaagcttttaattcattttaagatttaattttatgttttctgaag

SEQ ID NO: 90987 - DNA, 120 bp, Artificial Sequence
  ENSG00000087494_24 (sequence is synthesized)
aacaacaaaaaatatttctggaaaagactgctgagaagatttccctctttcagccagaagagcagagagaagattgtaaatcaaggaaaagatttcccccttcagatctaacgattacat

SEQ ID NO: 90988 - DNA, 120 bp, Artificial Sequence
  ENSG00000087494_25 (sequence is synthesized)
cctgttacttctttagtcatttcctttgactctgctacagataggattataggatgatgcttcaaaggggaccttgaacctattcaccattatttgtctctttaagctggcaaacccatc

SEQ ID NO: 90989 - DNA, 120 bp, Artificial Sequence
  ENSG00000087494_26 (sequence is synthesized)
attaaatagcacataaaatagcaatcatatgggataagtagtacagcttcagtaatcaatgggcagtggcactagaaaaatcttgagcacagtgaatgacctatcctgcaaacatctaat

SEQ ID NO: 90990 - DNA, 120 bp, Artificial Sequence
  ENSG00000087494_27 (sequence is synthesized)
acccgccctcgccgccacctggccctcctgatcgacgacacacgcacttgaaacttgttctcagggtgtgtggaatcaactttccggaagcaaccagcccaccagaggaggtagacagac

SEQ ID NO: 90991 - DNA, 87 bp, Artificial Sequence
  ENSG00000087495_0 (sequence is synthesized)
cttttttcccgcccccagacattccaggacatcaccccctgccccaagcacgcaataaacactgacaagaaaaagtttttatttcct

SEQ ID NO: 90992 - DNA, 120 bp, Artificial Sequence
  ENSG00000087495_1 (sequence is synthesized)
gcacgcaataaacactgacaagaaaaagtttttatttcctggttcaacttttttttttttccctggaatatagactgaagaatgggaataaacacgaataaataacaaagcgaggccgcg

SEQ ID NO: 90993 - DNA, 120 bp, Artificial Sequence
  ENSG00000087495_2 (sequence is synthesized)
cacgccgggatgcgcctggctgcagccggcgaggctattgtctccccgccctgaagccagccccggcgtctttctccagctcgtttcctttcccggcctttttttttttttttttttttt

SEQ ID NO: 90994 - DNA, 120 bp, Artificial Sequence
  ENSG00000087495_3 (sequence is synthesized)
aattttcttttttaaaaagacgccccctccagccccctcgccggtgaccttggccgcctcggatgctctgattccacgcggctcgctctaacttgcccccgcgccggccgggcccatggc

SEQ ID NO: 90995 - DNA, 120 bp, Artificial Sequence
  ENSG00000087495_4 (sequence is synthesized)
cgcgtcggaggacgggagcggctgcctcgtgtcgcggggccgctcgcagagtgaccccagcgtcctcaccgactcctcggccacctcctccgcggacgccggggagaacccagatgagat

SEQ ID NO: 90996 - DNA, 120 bp, Artificial Sequence
  ENSG00000087495_5 (sequence is synthesized)
ggaccaaacgcccccggcgcgtcctgaatatctggtctcagggattcgaactccccctgtgaggaggaacagcaaactggccaccctgggcaggatcttcaaaccctggaaatggaggaa

SEQ ID NO: 90997 - DNA, 120 bp, Artificial Sequence
  ENSG00000087495_6 (sequence is synthesized)
aaagaaaaacgaaaaactgaagcagacaacgtcagcgctggagaagaagatggccggcaggcaaggccgagaggagctcatcaagaaggggctgctggagatgatggagcaggatgctga

SEQ ID NO: 90998 - DNA, 120 bp, Artificial Sequence
  ENSG00000087495_7 (sequence is synthesized)
aagcaaaacttgcaaccccgatggaggaccccgatctgtacagagtgaaccacccactcccaagtcggagacgctgacttcagaagatgcccagcccggaagccccttggccactgggac

SEQ ID NO: 90999 - DNA, 120 bp, Artificial Sequence
  ENSG00000087495_8 (sequence is synthesized)
ggaccaggtctccctggacaagccactgtcctcagctgcccacttggacgatgcagccaagatgccttctgcatccagtggtgaagaagcagacgctggcagcctcctgcccaccaccaa

SEQ ID NO: 91000 - DNA, 120 bp, Artificial Sequence
  ENSG00000087495_9 (sequence is synthesized)
tgagctctcccaagccttagctggggctgactccctggacagtcctcccagacctctggagagatccgtgggccagctccccagccccccactgctgcccactccgccacccaaggcaag

SEQ ID NO: 91001 - DNA, 120 bp, Artificial Sequence
  ENSG00000087495_10 (sequence is synthesized)
ctccaaaaccacaaaaaatgtcacaggccaagccacactcttccaagcctccagcatgaagagtgccgacccttccctccggggccagctctccacacccacggggtctccgcatctcac

SEQ ID NO: 91002 - DNA, 120 bp, Artificial Sequence
  ENSG00000087495_11 (sequence is synthesized)
aagtaaagggtctccaaagaagcggctggatgtccgtctgtcgagaacgtccagcgtggagcggggcaaggagagggaggaggcttggagctttgacggggcattggagaacaagcgaac

SEQ ID NO: 91003 - DNA, 120 bp, Artificial Sequence
  ENSG00000087495_12 (sequence is synthesized)
tgccgctaaggaatctgaggagaacaaggagaacctgatcataaattctgaactcaaagacgacttgcttttgtatcaggacgaggaggcgctgaacgactccattatttctggaacact

SEQ ID NO: 91004 - DNA, 120 bp, Artificial Sequence
  ENSG00000087495_13 (sequence is synthesized)
gccacggaaatgcaagaaggagctcctggccgtgaagctaaggaaccggccaagcaaacaggaactagaagaccggaacattttccccagaaggactgatgaagaaagacaggagatccg

SEQ ID NO: 91005 - DNA, 120 bp, Artificial Sequence
  ENSG00000087495_14 (sequence is synthesized)
gcagcagatcgagatgaagctttccaaacggctgagccaaagacctgccgtggaagagctggagagaagaaatatcttgaaacaaaggaatgatcagacagagcaggaagaaagaagaga

SEQ ID NO: 91006 - DNA, 120 bp, Artificial Sequence
  ENSG00000087495_15 (sequence is synthesized)
aatcaagcaaagattgacaagaaagcttaatcagagacccactgttgatgaattaagagacagaaaaattctgatacgattcagtgattacgtggaagtagcaaaagcgcaggactatga

SEQ ID NO: 91007 - DNA, 120 bp, Artificial Sequence
  ENSG00000087495_16 (sequence is synthesized)
caggagggcagacaaaccctggacgagactgtcagcagcagataaggcagcaattcgtaaagaattaaatgagtacaaaagtaatgaaatggaggtacatgcatcaagcaagcacttgac

SEQ ID NO: 91008 - DNA, 120 bp, Artificial Sequence
  ENSG00000087495_17 (sequence is synthesized)
aagattccacaggccatagagattttcttctgagaagaatttgtgtttaattttttgataccaacactgaacattcatcagggaactttcctgaagttcagctcaagactaccctacctg

SEQ ID NO: 91009 - DNA, 120 bp, Artificial Sequence
  ENSG00000087495_18 (sequence is synthesized)
ctgtgtttgtgagaagagtaggatcacacacacaggtgcaatcttgaccacacttacctgcaagaggagtaaccagaggacacacttccttccttctttggtgtctgaggagtgtgaact

SEQ ID NO: 91010 - DNA, 120 bp, Artificial Sequence
  ENSG00000087495_19 (sequence is synthesized)
gttggggtcagttaagacccaacataactctatcagaagaaaactgttgtttgcctttcaaccttgttttacagttctgcagtgtaatggaggacgggcaacgtgcatgtgcaggctcac

SEQ ID NO: 91011 - DNA, 120 bp, Artificial Sequence
  ENSG00000087495_20 (sequence is synthesized)
cactcccaggcctctgacatgagggacatgtgacagtgtcattcagtattatgttcaaaagacatttttatcctgatcataattaatttgaaaactctttaagttcatgttatacaagat

SEQ ID NO: 91012 - DNA, 120 bp, Artificial Sequence
  ENSG00000087495_21 (sequence is synthesized)
gatttactgtattatacttttccttttttatataatgtctaacaaaaaatacagctgcaacattttgattcctgttaattttgttctttaattaaatgactacttattgcaggaaattaa

SEQ ID NO: 91013 - DNA, 120 bp, Artificial Sequence
  ENSG00000087495_22 (sequence is synthesized)
cattcaaacccagtccattctggctcatggggcccaagccttgctctgctgccccaggctgtgtaggatgcatctgcggtggccattcttctctccagaggtccttcctaggactgactt

SEQ ID NO: 91014 - DNA, 120 bp, Artificial Sequence
  ENSG00000087495_23 (sequence is synthesized)
aaaaacacaaagaaacaaaaagtacgggagaggatcagttcattctcctgactcctggttggtctcaagacctcccctgttgcctgtgctctggaagattccccatagtacctactaggt

SEQ ID NO: 91015 - DNA, 120 bp, Artificial Sequence
  ENSG00000087495_24 (sequence is synthesized)
ttatactaccagcataatattggtataaaagacacatagaccaatggaaaagaatagaaaacccagaaaaaattcacttatttacagccaactgatttttgacaaaggtgccaagaacat

SEQ ID NO: 91016 - DNA, 120 bp, Artificial Sequence
  ENSG00000087495_25 (sequence is synthesized)
tgctgggaaaattggatatccatatggcaaaagaatgaaactgtacccctatttcttactatatacaaaaatcaacttgaagaataaagacttaaatgtaagaccccaaactataaaacc

SEQ ID NO: 91017 - DNA, 120 bp, Artificial Sequence
  ENSG00000087495_26 (sequence is synthesized)
gacttaaatgtaagaccccaaactataaaaccactaaaagaaaacacagaagaaacagtccaggacattggtctaggcaaacattttatggctaagacctcaaaagcacagatagcaacc

SEQ ID NO: 91018 - DNA, 120 bp, Artificial Sequence
  ENSG00000087495_27 (sequence is synthesized)
aaaataaacaaatgagactatattaaactacaaagcttctacacaacaaatcaacagagtaaagagacaacagggaatatgagaaaatattaatatctgcaaactattcatccaaaaagg

SEQ ID NO: 91019 - DNA, 120 bp, Artificial Sequence
  ENSG00000087495_28 (sequence is synthesized)
gactaatatccagaatatacaaggaactcaacagtcaaaaaacaaaacaaataatcccattagaaagtagacaaaagacatgagtagacatttctcaaaagatgacatacaaatcgccaa

SEQ ID NO: 91020 - DNA, 120 bp, Artificial Sequence
  ENSG00000087495_29 (sequence is synthesized)
caggtatatggaaaaaatgctcaacatcattaatcaacagggaaatgcaaatcaaaaccacgatgagatatcatcttattccagttagaatagttattaaaaaaataaaaacatgctgga

SEQ ID NO: 91021 - DNA, 120 bp, Artificial Sequence
  ENSG00000087495_30 (sequence is synthesized)
aaggattaggagaaaagtgaacttttatatactgttgatgggaatgtaaattaatgcagccattatggaaaacagtatggagactcctcaaaatattgtttaaaaactatatgatccaga

SEQ ID NO: 91022 - DNA, 120 bp, Artificial Sequence
  ENSG00000087495_31 (sequence is synthesized)
aatgccacttctaggtatacacgcaaaggaaatcaaatcagtacattgaagagatatctgtactcccctgttcactgcagcattattaacaatagccaagatacaaaatcatccaagtgt

SEQ ID NO: 91023 - DNA, 120 bp, Artificial Sequence
  ENSG00000087495_32 (sequence is synthesized)
ccatcaatagattaatggataaagaaaatgtagtgcgtgtatatatgtatatgtgaatacagtgtgtatacacagccacacaaaatggaatattccaccttaagaaaatccagtcatttt

SEQ ID NO: 91024 - DNA, 120 bp, Artificial Sequence
  ENSG00000087495_33 (sequence is synthesized)
tgacaacatgtatggaactggatgttattatgttaaataagccaggcacagaaaaacaaatatcgcatgttctcactcatgtgggatcaaaaaagttgatgtcatggaggtagacagtag

SEQ ID NO: 91025 - DNA, 120 bp, Artificial Sequence
  ENSG00000087495_34 (sequence is synthesized)
ataccaaaggctgggaagggtggcagggtttggggagagaaagagaggttggttaaccagtagtaacatacaattagaaggaataagttctaatgttctatagcagagtagggtcactac

SEQ ID NO: 91026 - DNA, 120 bp, Artificial Sequence
  ENSG00000087495_35 (sequence is synthesized)
agttaacaactatgttgtgtatatttcaaaacagctagaagagaggacttaaaatgttcccaacacatagaaatgataaatactggaggtagacatcctaaatacttgatcatcacacag

SEQ ID NO: 91027 - DNA, 120 bp, Artificial Sequence
  ENSG00000087495_36 (sequence is synthesized)
tctatgcatataacaaaatatcacatgtaccctgtatatatgtacaaatattatgtatcaataaaatttttacaaagacttccagaatattagctacatactagcttggtaggactataa

SEQ ID NO: 91028 - DNA, 120 bp, Artificial Sequence
  ENSG00000087495_37 (sequence is synthesized)
taatgagtatggcagttttaatgatgaaccaaaaaattgtttgtttttttctgtatattacataatagagtcaacaaggattaggaatggttaatttataaacacgatgctaatttcctg

SEQ ID NO: 91029 - DNA, 120 bp, Artificial Sequence
  ENSG00000087495_38 (sequence is synthesized)
cacactgccagcgctcacactgcactcccaggccctgctgtaggtgctaatctgatgggggcagccttagggagggctctgtccccagcaggaggacccttggtgtctctgtggtccttg

SEQ ID NO: 91030 - DNA, 120 bp, Artificial Sequence
  ENSG00000087495_39 (sequence is synthesized)
aatcctggtgtctgttgaaatgcctcctcctctgggcaccttccaggaccaggccaggtgacaccaccattccacccccgtctctacccctttcctggactttcttccttccctgccctg

SEQ ID NO: 91031 - DNA, 120 bp, Artificial Sequence
  ENSG00000087495_40 (sequence is synthesized)
ctggaagagattcccagtttttattcagcgctcgagctgggctgcatgcttgctgacaagaggcgggaggccccttagacgtctttagacactccccctgtgctgggctgggcacaggcg

SEQ ID NO: 91032 - DNA, 120 bp, Artificial Sequence
  ENSG00000087495_41 (sequence is synthesized)
gctctactcagcagttcagcaggcagaaagccggaaggagagatcagtgctcccaaggctggtgtctcccgtgctgacaacggaggcagtgctgggaagcatgaatctcccagcatctct

SEQ ID NO: 91033 - DNA, 120 bp, Artificial Sequence
  ENSG00000087495_42 (sequence is synthesized)
ggatccagaagcctgaaaacaggtggtgctacccacccctccctaagccaatgggcaggaaaaagaatttcctgaacagatctcctcgctgcttaaacacactgctccggtgaacagtcc

SEQ ID NO: 91034 - DNA, 120 bp, Artificial Sequence
  ENSG00000087495_43 (sequence is synthesized)
agaccaggcaaggtttgggcgacagatcagaaaaatgaagacctgcacatgtggagctggagcaaggactagtctagtattagctctgtgacgggagagctttgactgtcacctggaagt

SEQ ID NO: 91035 - DNA, 120 bp, Artificial Sequence
  ENSG00000087495_44 (sequence is synthesized)
ctgacttgattttgccagcaagaggcaacaaccaaaggttcactttctctccttccaattttgggaggcgatctataggggtttgccagccacctctcatccttgcagaccccaggtgga

SEQ ID NO: 91036 - DNA, 120 bp, Artificial Sequence
  ENSG00000087502_0 (sequence is synthesized)
agccccggcgacccgggcttctgtgaaacatggcggtaggctgggaccataacacaagcatgactatatgaaggaagaggaaggttttcctgaagatgaggcgactgaatcggaaaaaaa

SEQ ID NO: 91037 - DNA, 120 bp, Artificial Sequence
  ENSG00000087502_1 (sequence is synthesized)
ctttaagtttggtaaaagagttggatgcctttccgaaggttcctgagagctatgtagagacttcagccagtggaggtacagtttctctaatagcatttacaactatggctttattaacca

SEQ ID NO: 91038 - DNA, 120 bp, Artificial Sequence
  ENSG00000087502_2 (sequence is synthesized)
taatggaattctcagtatatcaagatacatggatgaagtatgaatacgaagtagacaaggatttttctagcaaattaagaattaatatagatattactgttgccatgaagtgtcaatatg

SEQ ID NO: 91039 - DNA, 120 bp, Artificial Sequence
  ENSG00000087502_3 (sequence is synthesized)
ttggagcggatgtattggatttagcagaaacaatggttgcatctgcagatggtttagtttatgaaccaacagtatttgatctttcaccacagcagaaagagtggcagaggatgctgcagc

SEQ ID NO: 91040 - DNA, 120 bp, Artificial Sequence
  ENSG00000087502_4 (sequence is synthesized)
tgattcagagtaggctacaagaagagcattcacttcaagatgtgatatttaaaagtgcttttaaaagtacatcaacagctcttccaccaagagaagatgattcatcacagtctccaaatg

SEQ ID NO: 91041 - DNA, 120 bp, Artificial Sequence
  ENSG00000087502_5 (sequence is synthesized)
catgcagaattcatggccatctatatgtcaataaagtagcagggaattttcacataacagtgggcaaggcaattccacatcctcgtggtcatgcacatttggcagcacttgtcaaccatg

SEQ ID NO: 91042 - DNA, 120 bp, Artificial Sequence
  ENSG00000087502_6 (sequence is synthesized)
aatcttacaatttttctcatagaatagatcatttgtcttttggagagcttgttccagcaattattaatcctttagatggaactgaaaaaattgctatagatcacaaccagatgttccaat

SEQ ID NO: 91043 - DNA, 120 bp, Artificial Sequence
  ENSG00000087502_7 (sequence is synthesized)
attttattacagttgtgccaacaaaactacatacatataaaatatcagcagacacccatcagttttctgtgacagaaagggaacgtatcattaaccatgctgcaggcagccatggagtct

SEQ ID NO: 91044 - DNA, 120 bp, Artificial Sequence
  ENSG00000087502_8 (sequence is synthesized)
ctgggatatttatgaaatatgatctcagttctcttatggtgacagttactgaggagcacatgccattctggcagttttttgtaagactctgtggtattgttggaggaatcttttcaacaa

SEQ ID NO: 91045 - DNA, 120 bp, Artificial Sequence
  ENSG00000087502_9 (sequence is synthesized)
caggcatgttacatggaattggaaaatttatagttgaaataatttgctgtcgtttcagacttggatcctataaacctgtcaattctgttccttttgaggatggccacacagacaaccact

SEQ ID NO: 91046 - DNA, 120 bp, Artificial Sequence
  ENSG00000087502_10 (sequence is synthesized)
tacctcttttagaaaataatacacattaacacctcccgattgaaggagaaaaactttttgcctgagacataaaacctttttttaataataaaatattgtgcaatatattcaaagaaaaga

SEQ ID NO: 91047 - DNA, 120 bp, Artificial Sequence
  ENSG00000087502_11 (sequence is synthesized)
aaacacaaataagcagaaaacatacttattttaaaaaagaaaaaaaaggataaaaaaacccaaactgaaattctatatacgttgtgtctgttacaaatgtcgtagaagaaatcatgcagc

SEQ ID NO: 91048 - DNA, 120 bp, Artificial Sequence
  ENSG00000087502_12 (sequence is synthesized)
taaacgatgaagaagcccaactggagtgttgctttgaagatgacgccttcttatattttcatagcaaatgggtggtatcaaaatcagacattgcttcttgctgataaaaagcctgaagga

SEQ ID NO: 91049 - DNA, 120 bp, Artificial Sequence
  ENSG00000087502_13 (sequence is synthesized)
aataagtgaaactacatctatgggaaaaaaaaaaacattgagaagtgcaaatgttcgcatccttttgtttttaaaagatatgatgtcagaataaaatgtggaaaacatacggaaaactag

SEQ ID NO: 91050 - DNA, 120 bp, Artificial Sequence
  ENSG00000087502_14 (sequence is synthesized)
tctagactttaaagaattgtgatcaggtcacattgttaataaaaaaaaaaaacgggctagtccctatgttatagccatattaatgttaagccatattgacaagaccagttatccaataat

SEQ ID NO: 91051 - DNA, 120 bp, Artificial Sequence
  ENSG00000087502_15 (sequence is synthesized)
ttggtcttaaaaagtaactacttttctttgaactctggttattgacttatctaactgttgaagatagagtcttagaagactaaggtaaattctcacaggggcagatatgtaggtgttatg

SEQ ID NO: 91052 - DNA, 120 bp, Artificial Sequence
  ENSG00000087502_16 (sequence is synthesized)
taactagggtgtcattcacaaatggtatagtagaatcttatacacggaaaagaaagcacatttttttaaaaaagatgccaagttttttaatctaatcattatattattggtgtattttgg

SEQ ID NO: 91053 - DNA, 120 bp, Artificial Sequence
  ENSG00000087502_17 (sequence is synthesized)
gcaacatagggtgagttataaaaagatccgctactgatagtgaaaattaccggtttgtaaaacattaagagaaaaaataggatattttatacatgtggtgagtggagaacagggtaactt

SEQ ID NO: 91054 - DNA, 120 bp, Artificial Sequence
  ENSG00000087502_18 (sequence is synthesized)
taaatgaaagtgtaaggcaaattgtaagcaccacaagatatatcagatttgagaggtgccatgttaaacattgtccattaaactataaaactgtattatgaagtatttgcattcagggtg

SEQ ID NO: 91055 - DNA, 120 bp, Artificial Sequence
  ENSG00000087502_19 (sequence is synthesized)
tcctgaatatgattgattctgtattagattgtgttctaactttcttactatttaaggattggttctaaatcttcacattataaaagattaaaaacagtgagagggagctatcacacaggt

SEQ ID NO: 91056 - DNA, 120 bp, Artificial Sequence
  ENSG00000087502_20 (sequence is synthesized)
aatggggaaacaaaattccaggtaaataacaagactgaaaaactagatttaaaatagtggttttagaaaacaggatatcacaagtaacagtttttcaaatggatttttttaaagataaat

SEQ ID NO: 91057 - DNA, 120 bp, Artificial Sequence
  ENSG00000087502_21 (sequence is synthesized)
ttatgaaaacaggataaacaatataatggagagaaggagaaatagtgatgggtctgttttgcagtaaagtttatgcagaatgacgttttgcagaaaataacagaagcatcactttaaaaa

SEQ ID NO: 91058 - DNA, 120 bp, Artificial Sequence
  ENSG00000087502_22 (sequence is synthesized)
atatatcattaagagccatgacgttaactgatgaaaataagtgatataacatactttgaaagatttttaaacagaaaattctgaatcgtgaatgagccttctctaggttttaattttttt

SEQ ID NO: 91059 - DNA, 120 bp, Artificial Sequence
  ENSG00000087502_23 (sequence is synthesized)
tcttcaaattatttccaacaaagtttggctataaactaacaccatctatccacaggaattttaataggaaaggattagaattgtagactgattgttggtcctttaagtatgcttggaaga

SEQ ID NO: 91060 - DNA, 120 bp, Artificial Sequence
  ENSG00000087502_24 (sequence is synthesized)
aaattcaatcgagtttcaaggctttttctaaatgggagggagaacaatattgatttaggattattttctttcatttaggattagaacagttaagtgcctttaaaaaggactttaaaaatt

SEQ ID NO: 91061 - DNA, 120 bp, Artificial Sequence
  ENSG00000087502_25 (sequence is synthesized)
attttgatacttatatatgatttttaattgttttcgtattttccaaataccatattaaaattttaatgaaatttatctcctatgaaaggaatttctttaaagcaaaattctgctttgcct

SEQ ID NO: 91062 - DNA, 120 bp, Artificial Sequence
  ENSG00000087502_26 (sequence is synthesized)
ttgatttccattttaaaagttaaaggcttccatctgaaactcctcaaatagagtcagatttttggcaatggaagtattaaaattccgatcagccctttggacgatgaagtttacctgcat

SEQ ID NO: 91063 - DNA, 120 bp, Artificial Sequence
  ENSG00000087502_27 (sequence is synthesized)
attaggatttgttaggagtttttggcctcaccaagtgattcttttctattgcagagagcactttactcacctacctgttatgcaactttccctatgcctggaggtgcctccagccaggat

SEQ ID NO: 91064 - DNA, 120 bp, Artificial Sequence
  ENSG00000087502_28 (sequence is synthesized)
accctactttgttacccaattctcctttttgttttacaagagtattcataatatctatatgtttatattccagactacatatttaaaaatgagatctcaaattatatgaaatggattttt

SEQ ID NO: 91065 - DNA, 120 bp, Artificial Sequence
  ENSG00000087502_29 (sequence is synthesized)
aaatactgtgtttgcatacattgacctataaagaagattaaatatttaggtgaataattccctgctgcagtatttgtacacttcagactacctcttaggaaaagcttaacttagtattgc

SEQ ID NO: 91066 - DNA, 88 bp, Artificial Sequence
  ENSG00000087502_30 (sequence is synthesized)
cttcagactacctcttaggaaaagcttaacttagtattgcaaaattccctttctctttttttttttaagagatggggtctcgcatgta

SEQ ID NO: 91067 - DNA, 120 bp, Artificial Sequence
  ENSG00000087502_31 (sequence is synthesized)
ctgcttccatctgctgagtaggtaggactacagccatgcaccaacaaacctggctaattctttttcatttatatagttagtatcttgctgtgttgttcaagctggactccaactcccgga

SEQ ID NO: 91068 - DNA, 120 bp, Artificial Sequence
  ENSG00000087502_32 (sequence is synthesized)
ctcaagtaatcctcccaccttagtctcctgcattgctggaattataggcacgagccactgcacctggcacccaaattacttctagttctcaagttagatgattaatatcacacttttctc

SEQ ID NO: 91069 - DNA, 120 bp, Artificial Sequence
  ENSG00000087502_33 (sequence is synthesized)
atgtatgttttatgatagcattgaatttttataattaaaaatttactaatgcaaacaagatttacagtctttaatacaatcttaattttggaattcatgaaggaatgactaagttctaat

SEQ ID NO: 91070 - DNA, 120 bp, Artificial Sequence
  ENSG00000087502_34 (sequence is synthesized)
gggattacaggcatgagccactgcccctggacagatctaattttttaatagtgtaagagagatacactgtgcattccatctatgtcctgagttagtaattcaagtaccaaaaagtaattt

SEQ ID NO: 91071 - DNA, 120 bp, Artificial Sequence
  ENSG00000087502_35 (sequence is synthesized)
tagtaattcaagtaccaaaaagtaatttaatatgaaactccttgaaaattcagagcttacacttgaattcaaaatgcctatttttgattgtttaaaagttacttaaacctgagctttagg

SEQ ID NO: 91072 - DNA, 120 bp, Artificial Sequence
  ENSG00000087502_36 (sequence is synthesized)
acctttaaaatctcagcatgccttttaagctagtacttttcctgttttgagctctagcaaaccttcagcaagccaaggtggtagccctttttcaacacaatcaaaatagagaggtcacca

SEQ ID NO: 91073 - DNA, 120 bp, Artificial Sequence
  ENSG00000087502_37 (sequence is synthesized)
gttgtttactaccttatggtaaaatgcccggatcaagatccatgtatcccccccatattgtgatgatgcaatcaaagcatagtttttttctactttctgaaatattactgatgaaatcac

SEQ ID NO: 91074 - DNA, 120 bp, Artificial Sequence
  ENSG00000087502_38 (sequence is synthesized)
tttacatttaagaggagaaaacagactgccttggattttttttttgtcttgagagaaaaaacaaaatatttagtattgcaagcataaacatttggactcaataaatgacaaattatgaaa

SEQ ID NO: 91075 - DNA, 120 bp, Artificial Sequence
  ENSG00000087502_39 (sequence is synthesized)
gtgaaacatggcggtaggctgggaccataacacaaggtaaaatactgaaacaccgctgggtgctgttccctcggttgttccagggctgtttagggcgtaaatgcaattgagggaactggg

SEQ ID NO: 91076 - DNA, 120 bp, Artificial Sequence
  ENSG00000087502_40 (sequence is synthesized)
agcctgtcatgggcttggcttcctgtcttcattgatctctagagagccggtcggacggagaagccgctccacctcccacgggggcgttactggcaggaccctaggcaacgatgctactgg

SEQ ID NO: 91077 - DNA, 120 bp, Artificial Sequence
  ENSG00000087502_41 (sequence is synthesized)
gagcttccctttgccaggtccgggtgcttgtgtgctatcctgcaactcgaaggagttcaggtgcttcctcgatcgcacctgattctgaccctttgcttgtcacagtgcccggttcccagg

SEQ ID NO: 91078 - DNA, 120 bp, Artificial Sequence
  ENSG00000087502_42 (sequence is synthesized)
tggtttctccagtccgcaggcgagtaggatcccaatcggtcgagtcccagtcctcccggatgtcagactccctacccccattcagacaaatgccacattcgtggcagcacgttgccctct

SEQ ID NO: 91079 - DNA, 120 bp, Artificial Sequence
  ENSG00000087502_43 (sequence is synthesized)
gtctctttaagagtcttggccttgcccggaaggagtttcgcacagtgcttcggaaaatgagaagggggcgggggagggcgagatgctgagagacagcatgactatatgaaggaagaggaa

SEQ ID NO: 91080 - DNA, 120 bp, Artificial Sequence
  ENSG00000087502_44 (sequence is synthesized)
gtacgcgggagccccggcgacccgggcttctgtgaaacatggcggtaggctgggaccataacacaagagtttcaggccaggtgtggtggttcacatctataatcccagcactttttttga

SEQ ID NO: 91081 - DNA, 120 bp, Artificial Sequence
  ENSG00000087502_45 (sequence is synthesized)
atttccgggtacgcgggagccccggcgacccgggcttctgtgaaacatggcggtaggctgggaccataacacaaggttattgtcataggataaattcctcaatgggcatttacttagaag

SEQ ID NO: 91082 - DNA, 120 bp, Artificial Sequence
  ENSG00000087510_0 (sequence is synthesized)
aggacacactgttcgggcgcggctttccccgtccgcggagcggtcttgacactcgcggcggcagcatctacgctcgcagagccgccgatgcgtgtccagtgacccggacagcaaggcccg

SEQ ID NO: 91083 - DNA, 120 bp, Artificial Sequence
  ENSG00000087510_1 (sequence is synthesized)
cgcgcggcgggggcggcggcagacgcctggtcaccgtgaccccgattttggatttaccgcttgggggctggggggatcctggatttaactggcgactgttttgggggacgccggacgcca

SEQ ID NO: 91084 - DNA, 120 bp, Artificial Sequence
  ENSG00000087510_2 (sequence is synthesized)
tgttgtggaaaataaccgataatgtcaagtacgaagaggactgcgaggatcgccacgacgggagcagcaatgggaatccgcgggtcccccacctctcctccgccgggcagcacctctaca

SEQ ID NO: 91085 - DNA, 120 bp, Artificial Sequence
  ENSG00000087510_3 (sequence is synthesized)
gccccgcgccacccctctcccacactggagtcgccgaatatcagccgccaccctactttccccctccctaccagcagctggcctactcccagtcggccgacccctactcgcatctggggg

SEQ ID NO: 91086 - DNA, 120 bp, Artificial Sequence
  ENSG00000087510_4 (sequence is synthesized)
cgcatctgggggaagcgtacgccgccgccatcaaccccctgcaccagccggcgcccacaggcagccagcagcaggcctggcccggccgccagagccaggagggagcggggctgccctcgc

SEQ ID NO: 91087 - DNA, 120 bp, Artificial Sequence
  ENSG00000087510_5 (sequence is synthesized)
cggcctactgccccacctctccgggctggaggcgggcgcggtgagcgcccgcagggatgcctaccgccgctccgacctgctgctgccccacgcacacgccctggatgccgcgggcctggc

SEQ ID NO: 91088 - DNA, 120 bp, Artificial Sequence
  ENSG00000087510_6 (sequence is synthesized)
tggccgagaacctggggctccacgacatgcctcaccagatggacgaggtgcagaatgtcgacgaccagcacctgttgctgcacgatcagacagtcattcgcaaaggtcccatttccatga

SEQ ID NO: 91089 - DNA, 120 bp, Artificial Sequence
  ENSG00000087510_7 (sequence is synthesized)
ccaagaaccctctgaacctcccctgtcagaaggagctggtgggggccgtaatgaaccccactgaggtcttctgctcagtccctggaagattgtcgctcctcagctctacgtctaaataca

SEQ ID NO: 91090 - DNA, 120 bp, Artificial Sequence
  ENSG00000087510_8 (sequence is synthesized)
aagtgacagtggctgaagtacagaggcgactgtccccacctgaatgcttaaatgcctcgttactgggaggtgttctcagaagagccaaatcgaaaaatggaggccggtccttgcgggaga

SEQ ID NO: 91091 - DNA, 120 bp, Artificial Sequence
  ENSG00000087510_9 (sequence is synthesized)
agttggacaagattgggttgaatcttccggccgggaggcggaaagccgctcatgtgactctcctgacatccttagtagaaggtgaagctgttcatttggctagggactttgcctatgtct

SEQ ID NO: 91092 - DNA, 120 bp, Artificial Sequence
  ENSG00000087510_10 (sequence is synthesized)
gtgaagccgaatttcctagtaaaccagtggcagaatatttaaccagacctcatcttggaggacgaaatgagatggcagctaggaagaacatgctattggcggcccagcaactgtgtaaag

SEQ ID NO: 91093 - DNA, 120 bp, Artificial Sequence
  ENSG00000087510_11 (sequence is synthesized)
tgattacccacgggtttggcagccaggccatctgtgccgcggtgtctgccctgcagaactacatcaaagaagccctgattgtcatagacaaatcctacatgaaccctggagaccagagtc

SEQ ID NO: 91094 - DNA, 120 bp, Artificial Sequence
  ENSG00000087510_12 (sequence is synthesized)
cagctgattctaacaaaaccctggagaaaatggagaaacacaggaaataaaattggaacgaagaaaggttaggagagtagggaaggaacaggactgcaaaaatccttctccaccgcacag

SEQ ID NO: 91095 - DNA, 120 bp, Artificial Sequence
  ENSG00000087510_13 (sequence is synthesized)
actgggaacccctcctggcctgggggaagagtttgttacctaccttactatttaaagagccttcactggttctgcatcacccgcccctggacttcttagttgtttctctagcgctgagct

SEQ ID NO: 91096 - DNA, 120 bp, Artificial Sequence
  ENSG00000087510_14 (sequence is synthesized)
atctcctaactttggacctattatcagaaggtgacaagtactggctctttattcattaagctttttttttttgaaccccattctttccttctctgaaagtggtgctataagttttagaat

SEQ ID NO: 91097 - DNA, 120 bp, Artificial Sequence
  ENSG00000087510_15 (sequence is synthesized)
cttttaaatacattccctgggccaacagacccacacacttagccattgaaatgtcaaattgatgtgccctagatcaacagatcaacaataccttttttttcagtgttaaggtaatggttg

SEQ ID NO: 91098 - DNA, 120 bp, Artificial Sequence
  ENSG00000087510_16 (sequence is synthesized)
gtttttgtgtccgctaaatatttaccttgaaaaaaagaaaagtgtgtatctagcttcttcagagatcaagtcctctggtaggaggcaaaggttctatctgcttagcaactagttaataag

SEQ ID NO: 91099 - DNA, 120 bp, Artificial Sequence
  ENSG00000087510_17 (sequence is synthesized)
ctagttaataagtggtatctgacacactctaaaccccgtgttcaaacgggggccttctggttttaggaaacttgtagaaacgaagcctgctgattgatttttttctcctttttttttttt

SEQ ID NO: 91100 - DNA, 120 bp, Artificial Sequence
  ENSG00000087510_18 (sequence is synthesized)
tttgaaagttaactcttcaaatgggagactctttgaaatgacatgttcctttaaggtactgaagctttatttgcatatttatttcagatgtttcgagtaaacttgaaaagggtaggcacg

SEQ ID NO: 91101 - DNA, 120 bp, Artificial Sequence
  ENSG00000087510_19 (sequence is synthesized)
aagcaatttgttgctgcttgtcacccccaagtccccgtggaggttctgtattttaagaaacagtgcgttgagtgtacagattttatttatgcgtaatttaatggggtctgtaaatactgg

SEQ ID NO: 91102 - DNA, 120 bp, Artificial Sequence
  ENSG00000087510_20 (sequence is synthesized)
tgcacttcttacgacttttttgagacatgggatccaattttaatattaacttttaatggtgatggggtaatctataacacatcataaggttttattcatatatatacagggtattaagaa

SEQ ID NO: 91103 - DNA, 120 bp, Artificial Sequence
  ENSG00000087510_21 (sequence is synthesized)
ttaagaggatgctgggctctgttcttggcttggaagattctatttaattgaaactctctgttcagaaagcaataactttgtctcgttcctgttgggctgaaccctaaggtgagtgtgcag

SEQ ID NO: 91104 - DNA, 120 bp, Artificial Sequence
  ENSG00000087510_22 (sequence is synthesized)
tacagtgtgtgtgggtgaaatggagatttggaattgaactctctgcctgtaaatgttccccaaataattgttgtgtgtatgatacgtgtataataaaagtattcttgttagaatctgaaa

SEQ ID NO: 91105 - DNA, 120 bp, Artificial Sequence
  ENSG00000087510_23 (sequence is synthesized)
ctcaggggcgccgggagcgcggagctcgggctacggactcgcgggagttcactgcgcctccgggccctggagggctgcccctgcccgcaggcccgggcgcttccgccaggaggcgacagc

SEQ ID NO: 91106 - DNA, 120 bp, Artificial Sequence
  ENSG00000087586_0 (sequence is synthesized)
acaaggcagcctcgctcgagcgcaggccaatcggctttctagctagagggtttaactcctatttaaaaagaagaacctttgaattctaacggctgagctcttggaagacttgggtccttg

SEQ ID NO: 91107 - DNA, 120 bp, Artificial Sequence
  ENSG00000087586_1 (sequence is synthesized)
gctcttggaagacttgggtccttgggtcgcagggtctcactccattgcccaggccagagtgcggggatatttgataagaaacttcagtgaaggccgggcgcggtggctcatgcccgtaat

SEQ ID NO: 91108 - DNA, 120 bp, Artificial Sequence
  ENSG00000087586_2 (sequence is synthesized)
atcatggaccgatctaaagaaaactgcatttcaggacctgttaaggctacagctccagttggaggtccaaaacgtgttctcgtgactcagcaatttccttgtcagaatccattacctgta

SEQ ID NO: 91109 - DNA, 120 bp, Artificial Sequence
  ENSG00000087586_3 (sequence is synthesized)
aatagtggccaggctcagcgggtcttgtgtccttcaaattcttcccagcgcattcctttgcaagcacaaaagcttgtctccagtcacaagccggttcagaatcagaagcagaagcaattg

SEQ ID NO: 91110 - DNA, 120 bp, Artificial Sequence
  ENSG00000087586_4 (sequence is synthesized)
caggcaaccagtgtacctcatcctgtctccaggccactgaataacacccaaaagagcaagcagcccctgccatcggcacctgaaaataatcctgaggaggaactggcatcaaaacagaaa

SEQ ID NO: 91111 - DNA, 120 bp, Artificial Sequence
  ENSG00000087586_5 (sequence is synthesized)
aatgaagaatcaaaaaagaggcagtgggctttggaagactttgaaattggtcgccctctgggtaaaggaaagtttggtaatgtttatttggcaagagaaaagcaaagcaagtttattctg

SEQ ID NO: 91112 - DNA, 120 bp, Artificial Sequence
  ENSG00000087586_6 (sequence is synthesized)
gctcttaaagtgttatttaaagctcagctggagaaagccggagtggagcatcagctcagaagagaagtagaaatacagtcccaccttcggcatcctaatattcttagactgtatggttat

SEQ ID NO: 91113 - DNA, 120 bp, Artificial Sequence
  ENSG00000087586_7 (sequence is synthesized)
ttccatgatgctaccagagtctacctaattctggaatatgcaccacttggaacagtttatagagaacttcagaaactttcaaagtttgatgagcagagaactgctacttatataacagaa

SEQ ID NO: 91114 - DNA, 120 bp, Artificial Sequence
  ENSG00000087586_8 (sequence is synthesized)
ttggcaaatgccctgtcttactgtcattcgaagagagttattcatagagacattaagccagagaacttacttcttggatcagctggagagcttaaaattgcagattttgggtggtcagta

SEQ ID NO: 91115 - DNA, 120 bp, Artificial Sequence
  ENSG00000087586_9 (sequence is synthesized)
attgaaggtcggatgcatgatgagaaggtggatctctggagccttggagttctttgctatgaatttttagttgggaagcctccttttgaggcaaacacataccaagagacctacaaaaga

SEQ ID NO: 91116 - DNA, 120 bp, Artificial Sequence
  ENSG00000087586_10 (sequence is synthesized)
atatcacgggttgaattcacattccctgactttgtaacagagggagccagggacctcatttcaagactgttgaagcataatcccagccagaggccaatgctcagagaagtacttgaacac

SEQ ID NO: 91117 - DNA, 120 bp, Artificial Sequence
  ENSG00000087586_11 (sequence is synthesized)
ccctggatcacagcaaattcatcaaaaccatcaaattgccaaaacaaagaatcagctagcaaacagtcttaggaatcgtgcagggggagaaatccttgagccagggctgccatataacct

SEQ ID NO: 91118 - DNA, 120 bp, Artificial Sequence
  ENSG00000087586_12 (sequence is synthesized)
gacaggaacatgctactgaagtttattttaccattgactgctgccctcaatctagaacgctacacaagaaatatttgttttactcagcaggtgtgccttaacctccctattcagaaagct

SEQ ID NO: 91119 - DNA, 120 bp, Artificial Sequence
  ENSG00000087586_13 (sequence is synthesized)
ccacatcaataaacatgacactctgaagtgaaagtagccacgagaattgtgctacttatactggttcataatctggaggcaaggttcgactgcagccgccccgtcagcctgtgctaggca

SEQ ID NO: 91120 - DNA, 120 bp, Artificial Sequence
  ENSG00000087586_14 (sequence is synthesized)
tggtgtcttcacaggaggcaaatccagagcctggctgtggggaaagtgaccactctgccctgaccccgatcagttaaggagctgtgcaataaccttcctagtacctgagtgagtgtgtaa

SEQ ID NO: 91121 - DNA, 120 bp, Artificial Sequence
  ENSG00000087586_15 (sequence is synthesized)
cttattgggttggcgaagcctggtaaagctgttggaatgagtatgtgattctttttaagtatgaaaataaagatatatgtacagacttgtattttttctctggtggcattcctttaggaa

SEQ ID NO: 91122 - DNA, 120 bp, Artificial Sequence
  ENSG00000087586_16 (sequence is synthesized)
tgctgtgtgtctgtccggcaccccggtaggcctgattgggtttctagtcctccttaaccacttatctcccatatgagagtgtgaaaaataggaacacgtgctctacctccatttagggat

SEQ ID NO: 91123 - DNA, 120 bp, Artificial Sequence
  ENSG00000087586_17 (sequence is synthesized)
ttgcttgggatacagaagaggccatgtgtctcagagctgttaagggcttatttttttaaaacattggagtcatagcatgtgtgtaaactttaaatatgcaaataaataagtatctatgtc

SEQ ID NO: 91124 - DNA, 120 bp, Artificial Sequence
  ENSG00000087586_18 (sequence is synthesized)
ggctgagctcttggaagacttgggtccttgggtcgcaggtgggagccgacgggtgggtagaccgtgggggatatctcagtggcggacgaggacggcggggacaaggggcggctggtcgga

SEQ ID NO: 91125 - DNA, 120 bp, Artificial Sequence
  ENSG00000087586_19 (sequence is synthesized)
gtggcggagcgtcaagtcccctgtcggttcctccgtccctgagtgtccttggcgctgccttgtgcccgcccagcgcctttgcatccgctcctgggcaccgaggcgccctgtaggatactg

SEQ ID NO: 91126 - DNA, 64 bp, Artificial Sequence
  ENSG00000087586_20 (sequence is synthesized)
gaattctaacggctgagctcttggaagacttgggtccttgggtcgcaggtgggagccgataagt

SEQ ID NO: 91127 - DNA, 120 bp, Artificial Sequence
  ENSG00000087589_0 (sequence is synthesized)
gaagagtggtgtttttttcttcttcttcttcttttgtggtttcacatagcaaatgagtgacagtctctacttacagacaaagtgagacgtcaggcattgagacatagctccatagaattc

SEQ ID NO: 91128 - DNA, 120 bp, Artificial Sequence
  ENSG00000087589_1 (sequence is synthesized)
agtttctgagaaccagccagaagcatgcagtgacattgcacaatctgcctctgaagctggagatactagctgcagagctcaggggagctgctccacatcaccgacatgaagggaacaggc

SEQ ID NO: 91129 - DNA, 120 bp, Artificial Sequence
  ENSG00000087589_2 (sequence is synthesized)
atcatggactgtgcgcccaaggcactcctggccagggcactttatgacaactgccctgactgctctgacgagctggctttcagcagaggggacatcctgaccattctggagcaacacgtg

SEQ ID NO: 91130 - DNA, 120 bp, Artificial Sequence
  ENSG00000087589_3 (sequence is synthesized)
ccagaaagcgagggttggtggaagtgtttgctccatgggaggcaaggcctggcccctgccaaccgcctccaaatcctcacggaggtcgctgcagacaggccgtgccccccattcctgaga

SEQ ID NO: 91131 - DNA, 120 bp, Artificial Sequence
  ENSG00000087589_4 (sequence is synthesized)
ggcctggaagaagctcctgccagctcagaggagacctatcaggtgcccactctaccccgccctcccactccaggccccgtttatgagcagatgaggagttgggcggaggggccccagccc

SEQ ID NO: 91132 - DNA, 120 bp, Artificial Sequence
  ENSG00000087589_5 (sequence is synthesized)
cctactgcccaagtctatgaattccccgaccctcccaccagtgccagaatcatctgtgaaaagactctcagctttccaaaacaggccatcctcacgcttcccagacctgtccgggcctca

SEQ ID NO: 91133 - DNA, 120 bp, Artificial Sequence
  ENSG00000087589_6 (sequence is synthesized)
ctgccgactctgccttcccaggtgtatgacgtgcctacccagcaccggggccccgtggtcctgaaggagccagagaagcagcagttatatgacataccagccagccccaagaaggcagga

SEQ ID NO: 91134 - DNA, 120 bp, Artificial Sequence
  ENSG00000087589_7 (sequence is synthesized)
ctccatcccccagacagccaagcaagtgggcagggtgttcccctgatatcagtgactaccttaagaagaggcggttacagcacattaccaaatcctcagaaatcggaatggatttatgac

SEQ ID NO: 91135 - DNA, 120 bp, Artificial Sequence
  ENSG00000087589_8 (sequence is synthesized)
actccagtgtctccaggaaaggccagcgtcagaaacacgcctctcaccagctttgcggaagaatcaaggccccacgctctccccagttccagctccactttctacaatcctccaagtggc

SEQ ID NO: 91136 - DNA, 120 bp, Artificial Sequence
  ENSG00000087589_9 (sequence is synthesized)
agatccaggtccctcactccacaactgaataacaatgtgcccatgcagaaaaaactcagccttccagaaattccttcttatggctttcttgtacccagaggcacatttcctttggatgaa

SEQ ID NO: 91137 - DNA, 120 bp, Artificial Sequence
  ENSG00000087589_10 (sequence is synthesized)
gtttctcaggctgggaaggagctggagaaagccaaggaggtgtcagagaattccgcgggccataattcctcatggttctccagacggacaacttccccatctcctgaaccggacagatta

SEQ ID NO: 91138 - DNA, 120 bp, Artificial Sequence
  ENSG00000087589_11 (sequence is synthesized)
tcaggttccagttctgacagcagagctagcatcgtttcctcgtgctccaccacatccaccgacgactcctccagctcttcctcggaggagtcagcaaaggagctctccttggacctggat

SEQ ID NO: 91139 - DNA, 120 bp, Artificial Sequence
  ENSG00000087589_12 (sequence is synthesized)
gtggccaaggagacagtgatggctctgcagcacaaggtggtcagctctgtcgctggcctgatgctctttgtcagcaggaagtggagattccgagactatctggaggccaacattgatgca

SEQ ID NO: 91140 - DNA, 120 bp, Artificial Sequence
  ENSG00000087589_13 (sequence is synthesized)
atccacaggtccactgatcacatagaagaatctgtaagagaatttctggattttgcccgaggagtccatgggactgcctgtaacctcactgacagtaaccttcagaacagaattcgggac

SEQ ID NO: 91141 - DNA, 120 bp, Artificial Sequence
  ENSG00000087589_14 (sequence is synthesized)
cagatgcagaccatctccaactcctaccgcatcctgcttgaaacaaaggaaagcttggataatcgcaattggcctctggaagttcttgtgactgacagtgtccagaacagcccagatgac

SEQ ID NO: 91142 - DNA, 120 bp, Artificial Sequence
  ENSG00000087589_15 (sequence is synthesized)
cttgagaggtttgtcatggtggcacggatgcttccagaagacatcaagaggtttgcctccattgtcattgccaatggaaggctcctttttaagcggaactgtgaaaaggaagagactgtg

SEQ ID NO: 91143 - DNA, 120 bp, Artificial Sequence
  ENSG00000087589_16 (sequence is synthesized)
cagttgaccccaaatgcagaatttaagtgtgaaaaatacatccagcctccccaaagagaaactgaatcacaccaaaagagtaccccttccactaagcaaagggaagatgaacactcttct

SEQ ID NO: 91144 - DNA, 120 bp, Artificial Sequence
  ENSG00000087589_17 (sequence is synthesized)
gaactattaaagaaaaatagggcaaatatctgtggacagaatcctggccctcttatacctcagccttcgagtcaacagactcctgagaggaaaccccgcttatctgaacactgccggctc

SEQ ID NO: 91145 - DNA, 120 bp, Artificial Sequence
  ENSG00000087589_18 (sequence is synthesized)
tactttggggcgctcttcaaagccatcagcgcatttcacggcagcctcagcagcagccagcccgcggagatcatcactcagagcaagctggtcatcatggtgggacagaagctggtggac

SEQ ID NO: 91146 - DNA, 120 bp, Artificial Sequence
  ENSG00000087589_19 (sequence is synthesized)
acgctgtgcatggagacccaggagagggacgtgcgcaacgagatcctccgtggcagcagtcacctctgcagcctgctcaaggacgtagcgctggccactaagaatgccgtgctcacgtac

SEQ ID NO: 91147 - DNA, 120 bp, Artificial Sequence
  ENSG00000087589_20 (sequence is synthesized)
cccagccctgccgcgctggggcacctccaggcggaggctgagaagctggagcaacacacgcggcagttcagagggacactgggatgaggactgtctacctcccttcctcctctgctcacc

SEQ ID NO: 91148 - DNA, 120 bp, Artificial Sequence
  ENSG00000087589_21 (sequence is synthesized)
ctggagtagtggctactaagatgctgagactctttccatagtgtataggctttggggagacactggttccattttctagaaaataaaatttatgaaagtaaaattcttgatgaaatctta

SEQ ID NO: 91149 - DNA, 120 bp, Artificial Sequence
  ENSG00000087589_22 (sequence is synthesized)
ttaacaagtcagataaagataggtcagcataggcagataggtcagttgatttggatttcttccgaaaacttttggcgttcaagtttaccatattagaattaaaagggatttttaaatttc

SEQ ID NO: 91150 - DNA, 120 bp, Artificial Sequence
  ENSG00000087589_23 (sequence is synthesized)
ttaaaaatttattatttgagtagatttttaaaacctcaccaccaagtctccttgcatttttgaaagttataaatttagtcattctcagtgtgtttcttagcaacgaaagaggaagtagaa

SEQ ID NO: 91151 - DNA, 120 bp, Artificial Sequence
  ENSG00000087589_24 (sequence is synthesized)
acattctttcaaattgcccatggtctgatcagcccccagacttcagctactcttagaaatacttttctgaggctgggcctggtggcttatgcctgtaattccaacgctttgggaggccaa

SEQ ID NO: 91152 - DNA, 120 bp, Artificial Sequence
  ENSG00000087589_25 (sequence is synthesized)
accaggctgggcaacatagtgagaccccagctgtacaaaatttatttttaaatatccaggtgtagtggctcatgcacttgggagtctgagtgggggtatcccttgagaccaggagtttgg

SEQ ID NO: 91153 - DNA, 89 bp, Artificial Sequence
  ENSG00000087589_26 (sequence is synthesized)
taaatatccaggtgtagtggctcatgcacttgggagtctgagtgggggtatcccttgagaccaggagtttggggttgcagatggtgaca

SEQ ID NO: 91154 - DNA, 120 bp, Artificial Sequence
  ENSG00000087589_27 (sequence is synthesized)
tgggaaaagccagccggggcatacaccaatgagctgaaacagacctggtgcccaaagctggtagtaccaagtggctaagcaaccccagggcattgacttaccccgcagggggtcaggaaa

SEQ ID NO: 91155 - DNA, 120 bp, Artificial Sequence
  ENSG00000087589_28 (sequence is synthesized)
ggtatgaggtaaagaccttgtgaagtttagcatatatggagtatgcagtatcagcttgaagtgacttcgcagaaataatattttatattgattaaatgtgtgcatgttttgtttgttttt

SEQ ID NO: 91156 - DNA, 120 bp, Artificial Sequence
  ENSG00000087589_29 (sequence is synthesized)
gcccagctaatttttgtatttttttttaatgaaaggtctcacatatttattactgaacccagccaaccaatgcattcataacagattcagaaagaaaaaatatattcccaataaaacatg

SEQ ID NO: 91157 - DNA, 120 bp, Artificial Sequence
  ENSG00000087589_30 (sequence is synthesized)
tatattcccaataaaacatgtacaattctccagagagcggtgacattttcagcttgatgtggtaacatgactgtgaccttcagacagcataaatatgtgtgccctctcatgtgcaattcc

SEQ ID NO: 91158 - DNA, 120 bp, Artificial Sequence
  ENSG00000087589_31 (sequence is synthesized)
ttatagggctagcttggttcttcttcaatgtctccttttggagttgtacctgattttattaccagttttcatctgaatccactggggagtggggcgattttgttttaatttctcggtcag

SEQ ID NO: 91159 - DNA, 120 bp, Artificial Sequence
  ENSG00000087589_32 (sequence is synthesized)
tttctcggtcaggaatcacttaatcctggaagtcttatgagaagacatggcaagaagcagagtcaagcacacaccacaatggcagagaaaggaagagctaatttttgtatttttagtaga

SEQ ID NO: 91160 - DNA, 68 bp, Artificial Sequence
  ENSG00000087589_33 (sequence is synthesized)
ctcctggcatgtacgtgttttaaattcactcatttaacacttatgtattggatgcctactacatgcca

SEQ ID NO: 91161 - DNA, 120 bp, Artificial Sequence
  ENSG00000087589_34 (sequence is synthesized)
ctcatttaacacttatgtattggatgcctactacatgccaagttctaggtgctggagacatagcagtgtttcagagggcttgccctcttggaacttatgatctagtaggggagtcaggca

SEQ ID NO: 91162 - DNA, 120 bp, Artificial Sequence
  ENSG00000087589_35 (sequence is synthesized)
gtaaagcggtgaagaaatacatacacagtatagcaggtgccaggaaaaacgtaagtaggggaagtgcaagagaacttatcttcaaatggttaatttttattgcatccattagataataga

SEQ ID NO: 91163 - DNA, 120 bp, Artificial Sequence
  ENSG00000087589_36 (sequence is synthesized)
gtaagttttttgttgttttgaattgaattagttctgtgagattggtacaaattatgtatgtgtcttgcacccataaatatatatttttgctatgttactttaacctaaagatagatgtta

SEQ ID NO: 91164 - DNA, 120 bp, Artificial Sequence
  ENSG00000087589_37 (sequence is synthesized)
tatttacaacataacatgatctgttgggttctctattaatttatttcatacattatagattctgggttgataaattctgctcaatttgaaaaattttatattttgtctcaaatctgttac

SEQ ID NO: 91165 - DNA, 89 bp, Artificial Sequence
  ENSG00000087589_38 (sequence is synthesized)
aatttatattgtagacagtaatggcaaaaaccacaattgcttttgcaccaccctaataatattaaatataatcatgactttaaacatca

SEQ ID NO: 91166 - DNA, 120 bp, Artificial Sequence
  ENSG00000087842_0 (sequence is synthesized)
ctcctctaggccgccggccgcgaagcgctgagtcacggtgaggctactggacccacactctcttaacctgccctccctgcactcgctcccggcggctcttcgcgtcacccccgccgctaa

SEQ ID NO: 91167 - DNA, 120 bp, Artificial Sequence
  ENSG00000087842_1 (sequence is synthesized)
ggctccaggtgccgctaccgcagcccctccatcctctacagctcagcatcagaacactctctttttagactccgatatggggtcctccaagaaagttactctctcagtgctcagccggga

SEQ ID NO: 91168 - DNA, 120 bp, Artificial Sequence
  ENSG00000087842_2 (sequence is synthesized)
gcagtcggaaggggttggagcgagggtccggagaagcattggcagacccgagttaaaaaatctggatccgtttttactgtttgatgaatttaaaggaggtagaccaggaggatttcctga

SEQ ID NO: 91169 - DNA, 120 bp, Artificial Sequence
  ENSG00000087842_3 (sequence is synthesized)
tcatccacatcgaggttttgaaacagtatcctacctcctggaagggggcagcatggcccatgaagacttctgtggacacactggtaaaatgaacccaggagatttgcagtggatgactgc

SEQ ID NO: 91170 - DNA, 120 bp, Artificial Sequence
  ENSG00000087842_4 (sequence is synthesized)
gggccggggcattctgcacgctgagatgccttgctcagaggagccagcccatggcctacaactgtgggttaatttgaggagctcagagaagatggtggagcctcagtaccaggaactgaa

SEQ ID NO: 91171 - DNA, 120 bp, Artificial Sequence
  ENSG00000087842_5 (sequence is synthesized)
agtccaaggtttacactcgcacaccaaccttatatttggacttcaaattggacccaggagccaaacattcccaacctatccctaaagggtggacaagcttcatttacacgatatctggag

SEQ ID NO: 91172 - DNA, 120 bp, Artificial Sequence
  ENSG00000087842_6 (sequence is synthesized)
atgtgtatattgggcccgatgatgcacaacaaaaaatagaacctcatcacacagcagtgcttggagaaggtgacagtgtccaggtggagaacaaggatcccaagagaagccactttgtct

SEQ ID NO: 91173 - DNA, 120 bp, Artificial Sequence
  ENSG00000087842_7 (sequence is synthesized)
taattgctggggagccattaagagaaccagttatccaacatggtccatttgtgatgaacaccaatgaagagatttctcaagctattcttgatttcagaaacgcaaaaaatgggtttgaaa

SEQ ID NO: 91174 - DNA, 120 bp, Artificial Sequence
  ENSG00000087842_8 (sequence is synthesized)
gggccaaaacctggaaatcaaagattgggaactagtggaaagcggaagagcaggtcttgatgtgtcctagaattttgccatttctgagattgagccattgaaggcattccatttctaaag

SEQ ID NO: 91175 - DNA, 120 bp, Artificial Sequence
  ENSG00000087842_9 (sequence is synthesized)
cttatttagccggtgcttctaaagaattccacactaacgtgataacatggtttttgtaacaataaatgtaggatatttcctggcacatgcaaataaacctaatcattgtttctttaaaaa

SEQ ID NO: 91176 - DNA, 120 bp, Artificial Sequence
  ENSG00000087842_10 (sequence is synthesized)
accgaccggagcgccgatcagagcacctgcccgggccacacatttcctcctggagcacagcaagtgccgcctaaattacccgagtgagcatctcttcccggcacgagaggcagggaggcc

SEQ ID NO: 91177 - DNA, 120 bp, Artificial Sequence
  ENSG00000087842_11 (sequence is synthesized)
ggaagccattcctttcacctaccctacactcatactggattctgaccctgttcctggaagatgtctccactctgtgctcctgctcgagctacttcttgtgtgctccatcccatagctcca

SEQ ID NO: 91178 - DNA, 120 bp, Artificial Sequence
  ENSG00000087842_12 (sequence is synthesized)
aaccagttatccaacatggtaagaccaaaatgacaatgattttcttggttgattttccttttctttgaaaacagtatacatgtatactattgttgggaagaatagctggttttttttgtc

SEQ ID NO: 91179 - DNA, 120 bp, Artificial Sequence
  ENSG00000087842_13 (sequence is synthesized)
ctgtctctccatctataaatctgaggattgtttaatttttctgtcatcagagggaaatatatatgtgatgtttattcatctctttttttttaaagaaacatttcttagatacctattatg

SEQ ID NO: 91180 - DNA, 120 bp, Artificial Sequence
  ENSG00000087842_14 (sequence is synthesized)
aggcgtgagccaccgcgcccggcctcattatagattattttaaatagaataatatacattcagttttgaaggctttggggtagtttattattcaagacatatgttatattgacaccctca

SEQ ID NO: 91181 - DNA, 120 bp, Artificial Sequence
  ENSG00000087842_15 (sequence is synthesized)
tatattgacaccctcaatgatccagttcccaatatgaaaagaatactagaattggaatcctgttttaggttaaagatgttgtgaaaaacatctgcaaaatgaattaaaaatttcctctta

SEQ ID NO: 91182 - DNA, 120 bp, Artificial Sequence
  ENSG00000087842_16 (sequence is synthesized)
ggatttcgtctccaaatttatctttgtgtttgtaatacgtatatgtctttgttccttttggcattatggacactaacatgttaatgttgctggtcctttccagggtggacaagcttcatt

SEQ ID NO: 91183 - DNA, 120 bp, Artificial Sequence
  ENSG00000087884_0 (sequence is synthesized)
agttggggagcgcagatcccgaagcagcgctgggagcgtaagtgcgggcagagcactgcgccgtttgggaacgcaactttgaggagacagtgcggtggacttcagtgaagttccttatga

SEQ ID NO: 91184 - DNA, 120 bp, Artificial Sequence
  ENSG00000087884_1 (sequence is synthesized)
cttcccctgaaattgcttccttatcatgggggcaaatgaaagtaaaaggctctaatacaacctataaggactgcaaagtatggccagggggtagtcggacttgggattggagagaaacag

SEQ ID NO: 91185 - DNA, 120 bp, Artificial Sequence
  ENSG00000087884_2 (sequence is synthesized)
agaagggtgtacagactcttgtgattggccgagggatgagtgaggccttgaaggtgccttcatcaactgtggagtacctcaagaaacatggcattgatgtgcgggtcctccagacagagc

SEQ ID NO: 91186 - DNA, 120 bp, Artificial Sequence
  ENSG00000087884_3 (sequence is synthesized)
aggcagtgaaggagtataatgccttggttgcccaaggggtcagggtgggaggtgtcttccattccacctgctgatggagccttaagaggagaataaatcactaagtgcctatgcctgtga

SEQ ID NO: 91187 - DNA, 120 bp, Artificial Sequence
  ENSG00000087884_4 (sequence is synthesized)
gtattcccggagggcagttggggagcgcagatcccgaagcagcgctgggagcgtaagtgcgggcagagcactgcgccgtttgggaacgcaactttgaggagacagtgcggtggttctgga

SEQ ID NO: 91188 - DNA, 74 bp, Artificial Sequence
  ENSG00000087884_5 (sequence is synthesized)
ttctcctggtgtgcagcctgcagatgtgaaggaagttgttgagaagggtgtacagactcttgtgattggccgag

SEQ ID NO: 91189 - DNA, 120 bp, Artificial Sequence
  ENSG00000087884_6 (sequence is synthesized)
caacccagcagctgccatcaggtgttcatgtcagggctgtggtacaattccacctggctacagcttcatggcacatccttgagagatgcaaaacaggagctggactgagcatcaaacatg

SEQ ID NO: 91190 - DNA, 120 bp, Artificial Sequence
  ENSG00000087884_7 (sequence is synthesized)
tctgtgagctggcaatgagtcacctaagtacttttttgtatcaaatctatgatgccatcattcttaagatgcacctttattttatgaaatagtaagaaacaaaaaacactatgggacacc

SEQ ID NO: 91191 - DNA, 120 bp, Artificial Sequence
  ENSG00000087884_8 (sequence is synthesized)
aggctccaacccagcagctgccatcaggtgttcatgtcagggctgtggtacaattccacctggctacagcttcatggcacatccttgagagatgcaaaacagggtcttactctgccaccc

SEQ ID NO: 91192 - DNA, 120 bp, Artificial Sequence
  ENSG00000087884_9 (sequence is synthesized)
gaaggatggaatacagggggcacagttagatctgaattgttaagcagaggctgcttgatgcagaagatgaagacagaagaaagaatgagcctaggccgggcacagtggctcacgcctgta

SEQ ID NO: 91193 - DNA, 120 bp, Artificial Sequence
  ENSG00000087884_10 (sequence is synthesized)
gcagttggggagcgcagatcccgaagcagcgctgggagcgtaagtgcgggcagagcactgcgccgtttgggaacgcaactttgaggagacagtgcggtggtagagatgaggtttcaccat

SEQ ID NO: 91194 - DNA, 120 bp, Artificial Sequence
  ENSG00000087884_11 (sequence is synthesized)
cagttctggaggctgggaagtccaagaccagttggctcgcatctggtgagagccttcttgctgcatcatcctatagtggaagtcatcacatggtggaagcaccaagagagggccatactt

SEQ ID NO: 91195 - DNA, 120 bp, Artificial Sequence
  ENSG00000087884_12 (sequence is synthesized)
gtccttttataatgaacctactactcctgcaataacagcataatctattcatgagggtggaaccctcatggcctaatcagctcttaaaggtcccacctcttaatgttgttataatggcag

SEQ ID NO: 91196 - DNA, 120 bp, Artificial Sequence
  ENSG00000087903_0 (sequence is synthesized)
atagagactgtagccgtggagactgttacttaccaacggggaccaacacgcagcagccgctgccgccgccgcgggagccgctgcccgaactcccggcccgaactccagacctgagcatgc

SEQ ID NO: 91197 - DNA, 120 bp, Artificial Sequence
  ENSG00000087903_1 (sequence is synthesized)
agaattccgagggtggagcggattcgccagcgtccgtggctctgcgtccctcggcggcagccccgcctgtgccagcctccccgcagagggtgttggtccaggcagccagctccaatccca

SEQ ID NO: 91198 - DNA, 120 bp, Artificial Sequence
  ENSG00000087903_2 (sequence is synthesized)
aaggggcccagatgcagccgatctccctccccagagttcagcaggtaccccagcaggtgcagccggtgcagcacgtgtatcctgcccaggtgcagtacgtggaagggggagacgccgtct

SEQ ID NO: 91199 - DNA, 120 bp, Artificial Sequence
  ENSG00000087903_3 (sequence is synthesized)
acaccaatggagccatacgaacagcctacacctacaaccccgagcctcagatgtacgcccccagcagcacggcttcttacttcgaggccccaggcggtgcccaggtgaccgtggcagcct

SEQ ID NO: 91200 - DNA, 120 bp, Artificial Sequence
  ENSG00000087903_4 (sequence is synthesized)
cgtccccgccagcggtcccctcccacagcatggtgggcatcaccatggatgtcggggggagccccatcgtctccagcgcgggagcctatctcatccacggggggatggacagcaccagac

SEQ ID NO: 91201 - DNA, 120 bp, Artificial Sequence
  ENSG00000087903_5 (sequence is synthesized)
actccctggcccacacctcccgctcatcgcccgccacgcttgaaatggcgattgaaaacctccaaaaaagcgaaggaatcacatcacacaaaagcggtttactcaacagccatctccagt

SEQ ID NO: 91202 - DNA, 120 bp, Artificial Sequence
  ENSG00000087903_6 (sequence is synthesized)
ggctgttggataattatgaaacagcggaaggtgtgagtctccccagaagttctctttacaaccactaccttcggcactgccaggagcacaagctagacccagtgaacgccgcctccttcg

SEQ ID NO: 91203 - DNA, 120 bp, Artificial Sequence
  ENSG00000087903_7 (sequence is synthesized)
ggaaactgatccgttctgtgtttatggggctgagaacgcggcggctgggcaccaggggcaactcgaagtaccattactatgggattcgtctgaagccggactcaccactgaaccggctgc

SEQ ID NO: 91204 - DNA, 120 bp, Artificial Sequence
  ENSG00000087903_8 (sequence is synthesized)
aggaggacacgcagtacatggccatgcggcagcagcccatgcaccagaagcccaggtaccggccagcccagaagacggacagcctcggggacagcggctcccacagcggcctgcacagca

SEQ ID NO: 91205 - DNA, 120 bp, Artificial Sequence
  ENSG00000087903_9 (sequence is synthesized)
ctccggaacagaccatggccgtgcagagccagcaccaccagcagtacatagatgtctcccacgtcttccccgagttcccagcgcccgacctgggcagcttcctgctgcaggacggcgtca

SEQ ID NO: 91206 - DNA, 120 bp, Artificial Sequence
  ENSG00000087903_10 (sequence is synthesized)
cactgcacgacgtcaaggccctgcagctggtgtacagacggcactgcgaggcaactgtagatgtggtgatgaacctccagttccactacatcgagaagctgtggctctccttctggaact

SEQ ID NO: 91207 - DNA, 120 bp, Artificial Sequence
  ENSG00000087903_11 (sequence is synthesized)
ctaaggcctcctccagcgacggccccacctctcttcctgccagtgacgaagaccccgagggcgccgtcctgcccaaggacaagcttatctccctgtgtcagtgcgaccccatcctcaggt

SEQ ID NO: 91208 - DNA, 120 bp, Artificial Sequence
  ENSG00000087903_12 (sequence is synthesized)
ggatgaggagctgcgaccacatcctctaccaggcgctggtggagattctcatccccgacgtgctgaggccggtccccagtaccttgacacaggccatccgtaactttgccaagagcttgg

SEQ ID NO: 91209 - DNA, 120 bp, Artificial Sequence
  ENSG00000087903_13 (sequence is synthesized)
aaggctggttgacaaatgccatgagtgacttcccacaacaggtcatccagaccaaggtgggcgtcgtcagtgccttcgcccagacgctgcggcgctacacgtccctcaaccacctggcgc

SEQ ID NO: 91210 - DNA, 120 bp, Artificial Sequence
  ENSG00000087903_14 (sequence is synthesized)
aggcggcccgggcggtgctgcagaacacgtcccagatcaaccagatgctcagcgacctcaaccgcgtggactttgccaacgtgcaggagcaggcctcgtgggtgtgccagtgcgaggaga

SEQ ID NO: 91211 - DNA, 120 bp, Artificial Sequence
  ENSG00000087903_15 (sequence is synthesized)
gtgtggtgcagcggctggagcaggatttcaagctgaccctgcagcagcagagctccctggaccagtgggccagctggctggacagtgtggtcacccaggtcctgaagcagcatgccggca

SEQ ID NO: 91212 - DNA, 120 bp, Artificial Sequence
  ENSG00000087903_16 (sequence is synthesized)
cgcctgctctacgacgagtacatgttctacctggtggagcaccgcgtcgcggaggccaccggagagacgccgatcgctgtgatgggagagttcaacgatctcgcctctctgtcgctgacg

SEQ ID NO: 91213 - DNA, 120 bp, Artificial Sequence
  ENSG00000087903_17 (sequence is synthesized)
ctgctcgacaaagatgacatgggcgatgagcagcgtggcagcgaggcgggcccagacgcccgcagcctgggtgagcccctggtaaagcgggagcgcagtgaccccaaccactccctgcag

SEQ ID NO: 91214 - DNA, 120 bp, Artificial Sequence
  ENSG00000087903_18 (sequence is synthesized)
ggcatctagcagccccggccggcgcctcctcgaggttccaaaagatgccgcctggtcactctgggaacctggatttcaccggctccaccaaattagtgcctcttagatgatgtgatgttt

SEQ ID NO: 91215 - DNA, 120 bp, Artificial Sequence
  ENSG00000087903_19 (sequence is synthesized)
actttgactcaagcgggggctcccggggtcagtgttcaagaaggaaagcagttgttgaagctacagaagcccaggccagggctcccactggctgtagctgtgctctgggtccccaggtcc

SEQ ID NO: 91216 - DNA, 120 bp, Artificial Sequence
  ENSG00000087903_20 (sequence is synthesized)
ctgcgcagccaccagggccccaccagaccatgggttccttattctggacaaaccctcctctgctggaaccctggactttggccccagtccctttaagagctgaaagggctgtgctgagag

SEQ ID NO: 91217 - DNA, 120 bp, Artificial Sequence
  ENSG00000087903_21 (sequence is synthesized)
cactggcctctgcactcaactggaaccaattttcaccatgattttaaaaattaaaaaaacctggcagagcccgactagaaagggacggcctctcccctcctacctgccaccgctggggag

SEQ ID NO: 91218 - DNA, 120 bp, Artificial Sequence
  ENSG00000087903_22 (sequence is synthesized)
gcacagagctcgccagcgtccctggagtcccctcaggaatggaaagtggagtgcccttgtctggtagcaccatgtgggagggacccagctgggcgcagcgccctgtggccttttagatcc

SEQ ID NO: 91219 - DNA, 120 bp, Artificial Sequence
  ENSG00000087903_23 (sequence is synthesized)
agacctccctgccggatgccccgaggcgggaggccggctgtgctgcaggaacccatctccagatgccaaaggacttgaggggcagctgacaatcgctgtgtcccggcagatccgcagctc

SEQ ID NO: 91220 - DNA, 120 bp, Artificial Sequence
  ENSG00000087903_24 (sequence is synthesized)
gaaaaagaacaagccacagaaacgggctcgctcgtgccaggacacagcagtgtctttcaaaaaatcaaaaccagaagttttatcagcagcaggaaggatgtgggactctgtccaagttca

SEQ ID NO: 91221 - DNA, 120 bp, Artificial Sequence
  ENSG00000087903_25 (sequence is synthesized)
ccgtcaccatcaagccactggctgtggaaggagtttgtccaacagggtcagtgtcacagccacaacttcagaaagcagccatcccgcgtgtcgtccaaacagcagtgcctgcgtcccgct

SEQ ID NO: 91222 - DNA, 120 bp, Artificial Sequence
  ENSG00000087903_26 (sequence is synthesized)
ccacggagtcttccagaacacctccctctgaactaatcccggagcaccccacccccagcgagtcccacctggacctcttcaaagtcaaaactcttctctcgggacaaacaaatattcggg

SEQ ID NO: 91223 - DNA, 120 bp, Artificial Sequence
  ENSG00000087903_27 (sequence is synthesized)
actttcgaagccctgaacttgagacaccaagtttgtctccatggaaacacgtagccgctgcagttggacagctgcgtgctggagttctgtccccaaaccaactgcagagaagaaagacga

SEQ ID NO: 91224 - DNA, 120 bp, Artificial Sequence
  ENSG00000087903_28 (sequence is synthesized)
gcctcggcccaggacgcgatttctaacgaaatgcaatagttttctctttttggaaaaatgtttataccaatagttttgtgcgctaattgttattagaacgtttcttatgaatgtgtacat

SEQ ID NO: 91225 - DNA, 120 bp, Artificial Sequence
  ENSG00000087903_29 (sequence is synthesized)
tgcagtatattcagtcccaaatgttttgttctcattcacacagaaggtactaatgtcagctcacgtggcctttaaaaacctacttccccgcccgcaggagctcagagcatcgctgggcct

SEQ ID NO: 91226 - DNA, 120 bp, Artificial Sequence
  ENSG00000087903_30 (sequence is synthesized)
gcgccagagtgaggggtgcaggaagacaaagacgcgtgctcactttagaaacgaaaagctgggaataatcacactgtttgtctggtcgtatagcccaaaccttagttgaaatcagacaga

SEQ ID NO: 91227 - DNA, 120 bp, Artificial Sequence
  ENSG00000087903_31 (sequence is synthesized)
aagaatgtctttaaaatatacatctcctctccttggagacactgaagctcacagttaacggattgtaatgcccggcttttcctcactcctggtaaccaatacaagctggtttctgcctta

SEQ ID NO: 91228 - DNA, 120 bp, Artificial Sequence
  ENSG00000087903_32 (sequence is synthesized)
acggccgtagtccagggctgcttctagctgcgtctctcctgtgccccctcacatgaagtcaggaagccacgggagatgttcccactggcgcgtttgactcagcagtggctccaaaaggtc

SEQ ID NO: 91229 - DNA, 120 bp, Artificial Sequence
  ENSG00000087903_33 (sequence is synthesized)
ttgcgacaggacagcctggctggggagtcaaggctgccatctctccttgctttcattctggttccccatcgatgtggcgtggggaaaggagcaggtgactatgatgctggcttggctgac

SEQ ID NO: 91230 - DNA, 120 bp, Artificial Sequence
  ENSG00000087903_34 (sequence is synthesized)
actggaatggatgcagtggctgcatattaatgctacggcgtgcacacacatatgccaggttaaagttcagtagcaagtttttacaacatgatttctgctgcttctgttggacgggctctc

SEQ ID NO: 91231 - DNA, 120 bp, Artificial Sequence
  ENSG00000087903_35 (sequence is synthesized)
gggcttacctacgtgtgcgaagcaacactccctaccgcagctttcatgcacaatttaactcacccccgccctgcctgcgtggagcctcatttttattttgtaggagctcgaatcattatt

SEQ ID NO: 91232 - DNA, 90 bp, Artificial Sequence
  ENSG00000087903_36 (sequence is synthesized)
ggagcctcatttttattttgtaggagctcgaatcattatttggatattaataaaaacaaatcttggctgatgctaaccatctgatttccg

SEQ ID NO: 91233 - DNA, 120 bp, Artificial Sequence
  ENSG00000087903_37 (sequence is synthesized)
gtgaccgccccagcccaggcaggcagctcctgcgtgtccctcccgggaaccgccagcgctcaggccaggcgtccccgggtgacgctgaggagctggagccccgagccccccaacaagcat

SEQ ID NO: 91234 - DNA, 120 bp, Artificial Sequence
  ENSG00000087903_38 (sequence is synthesized)
cctctctgaagcagcagcccctccgcatccatgtccatcgcctgctcctctcctctctgtggcctcccttgggattccagggcaccccgctgtagcccggatcacggctgctcacttgac

SEQ ID NO: 91235 - DNA, 120 bp, Artificial Sequence
  ENSG00000087903_39 (sequence is synthesized)
attttcctttgttcctcgttactccaacgttgcctcaaatgtcagctccttagagagacccagggtgaccaactcttcccgctttggggatttcccggttttagcactgaaattcccata

SEQ ID NO: 91236 - DNA, 120 bp, Artificial Sequence
  ENSG00000087903_40 (sequence is synthesized)
aggaggggcgggaggggcgcgcaggcgcggaccgcctggcggtactttgaagaaagacttctcgacgccgagacactgctggtggtactcgatgtagcacatcttggtttggacagacca

SEQ ID NO: 91237 - DNA, 120 bp, Artificial Sequence
  ENSG00000087903_41 (sequence is synthesized)
catagtggccagtggctgccatattggacagcactggtgtaagagggtccatctctcactcccacatcaatgtccaatggtttctcattcaactggaaagtgaaattggaaatcttgtga

SEQ ID NO: 91238 - DNA, 120 bp, Artificial Sequence
  ENSG00000087903_42 (sequence is synthesized)
ggttaaaccagttaacgttgaacaaaggacaatggatatgatgagttacaagctgagttgtatccctccacaattcacatgttgaagtcctaacctttagtacttcagggtgtaacttat

SEQ ID NO: 91239 - DNA, 120 bp, Artificial Sequence
  ENSG00000087903_43 (sequence is synthesized)
ttggaaactagatcattatagaagttaaaacgaggtcataagggtgggccctaatcttactaacctgtccctataaaagggaaatttgaacacagtgacacccagagggaagatgatgtg

SEQ ID NO: 91240 - DNA, 120 bp, Artificial Sequence
  ENSG00000087903_44 (sequence is synthesized)
actttgaagaaagacttctcgacgccgagacactgctggtggtactcgatgtaggggtgactggcaaccatgccgtgaagacactcaagcaattctgtggagaaggccatggaatgagga

SEQ ID NO: 91241 - DNA, 120 bp, Artificial Sequence
  ENSG00000087903_45 (sequence is synthesized)
ccgtcagcccccgcgtaggcctgcacgtcttaggatcactcagcctctgggttccccagggaacgtagagcagggggtgtgttgctgccatgaagtctggcctggggcccgggttccatg

SEQ ID NO: 91242 - DNA, 120 bp, Artificial Sequence
  ENSG00000087903_46 (sequence is synthesized)
cagccctcagaaggaaccaagccagccagcctctcaatctcacacttttagcctccagatctgtgagacaataagtttatgttgtttaagccctccagtctgtggtactttgtaatgtag

SEQ ID NO: 91243 - DNA, 120 bp, Artificial Sequence
  ENSG00000087903_47 (sequence is synthesized)
ccccagcaaactaaaacatgggttggctggtggcattagaacaagttgcccatgaaaaggttacaggcagcctataggacaattgaagatgcattctactttctgcctgcactgtgcatc

SEQ ID NO: 91244 - DNA, 120 bp, Artificial Sequence
  ENSG00000087903_48 (sequence is synthesized)
tagtgaagaaaaaaaaaaaaaacacctcaataactatcagtgattcatggtgtcatggaggctccctctgcacatgtcttggggaaaagagaggataaacggtggatagtggaagttcaa

SEQ ID NO: 91245 - DNA, 120 bp, Artificial Sequence
  ENSG00000087903_49 (sequence is synthesized)
gcctccatcccttattatctgtgtaatgggccaacacacctcattccttgagttcctggcaagtagaactttctccactaaagtttctgacaaaggccttctccaaataagacccaatga

SEQ ID NO: 91246 - DNA, 120 bp, Artificial Sequence
  ENSG00000087903_50 (sequence is synthesized)
ggtggccagctgaaggagtttacacaccctaccatgaccctggtagagtagagacagcatgagttgaagcctgctactcagaatccactgcaactaagagtgtgtgtgtgtgtgtgtgtg

SEQ ID NO: 91247 - DNA, 120 bp, Artificial Sequence
  ENSG00000087903_51 (sequence is synthesized)
tgtgtgtatgtgtgtgttttctgcagttccagtcacagatctgcctgccacacagtggagccctctcttggactctgaatgcatagcccagcaaagccaagcaactgaatctcaccatca

SEQ ID NO: 91248 - DNA, 120 bp, Artificial Sequence
  ENSG00000087903_52 (sequence is synthesized)
gaacagctgagagcagctccatcaaagcagtcagtggtacatgtgatcaatttgttttttgtatttctgggctacaaaatgtctcttaagtttcatcattggacctatcgagaaaggaga

SEQ ID NO: 91249 - DNA, 120 bp, Artificial Sequence
  ENSG00000087903_53 (sequence is synthesized)
aatcaattgagttgtggagataaaagaaaattacacacacccatgcatgaccaggcaacagagtcccatgcctggggctaggctgggtggctggctgtgccattgactttcagggtgtgt

SEQ ID NO: 91250 - DNA, 120 bp, Artificial Sequence
  ENSG00000087903_54 (sequence is synthesized)
aacttttgccatctgtatggggatgataaaacttccatgtgatccttcagctgtggtgaggattctgtgagctggaaggtgaagagcatggtgcattctgtgcctgatgtggactgtgca

SEQ ID NO: 91251 - DNA, 120 bp, Artificial Sequence
  ENSG00000087903_55 (sequence is synthesized)
cccaatggaggagggatatcatcatctcaaaccatacccctatccccattttacaggtgaggaaactggggcatagagaggaccagttcctctgaggtcagccagcaagtgcacggcaga

SEQ ID NO: 91252 - DNA, 120 bp, Artificial Sequence
  ENSG00000087903_56 (sequence is synthesized)
atcaagtctcaaactgggagttgtctgctccctgagcccaggactttcattgaaagcctctgagtcaccaggggcattgaagcccctctgggtgtctcaagcaaccccacaaggactgtg

SEQ ID NO: 91253 - DNA, 120 bp, Artificial Sequence
  ENSG00000087903_57 (sequence is synthesized)
ccccacaaggactgtgttttcaacttatagatgagaagaccaccagcctggacaacatggcaaaacaccatctctacaaaacaaaaagaggatagcggccaggcacggtggctcacgcct

SEQ ID NO: 91254 - DNA, 120 bp, Artificial Sequence
  ENSG00000087903_58 (sequence is synthesized)
agcatgagatggtggtcagctacctcccactcagccatattgcagcacagatgatggacatctgggtacccataaagattggggcgctcacatactttgctcaagcagatgctctcaagg

SEQ ID NO: 91255 - DNA, 120 bp, Artificial Sequence
  ENSG00000087903_59 (sequence is synthesized)
gcagaaccaccgtggtcggaggccgtgggagaagcagttaccctctcattcttgaactcagctccgctcgcctgctctctgaaatacacactcaacctgctctttgcagaagtgtcaagt

SEQ ID NO: 91256 - DNA, 120 bp, Artificial Sequence
  ENSG00000087903_60 (sequence is synthesized)
ccaacggggaccaacacgcagcagccgctgccgccgccgcgggagccgctgcccgaactcccggcccgaactccagctgtgctgagatctgttttacataccgtaaagctcacccatttg

SEQ ID NO: 91257 - DNA, 120 bp, Artificial Sequence
  ENSG00000087903_61 (sequence is synthesized)
aaaccctgaacctgccatgaacagccacttgcccttcctcctcccagccccgggcaactgtgaatccactttctgtctctgtggatttgcctgttttgaacctttcatataaacagaatc

SEQ ID NO: 91258 - DNA, 120 bp, Artificial Sequence
  ENSG00000087903_62 (sequence is synthesized)
gggaggggcgcgcaggcgcggaccgcctggcggtactttgaagaaagacttctcgacgccgagacactgctggtggtactcgatgtagatcacgtggatggcaggagcagtggcaaagga

SEQ ID NO: 91259 - DNA, 120 bp, Artificial Sequence
  ENSG00000087903_63 (sequence is synthesized)
ggtagcccaggtgagtagatggttgttaatcattcgacagatttttttgggtaaagccctaggtctaacggtttttttaatcagggagaattatgtgaaaacagaagcacagagtcctta

SEQ ID NO: 91260 - DNA, 120 bp, Artificial Sequence
  ENSG00000087903_64 (sequence is synthesized)
actaacttgcctgaagttaggaggagttgcaaaatttagcaggcagctttaggagtagggaggttgcagacttccttgggtccaacgacagaactcagaaaactggattcagcaagtgtc

SEQ ID NO: 91261 - DNA, 120 bp, Artificial Sequence
  ENSG00000087903_65 (sequence is synthesized)
ccagagtcaaaccctgactccactgtttgctagacatttgggctatttccttaaaatccctcgtggcttttattgcctcttctttaaagtggggacagaggcttctcaggtccaatatag

SEQ ID NO: 91262 - DNA, 120 bp, Artificial Sequence
  ENSG00000087903_66 (sequence is synthesized)
gttacttaccaacggggaccaacacgcagcagccgctgccgccgccgcgggagccgctgcccgaactcccggcccgaactccaggcggagttagaacattccatttttttatccaaaatt

SEQ ID NO: 91263 - DNA, 120 bp, Artificial Sequence
  ENSG00000087903_67 (sequence is synthesized)
gagactgttacttaccaacggggaccaacacgcagcagccgctgccgccgccgcgggagccgctgcccgaactcccggcccgaactccagcttgaaatggcgattgaaaacctccaaaaa

SEQ ID NO: 91264 - DNA, 120 bp, Artificial Sequence
  ENSG00000087995_0 (sequence is synthesized)
cgttacggaaagtaaagtgtttccggctccggtgtcatggccggctcctaccctgaaggtgcacctgcagtcctcgccgataagaggcagcagttcggaagccggttcctgagagatccg

SEQ ID NO: 91265 - DNA, 120 bp, Artificial Sequence
  ENSG00000087995_1 (sequence is synthesized)
gcgcgcgtcttccaccacaatgcctgggacaatgtggagtggtcggaagagcaagccgcggcggcggagagaaaagtccaggagaacagtatccagcgggtgtgccaggagaaacaagtt

SEQ ID NO: 91266 - DNA, 120 bp, Artificial Sequence
  ENSG00000087995_2 (sequence is synthesized)
gattatgagatcaatgcccacaaatactggaatgacttctacaaaatccacgaaaatgggtttttcaaggatagacattggctttttaccgaattccctgagctggcacctagccaaaat

SEQ ID NO: 91267 - DNA, 120 bp, Artificial Sequence
  ENSG00000087995_3 (sequence is synthesized)
caaaatcatttgaaggactggttcttggagaacaagagtgaagtacctgaatgtagaaacaatgaggatggacctggtttaataatggaagaacagcacaagtgttcttcaaagagcctt

SEQ ID NO: 91268 - DNA, 120 bp, Artificial Sequence
  ENSG00000087995_4 (sequence is synthesized)
gaacataaaacacagacacttcctgtggaggagaatgtaactcagaaaattagtgacctggaaatttgtgctgatgagtttcctggatcctcagccacctaccgaatactggaggttggc

SEQ ID NO: 91269 - DNA, 120 bp, Artificial Sequence
  ENSG00000087995_5 (sequence is synthesized)
tgtggtgtgggaaacacagtctttccaattttacaaacgaacaatgacccaggactctttgtttattgctgtgatttttcttccacagctatagaactggtccagacaaattcagaatat

SEQ ID NO: 91270 - DNA, 120 bp, Artificial Sequence
  ENSG00000087995_6 (sequence is synthesized)
gatccttctcggtgttttgcctttgttcacgacctgtgtgatgaagagaagagttacccagtgcccaagggcagtcttgatattatcattctcatatttgttctttcagcaattgttcca

SEQ ID NO: 91271 - DNA, 120 bp, Artificial Sequence
  ENSG00000087995_7 (sequence is synthesized)
gacaagatgcagaaggctatcaacaggctgagcaggcttctgaaacctggcgggatgatgcttctgcgagattacggccgctatgacatggctcagcttcggtttaaaaaaggtcagtgt

SEQ ID NO: 91272 - DNA, 120 bp, Artificial Sequence
  ENSG00000087995_8 (sequence is synthesized)
ctatctggaaatttctacgtgagaggtgatggaaccagagtttacttcttcacacaagaggaactggacacgcttttcaccactgctggactggaaaaagttcagaacctggtggatcgc

SEQ ID NO: 91273 - DNA, 120 bp, Artificial Sequence
  ENSG00000087995_9 (sequence is synthesized)
cgactgcaggtgaaccgaggaaagcaactgacaatgtaccgggtttggattcagtgcaaatactgcaagccccttctgtccagcaccagctgagaggcacctgctgccaacacgatgcaa

SEQ ID NO: 91274 - DNA, 86 bp, Artificial Sequence
  ENSG00000087995_10 (sequence is synthesized)
ggggaggatccattgagcccagcagtccaacctgggcaaaatagtgagagaccctgtatctgaaagtaataataaaaataaaaaat

SEQ ID NO: 91275 - DNA, 120 bp, Artificial Sequence
  ENSG00000087995_11 (sequence is synthesized)
agagaccctgtatctgaaagtaataataaaaataaaaaatataaatgaggtctcgttgatgttggacaattcaagaattcagacttgaaccttaaacctaggaaaagttactttgtatca

SEQ ID NO: 91276 - DNA, 120 bp, Artificial Sequence
  ENSG00000087995_12 (sequence is synthesized)
ggattctaacaattatgcttcatatttgtgaagtcctttaaaacataattttctcaagttctttctttgagatctcaatctgtcttagcattttgtaactaataactgaaattttattca

SEQ ID NO: 91277 - DNA, 120 bp, Artificial Sequence
  ENSG00000087995_13 (sequence is synthesized)
aaggaattgtaaaccttaaaccaccaatttatttccatgtgaaaaagtgttacatatgacaagtgttttttgactgtaattgcgttaaatcttttgagaatgtaaatgccgggctaggca

SEQ ID NO: 91278 - DNA, 120 bp, Artificial Sequence
  ENSG00000087995_14 (sequence is synthesized)
attgcagttaatacatacagaggttagtgaagggcttattaagttgtaggggaagcaagctgggaagaatcagatcagatattttcctgacaaaaaaaaatgaccctacagagagcatca

SEQ ID NO: 91279 - DNA, 120 bp, Artificial Sequence
  ENSG00000087995_15 (sequence is synthesized)
tcctgacaaaaaaaaatgaccctacagagagcatcaaaatgtggtgttcttgttaagtaattgatcgtggtcttcgctttaatcttagttccgccaggcacggtggctcacacctgtaat

SEQ ID NO: 91280 - DNA, 66 bp, Artificial Sequence
  ENSG00000087995_16 (sequence is synthesized)
gtcaggagttttagctgagtgtgttggtgggtgcctgtaatccagctacttgggagactgaggcag

SEQ ID NO: 91281 - DNA, 120 bp, Artificial Sequence
  ENSG00000087995_17 (sequence is synthesized)
ataaaaaaaaaatcttagttccatggaattttaagcattgttccccctctaacctgtgtctaaagaattaaaagaatttggccgggtgcggcagctcatgcctgtaatcccaacactttg

SEQ ID NO: 91282 - DNA, 120 bp, Artificial Sequence
  ENSG00000087995_18 (sequence is synthesized)
cagatgtgttcctggtgtggagaaagtgccagggtggctcagcgaagaaaaaagaattcttgtggtgctatcaagcaaggcttcatttgagggaaaagtaggatttctgtaggtggaaaa

SEQ ID NO: 91283 - DNA, 120 bp, Artificial Sequence
  ENSG00000087995_19 (sequence is synthesized)
agagaagacattgatttgaaactccctggttgttttataaacttcatattagctatgtccacagagcctccaaaaggatataattcaaaagggattttaaccaaaatgaaatatgttgtg

SEQ ID NO: 91284 - DNA, 120 bp, Artificial Sequence
  ENSG00000087995_20 (sequence is synthesized)
cttccaccacaatgcctggtaatcactctgccccttcgcccggcctgtcgctgaccctctgtcccgccgcctcggagcactccgaaaagcccctgaccgccggccacgagtcaagctgcc

SEQ ID NO: 91285 - DNA, 120 bp, Artificial Sequence
  ENSG00000087995_21 (sequence is synthesized)
ctacccgaggcactctccaaggggagagaaactcctaggccagcgactcaccctgcccgcagccaggacgtgaggcccctaagctgcccgtttgattttctcagggacaatgtggagtgg

SEQ ID NO: 91286 - DNA, 120 bp, Artificial Sequence
  ENSG00000087995_22 (sequence is synthesized)
aaagaaaagaattttcactttttgcaaaattatcttttttaatgcacccttaagtgtttgacacaaaaggaattgagggaacttcttaattttaaccacatcatcacttcacttctgaat

SEQ ID NO: 91287 - DNA, 120 bp, Artificial Sequence
  ENSG00000087995_23 (sequence is synthesized)
ttttttttttttttttttttttaaggagacagggctctcactttgttgcccaggctggagttcagtggtgcaatgatagctcattatcacctcaaacttctggctcaagccatccctccg

SEQ ID NO: 91288 - DNA, 120 bp, Artificial Sequence
  ENSG00000087995_24 (sequence is synthesized)
acctcaaacttctggctcaagccatccctccgcctcagcctcctgagtagctaggactgcaggtgggcaccatcatgcctagctaattgttagatcctttttttttatgttctgcatttt

SEQ ID NO: 91289 - DNA, 120 bp, Artificial Sequence
  ENSG00000087995_25 (sequence is synthesized)
ttttttcagttatttttacatatttctctcttgatccatgcagttataggatatatccttaattttagaaagtaaggacttttcgaccaggcgtggcggctcatgcctataatcccagca

SEQ ID NO: 91290 - DNA, 79 bp, Artificial Sequence
  ENSG00000087995_26 (sequence is synthesized)
cagatcacttgaggtcaggagttccagtataaaaaatcagcccggcatggctgtgggcgcctgtaatcccagctactca

SEQ ID NO: 91291 - DNA, 120 bp, Artificial Sequence
  ENSG00000088002_0 (sequence is synthesized)
gttggaggcgtgggtagcagctgggagaaccggctgggtgctgcccctccccttgggccgggcacggagtaggcacctggcgggctccccaggtggcagacgctgtcgctgcgcacacct

SEQ ID NO: 91292 - DNA, 120 bp, Artificial Sequence
  ENSG00000088002_1 (sequence is synthesized)
ggcctctgtgccgcctgctccctgctcgtcctcccctccccaccctcacccacctgccatggacgggcccgccgagccccagatcccgggcttgtgggacacctatgaagatgacatctc

SEQ ID NO: 91293 - DNA, 120 bp, Artificial Sequence
  ENSG00000088002_2 (sequence is synthesized)
ggaaatcagccagaagttgccaggtgaatacttccggtacaagggcgtccccttccccgtcggcctgtactcgctcgagagcatcagcttggcggagaacacccaagatgtgcgggacga

SEQ ID NO: 91294 - DNA, 120 bp, Artificial Sequence
  ENSG00000088002_3 (sequence is synthesized)
cgacatctttatcatcacctaccccaagtcaggcacgacctggatgatcgagatcatctgcttaatcctgaaggaaggggatccatcctggatccgctccgtgcccatctgggagcgggc

SEQ ID NO: 91295 - DNA, 120 bp, Artificial Sequence
  ENSG00000088002_4 (sequence is synthesized)
accctggtgtgagaccattgtgggtgccttcagcctcccggaccagtacagcccccgcctcatgagctcccatcttcccatccagatcttcaccaaggccttcttcagctccaaggccaa

SEQ ID NO: 91296 - DNA, 120 bp, Artificial Sequence
  ENSG00000088002_5 (sequence is synthesized)
accagttcctgagggacttcctcaaaggcgaagtgcagtttggctcctggttcgaccacattaagggctggcttcggatgaagggcaaagacaacttcctatttatcacctacgaggagc

SEQ ID NO: 91297 - DNA, 120 bp, Artificial Sequence
  ENSG00000088002_6 (sequence is synthesized)
tgcagcaggacttacagggctccgtggagcgcatctgtgggttcctgggccgtccgctgggcaaggaggcactgggctccgtcgtggcacactcaaccttcagcgccatgaaggccaaca

SEQ ID NO: 91298 - DNA, 120 bp, Artificial Sequence
  ENSG00000088002_7 (sequence is synthesized)
ccatgtccaactacacgctgctgcctcccagcctgctggaccaccgtcgcggggccttcctccggaaaggggtctgcggcgactggaagaaccacttcacggtggcccagagcgaagcct

SEQ ID NO: 91299 - DNA, 120 bp, Artificial Sequence
  ENSG00000088002_8 (sequence is synthesized)
tcgatcgtgcctaccgcaagcagatgcgggggatgccgaccttcccctgggatgaagacccggaggaggacggcagcccagatcctgagcccagccctgagcctgagcccaagcccagcc

SEQ ID NO: 91300 - DNA, 120 bp, Artificial Sequence
  ENSG00000088002_9 (sequence is synthesized)
ttgagcccaacaccagcctggagcgtgagcccagacccaactccagccccagccccagccccggccaggcctctgagaccccgcacccacgaccctcataataaacacgtcgattctgtc

SEQ ID NO: 91301 - DNA, 74 bp, Artificial Sequence
  ENSG00000088002_10 (sequence is synthesized)
gtacaggcatgcgccaccacgcctggctgatttttgtctttttagtaggggcggggtttcaccatgttggccag

SEQ ID NO: 91302 - DNA, 120 bp, Artificial Sequence
  ENSG00000088002_11 (sequence is synthesized)
cagctttataaagtttatagggacagtgtcaccactttacagaagagggactgaggctctgaggaggaagttccttgccagggtccgagtgtcgccaccctgagaactccagcacccacc

SEQ ID NO: 91303 - DNA, 120 bp, Artificial Sequence
  ENSG00000088002_12 (sequence is synthesized)
attacagacatgagccactgcacctgccccacatctgtgcttgaaagccgggtctgggtctgggactgtgtcccagggcactcgggagccacggaagagttgggagccagtgaggagcag

SEQ ID NO: 91304 - DNA, 120 bp, Artificial Sequence
  ENSG00000088002_13 (sequence is synthesized)
tgggagccagtgaggagcagggtcagctggggtgtgggggatgagctggagggggatggagactggaggcaggaaggctgtggagcagccggctgctgaggcatggatccaggaagggga

SEQ ID NO: 91305 - DNA, 120 bp, Artificial Sequence
  ENSG00000088002_14 (sequence is synthesized)
ggatgaggcctaagcagttctaggctacagggacacagaggaggggatatggcaaggggaggcaggtggggagggacagggctcatgatggacaggttttgggggtgaggggtacccaga

SEQ ID NO: 91306 - DNA, 120 bp, Artificial Sequence
  ENSG00000088002_15 (sequence is synthesized)
gagggaggccaggctcctgggtggatggtggggccatcctgcaatgggggcctgggggaggagcaggtttgagatgtagaccagccaatgcctgtctctaacctgaaggagggtgattcc

SEQ ID NO: 91307 - DNA, 120 bp, Artificial Sequence
  ENSG00000088002_16 (sequence is synthesized)
ccctgctgtgacctctgccccaagcccacctattccctcccacctagagaaccctccaaagacagaaactgcaaaaacccttagaggcgatatagcccaacccctcagtttggagttggg

SEQ ID NO: 91308 - DNA, 120 bp, Artificial Sequence
  ENSG00000088002_17 (sequence is synthesized)
gaaactgaggcaaagaggcagcgtccctcaggcagccccaggttaggacccagacatgcggatcccaggttccacgctccttccttggccgagtgccctccctccgctgacccctctccc

SEQ ID NO: 91309 - DNA, 120 bp, Artificial Sequence
  ENSG00000088002_18 (sequence is synthesized)
gggattacagacatgagccaccgcagctggccaagtgttctttctcagcctccctccctttatgcctttgtcattccctcaagcaatttccagaacctcctgtgtgtggggctctgggct

SEQ ID NO: 91310 - DNA, 120 bp, Artificial Sequence
  ENSG00000088002_19 (sequence is synthesized)
aaggctctaggaacgtgtaagaccttgcctgtcctcaaggggttcctcaatctgtgatctacatgggccgcaacccccgggacgttgtggtctccctctatcattactccaagatcgccg

SEQ ID NO: 91311 - DNA, 120 bp, Artificial Sequence
  ENSG00000088035_0 (sequence is synthesized)
gcgcatgcgccttcctgggacccacggcaggcgcgaatcccagcggccggcgggcggcggggatacttctacatagacataatcaagttttgactatttggaaaccaagcatcattaaaa

SEQ ID NO: 91312 - DNA, 120 bp, Artificial Sequence
  ENSG00000088035_1 (sequence is synthesized)
ttctctcaaactcctaattgcgaagaatcgataacatttcaagaagtgataacatttctctgaacaagaaaagaagtgattgaccacgttttaaaagtactctggcactggtgctgtgtt

SEQ ID NO: 91313 - DNA, 120 bp, Artificial Sequence
  ENSG00000088035_2 (sequence is synthesized)
ttcttcccctccctaaatttgaagaactatggagaaatggtacttgatgacagtagtggttttaataggactaacagtacgatggacagtgtctcttaattcttattcaggtgctggtaa

SEQ ID NO: 91314 - DNA, 120 bp, Artificial Sequence
  ENSG00000088035_3 (sequence is synthesized)
accgcctatgtttggtgattatgaagctcagagacactggcaagaaataacttttaatttaccggtcaaacaatggtattttaacagcagtgataacaatttacagtattggggattgga

SEQ ID NO: 91315 - DNA, 120 bp, Artificial Sequence
  ENSG00000088035_4 (sequence is synthesized)
ttacccacctcttacagcttatcatagtctcctatgtgcatatgtggcaaagtttataaatccagactggattgctctccatacatcacgtggatatgagagtcaggcacataagctctt

SEQ ID NO: 91316 - DNA, 120 bp, Artificial Sequence
  ENSG00000088035_5 (sequence is synthesized)
catgcgtacaacagttttaattgctgatctgctgatttacatacctgcagtggttttgtactgttgttgcttaaaagaaatctcaactaagaaaaagattgctaatgcattatgcatctt

SEQ ID NO: 91317 - DNA, 120 bp, Artificial Sequence
  ENSG00000088035_6 (sequence is synthesized)
gctgtatccaggccttattcttatagactatggacattttcaatataattctgtgagtcttggctttgctttgtggggtgttcttggaatatcttgtgactgcgacctcctagggtcact

SEQ ID NO: 91318 - DNA, 120 bp, Artificial Sequence
  ENSG00000088035_7 (sequence is synthesized)
ggcattttgcttagctataaattataaacagatggaactttaccacgccttgccatttttttgctttttacttggcaagtgttttaaaaaaggcctcaaaggaaaggggtttgtgttgct

SEQ ID NO: 91319 - DNA, 120 bp, Artificial Sequence
  ENSG00000088035_8 (sequence is synthesized)
agttaagctagcttgtattgttgtggcttccttcgttctctgctggctgccattctttacagaaagggaacaaaccctgcaggttctaagaagactcttcccggttgatcgtggattatt

SEQ ID NO: 91320 - DNA, 120 bp, Artificial Sequence
  ENSG00000088035_9 (sequence is synthesized)
tgaggataaagtagccaatatttggtgcagcttcaatgtctttctgaagattaaggatattttgccacgtcacatccaattaataatgagcttttgttctacgtttttgagcctgcttcc

SEQ ID NO: 91321 - DNA, 120 bp, Artificial Sequence
  ENSG00000088035_10 (sequence is synthesized)
tgcatgcataaaattaatacttcagccctcttccaaaggattcaaatttacactggttagctgtgcgctatcattctttttattttctttccaagtacatgaaaaatccattctcttggt

SEQ ID NO: 91322 - DNA, 120 bp, Artificial Sequence
  ENSG00000088035_11 (sequence is synthesized)
gtcactaccagtctgcttagttttaagtgaaattccttttatgtctacttggtttttacttgtgtcaacatttagtatgctacctcttctattgaaggatgaactcctaatgccctctgt

SEQ ID NO: 91323 - DNA, 120 bp, Artificial Sequence
  ENSG00000088035_12 (sequence is synthesized)
tgtgacaacaatggcattttttatagcttgtgtaacttccttttcaatatttgaaaagacttctgaagaagaactgcagttgaaatccttttccatttctgtgaggaaatatcttccatg

SEQ ID NO: 91324 - DNA, 120 bp, Artificial Sequence
  ENSG00000088035_13 (sequence is synthesized)
ctggatcctcctcagaaactaccggacttgttttctgtattggtgtgttttgtatcttgcttgaacttcctgttcttcttggtatactttaacattattattatgtgggattccaaaagt

SEQ ID NO: 91325 - DNA, 120 bp, Artificial Sequence
  ENSG00000088035_14 (sequence is synthesized)
ggaagaaatcagaagaaaatcagctagctgtattcctaaacaaattgtttcctaaacaaatgtgaaaatgtgaacagtgctgaaaggttttgtgaactttttgctatgtataaatgaaat

SEQ ID NO: 91326 - DNA, 120 bp, Artificial Sequence
  ENSG00000088035_15 (sequence is synthesized)
taccattttgagaaccatggaaccacaggaaaggaaatggtgaaaagtcattgttgtctacacaaaataaatgtatatggagaccaaagaccaatggaggcttgtctaagtactgcttgg

SEQ ID NO: 91327 - DNA, 120 bp, Artificial Sequence
  ENSG00000088035_16 (sequence is synthesized)
ccaaaacatgtggttttattattcacagctattcaagtggggaaaaaagagaaacatgtccttaatcccattgtttactcaggaaatgcactttttaaatgtctttaaaaaactgagaaa

SEQ ID NO: 91328 - DNA, 120 bp, Artificial Sequence
  ENSG00000088035_17 (sequence is synthesized)
tatttcttgatatttgctttgtctaaacctacttccttcatcagaccatatagtgagcttcatgggagaattgagccccttctttttaatggaaatcactaattttggtattcaaactta

SEQ ID NO: 91329 - DNA, 120 bp, Artificial Sequence
  ENSG00000088035_18 (sequence is synthesized)
cattttagaatgcaagtagtgtgtatttcactgtttagaagtcatatcttagggaattaaatttgtgataatctttttaattactgagaaggcaatttaaactgcttgaagtttgaatat

SEQ ID NO: 91330 - DNA, 120 bp, Artificial Sequence
  ENSG00000088035_19 (sequence is synthesized)
gccttattacacatgcaaatttgattgttttaacaaggcaaataaaccataatcttatttatttccaagaatgcatattttaatacaattaaaaatgaattttcctgaatttaaatgtaa

SEQ ID NO: 91331 - DNA, 120 bp, Artificial Sequence
  ENSG00000088035_20 (sequence is synthesized)
gctttaacttaactttaagtggtttgagtgaagtcttctaaattacacataatcactggttctaaacttccagaaccattctgtttaattaaacattatattatatatatattattattg

SEQ ID NO: 91332 - DNA, 120 bp, Artificial Sequence
  ENSG00000088035_21 (sequence is synthesized)
acatggttcagggttaccactgccagagcattgattcatgttaacttcatcctattaatactgtatcaccctgtattagcagaagccaatatttattatagtattcaactggtaaaaata

SEQ ID NO: 91333 - DNA, 120 bp, Artificial Sequence
  ENSG00000088035_22 (sequence is synthesized)
atacatgatatccatgttgcagtttctcatataaagatatgttttctttagcctctgtaataaagataatcattttcccatcaacattttttaaggaatatatttcttctttcataagat

SEQ ID NO: 91334 - DNA, 120 bp, Artificial Sequence
  ENSG00000088035_23 (sequence is synthesized)
agccattaaactatattaagtggtggtatattttaatatagtgcaaatcaaaccacatacaaaaaaaaactggttctagacacggacagtcacaggctgatataagaaggtatgtgtttc

SEQ ID NO: 91335 - DNA, 120 bp, Artificial Sequence
  ENSG00000088035_24 (sequence is synthesized)
taagtctggtaaaggaagtgggtttagacaaagcaaaaatctagaaaggtttctttctcaaagcaaatgtgcataaagactcaaagggcaggtcaacgcagaatagcagccttgaatcac

SEQ ID NO: 91336 - DNA, 120 bp, Artificial Sequence
  ENSG00000088035_25 (sequence is synthesized)
tgccgaatcagcaagaacattgctgtccatggtcaccatctgtaatcactgtgcccaaatgtcagcatcttggctggctggtgtagctttatttttaaaaatattttttgtaatagtaca

SEQ ID NO: 91337 - DNA, 120 bp, Artificial Sequence
  ENSG00000088035_26 (sequence is synthesized)
atagtacacttgtgtttaacatagaatgttgacttagataaatgatgaggaagttataaataattggagtagcataactttattatttggaaataaaagtattatgtacatatattagta

SEQ ID NO: 91338 - DNA, 120 bp, Artificial Sequence
  ENSG00000088035_27 (sequence is synthesized)
agctgggatttacaggtgctggtaaaccgcctatgtttggtgattatgaagctcagagacactggcaagaaataacttttaatttaccggtcaaacaatggtattttaacagcagtgata

SEQ ID NO: 91339 - DNA, 120 bp, Artificial Sequence
  ENSG00000088035_28 (sequence is synthesized)
gctacttgtttgtatgatagagaaaaaaagttccattaacggcatactggaagcagcagttttccaattattatgaggagttgacacctctgtgcctgtgtctaggctaatttagtctgg

SEQ ID NO: 91340 - DNA, 120 bp, Artificial Sequence
  ENSG00000088035_29 (sequence is synthesized)
actgttaacaaaatgaatcagtagtccatatgaagaccttcctggctgtttttaagctaccgctgaaaatcagacagataaaatgtatttatattttttacaattaggagttgaagttat

SEQ ID NO: 91341 - DNA, 120 bp, Artificial Sequence
  ENSG00000088035_30 (sequence is synthesized)
attctgtaatattaaaatatttttttctttacgattttagaccagtctgcttagttttaagtgaaattccttttatgtctacttggtttttacttgtgtcaacatttaggtaagtcatat

SEQ ID NO: 91342 - DNA, 120 bp, Artificial Sequence
  ENSG00000088035_31 (sequence is synthesized)
caatttccatatattttcagtataattcttgtaaactaatttaaaacttttttatgaagtggttatggtttgaattgataattctcttgtgatttttaaaaattttcctttacagtatgc

SEQ ID NO: 91343 - DNA, 120 bp, Artificial Sequence
  ENSG00000088035_32 (sequence is synthesized)
ctggcttgtagaaggtctctgctttatgtgtcacacatggagagagacctctgttgtctcttccttttcttgtaaggacaccagtactactggattagggccccattcttatcatctaat

SEQ ID NO: 91344 - DNA, 120 bp, Artificial Sequence
  ENSG00000088035_33 (sequence is synthesized)
ttaaccttatttacctcctaaaaggctatatctccaaataacagtcacattgggggttagggcttcaacatatgaattttaattcagtccataacatgggataataaaattgtggtcttt

SEQ ID NO: 91345 - DNA, 120 bp, Artificial Sequence
  ENSG00000088035_34 (sequence is synthesized)
ttactctgttactctaagtaaattcagttgtgtgataaaaatgggtcaaatgtaatatgtattctataaattgtagaaaaaacatttcttagaaaaatttccaaagatgaaggactttag

SEQ ID NO: 91346 - DNA, 120 bp, Artificial Sequence
  ENSG00000088035_35 (sequence is synthesized)
tattcagggatagtgcactgctctttgaaaactattaagtatttgggaatgtctggattatggtgggccaatgcttttgatcaactgccctgcacaaaaatgaaaaatgcttgagacagt

SEQ ID NO: 91347 - DNA, 120 bp, Artificial Sequence
  ENSG00000088035_36 (sequence is synthesized)
gtatgcgtatatgtttattcctggaggatttaatctatttagttataattgtgactaaaagtttcacatctcaaaaagtttattagagattatgggctgtacttcatgggttttaatatt

SEQ ID NO: 91348 - DNA, 120 bp, Artificial Sequence
  ENSG00000088035_37 (sequence is synthesized)
ttgaataggtgtttgtttggggaaaagtttaccattttctgaccagtacagagaagaatttcaggcctttttgatatggttgagaaaatacatttaaatgtccagttctaatagaaagaa

SEQ ID NO: 91349 - DNA, 120 bp, Artificial Sequence
  ENSG00000088035_38 (sequence is synthesized)
ggtgccgggggctcggacgcgccacgagccggcgcagagctggcgacccgtctcccagctccgctccactcccagggacgcgacgcgaggcctccccagcccttcctgcagggtcgcttg

SEQ ID NO: 91350 - DNA, 120 bp, Artificial Sequence
  ENSG00000088035_39 (sequence is synthesized)
tgggtcgggtgaggggacgcggtgatagtggtggcacttgcaggctggggcggtcctggcacccttgtccttgcggttctgagggcctggccctcaagaggaggggcggagaaacgcgag

SEQ ID NO: 91351 - DNA, 120 bp, Artificial Sequence
  ENSG00000088035_40 (sequence is synthesized)
acacgcccgggatagctgcactccccggtgttgtgtccactgcggtggaaggacctttcagactaaaaggagcaaagtcggttctgggatggggacggcgggcttggcatttgtcgagat

SEQ ID NO: 91352 - DNA, 120 bp, Artificial Sequence
  ENSG00000088035_41 (sequence is synthesized)
gcaccgtcagggcaaaggaggacgaaaagcgcatctactgcctgcctagcaacttcgtggccagtggatgggatacttctacatagacataatcaagttttgactatttggaaaccaagc

SEQ ID NO: 91353 - DNA, 120 bp, Artificial Sequence
  ENSG00000088038_0 (sequence is synthesized)
atcttggaccgggcccggtcagcttccgcggagccatcggcagacgccgcggcctcccttgagccccgacccccgtcgtcagaacaaccccgggcccactcccccaaccccacttccgct

SEQ ID NO: 91354 - DNA, 120 bp, Artificial Sequence
  ENSG00000088038_1 (sequence is synthesized)
tcgcgccgctatcgcgatagcgcccgggcccggggcgcgagaaaaaggcggcgggcgctcgcctcccccgcctgtcgcgatacgctcctcagcggcggcgccagctcctgtgcgtccgtc

SEQ ID NO: 91355 - DNA, 120 bp, Artificial Sequence
  ENSG00000088038_2 (sequence is synthesized)
tccaagagagtatgaagagagtgcgtctgtagggcagggaagatggcggacaagcgcaaactccaaggtgagattgatcgctgcctcaagaaggtgtccgagggcgtggagcagtttgaa

SEQ ID NO: 91356 - DNA, 120 bp, Artificial Sequence
  ENSG00000088038_3 (sequence is synthesized)
gatatttggcagaagctccacaatgcagccaacgcgaaccagaaagaaaagtatgaggctgacctaaagaaggagattaagaagctacaacggctgagggaccaaatcaagacatgggta

SEQ ID NO: 91357 - DNA, 120 bp, Artificial Sequence
  ENSG00000088038_4 (sequence is synthesized)
gcgtccaacgagatcaaggacaagaggcagcttatagacaaccgcaagctcattgagacgcaaatggaacggttcaaagttgtggaacgagagaccaaaaccaaagcttacagcaaagag

SEQ ID NO: 91358 - DNA, 120 bp, Artificial Sequence
  ENSG00000088038_5 (sequence is synthesized)
ggcctgggcctggcccagaaggtagatcctgcccagaaggagaaggaagaggttggccagtggctcacgaataccatcgacacgctcaacatgcaggtggaccagtttgagagtgaagtg

SEQ ID NO: 91359 - DNA, 120 bp, Artificial Sequence
  ENSG00000088038_6 (sequence is synthesized)
gagtcactgtcagtgcagacacgcaagaagaagggcgacaaggataagcaggaccggattgagggcttgaagcggcacatcgagaagcaccgctaccacgtgcgcatgctagagaccatc

SEQ ID NO: 91360 - DNA, 120 bp, Artificial Sequence
  ENSG00000088038_7 (sequence is synthesized)
ctgcgcatgctggacaatgactccatcctcgttgacgccatccgcaagatcaaggacgacgttgagtactatgttgactcatcccaggaccccgacttcgaggagaacgagtttctctac

SEQ ID NO: 91361 - DNA, 120 bp, Artificial Sequence
  ENSG00000088038_8 (sequence is synthesized)
gatgacctggacctcgaggacattccacaggcgctggtcgccacctccccccccagccacagccacatggaggatgagatcttcaaccagtccagcagcacgcccacctcaaccacctcc

SEQ ID NO: 91362 - DNA, 120 bp, Artificial Sequence
  ENSG00000088038_9 (sequence is synthesized)
agctctcccatcccgcccagcccagccaactgtaccacggaaaactctgaagatgataagaagaggggacgttccacagacagtgaagtcagccagtctccagccaaaaacggctccaag

SEQ ID NO: 91363 - DNA, 120 bp, Artificial Sequence
  ENSG00000088038_10 (sequence is synthesized)
cctgtccacagcaaccagcaccctcagtccccagctgtgccgcccacctacccctccggccccccgcctgctgcctctgccttgagcaccactcctggcaacaatggggtccccgccccc

SEQ ID NO: 91364 - DNA, 120 bp, Artificial Sequence
  ENSG00000088038_11 (sequence is synthesized)
ccctgctccctatgcccaggctgtggccccaccagctcccagtgggcccagcacgacccagccccggccccccagcgtccagcctagcggaggcggaggcggcggcagcggaggcggagg

SEQ ID NO: 91365 - DNA, 120 bp, Artificial Sequence
  ENSG00000088038_12 (sequence is synthesized)
gagggagcagcagcagtagtaacagcagtgccggtggaggggctggcaagcagaatggcgccaccagttacagctcagttgtggcagacagcccggcagaggtggctttgagcagcagtg

SEQ ID NO: 91366 - DNA, 120 bp, Artificial Sequence
  ENSG00000088038_13 (sequence is synthesized)
ggggcaacaatgccagcagccaggccttgggccccccttccggcccccacaacccacctcccagcacctcgaaggaacccagtgcggcagccccaacgggggctgggggcgtggccccag

SEQ ID NO: 91367 - DNA, 120 bp, Artificial Sequence
  ENSG00000088038_14 (sequence is synthesized)
gctcagggaacaactcagggggacccagcctcctggtgccactgcctgtgaatcctcccagctccccaacgcccagcttcagtgatgccaaggcagccggtgccctgctcaatgggcctc

SEQ ID NO: 91368 - DNA, 120 bp, Artificial Sequence
  ENSG00000088038_15 (sequence is synthesized)
cacagttcagcaccgccccagaaatcaaggcccctgagcctctgagctccttgaagtccatggcggaacgggcagccatcagctctggcattgaggaccctgtgccaacgctgcacctga

SEQ ID NO: 91369 - DNA, 120 bp, Artificial Sequence
  ENSG00000088038_16 (sequence is synthesized)
ccgagcgagacatcatcctgagcagtacatcagcacctccggcctcagcccagccgcccctgcagctgtcagaggtgaacataccgctgtcgctgggtgtctgtccactgggccctgtgc

SEQ ID NO: 91370 - DNA, 120 bp, Artificial Sequence
  ENSG00000088038_17 (sequence is synthesized)
ccctcaccaaggagcagctctatcagcaggccatggaagaggccgcctggcaccacatgcctcacccctctgactctgagcgtattcggcagtacctcccccggaacccctgtccgacgc

SEQ ID NO: 91371 - DNA, 120 bp, Artificial Sequence
  ENSG00000088038_18 (sequence is synthesized)
ccccctaccaccaccagatgccacccccacactcggacactgtggaattctaccagcgcctgtcgaccgagacactcttcttcatcttctactatctggagggcactaaggcacagtatc

SEQ ID NO: 91372 - DNA, 120 bp, Artificial Sequence
  ENSG00000088038_19 (sequence is synthesized)
tggcagccaaggccctaaagaagcagtcatggcgattccacaccaagtacatgatgtggttccagaggcacgaggagcccaagaccatcactgacgagtttgagcagggcacctacatct

SEQ ID NO: 91373 - DNA, 120 bp, Artificial Sequence
  ENSG00000088038_20 (sequence is synthesized)
actttgactacgagaagtggggccagcggaagaaggaaggcttcacctttgagtaccgctacctggaggaccgggacctccagtgacaccggcccctccctctacccacccccttccccc

SEQ ID NO: 91374 - DNA, 120 bp, Artificial Sequence
  ENSG00000088038_21 (sequence is synthesized)
gcatgctgatccccctgcccaggtgagggccctgccctggaagactggagggaggccccaagccacggggcatccccctctcccaggaagcagggagggggccgggaggttttcctctca

SEQ ID NO: 91375 - DNA, 120 bp, Artificial Sequence
  ENSG00000088038_22 (sequence is synthesized)
gccccaccctgggggcccgggggcgagggctgccccctcctcccctccccagtgagggacattttttggtaaacctattttcattttggaaaatatttatgaataaatagttttatatga

SEQ ID NO: 91376 - DNA, 120 bp, Artificial Sequence
  ENSG00000088038_23 (sequence is synthesized)
aaattctccctgggggtaaggtaccagccctgtcctttgtgggcttcttgttctaaagcatatccgtcccatatggttgctgctagtcacatgtggtgattagtaactagttaaaaatga

SEQ ID NO: 91377 - DNA, 120 bp, Artificial Sequence
  ENSG00000088038_24 (sequence is synthesized)
aaaattcagttcctccattacacttgccacatttcagatgttcagtggccaacagatatgcgcaaatagagtgtttccagcattgcaaagttctgttggatagcactgtttgccagatgt

SEQ ID NO: 91378 - DNA, 120 bp, Artificial Sequence
  ENSG00000088038_25 (sequence is synthesized)
tcccttctttgtgggtgaggactcttttggtgtgacttccctctgtattgaggctcttgttcctcagtatggggctgtttctgtctttacagtaagtgactactccagggttccctgccc

SEQ ID NO: 91379 - DNA, 120 bp, Artificial Sequence
  ENSG00000088038_26 (sequence is synthesized)
tgcacacgtagagtgggagcggcccgtggatcccagggaactgtgcttttcattgtaggccccctccctggaggggaagagggcaatctccgctggtatctcagaagtcttcttctgagg

SEQ ID NO: 91380 - DNA, 120 bp, Artificial Sequence
  ENSG00000088038_27 (sequence is synthesized)
cataagcctctcttcccagggctcccctggtctcgctgtcaggccctaaggtatgtcttcccttggactaaagctccttggaactcccttttgacctcagtcttctctgggttccaggta

SEQ ID NO: 91381 - DNA, 120 bp, Artificial Sequence
  ENSG00000088038_28 (sequence is synthesized)
acttcctttaaaataaagacgctcctctcttgaagttttgggttcctgccctgatggtctatgtctccctgactctaaattaccaatccacttgctatgggattcctccgtgagtgcaga

SEQ ID NO: 91382 - DNA, 120 bp, Artificial Sequence
  ENSG00000088038_29 (sequence is synthesized)
tcggctccctcacagctgcggtacctttgcaccctcttatcttagtaagatttctgtcttctcccaggtctctcttgggtactgccttctgcccccaaatctctaagccttcttggtatt

SEQ ID NO: 91383 - DNA, 120 bp, Artificial Sequence
  ENSG00000088038_30 (sequence is synthesized)
agcttctttgggttaggagtgttatttccttttggtttaaggatcctgctctggaataaatgtcttggtggtttgagtcccttctacttggcattcagccctgtctgcatgagcgggttc

SEQ ID NO: 91384 - DNA, 120 bp, Artificial Sequence
  ENSG00000088038_31 (sequence is synthesized)
agctcttcacagctttcggcatctctgctcgccgtcgttttcccccacccccaatctttcttctcctacctacagcttacacacacacacacacacgcccttctctgtgagctgccagtt

SEQ ID NO: 91385 - DNA, 120 bp, Artificial Sequence
  ENSG00000088038_32 (sequence is synthesized)
tcatttgtctcctgacttgtctgagggatgacctctcctagccacctctgcccagcccctctgagtaggaagtgtgatctccagggctaatgcctccatcccagtcatcagctgtgtgca

SEQ ID NO: 91386 - DNA, 120 bp, Artificial Sequence
  ENSG00000088038_33 (sequence is synthesized)
gcatgactgtcctgctctgaaaaacctttttgagtgtattctggggagaaggtactccatgctctaggaattttccacttcctgagtcagaggcacacaaaaaagtatgtaacttttctt

SEQ ID NO: 91387 - DNA, 120 bp, Artificial Sequence
  ENSG00000088038_34 (sequence is synthesized)
gtttcaacaaacttatggggtcccctgttggccagacactatgctgggcagtcaagcgagcatcaggagaactggggctggtctcttgtcagatagcaaatgcttcttctctttaccagt

SEQ ID NO: 91388 - DNA, 120 bp, Artificial Sequence
  ENSG00000088038_35 (sequence is synthesized)
gtagagtccccaggctccaggcagcccctgctggcctctgctcccttgcctccacctttcagctggcgcagtccctcagcctgaccaagtactcctccctctggctgtctgctcagcctg

SEQ ID NO: 91389 - DNA, 120 bp, Artificial Sequence
  ENSG00000088038_36 (sequence is synthesized)
gaacaccgccctctcatcctccacttggccagctcctaggcctcctgtaggtctcagcccaaatgtcccttcctcaaagaaaccttcctggagccacccagcccagtgcctcccctttgc

SEQ ID NO: 91390 - DNA, 120 bp, Artificial Sequence
  ENSG00000088038_37 (sequence is synthesized)
agtgctgggcacactcgcctggggtgtgggattttcccagtatgtgtccctgcaccaggctgtgggctctgctgccgagggaccttgatggcccccacttcacctccaggtcccagcact

SEQ ID NO: 91391 - DNA, 120 bp, Artificial Sequence
  ENSG00000088038_38 (sequence is synthesized)
cagcagggcaggggctcagtgcggaaactattttttttgaatgggcttctcaagttctaatactgggaaattcctgctgcttgcaaacactctggaaccaacctacctgggtttcagccc

SEQ ID NO: 91392 - DNA, 120 bp, Artificial Sequence
  ENSG00000088038_39 (sequence is synthesized)
agtccagctgggcgactctaggcaagtcactcgaacctctgtgtctcaattaacttatctgtaaaaatggggggaagaccacctacctaatgcagttgttatgaagattaaatgagttaa

SEQ ID NO: 91393 - DNA, 120 bp, Artificial Sequence
  ENSG00000088038_40 (sequence is synthesized)
taacatgtaagtacttaatggtgactgctacatagtcagtgtcatggattttttttttcaaattactttcagttggtgtgttctacagtgatgtttttttccaccaaatacttccctgat

SEQ ID NO: 91394 - DNA, 120 bp, Artificial Sequence
  ENSG00000088038_41 (sequence is synthesized)
gccgagccccttcatggggatgaagtagtacaaggtccttgtcctcagagaactcagtcccctctcctggttctcccaggttgccatctttgaagcacttaagacattcatttagaacct

SEQ ID NO: 91395 - DNA, 120 bp, Artificial Sequence
  ENSG00000088038_42 (sequence is synthesized)
aggtcctctcccattgtgtcctcagatgttaaccacagacttcctgtcctttcctggtttggcccaaaaccatcctccaagttagtacatttcagggcatccagtcattcagaaattccc

SEQ ID NO: 91396 - DNA, 120 bp, Artificial Sequence
  ENSG00000088038_43 (sequence is synthesized)
acaccacttcgtcaccaataaaatgtccctgcagagtgcttggatttagactctgagactgttccattctctagaacaagggtgacagtacccactgcctcgaggtctttgtgaagatta

SEQ ID NO: 91397 - DNA, 120 bp, Artificial Sequence
  ENSG00000088038_44 (sequence is synthesized)
aatgctaggctgtgcatcctgtactcacgtgagaggtgctcaaaagccacagccctcgaggaaacgaaggctgtgcactcacacctggggctggggccccgttctggcagctggcttcgg

SEQ ID NO: 91398 - DNA, 120 bp, Artificial Sequence
  ENSG00000088038_45 (sequence is synthesized)
tggaacctctgcggccccctccgtttcctcctcgctgaagtggcatgataacatttcctacccaagaagaaccttgtgaggatggatgagagtgtgtgcgtgcagggcagctggcccggt

SEQ ID NO: 91399 - DNA, 120 bp, Artificial Sequence
  ENSG00000088038_46 (sequence is synthesized)
gcctgacacatccacagccctaagaattgtcccctttgtctgttggtccggcccagatcccagaccacctcctcgtccactcactgaccgccttctcccccggccagggcacctacatct

SEQ ID NO: 91400 - DNA, 120 bp, Artificial Sequence
  ENSG00000088038_47 (sequence is synthesized)
gcacagtatctggcagccaaggccctaaagaagcagtcatggcgattccacaccaagtacatgatgtggttccagaggcacgaggagcccaagaccatcactgacgagtttgagcagatc

SEQ ID NO: 91401 - DNA, 120 bp, Artificial Sequence
  ENSG00000088038_48 (sequence is synthesized)
ccgcggcccctccccagccctgctccagcagccccagtctaggccgaccccactctgctcattggcacattctcaggcctccctggagaccactggggagctgtccagccccctcccaac

SEQ ID NO: 91402 - DNA, 120 bp, Artificial Sequence
  ENSG00000088038_49 (sequence is synthesized)
cccacttctctgaaagcaattttcacctcctgtctcattttccttctcctgatcagcattggtatgttctgtgcccccagccccatctccaagaggattgtccagcccaactgtggtctg

SEQ ID NO: 91403 - DNA, 120 bp, Artificial Sequence
  ENSG00000088038_50 (sequence is synthesized)
tggcgggggccggggttcagccctgatgtcctgccccattcccctggctccccacccagtttgggggccccctgatccccctctccactgttcctcccccagggcactaaggcacagtat

SEQ ID NO: 91404 - DNA, 120 bp, Artificial Sequence
  ENSG00000088038_51 (sequence is synthesized)
tcagagaggagggcacaggaaggcggctcaggacctctgggtgttgaccagcgggaggggctacatatgcagatgctgaggacctaagagaatcagctctaagatggattgggggtaggg

SEQ ID NO: 91405 - DNA, 120 bp, Artificial Sequence
  ENSG00000088038_52 (sequence is synthesized)
gcgtccaacgagatcaaggacaagaggcagcttatagacaaccgcaagctcattgagacggtaggagcccagagcctgagtcccagagaggtgggaaggtcaccagattcttgagatccc

SEQ ID NO: 91406 - DNA, 120 bp, Artificial Sequence
  ENSG00000088038_53 (sequence is synthesized)
aaggggcggaggcagagcggccagaccccagaggtcctcaagagaagtaaggtttctgcacctaagggaagtgaagaggcagcggactcagagctcagaaagtagggtcacgaggctcag

SEQ ID NO: 91407 - DNA, 120 bp, Artificial Sequence
  ENSG00000088038_54 (sequence is synthesized)
gtcggagtgtctgctggcccttagtcagctcctttcccacctttgagagcccccctgccaactgcactctctacagcaaatggaacggttcaaagttgtggaacgagagaccaaaaccaa

SEQ ID NO: 91408 - DNA, 120 bp, Artificial Sequence
  ENSG00000088053_0 (sequence is synthesized)
acagagctcaggacagggctgaggaaccatgtctccatccccgaccgccctcttctgtcttgggctgtgtctggggcgtgtgccagcgcagagtggaccgctccccaagccctccctcca

SEQ ID NO: 91409 - DNA, 120 bp, Artificial Sequence
  ENSG00000088053_1 (sequence is synthesized)
ggctctgcccagctccctggtgcccctggagaagccagtgaccctccggtgccagggacctccgggcgtggacctgtaccgcctggagaagctgagttccagcaggtaccaggatcaggc

SEQ ID NO: 91410 - DNA, 120 bp, Artificial Sequence
  ENSG00000088053_2 (sequence is synthesized)
agtcctcttcatcccggccatgaagagaagtctggctggacgctaccgctgctcctaccagaacggaagcctctggtccctgcccagcgaccagctggagctcgttgccacgggagtttt

SEQ ID NO: 91411 - DNA, 120 bp, Artificial Sequence
  ENSG00000088053_3 (sequence is synthesized)
tgccaaaccctcgctctcagcccagcccggcccggcggtgtcgtcaggaggggacgtaaccctacagtgtcagactcggtatggctttgaccaatttgctctgtacaaggaaggggaccc

SEQ ID NO: 91412 - DNA, 120 bp, Artificial Sequence
  ENSG00000088053_4 (sequence is synthesized)
tgcgccctacaagaatcccgagagatggtacagggctagttttcccatcatcacggtgaccgccgcccacagcggaacctaccgatgctacagcttctccagcagggacccatacctgtg

SEQ ID NO: 91413 - DNA, 120 bp, Artificial Sequence
  ENSG00000088053_5 (sequence is synthesized)
gtcagcccccagcgaccccctggagcttgtggtcacaggaacctctgtgacccccagccggttaccaacagaaccaccttccccggtagcagaattctcagaagccaccgctgaactgac

SEQ ID NO: 91414 - DNA, 120 bp, Artificial Sequence
  ENSG00000088053_6 (sequence is synthesized)
cgtctcattcacaaacgaagtcttcacaactgagacttctaggagtatcaccgccagtccaaaggagtcagactctccagctggtgagtcctgcccgccagtactacaccaagggcaacc

SEQ ID NO: 91415 - DNA, 120 bp, Artificial Sequence
  ENSG00000088053_7 (sequence is synthesized)
tggtccggatatgcctcggggctgtgatcctaataatcctggcggggtttctggcagaggactggcacagccggaggaagcgcctgcggcacaggggcagggctgtgcagaggccgcttc

SEQ ID NO: 91416 - DNA, 120 bp, Artificial Sequence
  ENSG00000088053_8 (sequence is synthesized)
cgcccctcccgcccctcccgctgacccggaaatcaaacgggggtcaggatggaggccgacaggatgttcacagccgcgggttatgttcatgaccgctgaaccccaggcacggtcgtatcc

SEQ ID NO: 91417 - DNA, 120 bp, Artificial Sequence
  ENSG00000088053_9 (sequence is synthesized)
ctggtgttccatcagggagccgttcggccagtgtctgtctgtctgtctgcctctctgtctgagggcaccctccatttgggatggaaggaatctgtggagaccccatcctcctccctgcac

SEQ ID NO: 91418 - DNA, 120 bp, Artificial Sequence
  ENSG00000088053_10 (sequence is synthesized)
actgtggatgacatggtaccctggctggaccacatactggcctctttcttcaacctctctaatatgggctccagacggatctctaaggttcccagctctcagggttgactctgttccatc

SEQ ID NO: 91419 - DNA, 120 bp, Artificial Sequence
  ENSG00000088053_11 (sequence is synthesized)
ctctgtgcaaaatcctcccgtgcttccctttggccctctgtgctcttgtctggttttccccagaaactctcaccctcactccatctcccactgcggtctaacaaatctcctttcgtctct

SEQ ID NO: 91420 - DNA, 120 bp, Artificial Sequence
  ENSG00000088053_12 (sequence is synthesized)
cagaacgggtcttgcaggcagtttgggtatgtcattcattttccttagtgtaaaactagcacgttgcccgcttcccttcacattagaaaacaagatcagcctgtgcaacatggtgaaacc

SEQ ID NO: 91421 - DNA, 84 bp, Artificial Sequence
  ENSG00000088053_13 (sequence is synthesized)
aacctcatctctaccaacaaaacaccctatactcccagcaactcagggggctgaggtgggagaatggcttgagcctgggaggca

SEQ ID NO: 91422 - DNA, 120 bp, Artificial Sequence
  ENSG00000088053_14 (sequence is synthesized)
agctgagatcacaccactgcactctagctcgggtgacgaagcctgactttgtctcaaaaaatacagggatgaatatgtcaattaccctgatttgatcatagcacgttgtatacatgtact

SEQ ID NO: 91423 - DNA, 120 bp, Artificial Sequence
  ENSG00000088053_15 (sequence is synthesized)
catgtactgcaatattgctgtccaccccataaatatgtacaattctgtatacatttttaaaatcataaaaataagataatgcaccgtctccacccctctcatatttactttctgaaggaa

SEQ ID NO: 91424 - DNA, 120 bp, Artificial Sequence
  ENSG00000088053_16 (sequence is synthesized)
atgttaggtcttctcaaggtaaagttctatatttattatagcgtttaggcatttcttgaccatctaatgagtgtaaaactgtaccactgggccaagtgcagtggatcatgtctgtaatcc

SEQ ID NO: 91425 - DNA, 120 bp, Artificial Sequence
  ENSG00000088053_17 (sequence is synthesized)
gtcagagaaaggggtttcagggagcctagatatctcaaaaggggaatggagatatctagaggatatagggaaccacggggaagacctaacattgttttgctttcttagaattctcagaag

SEQ ID NO: 91426 - DNA, 120 bp, Artificial Sequence
  ENSG00000088053_18 (sequence is synthesized)
caccgtgtctaacacgaacaagtccacagagagcagtacgccaccatgccttgccctcctctcccaccacccccagccatggatctgctttcttctccatctcctatagatttacctatt

SEQ ID NO: 91427 - DNA, 120 bp, Artificial Sequence
  ENSG00000088053_19 (sequence is synthesized)
ctggatatttcatgtaaatgacctcataaactatgtggctttttctgaccggtttctctcacttaaattacattcctgtgtgtcttttgaagaaattattaggacagagtaaagcatatg

SEQ ID NO: 91428 - DNA, 120 bp, Artificial Sequence
  ENSG00000088053_20 (sequence is synthesized)
catgcaaatgtcttatcaccgcgcccagcaggcaggaatgtccataaaagcgagtcctggcatctggtccctttcttctttcctcagggctgtgtctggggcgtgtgccagcgcagagtg

SEQ ID NO: 91429 - DNA, 120 bp, Artificial Sequence
  ENSG00000088179_0 (sequence is synthesized)
aggattacccgccagctcacgccgcgcagtgcgcttttccgctcctcgcgccccaccaccaacattgttctctcaggactcctgggtcccaggggccggaattgggcctgagcgggagag

SEQ ID NO: 91430 - DNA, 120 bp, Artificial Sequence
  ENSG00000088179_1 (sequence is synthesized)
gaaagagacttggctttggccgcggggtcggaggattggggccaggccccctcccccacgcacttttgggggtgtggattatctcatccctgcagggaggtaggagaggtcgccggctgc

SEQ ID NO: 91431 - DNA, 120 bp, Artificial Sequence
  ENSG00000088179_2 (sequence is synthesized)
cctgcagggaggtaggagaggtcgccggctgcccgcctccctgccacctccccagcggcgccggcccgcggctgcccagcagcatgaggtggtgctggcggctccgggtcgtggcgcgac

SEQ ID NO: 91432 - DNA, 120 bp, Artificial Sequence
  ENSG00000088179_3 (sequence is synthesized)
ggtagccccccggagcggcacggaggacgcgcttctcctctgcgcgccggggcctcgaggctttttttctccagccgagaggacgcggctgtgatatacgaagactttgtgtggacagta

SEQ ID NO: 91433 - DNA, 120 bp, Artificial Sequence
  ENSG00000088179_4 (sequence is synthesized)
atgacctcacgtttccgattgcctgctggcagaacctacaatgtacgagcatcagagttggcccgagacagacagcatactgaagtggtttgcaacatccttcttctggataacactgta

SEQ ID NO: 91434 - DNA, 120 bp, Artificial Sequence
  ENSG00000088179_5 (sequence is synthesized)
caagctttcaaagtcaataaacatgatcaggggcaagtcttgttggatgtcgtcttcaagcatctagatttgactgagcaggactattttggtttacagttggctgatgattccacagat

SEQ ID NO: 91435 - DNA, 120 bp, Artificial Sequence
  ENSG00000088179_6 (sequence is synthesized)
aacccaaggtggctggatccaaacaaaccaataaggaagcagctaaagagaggatctccttacagtttgaactttagagtcaaattttttgtaagtgaccccaacaagttacaagaagaa

SEQ ID NO: 91436 - DNA, 120 bp, Artificial Sequence
  ENSG00000088179_7 (sequence is synthesized)
tatacaaggtaccagtattttttgcaaattaaacaagacattcttactggaagattaccctgtccttctaatactgctgcccttttagcttcatttgctgttcagtctgaacttggagac

SEQ ID NO: 91437 - DNA, 120 bp, Artificial Sequence
  ENSG00000088179_8 (sequence is synthesized)
tacgatcagtcagagaacttgtcaggctacctctcagattattctttcattcctaatcaacctcaagattttgaaaaagaaattgcaaaattacatcagcaacacataggcttatctcct

SEQ ID NO: 91438 - DNA, 120 bp, Artificial Sequence
  ENSG00000088179_9 (sequence is synthesized)
gcagaagcagaatttaattacctaaacacagcacgtaccttagaactctatggagttgaattccactatgcaagggatcagagtaacaatgaaattatgattggagtgatgtcaggagga

SEQ ID NO: 91439 - DNA, 120 bp, Artificial Sequence
  ENSG00000088179_10 (sequence is synthesized)
attctgatttataagaacagggtacgaatgaatacctttccatggttgaagattgtaaaaatttcttttaagtgcaaacagttttttattcaacttagaaaagaattgcatgaatctaga

SEQ ID NO: 91440 - DNA, 120 bp, Artificial Sequence
  ENSG00000088179_11 (sequence is synthesized)
gaaacattattgggatttaatatggtgaattacagagcatgtaaaaatttgtggaaagcatgtgtagaacatcacacattcttccgtttggacagaccacttccacctcaaaagaatttt

SEQ ID NO: 91441 - DNA, 120 bp, Artificial Sequence
  ENSG00000088179_12 (sequence is synthesized)
tttgcacattattttacattaggttcaaaattccggtactgtgggagaactgaagtccaatcagttcagtatggcaaagaaaaggcaaataaagacagggtatttgcaagatccccaagt

SEQ ID NO: 91442 - DNA, 120 bp, Artificial Sequence
  ENSG00000088179_13 (sequence is synthesized)
aagcccttggcacggaaattaatggattgggaagtagtaagcagaaattcaatatctgatgacaggttagaaacacaaagtcttccatcacgatctccaccgggaactcctaatcatcga

SEQ ID NO: 91443 - DNA, 120 bp, Artificial Sequence
  ENSG00000088179_14 (sequence is synthesized)
aattctacattcacgcaggaaggaacccggttacgaccatcttcagttggtcatttggtagaccatatggttcatacttccccaagcgaagtgtttgtaaatcagagatctccgtcatca

SEQ ID NO: 91444 - DNA, 120 bp, Artificial Sequence
  ENSG00000088179_15 (sequence is synthesized)
acacaagctaatagcattgttctggaatcatcaccatcacaagagacccctggagatgggaagcctccagctttaccacccaaacagtcaaagaaaaacagttggaaccaaattcattat

SEQ ID NO: 91445 - DNA, 120 bp, Artificial Sequence
  ENSG00000088179_16 (sequence is synthesized)
tcacattcgcaacaagatctagaaagtcatattaatgaaacatttgatattccatcttctcctgaaaaacccactcctaatggtggtattccacatgataatcttgtcctaatcagaatg

SEQ ID NO: 91446 - DNA, 120 bp, Artificial Sequence
  ENSG00000088179_17 (sequence is synthesized)
aaacctgatgaaaatgggaggtttggattcaatgtaaagggaggatatgatcagaagatgcctgtgattgtgtctcgagtagcaccaggaacacctgctgacctctgtgtccctagactg

SEQ ID NO: 91447 - DNA, 120 bp, Artificial Sequence
  ENSG00000088179_18 (sequence is synthesized)
aatgaaggggaccaagttgtactgatcaatggtcgggacattgcagaacacactcatgatcaggttgtgctgtttattaaagctagttgtgagagacattctggggaactcatgcttcta

SEQ ID NO: 91448 - DNA, 120 bp, Artificial Sequence
  ENSG00000088179_19 (sequence is synthesized)
gttcgacctaatgctgtatatgatgtagtggaagaaaagctagaaaatgagccagatttccagtatattcctgagaaagccccactagatagtgtgcatcaggatgaccattccctgcgg

SEQ ID NO: 91449 - DNA, 120 bp, Artificial Sequence
  ENSG00000088179_20 (sequence is synthesized)
gagtcaatgatccagctagctgaggggcttatcactggaacagtcctgacacagtttgatcaactgtatcggaaaaaacctggaatgacaatgtcctgtgccaaattacctcagaatatt

SEQ ID NO: 91450 - DNA, 120 bp, Artificial Sequence
  ENSG00000088179_21 (sequence is synthesized)
tccaaaaatagatacagagatatttcgccttatgatgccacacgggtcattttaaaaggtaatgaagactacatcaatgcgaactatataaatatggaaattccttcttccagcattata

SEQ ID NO: 91451 - DNA, 120 bp, Artificial Sequence
  ENSG00000088179_22 (sequence is synthesized)
aatcagtacattgcttgtcaagggccattaccacacacttgtacagatttttggcagatgacttgggaacaaggctcctctatggttgtaatgttgaccacacaagttgaacgtggcaga

SEQ ID NO: 91452 - DNA, 120 bp, Artificial Sequence
  ENSG00000088179_23 (sequence is synthesized)
gttaaatgtcaccaatattggccagaacccacaggcagttcatcttatggatgctaccaagttacctgccactctgaagaaggaaacactgcctatatcttcaggaagatgaccctattt

SEQ ID NO: 91453 - DNA, 120 bp, Artificial Sequence
  ENSG00000088179_24 (sequence is synthesized)
aaccaagagaaaaatgaaagtcgtccactcactcagatccagtacatagcctggcctgaccatggagtccctgatgattcgagtgactttctagattttgtttgtcatgtacgaaacaag

SEQ ID NO: 91454 - DNA, 120 bp, Artificial Sequence
  ENSG00000088179_25 (sequence is synthesized)
agggctggcaaggaagaacccgttgttgtccattgcagtgctggaatcggaagaactggggttcttattactatggaaacagccatgtgtctcattgaatgcaatcagccagtttatcca

SEQ ID NO: 91455 - DNA, 120 bp, Artificial Sequence
  ENSG00000088179_26 (sequence is synthesized)
ctagatattgtaagaacaatgagagatcagcgagccatgatgatccaaacacctagtcaatacagatttgtatgtgaagctattttgaaagtttatgaagaaggctttgttaaaccctta

SEQ ID NO: 91456 - DNA, 120 bp, Artificial Sequence
  ENSG00000088179_27 (sequence is synthesized)
acaacatcaacaaataaataagaaagcaaaaagatctgggatatgtgttggaaaactgctttcccttatgttcactgtgccataatgctgctcgcaggaaatggcattttacaaaaaaaa

SEQ ID NO: 91457 - DNA, 120 bp, Artificial Sequence
  ENSG00000088179_28 (sequence is synthesized)
aatgaagaactcaaaaaaactttgaaaacttcagcactgttgcactttatgttttaaaaaatgtcactctttcaaaatctataactcatgtatttgaagactgtttcatgctttgctccg

SEQ ID NO: 91458 - DNA, 120 bp, Artificial Sequence
  ENSG00000088179_29 (sequence is synthesized)
aacaaatagtaaataactgagtatgttcagggtaatttatgaaattttgtggtggtgccatgcaatccccttttggtagaattgccacaaacaaggctcaaaattctcatcatctctgtt

SEQ ID NO: 91459 - DNA, 120 bp, Artificial Sequence
  ENSG00000088179_30 (sequence is synthesized)
atacacctgtatcatgaaagcaaaaagaagtaaacatcaggagtcagctctggtcttttgcagtggtttgcgtacttactatactgattaccagattttatttttaaaattttagcaata

SEQ ID NO: 91460 - DNA, 120 bp, Artificial Sequence
  ENSG00000088179_31 (sequence is synthesized)
tcgttcttaatattagccaatacactgcctatggatgcagcacatttttccctgcacaccccctgtagagacctgcctgctgctcagaagaagaaagatggaatttgctgttcccaggaa

SEQ ID NO: 91461 - DNA, 120 bp, Artificial Sequence
  ENSG00000088179_32 (sequence is synthesized)
atgctgcacattgtccatttaccagcatcttatagaaaatataaatatgaatctacaaattctcttggatttaataatgtaacttatatttatcataaggttggcttattccaaatcatg

SEQ ID NO: 91462 - DNA, 120 bp, Artificial Sequence
  ENSG00000088179_33 (sequence is synthesized)
tgatttcacatacttgatgtaaaggaatgcatgcattgtgtcttaaccccttaagtgccttgagacgtccttgtatgtctaacgaaaaggcactcatttgaccccactaggaggtatata

SEQ ID NO: 91463 - DNA, 120 bp, Artificial Sequence
  ENSG00000088179_34 (sequence is synthesized)
tgtatattgtacattcgtatatttttatgcattttgaataagttcacattttaaaaaacagctatattgagtgttatacagtcaaagaagggtaaggaaattctgtttcttactcagtac

SEQ ID NO: 91464 - DNA, 120 bp, Artificial Sequence
  ENSG00000088179_35 (sequence is synthesized)
tcgtgatttgctataagaagcaaagataatttgtgttctactgagtgcacactgctgctatggaattgttcaaaatctgcacattcctttacttgagggactgaggggttacggtttagc

SEQ ID NO: 91465 - DNA, 120 bp, Artificial Sequence
  ENSG00000088179_36 (sequence is synthesized)
agctcaactttaaaagatgcttttatgcttcaaatttcatatttatttcatccctaactttaggaagacatctaacatgcagattaatgttaaacatattgataatctaagctaaagtta

SEQ ID NO: 91466 - DNA, 120 bp, Artificial Sequence
  ENSG00000088179_37 (sequence is synthesized)
gagcaaataattgtgatttattcatgtccataactaaaatattattctttagcactcatttcagttaatatcaagctttgttcacactgatatattgattgggattcttcaaacgaagaa

SEQ ID NO: 91467 - DNA, 120 bp, Artificial Sequence
  ENSG00000088179_38 (sequence is synthesized)
gggattcttcaaacgaagaatgaaacattattgacttatttctaagtgtaataactcaataactaaattgagaattttcttgtttttttgtgtacaattaaattattccattttatatat

SEQ ID NO: 91468 - DNA, 120 bp, Artificial Sequence
  ENSG00000088179_39 (sequence is synthesized)
gttaataaggagacttttgactgtccagcctaatggaggatctgattcccattaaggatgtgggaattcccgtattttcctcttcaggtttttttgtttttaagtctacagagagataga

SEQ ID NO: 91469 - DNA, 120 bp, Artificial Sequence
  ENSG00000088179_40 (sequence is synthesized)
accttaacattgcccagtttgataaaagtgaaaatttgctcacctatacaaatgttattttacacaattattttatgtggattggggttttaaaagattcatttcctagcagtttctgaa

SEQ ID NO: 91470 - DNA, 120 bp, Artificial Sequence
  ENSG00000088179_41 (sequence is synthesized)
tatttctgtaagatcttgataaagtttagagtcaaatggcagatattttggaaagccatttagtatgaggggaagagtacacattttaaatctttggtataatctaaacgatgtcatttc

SEQ ID NO: 91471 - DNA, 120 bp, Artificial Sequence
  ENSG00000088179_42 (sequence is synthesized)
agacattcaaaactcataataataaatttcaggaaatcaagctcctaaacattaatagccaagataccaaataaattatcatattaaaatatttaagtttatttaaagagagaagtaaac

SEQ ID NO: 91472 - DNA, 120 bp, Artificial Sequence
  ENSG00000088179_43 (sequence is synthesized)
ataaacttatgtcaaagagaaattctcttaatctatttcctgacttcacagtcaaaacagtataagatagtgaagtaacttataatcttatttggtcattctgttctataaacagacaaa

SEQ ID NO: 91473 - DNA, 120 bp, Artificial Sequence
  ENSG00000088179_44 (sequence is synthesized)
tataatttaggctgctatatgacatgataaattaaaaactgagaaagtaaaattatgtcggggtctacacattaaatgactgttttggcagtttttcacctgaatttaaaaataaaattt

SEQ ID NO: 91474 - DNA, 120 bp, Artificial Sequence
  ENSG00000088179_45 (sequence is synthesized)
gtctgttctatctgtatggacagaatatgacaaccatagaccaaaagatatcattgtatagatgtaaagagacaaaagtcatggttggcatgttctttaatttagggccttgtttatact

SEQ ID NO: 91475 - DNA, 120 bp, Artificial Sequence
  ENSG00000088179_46 (sequence is synthesized)
tcaatgcctgtctttaaatgccaatcattagaagtttagaattacatttaaatttctcatatatgaatttttcatctgggaactacccactgtcgtcatttttatgtgcagaaaagatcc

SEQ ID NO: 91476 - DNA, 120 bp, Artificial Sequence
  ENSG00000088179_47 (sequence is synthesized)
tttttgaaaaccatatttattgggatcttatttaaatttaaattatcctttacaacttcttaaaatgaatatgctaatagataagactttatccattacatctaagaactttttaacctg

SEQ ID NO: 91477 - DNA, 120 bp, Artificial Sequence
  ENSG00000088179_48 (sequence is synthesized)
tatatcaatctaaataggtttctagaaataatcctagctttcatacaccatgtagttctagactccgtccatatcagtgtaacattgtgtgataaaatgccaaatgtcttgtatctaagc

SEQ ID NO: 91478 - DNA, 120 bp, Artificial Sequence
  ENSG00000088179_49 (sequence is synthesized)
tacgctcccactcttccagccacccctacctcccaccttgacacccttaagaaagcaatgctgacttttattctgacaagtggaaatcaatagtggttaatcaagtggattttgtaaatg

SEQ ID NO: 91479 - DNA, 120 bp, Artificial Sequence
  ENSG00000088179_50 (sequence is synthesized)
ctaagaagtgtttgtgaaaaccttccctttctgagttaggattgttttttcctgttcatttcaggtgttttattgagcatctgatttgtgtcagcaccatgtaaatatgatgaggagtat

SEQ ID NO: 91480 - DNA, 120 bp, Artificial Sequence
  ENSG00000088179_51 (sequence is synthesized)
ttggaatagactttacattcaccagaaaattgatagtatttgttaaaccaatgcatccattcaaaatagaggcagagtaaacagcctaagaaatgatttcctttctacagtctgctagga

SEQ ID NO: 91481 - DNA, 120 bp, Artificial Sequence
  ENSG00000088179_52 (sequence is synthesized)
gaaagaggtgagaggggagtggttgatgattttaatcaagagtaaagggaacatttattacatgaaatctgacttcagttgtgcaaaggtatgttaagacattaagacaattgctggaag

SEQ ID NO: 91482 - DNA, 120 bp, Artificial Sequence
  ENSG00000088179_53 (sequence is synthesized)
gtttcaaatatgtgtacacacacatagagctacttttgtgtgtttatttatatgtatatttcacaaaggctaatgcccacagaggaaaatgattattttaacttctgggttatcatctgc

SEQ ID NO: 91483 - DNA, 120 bp, Artificial Sequence
  ENSG00000088179_54 (sequence is synthesized)
tggcagggtctgatcaggtctagagtatttaaggaaaagtctcctgtcttctatctccactagaagtactgcagcttgagagctgaaaggaacttgaaaaatgttatccagtcttcactt

SEQ ID NO: 91484 - DNA, 120 bp, Artificial Sequence
  ENSG00000088179_55 (sequence is synthesized)
agcccatttttatcggcattaggaaatagggttcagcaatggttattgatttagcagtctggtcttatatgatctgctttctaattatctatctagtattcctatattatactggaactt

SEQ ID NO: 91485 - DNA, 120 bp, Artificial Sequence
  ENSG00000088179_56 (sequence is synthesized)
caataaattataacctatgtgaatatcataaattcttgtgaatttttgtctatttccagtagagaagcatactcagccaatgttttcacttaataactatgacaaccttaaaggatgtca

SEQ ID NO: 91486 - DNA, 120 bp, Artificial Sequence
  ENSG00000088179_57 (sequence is synthesized)
cttaagttagaaaataagcaggcttaagaagtgattctaattaggacccccactcagtttgctagtcatgcctgcctgacagaacataagcttttgtaaagtatttagactgataacaca

SEQ ID NO: 91487 - DNA, 120 bp, Artificial Sequence
  ENSG00000088179_58 (sequence is synthesized)
tgcagtatgaaaacattatagactgcagttagaagactaattttttaaaagcactcaaaacatagaactaagatttagaatatatgtccatttataatgaaataatttgtgttcataatg

SEQ ID NO: 91488 - DNA, 120 bp, Artificial Sequence
  ENSG00000088179_59 (sequence is synthesized)
tgaacatgtaagataagtaaataaagcattacttgttttataatatcaggaagagagaaggaaacattagtttataacaatgtgctatttaatatctgtattttgaacatttaaaatact

SEQ ID NO: 91489 - DNA, 120 bp, Artificial Sequence
  ENSG00000088179_60 (sequence is synthesized)
ctgatggtaaggttgccaaagtaattttgaattcataaaaattgtttataccacaataatgtgggatatgtttacaggctcttttattttgtggtagttactttatagttcagatgaatt

SEQ ID NO: 91490 - DNA, 120 bp, Artificial Sequence
  ENSG00000088179_61 (sequence is synthesized)
tgcatttcagtcacttatagtaaataaagtatattaaatatttgttggaataaaaatctcaatgtaataggacatagataaattatgcaacagcctgctttgatgaaagctggtgcatta

SEQ ID NO: 91491 - DNA, 120 bp, Artificial Sequence
  ENSG00000088179_62 (sequence is synthesized)
tgtgagctgccacagttaatactttgtattaacattgcttacttcccccatttgcttcacctatctgactacaattgctggaatcattctttttgtggtgcttcctccaagtgaaataac

SEQ ID NO: 91492 - DNA, 120 bp, Artificial Sequence
  ENSG00000088179_63 (sequence is synthesized)
tatgttattaaaacctactggattaattttatcaaatatcagacttactgatctcttggcagagatttattggtgtctcagtgtgatcacaatacaagttgtagcaaccattttataaaa

SEQ ID NO: 91493 - DNA, 120 bp, Artificial Sequence
  ENSG00000088179_64 (sequence is synthesized)
ctcttagagaattatgtagataaaatggaaattacataatcctaaaacatttttgagggctaattgataataatttcagcaattttattaagaacccagtaaattaatccctaatttgta

SEQ ID NO: 91494 - DNA, 120 bp, Artificial Sequence
  ENSG00000088179_65 (sequence is synthesized)
tgttttttgttcaacttaccgtgtctgcaaccattatatagacttcattgatactcagcaattactacagtgtgtcttacaatgttataaaaaacaaacagcaatctctgtttctgccag

SEQ ID NO: 91495 - DNA, 120 bp, Artificial Sequence
  ENSG00000088179_66 (sequence is synthesized)
aagttagatatttttttatagtcctgatgaatttgttgtgagtagacaccacatagttatttctgtttgcatataaatttgctgctatttatttgtatgtttttctactgtagtatgcta

SEQ ID NO: 91496 - DNA, 120 bp, Artificial Sequence
  ENSG00000088179_67 (sequence is synthesized)
ttgatttctgaagttataatcataatttttattttagtaatccaagctaaatgggcaaccagaagtaatatctgctagggtgcaatccatcagcattggttcagtgcatatacataagta

SEQ ID NO: 91497 - DNA, 120 bp, Artificial Sequence
  ENSG00000088179_68 (sequence is synthesized)
aaccagtttaaaaaaattttactaagcaaaaggtagtagcaatattgctagttaaagattaccattttaggggaaagttcaaaggtttaacttcctgaaaccttttaaacttttcagtgc

SEQ ID NO: 91498 - DNA, 120 bp, Artificial Sequence
  ENSG00000088179_69 (sequence is synthesized)
aagaatgaaaatgtttgaaagccttgttaagctcataaaagtttcatttaaacactgtagagtttcctacctttgttgtgtaaaggatatagaaaatatttttctatggacagaaggttg

SEQ ID NO: 91499 - DNA, 120 bp, Artificial Sequence
  ENSG00000088179_70 (sequence is synthesized)
aaactgttaacttctttaatttcattgtttaaaggagataaaatgttatttgtgtgtctttcatgctgtaaagaaaatgaatgtatctttcaaatgtcattagaattatggcttgattct

SEQ ID NO: 91500 - DNA, 120 bp, Artificial Sequence
  ENSG00000088179_71 (sequence is synthesized)
aaggatactctatttgttttaaagtctacacgggattgaaaagaaagggaagagtattacacttcattgtacaaaatgtaattttagaagaaaaacattttcattataaacaagagcaat

SEQ ID NO: 91501 - DNA, 120 bp, Artificial Sequence
  ENSG00000088179_72 (sequence is synthesized)
cattgaagcattttcagatataatgtacattctttttcattttgctttgcctctagaatagaaacttttcagaaaatttgcacatactgtttgtaagtataaaataattgaattctagac

SEQ ID NO: 91502 - DNA, 120 bp, Artificial Sequence
  ENSG00000088179_73 (sequence is synthesized)
ttttggagtgtggaagggtgtttgtgtgtgaaggtaataaatgtgttgctgcatgtgtttaccatagagaacgttgccaggctttgtcaaatgaggacattgttgtgagggtgtgacttt

SEQ ID NO: 91503 - DNA, 120 bp, Artificial Sequence
  ENSG00000088179_74 (sequence is synthesized)
tgtgaagccagaaaactgtgcctaagattcattacagtgagtatgtgcagaggcccctgacccagtaaatgctttttgcctttttattcccaatgtcttggacagttgagacaacttggc

SEQ ID NO: 91504 - DNA, 120 bp, Artificial Sequence
  ENSG00000088179_75 (sequence is synthesized)
ccaactctgaattgtagcagtgatgtcttatatgcttacgagtttatattaattcagctgaacaagaactacatcttaaaccacctttgtaggtatgattaatacgtgcaacagctgctt

SEQ ID NO: 91505 - DNA, 120 bp, Artificial Sequence
  ENSG00000088179_76 (sequence is synthesized)
taaaaggtggtatttattattcatcactcatgaaacttgactcagtgaggacttcattatttttatttctctttccacgtctccaactttttaaaaatcactaatttaactctttgttaa

SEQ ID NO: 91506 - DNA, 120 bp, Artificial Sequence
  ENSG00000088179_77 (sequence is synthesized)
gtactcaagtacaaagtgatctcttctttcatgaactttgctataactgttgaaaggattggtgtcaggctctctcaaccctgggagtttccaaaatttagcaaatattacttgtgataa

SEQ ID NO: 91507 - DNA, 120 bp, Artificial Sequence
  ENSG00000088179_78 (sequence is synthesized)
gcttaaatgccacatcgctaagtacaattattaccaggaatccgtcaagggggagatagccccgctcacacccttagacccaaacaggtgctggttcatgctttctccacaaattggcag

SEQ ID NO: 91508 - DNA, 120 bp, Artificial Sequence
  ENSG00000088179_79 (sequence is synthesized)
ttgggtacttccccactgtcatcacagttgagctcattttaacatatattcaaagaagctttttagtttctactcctgaattgtagtgttcaagttatttgccttcctgggtaagaaaat

SEQ ID NO: 91509 - DNA, 120 bp, Artificial Sequence
  ENSG00000088179_80 (sequence is synthesized)
tttaacccaagtctgggattctctggcacctgtcttttcccatcttttaatgagttggcaagattaggtcaaatttcaatgctaaatttgattttttgaattttaaatagttgcacttta

SEQ ID NO: 91510 - DNA, 120 bp, Artificial Sequence
  ENSG00000088179_81 (sequence is synthesized)
tttcatgctgaccaccaacttaatttatacattttaaaataaaattatcctagaagtgttgtaaacgtgggaaaattttaattagtgttggaggtcattagattggacccaggtttaaat

SEQ ID NO: 91511 - DNA, 120 bp, Artificial Sequence
  ENSG00000088179_82 (sequence is synthesized)
ataatgatctcttcacagcttatttgatgtttaagagcaacttgtgtgatcttagctttgcaggttttctgtaatttatgtagcacaataaaggataaccagttgactgtgttactggac

SEQ ID NO: 91512 - DNA, 120 bp, Artificial Sequence
  ENSG00000088179_83 (sequence is synthesized)
tctgagttctcacagctagtttcatctaagcttggtttattatcatttctgctttggatttttttgtgcatcacatgaatacttagaaatccatttgttttcagtgtagtacctagggtg

SEQ ID NO: 91513 - DNA, 120 bp, Artificial Sequence
  ENSG00000088179_84 (sequence is synthesized)
aagtagatgctgcacaagtaagtttaagggaataaaagtcccgacactttatatacatgttgaggggcacgatttaagagactgaaacagtttacattaaactgtttttattttctgcca

SEQ ID NO: 91514 - DNA, 120 bp, Artificial Sequence
  ENSG00000088179_85 (sequence is synthesized)
gtagactctatctgcttaaaaaaataaaaattgttcaacccagtgttctccagcatcaggacattacagttgtaatctatgttgtaatcttttcaaataagaaaagctactccttattct

SEQ ID NO: 91515 - DNA, 120 bp, Artificial Sequence
  ENSG00000088179_86 (sequence is synthesized)
ctacagtgtaggcttaattttagaaccgataatttactatatctgcattattgatatttttaagtagtagttttaaaaataattatttctatgtggagggtgttttaatttgggattttt

SEQ ID NO: 91516 - DNA, 120 bp, Artificial Sequence
  ENSG00000088179_87 (sequence is synthesized)
tttttcttgtaacaggtgctatttgtaaatatgaaggggaaaagtcacttagttaaaagtctagcttatgtcataattaagatacaattattcatttcatgtttgattctattaaactag

SEQ ID NO: 91517 - DNA, 120 bp, Artificial Sequence
  ENSG00000088179_88 (sequence is synthesized)
tggcaaaacagaattggtcccttagttttttagattacctttccccctatatcacaaaaatatctctttccatatgatctcataattgaggcaaagaagctaagggtttatttaaaatgt

SEQ ID NO: 91518 - DNA, 120 bp, Artificial Sequence
  ENSG00000088179_89 (sequence is synthesized)
gtataagcttgaatttggtcaacactgcataatttgaaatcactctgcatttgtcactgcagcttactgtatgcttgaaaggccttgtgtgtttgtcttaattttagtgaaaaaattaga

SEQ ID NO: 91519 - DNA, 120 bp, Artificial Sequence
  ENSG00000088179_90 (sequence is synthesized)
atttctgccattcatgtacaaaaaaattacaactacagcaaacaagataaaaatgctggtttgcattaatactgttttagtcttaagagcaatttatattatgtgaaatgctgttacaca

SEQ ID NO: 91520 - DNA, 120 bp, Artificial Sequence
  ENSG00000088179_91 (sequence is synthesized)
tattttgttggccatatttcattttgagaaacagttgttcaggtacaaacatgacaaacaactctagctatgactcttaatgttcaattgcaaaataaagatgtgctttagtaatctaaa

SEQ ID NO: 91521 - DNA, 120 bp, Artificial Sequence
  ENSG00000088179_92 (sequence is synthesized)
ttttatattttatttttcagagtcaatacagatttgtatgtgaagctattttgaaagtttatgaagaaggctttgttaaacccttaacaacatcaacaaataaataagaaagcaaaaaga

SEQ ID NO: 91522 - DNA, 120 bp, Artificial Sequence
  ENSG00000088179_93 (sequence is synthesized)
tgggataccacctgcttatctgacctctacaatgctaaagacctgcttgcctggatcactgcttattgtctgactttgtgtggacagtaatgacctcacgtttccgattgcctgctggca

SEQ ID NO: 91523 - DNA, 120 bp, Artificial Sequence
  ENSG00000088179_94 (sequence is synthesized)
tggtgagtacggatttaataattattgacataaatgaagccttttaagaaatacccattcatgacagaacttttctattattagtacaagtgaaagtgcaattaatactgtggataactg

SEQ ID NO: 91524 - DNA, 120 bp, Artificial Sequence
  ENSG00000088179_95 (sequence is synthesized)
cccgctgaggtaatgaattcacttgttataacaaaatgtacttgtttttccagtgtgtatgtggttctaatttaaagttcttctagatattcctcttgctgtttctcgagcttagaaact

SEQ ID NO: 91525 - DNA, 120 bp, Artificial Sequence
  ENSG00000088179_96 (sequence is synthesized)
gatttctcacacatgatgttcattgaaaacctcagggtccatttttgaagggcagcaaatgagcatttcatatatccctttttccctactaaatctatagtacttactttcgtatataag

SEQ ID NO: 91526 - DNA, 120 bp, Artificial Sequence
  ENSG00000088179_97 (sequence is synthesized)
ttcattttattttaggggagctgagtgttacaagttcatgaacttataacacattgcctccctttgttggagtggtaatggctttatatattataaataacaaattgagttgtcatggaa

SEQ ID NO: 91527 - DNA, 120 bp, Artificial Sequence
  ENSG00000088179_98 (sequence is synthesized)
agtacagtgttggaaataatttcatcttgttaatgattttgtctgtttcattaaatcaaactaaccttatcctttgatgtacattatttcttagaaatctgagaagtcttggcaaattca

SEQ ID NO: 91528 - DNA, 120 bp, Artificial Sequence
  ENSG00000088179_99 (sequence is synthesized)
ttcatgcagatttcaagatggttgtgtgtgtatgtgtgtaaaatgtatttgaaaccataaaaatgtctttggggctgtcctcagtggctcaatcctgtaatcccagcactttgagaggct

SEQ ID NO: 91529 - DNA, 120 bp, Artificial Sequence
  ENSG00000088179_100 (sequence is synthesized)
tgggaggatcccttgaggccaggagttccagaccagccttggccacatagtgagacactgtctctacaaaaaaaaaatggaaaaaaaaaattggccaggtgtgatgatgtgtgcctctag

SEQ ID NO: 91530 - DNA, 120 bp, Artificial Sequence
  ENSG00000088179_101 (sequence is synthesized)
actcaggaggctgaggtgggaggctctctggagcccaggaattcaaggctgcaatgagctatcatcacaccattgcactccagcctggatgacatagggaggccctgtctcaaaaaaaaa

SEQ ID NO: 91531 - DNA, 120 bp, Artificial Sequence
  ENSG00000088179_102 (sequence is synthesized)
ctcaaaaaaaaaaaaaaaaaaagcctttgggtacagtggtggcttctacctgttatcccagctacttggaaggctgaggtgggtggataggttgagcccaggagttcaaggctgcaatga

SEQ ID NO: 91532 - DNA, 120 bp, Artificial Sequence
  ENSG00000088179_103 (sequence is synthesized)
attgtgccactgtagtccagcatgggcaacagagcaggacaccactgcctcttgaaaaataaagaaagtctttgaatcagctctgttgtattggtctactacgtgattataaactatggt

SEQ ID NO: 91533 - DNA, 120 bp, Artificial Sequence
  ENSG00000088179_104 (sequence is synthesized)
ttatcgtttatgttcataaaatacagagggatttttttcaagagaatttttattgaaataaaacataataccaaaaatgtgcatattttaagtacacaacttgatgaagtgaacatatcc

SEQ ID NO: 91534 - DNA, 120 bp, Artificial Sequence
  ENSG00000088179_105 (sequence is synthesized)
atatcagcacctccaagatatgtagtatatgtaccgccttctaatatgtagaactttaccagcaccccagatgcttgaaatgttgctgctggagctgatgcccacttccagtcattaagc

SEQ ID NO: 91535 - DNA, 120 bp, Artificial Sequence
  ENSG00000088179_106 (sequence is synthesized)
ctctaaatgcattaattttttacaagtaaactctttatgttgctcatctagaacataatctctgaaaacaaattgtaggatttgattcatggtttggggtataaaaataaaacttttaac

SEQ ID NO: 91536 - DNA, 120 bp, Artificial Sequence
  ENSG00000088179_107 (sequence is synthesized)
ctgtattttcaaatgccccaaattgctttacttaaaataatctgggaaattaggatattcgatacaagattttaattatgcaacttttcaaaatgtgtatgtttgcaattatgctcattt

SEQ ID NO: 91537 - DNA, 120 bp, Artificial Sequence
  ENSG00000088205_0 (sequence is synthesized)
acgtgcggccggaagggaagtaacgtcagcctgagaactgagtagctgtactgtgtggcgccttattctaggcacttgttgggcagaatgtcacacctgccgatgaaactcctgcgtaag

SEQ ID NO: 91538 - DNA, 120 bp, Artificial Sequence
  ENSG00000088205_1 (sequence is synthesized)
aagatcgagaagcggaacctcaaattgcggcagcggaacctaaagtttcagggggcctcaaatctgaccctatcggaaactcaaaatggagatgtatctgaagaaacaatgggaagtaga

SEQ ID NO: 91539 - DNA, 120 bp, Artificial Sequence
  ENSG00000088205_2 (sequence is synthesized)
aaggttaaaaaatcaaaacaaaagcccatgaatgtgggcttatcagaaactcaaaatggaggcatgtctcaagaagcagtgggaaatataaaagttacaaagtctccccagaaatccact

SEQ ID NO: 91540 - DNA, 120 bp, Artificial Sequence
  ENSG00000088205_3 (sequence is synthesized)
gtattaaccaatggagaagcagcaatgcagtcttccaattcagaatcaaaaaagaaaaagaagaaaaagagaaaaatggtgaatgatgctgagcctgatacgaaaaaagcaaaaactgaa

SEQ ID NO: 91541 - DNA, 120 bp, Artificial Sequence
  ENSG00000088205_4 (sequence is synthesized)
aacaaagggaaatctgaagaagaaagtgccgagactactaaagaaacagaaaataatgtggagaagccagataatgatgaagatgagagtgaggtgcccagtctgcccctgggactgaca

SEQ ID NO: 91542 - DNA, 120 bp, Artificial Sequence
  ENSG00000088205_5 (sequence is synthesized)
ggagcttttgaggatacttcgtttgcttctctatgtaatcttgtcaatgaaaacactctgaaggcaataaaagaaatgggttttacaaacatgactgaaattcagcataaaagtatcaga

SEQ ID NO: 91543 - DNA, 120 bp, Artificial Sequence
  ENSG00000088205_6 (sequence is synthesized)
ccacttctggaaggcagggatcttctagcagctgcaaaaacaggcagtggtaaaaccctggcttttctcatccctgcagttgaactcattgttaagttaaggttcatgcccaggaatgga

SEQ ID NO: 91544 - DNA, 120 bp, Artificial Sequence
  ENSG00000088205_7 (sequence is synthesized)
acaggagtccttattctctcacctactagagaactagccatgcaaacctttggtgttcttaaggagctgatgactcaccacgtgcatacctatggcttgataatgggtggcagtaacaga

SEQ ID NO: 91545 - DNA, 120 bp, Artificial Sequence
  ENSG00000088205_8 (sequence is synthesized)
tctgctgaagcacagaaacttggtaatgggatcaacatcattgtggccacaccaggccgtctgctggaccatatgcagaataccccaggatttatgtataaaaacctgcagtgtctggtt

SEQ ID NO: 91546 - DNA, 120 bp, Artificial Sequence
  ENSG00000088205_9 (sequence is synthesized)
attgatgaagctgatcgtatcttggatgtggggtttgaagaggaattaaagcaaattattaaacttttgccaacacgtagacagactatgctcttttctgccacccaaactcgaaaagtt

SEQ ID NO: 91547 - DNA, 120 bp, Artificial Sequence
  ENSG00000088205_10 (sequence is synthesized)
gaagacctggcaaggatttctctgaaaaaggagccattgtatgttggcgttgatgatgataaagcgaatgcaacagtggatggtcttgaacagggatatgttgtttgtccttctgaaaag

SEQ ID NO: 91548 - DNA, 120 bp, Artificial Sequence
  ENSG00000088205_11 (sequence is synthesized)
agattccttctgctctttacattccttaagaagaaccgaaagaagaagcttatggtcttcttttcatcttgtatgtctgtgaaataccactatgagttgctgaactacattgatttgccc

SEQ ID NO: 91549 - DNA, 120 bp, Artificial Sequence
  ENSG00000088205_12 (sequence is synthesized)
gtcttggccattcatggaaagcaaaagcaaaataagcgtacaaccacattcttccagttctgcaatgcagattcgggaacactattgtgtacggatgtggcagcgagaggactagacatt

SEQ ID NO: 91550 - DNA, 120 bp, Artificial Sequence
  ENSG00000088205_13 (sequence is synthesized)
cctgaagtcgactggattgttcagtatgaccctccggatgaccctaaggaatatattcatcgtgtgggtagaacagccagaggcctaaatgggagagggcatgccttgctcattttgcgc

SEQ ID NO: 91551 - DNA, 120 bp, Artificial Sequence
  ENSG00000088205_14 (sequence is synthesized)
ccagaagaattgggttttcttcgctacttgaaacaatccaaggttccattaagtgaatttgacttttcctggtctaaaatttctgacattcagtctcagcttgagaaattgattgaaaag

SEQ ID NO: 91552 - DNA, 120 bp, Artificial Sequence
  ENSG00000088205_15 (sequence is synthesized)
tataagtcatacatacgagcctatgattcccattctctgaaacagatctttaatgttaataacctaaatttgcctcaggttgctctgtcatttggtttcaaggtgcctcccttcgttgat

SEQ ID NO: 91553 - DNA, 120 bp, Artificial Sequence
  ENSG00000088205_16 (sequence is synthesized)
ctgaacgtcaacagtaatgaaggcaagcagaaaaagcgaggaggtggtggtggatttggctaccagaaaaccaagaaagttgagaaatccaaaatctttaaacacattagcaagaaatca

SEQ ID NO: 91554 - DNA, 120 bp, Artificial Sequence
  ENSG00000088205_17 (sequence is synthesized)
tctgacagcaggcagttctctcactgaacacatgccttcctttcatcttgaataactttgtcctaaaatgaattttttttccccttgatttaacaggatttttgtagactttagaatttg

SEQ ID NO: 91555 - DNA, 120 bp, Artificial Sequence
  ENSG00000088205_18 (sequence is synthesized)
gacttacctaacaagagtataaattgacttgggttgcaagcactgagcactgttacttctatcacgtctctcttttatttctgggatataaaacaggctttaagtttcttggttgcccaa

SEQ ID NO: 91556 - DNA, 120 bp, Artificial Sequence
  ENSG00000088205_19 (sequence is synthesized)
gggcagagcaaggaatatctggtgtttcttgtgatgataatattttaattttaaatatccctccctcatacaagtgtatgttaccattttaatataattctttttgtacctttccttctt

SEQ ID NO: 91557 - DNA, 120 bp, Artificial Sequence
  ENSG00000088205_20 (sequence is synthesized)
gttttgcgaagatttttgtggcatggattgctgtgctcactgctgtaaaaggtgacctagtgtactgggcagctggtggcggtgcagaaaagagtctcaggttattttttgtttttagtt

SEQ ID NO: 91558 - DNA, 120 bp, Artificial Sequence
  ENSG00000088205_21 (sequence is synthesized)
atttcttggaccttgacagtatctaatgactcctcctgaaaatgctgcagtataaaagagcaaagagctttgggaaatacctaagaagcaccttaagattagggtggcattgcttttata

SEQ ID NO: 91559 - DNA, 120 bp, Artificial Sequence
  ENSG00000088205_22 (sequence is synthesized)
gattcttgattttaaagcaacaggcctttctcaggtgttgcattttttggagcaaaaactatgggttgtaatttgaataaagtgtcactaagcagttataacgtttgatggctggggggt

SEQ ID NO: 91560 - DNA, 120 bp, Artificial Sequence
  ENSG00000088205_23 (sequence is synthesized)
aggaagaggatggaattgagatgtttgagcctcatttacatcaatagaggtgtaatgtactgcatttcttcatttggtaacataacaaagactttcatacaaagaacgatgatgctcctc

SEQ ID NO: 91561 - DNA, 120 bp, Artificial Sequence
  ENSG00000088205_24 (sequence is synthesized)
attaagatttgtttaattcaaggtggtttggatttggtaagcctttgcactctgtagagtacttagaagacaagggcaacttacttggagttagagccaagctgtcagacggtgcccagc

SEQ ID NO: 91562 - DNA, 120 bp, Artificial Sequence
  ENSG00000088205_25 (sequence is synthesized)
acacattaatgttagcttctttctgagaaaaaaatacctcttccaggccctgaaacaaaaaatacatttgctgtgaagattgaaaatgaacaaagttagaaaaaaaaacagcaaaatcag

SEQ ID NO: 91563 - DNA, 120 bp, Artificial Sequence
  ENSG00000088205_26 (sequence is synthesized)
tgatttagtcagatgagtttttcgttgtaggagcacttgatttctagtgtgttttgtacagtatataactacaagatagtacattttgtagcagttcaaagccaaagttgctagcatcat

SEQ ID NO: 91564 - DNA, 120 bp, Artificial Sequence
  ENSG00000088205_27 (sequence is synthesized)
tttgctgttgtgccagttaatcataggatcccattaaataagtgtgctaacatcgaatatagagaaaactggtaaagaacattccagtaggaaaagaaaagaacaatcttccatttctgg

SEQ ID NO: 91565 - DNA, 120 bp, Artificial Sequence
  ENSG00000088205_28 (sequence is synthesized)
gcttggccaccatcaccctggtcggacctgtcctggacttccaaccttgactgctgagctcctggcttagcttcttgggttcctaattcctggtgtttaataattctctccacgatcatg

SEQ ID NO: 91566 - DNA, 120 bp, Artificial Sequence
  ENSG00000088205_29 (sequence is synthesized)
tttttctgattttttttttcagaaataatgttttttaaaagacaaaaacaaagggaagaatatttaattactgagcagaagtaaatactgttggcattttgtacataatctaatttttat

SEQ ID NO: 91567 - DNA, 120 bp, Artificial Sequence
  ENSG00000088205_30 (sequence is synthesized)
atgcatgttcatgctttttaatttttttatcaaaaattaagtcatctacctactacttgtaaccagcttgtttcataacatgttattttcctgtgtcattaaataattacttcaatgttg

SEQ ID NO: 91568 - DNA, 120 bp, Artificial Sequence
  ENSG00000088205_31 (sequence is synthesized)
tcagaatgactctgcattaaaagttcacttattctcccagttccctgacggaaactgcattccacattcaaggtaaagatccctactatacagtgactgcagtatttctctggtattgaa

SEQ ID NO: 91569 - DNA, 120 bp, Artificial Sequence
  ENSG00000088205_32 (sequence is synthesized)
aagtacttaaggcttttcagggctcaaacgggctgtgccagaggattgaaaaggatcagtgggacttaagttatgaaaatgagatccttggaatgatctcttaagaacagcagatgcctg

SEQ ID NO: 91570 - DNA, 120 bp, Artificial Sequence
  ENSG00000088205_33 (sequence is synthesized)
aaggaaataaaattgcttaaggaagtagataaacttctgtagtatatgtggtagaataagcttcattgagaagtattttcaacaaacactggattaaagccgttttgatgatgaagcaca

SEQ ID NO: 91571 - DNA, 120 bp, Artificial Sequence
  ENSG00000088205_34 (sequence is synthesized)
attttcttcagttgtttgtcttcaaaggagtttgtccatttcatctaagtcctcaaatttatagacctagtgtttcatgatataccctttttaccttttgtaatatttgtagattctgta

SEQ ID NO: 91572 - DNA, 120 bp, Artificial Sequence
  ENSG00000088205_35 (sequence is synthesized)
gaaacatcatatctcccatttctgatatctctacctagaatatttgtagttgtgaggcaattgtaaagattccctaaaagattggggttatttttatatgtatctgtttcagcacgtaga

SEQ ID NO: 91573 - DNA, 120 bp, Artificial Sequence
  ENSG00000088205_36 (sequence is synthesized)
gggattgttagcaagcaacatttctacatgtgtcagaggagtctcgagtctggccagtgctgttacaaccattcttatggcaattaagcaagtaaggttttatgtacttctagcccaaga

SEQ ID NO: 91574 - DNA, 120 bp, Artificial Sequence
  ENSG00000088205_37 (sequence is synthesized)
agtgagcacagaaggaactgcccacatggctcggctttctagctctgttacccagcaacacctctgtgtcccagcctctcctttcctgttccctccagccctctttgaaaccttctccac

SEQ ID NO: 91575 - DNA, 120 bp, Artificial Sequence
  ENSG00000088205_38 (sequence is synthesized)
tcctttgaagctccctcacacctagtcatctctgcttctgctccccttctttcctcttacctcatgtgaagcagtggggaatccttgttcgctctagcctctgcctcctcccctgccctc

SEQ ID NO: 91576 - DNA, 120 bp, Artificial Sequence
  ENSG00000088205_39 (sequence is synthesized)
tgtctcctattcatcaactcttggcctacagtctcttccttgcggttggcgctttaccatctcaaatttctcactgtaaaaaagtaacttcaaccttaaacctgttcttctacccctgcc

SEQ ID NO: 91577 - DNA, 120 bp, Artificial Sequence
  ENSG00000088205_40 (sequence is synthesized)
tgcaggagctactgtctgttgcctttcctcagtcagccttactggaaaaatggcttatattcttgccatttacctccctctcagtccctaaccagcctaatttggctttagctttctact

SEQ ID NO: 91578 - DNA, 120 bp, Artificial Sequence
  ENSG00000088205_41 (sequence is synthesized)
atcacaccagaattgaatccatcaggaccctaagtggcctcttcattgctaggccatgtgggggatgcatatcaggccttctcctgcctgacatttacatcctcattggcctttctggca

SEQ ID NO: 91579 - DNA, 120 bp, Artificial Sequence
  ENSG00000088205_42 (sequence is synthesized)
tagtcttgatgataggcttcctctaccctgtaactgcaggcagttccctgaaattgctctacagcttttgcacactttgtccagaatgcttggtttcagctcgcctctgtctttgctggg

SEQ ID NO: 91580 - DNA, 120 bp, Artificial Sequence
  ENSG00000088205_43 (sequence is synthesized)
aagccatcgctgatctcctgcctccttgttcccacagcacaggtgctcatcaggttgacatttctttctttctttctttttttattattattacactttaagttctagggtacatgtgca

SEQ ID NO: 91581 - DNA, 64 bp, Artificial Sequence
  ENSG00000088205_44 (sequence is synthesized)
tgccatgttggtgtgctgcacccataaactcgtcatatacgttaggtatataattcaccaccct

SEQ ID NO: 91582 - DNA, 80 bp, Artificial Sequence
  ENSG00000088205_45 (sequence is synthesized)
gcctaaatgtcttcttttgagaagtgtgtgttcatatctttcgcccactttttgattagtagattctggatattagtcct

SEQ ID NO: 91583 - DNA, 120 bp, Artificial Sequence
  ENSG00000088205_46 (sequence is synthesized)
ttgacatttcattacttatctttctccccctcaagacggcaagctctctgagggcagagtccatgagttaggtacctattttctctctagcacctggcacaggcctgttgcttttctagt

SEQ ID NO: 91584 - DNA, 120 bp, Artificial Sequence
  ENSG00000088205_47 (sequence is synthesized)
tatctaatgagtgataactgatggcagatccatcctgtaggagtttgtggtcatcatggcctccagtgtcacaagcctcaatacaggactgtgggggtattagggcccctcttctgacat

SEQ ID NO: 91585 - DNA, 120 bp, Artificial Sequence
  ENSG00000088205_48 (sequence is synthesized)
ggagaaaaggggctgatggcccttctgactagaagcttcaagctgattcatggttgcaaatagtcaggattatagagattcttacagaaaagtgctttactgactgtgtccctatccagt

SEQ ID NO: 91586 - DNA, 120 bp, Artificial Sequence
  ENSG00000088205_49 (sequence is synthesized)
tccttgcctttcagaaagaaagaagtgcagattgcctaactcagcagagcaaagatgtaactttcccatcaacattgggagactagaaaaagcagattttcctttctgtcctgagggaat

SEQ ID NO: 91587 - DNA, 120 bp, Artificial Sequence
  ENSG00000088205_50 (sequence is synthesized)
ttcataggccggttcatccttccctgtcttcagtacccagtatcggaatgctgatcatcctggtttactaatcttaatacttttgatttctaggttccattaagtgaatttgacttttcc

SEQ ID NO: 91588 - DNA, 120 bp, Artificial Sequence
  ENSG00000088205_51 (sequence is synthesized)
tggtctaaaatttctgacattcagtctcaggtatgtgctttttaaacgtttgtgagtaaacaggaaccttgtcccagcactctgtttgtagtgattcactgggcaatcactgtcctttga

SEQ ID NO: 91589 - DNA, 120 bp, Artificial Sequence
  ENSG00000088205_52 (sequence is synthesized)
agtctaccctgtcctaaagtgaggatcaggctgtgtagtgtataaggtttcttgctattctagttatcaccactctgtgccctctttaaatgttttccatggagtggctttgctctagga

SEQ ID NO: 91590 - DNA, 120 bp, Artificial Sequence
  ENSG00000088205_53 (sequence is synthesized)
tatttaaaatctggtgttttggaggtttttgtttgtttttgtttattaaaaccagtgtttctttctatttcagcttgagaaattgattgaaaagaattactttcttcataagtcagccca

SEQ ID NO: 91591 - DNA, 120 bp, Artificial Sequence
  ENSG00000088205_54 (sequence is synthesized)
ctgacctttctgagcaatcagtgtcttcttacaacaataatactacagcattactacttttcagcgcatatgggcctcaaatctgaccctatcggaaactcaaaatggagatgtatctga

SEQ ID NO: 91592 - DNA, 120 bp, Artificial Sequence
  ENSG00000088205_55 (sequence is synthesized)
gttggaggtagataagagttgttcctatagaaaaactgtactaatgccagaactttaccatagccaagtgaggtagttgtgccaattaacccgaaaggtaatttggaatacaagcatcaa

SEQ ID NO: 91593 - DNA, 120 bp, Artificial Sequence
  ENSG00000088205_56 (sequence is synthesized)
atgtattataacttgatataatagttttgctgttttagaagttataaggcacgttaagcagtcttcacataggtcctgtcctccacctcttgcccattcttacctcatctaacatccccc

SEQ ID NO: 91594 - DNA, 120 bp, Artificial Sequence
  ENSG00000088205_57 (sequence is synthesized)
aagaagccgcagattttttgccttacttgtacataccttggttatagtacttgcaacattatgaactggttataactaagaccatggtttccttcattatataatttatttttaaaagct

SEQ ID NO: 91595 - DNA, 120 bp, Artificial Sequence
  ENSG00000088205_58 (sequence is synthesized)
ttgtcaaagtataattatatctacccatttataatgtacaatttgatgttctttgatttgtttaccactgtgacatcatcgctgcaatcaagaaaatgaacatgtccatcacagtcaaag

SEQ ID NO: 91596 - DNA, 120 bp, Artificial Sequence
  ENSG00000088247_0 (sequence is synthesized)
tgtggagcgaggccttgttcccgcgttgagccgccgccgccgccgccgcctcctcagcttcagcctccgcgccaggcccggccccgccgcgccatgtcggactacagcacgggaggaccc

SEQ ID NO: 91597 - DNA, 120 bp, Artificial Sequence
  ENSG00000088247_1 (sequence is synthesized)
ccgggcggggggtcggccgggggcccctctcagccacccggcggaggcggcccgggaatccgcaaggacgctttcgccgacgccgtgcagcgggcccgccagattgcagccaaaattgga

SEQ ID NO: 91598 - DNA, 120 bp, Artificial Sequence
  ENSG00000088247_2 (sequence is synthesized)
ggcgatgctgccacgacagtgaataacagcactcctgattttggttttgggggccaaaagagacagttggaagatggagatcaaccggagagcaagaagctggcttcccagggagactca

SEQ ID NO: 91599 - DNA, 120 bp, Artificial Sequence
  ENSG00000088247_3 (sequence is synthesized)
atcagttctcaacttggacccatccatcctcccccaaggacttcaatgacagaagagtacagggtcccagacggcatggtgggcctgatcattggcagaggaggtgaacaaattaacaaa

SEQ ID NO: 91600 - DNA, 120 bp, Artificial Sequence
  ENSG00000088247_4 (sequence is synthesized)
atccaacaggattcaggctgcaaagtacagatttctccagacagcggtggcctacccgagcgcagtgtgtccttgacaggagccccagaatctgtccagaaagccaagatgatgctggat

SEQ ID NO: 91601 - DNA, 120 bp, Artificial Sequence
  ENSG00000088247_5 (sequence is synthesized)
gacattgtgtctcggggtcgtgggggccccccaggacagttccacgacaacgccaacgggggccagaacggcaccgtgcaggagatcatgatccccgcgggcaaggccggcctggtcatt

SEQ ID NO: 91602 - DNA, 120 bp, Artificial Sequence
  ENSG00000088247_6 (sequence is synthesized)
ggcaagggcggggagaccattaagcagctgcaggaacgcgctggagtgaagatgatcttaattcaggacggatctcagaatacgaatgtggacaaacctctccgcatcattggggatcct

SEQ ID NO: 91603 - DNA, 120 bp, Artificial Sequence
  ENSG00000088247_7 (sequence is synthesized)
tacaaagtgcagcaagcctgtgagatggtgatggacatcctccgggaacgtgaccaaggcggctttggggaccggaatgagtacggatctcggattggcggaggcatcgatgtgccagtg

SEQ ID NO: 91604 - DNA, 120 bp, Artificial Sequence
  ENSG00000088247_8 (sequence is synthesized)
cccaggcattctgttggcgtggtcattggccggagtggagagatgatcaagaagatccagaatgatgctggcgtgcggatacagttcaagcaagatgacgggacagggcccgagaagatt

SEQ ID NO: 91605 - DNA, 120 bp, Artificial Sequence
  ENSG00000088247_9 (sequence is synthesized)
gctcatataatggggcccccagacaggtgcgagcacgcagcccggatcatcaacgacctcctccagagcctcaggagtggtcccccaggtcctccagggggtccaggcatgcccccgggg

SEQ ID NO: 91606 - DNA, 120 bp, Artificial Sequence
  ENSG00000088247_10 (sequence is synthesized)
ggccgaggccgaggaagaggccaaggcaattggggtccccctggcggggagatgaccttctccatccccactcacaagtgtgggctggtcatcggccgaggtggcgagaatgtgaaagcc

SEQ ID NO: 91607 - DNA, 120 bp, Artificial Sequence
  ENSG00000088247_11 (sequence is synthesized)
caagcagcttatcgaggaaaagatcgagggtcctctctgcccagttggaccaggcccaggtggcccaggccctgctggcccaatggggcccttcaatcctgggcccttcaaccaggggcc

SEQ ID NO: 91608 - DNA, 120 bp, Artificial Sequence
  ENSG00000088247_12 (sequence is synthesized)
acccggggctcccccacatgccggggggccccctcctcaccagtacccaccccagggctggggcaatacctacccccagtggcagccgcctgctcctcatgacccaagcaaagcagctgc

SEQ ID NO: 91609 - DNA, 120 bp, Artificial Sequence
  ENSG00000088247_13 (sequence is synthesized)
cggaccccaacgccgcgtgggccgcctactactcacactactaccagcagcccccgggccccgtccccggccccgcaccggcccctgcggccccaccggctcagggtgagccccctcagc

SEQ ID NO: 91610 - DNA, 120 bp, Artificial Sequence
  ENSG00000088247_14 (sequence is synthesized)
ccctcagcccccacccaccggccagtcggactacactaaggcctgggaagagtattacaaaaagatcggccagcagccccagcagcccggagcacccccacagcaggactacacgaaggc

SEQ ID NO: 91611 - DNA, 120 bp, Artificial Sequence
  ENSG00000088247_15 (sequence is synthesized)
ttgggaggagtactacaagaagcaagcgcaagtggccaccggagggggtccaggagctcccccaggctcccagccagactacagtgccgcctgggcggaatattacagacagcaggccgc

SEQ ID NO: 91612 - DNA, 120 bp, Artificial Sequence
  ENSG00000088247_16 (sequence is synthesized)
ttactacggacagaccccaggtcctggcggcccccagccgccgcccacgcagcagggacagcagcaggctcaatgaatcgaatgaatgtgaacttcttcatctgtgaaaaatcttttttt

SEQ ID NO: 91613 - DNA, 120 bp, Artificial Sequence
  ENSG00000088247_17 (sequence is synthesized)
tttccattttgttctgtttgggggcttctgttttgtttggcgagagagcgatggctgccgtggggagtactggggagccctcgcggcaagcagggtgggggggacttgggggcatgccgg

SEQ ID NO: 91614 - DNA, 120 bp, Artificial Sequence
  ENSG00000088247_18 (sequence is synthesized)
gccctcactctctcgcctgttctgtgtctcacatgctttttctttcaaaattgggatccttccatgttgagccagccagagaagatagcgagatctaaatctctgccaaaaaaaaaaaaa

SEQ ID NO: 91615 - DNA, 120 bp, Artificial Sequence
  ENSG00000088247_19 (sequence is synthesized)
aacttaaaaattaaaaacacaaagagcaaagcagaacttataaaattatatatatatatattaaaaagtctctattcttcaccccccagccttcctgaacctgcctctctgaggataaag

SEQ ID NO: 91616 - DNA, 120 bp, Artificial Sequence
  ENSG00000088247_20 (sequence is synthesized)
caattcattttctcccaccctcggccctcttgtttttaaaataaacttttaaaaaggaaaaaaaaaagtcactcttgctatttcttttttttagttagaggtggaacattccttggacca

SEQ ID NO: 91617 - DNA, 120 bp, Artificial Sequence
  ENSG00000088247_21 (sequence is synthesized)
ggtgttgtattgcaggaccccttcccccagcagccaagccccctcttctctccctcccgccctggctcagctcccgcggccccgcccgtcccccctcccaggactggtctgttgtctttt

SEQ ID NO: 91618 - DNA, 120 bp, Artificial Sequence
  ENSG00000088247_22 (sequence is synthesized)
catctgttcaagaggagattgaaactgaaaacaaaatgagaacaacaaaaaaaattgtatggcagtttttactttttatcgctcgtttttaacttcacaaataaatgataacaaaacctc

SEQ ID NO: 91619 - DNA, 120 bp, Artificial Sequence
  ENSG00000088247_23 (sequence is synthesized)
caagccccctcctccctcccgccctggctcagctcccgcggccccgcccgtcccccctcccaggactggtctgttgtcttttcatctgttcaagaggagattgaaactgaaaacaaaatg

SEQ ID NO: 91620 - DNA, 120 bp, Artificial Sequence
  ENSG00000088247_24 (sequence is synthesized)
aacgggtgacccccctgcagggagtaggggcgcactgggggtcaccaggagcggcgcctgggtgtgcaggcgccccggagctcggagacgcacttttgggaccccccccttagccccccg

SEQ ID NO: 91621 - DNA, 120 bp, Artificial Sequence
  ENSG00000088247_25 (sequence is synthesized)
ggcggcccccagccgccgcccacgcagcagggacagcagcaggcaagtgggaattgccaccctcctcctcctcctttctccttccaacccccggccaccgtccatcctgccttagtgggt

SEQ ID NO: 91622 - DNA, 120 bp, Artificial Sequence
  ENSG00000088247_26 (sequence is synthesized)
agcgccggaaaccccttcccctgcggggtgtgcccttgatgcctgcagcgggggccgtgtggccggaggtctccgggagtccccacgcaccgccagggaagcattcgctgggtccagagg

SEQ ID NO: 91623 - DNA, 120 bp, Artificial Sequence
  ENSG00000088247_27 (sequence is synthesized)
ttaaacgaagaggcctccctgcgccggctgcttgttcctgtgtgccgctgtcgtgatgctggggagcgctgagactcgcaggcgggacttctgaactgctggggagtcggggggcaggca

SEQ ID NO: 91624 - DNA, 120 bp, Artificial Sequence
  ENSG00000088247_28 (sequence is synthesized)
gacagcgcggacggtgggcaccggcccggccgccaccacctcgctcacaatctggccacttgggaagaaaacgtctattttttccccttctctgcatcacttttttggtttttgttcttt

SEQ ID NO: 91625 - DNA, 120 bp, Artificial Sequence
  ENSG00000088247_29 (sequence is synthesized)
gacagttggaagatggagatcaaccggagagcaagaagctggcttcccagggagactgtaagtccagggggtctggtggcagatatgtggcttcagagggttgaggttttcaggagtcag

SEQ ID NO: 91626 - DNA, 120 bp, Artificial Sequence
  ENSG00000088247_30 (sequence is synthesized)
gagctggaagcactgaggaggtggcagctctttacagaggcccctggtgcttcattctggggcccatacgtttgagggatcccaggaaccctgaaattgagggagatgagctctgtgctt

SEQ ID NO: 91627 - DNA, 120 bp, Artificial Sequence
  ENSG00000088247_31 (sequence is synthesized)
ggaggagctaagccagtctttgctttgggttttctctctacagcaatcagttctcaacttggacccatccatcctcccccaaggtaagccatggtggggcccacactgctttcttgtctg

SEQ ID NO: 91628 - DNA, 120 bp, Artificial Sequence
  ENSG00000088247_32 (sequence is synthesized)
ttggccagcagactggcctttctgctgacttgggagggctctgactgggggcacatctctcaggttttatcccccagtgccagttgaccagagtgctcagacgggaatgaggcagaggag

SEQ ID NO: 91629 - DNA, 120 bp, Artificial Sequence
  ENSG00000088247_33 (sequence is synthesized)
ctgtgtccgttcctcgtaccccttgtctgaagggctgtgggaggggagcgtcgtggcagtcactgtagtgatagggtggtctccgcaccctatggcttcctccgctggggtggggactct

SEQ ID NO: 91630 - DNA, 120 bp, Artificial Sequence
  ENSG00000088247_34 (sequence is synthesized)
gtgagtctgcagggtggcgggggggctccagccctgccgggggagtggtttctgacctgtctcggcgcccgcacaggccagcagccccagcagcccggagcacccccacagcaggactac

SEQ ID NO: 91631 - DNA, 120 bp, Artificial Sequence
  ENSG00000088247_35 (sequence is synthesized)
gggcggtaggcgggggcctggccctcccgctgcgcctcgagtgggatcccaacgggtgacccccctgcagggagtaggggcgcactgggggtcaccaggagcggcgcctggattgcagcc

SEQ ID NO: 91632 - DNA, 120 bp, Artificial Sequence
  ENSG00000088247_36 (sequence is synthesized)
ttttattttttaaacccatgatcttttttcctgtgtccaagtgactgtgttgcaggcggcctggctctggcagggactggtggggacgcggggagcggcccaggcccctgccccgccggg

SEQ ID NO: 91633 - DNA, 120 bp, Artificial Sequence
  ENSG00000088247_37 (sequence is synthesized)
ctcagcctcccatgcgctcgcgcttgcctgtgtcccgggcttgtctgtgaagtgggcgtgaagatcgttgccaccttccaacctacctcacaggggtgttgtggggacaccatgatctct

SEQ ID NO: 91634 - DNA, 120 bp, Artificial Sequence
  ENSG00000088247_38 (sequence is synthesized)
cacgcagcagggacagcagcagccttcctgaacctgcctctctgaggataaagcaattcattttctcccaccctcggccctcttgtttttaaaataaacttttaaaaaggaaaaaaaaaa

SEQ ID NO: 91635 - DNA, 80 bp, Artificial Sequence
  ENSG00000088256_0 (sequence is synthesized)
aggttgtccggcgctgtcgctcggttgcggcggctgcggttggcggtggctgcggcggcggcgcgggctgagtgcggccg

SEQ ID NO: 91636 - DNA, 120 bp, Artificial Sequence
  ENSG00000088256_1 (sequence is synthesized)
ggccggggggcggcggcgggcaggcggccgcgtcggccggggccgggacgatgactctggagtccatgatggcgtgttgcctgagcgatgaggtgaaggagtccaagcggatcaacgccg

SEQ ID NO: 91637 - DNA, 120 bp, Artificial Sequence
  ENSG00000088256_2 (sequence is synthesized)
agatcgagaagcagctgcggcgggacaagcgcgacgcccggcgcgagctcaagctgctgctgctcggcacgggcgagagcgggaagagcacgttcatcaagcagatgcgcatcatccacg

SEQ ID NO: 91638 - DNA, 120 bp, Artificial Sequence
  ENSG00000088256_3 (sequence is synthesized)
gcgccggctactcggaggaggacaagcgcggcttcaccaagctcgtctaccagaacatcttcaccgccatgcaggccatgatccgggccatggagacgctcaagatcctctacaagtacg

SEQ ID NO: 91639 - DNA, 120 bp, Artificial Sequence
  ENSG00000088256_4 (sequence is synthesized)
agcagaacaaggccaatgcgctcctgatccgggaggtggacgtggagaaggtgaccaccttcgagcatcagtacgtcagtgccatcaagaccctgtgggaggacccgggcatccaggaat

SEQ ID NO: 91640 - DNA, 120 bp, Artificial Sequence
  ENSG00000088256_5 (sequence is synthesized)
gctacgaccgcaggcgcgagtaccagctctccgactctgccaagtactacctgaccgacgttgaccgcatcgccaccttgggctacctgcccacccagcaggacgtgctgcgggtccgcg

SEQ ID NO: 91641 - DNA, 120 bp, Artificial Sequence
  ENSG00000088256_6 (sequence is synthesized)
tgcccaccaccggcatcatcgagtaccctttcgacctggagaacatcatcttccggatggtggatgtggggggccagcggtcggagcggaggaagtggatccactgctttgagaacgtga

SEQ ID NO: 91642 - DNA, 120 bp, Artificial Sequence
  ENSG00000088256_7 (sequence is synthesized)
catccatcatgtttctcgtcgccctcagcgaatacgaccaagtcctggtggagtcggacaacgagaaccggatggaggagagcaaagccctgttccggaccatcatcacctacccctggt

SEQ ID NO: 91643 - DNA, 120 bp, Artificial Sequence
  ENSG00000088256_8 (sequence is synthesized)
tccagaactcctccgtcatcctcttcctcaacaagaaggacctgctggaggacaagatcctgtactcgcacctggtggactacttccccgagttcgatggtccccagcgggacgcccagg

SEQ ID NO: 91644 - DNA, 120 bp, Artificial Sequence
  ENSG00000088256_9 (sequence is synthesized)
cggcgcgggagttcatcctgaagatgttcgtggacctgaaccccgacagcgacaagatcatctactcacacttcacgtgtgccaccgacacggagaacatccgcttcgtgttcgcggccg

SEQ ID NO: 91645 - DNA, 120 bp, Artificial Sequence
  ENSG00000088256_10 (sequence is synthesized)
tgaaggacaccatcctgcagctcaacctcaaggagtacaacctggtctgagcgcccaggcccagggagacgggatggagacacggggcaggaccttccttccacggagcctgcggctgcc

SEQ ID NO: 91646 - DNA, 120 bp, Artificial Sequence
  ENSG00000088256_11 (sequence is synthesized)
gggcgggtggcgctgccgagtccgggccggggcctctgcccgcgggaggagatttttttttttcatatttttaacaaatggtttttatttcacagttatcaggggatgtacatctctccc

SEQ ID NO: 91647 - DNA, 120 bp, Artificial Sequence
  ENSG00000088256_12 (sequence is synthesized)
tctctccctccgtacacttcgcgcaccttctcaccttttgtcaacggcaaaggcagcctttttctggccttgacttatggctcgcttttttctaaaaaaaaaaaaaaaagaaagaaagaa

SEQ ID NO: 91648 - DNA, 120 bp, Artificial Sequence
  ENSG00000088256_13 (sequence is synthesized)
acgaaacataaaacacacaagcgccccgtgcccccagtgactctgggcctcacagagcccccgccagccagcatggggccccgccctgcagccagtcacgcgcccccacaccgcagcccc

SEQ ID NO: 91649 - DNA, 120 bp, Artificial Sequence
  ENSG00000088256_14 (sequence is synthesized)
ccgtggctgtccttccaaccccacgtgctttttctttctcctgcccgcttcttttcttcatcacaaaaggcgtggagactcggagacggacgtttttccccttttttaagttattgacgc

SEQ ID NO: 91650 - DNA, 120 bp, Artificial Sequence
  ENSG00000088256_15 (sequence is synthesized)
ccagcgcgcctcgcctcttcacccatcaacgctgtgctttgcccactggactcctgaagagggggtggggggctccctcggtcgcccaccctgggaagtgcctaaccttttattttattt

SEQ ID NO: 91651 - DNA, 120 bp, Artificial Sequence
  ENSG00000088256_16 (sequence is synthesized)
gctggagccacgggggcttctctgggctgtgcctccggggccaacactggctgcttggggctgcccggggactccagagggctgcacggccaccctgccctggctagagcgcaccccacc

SEQ ID NO: 91652 - DNA, 120 bp, Artificial Sequence
  ENSG00000088256_17 (sequence is synthesized)
ggagcccacgtgggctgggcggctggagggatggtcccccggtgacactgggagaaaggccacttggatgggggcgtttctgttttgttccgctttgtgatgtcaccaatttggaaacag

SEQ ID NO: 91653 - DNA, 120 bp, Artificial Sequence
  ENSG00000088256_18 (sequence is synthesized)
cgagggtgggtggggacttttacagaatattctcaggtgtgtacccgagaggcagagagagggacgtggccggcagctctgtgcgtggccttgtcccaagcacttgcgcccgcccccgag

SEQ ID NO: 91654 - DNA, 120 bp, Artificial Sequence
  ENSG00000088256_19 (sequence is synthesized)
cgccgcccccggggagcgggaagccagcactcgcactttggccaggggcgcgtggaaggtggtggcaggcaccggcctgggcagcttccaggcctggctggccacgaccacggcccgagg

SEQ ID NO: 91655 - DNA, 120 bp, Artificial Sequence
  ENSG00000088256_20 (sequence is synthesized)
gggagcccgccaggccacgccgcactgagccacagccccgggggccgcctcccggggccccttgaggcactgaggcaccgagactggttctccccgagagactcggaaggtggggaacga

SEQ ID NO: 91656 - DNA, 120 bp, Artificial Sequence
  ENSG00000088256_21 (sequence is synthesized)
ggggactgtgtttggggaggtggctttttcgtctgctgttgactgaacactacagcgccctgtggttccgggcttcgcacagctgtcccagggatggatcgcctgtgctgccttcgcccg

SEQ ID NO: 91657 - DNA, 120 bp, Artificial Sequence
  ENSG00000088256_22 (sequence is synthesized)
ccgccacaccgggaccctgcacggctgcttctggcctcgacagatgacaaaagaaacagccccaaaatacgaccactccaaccagcagttcccgcctgcctgcccgccactgtcaggcct

SEQ ID NO: 91658 - DNA, 120 bp, Artificial Sequence
  ENSG00000088256_23 (sequence is synthesized)
gccctggcctcctcgtccgcagggctgtctgctggcttctgggggcagaagagcggggagccccgtggaagggtcaggggagaccaggtcagggcagctacatttctggtgatcagcccc

SEQ ID NO: 91659 - DNA, 120 bp, Artificial Sequence
  ENSG00000088256_24 (sequence is synthesized)
atggggagacggggctggcgggataccccccccccggcttccccacaccacttctgtctcacccggaagcgtcctttttttgtgccaggtgtctacctaagagggttggtgccagaagcc

SEQ ID NO: 91660 - DNA, 120 bp, Artificial Sequence
  ENSG00000088256_25 (sequence is synthesized)
ccccatggcgagtgctggggcccggcggtgccctgggggagcagatggggccacccctggcagggccgctacaaccttttccagcagcggagccctctggggggcctgtgcttgtggcat

SEQ ID NO: 91661 - DNA, 120 bp, Artificial Sequence
  ENSG00000088256_26 (sequence is synthesized)
ctctgagggcctagattgcacaaggtgacctggccgtggcctgagggtggagtcgcccagcacgcaggccggggcgctgcggggctaagtattaggccttcccagggagggggcgtgcca

SEQ ID NO: 91662 - DNA, 120 bp, Artificial Sequence
  ENSG00000088256_27 (sequence is synthesized)
agcatcccagagccgggctgggaccgccaaaacgtcgtggcctggatcctctgggtctgagtgcctgatcccctgccccccaaaaaagcagaggtaggtgttgcaggcccagggcagggg

SEQ ID NO: 91663 - DNA, 120 bp, Artificial Sequence
  ENSG00000088256_28 (sequence is synthesized)
tgcctgccccaggagagtcccaggcagtggttctcgtgccagtggcacccaggggcaaggacagccaacccccacccttgccacgtgtggggccacgtgggcatgtggggtgtgtgtttt

SEQ ID NO: 91664 - DNA, 120 bp, Artificial Sequence
  ENSG00000088256_29 (sequence is synthesized)
taccttggtgaatctcacctgccaacgatttctcgtgagtgccgaccaccttctccgaccatgttacgcccgggcggcagcagcccccggccactgcaaacccatgccctgggtcccccg

SEQ ID NO: 91665 - DNA, 120 bp, Artificial Sequence
  ENSG00000088256_30 (sequence is synthesized)
gctcccccagggaggcatccccgtgccaatgtcccccagtggtggcagcagatcctgtggccggcctggcggacgggacccagtgatacttgtatattacacagtcctgatttcagacaa

SEQ ID NO: 91666 - DNA, 120 bp, Artificial Sequence
  ENSG00000088256_31 (sequence is synthesized)
tttcaaccttaatctatttaaaaaagaatattctatacaagctgtttttaagccttttaccatttgaaatgcatgtgttgtgcgcgttggggatgggaggaggggctgaggagcggctca

SEQ ID NO: 91667 - DNA, 120 bp, Artificial Sequence
  ENSG00000088256_32 (sequence is synthesized)
gtgtcacctcccacagccaccggccctgacccttaatccagacaccgatggaagtcgacttttcatatctttctcctgaaatgaactctgttttaaattggaataaattttgttcctaaa

SEQ ID NO: 91668 - DNA, 120 bp, Artificial Sequence
  ENSG00000088256_33 (sequence is synthesized)
ttttcttcttttttattcacacggggcccatgaccccaggatacagctgaggcgagccaggcataggccaggttgtggcatgaatgtcccctcacagccccacgctggcctcttaacagc

SEQ ID NO: 91669 - DNA, 120 bp, Artificial Sequence
  ENSG00000088256_34 (sequence is synthesized)
gcaggcctctgtgtcctctgtcagaaatgtcctgtcccctccctgagctgagctcaggctgggtgtgtcaccccctctccaccatcttccaggcccttcccagctccagctgtgcccttt

SEQ ID NO: 91670 - DNA, 66 bp, Artificial Sequence
  ENSG00000088256_35 (sequence is synthesized)
accatcttccaggcccttcccagctccagctgtgcctgtgcaatctgggctcactgcaagctccgc

SEQ ID NO: 91671 - DNA, 120 bp, Artificial Sequence
  ENSG00000088256_36 (sequence is synthesized)
aggcgtgagccaccgcgcccggcccggctgtgccctctgtgccgggtgcagacccccgtcctgagcctactcctctgccaccattgtttctctgccagccgcctctgtccaccacacgct

SEQ ID NO: 91672 - DNA, 120 bp, Artificial Sequence
  ENSG00000088256_37 (sequence is synthesized)
tgccagccgcctctgtccaccacacgctggcagagggccggccaggtgctgtgggatgcagctggaggccttgaaggccggtgggatcgtcccagtgcgtgaggagaggctcctgctccc

SEQ ID NO: 91673 - DNA, 120 bp, Artificial Sequence
  ENSG00000088256_38 (sequence is synthesized)
tcaggtggggacaagacacggggggacccggatcccagccctgccggccgccgcaggcgtgcaggagaggcctcgcgctccagacgggctgtggcctggtgtcggcacacccactgtcct

SEQ ID NO: 91674 - DNA, 120 bp, Artificial Sequence
  ENSG00000088256_39 (sequence is synthesized)
cccgcctggccacagctgctggtgcgggccctcttgtcccttagagtcacctggcacatctgtcatccaccggtgcctgctggactcccccgcagaccagaccaggtggatttcaccact

SEQ ID NO: 91675 - DNA, 120 bp, Artificial Sequence
  ENSG00000088256_40 (sequence is synthesized)
cacatgcccaaagcagccccgctctcctcggcagagttgcagggaccccggccttccctggggcctggggccagggcctgaggggcactctccgcttctgcctttgtattctttcaagga

SEQ ID NO: 91676 - DNA, 120 bp, Artificial Sequence
  ENSG00000088256_41 (sequence is synthesized)
gaccaaagtgccttttctcgttatagaaaacttagaaaagtcacaagtagaaagaggcaaacgtcccgtaaggaacgcacgcccgcagacatcgtctgagctgattttctttctcccgcc

SEQ ID NO: 91677 - DNA, 120 bp, Artificial Sequence
  ENSG00000088256_42 (sequence is synthesized)
tgtgcgtggcctgagagtgtgaggttgagctgctcaccacgcggggcagggcgctgcgcctgctcttctgccccaggaggataccggcaactctgccctctgcagccgtcactggagggt

SEQ ID NO: 91678 - DNA, 120 bp, Artificial Sequence
  ENSG00000088256_43 (sequence is synthesized)
ctgcgagtgacgcttggtgaacatctgtgtccctggcccagtgaggggaaaggcttctgtgctcagggtgacatccagatgccagatgtagggtccctgggcacccatcgcaggttcccg

SEQ ID NO: 91679 - DNA, 120 bp, Artificial Sequence
  ENSG00000088256_44 (sequence is synthesized)
cagcagctggcgcccagaatcctctgggttctcacacccccacactagcgcccgcttccctgggcccagtggtctcaggcccctttgccagtgagggaagggtctgcggtggtcacccct

SEQ ID NO: 91680 - DNA, 120 bp, Artificial Sequence
  ENSG00000088256_45 (sequence is synthesized)
ggaggcggtgcggccgctctctgagagcgtccttgcccgttctaagagtgggggctcttcctgctccagccgatgtcagtctggtgtggcaggaggggcttgggtgggagccgtcctggg

SEQ ID NO: 91681 - DNA, 120 bp, Artificial Sequence
  ENSG00000088256_46 (sequence is synthesized)
gccaagcctgggtcccctcacctgggtccccccagctgccccttgggctgtgtgcagtggggagggcccctctgattccctctgccttcgctcccgccagaaccggatggaggagagcaa

SEQ ID NO: 91682 - DNA, 120 bp, Artificial Sequence
  ENSG00000088256_47 (sequence is synthesized)
caacctgttatcaggggatgtacatctctccctccgtacacttcgcgcaccttctcaccttttgtcaacggcaaaggcagcctttttctggccttgacttatggctcgcttttttctaaa

SEQ ID NO: 91683 - DNA, 79 bp, Artificial Sequence
  ENSG00000088256_48 (sequence is synthesized)
caggaggctgaggcaggaggatcgctcaagcccaggaggttgaggctgaagtgagccatgatggttcgtcttattaaac

SEQ ID NO: 91684 - DNA, 120 bp, Artificial Sequence
  ENSG00000088280_0 (sequence is synthesized)
agtgccccccgcgccccgctccggcagctccacgctcgcgcccgccatgccggagcagttcagcgtcgccgagttcctggccgtcaccgcggaggacctcagctccccggctggggccgc

SEQ ID NO: 91685 - DNA, 120 bp, Artificial Sequence
  ENSG00000088280_1 (sequence is synthesized)
cgccttcgccgccaagatgccccggtaccgaggggcggcgctggcgcgggaggagatcttggaaggagaccaagccatcctgcagagaataaagaaggctgtgcgggcaatccatagctc

SEQ ID NO: 91686 - DNA, 120 bp, Artificial Sequence
  ENSG00000088280_2 (sequence is synthesized)
cggccttggccatgtggagaatgaagagcagtaccgagaggccgtggaatccttaggcaacagccacctgtcccagaacagccatgagctgtccacaggcttcctaaacttggccgtgtt

SEQ ID NO: 91687 - DNA, 120 bp, Artificial Sequence
  ENSG00000088280_3 (sequence is synthesized)
cacccgcgaggttgctgcgctcttcaagaacctgattcagaacttgaacaacattgtctctttccccctggacagtctgatgaaggggcagctgagggacggtcgacaggattccaaaaa

SEQ ID NO: 91688 - DNA, 120 bp, Artificial Sequence
  ENSG00000088280_4 (sequence is synthesized)
acagctggagaaggcatggaaggactatgaagccaaaatggccaagctggagaaggagcgcgatcgggccagggtgacaggagggatccctggggaggtggcccaggacatgcagagaga

SEQ ID NO: 91689 - DNA, 120 bp, Artificial Sequence
  ENSG00000088280_5 (sequence is synthesized)
gcggcgcatcttccagctgcacatgtgtgagtatctgctcaaagccggggagagccagatgaagcaaggtcctgacttccttcagagcctcatcaagttcttccacgcccagcacaactt

SEQ ID NO: 91690 - DNA, 120 bp, Artificial Sequence
  ENSG00000088280_6 (sequence is synthesized)
tttccaagatggctggaaggctgcccagagcctgttccccttcatcgagaagctggcggcctcagtacatgcactccatcaggcccaggaggacgagctacagaagctgacccagctccg

SEQ ID NO: 91691 - DNA, 120 bp, Artificial Sequence
  ENSG00000088280_7 (sequence is synthesized)
ggactccctccgagggacactgcagcttgagagcagagaggaacacctgagccggaagaactcaggatgtggctatagcatccaccagcaccaaggcaacaagcagtttgggacggagaa

SEQ ID NO: 91692 - DNA, 120 bp, Artificial Sequence
  ENSG00000088280_8 (sequence is synthesized)
agtgggctttctatacaagaaaagtgacggaattcgaagagtctggcagaaaaggaagtgtggagtcaagtatggctgcctgaccatctcacacagcacgataaaccggcccccggtgaa

SEQ ID NO: 91693 - DNA, 120 bp, Artificial Sequence
  ENSG00000088280_9 (sequence is synthesized)
gctgaccctgctgacgtgccaagtgaggccaaaccctgaggagaaaaagtgcttcgacctggtgacccacaaccggacgtaccactttcaggcagaggacgagcacgagtgtgaggcgtg

SEQ ID NO: 91694 - DNA, 120 bp, Artificial Sequence
  ENSG00000088280_10 (sequence is synthesized)
ggtgtcagtgttgcagaacagcaaggacgaagccctgagcagcgccttcctcggggagcccagcgctggcccggggtcctgggggtccgccggccatgatggggagccgcacgacctcac

SEQ ID NO: 91695 - DNA, 120 bp, Artificial Sequence
  ENSG00000088280_11 (sequence is synthesized)
aaagctgctcatcgcggaggtgaagagcaggcctgggaatagccagtgctgcgactgcggggctgcagaccccacgtggctcagcaccaacctgggcgtgctcacctgcatccagtgctc

SEQ ID NO: 91696 - DNA, 120 bp, Artificial Sequence
  ENSG00000088280_12 (sequence is synthesized)
gggcgtccaccgcgaactgggcgtgcgcttttcgcgcatgcagtcactcaccttggacctgctgggcccctccgagttgttgctggccttgaacatgggaaacacgagcttcaatgaggt

SEQ ID NO: 91697 - DNA, 120 bp, Artificial Sequence
  ENSG00000088280_13 (sequence is synthesized)
catggaggcccagctaccctcacacggcggccctaaaccctcagctgagagtgacatgggcacccgcagggactacattatggccaagtatgtggagcataggtttgcacgccggtgcac

SEQ ID NO: 91698 - DNA, 120 bp, Artificial Sequence
  ENSG00000088280_14 (sequence is synthesized)
acctgagcctcagcgactctggacagccatttgcaacagggacctcctgtcggtactggaggcctttgccaatgggcaggactttggacagccgctgccagggcctgatgcacaggcacc

SEQ ID NO: 91699 - DNA, 120 bp, Artificial Sequence
  ENSG00000088280_15 (sequence is synthesized)
tgaagaactcgtcttgcatttggctgtcaaagtcgccaaccaggcttccctgcctctggtggatttcatcatccagaacggtggtcacctggatgccaaggctgctgacgggaacacggc

SEQ ID NO: 91700 - DNA, 120 bp, Artificial Sequence
  ENSG00000088280_16 (sequence is synthesized)
gagacagctctggacatagccaggaagaagcaccacaaggagtgtgaggagctgctggagcaggcccaggcggggacctttgccttccctctacatgtggactactcctgggtaatttcc

SEQ ID NO: 91701 - DNA, 120 bp, Artificial Sequence
  ENSG00000088280_17 (sequence is synthesized)
acagagcctggctctgacagtgaggaggatgaggaagagaagcgctgcttgctgaagctcccggcccaggctcactgggccagtgggaggctggacatcagcaacaagacctatgagact

SEQ ID NO: 91702 - DNA, 120 bp, Artificial Sequence
  ENSG00000088280_18 (sequence is synthesized)
gtcgccagcctgggagcagccacccctcagggcgagagtgaggactgtcccccgcccttgccagtcaaaaactcttctcggactttggtccaagggtgtgcaagacatgccagtggagat

SEQ ID NO: 91703 - DNA, 120 bp, Artificial Sequence
  ENSG00000088280_19 (sequence is synthesized)
cgttctgaagtctccagcctgagttcagaggcccctgagacccctgagagcctgggcagtccagcctcctcctccagtctgatgagccccttggaacctggggatcccagccaagcccca

SEQ ID NO: 91704 - DNA, 120 bp, Artificial Sequence
  ENSG00000088280_20 (sequence is synthesized)
cccaactctgaagagggcctccgagagcccccaggcacctccagacccagcctgacatccgggaccaccccttcggagatgtacctccccgtcagattcagctccgagagcactcgctcc

SEQ ID NO: 91705 - DNA, 120 bp, Artificial Sequence
  ENSG00000088280_21 (sequence is synthesized)
tatcggcggggggcgcggagccctgaagatggtccctcagccaggcagcctctgcccagaaggaacgtgccggttggcatcactgaaggagatggctcaaggactgggagtctcccagca

SEQ ID NO: 91706 - DNA, 120 bp, Artificial Sequence
  ENSG00000088280_22 (sequence is synthesized)
agttctgtgcaacttttgcaagactagctccttgctggcccccacatgccccatgctaggccccaatgttcagagctgggacttgagctcacaaaactggggagctgagacatttgttct

SEQ ID NO: 91707 - DNA, 120 bp, Artificial Sequence
  ENSG00000088280_23 (sequence is synthesized)
cttggatctcactctctctgtcccttgtgcctctgtagctggccttcttcctgccacaggccatgcctctaccaaggacacatggcctttccctgttaggactgatggcggttctttcct

SEQ ID NO: 91708 - DNA, 120 bp, Artificial Sequence
  ENSG00000088280_24 (sequence is synthesized)
atctcattacccgctaggggcctgggagccctgtggctggatctgagtgctcctgagctggcttcagctgcagaactctcagtccctcatcagatcgagactctatttcccccgtcagtc

SEQ ID NO: 91709 - DNA, 120 bp, Artificial Sequence
  ENSG00000088280_25 (sequence is synthesized)
tgggggcttcacaagggcaggagagccctccatcactgacttccagatcagggaccctgccaagtagggactgtcttctcagccagccatttattagtctaatattccttcactaaattc

SEQ ID NO: 91710 - DNA, 120 bp, Artificial Sequence
  ENSG00000088280_26 (sequence is synthesized)
caactctatgtctggacctgtgttaggcacttcagataccacacgagtaagacaagggccctgcaggggtggtcctttggtggaaagctggtcttaagggttgggcttgggaataggcag

SEQ ID NO: 91711 - DNA, 120 bp, Artificial Sequence
  ENSG00000088280_27 (sequence is synthesized)
ggtcagattccagggcatggctctggactcagctggtttatacctatatgaccattacaattgtctacagatcacatccattctggctggtcaacatgcatgctgtactggctgttaaat

SEQ ID NO: 91712 - DNA, 120 bp, Artificial Sequence
  ENSG00000088280_28 (sequence is synthesized)
aaaaatattctgaatgtcactccttttgagggacagcacagccttccctaggcattctcctatattccccagccaaattgtagagtcagatgcacccacatttgcctgtgtccttgattt

SEQ ID NO: 91713 - DNA, 120 bp, Artificial Sequence
  ENSG00000088280_29 (sequence is synthesized)
agcaggaaggaaaggaatagtcagggttgatggatgcccacttctcttctctttctcttggtcaactcaggagccttttagtctgagggaatggagaggcaaagaaagaagggagagtaa

SEQ ID NO: 91714 - DNA, 120 bp, Artificial Sequence
  ENSG00000088280_30 (sequence is synthesized)
tagaattgggagggcagagacttaagggttctgcttcccagccctagaaattctatcattgctcagccccaatgagaaagcagatacacctaagccatcatcaaccactaacatctcaac

SEQ ID NO: 91715 - DNA, 120 bp, Artificial Sequence
  ENSG00000088280_31 (sequence is synthesized)
ttgccagttgctgggtgctgggccctggcaggaatgggccaagccaagcaggggagactagagagcaccaatggccaacacagctgcctggctggggaggctgtgctgtttcccctggag

SEQ ID NO: 91716 - DNA, 120 bp, Artificial Sequence
  ENSG00000088280_32 (sequence is synthesized)
acctgactggtctgtggttcccacaggaacagggttgtcttttgagcccccagtgtctggtttcattcatctcagacttgttatttcactcatctctaataaaggattggggggtcagtt

SEQ ID NO: 91717 - DNA, 120 bp, Artificial Sequence
  ENSG00000088280_33 (sequence is synthesized)
gggacctgaaggccccaatctagtcttagtctacacttcacatccttgaggtgctgctgggtgaggagaaacacaaatggaacaggatgattatgcccatttaacagagtgggaaatgga

SEQ ID NO: 91718 - DNA, 120 bp, Artificial Sequence
  ENSG00000088280_34 (sequence is synthesized)
gaggaggatttggaagacccagagcgggatgaaacgggacagagccctgaaggggcagggatgggggaaggcggaggagtttctactgaggccagggctccacgctcgcgcccgccatgc

SEQ ID NO: 91719 - DNA, 80 bp, Artificial Sequence
  ENSG00000088280_35 (sequence is synthesized)
cccaggctagagtacagtggcacaatcatggctcaccacagcctcaacctcctgggctcagtggcgccggcttaattttt

SEQ ID NO: 91720 - DNA, 87 bp, Artificial Sequence
  ENSG00000088280_36 (sequence is synthesized)
attttggcgccggcttaatttttgtattttttgtagggttggggtttcactatgttgcccggctggtcttgaactcctgggctcaag

SEQ ID NO: 91721 - DNA, 120 bp, Artificial Sequence
  ENSG00000088280_37 (sequence is synthesized)
gcctccaaaaatgttaggattacaggcgtgagccactatgctcggccagggcataatttgtaataagtaatttaaaacataacagaaaaggcctatgaacaactatctcaatccctgtat

SEQ ID NO: 91722 - DNA, 120 bp, Artificial Sequence
  ENSG00000088280_38 (sequence is synthesized)
tctccccagagatcttggaaggagaccaagccatcctgcagagaataaagaaggctgtgcgggcaatccatagctccggccttggccatgtggagaatgaagagcagtaccgagaggccg

SEQ ID NO: 91723 - DNA, 120 bp, Artificial Sequence
  ENSG00000088298_0 (sequence is synthesized)
gaacccgcagcagctcccaggatgaactggttgcagtggctgctgctgctgcgggggcgctgagaggacacgagctctatgcctttccggctgctcatcccgctcggcctcctgtgcgcg

SEQ ID NO: 91724 - DNA, 120 bp, Artificial Sequence
  ENSG00000088298_1 (sequence is synthesized)
ctgctgcctcagcaccatggtgcgccaggtcccgacggctccgcgccagatcccgcccactacagggagcgagtcaaggccatgttctaccacgcctacgacagctacctggagaatgcc

SEQ ID NO: 91725 - DNA, 120 bp, Artificial Sequence
  ENSG00000088298_2 (sequence is synthesized)
tttcccttcgatgagctgcgacctctcacctgtgacgggcacgacacctggggcagtttttctctgactctaattgatgcactggacaccttgctgattttggggaatgtctcagaattc

SEQ ID NO: 91726 - DNA, 120 bp, Artificial Sequence
  ENSG00000088298_3 (sequence is synthesized)
caaagagtggttgaagtgctccaggacagcgtggactttgatattgatgtgaacgcctctgtgtttgaaacaaacattcgagtggtaggaggactcctgtctgctcatctgctctccaag

SEQ ID NO: 91727 - DNA, 120 bp, Artificial Sequence
  ENSG00000088298_4 (sequence is synthesized)
aaggctggggtggaagtagaggctggatggccctgttccgggcctctcctgagaatggctgaggaggcggcccgaaaactcctcccagcctttcagacccccactggcatgccatatgga

SEQ ID NO: 91728 - DNA, 120 bp, Artificial Sequence
  ENSG00000088298_5 (sequence is synthesized)
acagtgaacttacttcatggcgtgaacccaggagagacccctgtcacctgtacggcagggattgggaccttcattgttgaatttgccaccctgagcagcctcactggtgacccggtgttc

SEQ ID NO: 91729 - DNA, 120 bp, Artificial Sequence
  ENSG00000088298_6 (sequence is synthesized)
gaagatgtggccagagtggctttgatgcgcctctgggagagccggtcagatatcgggctggtcggcaaccacattgatgtgctcactggcaagtgggtggcccaggacgcaggcatcggg

SEQ ID NO: 91730 - DNA, 120 bp, Artificial Sequence
  ENSG00000088298_7 (sequence is synthesized)
tataacaaagccatccggaactacacccgcttcgatgactggtacctgtgggttcagatgtacaaggggactgtgtccatgccagtcttccagtccttggaggcctactggcctggtctt

SEQ ID NO: 91731 - DNA, 120 bp, Artificial Sequence
  ENSG00000088298_8 (sequence is synthesized)
cagagcctcattggagacattgacaatgccatgaggaccttcctcaactactacactgtatggaagcagtttggggggctcccggaattctacaacattcctcagggatacacagtggag

SEQ ID NO: 91732 - DNA, 120 bp, Artificial Sequence
  ENSG00000088298_9 (sequence is synthesized)
aagcgagagggctacccacttcggccagaacttattgaaagcgcaatgtacctctaccgtgccacgggggatcccaccctcctagaactcggaagagatgctgtggaatccattgaaaaa

SEQ ID NO: 91733 - DNA, 120 bp, Artificial Sequence
  ENSG00000088298_10 (sequence is synthesized)
atcagcaaggtggagtgcggatttgcaacaatcaaagatctgcgagaccacaagctggacaaccgcatggagtcgttcttcctggccgagactgtgaaatacctctacctcctgtttgac

SEQ ID NO: 91734 - DNA, 120 bp, Artificial Sequence
  ENSG00000088298_11 (sequence is synthesized)
ccaaccaacttcatccacaacaatgggtccaccttcgacgcggtgatcaccccctatggggagtgcatcctgggggctggggggtacatcttcaacacagaagctcaccccatcgaccct

SEQ ID NO: 91735 - DNA, 120 bp, Artificial Sequence
  ENSG00000088298_12 (sequence is synthesized)
gccgccctgcactgctgccagaggctgaaggaagagcagtgggaggtggaggacttgatgagggaattctactctctcaaacggagcaggtcgaaatttcagaaaaacactgttagttcg

SEQ ID NO: 91736 - DNA, 120 bp, Artificial Sequence
  ENSG00000088298_13 (sequence is synthesized)
gggccatgggaacctccagcaaggccaggaacactcttctcaccagaaaaccatgaccaggcaagggagaggaagcctgccaaacagaaggtcccacttctcagctgccccagtcagccc

SEQ ID NO: 91737 - DNA, 120 bp, Artificial Sequence
  ENSG00000088298_14 (sequence is synthesized)
ttcacctccaagttggcattactgggacaggttttcctagactcctcataaccactggataatttttttatttttatttttttgaggctaaactataataaattgcttttggctatcata

SEQ ID NO: 91738 - DNA, 80 bp, Artificial Sequence
  ENSG00000088305_0 (sequence is synthesized)
gcagcagctgctcccggctccgcggccgcagcccgcgtggacgctccgagcgccccccgacggacgggaccggctccctg

SEQ ID NO: 91739 - DNA, 120 bp, Artificial Sequence
  ENSG00000088305_1 (sequence is synthesized)
gcggtcgggcgagcgggcggcaacgctgcccggccggcagcgctggggttaagtggcccaagtaaacctagctcggcgatcggcgccggagattcgcgagcccagcgccctgcacggccg

SEQ ID NO: 91740 - DNA, 120 bp, Artificial Sequence
  ENSG00000088305_2 (sequence is synthesized)
ccagccggcctcccgccagccagccccgacccgcggctccgccgcccagccgcgccccagccagccctgcggcaggaaagcatgaagggagacaccaggcatctcaatggagaggaggac

SEQ ID NO: 91741 - DNA, 120 bp, Artificial Sequence
  ENSG00000088305_3 (sequence is synthesized)
gccggcgggagggaagactcgatcctcgtcaacggggcctgcagcgaccagtcctccgactcgcccccaatcctggaggctatccgcaccccggagatcagaggccgaagatcaagctcg

SEQ ID NO: 91742 - DNA, 120 bp, Artificial Sequence
  ENSG00000088305_4 (sequence is synthesized)
cgactctccaagagggaggtgtccagtctgctaagctacacacaggacttgacaggcgatggcgacggggaagatggggatggctctgacaccccagtcatgccaaagctcttccgggaa

SEQ ID NO: 91743 - DNA, 120 bp, Artificial Sequence
  ENSG00000088305_5 (sequence is synthesized)
accaggactcgttcagaaagcccagctgtccgaactcgaaataacaacagtgtctccagccgggagaggcacaggccttccccacgttccacccgaggccggcagggccgcaaccatgtg

SEQ ID NO: 91744 - DNA, 120 bp, Artificial Sequence
  ENSG00000088305_6 (sequence is synthesized)
gacgagtcccccgtggagttcccggctaccaggtccctgagacggcgggcaacagcatcggcaggaacgccatggccgtcccctcccagctcttaccttaccatcgacctcacagacgac

SEQ ID NO: 91745 - DNA, 120 bp, Artificial Sequence
  ENSG00000088305_7 (sequence is synthesized)
acagaggacacacatgggacgccccagagcagcagtaccccctacgcccgcctagcccaggacagccagcaggggggcatggagtccccgcaggtggaggcagacagtggagatggagac

SEQ ID NO: 91746 - DNA, 120 bp, Artificial Sequence
  ENSG00000088305_8 (sequence is synthesized)
agttcagagtatcaggatgggaaggagtttggaataggggacctcgtgtggggaaagatcaagggcttctcctggtggcccgccatggtggtgtcttggaaggccacctccaagcgacag

SEQ ID NO: 91747 - DNA, 120 bp, Artificial Sequence
  ENSG00000088305_9 (sequence is synthesized)
gctatgtctggcatgcggtgggtccagtggtttggcgatggcaagttctccgaggtctctgcagacaaactggtggcactggggctgttcagccagcactttaatttggccaccttcaat

SEQ ID NO: 91748 - DNA, 120 bp, Artificial Sequence
  ENSG00000088305_10 (sequence is synthesized)
aagctcgtctcctatcgaaaagccatgtaccatgctctggagaaagctagggtgcgagctggcaagaccttccccagcagccctggagactcattggaggaccagctgaagcccatgttg

SEQ ID NO: 91749 - DNA, 120 bp, Artificial Sequence
  ENSG00000088305_11 (sequence is synthesized)
gagtgggcccacgggggcttcaagcccactgggatcgagggcctcaaacccaacaacacgcaaccagtggttaataagtcgaaggtgcgtcgtgcaggcagtaggaaattagaatcaagg

SEQ ID NO: 91750 - DNA, 120 bp, Artificial Sequence
  ENSG00000088305_12 (sequence is synthesized)
aaatacgagaacaagactcgaagacgcacagctgacgactcagccacctctgactactgccccgcacccaagcgcctcaagacaaattgctataacaacggcaaagaccgaggggatgaa

SEQ ID NO: 91751 - DNA, 120 bp, Artificial Sequence
  ENSG00000088305_13 (sequence is synthesized)
gatcagagccgagaacaaatggcttcagatgttgccaacaacaagagcagcctggaagatggctgtttgtcttgtggcaggaaaaaccccgtgtccttccaccctctctttgaggggggg

SEQ ID NO: 91752 - DNA, 120 bp, Artificial Sequence
  ENSG00000088305_14 (sequence is synthesized)
ctctgtcagacatgccgggatcgcttccttgagctgttttacatgtatgatgacgatggctatcagtcttactgcactgtgtgctgcgagggccgagagctgctgctttgcagcaacacg

SEQ ID NO: 91753 - DNA, 120 bp, Artificial Sequence
  ENSG00000088305_15 (sequence is synthesized)
agctgctgccggtgtttctgtgtggagtgcctggaggtgctggtgggcacaggcacagcggccgaggccaagcttcaggagccctggagctgttacatgtgtctcccgcagcgctgtcat

SEQ ID NO: 91754 - DNA, 120 bp, Artificial Sequence
  ENSG00000088305_16 (sequence is synthesized)
ggcgtcctgcggcgccggaaggactggaacgtgcgcctgcaggccttcttcaccagtgacacggggcttgaatatgaagcccccaagctgtaccctgccattcccgcagcccgaaggcgg

SEQ ID NO: 91755 - DNA, 120 bp, Artificial Sequence
  ENSG00000088305_17 (sequence is synthesized)
cccattcgagtcctgtcattgtttgatggcatcgcgacaggctacctagtcctcaaagagttgggcataaaggtaggaaagtacgtcgcttctgaagtgtgtgaggagtccattgctgtt

SEQ ID NO: 91756 - DNA, 120 bp, Artificial Sequence
  ENSG00000088305_18 (sequence is synthesized)
aggggaatatcaaatacgtgaacgacgtgaggaacatcacaaagaaaaatattgaagaatggggcccatttgacttggtgattggcggaagcccatgcaacgatctctcaaatgtgaatc

SEQ ID NO: 91757 - DNA, 120 bp, Artificial Sequence
  ENSG00000088305_19 (sequence is synthesized)
cagccaggaaaggcctgtatgagggtacaggccggctcttcttcgaattttaccacctgctgaattactcacgccccaaggagggtgatgaccggccgttcttctggatgtttgagaatg

SEQ ID NO: 91758 - DNA, 120 bp, Artificial Sequence
  ENSG00000088305_20 (sequence is synthesized)
ttgtagccatgaaggttggcgacaagagggacatctcacggttcctggagtgtaatccagtgatgattgatgccatcaaagtttctgctgctcacagggcccgatacttctggggcaacc

SEQ ID NO: 91759 - DNA, 120 bp, Artificial Sequence
  ENSG00000088305_21 (sequence is synthesized)
tacccgggatgaacaggcccgtgatagcatcaaagaatgataaactcgagctgcaggactgcttggaatacaataggatagccaagttaaagaaagtacagacaataaccaccaagtcga

SEQ ID NO: 91760 - DNA, 120 bp, Artificial Sequence
  ENSG00000088305_22 (sequence is synthesized)
actcgatcaaacaggggaaaaaccaacttttccctgttgtcatgaatggcaaagaagatgttttgtggtgcactgagctcgaaaggatctttggctttcctgtgcactacacagacgtgt

SEQ ID NO: 91761 - DNA, 120 bp, Artificial Sequence
  ENSG00000088305_23 (sequence is synthesized)
ccaacatgggccgtggtgcccgccagaagctgctgggaaggtcctggagcgtgcctgtcatccgacacctcttcgcccctctgaaggactactttgcatgtgaatagttccagccaggcc

SEQ ID NO: 91762 - DNA, 120 bp, Artificial Sequence
  ENSG00000088305_24 (sequence is synthesized)
ccaagcccactggggtgtgtggcagagccaggacccaggaggtgtgattcctgaaggcatccccaggccctgctcttcctcagctgtgtgggtcataccgtgtacctcagttccctcttg

SEQ ID NO: 91763 - DNA, 120 bp, Artificial Sequence
  ENSG00000088305_25 (sequence is synthesized)
ctcagtgggggcagagccacctgactcttgcaggggtagcctgaggtgccgcctccttgtgcacaaatcagacctggctgcttggagcagcctaacacggtgctcattttttcttctcct

SEQ ID NO: 91764 - DNA, 120 bp, Artificial Sequence
  ENSG00000088305_26 (sequence is synthesized)
aaaactttaaaacttgaagtaggtagcaacgtggctttttttttttcccttcctgggtctaccactcagagaaacaatggctaagataccaaaaccacagtgccgacagctctccaatac

SEQ ID NO: 91765 - DNA, 120 bp, Artificial Sequence
  ENSG00000088305_27 (sequence is synthesized)
tcaggttaatgctgaaaaatcatccaagacagttattgcaagagtttaatttttgaaaactggctactgctctgtgtttacagacgtgtgcagttgtaggcatgtagctacaggacattt

SEQ ID NO: 91766 - DNA, 120 bp, Artificial Sequence
  ENSG00000088305_28 (sequence is synthesized)
ttaagggcccaggatcgttttttcccagggcaagcagaagagaaaatgttgtatatgtcttttacccggcacattccccttgcctaaatacaagggctggagtctgcacgggacctatta

SEQ ID NO: 91767 - DNA, 120 bp, Artificial Sequence
  ENSG00000088305_29 (sequence is synthesized)
gagtattttccacaatgatgatgatttcagcagggatgacgtcatcatcacattcagggctattttttcccccacaaacccaagggcaggggccactcttagctaaatccctccccgtga

SEQ ID NO: 91768 - DNA, 120 bp, Artificial Sequence
  ENSG00000088305_30 (sequence is synthesized)
ctgcaatagaaccctctggggagctcaggaaggggtgtgctgagttctataatataagctgccatatattttgtagacaagtatggctcctccatatctccctcttccctaggagaggag

SEQ ID NO: 91769 - DNA, 120 bp, Artificial Sequence
  ENSG00000088305_31 (sequence is synthesized)
tgtgaagcaaggagcttagataagacaccccctcaaacccattccctctccaggagacctaccctccacaggcacaggtccccagatgagaagtctgctaccctcatttctcatcttttt

SEQ ID NO: 91770 - DNA, 120 bp, Artificial Sequence
  ENSG00000088305_32 (sequence is synthesized)
actaaactcagaggcagtgacagcagtcagggacagacatacatttctcataccttccccacatctgagagatgacagggaaaactgcaaagctcggtgctccctttggagattttttaa

SEQ ID NO: 91771 - DNA, 120 bp, Artificial Sequence
  ENSG00000088305_33 (sequence is synthesized)
tccttttttattccataagaagtcgtttttagggagaacgggaattcagacaagctgcatttcagaaatgctgtcataatggtttttaacaccttttactcttcttactggtgctatttt

SEQ ID NO: 91772 - DNA, 120 bp, Artificial Sequence
  ENSG00000088305_34 (sequence is synthesized)
gtagaataaggaacaacgttgacaagttttgtggggctttttatacactttttaaaatctcaaacttctatttttatgtttaacgttttcattaaaattttttttgtaactggagccacg

SEQ ID NO: 91773 - DNA, 120 bp, Artificial Sequence
  ENSG00000088305_35 (sequence is synthesized)
acgtaacaaatatggggaaaaaactgtgccttgtttcaacagtttttgctaatttttaggctgaaagatgacggatgcctagagtttaccttatgtttaattaaaatcagtatttgtcta

SEQ ID NO: 91774 - DNA, 120 bp, Artificial Sequence
  ENSG00000088305_36 (sequence is synthesized)
gaagggagagagcaaacaaaggggtcaggagggaaaataatgcactggcttcctgagcccctgcagaggctgagcagggagagggggccagggccagaggggacagaggctggcggcaga

SEQ ID NO: 91775 - DNA, 120 bp, Artificial Sequence
  ENSG00000088305_37 (sequence is synthesized)
cgggccgggacaggcaggtcctaaatggcattgtttgaaggggccggctaattgcacagagcagtctgagcctgagaccccagccctggcctccccactctgtcctgggtgctggcgtct

SEQ ID NO: 91776 - DNA, 120 bp, Artificial Sequence
  ENSG00000088320_0 (sequence is synthesized)
gctcactgaggcgggtggtacagcctggagcatccagccgctggagctgcgagggaccctggacccctcccacgccgaggtttatgcagagcctgaggccagaaaacctagggactttct

SEQ ID NO: 91777 - DNA, 120 bp, Artificial Sequence
  ENSG00000088320_1 (sequence is synthesized)
gccccaagaagctgaggcacctcctactcccatctgaacaagagggggatctggaagaagccatacagcagctcatcaggacactatagaaagaagcagctcaaagcaattggctgacag

SEQ ID NO: 91778 - DNA, 120 bp, Artificial Sequence
  ENSG00000088320_2 (sequence is synthesized)
ccaattcccccttctttcagaaggaaagaaggaagaagcaaacccccccctaccaaagatgacactcaacaccgagcaggaagcaaagacccctctgcaccggcgagccagcaccccact

SEQ ID NO: 91779 - DNA, 120 bp, Artificial Sequence
  ENSG00000088320_3 (sequence is synthesized)
gcccctgtccccacggggccaccagcctggccgcctgagcacagtgccttccactcaatcccagcatccccggctgggccaatcagcctccctcaaccctcccacccagaaaccttcacc

SEQ ID NO: 91780 - DNA, 120 bp, Artificial Sequence
  ENSG00000088320_4 (sequence is synthesized)
tgccccagatgattggtcttctgaatccagcgactctgaaggctcctgggaggctctctaccgtgtggtgctacttggagatcctggagtggggaagaccagcttggccagcctctttgc

SEQ ID NO: 91781 - DNA, 120 bp, Artificial Sequence
  ENSG00000088320_5 (sequence is synthesized)
agggaagcaagagagggacctccatgaacagctgggagaagatgtatatgagaggaccctcacggtggatggagaagacaccacactggtggtcgtggacacctgggaggccgagaaact

SEQ ID NO: 91782 - DNA, 120 bp, Artificial Sequence
  ENSG00000088320_6 (sequence is synthesized)
ctccgcatccagctgcggcgcacacatcaggcagaccatgtgcccatcatcctcgtgggcaacaaggcagacttggcccgctgccgagaagtctctgtggaagagggccgcgcctgcgct

SEQ ID NO: 91783 - DNA, 120 bp, Artificial Sequence
  ENSG00000088320_7 (sequence is synthesized)
gtggtgttcgactgtaaattcatcgagacatccgccacgctgcagcacaatgtggccgagctcttcgagggcgtggtgcgccaactgcgcttgcgccgccgggacagtgcggccaaggaa

SEQ ID NO: 91784 - DNA, 120 bp, Artificial Sequence
  ENSG00000088320_8 (sequence is synthesized)
cccccagcaccccgacggccggccagcctagcccagcgcgctcgtcgcttcctggcacgcctgacagcccgcagcgcacgccgccgggcactcaaggcccgctccaagtcctgccacaat

SEQ ID NO: 91785 - DNA, 120 bp, Artificial Sequence
  ENSG00000088320_9 (sequence is synthesized)
ctggccgtgctctgaagccccccgcccttctgagagttggcgggtcactgaggtgcattctgggctccagggacgccactgcggggcaaaggcgccgttacctggagtctgcatcatggg

SEQ ID NO: 91786 - DNA, 120 bp, Artificial Sequence
  ENSG00000088320_10 (sequence is synthesized)
tcttgcttgcctgctgccctgatggcctgagcatcccccagatccaagcctgggggatcccgggaaagcgatggacagacagacgatggggccgaagccccaagctgggcacaaagtagt

SEQ ID NO: 91787 - DNA, 120 bp, Artificial Sequence
  ENSG00000088320_11 (sequence is synthesized)
tttttacgtggtgggtgtctttttgtaaaaaaatcttccttgtccctgggctctggccaaccctcagaaaccctcacaataaaccagaccagaaggatgtcccatctgaatgcccagacc

SEQ ID NO: 91788 - DNA, 120 bp, Artificial Sequence
  ENSG00000088320_12 (sequence is synthesized)
tctccatctcggctcttccaggcgtctccacctactgccctcccatctacacttgactgtagactggtctggcctgctggcctgggcgtcagggcgcatcaataaagtacttggaccagt

SEQ ID NO: 91789 - DNA, 120 bp, Artificial Sequence
  ENSG00000088325_0 (sequence is synthesized)
gaatgagtcccgcggcgggttggctcgcgcttcgttgtcagatctgaggcgaggctaggtgagccgtgggaagaaaagagggagcagctagggcgcgggtctccctcctcccggagtttg

SEQ ID NO: 91790 - DNA, 120 bp, Artificial Sequence
  ENSG00000088325_1 (sequence is synthesized)
gaacggctgaagttcaccttccagcccctagcgccgttcgcgccgctaggcctggcttctgaggcggttgcggtgctcggtcgccgcctaggcggggcagggtgcgagcaggggcttcgg

SEQ ID NO: 91791 - DNA, 120 bp, Artificial Sequence
  ENSG00000088325_2 (sequence is synthesized)
gccacgcttctcttggcgacaggattttgctgtgaagtccgtccgggaaacggaggaaaaaaagagttgcgggaggctgtcggctaataacggttcttgatacatatttgccagacttca

SEQ ID NO: 91792 - DNA, 120 bp, Artificial Sequence
  ENSG00000088325_3 (sequence is synthesized)
agatttcagaaaaggggtgaaagagaagattgcaactttgagtcagacctgtaggcctgatagactgattaaaccacagaaggtgacctgctgagaaaagtggtacaaatactgggaaaa

SEQ ID NO: 91793 - DNA, 120 bp, Artificial Sequence
  ENSG00000088325_4 (sequence is synthesized)
acctgctcttctgcgttaagtgggagacaatgtcacaagttaaaagctcttattcctatgatgccccctcggatttcatcaatttttcatccttggatgatgaaggagatactcaaaaca

SEQ ID NO: 91794 - DNA, 120 bp, Artificial Sequence
  ENSG00000088325_5 (sequence is synthesized)
tagattcatggtttgaggagaaggccaatttggagaataagttactggggaagaatggaactggagggctttttcagggcaaaactcctttgagaaaggctaatcttcagcaagctattg

SEQ ID NO: 91795 - DNA, 120 bp, Artificial Sequence
  ENSG00000088325_6 (sequence is synthesized)
tcacacctttgaaaccagttgacaacacttactacaaagaggcagaaaaagaaaatcttgtggaacaatccattccgtcaaatgcttgttcttccctggaagttgaggcagccatatcaa

SEQ ID NO: 91796 - DNA, 120 bp, Artificial Sequence
  ENSG00000088325_7 (sequence is synthesized)
gaaaaactccagcccagcctcagagaagatctcttaggctttctgctcagaaggatttggaacagaaagaaaagcatcatgtaaaaatgaaagccaagagatgtgccactcctgtaatca

SEQ ID NO: 91797 - DNA, 120 bp, Artificial Sequence
  ENSG00000088325_8 (sequence is synthesized)
tcgatgaaattctaccctctaagaaaatgaaagtttctaacaacaaaaagaagccagaggaagaaggcagtgctcatcaagatactgctgaaaagaatgcatcttccccagagaaagcca

SEQ ID NO: 91798 - DNA, 120 bp, Artificial Sequence
  ENSG00000088325_9 (sequence is synthesized)
agggtagacatactgtgccttgtatgccacctgcaaagcagaagtttctaaaaagtactgaggagcaagagctggagaagagtatgaaaatgcagcaagaggtggtggagatgcggaaaa

SEQ ID NO: 91799 - DNA, 120 bp, Artificial Sequence
  ENSG00000088325_10 (sequence is synthesized)
agaatgaagaattcaagaaacttgctctggctggaatagggcaacctgtgaagaaatcagtgagccaggtcaccaaatcagttgacttccacttccgcacagatgagcgaatcaaacaac

SEQ ID NO: 91800 - DNA, 120 bp, Artificial Sequence
  ENSG00000088325_11 (sequence is synthesized)
atcctaagaaccaggaggaatataaggaagtgaactttacatctgaactacgaaagcatccttcatctcctgcccgagtgactaagggatgtaccattgttaagcctttcaacctgtccc

SEQ ID NO: 91801 - DNA, 120 bp, Artificial Sequence
  ENSG00000088325_12 (sequence is synthesized)
aaggaaagaaaagaacatttgatgaaacagtttctacatatgtgccccttgcacagcaagttgaagacttccataaacgaacccctaacagatatcatttgaggagcaagaaggatgata

SEQ ID NO: 91802 - DNA, 120 bp, Artificial Sequence
  ENSG00000088325_13 (sequence is synthesized)
ttaacctgttaccctccaaatcttctgtgaccaagatttgcagagacccacagactcctgtactgcaaaccaaacaccgtgcacgggctgtgacctgcaaaagtacagcagagctggagg

SEQ ID NO: 91803 - DNA, 120 bp, Artificial Sequence
  ENSG00000088325_14 (sequence is synthesized)
gagcctattggctttgatttggaaattgagaaaagaatccaggagcgagaatcaaagaagaaaacagaggatgaacactttgaatttcattccagaccttgccctactaagattttggaa

SEQ ID NO: 91804 - DNA, 120 bp, Artificial Sequence
  ENSG00000088325_15 (sequence is synthesized)
gatgttgtgggtgttcctgaaaagaaggtacttccaatcaccgtccccaagtcaccagcctttgcattgaagaacagaattcgaatgcccaccaaagaagatgaggaagaggacgaaccg

SEQ ID NO: 91805 - DNA, 120 bp, Artificial Sequence
  ENSG00000088325_16 (sequence is synthesized)
gtagtgataaaagctcaacctgtgccacattatggggtgccttttaagccccaaatcccagaggcaagaactgtggaaatatgccctttctcgtttgattctcgagacaaagaacgtcag

SEQ ID NO: 91806 - DNA, 120 bp, Artificial Sequence
  ENSG00000088325_17 (sequence is synthesized)
ttacagaaggagaagaaaataaaagaactgcagaaaggggaggtgcccaagttcaaggcacttcccttgcctcattttgacaccattaacctgccagagaagaaggtaaagaatgtgacc

SEQ ID NO: 91807 - DNA, 120 bp, Artificial Sequence
  ENSG00000088325_18 (sequence is synthesized)
cagattgaacctttctgcttggagactgacagaagaggtgctctgaaggcacagacttggaagcaccagctggaagaagaactgagacagcagaaagaagcagcttgtttcaaggctcgt

SEQ ID NO: 91808 - DNA, 120 bp, Artificial Sequence
  ENSG00000088325_19 (sequence is synthesized)
ccaaacaccgtcatctctcaggagccctttgttcccaagaaagagaagaaatcagttgctgagggcctttctggttctctagttcaggaaccttttcagctggctactgagaagagagcc

SEQ ID NO: 91809 - DNA, 120 bp, Artificial Sequence
  ENSG00000088325_20 (sequence is synthesized)
aaagagcggcaggagctggagaagagaatggctgaggtagaagcccagaaagcccagcagttggaggaggccagactacaggaggaagagcagaaaaaagaggagctggccaggctacgg

SEQ ID NO: 91810 - DNA, 120 bp, Artificial Sequence
  ENSG00000088325_21 (sequence is synthesized)
agagaactggtgcataaggcaaatccaatacgcaagtaccagggtctggagataaagtcaagtgaccagcctctgactgtgcctgtatctcccaaattctccactcgattccactgctaa

SEQ ID NO: 91811 - DNA, 120 bp, Artificial Sequence
  ENSG00000088325_22 (sequence is synthesized)
actcagctgtgagctgcggataccgcccggcaatgggacctgctcttaacctcaaacctaggaccgtcttgctttgtcattgggcatggagagaacccatttctccagacttttacctac

SEQ ID NO: 91812 - DNA, 120 bp, Artificial Sequence
  ENSG00000088325_23 (sequence is synthesized)
ccgtgcctgagaaagcatacttgacaactgtggactccagttttgttgagaattgttttcttacattactaaggctaataatgagatgtaactcatgaatgtctcgattagactccatgt

SEQ ID NO: 91813 - DNA, 120 bp, Artificial Sequence
  ENSG00000088325_24 (sequence is synthesized)
agttacttcctttaaaccatcagccggccttttatatgggtcttcactctgactagaatttagtctctgtgtcagcacagtgtaatctctattgctattgccccttacgactctcaccct

SEQ ID NO: 91814 - DNA, 120 bp, Artificial Sequence
  ENSG00000088325_25 (sequence is synthesized)
ctccccactttttttaaaaattttaaccagaaaataaagatagttaaatcctaagatagagattaagtcatggtttaaatgaggaacaatcagtaaatcagattctgtcctcttctctgc

SEQ ID NO: 91815 - DNA, 120 bp, Artificial Sequence
  ENSG00000088325_26 (sequence is synthesized)
ataccgtgaatttatagttaaggatccctttgctgtgagggtagaaaacctcaccaactgcaccagtgaggaagaagactgcgtggattcatggggagcctcacagcagccacgcagcag

SEQ ID NO: 91816 - DNA, 120 bp, Artificial Sequence
  ENSG00000088325_27 (sequence is synthesized)
gctctgggtggggctgccgttaaggcacgttctttccttactggtgctgataacaacagggaaccgtgcagtgtgcattttaagacctggcctggaataaatacgttttgtctttccctc

SEQ ID NO: 91817 - DNA, 120 bp, Artificial Sequence
  ENSG00000088356_0 (sequence is synthesized)
acctagagagcggcgcgtgcgcagcgggagtcgaagcggagatcccggggtcgcgcgagagccgcaagcggagttggtgggcgctatgctatcacccgaggcagagcgagtgctgcggta

SEQ ID NO: 91818 - DNA, 120 bp, Artificial Sequence
  ENSG00000088356_1 (sequence is synthesized)
ccttgtagaagtggaggagctcgccgaggaggtgctggcggacaagcggcagattgtggacctggacactaaaaggaatcagaatcgagagggcctgagggccctgcagaaggatctcag

SEQ ID NO: 91819 - DNA, 120 bp, Artificial Sequence
  ENSG00000088356_2 (sequence is synthesized)
cctctctgaagatgtgatggtttgcttcgggaacatgtttatcaagatgcctcaccctgagacaaaggaaatgattgaaaaagatcaagatcatctggataaagaaatagaaaaactgcg

SEQ ID NO: 91820 - DNA, 120 bp, Artificial Sequence
  ENSG00000088356_3 (sequence is synthesized)
gaagcaacttaaagtgaaggtcaaccgcctttttgaggcccaaggcaaaccggagctgaagggttttaacttgaaccccctcaaccaggatgagcttaaagctctcaaggtcatcttgaa

SEQ ID NO: 91821 - DNA, 120 bp, Artificial Sequence
  ENSG00000088356_4 (sequence is synthesized)
aggatgagactcaagaaccaagatgggggaccagcaaccccccagggtcatggaggacccaggaccctccaaccttgacacctgtaaggacaggatctgccctgtaaggggccagccgtc

SEQ ID NO: 91822 - DNA, 120 bp, Artificial Sequence
  ENSG00000088356_5 (sequence is synthesized)
aggaatctggccatgaaaacctctttgtagtgcttggctactctgtgatggcaggagggaaccttcagcctgtctggctgctggacctggacaccagggctcggtggacacaagatctat

SEQ ID NO: 91823 - DNA, 120 bp, Artificial Sequence
  ENSG00000088356_6 (sequence is synthesized)
tgacgggccttggtagccaccagtgggtgtgtggggcagtggctgtgggggtgtaagaatgactgcaacaggcacttcccaacaatggcctgctgttcacatggaccctgagcaaggaag

SEQ ID NO: 91824 - DNA, 120 bp, Artificial Sequence
  ENSG00000088356_7 (sequence is synthesized)
gagggagggaggggcagagtggagtgtcattccagcattcctctcagaagggagagaggttttcaggctggtgccatgcgattggaataaagcaggaggctcatgggtggttgctgaatg

SEQ ID NO: 91825 - DNA, 120 bp, Artificial Sequence
  ENSG00000088356_8 (sequence is synthesized)
catctgtggggcaggcacacacacctcccgccagctccaattttgcactttttccctgcttgattccaagagtaggtgctgcctagcagcccttcgtggccactctttactcaggagggc

SEQ ID NO: 91826 - DNA, 120 bp, Artificial Sequence
  ENSG00000088356_9 (sequence is synthesized)
cttgcagagtcctgcaccaggcctgggtgagtggatgcgcctcttaccatatgacacgtgtcaagatgcccttccgccccctctgaaagtggggcccggccagcactgctcgttactgtc

SEQ ID NO: 91827 - DNA, 120 bp, Artificial Sequence
  ENSG00000088356_10 (sequence is synthesized)
tgccttcagtggtctgaggtcccagtatgaactgccgtgaagtcaaaactcttatgtgttcattaagggctcaataaatgttagctgaatgaatgaatagcagcaactagtctttatttg

SEQ ID NO: 91828 - DNA, 120 bp, Artificial Sequence
  ENSG00000088356_11 (sequence is synthesized)
cctcatctagtccttcagtaagggcacgccactccatttagaatacaacctatgaacatggttcttgccttgaaataaacctgtgatttgacaggcgggtgataacaaatggcagcatgg

SEQ ID NO: 91829 - DNA, 120 bp, Artificial Sequence
  ENSG00000088356_12 (sequence is synthesized)
caggggcacacctctcctggtccccccgctccttggctctggctcatagttacatagaaacacaggctgtcatggccagttcttacgtgttttcaagagaagctagacatatgggttgtg

SEQ ID NO: 91830 - DNA, 120 bp, Artificial Sequence
  ENSG00000088356_13 (sequence is synthesized)
aagttgaatctccttttaaatatttttgactaatgcagaaacttttaaaacatgagtgtgggtcacaggtgttagctccagatagtgcaataccatacaactataatcaagaataaggaa

SEQ ID NO: 91831 - DNA, 120 bp, Artificial Sequence
  ENSG00000088356_14 (sequence is synthesized)
caagctccaagatacatcaagtgaggaaagcaaggggaaggctggtgtcttataagctaataatttttgtgcaagcacagtgtgattccctcagaacagcacctgcagggttggggcgca

SEQ ID NO: 91832 - DNA, 120 bp, Artificial Sequence
  ENSG00000088356_15 (sequence is synthesized)
caggtgggagggaaggagatgtcaccctatacccttttgtaaactttggattttaaaccgtatgaatatattgcttattttaaaatgtaaataaagtagggagttgcagaattcaccttg

SEQ ID NO: 91833 - DNA, 80 bp, Artificial Sequence
  ENSG00000088367_0 (sequence is synthesized)
agtcggcatccatcagcgggcgggggtgtcgccgaacaggctgctccgcagagcccgccgcgaccccgcgccgccccgcc

SEQ ID NO: 91834 - DNA, 120 bp, Artificial Sequence
  ENSG00000088367_1 (sequence is synthesized)
cgcccaacctgcccgacatggggaaccccgggcccaggcgtgctggtcaccatgacaacagagacaggccccgactctgaggtgaagaaagctcaggaggaggccccgcagcagcccgag

SEQ ID NO: 91835 - DNA, 120 bp, Artificial Sequence
  ENSG00000088367_2 (sequence is synthesized)
gctgctgccgctgtgaccacccctgtgacccctgcaggccacggccacccagaggccaactccaatgagaagcatccatcccagcaggacacgcggcctgctgaacagagcctagacatg

SEQ ID NO: 91836 - DNA, 120 bp, Artificial Sequence
  ENSG00000088367_3 (sequence is synthesized)
gaggagaaggactacagtgaggccgatggcctttcggagaggaccacgcccagcaaggcccagaaatcgccccagaagattgccaagaaatacaagagtgccatctgccgggtcactctg

SEQ ID NO: 91837 - DNA, 120 bp, Artificial Sequence
  ENSG00000088367_4 (sequence is synthesized)
cttgatgcctcggagtatgagtgtgaggtggagaaacatggccggggccaggtgctgtttgacctggtctgtgaacacctcaacctcctagagaaggactacttcggcctgaccttctgt

SEQ ID NO: 91838 - DNA, 120 bp, Artificial Sequence
  ENSG00000088367_5 (sequence is synthesized)
gatgctgacagccagaagaactggctggacccctccaaggagatcaagaagcagatccggagtagcccctggaattttgccttcacagtcaagttctacccgcctgatcctgcccagctg

SEQ ID NO: 91839 - DNA, 120 bp, Artificial Sequence
  ENSG00000088367_6 (sequence is synthesized)
acagaagacatcacaagatactacctgtgcctgcagctgcgggcagacatcatcacgggccggctgccatgctcctttgtcacgcatgccctactgggctcctacgctgtgcaggctgag

SEQ ID NO: 91840 - DNA, 120 bp, Artificial Sequence
  ENSG00000088367_7 (sequence is synthesized)
ctgggtgactatgatgctgaggagcatgtgggcaactatgtcagcgagctccgcttcgcccctaaccagacccgggagctggaggagaggatcatggagctgcataagacatataggggg

SEQ ID NO: 91841 - DNA, 120 bp, Artificial Sequence
  ENSG00000088367_8 (sequence is synthesized)
atgaccccgggagaagcagaaatccacttcttagagaatgccaagaagctttccatgtacggagtagacctgcaccatgccaaggactctgagggcatcgacatcatgttaggcgtttgt

SEQ ID NO: 91842 - DNA, 120 bp, Artificial Sequence
  ENSG00000088367_9 (sequence is synthesized)
gccaatggcctgctcatctaccgggaccggctgagaatcaaccgctttgcctggcccaagatcctcaagatctcctacaagaggagtaacttctatatcaagatccggcctggggagtat

SEQ ID NO: 91843 - DNA, 120 bp, Artificial Sequence
  ENSG00000088367_10 (sequence is synthesized)
gagcaatttgagagcacaattggctttaagctcccaaaccaccggtcagccaagagactgtggaaggtctgcatcgagcatcatacattcttccggctggtgtcccctgagcccccaccc

SEQ ID NO: 91844 - DNA, 120 bp, Artificial Sequence
  ENSG00000088367_11 (sequence is synthesized)
aagggcttcctggtgatgggctccaagttccggtacagtgggaggacccaggcacagactcgccaggccagcgccctcattgaccggcctgcacccttctttgagcgttcttccagcaaa

SEQ ID NO: 91845 - DNA, 120 bp, Artificial Sequence
  ENSG00000088367_12 (sequence is synthesized)
cggtacaccatgtcccgcagccttgatggagcagagttctcccgcccagcctcggtcagcgagaaccatgatgcagggcctgacggtgacaagcgggatgaggatggcgagtctgggggg

SEQ ID NO: 91846 - DNA, 120 bp, Artificial Sequence
  ENSG00000088367_13 (sequence is synthesized)
caacggtcagaggctgaggagggagaggtcaggactccaaccaagatcaaggagctaaagccggagcaggaaaccacgccgagacacaagcaggagttcttagacaagccagaagatgtc

SEQ ID NO: 91847 - DNA, 120 bp, Artificial Sequence
  ENSG00000088367_14 (sequence is synthesized)
ttgctgaagcaccaggccagcatcaatgagctcaaaaggaccctgaaggagcccaacagcaaactcatccaccgggatcgagactgggaacgggagcgcaggctgccctcctcccccgcc

SEQ ID NO: 91848 - DNA, 120 bp, Artificial Sequence
  ENSG00000088367_15 (sequence is synthesized)
tccccctcccccaagggcacccctgagaaagccaatgagagagcagggctgagggagggctccgaggagaaagtcaaaccaccacgtccccgggccccagagagtgacacaggcgatgag

SEQ ID NO: 91849 - DNA, 120 bp, Artificial Sequence
  ENSG00000088367_16 (sequence is synthesized)
gaccaggaccaggagagggacacggtgttcctgaaggacaaccacctggccattgagcgcaagtgctccagcatcacggtcagctctacgtctagcctggaggctgaggtggacttcacg

SEQ ID NO: 91850 - DNA, 120 bp, Artificial Sequence
  ENSG00000088367_17 (sequence is synthesized)
gtcattggtgactaccatggcagcgccttcgaagacttctcccgcagcctgcctgagctcgaccgggacaaaagcgactcggacactgagggcctgctgttctcccgggatctcaacaag

SEQ ID NO: 91851 - DNA, 120 bp, Artificial Sequence
  ENSG00000088367_18 (sequence is synthesized)
ggggcccccagccaggatgatgagtctgggggcattgaggacagcccggatcgaggggcctgctccaccccggatatgccccagtttgagcccgtgaaaacagaaaccatgactgtcagc

SEQ ID NO: 91852 - DNA, 120 bp, Artificial Sequence
  ENSG00000088367_19 (sequence is synthesized)
agtctggccattagaaagaagattgagccggaggccgtactgcagaccagagtctccgctatggataacacccagcaggttgatgggagtgcctcagtggggagggagttcatagcaacc

SEQ ID NO: 91853 - DNA, 120 bp, Artificial Sequence
  ENSG00000088367_20 (sequence is synthesized)
actccctccatcaccacggagaccatatcgaccaccatggagaacagtctcaagtccgggaagggggcagctgccatgatcccaggcccacagacggtggccacggaaatccgttctctt

SEQ ID NO: 91854 - DNA, 120 bp, Artificial Sequence
  ENSG00000088367_21 (sequence is synthesized)
tctccgatcatcgggaaagatgtcctcaccagcacctacggcgccactgcggaaaccctctcaacctccaccaccacccatgtcaccaaaactgtgaaaggagggttttctgagacaagg

SEQ ID NO: 91855 - DNA, 120 bp, Artificial Sequence
  ENSG00000088367_22 (sequence is synthesized)
atcgagaagcgaatcatcattactggggatgaagatgtcgatcaagaccaggccctggctttggccatcaaggaggccaaactgcagcatcctgatatgctggtaaccaaagctgtcgta

SEQ ID NO: 91856 - DNA, 120 bp, Artificial Sequence
  ENSG00000088367_23 (sequence is synthesized)
tacagagaaacagacccatccccagaggagagggacaagaagccacaggaatcctgacctctgtgaagagatcctggcatttctggtccaacccaagccagagaaccattaagaaggggc

SEQ ID NO: 91857 - DNA, 120 bp, Artificial Sequence
  ENSG00000088367_24 (sequence is synthesized)
cttcattctggattctccgacgcaacactgacgtcccagctgcgacgtactgtcactgatgagagactgggaagggaaaagcatatatatatagatatatagagatatagatatatatac

SEQ ID NO: 91858 - DNA, 120 bp, Artificial Sequence
  ENSG00000088367_25 (sequence is synthesized)
aggaaacaccgcatccttgcactgctgctggggctggcagagcagttggctgacagcaacaaccgacatctgaacacctacatttcctttgcagacaaattgaagaactggtgggatttt

SEQ ID NO: 91859 - DNA, 120 bp, Artificial Sequence
  ENSG00000088367_26 (sequence is synthesized)
ttgctcacccctttcccccgccaaataagaaacgcaagccagaccacgatgattgtagaagtccctcccgccctggttctgcacgttacagttagcagacgagcaattccatttgttctt

SEQ ID NO: 91860 - DNA, 120 bp, Artificial Sequence
  ENSG00000088367_27 (sequence is synthesized)
ctccagcatctctaaggcccacttgaatgcaaaggaaaacacttgcacagcaaagcaagagaagtcacagcagcaagacacgcacagtcaaccattttccgagaaaaaaagaaaattccc

SEQ ID NO: 91861 - DNA, 120 bp, Artificial Sequence
  ENSG00000088367_28 (sequence is synthesized)
cacttggaaagaaagaggaggaacactggattcttactttctggatcttgacactgggctgcaaaacctaccttcctctctcccgcctcccctcaccctcaactctcaatgtcttgctgt

SEQ ID NO: 91862 - DNA, 120 bp, Artificial Sequence
  ENSG00000088367_29 (sequence is synthesized)
cattttctgtctcggctccctcctcccccttcccccttcccccaccccacacccttcaccctctgtgtcctggtccttctgagggccactgcagatgactctcctttgaaatgagaaaaa

SEQ ID NO: 91863 - DNA, 120 bp, Artificial Sequence
  ENSG00000088367_30 (sequence is synthesized)
gaaaagaaagcaagaacagaaaacgaagccacaggaagggaagtagacattgtatgcttatggtttctcattatgaaggtgcagcttgtaggaggtttgtacggatgtgctttgaagtta

SEQ ID NO: 91864 - DNA, 120 bp, Artificial Sequence
  ENSG00000088367_31 (sequence is synthesized)
tgtatattacatataacaggaaaaaatattaaaataaacagtgctggtaagtatgaagctgacattctaaaattataattatctgactgtgattgatgtatcctgaggttcctagatctc

SEQ ID NO: 91865 - DNA, 120 bp, Artificial Sequence
  ENSG00000088367_32 (sequence is synthesized)
actgaactggcccagctaaggagacctggactctgggtgtgggttggctcacagtaggggctgacgggttcagtgtagtaatactgtgtgtggtgtttgtaattggttgattggtgggga

SEQ ID NO: 91866 - DNA, 120 bp, Artificial Sequence
  ENSG00000088367_33 (sequence is synthesized)
ggggtggggggccctaatggagaggtgtgggtttggcaagaaagaagcaacacagatgtcgtccccaaaatgccagttcaagacaccttctccctgcccccctggtagtaacagtcaggg

SEQ ID NO: 91867 - DNA, 120 bp, Artificial Sequence
  ENSG00000088367_34 (sequence is synthesized)
cctggtctgtgctcaggtactgggtcccagtctgggactctgctgctgaagttgccacagtagaggtccctggcttagtccttatctccctacggggcttgccttggttttcagtcttct

SEQ ID NO: 91868 - DNA, 120 bp, Artificial Sequence
  ENSG00000088367_35 (sequence is synthesized)
ctctctttctctcttttttttttttttgccacattctgcccttccctgaccccattgtaataaccaactccatatccaaagggaggtggtgctctcagccattgtagaagatggtggctt

SEQ ID NO: 91869 - DNA, 120 bp, Artificial Sequence
  ENSG00000088367_36 (sequence is synthesized)
taacctgactgtctaaaaattcccagctaagccttttcctctactctcttccttgttctgaatcatttcttcttctcaggccaaagtagccatggtaaggaggcttcatggggcagaccc

SEQ ID NO: 91870 - DNA, 120 bp, Artificial Sequence
  ENSG00000088367_37 (sequence is synthesized)
tgaaagatcaaaactgcatttgcaaagccctcccctgtcccaggacaaagctgagactgacgggtgatgttgctcataggctccagctctgcataagaccttggcttggagacctccctc

SEQ ID NO: 91871 - DNA, 120 bp, Artificial Sequence
  ENSG00000088367_38 (sequence is synthesized)
tcagtcaacagctgaactctgagcttgtgcccagaaattaccccaagaccacaggaacccttcaagaagctcccatcacaagcttggcattgctctctgccacacgtgggcttcctcagg

SEQ ID NO: 91872 - DNA, 120 bp, Artificial Sequence
  ENSG00000088367_39 (sequence is synthesized)
cttgtctgccacaagctacttctctgagctcagaaagtgccccttgatgagggaaaatgtcccactgcactgcgaatttctcagttccattttacctcccagtcctccttctaaaccagt

SEQ ID NO: 91873 - DNA, 120 bp, Artificial Sequence
  ENSG00000088367_40 (sequence is synthesized)
taataaattcattccacaagtatttactgattacctgcttgtgccagggactattctcaggctgaagaaggtgggaggggagggcggaacctgaggagccacctgagccagctttatatt

SEQ ID NO: 91874 - DNA, 120 bp, Artificial Sequence
  ENSG00000088367_41 (sequence is synthesized)
tcaaccatggctggcccatctgagagcatctccccactctcgccaacctatcggggcatagcccagggatgcccccaggcggcccaggttagatgcgtccctttggcttgtcagtgatga

SEQ ID NO: 91875 - DNA, 120 bp, Artificial Sequence
  ENSG00000088367_42 (sequence is synthesized)
catacaccttagctgcttagctggtgctggcctgaggcagggcaggaaatcagaatagcatttgcttctctgggcaaatgggaagttcagcggggcagcagaatcagtggcattccccct

SEQ ID NO: 91876 - DNA, 120 bp, Artificial Sequence
  ENSG00000088367_43 (sequence is synthesized)
ggtgcaggccggtgggtccactccaactccccctgagtgtagcagcacactttccatacaccaggttctttctacaatcctggtggaaaagccacagaaccttcttcctgcccttcttga

SEQ ID NO: 91877 - DNA, 120 bp, Artificial Sequence
  ENSG00000088367_44 (sequence is synthesized)
gagttccccctctttctgggtcaagagctggagtggtggctccatcctctctgggccacttcggtctaggaactcatctttgcaggaaccaggagtcctgagcacactgaacacacctca

SEQ ID NO: 91878 - DNA, 120 bp, Artificial Sequence
  ENSG00000088367_45 (sequence is synthesized)
gagggaggatccttgttgtggattttgcacctggctttggggcaggggtgaagtgaccaggcttagcttgtggagtttatgggccaccagggtttggggaaatcaccatcccgcggatgc

SEQ ID NO: 91879 - DNA, 120 bp, Artificial Sequence
  ENSG00000088367_46 (sequence is synthesized)
tgtgacctcccttctacggagatgcaggcagtgccacgagggaggaggggacctgcaaagctagaatctagggcactgtttcctccccatccttctctttgtagagaatagagacgtttg

SEQ ID NO: 91880 - DNA, 120 bp, Artificial Sequence
  ENSG00000088367_47 (sequence is synthesized)
tcttgtctgtcttcaacctacttttccttttctcttttttgtttctcatcctctctgtgccacctctccacccaggaggccatgtagcatagtggaaaaagtccctgagggcggttagga

SEQ ID NO: 91881 - DNA, 120 bp, Artificial Sequence
  ENSG00000088367_48 (sequence is synthesized)
gttctgggtgaccatcctggctcagctcctaactcaccatgtgacatcaggctatccccattccccctcttgggcctcagtttcccgacttgcaaaataagcagaaagaaccagatgctc

SEQ ID NO: 91882 - DNA, 120 bp, Artificial Sequence
  ENSG00000088367_49 (sequence is synthesized)
tccagggtctttttctactttgctatctcatgggtcttcattttctcttattttgttttctctggatcttttccatctgagggtacaggaagtaccaggacctgtttcagtttttgaatc

SEQ ID NO: 91883 - DNA, 120 bp, Artificial Sequence
  ENSG00000088367_50 (sequence is synthesized)
ctgcaagcacattccaagactggcctgaaactgcatgagcaacatcactcgaaataattttttttttcaaaagcaccttaacaaccaattgcgatgctgtcctgttcctttttactcaca

SEQ ID NO: 91884 - DNA, 120 bp, Artificial Sequence
  ENSG00000088367_51 (sequence is synthesized)
cccttctctcctttctcgtccccatgctcccccacctcagtgctccgtgctgtatgcgtgtgctctctgttcttgtatactcaatataagtgaaataaatgtgtttgatgctgaaccata

SEQ ID NO: 91885 - DNA, 120 bp, Artificial Sequence
  ENSG00000088367_52 (sequence is synthesized)
cagaattgttgggcttcatcttggctctgtgctgcctggaggggagacctaggataggctcctgatctgcaaaatggggataatcccagctgccacttaagtgagacaagtgcctgactg

SEQ ID NO: 91886 - DNA, 120 bp, Artificial Sequence
  ENSG00000088367_53 (sequence is synthesized)
gcatttctgcgcagctctagcgcgcctcggagcccgccggggcagccgccggacaccaggaccgcgagccagacagctcccggaagccgcgccgccgccgccagccacagcacagccgga

SEQ ID NO: 91887 - DNA, 120 bp, Artificial Sequence
  ENSG00000088367_54 (sequence is synthesized)
cagaggaggtggattaggagttcccgggagggagcctgctcagcctttccctgacatttgggcaaatgtgtggggagatgcggagctcaaggcgtgctggtcaccatgacaacagagaca

SEQ ID NO: 91888 - DNA, 120 bp, Artificial Sequence
  ENSG00000088367_55 (sequence is synthesized)
gcatttctgcgcagctctagcgcgcctcggagcccgccggggcagccgccggacaccaggaccgcgagccagacagctcccggaagccgcgccgccgccgccaggtgcctgactgacaga

SEQ ID NO: 91889 - DNA, 120 bp, Artificial Sequence
  ENSG00000088367_56 (sequence is synthesized)
ttcttgcccccggggagctggtgtggacagaggaggggctgctgttcgtacctgcctcatggttttcttggggaggatcaatgaggtagaacctgcaaagggcttagcagagagcctagc

SEQ ID NO: 91890 - DNA, 120 bp, Artificial Sequence
  ENSG00000088367_57 (sequence is synthesized)
agagcaggagcgagcgcgcgagagagcggggcatttctgcgcagctctagcgcgcctcggagcccgccggggcagccgccggacaccaggaccgcgagccagacagctcccggaagccgc

SEQ ID NO: 91891 - DNA, 120 bp, Artificial Sequence
  ENSG00000088367_58 (sequence is synthesized)
cgtcccggggaccccgccgcgtcgggtcccgcgtgtgcgtgtggggtggccgccgagggcggcgggctcgattcccgatctttgggcactgacaggccggcgggccggctccaggagccg

SEQ ID NO: 91892 - DNA, 120 bp, Artificial Sequence
  ENSG00000088367_59 (sequence is synthesized)
gccgcgggcttcggtagctccttggatattcctttctgcaagtgatcaggcaaagataaattccattttacagatgaggaagctgaggcctgtgaagggaaagtgacctggctacacagc

SEQ ID NO: 91893 - DNA, 120 bp, Artificial Sequence
  ENSG00000088367_60 (sequence is synthesized)
cggaacctgaatgcaggacattctgcccctgtcgtggtggtattggagccagctaatgccaccattcgaggttgcaggagcagcacctgaccagaaatccagagcttgtttaaaggaccc

SEQ ID NO: 91894 - DNA, 120 bp, Artificial Sequence
  ENSG00000088367_61 (sequence is synthesized)
tgggctttttcatcaaggaggcctgagttcaaatccttcttctatgtctgattctctctgtgaccttgggtgcctgactgacagaagttcttgcccccggggagctggtgtggacagagg

SEQ ID NO: 91895 - DNA, 120 bp, Artificial Sequence
  ENSG00000088367_62 (sequence is synthesized)
tccccctcccccaagggcacccctgagaaagccaatgagtcccagaggacccaggacatctctcagcgggacttggtacctgagcctggagcagccgcaggcttggaagtgttcactcag

SEQ ID NO: 91896 - DNA, 120 bp, Artificial Sequence
  ENSG00000088367_63 (sequence is synthesized)
aaaagcctcgcagcatctcctgagggttcagagcattgggtatttatagaaagagagtacactaggccagaagagctcggtctcctaaaagtgaccaccatgcagcaggaagaaaggcag

SEQ ID NO: 91897 - DNA, 120 bp, Artificial Sequence
  ENSG00000088367_64 (sequence is synthesized)
gcaggccttgctggtatccttgccaacggcagactctccaaggtagacgttctggtggacaagttcaaagtggaagtggccacagaagaaatggtgggaaacagaagagcaaacacccag

SEQ ID NO: 91898 - DNA, 120 bp, Artificial Sequence
  ENSG00000088367_65 (sequence is synthesized)
caacaaggaaaaatgattgcaagtcctgaagactttgagtcagtgggggaggaaggcccctggatcagggaaagcccaggaggggctgccctggcttccggccgcacattggcagaaaag

SEQ ID NO: 91899 - DNA, 120 bp, Artificial Sequence
  ENSG00000088367_66 (sequence is synthesized)
ctcctcgagggctctgagctcagggcagacaccagagaggcaaccatcaggaaccgctgcatgtcagatggtcagccggagggccagacagagctgaggaaggggctggaggagcctcac

SEQ ID NO: 91900 - DNA, 120 bp, Artificial Sequence
  ENSG00000088367_67 (sequence is synthesized)
acttgtgggagacccactgctccagggaccaggccagcagaggtggacgtcctctctccagcctccgacaagggaggactccagtcgtttctattggatccagcccacgcagaagccaga

SEQ ID NO: 91901 - DNA, 120 bp, Artificial Sequence
  ENSG00000088367_68 (sequence is synthesized)
gctgagttgagcaatgaaactgatacttcctttgcagagaggagcttctatttaaattatgaagaaaaagactcagaagaccaagtcctccctccacccctggaggagagaaaagggcgc

SEQ ID NO: 91902 - DNA, 120 bp, Artificial Sequence
  ENSG00000088367_69 (sequence is synthesized)
ctggatgcccctcccggaggtgagcccaggccgacgctgaattccttagacctgagggtttctgctgctgcttccagcaggagcaaggacgaagcccacatgacttccccaaaggaaggg

SEQ ID NO: 91903 - DNA, 120 bp, Artificial Sequence
  ENSG00000088367_70 (sequence is synthesized)
gcagggacccccaagaaccatggaggacctggtgacctgaagggatctcccgcaggacagacgtttgctgaaggctgggaagatgcccagtggggagtggaaggagagtttccccacctg

SEQ ID NO: 91904 - DNA, 120 bp, Artificial Sequence
  ENSG00000088367_71 (sequence is synthesized)
acagccagcgcagcccgagaggaagggacccccgtgagtggagatttgctgggaaaggctgaggaaagtcccacagaggaactgaagaagcaccctcctcacagaggacagggcgtgcat

SEQ ID NO: 91905 - DNA, 120 bp, Artificial Sequence
  ENSG00000088367_72 (sequence is synthesized)
cccgacccccaggcctgcgcccttcctcgggccatccctctgaatgtcaggaagccagtcaaaccagacagaggcaacttcccacccaaagagaggggagtggttcccacccagaaagga

SEQ ID NO: 91906 - DNA, 120 bp, Artificial Sequence
  ENSG00000088367_73 (sequence is synthesized)
ggggctgagctgaaggaccgcgaggcttcagcatttcttcacatggaggtgatcattcccctgccagcctcccctggtcattctgaggacctggcagctctggaggaagcttctccaagc

SEQ ID NO: 91907 - DNA, 120 bp, Artificial Sequence
  ENSG00000088367_74 (sequence is synthesized)
ccaacctcccatgggtcaggggagccttcggagctcagggagccctttcttagacatgtccatctttcgaaagccagcccagagcccaaggaccaagtagggtttgtggtgtcccctgcc

SEQ ID NO: 91908 - DNA, 120 bp, Artificial Sequence
  ENSG00000088367_75 (sequence is synthesized)
acaggaggtgagcgcaggcctcctcccatcaccagcagaaagcccagagtagtccctgaagaagctgaggggcgcatacctctggggtttgggttcccttcagggaagcgaagggagatg

SEQ ID NO: 91909 - DNA, 120 bp, Artificial Sequence
  ENSG00000088367_76 (sequence is synthesized)
acctctttccaggctggggaccaagagggctccctagaagatattagcaagacctcagtggccaacaaaattcggatatttgagacccacggagctgaaactcgccgaatgagtgagggt

SEQ ID NO: 91910 - DNA, 120 bp, Artificial Sequence
  ENSG00000088367_77 (sequence is synthesized)
gaagcaaggtcccttccaaatgacgtatcttcagaggcacccgtgggacaagcagagcagcagcggagtacgctctcagacctgggcttcgcccaactccagcccccaggggactttgcc

SEQ ID NO: 91911 - DNA, 120 bp, Artificial Sequence
  ENSG00000088367_78 (sequence is synthesized)
agccccaaagccacacattccacagtgatacctctggctaccagacacttcagggaggacacttctgcatcctaccaggaagcacacacggaactagagcccgtgtcccccaattcaggc

SEQ ID NO: 91912 - DNA, 120 bp, Artificial Sequence
  ENSG00000088367_79 (sequence is synthesized)
tgtgaaaccacgctggcagaagctactggaactgggaacaaatccggagatgcggtcagggaagagaagcgctccaccaacttagcagccaacacccctgggaagggggggcgcctgaga

SEQ ID NO: 91913 - DNA, 120 bp, Artificial Sequence
  ENSG00000088367_80 (sequence is synthesized)
agttcttgcccccggggagctggtgtggacagaggaggggccctggaagtgaccactgggctgagtagctcatcagcttccccacactgaagcccgaggggtctcctgctggcttctgag

SEQ ID NO: 91914 - DNA, 120 bp, Artificial Sequence
  ENSG00000088367_81 (sequence is synthesized)
tctcctgctggcttctgagagctgacggaacaggttccagcaaggcagaccctgacacagaagccagacctgtccagcagggaccccatacactgggaggcttcctgggaaactggaagg

SEQ ID NO: 91915 - DNA, 120 bp, Artificial Sequence
  ENSG00000088367_82 (sequence is synthesized)
cgagagagcggggcatttctgcgcagctctagcgcgcctcggagcccgccggggcagccgccggacaccaggaccgcgagccagacagctcccggaagccgcgccgccgccgccagagcc

SEQ ID NO: 91916 - DNA, 120 bp, Artificial Sequence
  ENSG00000088386_0 (sequence is synthesized)
gtcaggtcggaggagtagcacctgccaggagcacgtcccgccggcaggtcgcaggagccctgggagccgccgccatgggaatgtccaaatcacacagtttctttggttatcccctgagca

SEQ ID NO: 91917 - DNA, 120 bp, Artificial Sequence
  ENSG00000088386_1 (sequence is synthesized)
tcttcttcatcgtggtcaatgagttttgcgaaagattttcctactatggaatgcgagcaatcctgattctgtacttcacaaatttcatcagctgggatgataacctgtccaccgccatct

SEQ ID NO: 91918 - DNA, 120 bp, Artificial Sequence
  ENSG00000088386_2 (sequence is synthesized)
accatacgtttgtggctctgtgctacctgacgccaattctcggagctcttatcgccgactcgtggctgggaaagttcaagaccattgtgtcgctctccattgtctacacaattggacaag

SEQ ID NO: 91919 - DNA, 120 bp, Artificial Sequence
  ENSG00000088386_3 (sequence is synthesized)
cagtcacctcagtaagctccattaatgacctcacagaccacaaccatgatggcacccccgacagccttcctgtgcacgtggtgctgtccttgatcggcctggccctgatagctctcggga

SEQ ID NO: 91920 - DNA, 120 bp, Artificial Sequence
  ENSG00000088386_4 (sequence is synthesized)
ctggaggaatcaaaccctgtgtgtctgcgtttggtggagatcagtttgaagagggccaggagaaacaaagaaacagatttttttccatcttttacttggctattaatgctggaagtttgc

SEQ ID NO: 91921 - DNA, 120 bp, Artificial Sequence
  ENSG00000088386_5 (sequence is synthesized)
tttccacaatcatcacacccatgctcagagttcaacaatgtggaattcacagtaaacaagcttgttacccactggcctttggggttcctgctgctctcatggctgtagccctgattgtgt

SEQ ID NO: 91922 - DNA, 120 bp, Artificial Sequence
  ENSG00000088386_6 (sequence is synthesized)
ttgtccttggcagtgggatgtacaagaagttcaagccacagggcaacatcatgggtaaagtggccaagtgcatcggttttgccatcaaaaatagatttaggcatcggagtaaggcatttc

SEQ ID NO: 91923 - DNA, 120 bp, Artificial Sequence
  ENSG00000088386_7 (sequence is synthesized)
ccaagagggagcactggctggactgggctaaagagaaatacgatgagcggctcatctcccaaattaagatggttacgagggtgatgttcctgtatattccactcccaatgttctgggcct

SEQ ID NO: 91924 - DNA, 120 bp, Artificial Sequence
  ENSG00000088386_8 (sequence is synthesized)
tgtttgaccagcagggctccaggtggacactgcaggcaacaactatgtccgggaaaatcggagctcttgaaattcagcccgatcagatgcagaccgtgaacgccatcctgatcgtgatca

SEQ ID NO: 91925 - DNA, 120 bp, Artificial Sequence
  ENSG00000088386_9 (sequence is synthesized)
tggtcccgatcttcgatgctgtgctgtaccctctcattgcaaaatgtggcttcaatttcacctccttgaagaagatggcagttggcatggtcctggcctccatggcctttgtggtggctg

SEQ ID NO: 91926 - DNA, 120 bp, Artificial Sequence
  ENSG00000088386_10 (sequence is synthesized)
ccatcgtgcaggtggaaatcgataaaactcttccagtcttccccaaaggaaacgaagtccaaattaaagttttgaatataggaaacaataccatgaatatatctcttcctggagagatgg

SEQ ID NO: 91927 - DNA, 120 bp, Artificial Sequence
  ENSG00000088386_11 (sequence is synthesized)
tgacacttggcccaatgtctcaaacaaatgcatttatgacttttgatgtaaacaaactgacaaggataaacatttcttctcctggatcaccagtcactgctgtaactgacgacttcaagc

SEQ ID NO: 91928 - DNA, 120 bp, Artificial Sequence
  ENSG00000088386_12 (sequence is synthesized)
agggccaacgccacacgcttctagtgtgggcccccaatcactaccaggtggtaaaggatggtcttaaccagaagccagaaaaaggggaaaatggaatcagatttgtaaatacttttaacg

SEQ ID NO: 91929 - DNA, 120 bp, Artificial Sequence
  ENSG00000088386_13 (sequence is synthesized)
catcaccatcacaatgagtgggaaagtttatgcaaacatcagcagctacaatgccagcacataccagttttttccttctggcataaaaggcttcacaataagctcaacagagattccgcc

SEQ ID NO: 91930 - DNA, 120 bp, Artificial Sequence
  ENSG00000088386_14 (sequence is synthesized)
acaatgtcaacctaatttcaatactttctaccttgaatttggtagtgcttatacctatatagtccaaaggaagaatgacagctgccctgaagtgaaggtgtttgaagatatttcagccaa

SEQ ID NO: 91931 - DNA, 120 bp, Artificial Sequence
  ENSG00000088386_15 (sequence is synthesized)
cacagttaacatggctctgcaaatcccgcagtattttcttctcacctgtggcgaagtggtcttctctgtcacgggattggaattctcatattctcaggctccttccaacatgaagtcggt

SEQ ID NO: 91932 - DNA, 120 bp, Artificial Sequence
  ENSG00000088386_16 (sequence is synthesized)
gcttcaggcaggatggctgctgaccgtggctgttggcaacatcattgtgctcatcgtggcaggggcaggccagttcagcaaacagtgggccgagtacattctatttgccgcgttgcttct

SEQ ID NO: 91933 - DNA, 120 bp, Artificial Sequence
  ENSG00000088386_17 (sequence is synthesized)
ggtcgtctgtgtaatttttgccatcatggctcggttctatacttacatcaacccagcggagatcgaagctcaatttgatgaggatgaaaagaaaaacagactggaaaagagtaacccata

SEQ ID NO: 91934 - DNA, 120 bp, Artificial Sequence
  ENSG00000088386_18 (sequence is synthesized)
tttcatgtcaggggccaattcacagaaacagatgtgaaggtcaggaggcaagtggaggatggactgggcccgcagatgccctgacctctgcccccaggtagcaggacactccattggatg

SEQ ID NO: 91935 - DNA, 87 bp, Artificial Sequence
  ENSG00000088386_19 (sequence is synthesized)
ctgacctctgcccccaggtagcaggacactccattggatggcccctgatgaggaagacttcagaattgggaactaaaccatgaatgc

SEQ ID NO: 91936 - DNA, 120 bp, Artificial Sequence
  ENSG00000088386_20 (sequence is synthesized)
ctaccgcgcccggccgtgaacgctattttctaagcagccagcagtgaatctaaaactctggaagaagtcttctgtttgaaaggcttatttaagccacacgtacacacactgtcttagagt

SEQ ID NO: 91937 - DNA, 120 bp, Artificial Sequence
  ENSG00000088386_21 (sequence is synthesized)
actgtgagcccaccccacattggtcatcttccctatcacacaaatgatgttattttggactagcttaattttgaaatggtaacaaagtttcctattccatactgttcatttctaatactc

SEQ ID NO: 91938 - DNA, 120 bp, Artificial Sequence
  ENSG00000088386_22 (sequence is synthesized)
ttacgaaaactattctaaaggaggcaggagccaaggccaaaagtgaacgtacaggtttgaaatggctgtgataaggaccagctggtattaactgataactttacctttgggtttttgtta

SEQ ID NO: 91939 - DNA, 120 bp, Artificial Sequence
  ENSG00000088386_23 (sequence is synthesized)
ttttgtttttctagtccctacctgtgtttaaattatggataactcgaaagacagctcaggtgaaggccagtaatgatttttttgaagtttcaatggtgtgaaataaatttctgttcttaa

SEQ ID NO: 91940 - DNA, 120 bp, Artificial Sequence
  ENSG00000088386_24 (sequence is synthesized)
cagtcaccggtaagttactgaatctgcgttggctgcctttcatgccactggtgctcctttgtggctatggaccagtggggggtgtatttcaatcctgtgcttgtttcttttttgtcagag

SEQ ID NO: 91941 - DNA, 120 bp, Artificial Sequence
  ENSG00000088386_25 (sequence is synthesized)
gttggaatctggagtaagtgcttccttccctgtgagtttcacctcctttttgtcttatttaaatcccttatcccagtgaccactggagagtctaagccatccttagcatgggcatccatc

SEQ ID NO: 91942 - DNA, 120 bp, Artificial Sequence
  ENSG00000088386_26 (sequence is synthesized)
ttcctaaactgttattcatgcaaagtcatgctcgtggtaagaggtaagaggcaagagaggtgccttggaagccaagctggtggccgtagctgccattttagccttcaagctttgctcccc

SEQ ID NO: 91943 - DNA, 120 bp, Artificial Sequence
  ENSG00000088386_27 (sequence is synthesized)
agtgatatttctgtgacttaggaagagtttactgggcaaaattgtattgattttttgtttgttttgttttgtttttagaaggagtcttgctctgtcacccacgctggagcgcagtggcgt

SEQ ID NO: 91944 - DNA, 120 bp, Artificial Sequence
  ENSG00000088386_28 (sequence is synthesized)
ggcaaagtttttttctttgctttcccatcatctcaagtatttccaaaagaactgctcagataaagagaatgggacagtgtcagtaactatcagaggtttgtgcttgctaatgctccatag

SEQ ID NO: 91945 - DNA, 120 bp, Artificial Sequence
  ENSG00000088386_29 (sequence is synthesized)
agagtttgtgaatttcccatgtggaagggaatatgtggtgttactggtgacaaactaacaagaccatcctgtccacatttgaatcagattagattatgaaataaagatttcagggggatt

SEQ ID NO: 91946 - DNA, 120 bp, Artificial Sequence
  ENSG00000088387_0 (sequence is synthesized)
ctggcatgcctgtgccttgcacggccagggactcgcagctgttccagttgcagactttctgacttgcgttttcagccgagaatgcaggctgataaatgcaggacaagtagtagaagtgtc

SEQ ID NO: 91947 - DNA, 120 bp, Artificial Sequence
  ENSG00000088387_1 (sequence is synthesized)
aaaaaggaactggtgattgagtcccccctgcaatacaaggatgcagctcagggcgaagtggaagcagagagcccgggccctgtgccggcaaagccaaagctaattgagccactcgactat

SEQ ID NO: 91948 - DNA, 120 bp, Artificial Sequence
  ENSG00000088387_2 (sequence is synthesized)
gaaaatgtcatcgtccagaagaagactcagatcctgaacgactgtttacgggagatgctgctcttcccttacgatgactttcagacggccatcctgagacgacagggtcgatacatatgc

SEQ ID NO: 91949 - DNA, 120 bp, Artificial Sequence
  ENSG00000088387_3 (sequence is synthesized)
tcaacagtgcctgcgaaggcggaagaggaagcacagagcttgtttgttacagagtgcatcaaaacctataactctgactggcatcttgtgaactataaatatgaagattactcaggagag

SEQ ID NO: 91950 - DNA, 120 bp, Artificial Sequence
  ENSG00000088387_4 (sequence is synthesized)
tttcgacagcttccgaacaaagtggtcaagttggataaacttccagttcatgtctatgaagttgacgaggaggtcgacaaagatgaggatgctgcctcccttggttcccagaagggtggg

SEQ ID NO: 91951 - DNA, 120 bp, Artificial Sequence
  ENSG00000088387_5 (sequence is synthesized)
atcaccaagcatggctggctgtacaaaggcaacatgaacagtgccatcagcgtgaccatgaggtcatttaagagacgatttttccacctgattcaacttggcgatggatcctataatttg

SEQ ID NO: 91952 - DNA, 120 bp, Artificial Sequence
  ENSG00000088387_6 (sequence is synthesized)
aatttttataaagatgaaaagatctccaaagaaccaaaaggatcaatatttctggattcctgtatgggtgtcgttcagaacaacaaagtcaggcgttttgcttttgagctcaagatgcag

SEQ ID NO: 91953 - DNA, 120 bp, Artificial Sequence
  ENSG00000088387_7 (sequence is synthesized)
gacaaaagtagttatctcttggcagcagacagtgaagtggaaatggaagaatggatcacaattctaaataagatcctccagctcaactttgaagctgcaatgcaagaaaagcgaaatggc

SEQ ID NO: 91954 - DNA, 120 bp, Artificial Sequence
  ENSG00000088387_8 (sequence is synthesized)
gactctcacgaagatgatgaacaaagcaaattggaaggttctggttccggtttagatagctacctgccggaacttgccaagagtgcaagagaagcagaaatcaaactgaaaagtgaaagc

SEQ ID NO: 91955 - DNA, 120 bp, Artificial Sequence
  ENSG00000088387_9 (sequence is synthesized)
agagtcaaacttttttatttggacccagatgcccagaagcttgacttctcatcagctgagccagaagtgaagtcatttgaagagaagtttggaaaaaggatccttgtcaagtgcaatgat

SEQ ID NO: 91956 - DNA, 120 bp, Artificial Sequence
  ENSG00000088387_10 (sequence is synthesized)
ttatctttcaatttgcaatgctgtgttgccgaaaatgaagaaggacccactacaaatgttgaacctttctttgttactctatccctgtttgacataaaatacaaccggaagatttctgcc

SEQ ID NO: 91957 - DNA, 120 bp, Artificial Sequence
  ENSG00000088387_11 (sequence is synthesized)
gatttccacgtagacctgaaccatttctcagtgaggcaaatgctcgccaccacgtccccggcgctgatgaatggcagtgggcagagcccatctgtcctcaagggcatccttcatgaagcc

SEQ ID NO: 91958 - DNA, 120 bp, Artificial Sequence
  ENSG00000088387_12 (sequence is synthesized)
gccatgcagtatccgaagcagggaatattttcagtcacttgtcctcatccagatatatttcttgtggccagaattgaaaaagtccttcaggggagcatcacacattgcgctgagccatat

SEQ ID NO: 91959 - DNA, 120 bp, Artificial Sequence
  ENSG00000088387_13 (sequence is synthesized)
atgaaaagttcagactcttctaaggtggcccagaaggtgctgaagaatgccaagcaggcatgccaaagactaggacagtatagaatgccatttgcttgggcagcaaggacattgtttaag

SEQ ID NO: 91960 - DNA, 120 bp, Artificial Sequence
  ENSG00000088387_14 (sequence is synthesized)
gatgcatctggaaatcttgacaaaaatgccagattttctgccatctacaggcaagacagcaataagctatccaatgatgacatgctcaagttacttgcagactttcggaaacctgagaag

SEQ ID NO: 91961 - DNA, 120 bp, Artificial Sequence
  ENSG00000088387_15 (sequence is synthesized)
atggctaagctcccagtgattttaggcaatctagacattacaattgataatgtttcctcagacttccctaattatgttaattcatcatacattcccacaaaacaatttgaaacctgcagt

SEQ ID NO: 91962 - DNA, 120 bp, Artificial Sequence
  ENSG00000088387_16 (sequence is synthesized)
aaaactcccatcacgtttgaagtggaggaatttgtgccctgcataccaaaacacactcagccttacaccatctacaccaatcacctttacgtttatcctaagtacttgaaatacgacagt

SEQ ID NO: 91963 - DNA, 120 bp, Artificial Sequence
  ENSG00000088387_17 (sequence is synthesized)
cagaagtcttttgccaaggctagaaatattgcgatttgcattgaattcaaagattcagatgaggaagactctcagccccttaagtgcatttatggcagacctggtgggccagttttcaca

SEQ ID NO: 91964 - DNA, 120 bp, Artificial Sequence
  ENSG00000088387_18 (sequence is synthesized)
agaagcgcctttgctgcagttttacaccatcaccaaaacccagaattttatgatgagattaaaatagagttgcccactcagctgcatgaaaagcaccacctgttgctcacattcttccat

SEQ ID NO: 91965 - DNA, 120 bp, Artificial Sequence
  ENSG00000088387_19 (sequence is synthesized)
gtcagctgtgacaactcaagtaaaggaagcacgaagaagagggatgtcgttgaaacccaagttggctactcctggcttcccctcctgaaagacggaagggtggtgacaagcgagcagcac

SEQ ID NO: 91966 - DNA, 120 bp, Artificial Sequence
  ENSG00000088387_20 (sequence is synthesized)
atcccggtctcggcgaaccttccttcgggctatcttggctaccaggagcttgggatgggcaggcattatggtccggaaattaaatgggtagatggaggcaagccactgctgaaaatttcc

SEQ ID NO: 91967 - DNA, 120 bp, Artificial Sequence
  ENSG00000088387_21 (sequence is synthesized)
actcatctggtttctacagtgtatactcaggatcagcatttacataattttttccagtactgtcagaaaaccgaatctggagcccaagccttaggaaacgaacttgtaaagtaccttaag

SEQ ID NO: 91968 - DNA, 120 bp, Artificial Sequence
  ENSG00000088387_22 (sequence is synthesized)
agtctgcatgcgatggaaggccacgtgatgatcgccttcttgcccactatcctaaaccagctgttccgagtcctcaccagagccacacaggaagaagtcgcggttaacgtgactcgggtc

SEQ ID NO: 91969 - DNA, 120 bp, Artificial Sequence
  ENSG00000088387_23 (sequence is synthesized)
attattcatgtggttgcccagtgccatgaggaaggattggagagccacttgaggtcatatgttaagtacgcgtataaggctgagccatatgttgcctctgaatacaagacagtgcatgaa

SEQ ID NO: 91970 - DNA, 120 bp, Artificial Sequence
  ENSG00000088387_24 (sequence is synthesized)
gaactgaccaaatccatgaccacgattctcaagccttctgccgatttcctcaccagcaacaaactactgaagtactcatggtttttctttgatgtactgatcaaatctatggctcagcat

SEQ ID NO: 91971 - DNA, 120 bp, Artificial Sequence
  ENSG00000088387_25 (sequence is synthesized)
ttgatagagaactccaaagttaagttgctgcgaaaccagagatttcctgcatcctatcatcatgcagtggaaaccgttgtaaatatgctgatgccacacatcactcagaagtttcgagat

SEQ ID NO: 91972 - DNA, 120 bp, Artificial Sequence
  ENSG00000088387_26 (sequence is synthesized)
aatccagaggcatctaagaacgcgaatcatagccttgctgtcttcatcaagagatgtttcaccttcatggacaggggctttgtcttcaagcagatcaacaactacattagctgttttgct

SEQ ID NO: 91973 - DNA, 120 bp, Artificial Sequence
  ENSG00000088387_27 (sequence is synthesized)
cctggagacccaaagaccctctttgaatacaagtttgaatttctccgtgtagtgtgcaaccatgaacattatattccgttgaacttaccaatgccatttggaaaaggcaggattcaaaga

SEQ ID NO: 91974 - DNA, 120 bp, Artificial Sequence
  ENSG00000088387_28 (sequence is synthesized)
taccaagacctccagcttgactactcattaacagatgagttctgcagaaaccacttcttggtgggactgttactgagggaggtggggacagccctccaggagttccgggaggtccgtctg

SEQ ID NO: 91975 - DNA, 120 bp, Artificial Sequence
  ENSG00000088387_29 (sequence is synthesized)
atcgccatcagtgtgctcaagaacctgctgataaagcattcttttgatgacagatatgcttcaaggagccatcaggcaaggatagccaccctctacctgcctctgtttggtctgctgatt

SEQ ID NO: 91976 - DNA, 120 bp, Artificial Sequence
  ENSG00000088387_30 (sequence is synthesized)
gaaaacgtccagcggatcaatgtgagggatgtgtcacccttccctgtgaacgcgggcatgactgtgaaggatgaatccctggctctaccagctgtgaatccgctggtgacgccgcagaag

SEQ ID NO: 91977 - DNA, 120 bp, Artificial Sequence
  ENSG00000088387_31 (sequence is synthesized)
attcgagaggatctctcataagcacagattcgggtaacagccttccagaaaggaatagtgagaagagcaattccctggataagcaccaacaaagtagcacattgggaaattccgtggttc

SEQ ID NO: 91978 - DNA, 120 bp, Artificial Sequence
  ENSG00000088387_32 (sequence is synthesized)
gctgtgataaacttgaccagtctgagattaagagcctactgatgtgtttcctctacatcttaaagagcatgtctgatgatgctttgtttacatattggaacaaggcttcaacatctgaac

SEQ ID NO: 91979 - DNA, 120 bp, Artificial Sequence
  ENSG00000088387_33 (sequence is synthesized)
ttatggatttttttacaatatctgaagtctgcctgcaccagttccagtacatggggaagcgatacatagccagaacaggaatgatgcatgccagattgcagcagctgggcagcctggata

SEQ ID NO: 91980 - DNA, 120 bp, Artificial Sequence
  ENSG00000088387_34 (sequence is synthesized)
actctctcacttttaaccacagctatggccactcggacgcagatgttctgcaccagtcattacttgaagccaacattgctactgaggtttgcctgacagctctggacacgctttctctat

SEQ ID NO: 91981 - DNA, 120 bp, Artificial Sequence
  ENSG00000088387_35 (sequence is synthesized)
ttacattggcgtttaagaaccagctcctggccgaccatggacataatcctctcatgaaaaaagtttttgatgtctacctgtgttttcttcaaaaacatcagtctgaaacggctttaaaaa

SEQ ID NO: 91982 - DNA, 120 bp, Artificial Sequence
  ENSG00000088387_36 (sequence is synthesized)
atgtcttcactgccttaaggtccttaatttataagtttccctcaacattctatgaagggagagcggacatgtgtgcggctctgtgttacgagattctcaagtgctgtaactccaagctga

SEQ ID NO: 91983 - DNA, 120 bp, Artificial Sequence
  ENSG00000088387_37 (sequence is synthesized)
gctccatcaggacggaggcctcccagctgctctacttcctgatgaggaacaactttgattacactggaaagaagtcctttgtccggacacatttgcaagtcatcatatctgtcagccagc

SEQ ID NO: 91984 - DNA, 120 bp, Artificial Sequence
  ENSG00000088387_38 (sequence is synthesized)
tgatagcagacgttgttggcattgggggaaccagattccagcagtccctgtccatcatcaacaactgtgccaacagtgaccggcttattaagcacaccagcttctcctctgatgtgaagg

SEQ ID NO: 91985 - DNA, 120 bp, Artificial Sequence
  ENSG00000088387_39 (sequence is synthesized)
acttaaccaaaaggatacgcacggtgctaatggccaccgcccagatgaaggagcatgagaacgacccagagatgctggtggacctccagtacagcctggccaaatcctatgccagcacgc

SEQ ID NO: 91986 - DNA, 120 bp, Artificial Sequence
  ENSG00000088387_40 (sequence is synthesized)
ccgagctcaggaagacgtggctcgacagcatggccaggatccatgtcaaaaatggcgatctctcagaggcagcaatgtgctatgtccacgtaacagccctagtggcagaatatctcacac

SEQ ID NO: 91987 - DNA, 120 bp, Artificial Sequence
  ENSG00000088387_41 (sequence is synthesized)
ggaaagaagcagtccagtgggagccgccccttctcccccacagccatagcgcctgcctgaggaggagccggggaggcgtgtttagacaaggatgcaccgccttcagggtcattaccccaa

SEQ ID NO: 91988 - DNA, 120 bp, Artificial Sequence
  ENSG00000088387_42 (sequence is synthesized)
acatcgacgaggaggcctccatgatggaagacgtggggatgcaggatgtccatttcaacgaggatgtgctgatggagctccttgagcagtgcgcagatggactctggaaagccgagcgct

SEQ ID NO: 91989 - DNA, 120 bp, Artificial Sequence
  ENSG00000088387_43 (sequence is synthesized)
acgagctcatcgccgacatctacaaacttatcatccccatttatgagaagcggagggattttgagaggctggcccatctgtatgacacgctgcaccgggcctacagcaaagtgaccgagg

SEQ ID NO: 91990 - DNA, 120 bp, Artificial Sequence
  ENSG00000088387_44 (sequence is synthesized)
tcatgcactcgggccgcaggcttctggggacctacttccgggtagccttcttcgggcaggcagcgcaataccagtttacagacagtgaaacagatgtggagggattctttgaagatgaag

SEQ ID NO: 91991 - DNA, 120 bp, Artificial Sequence
  ENSG00000088387_45 (sequence is synthesized)
atggaaaggagtatatttacaaggaacccaaactcacaccgctgtcggaaatttctcagagactccttaaactgtactcggataaatttggttctgaaaatgtcaaaatgatacaggatt

SEQ ID NO: 91992 - DNA, 120 bp, Artificial Sequence
  ENSG00000088387_46 (sequence is synthesized)
ctggcaaggtcaaccctaaggatctggattctaagtatgcatacatccaggtgactcacgtcatccccttctttgacgaaaaagagttgcaagaaaggaaaacagagtttgagagatccc

SEQ ID NO: 91993 - DNA, 120 bp, Artificial Sequence
  ENSG00000088387_47 (sequence is synthesized)
acaacatccgccgcttcatgtttgagatgccatttacgcagaccgggaagaggcagggcggggtggaagagcagtgcaaacggcgcaccatcctgacagccatacactgcttcccttatg

SEQ ID NO: 91994 - DNA, 120 bp, Artificial Sequence
  ENSG00000088387_48 (sequence is synthesized)
tgaagaagcgcatccctgtcatgtaccagcaccacactgacctgaaccccatcgaggtggccattgacgagatgagtaagaaggtggcggagctccggcagctgtgctcctcggccgagg

SEQ ID NO: 91995 - DNA, 120 bp, Artificial Sequence
  ENSG00000088387_49 (sequence is synthesized)
tggacatgatcaaactgcagctcaaactccagggcagcgtgagtgttcaggtcaatgctggcccactagcatatgcgcgagctttcttagatgatacaaacacaaagcgatatcctgaca

SEQ ID NO: 91996 - DNA, 120 bp, Artificial Sequence
  ENSG00000088387_50 (sequence is synthesized)
ataaagtgaagctgcttaaggaagttttcaggcaatttgtggaagcttgcggtcaagccttagcggtaaacgaacgtctgattaaagaagaccagctcgagtatcaggaagaaatgaaag

SEQ ID NO: 91997 - DNA, 120 bp, Artificial Sequence
  ENSG00000088387_51 (sequence is synthesized)
ccaactacagggaaatggcgaaggagctttctgaaatcatgcatgagcagctgggatgatctgccccctggaggagaagacgagcgtcttaccgaattcccttcacatcttcaacgccat

SEQ ID NO: 91998 - DNA, 120 bp, Artificial Sequence
  ENSG00000088387_52 (sequence is synthesized)
cagtgggactccaacaagcacaatggttcacgggatgaccagctcgtcttcggtcgtgtgattacatctcatggcccgtgtgtggggacttgctttgtcatttgcaaactcaggatgctt

SEQ ID NO: 91999 - DNA, 120 bp, Artificial Sequence
  ENSG00000088387_53 (sequence is synthesized)
tccaaagccaatcactggggagaccgagcacagggaggaccaaggggaaggggagagaaaggaaataaagaacaacgttatttcttaacagactttctataggagttgtaagaaggtgca

SEQ ID NO: 92000 - DNA, 120 bp, Artificial Sequence
  ENSG00000088387_54 (sequence is synthesized)
catatttttttaaatctcactggcaatattcaaagttttcattgtgtcttaacaaaggtgtggtagacactcttgagctggacttagattttattcttccttgcagagtagtgttagaat

SEQ ID NO: 92001 - DNA, 120 bp, Artificial Sequence
  ENSG00000088387_55 (sequence is synthesized)
agatggcctacagaaaaaaaaggttctgggatctacatggcagggagggctgcactgacattgatgcctgggggaccttttgcctcgaggctgagctggaaaatcttgaaaatatttttt

SEQ ID NO: 92002 - DNA, 120 bp, Artificial Sequence
  ENSG00000088387_56 (sequence is synthesized)
ttttcctgtggcacattcaggttgaatacaagaactatttttgtgactagtttttgatgacctaagggaactgaccattgtaatttttgtaccagtgaaccaggagatttagtgctttta

SEQ ID NO: 92003 - DNA, 120 bp, Artificial Sequence
  ENSG00000088387_57 (sequence is synthesized)
tattcatttccttgcatttaagaaaatatgaaagcttaaggaattatgtgagcttaaaactagtcaagcagtttagaaccaaaggcctatattaataaccgcaactatgctgaaaagtac

SEQ ID NO: 92004 - DNA, 120 bp, Artificial Sequence
  ENSG00000088387_58 (sequence is synthesized)
aaagtagtacagtatattgttatgtacatatcattgttaatacagtcctggcattctgtacatatatgtattacatttctacatttttaatactcacatgggcttatgcattaagtttaa

SEQ ID NO: 92005 - DNA, 120 bp, Artificial Sequence
  ENSG00000088387_59 (sequence is synthesized)
ttgtgataaatttgtgctgttccagtatatgcaatacactttaatgttttattcttgtacataaaaatgtgcaatatggagatgtatacagtctttactatattaggtttataaacagtt

SEQ ID NO: 92006 - DNA, 120 bp, Artificial Sequence
  ENSG00000088387_60 (sequence is synthesized)
ttaagaatttcatccttttgccaaaatggtggagtatgtaattggtaaatcataaatcctgtggtgaatggtggtgtactttaaagctgtcaccatgttatattttcttttaagacttta

SEQ ID NO: 92007 - DNA, 120 bp, Artificial Sequence
  ENSG00000088387_61 (sequence is synthesized)
atttagtaattttatatttgggaaaataaaggtttttaattttatttaactggaatcactgccctgctgtaattaaacattctgtaccacatctgtattaaaaagacattgctgaccatt

SEQ ID NO: 92008 - DNA, 120 bp, Artificial Sequence
  ENSG00000088387_62 (sequence is synthesized)
gcagcatctgcagcagtgtggctgtctggcactgtctttttcattttgggcaggttctgagattcagaacaatcccaagcaaatcacaggagccggcagttttccagtagagccacatgt

SEQ ID NO: 92009 - DNA, 120 bp, Artificial Sequence
  ENSG00000088387_63 (sequence is synthesized)
aaatctcctgcttatttgttctttggtattaagagtgaagcaatcagctagaaaaacgatactttaaaggtttggtgcatccgaggtgtgtcatcttgtgtttgcaccacccctcctgtt

SEQ ID NO: 92010 - DNA, 120 bp, Artificial Sequence
  ENSG00000088387_64 (sequence is synthesized)
ttacactcggagtctggattttttgtcaggctgttgagcaggagcggattctagtacggcagctcagagcttcccttctgttccagtaccggtgactgcttgtcacgaagatggtacagt

SEQ ID NO: 92011 - DNA, 120 bp, Artificial Sequence
  ENSG00000088387_65 (sequence is synthesized)
gggagcctgtttcggaagagccaaggaagaggatgtggaaatggagtagagattgctaaaaaactgaacatccacaccttggggatgggttgcactactagtgtgattctgtttaaaggc

SEQ ID NO: 92012 - DNA, 120 bp, Artificial Sequence
  ENSG00000088387_66 (sequence is synthesized)
atccgcaccgtttttgaaagaaactgtgcttatatgtgcaaacagcaaggagagaataatgcccttgaatatacagcatacaattggacaaaagaagattcagaactattgatctcctcc

SEQ ID NO: 92013 - DNA, 120 bp, Artificial Sequence
  ENSG00000088387_67 (sequence is synthesized)
ccgggccgggccgcgggagcaggcggaggcggaggcggcgggggcaggaggatgtcgcagccgccgctgctccccgcctcggcggagactcggaagttcacccgggcgctgagtaagccg

SEQ ID NO: 92014 - DNA, 120 bp, Artificial Sequence
  ENSG00000088387_68 (sequence is synthesized)
catctgaacttatggatttttttacaatatctgaagtctgcctgcaccagttccagtacatggggaagcgatacatagccaggaaccaggaggggttgggacccatagttcatgatcgaa

SEQ ID NO: 92015 - DNA, 120 bp, Artificial Sequence
  ENSG00000088387_69 (sequence is synthesized)
gccatctccggcattggtaacgctccatgctcttgtgggcttctctccaccatcactctgaaagtgtcttggagccaatagttggtgaacgtgtcacacttgtgtggtaggaccttgaag

SEQ ID NO: 92016 - DNA, 120 bp, Artificial Sequence
  ENSG00000088387_70 (sequence is synthesized)
tctaagttgctttcctgagtattcttttcctgcttgtgatagtcaacaactgaaacccctcagccatgccctgaaataaaggtcccggatgcctgtgactcctcaggatcatacagttaa

SEQ ID NO: 92017 - DNA, 120 bp, Artificial Sequence
  ENSG00000088387_71 (sequence is synthesized)
aaaaccgggtcactgtggatttttcccttctaatgattccacctttgccagaggagacattgaatgcaacaccttccctcccactgccggaagtactaagttctccagtggctctgatca

SEQ ID NO: 92018 - DNA, 120 bp, Artificial Sequence
  ENSG00000088387_72 (sequence is synthesized)
agtggcaccaacaaagtagcacattgggaaattccgtggttcgctgtgataaacttgaccagtctgagattaagagcctactgatgtgtttcctctacatcttaaagagcatgtctgatg

SEQ ID NO: 92019 - DNA, 80 bp, Artificial Sequence
  ENSG00000088387_73 (sequence is synthesized)
ggagcgagcccgggcgctgctgcgatcgcggggggccgcggacgccgaggggggcgccttggggcgtgacacggtgcaga

SEQ ID NO: 92020 - DNA, 120 bp, Artificial Sequence
  ENSG00000088387_74 (sequence is synthesized)
gagccactcccagttgatcccttttccctggagtcagtcatgtgtcccggaagtgcttccagcagctgctgaagacctctgccctatgaggtcactaggagttctttcattaagtgacct

SEQ ID NO: 92021 - DNA, 120 bp, Artificial Sequence
  ENSG00000088387_75 (sequence is synthesized)
gaggcaaagccaaagctaattgagccactcgactatgaaaatgtcatcgtccagaagaagactcagatcctgaacgactgtttacgggagatgctgctcttcccttacgatgactttcag

SEQ ID NO: 92022 - DNA, 120 bp, Artificial Sequence
  ENSG00000088387_76 (sequence is synthesized)
tttttgttcaacgtttgttgagttttcattttaaatcttaattggattgtgtatactgttaagggatatttttgcaggtggtggggggaggggaacactgatttgtagtgttagcaattt

SEQ ID NO: 92023 - DNA, 120 bp, Artificial Sequence
  ENSG00000088387_77 (sequence is synthesized)
tgatgaaatatgacatagtaattccagaagaacgtagcagtttgtggctagaattcagtgctaaaatcagttctcaaaagtcttctgtcccgcaagactttttctgtgtgaaataacaga

SEQ ID NO: 92024 - DNA, 120 bp, Artificial Sequence
  ENSG00000088387_78 (sequence is synthesized)
agagcggccacctctgagagaaaaacacgtgacacaaatcaagattctaatagtttctccataagaaaatgccggacataatgtacttattaatattctgactaaatgaacgcctgtgct

SEQ ID NO: 92025 - DNA, 82 bp, Artificial Sequence
  ENSG00000088387_79 (sequence is synthesized)
tatcctccaagaattgtcacaggtgctcacagccttcttcagtctttatttctccctgtctttatcacattttgaataaaga

SEQ ID NO: 92026 - DNA, 120 bp, Artificial Sequence
  ENSG00000088387_80 (sequence is synthesized)
tctttatttctccctgtctttatcacattttgaataaagaaagcatcctactatggctagtggctagactacctaataatgggactaattcatgggataaaataaatggcagcctttatc

SEQ ID NO: 92027 - DNA, 120 bp, Artificial Sequence
  ENSG00000088387_81 (sequence is synthesized)
caattaactcacaggacttgcccactctgagattatgtctttacctttgccggtggtggtggtggtaatacgccatttcatgtaggggatgaaactgggtagaatttaacatgagaaacc

SEQ ID NO: 92028 - DNA, 120 bp, Artificial Sequence
  ENSG00000088387_82 (sequence is synthesized)
ccacaccaatgcccaaatttatcctgcaataataataccagtccttaacctggttgatatttatgtgtctttttcacagttatgctctccttagttgacactgtaaagattaaaagagtt

SEQ ID NO: 92029 - DNA, 120 bp, Artificial Sequence
  ENSG00000088387_83 (sequence is synthesized)
aattcatgcaaaatgcttgcaacagagcctggcacacggtaaatgctcagcaaatgttggctgctgtcacgagtttccatttgcctttcttctgggccttcactctgtctctgccctgct

SEQ ID NO: 92030 - DNA, 120 bp, Artificial Sequence
  ENSG00000088387_84 (sequence is synthesized)
ttgccccattcccagccactgctccagaagcagggaggggaccttccttagagggttttgtctgcagtggttcacagcactagctttaaagtcagacagatgcagccttggatctggaat

SEQ ID NO: 92031 - DNA, 120 bp, Artificial Sequence
  ENSG00000088387_85 (sequence is synthesized)
cgaccatttactagttaccatggcaggatgttgtctatcttctttgccctccatacccatgtcttcaaaacggtcgttagagggattaagagctgatacaaagtgtatggtggttggcag

SEQ ID NO: 92032 - DNA, 120 bp, Artificial Sequence
  ENSG00000088387_86 (sequence is synthesized)
agaggagtcagatgagtggaaacatcacttcactgtaaccttgatcatttccacaaagttttaatacttctgtttgactcttttgactcttctccaattcagaattcaccttgttaggat

SEQ ID NO: 92033 - DNA, 120 bp, Artificial Sequence
  ENSG00000088387_87 (sequence is synthesized)
tggggacttctttagaacttggagataggccactggggatctttagcatcatagcctccaattgctccgcactgacattgcagctgtgaaaagtacttgaaactgacttaatcctttttc

SEQ ID NO: 92034 - DNA, 120 bp, Artificial Sequence
  ENSG00000088387_88 (sequence is synthesized)
actcttgaattttaagatccaaatccacttttcataggaattcacctcgacaggcttattatactcaggttatctatattgcctcctttcttgaagatttaaatccctgttctcttttag

SEQ ID NO: 92035 - DNA, 120 bp, Artificial Sequence
  ENSG00000088387_89 (sequence is synthesized)
gagtaccttccagggaagcctcatctttgaactgggtttactagtttttttctggcagctttaacaattctttgttcatcagggagtttctagctaattttagtcctggtgcttctcctt

SEQ ID NO: 92036 - DNA, 120 bp, Artificial Sequence
  ENSG00000088387_90 (sequence is synthesized)
caagagcaaactctccttacatctctgttagaagaatcctgtttccacacatactgagaatgtgccgtcacagttttttaaatgtctttggatcatggtgcctgagagttttaaaagtga

SEQ ID NO: 92037 - DNA, 120 bp, Artificial Sequence
  ENSG00000088387_91 (sequence is synthesized)
ttctttttccacctactcagtggtaccaagggaagagggacgaatttatcttcttttcattttactcaagtgtcgtttaaggactttaaaagctatgcactgggccaggatattaaatac

SEQ ID NO: 92038 - DNA, 120 bp, Artificial Sequence
  ENSG00000088387_92 (sequence is synthesized)
aaacacatacacaaagacataaaaataggaacaaactaagcatattgattttgatatattgcatttccatctgtttgtcttaaattaggactctagttctggaatcaagcttgagactct

SEQ ID NO: 92039 - DNA, 120 bp, Artificial Sequence
  ENSG00000088387_93 (sequence is synthesized)
gagaacttagggcctaattttactttactgaggacctctttctcttgagttctgtgttctttttcatgacttctgtgttcttcaaatgctgttctacattaaatatgaaatatgattata

SEQ ID NO: 92040 - DNA, 120 bp, Artificial Sequence
  ENSG00000088387_94 (sequence is synthesized)
ttagaaaaattataatttggtcatagcatgtgtttcttatctgagtacagaaaaaggccatagttttttcacagggtttttacctgtcccttgcgacaatcattcacatggtttctctcc

SEQ ID NO: 92041 - DNA, 120 bp, Artificial Sequence
  ENSG00000088387_95 (sequence is synthesized)
tggggagacgcagccactggctgacaataaggcttaatgaaaccatgttcaagcctttgcttcttttttcaaattctcctggctcttcttttcttgatctttaatacactgaatcagttt

SEQ ID NO: 92042 - DNA, 120 bp, Artificial Sequence
  ENSG00000088387_96 (sequence is synthesized)
cagggatagcagtgaataaatctgagtgttcaacagagggaaggatttatgaccttgatgtcacaggtcttccttctaaggttaaagagttaaagactgaccaggcacggtggctcatgc

SEQ ID NO: 92043 - DNA, 61 bp, Artificial Sequence
  ENSG00000088387_97 (sequence is synthesized)
gaaatacaaaaaaattagccagggttggtggcagtcgcctgtaatcacagctacttgggag

SEQ ID NO: 92044 - DNA, 120 bp, Artificial Sequence
  ENSG00000088387_98 (sequence is synthesized)
cacagctacttgggaggctgaggcagaggagtcactttcaaatatacttttggtgtaacctagaggctggctatatttattttgttgtttatttattttttaacttagaagtatcccagt

SEQ ID NO: 92045 - DNA, 120 bp, Artificial Sequence
  ENSG00000088387_99 (sequence is synthesized)
tttttaacttagaagtatcccagtccatggcagctcatttgcctactgagatctgaaaacaaccagcctgttgtgaagtgccaagtaatggcatcttcagcttgcgtctgggagaatgtg

SEQ ID NO: 92046 - DNA, 120 bp, Artificial Sequence
  ENSG00000088387_100 (sequence is synthesized)
tgctcacagctgccagacacagagtccaaatctcctgatgccatctgccaaaccagccaggcctttccgctggaggcacgccttttggttcagcacggaatgtacaagtccaaagagtcg

SEQ ID NO: 92047 - DNA, 120 bp, Artificial Sequence
  ENSG00000088387_101 (sequence is synthesized)
ttttaaattatgtgatttatttaaatcttatctaagcaggaagtcaatctattaccttaaaaaattccatagtaccaagatagggagtgatttctgccttcaaatactgtttttttcatg

SEQ ID NO: 92048 - DNA, 120 bp, Artificial Sequence
  ENSG00000088387_102 (sequence is synthesized)
gacatcacaaattttatttccacattagatttcctttctgctcatagttgtttatagcagattcccagatattccccgttcacagcacccttagtgtcactttatttcgtggcatcccta

SEQ ID NO: 92049 - DNA, 120 bp, Artificial Sequence
  ENSG00000088387_103 (sequence is synthesized)
ggctgaaagacacacccagcagttctctttattaggtacttaggaccaaataacttaataagtacttacatcctaacaatttagtaggcacttaaaagaaataatacacataaatttaaa

SEQ ID NO: 92050 - DNA, 120 bp, Artificial Sequence
  ENSG00000088387_104 (sequence is synthesized)
ggaaacaattaattttatttttaataaccacaactcactacaaatgggtggtgtgtacctgttggacactgacagcttctcagcctttgggtcagattggccagcaccattcgcatttcc

SEQ ID NO: 92051 - DNA, 120 bp, Artificial Sequence
  ENSG00000088387_105 (sequence is synthesized)
tgtccctcattgattacttgccttttatcatagcaggcccccaaatacccagcttcacaaatatgtcttcaaaaggagcatagcacaacctgctgctgaaacagcagcttctggctgagg

SEQ ID NO: 92052 - DNA, 120 bp, Artificial Sequence
  ENSG00000088387_106 (sequence is synthesized)
tcacatatcactgtgttctcctcgaaaatttaaaataccccatgacacccctcagagttgggtaggctcctcagtgtttattaccagtttgaatgctacaagtttgttgtgtggtttaat

SEQ ID NO: 92053 - DNA, 120 bp, Artificial Sequence
  ENSG00000088387_107 (sequence is synthesized)
tttgtgatttgatagttgtaggtggatttatcttttaatttttttaagtcttcattctatcacattctgaaacaggtatgcatttagtctttagcgatcaaaggtggtttctaacaagtg

SEQ ID NO: 92054 - DNA, 120 bp, Artificial Sequence
  ENSG00000088387_108 (sequence is synthesized)
aattgatgtttacatctgaatgtttcagactagtttctttttatctcattgtatatgacctggttctttaaaggtgaagtaatggaatgcaactcttgagccaacttcctaacagaaaaa

SEQ ID NO: 92055 - DNA, 120 bp, Artificial Sequence
  ENSG00000088387_109 (sequence is synthesized)
ataagtgcaataaaagcaatttcccttaaagttcagtactcatctttattttgttctgtcttaataaaactttattgttggcttgatttccatttagcttctccatatacaacctcaact

SEQ ID NO: 92056 - DNA, 120 bp, Artificial Sequence
  ENSG00000088387_110 (sequence is synthesized)
tttgtcttatagtgatgaaataggccagagatttttagtagacttcctctttgtgaagattttctttttctgttaacattgttcttttctggggatatttgagaaattttcagaattaca

SEQ ID NO: 92057 - DNA, 120 bp, Artificial Sequence
  ENSG00000088387_111 (sequence is synthesized)
ttttatgttaagaagtaaacatgtatgttttctttttaaaagaagcaaatttagaatttttgcattttcctcctattaatattttctatttttcattgaaatgtggtagcacttaaagtt

SEQ ID NO: 92058 - DNA, 120 bp, Artificial Sequence
  ENSG00000088387_112 (sequence is synthesized)
ctctaatcttaactgttttattttttatcacaacagtaattttatatttgagttttggagtactaaatgcaagtatatacaaggtgtccttataccagcaacgtcttctaccttgacttg

SEQ ID NO: 92059 - DNA, 120 bp, Artificial Sequence
  ENSG00000088387_113 (sequence is synthesized)
gattctccctgactttgtcccatgaagatgggcaaacagtaaattctgtcacagaaaggcactgtgctgggctagcttcactttttgcagtgacacctacgtcacaagatggcatttgga

SEQ ID NO: 92060 - DNA, 120 bp, Artificial Sequence
  ENSG00000088387_114 (sequence is synthesized)
gaatattgtgccaagtagaataaaatgcctcacagcttaaaacagtgaatgtgagaagctgaagatttctgtcccaacaaaatgttttagaatcgggttttgtgaaatggttaacgtatt

SEQ ID NO: 92061 - DNA, 120 bp, Artificial Sequence
  ENSG00000088387_115 (sequence is synthesized)
tttttcagtggatataaatttaacttcttaaaagaaaatcttcctacttcataagcaccctgtatatatttgcatataaaagtgtggactgccttaaaaatagatgggccaaggaaaaca

SEQ ID NO: 92062 - DNA, 120 bp, Artificial Sequence
  ENSG00000088387_116 (sequence is synthesized)
ggagtggagatgatgtgactttgctccatgcactgtggaaagatatgctctgctctatacaaaaattgccatggttctctgctgcatgtgaaaaagatcctgaactagactgtgaacctt

SEQ ID NO: 92063 - DNA, 120 bp, Artificial Sequence
  ENSG00000088387_117 (sequence is synthesized)
gtacatgtttgccatccacggtggtcgagtttgatgaacactgtgccttcttattgtcactttgaagtcacccagcagcatgcagtcgatgatagtccatgcatgtccctgttctcctac

SEQ ID NO: 92064 - DNA, 120 bp, Artificial Sequence
  ENSG00000088387_118 (sequence is synthesized)
acacaataacacagtgagggggacggttggctccgggacaggggacaggtgtcattgcagccctggtctcattttcatctgctctggtgatggtacacagcaggaagttagctgtttgat

SEQ ID NO: 92065 - DNA, 120 bp, Artificial Sequence
  ENSG00000088387_119 (sequence is synthesized)
tgctaacccaaatcactcttctgttttctctacttgactgctgacaagtttaacaaagtgtgtggctcttctccttcctgcttgggaaccaggaggggttgggacccatagttcatgatc

SEQ ID NO: 92066 - DNA, 120 bp, Artificial Sequence
  ENSG00000088448_0 (sequence is synthesized)
gcgcgctccgctcggcagcctgtgggacgcgaccgcggcgctagtctcgttcctttgtgctgcggcggcggcttctcgagtcctccccgacgcgtcctctaggccagcgagccccgcgct

SEQ ID NO: 92067 - DNA, 120 bp, Artificial Sequence
  ENSG00000088448_1 (sequence is synthesized)
ctccggtgacggaccatgtcggcggcgggagcgggcgcgggcgtagaggcgggcttctccagcgaggagctgctctcgctccgtttcccgctgcaccgcgcctgccgcgacggggacctg

SEQ ID NO: 92068 - DNA, 120 bp, Artificial Sequence
  ENSG00000088448_2 (sequence is synthesized)
gccacgctctgctcgctgctgcagcagacaccccacgcccacctggcctctgaggactccttctatggctggacgcccgtgcactgggccgcgcatttcggcaagttggagtgcttagtg

SEQ ID NO: 92069 - DNA, 120 bp, Artificial Sequence
  ENSG00000088448_3 (sequence is synthesized)
cagttggtgagagcgggagccacactcaacgtctccaccacacggtacgcgcagacgccagcccacattgcagcctttgggggacatcctcagtgcctggtctggctgattcaagcagga

SEQ ID NO: 92070 - DNA, 120 bp, Artificial Sequence
  ENSG00000088448_4 (sequence is synthesized)
gccaacattaacaaaccggattgtgagggtgaaactcccattcacaaggcagctcgctctgggagcctagaatgcatcagtgcccttgtggcgaatggggctcacgtcgacctgagaaat

SEQ ID NO: 92071 - DNA, 120 bp, Artificial Sequence
  ENSG00000088448_5 (sequence is synthesized)
gccagtggcctgacagcagcagacattgcacaaacccagggtttccaagagtgtgcccagtttctcttgaacctccagaattgtcatctgaaccatttctataacaatggcatcttaaat

SEQ ID NO: 92072 - DNA, 120 bp, Artificial Sequence
  ENSG00000088448_6 (sequence is synthesized)
gggggtcatcagaatgtatttcctaatcatattagtgtgggaacaaatcgaaagagatgcttggaagactcagaagactttggagtaaagaaagctagaactgaagctcaaagcttggat

SEQ ID NO: 92073 - DNA, 120 bp, Artificial Sequence
  ENSG00000088448_7 (sequence is synthesized)
tctgccgtgccactcacgaatggcgacacagaagacgatgctgacaaaatgcacgttgatagggagtttgctgttgtaacagatatgaaaaacagtagctccgtatcgaatacattgaca

SEQ ID NO: 92074 - DNA, 120 bp, Artificial Sequence
  ENSG00000088448_8 (sequence is synthesized)
aatggatgtgtcatcaatggacatttggacttcccctccacgaccccgctcagtgggatggaaagcaggaatggccagtgcttgacaggaactaacggaattagcagtggattagcccca

SEQ ID NO: 92075 - DNA, 120 bp, Artificial Sequence
  ENSG00000088448_9 (sequence is synthesized)
ggacagccgtttccgagtagccagggttctctctgcattagtgggactgaggagccagagaagaccctgagagctaaccctgagttgtgcggttctctgcacctgaacgggagtccaagt

SEQ ID NO: 92076 - DNA, 120 bp, Artificial Sequence
  ENSG00000088448_10 (sequence is synthesized)
cccagaactgaacagtgtggtcgagcattccaagtccgtgaaggtgcaggagcggtacgacagtgccgtgctgggcaccatgcacctgcaccacggctcctagagacgctgacctggctc

SEQ ID NO: 92077 - DNA, 120 bp, Artificial Sequence
  ENSG00000088448_11 (sequence is synthesized)
tcggaaacgcaggagtccttcctggtagccagctcagaatacccatgtagcagcaacttgaacgaatgtcacaacttgtacgttttttatatacttcaactttctgaaaaagtaaacttc

SEQ ID NO: 92078 - DNA, 120 bp, Artificial Sequence
  ENSG00000088448_12 (sequence is synthesized)
gacaagttcccagcaactgcttgtttgtgcatgagtagggcttactaagtgcatagatgtttctacagtgaggtgtcctttttataaggtgcacttttggagtttttctgatgccaatct

SEQ ID NO: 92079 - DNA, 120 bp, Artificial Sequence
  ENSG00000088448_13 (sequence is synthesized)
caacattgtctttttaatactgtcaccagatattgccatttttctttttgttaaaagattatatgatcaagataaattggggtggtaaatcaggtgcctggtaatttatctctttgcaca

SEQ ID NO: 92080 - DNA, 120 bp, Artificial Sequence
  ENSG00000088448_14 (sequence is synthesized)
tgggcatcattttaaaaagcttgcttccactcttttctgtagaatttgacggaacacagctatttccctatgcaaggtacagccttacaaagatttctgcagtgatttgtgtgaagaaga

SEQ ID NO: 92081 - DNA, 120 bp, Artificial Sequence
  ENSG00000088448_15 (sequence is synthesized)
gaacgtttgtctttttcaatgaagctttgcagatcaccatgtggttgaaggttttagttgtggacacagtggtccctccttaatgatgaagatcactgccttgggcttcatggaaaacag

SEQ ID NO: 92082 - DNA, 120 bp, Artificial Sequence
  ENSG00000088448_16 (sequence is synthesized)
gcccagcctggggctgcgtttggatttattgtttttattccacacttcctacttggtctctggaagttttaccacatgtaacagattcctttatatgtagtggaaatcactatttgtaga

SEQ ID NO: 92083 - DNA, 120 bp, Artificial Sequence
  ENSG00000088448_17 (sequence is synthesized)
aactgtcaggtcaaaatatttaactgactgttgacatgtattttcttttttccttgtttttgttttttggggttttctgctttaagatatataccactatgtatatccagttaactgaga

SEQ ID NO: 92084 - DNA, 120 bp, Artificial Sequence
  ENSG00000088448_18 (sequence is synthesized)
gaattttgactctcttaataaaactgcattaagtttttgattttgtagaaattagcttttgtctaggcaactagtggttatactctgcaaatattgtaatgaatttttacttttttgatt

SEQ ID NO: 92085 - DNA, 120 bp, Artificial Sequence
  ENSG00000088448_19 (sequence is synthesized)
tttgtaataaaaattggtgcagataaaatgtcaaatgaacaaaccagtgttctaagagtgttactaacattttgttctaaaactgtccttcacaaattgaataaaaaactctcacactca

SEQ ID NO: 92086 - DNA, 120 bp, Artificial Sequence
  ENSG00000088448_20 (sequence is synthesized)
gctctgggagcctagaatgcatcagtgcccttgtggcgaatggggctcacgtcgagttgcatctgtaagataacgcatttcagctgctgtgcatcgtattaaattttctagcaccacacg

SEQ ID NO: 92087 - DNA, 120 bp, Artificial Sequence
  ENSG00000088448_21 (sequence is synthesized)
ggtgaaactcccattcacaaggcagctcgctctgggagcctagaatgcatcagtgcccttgtggcgaatggggctcacgtcgaggccctcaagtgtctcttttccaccaggtgtggctga

SEQ ID NO: 92088 - DNA, 120 bp, Artificial Sequence
  ENSG00000088448_22 (sequence is synthesized)
gtataagagccaccactcaagaccctgcattatggtgacttccctggactgagctttcatattttttttagaagaagtatttagcctgagctacctagccaaaaacaattataagccttt

SEQ ID NO: 92089 - DNA, 120 bp, Artificial Sequence
  ENSG00000088448_23 (sequence is synthesized)
ggcctggagatagagcacaagtaatcattattcattgctattgtatatgtggttatttagttttaacatcgagataaaatgtcagttttgtcagtaagttaatttgtaagttgcttcttg

SEQ ID NO: 92090 - DNA, 120 bp, Artificial Sequence
  ENSG00000088448_24 (sequence is synthesized)
ttttttgttttaccttaagtgttatgaataattcatgaaaattaattataaaccacattattctaatcagaaatgtgaacatttagacttcggaggaaataaaacccacaaaactagttt

SEQ ID NO: 92091 - DNA, 120 bp, Artificial Sequence
  ENSG00000088448_25 (sequence is synthesized)
agggttctggagtggttgtttgagtgacacagcacaaggccttgatttcatcatgcttttgctgtggatgtagtgtagcttgctgaacaggtttatttcacagagcagtgtacattcttg

SEQ ID NO: 92092 - DNA, 120 bp, Artificial Sequence
  ENSG00000088448_26 (sequence is synthesized)
cacttcaggtggtaatgcgcctggtggattgtgcggtgacggtggagatttctcctgtactgccactgcgaagatgggacttaacaaaagggaatgtgagggaaatactgatggcccaag

SEQ ID NO: 92093 - DNA, 120 bp, Artificial Sequence
  ENSG00000088448_27 (sequence is synthesized)
tgtaaatgtctatgtggaactttttgagcacccatgtttacctgccatgaattagattttttaatttgttgtatctgtttgaaatatatctattaaagaaaatctgccactgtgcctgaa

SEQ ID NO: 92094 - DNA, 120 bp, Artificial Sequence
  ENSG00000088448_28 (sequence is synthesized)
cagtatgcatattatttctaacataagtttttctcagatgttttgcactttgttgtccagtgtctttttaaaaatgttatactataatttgcatatcttgggcaagtttgtagatacaag

SEQ ID NO: 92095 - DNA, 120 bp, Artificial Sequence
  ENSG00000088448_29 (sequence is synthesized)
aagtgttttgggtatattctgtggacatgaaaaatgtaagtgcaatctttattctgatttgaagctattgcttaatgtgccttgcttatttttaatgaggtttgcatttttaattttctg

SEQ ID NO: 92096 - DNA, 120 bp, Artificial Sequence
  ENSG00000088448_30 (sequence is synthesized)
acatatggcctttgggtgaatataccgaacatgctacagttaatattttcaaaccaatataccacaaagaggacgactagcagtaaacactgagaaactagtaaatgtggttctgactca

SEQ ID NO: 92097 - DNA, 120 bp, Artificial Sequence
  ENSG00000088448_31 (sequence is synthesized)
gaagattctgaatctgtaaaaactacacatgtcaatgttttacagctacgtaattcgaattgacttgattttttcaagtaatcctagaaagggggagcattccatatagaaactgctgaa

SEQ ID NO: 92098 - DNA, 120 bp, Artificial Sequence
  ENSG00000088448_32 (sequence is synthesized)
cacgttgatagggagtttgctgttgtaacaggtgggagtggacagtttcctgttagctgcaacaacaatccaatggttgaagacaccaaacagcaggagagtggttctgttggaccaaaa

SEQ ID NO: 92099 - DNA, 120 bp, Artificial Sequence
  ENSG00000088448_33 (sequence is synthesized)
ggcctagggcgcctgtgcggcagcgctcgcggcccggagtcgcggcggggcagccggggggcgcggggcggaagcgagggtcttgctctgttgcccacgctggagtgcagcggcgtgatc

SEQ ID NO: 92100 - DNA, 65 bp, Artificial Sequence
  ENSG00000088448_34 (sequence is synthesized)
ggcagccggggggcgcggggcggaagcgagggtcttgctctgttgcccacgctggagtgcagctc

SEQ ID NO: 92101 - DNA, 120 bp, Artificial Sequence
  ENSG00000088451_0 (sequence is synthesized)
actgctgagctgggagatgtcggcggcgtgttgggaggaaccgtggggtcttcccggcggctttgcgaagcgggtcctggtgaccggcggtgctggtttcattgcatcacatatgattgt

SEQ ID NO: 92102 - DNA, 120 bp, Artificial Sequence
  ENSG00000088451_1 (sequence is synthesized)
ctctttagtggaagattatccaaactatatgatcataaatctagacaagctggattactgtgcaagcttgaagaatcttgaaaccatttctaacaaacagaactacaaatttatacaggg

SEQ ID NO: 92103 - DNA, 120 bp, Artificial Sequence
  ENSG00000088451_2 (sequence is synthesized)
tgacatatgtgattctcactttgtgaaactgctttttgaaacagagaaaatagatatagtactacattttgccgcacaaacacatgtagatctttcattcgtacgtgcctttgagtttac

SEQ ID NO: 92104 - DNA, 120 bp, Artificial Sequence
  ENSG00000088451_3 (sequence is synthesized)
ctatgttaatgtttatggcactcacgttttggtaagtgctgctcatgaagccagagtggagaagtttatttatgtcagcacagatgaagtatatggtggcagtcttgataaggaatttga

SEQ ID NO: 92105 - DNA, 120 bp, Artificial Sequence
  ENSG00000088451_4 (sequence is synthesized)
tgaatcttcacccaaacaacctacaaatccttatgcatcatctaaagcagctgctgaatgttttgtacagtcttactgggaacaatataagtttccagttgtcatcacaagaagcagtaa

SEQ ID NO: 92106 - DNA, 120 bp, Artificial Sequence
  ENSG00000088451_5 (sequence is synthesized)
tgtttatggaccacatcaatatccagaaaaggttattccaaaatttatatctttgctacagcacaacaggaaatgttgcattcatgggtcagggcttcaaacaagaaacttcctttatgc

SEQ ID NO: 92107 - DNA, 120 bp, Artificial Sequence
  ENSG00000088451_6 (sequence is synthesized)
tactgatgttgtagaagcatttctcactgtcctcaaaaaagggaaaccaggtgaaatttataacatcggaaccaattttgaaatgtcagttgtccagcttgccaaagaactaatacaact

SEQ ID NO: 92108 - DNA, 120 bp, Artificial Sequence
  ENSG00000088451_7 (sequence is synthesized)
gagacctaaagtgccttggaaagaaggaataaagaaaacaattgaatggtacagagagaattttcacaactggaagaatgtggaaaaggcattagaaccctttccggtataatcaccatt

SEQ ID NO: 92109 - DNA, 120 bp, Artificial Sequence
  ENSG00000088451_8 (sequence is synthesized)
tatatagtcgagacagttgtcaaagaagaaagttatcctacctcgccaagtggtatgaaattaagtgaccaaatgaagtgcactcttttcttttggaattagattcatgactttctgtat

SEQ ID NO: 92110 - DNA, 120 bp, Artificial Sequence
  ENSG00000088451_9 (sequence is synthesized)
aaaattcaaatgcagaatgcctcaatctttgggagagtttcagtactggcatagaatttaaatgtcaaaattctttctgaaaccctttctcctagaaactaggaaataataggtgtagaa

SEQ ID NO: 92111 - DNA, 120 bp, Artificial Sequence
  ENSG00000088451_10 (sequence is synthesized)
gactctccctaagggtagccaggaagaagtctcctgattcggacaaccatgaggggtagtggtgctagggagaaggcaaccttcactggttttgaactcagtgcctaagaaagtctctga

SEQ ID NO: 92112 - DNA, 120 bp, Artificial Sequence
  ENSG00000088451_11 (sequence is synthesized)
aatgttcgtttttaggcaatataggatgtcttaggccctaattcaccatttcttttttaagatctgatatgctatcattgccttaataatggaacaaaatagaagcatatctaacacttt

SEQ ID NO: 92113 - DNA, 120 bp, Artificial Sequence
  ENSG00000088451_12 (sequence is synthesized)
ttaaattgataattttgtaaaattgattacgttgaatgctttttaagagaagtgtgtaaagtttttatattttcacaattaacgtatgtaaaaccttgtatcagaaatttatcatgttta

SEQ ID NO: 92114 - DNA, 120 bp, Artificial Sequence
  ENSG00000088451_13 (sequence is synthesized)
gttaacgtgtcccgcgagcgaggcgcgtcgcaaaaggtcgcggcggaacttccctgcgcttttcagaccatactctttacggtactaggcactgctgagctgggagatgtcggcggcgtg

SEQ ID NO: 92115 - DNA, 120 bp, Artificial Sequence
  ENSG00000088451_14 (sequence is synthesized)
ttgggaggaaccgtggggtcttcccggcggctttgcgaagcgggtcctggtgaccggcggtgctggtttcatgtaggtaatggcgccgctagccaagcagtggctccccagaaaccccta

SEQ ID NO: 92116 - DNA, 120 bp, Artificial Sequence
  ENSG00000088451_15 (sequence is synthesized)
gtctaaaataatatgttgtaaattatacataattttatatgctgtataacaccacttgcagattccttcagacttagagtttgaaaacttgagttttaagtctcaagctggctgacactc

SEQ ID NO: 92117 - DNA, 120 bp, Artificial Sequence
  ENSG00000088451_16 (sequence is synthesized)
aatgatatatgtgaaaataccttgtacttctaaagactctaaagcactatagaatacttctacctctactgtcacgctgcagttgactccctgtttgcagtcagaccagtatgtcagcgt

SEQ ID NO: 92118 - DNA, 120 bp, Artificial Sequence
  ENSG00000088451_17 (sequence is synthesized)
atacagaaagtcaaaagctagctagatagtgatgcaagaagcttgtatacattaactgtcttagtgtcagctggctaactgtgcctcaactcatctttattgtgtaggcacgaatatctt

SEQ ID NO: 92119 - DNA, 120 bp, Artificial Sequence
  ENSG00000088451_18 (sequence is synthesized)
ccagaaagtactacaagtaatgaataaaaaatgtagtttagaggctgaaaatgcctgtgcaattggctctatatcatcaagcctgattttatataactttggctactctgcctaaatttg

SEQ ID NO: 92120 - DNA, 80 bp, Artificial Sequence
  ENSG00000088538_0 (sequence is synthesized)
gagcccgctggggcgagccgagccgcggcggcgccgggagccgggcggcggagctgtgaagaagcaagcggcggcacggg

SEQ ID NO: 92121 - DNA, 80 bp, Artificial Sequence
  ENSG00000088538_1 (sequence is synthesized)
gccaggggctgctgggccacccgcggagcctcgcggtccagacgtggcgggggtggcggcggcatcccggacggcctgtg

SEQ ID NO: 92122 - DNA, 120 bp, Artificial Sequence
  ENSG00000088538_2 (sequence is synthesized)
ccacagccgggcccgcggccgtccccgccgcgttgtcgcccggtcgccgcgcccgcggggccgcgcccggcacggccatgtggacccccacggaggaggagaaatacggcgtagtgatat

SEQ ID NO: 92123 - DNA, 120 bp, Artificial Sequence
  ENSG00000088538_3 (sequence is synthesized)
gaaatacggcgtagtgatatgcagctttcgaggatctgtccctcaagggttggtcttagaaataggagaaacagtccagattcttgaaaaatgtgaaggttggtacagaggagtttcaac

SEQ ID NO: 92124 - DNA, 120 bp, Artificial Sequence
  ENSG00000088538_4 (sequence is synthesized)
aaagaagccaaatgtgaaggggatctttcctgcaaattacattcacttgaaaaaggcaattgtcagtaatagggggcagtatgaaactgtggttccacttgaagattctattgtgactga

SEQ ID NO: 92125 - DNA, 120 bp, Artificial Sequence
  ENSG00000088538_5 (sequence is synthesized)
ggttacagcaactctacaagaatgggcaagtttgtggaaacagttgtatgtgaaacacaaagtagatcttttctacaaactacgccatgtgatgaatgaacttattgacctgcgaaggca

SEQ ID NO: 92126 - DNA, 120 bp, Artificial Sequence
  ENSG00000088538_6 (sequence is synthesized)
gctactgtctggtcacctgactcaggatcaggtgcgggaggttaagcggcacatcaccgtgcgcctggactggggtaatgaacatttgggcctggacctggtgcctcggaaggactttga

SEQ ID NO: 92127 - DNA, 120 bp, Artificial Sequence
  ENSG00000088538_7 (sequence is synthesized)
agtagtggactcggaccagattagtgtctcagatctctataagatgcatttatctagccggcagagtgtacagcaaagcacatcccaggtagatacaatgcgcccacgtcatggggaaac

SEQ ID NO: 92128 - DNA, 120 bp, Artificial Sequence
  ENSG00000088538_8 (sequence is synthesized)
atgtcggatgccagtgccacatcacttcttcctcagcctgaagagtttcacttacaatactattggggaagataccgatgtcttcttttccttatatgacatgagggaaggcaagcagat

SEQ ID NO: 92129 - DNA, 120 bp, Artificial Sequence
  ENSG00000088538_9 (sequence is synthesized)
cagtgagcggtttctggtaagactgaacaagaatggtgggccgaggaacccagagaagatagaacgaatgtgtgccctttttacagatctgagcagcaaagatatgaagagagatttgta

SEQ ID NO: 92130 - DNA, 120 bp, Artificial Sequence
  ENSG00000088538_10 (sequence is synthesized)
tatcgttgcccatgtgatccgaataggccggatgctcctgaacgactcaaagaaaggtcctcctcacctgcactacaggcgaccatatggctgtgcggtcctaagcatcttggatgtcct

SEQ ID NO: 92131 - DNA, 120 bp, Artificial Sequence
  ENSG00000088538_11 (sequence is synthesized)
acagtcactcacagaagtaaaggaagaaaaggattttgttcttaaggtttacacgtgcaacaacgagagtgagtggtcccagatccacgagaacatcatccgaaagtccagtgccaagta

SEQ ID NO: 92132 - DNA, 120 bp, Artificial Sequence
  ENSG00000088538_12 (sequence is synthesized)
ctctgcccccagcgccagccatggtcttatcatttctctgcagcttcttcgtggagacatggaacagattcggagagaaaatcccatgatatttaataggggattggcaattacaagaaa

SEQ ID NO: 92133 - DNA, 120 bp, Artificial Sequence
  ENSG00000088538_13 (sequence is synthesized)
attgggatttcctgatgtcattatgccaggtgatatccgcaatgacctgtacctaaccctggagaagggggatttcgagagaggaggaaagagtgtacaaaagaatattgaagtgaccat

SEQ ID NO: 92134 - DNA, 120 bp, Artificial Sequence
  ENSG00000088538_14 (sequence is synthesized)
gtatgtgctttatgcagatggagaaatcttgaaggattgcatcagcttgggttcaggagagccaaataggagttcctaccactcctttgtcctctaccacagtaatagtcctcgctgggg

SEQ ID NO: 92135 - DNA, 120 bp, Artificial Sequence
  ENSG00000088538_15 (sequence is synthesized)
agaaattatcaaattgcctatccccattgaccggttccggggctcccacctgcgctttgagttcagacattgttccacaaaggacaaaggggaaaagaaactctttggctttgcattctc

SEQ ID NO: 92136 - DNA, 120 bp, Artificial Sequence
  ENSG00000088538_16 (sequence is synthesized)
aaccctgatgcgtgatgatggcaccaccctctcagatgatattcacgagctttatgtgtacaagtgtgatgagaatagcacgtttaataaccatgctctgtacctgggcctgccctgctg

SEQ ID NO: 92137 - DNA, 120 bp, Artificial Sequence
  ENSG00000088538_17 (sequence is synthesized)
caaagaggactacaatggctgccctaatattccttctagcctcatcttccagcgcagcaccaaagagtctttcttcatctccactcagctctcctctaccaaactcacccagaatgtgga

SEQ ID NO: 92138 - DNA, 120 bp, Artificial Sequence
  ENSG00000088538_18 (sequence is synthesized)
cctcctagctctgctgaagtggaaagccttccccgaccggatcatggatgtactagggcggctgcggcatgtcagtggggaggaaattgttaagtttctgcaggacatcttagatacact

SEQ ID NO: 92139 - DNA, 120 bp, Artificial Sequence
  ENSG00000088538_19 (sequence is synthesized)
ctttgtgattttggatgataatacagagaagtacggcctgttggtttttcagtctctggtgttcatcatcaacctgctccgagacatcaagtattttcactttcgacctgtgatggacac

SEQ ID NO: 92140 - DNA, 120 bp, Artificial Sequence
  ENSG00000088538_20 (sequence is synthesized)
gtatatccagaagcactttgctggagctctggcatacaaggagctcatccgctgtttgaagtggtatatggactgctcagcagaactgattcgacaggaccacattcaagaagctatgcg

SEQ ID NO: 92141 - DNA, 120 bp, Artificial Sequence
  ENSG00000088538_21 (sequence is synthesized)
ggccttggagtaccttttcaagttcattgtacagtcacggatcctgtactcacgagccacttgtggaatggaagaggaacaattcagatccagtatccaagaacttttccagtccatccg

SEQ ID NO: 92142 - DNA, 120 bp, Artificial Sequence
  ENSG00000088538_22 (sequence is synthesized)
gtttgtgctcagtctggacagccgaaactcagaaacactcctttttactcaggctgcactcctcaattctttcccaaccatctttgatgagcttctgcaaatgttcaccgtgcaagaggt

SEQ ID NO: 92143 - DNA, 120 bp, Artificial Sequence
  ENSG00000088538_23 (sequence is synthesized)
ggcagagtttgtgagagggacactggggagcatgcccagcactgtgcacattgggcagtcaatggacgtggtcaagctgcagtccattgccaggacagtggatagccgcctgttttcttt

SEQ ID NO: 92144 - DNA, 120 bp, Artificial Sequence
  ENSG00000088538_24 (sequence is synthesized)
ctcagaatcccgccgcatcctgcttcctgtggttctccatcacattcaccttcacctgaggcagcagaaagagctgctaatttgctcagggattcttggcagcatcttctccatcgtcaa

SEQ ID NO: 92145 - DNA, 120 bp, Artificial Sequence
  ENSG00000088538_25 (sequence is synthesized)
gaccagctctctggaggcagatgtcatggaggaagtagagatgatggtggagagcctcctggacgtgctcttgcagactctgctcaccatcatgagcaaatcgcacgctcaggaggcggt

SEQ ID NO: 92146 - DNA, 120 bp, Artificial Sequence
  ENSG00000088538_26 (sequence is synthesized)
aagagggcagcggtgcccgcagtgcacagccgagatcactggcgagtatgtgtcctgccttctctcactgctccgccagatgtgtgacacccatttccagcacctcctggacaacttcca

SEQ ID NO: 92147 - DNA, 120 bp, Artificial Sequence
  ENSG00000088538_27 (sequence is synthesized)
gagcaaagatgaactcaaggaatttctgctgaagattttttgcgtgttccggaacctgatgaagatgagtgtcttccctcgggactggatggtaatgagactgctcacaagcaatattat

SEQ ID NO: 92148 - DNA, 120 bp, Artificial Sequence
  ENSG00000088538_28 (sequence is synthesized)
agtcactactgtccagtacctgtcctctgcactgcacaagaatttcacagagactgactttgactttaaggtgtggaattcttactttagcctggcagttctattcataaatcagccaag

SEQ ID NO: 92149 - DNA, 120 bp, Artificial Sequence
  ENSG00000088538_29 (sequence is synthesized)
ccttcagctagaaattatcacctcagccaaaaggaagaagattctagataagtatggggacatgcgtgtaatgatggcctatgaactgttcagcatgtggcagaatttgggtgaacataa

SEQ ID NO: 92150 - DNA, 120 bp, Artificial Sequence
  ENSG00000088538_30 (sequence is synthesized)
gatccactttattccgggaatgattggtccttttctgggtgtgacactggtcccacagccagaagtacggaatatcatgattcccatctttcatgacatgatggactgggagcagagaaa

SEQ ID NO: 92151 - DNA, 120 bp, Artificial Sequence
  ENSG00000088538_31 (sequence is synthesized)
aaatggcaacttcaaacaggtggaggccgagttgattgacaagctggacagcatggtgtcagaagggaaaggtgacgagagctacagggagctcttcagcctactaacccagctgtttgg

SEQ ID NO: 92152 - DNA, 120 bp, Artificial Sequence
  ENSG00000088538_32 (sequence is synthesized)
gccctaccccagcctgctggagaaggttgaacaagaaacatggcgcgagaccggcatttcctttgtgacctcagtcacccgcctcatggaacgtcttcttgactacagggactgcatgaa

SEQ ID NO: 92153 - DNA, 120 bp, Artificial Sequence
  ENSG00000088538_33 (sequence is synthesized)
aggagaggaaacagagaataagaagataggctgcactgttaacctgatgaatttttacaaatctgagattaacaaggaagaaatgtatatccgctacatccataagctttgtgacatgca

SEQ ID NO: 92154 - DNA, 120 bp, Artificial Sequence
  ENSG00000088538_34 (sequence is synthesized)
cttgcaggccgaaaactacacagaggccgcatttaccctgctcctttactgtgagctgctgcagtgggaggaccggccactacgggaattcctccactacccatcgcagacagagtggca

SEQ ID NO: 92155 - DNA, 120 bp, Artificial Sequence
  ENSG00000088538_35 (sequence is synthesized)
gcggaaggagggactgtgccggaagatcattcactacttcaacaaaggcaagagctgggagtttgggatcccactgtgcagggagctggcgtgtcagtacgagagcctctatgattacca

SEQ ID NO: 92156 - DNA, 120 bp, Artificial Sequence
  ENSG00000088538_36 (sequence is synthesized)
gagcctcagctggattcggaaaatggaggccagctactatgacaacattatggagcagcaacgcctggagcctgagttctttcgggtcggcttctatggcaggaagtttcctttctttct

SEQ ID NO: 92157 - DNA, 120 bp, Artificial Sequence
  ENSG00000088538_37 (sequence is synthesized)
cagtgagtttccgcaggctgtcgccatgcagcaccccaaccatcctgatgacgccatcctacagtgcgatgcccagtacttgcagatctatgcagtgacgcccattccagattatgtgga

SEQ ID NO: 92158 - DNA, 120 bp, Artificial Sequence
  ENSG00000088538_38 (sequence is synthesized)
tgttctgcagatggatagggtaccagatcgagtcaagagcttctatcgcgtcaacaatgtgaggaagttccggtatgacaggccttttcacaaaggccccaaggacaaggagaatgaatt

SEQ ID NO: 92159 - DNA, 120 bp, Artificial Sequence
  ENSG00000088538_39 (sequence is synthesized)
caagagcctgtggattgaacgtaccacactgaccctgacccacagcttgcctggcatctctcggtggtttgaagtggagaggagggaactggtggaggtgagccctctggagaatgccat

SEQ ID NO: 92160 - DNA, 120 bp, Artificial Sequence
  ENSG00000088538_40 (sequence is synthesized)
ccaagtggttgagaataagaaccaggagctacgctccctgatcagccagtatcaacacaagcaggtgcatggcaacattaacctgctaagcatgtgcctgaatggtgtcattgatgcagc

SEQ ID NO: 92161 - DNA, 120 bp, Artificial Sequence
  ENSG00000088538_41 (sequence is synthesized)
tgtcaatggaggcattgcacgctatcaggaggccttctttgataaagattacatcaacaagcacccaggagatgctgagaagatcacccagctcaaggagcttatgcaggagcaggttca

SEQ ID NO: 92162 - DNA, 120 bp, Artificial Sequence
  ENSG00000088538_42 (sequence is synthesized)
tgtccttggagttgggctagcagttcatgagaagtttgtgcacccagaaatgcggcctctgcataagaagctaattgatcagttccagatgatgcgggccagtctctaccatgagtttcc

SEQ ID NO: 92163 - DNA, 120 bp, Artificial Sequence
  ENSG00000088538_43 (sequence is synthesized)
aggtttggataagctaagtcctgcatgttcaggcaccagcaccccacggggaaatgttctggcatcccatagccccatgagtccggagagcatcaagatgacccaccggcacagccccat

SEQ ID NO: 92164 - DNA, 120 bp, Artificial Sequence
  ENSG00000088538_44 (sequence is synthesized)
gaacttgatgggcacaggccgccattcatcatcctctctctcctcacatgcgtctagtgaagcaggaaacatggtgatgctgggtgacggctccatgggtgatgctcctgaggacctgta

SEQ ID NO: 92165 - DNA, 120 bp, Artificial Sequence
  ENSG00000088538_45 (sequence is synthesized)
ccaccacatgcagctcgcgtatcccaaccccaggtaccaaggctcagtcaccaacgtctctgttctgtcctcgtcccaggcaagcccttcttcctccagcctgagttccactcactcagc

SEQ ID NO: 92166 - DNA, 120 bp, Artificial Sequence
  ENSG00000088538_46 (sequence is synthesized)
accatcccagatgattacctctgccccttccagtgcccgaggctctccctctctgccagataagtaccgccatgcccgtgaaatgatgttgttgctgcccacataccgggaccgcccaag

SEQ ID NO: 92167 - DNA, 120 bp, Artificial Sequence
  ENSG00000088538_47 (sequence is synthesized)
cagtgccatgtatccagcagccatcctggagaacggacagccgccgaatttccagcgagccctgttccagcaagtggtcggagcctgcaaaccctgcagtgatcccaatctgtctgtggc

SEQ ID NO: 92168 - DNA, 120 bp, Artificial Sequence
  ENSG00000088538_48 (sequence is synthesized)
tgaaaaaggtcattactccctacactttgacgccttccaccaccctctgggtgatacccccccagccctccctgcccggaccctgcgcaagtctcctctccaccctatcccagcctcccc

SEQ ID NO: 92169 - DNA, 120 bp, Artificial Sequence
  ENSG00000088538_49 (sequence is synthesized)
cacaagcccccagtcaggtctggacggcagcaactctacgctgtccggcagtgccagcagcggcgtgtcctccttgagtgagagtaactttgggcactcctcggaggccccacctcgcac

SEQ ID NO: 92170 - DNA, 120 bp, Artificial Sequence
  ENSG00000088538_50 (sequence is synthesized)
tgacaccatggactccatgccaagtcaggcctggaatgctgacgaagatcttgagccaccctacctccctgtccactacagcctctctgagtctgccgtcctggactccatcaaggccca

SEQ ID NO: 92171 - DNA, 120 bp, Artificial Sequence
  ENSG00000088538_51 (sequence is synthesized)
gccatgccgaagccactcagccccagggtgcgtcatccctcaggaccccatggacccgcctgcgctgccgcccaagccctaccacccccgcctgccggccctggagcacgatgagggggt

SEQ ID NO: 92172 - DNA, 120 bp, Artificial Sequence
  ENSG00000088538_52 (sequence is synthesized)
gctgctgcgtgaagagactgagaggcctcgaggcctgcaccgcaaggctccattgcctcctgggagcgctaaggaggagcaggcccgcatggcctgggagcacggccgaggggagcagtg

SEQ ID NO: 92173 - DNA, 120 bp, Artificial Sequence
  ENSG00000088538_53 (sequence is synthesized)
aggggcaacgaggcggctgggatgccgccctcagtaagcagcttgccaatcactccaggtctgaaaagcaagtcccccagccccaccccagggagccagagaggcttgcactcaggagag

SEQ ID NO: 92174 - DNA, 120 bp, Artificial Sequence
  ENSG00000088538_54 (sequence is synthesized)
aaccacccccaagtctccgttctactgccgtgaactcatgtgttgccatgtacagaggccacagcagcatgaagggttgtggcttccctttttatttttttacatttccatttctatggg

SEQ ID NO: 92175 - DNA, 120 bp, Artificial Sequence
  ENSG00000088538_55 (sequence is synthesized)
ttttcctttctttcctttatgcagtagatgctttcttcctcctgcagttctggaccatgtggagctacatggagaaattgcacagacagaatcactttgccacactgcagggcccaggag

SEQ ID NO: 92176 - DNA, 120 bp, Artificial Sequence
  ENSG00000088538_56 (sequence is synthesized)
tgggagcccaggccctccctccagggtagagatgcaccgaatggaaattgcactaaggacctcttcctttgctgtatggacagaagagttcatggttgcattcagggattgcaaggacca

SEQ ID NO: 92177 - DNA, 120 bp, Artificial Sequence
  ENSG00000088538_57 (sequence is synthesized)
tatagacatgtcacaggtggaaaaagggccacaagccgttttgcacaaatgcctgcccacctgcccctcttccatccaggagtgtgctactgaggggctggctggaccaacctgctggct

SEQ ID NO: 92178 - DNA, 120 bp, Artificial Sequence
  ENSG00000088538_58 (sequence is synthesized)
caggcatgtgactggcctaactgcatgcccagggcactgccagggttcaatgggccagccgtctcctactccaccttggatttttctctccatcacatcatttctgaccatttgctccct

SEQ ID NO: 92179 - DNA, 120 bp, Artificial Sequence
  ENSG00000088538_59 (sequence is synthesized)
tccattcttgaaacacctcatgccccacaggagccccagtggtgactggatctgcaagggttatctcccgccctctggggtttgagtggaggtatggagccagagaggctatcctagcta

SEQ ID NO: 92180 - DNA, 120 bp, Artificial Sequence
  ENSG00000088538_60 (sequence is synthesized)
ccttcctcctagggggagctggtccccttcctatgtggtagagagactggtgtaagagtgtggggtgtggcaggcgccggaaatcctcaaagctttcagaagcatccagaatgcctacca

SEQ ID NO: 92181 - DNA, 120 bp, Artificial Sequence
  ENSG00000088538_61 (sequence is synthesized)
tcagctcctgaatcagggattttcagcactacctctgagccatggggttggctgcccagccaggcttccaggccctgaggacatgtggtcaggttcagcaggctcctgggtaaagagggt

SEQ ID NO: 92182 - DNA, 120 bp, Artificial Sequence
  ENSG00000088538_62 (sequence is synthesized)
gggagggggcttctccttttggaagcagatagccatgcaggtagaattgtcatctcccaagtggccacatacagcaacccactccaggccatggggaccaccactcagggttcggggctg

SEQ ID NO: 92183 - DNA, 120 bp, Artificial Sequence
  ENSG00000088538_63 (sequence is synthesized)
gcaggagggtagtttctccagtctccccagtctgttggtgtctttataggaaactataaagcagagcagtggtgtctttagaggaaactcattcaagtcagggcactgattttcctctca

SEQ ID NO: 92184 - DNA, 120 bp, Artificial Sequence
  ENSG00000088538_64 (sequence is synthesized)
gtttattatttggggggatagggtcaggtgggtatagtagtactttaccagggtgcttttaagttactttaaaaaaagcctacaaaatattttttttcttttatttgctcgagttcacat

SEQ ID NO: 92185 - DNA, 120 bp, Artificial Sequence
  ENSG00000088538_65 (sequence is synthesized)
taatgatggtcacaaggctgccttgttgggcaggcgtattgcccccagttcctcttctgctggcctgtatgacctccacagccaggccctgggcccaagccccttgtcccttctccactg

SEQ ID NO: 92186 - DNA, 120 bp, Artificial Sequence
  ENSG00000088538_66 (sequence is synthesized)
cccctctttccagacagtaaaggccatggtcagtgtgtttttctcttgtaaacaaaccccagcttgtttaacagaaatgctaataacctactgggaaagatggaggtctaaattacctcc

SEQ ID NO: 92187 - DNA, 120 bp, Artificial Sequence
  ENSG00000088538_67 (sequence is synthesized)
agggtttttctgggggtttatcaccagtgtgggtcccttctgataccaccaggttcactccaggcagagtggggcggaaggctgctgaggatatgggtcagttacagcagccctcacctc

SEQ ID NO: 92188 - DNA, 120 bp, Artificial Sequence
  ENSG00000088538_68 (sequence is synthesized)
aaagggctggcctgcttctcagcctacattcatttgcaagcttcaatctctggaccatctggtgttcacaggtgttagagggttaggggttaggggctagttttggatttgattcatagg

SEQ ID NO: 92189 - DNA, 120 bp, Artificial Sequence
  ENSG00000088538_69 (sequence is synthesized)
taggagggcttagattttaaggcacttctgaaagtcaatccctggacaaggcagtcatcacataagaacagctaccttctccacttggtggcacaagaggtagggaggggagtatgggtt

SEQ ID NO: 92190 - DNA, 120 bp, Artificial Sequence
  ENSG00000088538_70 (sequence is synthesized)
catttggcttcgcattatgcaaggtgaaaccgtttgttttccctctccattttccctaactaaatgaaaaggacacattctgaaatcccttttgttggagaataagtcagtctgagggga

SEQ ID NO: 92191 - DNA, 120 bp, Artificial Sequence
  ENSG00000088538_71 (sequence is synthesized)
aatgggaggccagagatgagaaccctttgaaaagattgtaaaatactgattttcattctttcaagcttatttgtaaatacctatttgaatgctgtgtatttgtacaggaatttgagcaaa

SEQ ID NO: 92192 - DNA, 120 bp, Artificial Sequence
  ENSG00000088538_72 (sequence is synthesized)
aaatgtatagagtgtgatgtccaattggtattcagcactataaatgtgtttttaacctcccgcattctgtgcttatttaaaacaaggaaacttctaaccatttcttttgtgtattcatgt

SEQ ID NO: 92193 - DNA, 120 bp, Artificial Sequence
  ENSG00000088538_73 (sequence is synthesized)
ttaaagaaaaaaagtgatttaaaaatgatcttacctgtaccagaaaagcaaagttaaaggaaacaaaatttgtaccattgtcccaagaggtattttactgtatatattgtggtagcatgt

SEQ ID NO: 92194 - DNA, 120 bp, Artificial Sequence
  ENSG00000088538_74 (sequence is synthesized)
tcaaaatccaacaagtaatgtgaattttagatgtaaatatctgccacttgattttttttccccctttccccacttccttgactgctgtgatgtgaattaaagataaatacgtgatactga

SEQ ID NO: 92195 - DNA, 120 bp, Artificial Sequence
  ENSG00000088543_0 (sequence is synthesized)
gctgtagcttcggggatcccccgaggctgctcggcccggccccacctccgccgtgggtcccggccctacccaccctagctcaggccggcagagccagcgctcgcggatgcggctggtgcg

SEQ ID NO: 92196 - DNA, 120 bp, Artificial Sequence
  ENSG00000088543_1 (sequence is synthesized)
cagtagcgggcctggccagcggctcggggcttgcagggagggcggatctcgggtcggacccgcagccccagacgccgggcttgggggttccccccgccccggcctcctgccagtcactac

SEQ ID NO: 92197 - DNA, 120 bp, Artificial Sequence
  ENSG00000088543_2 (sequence is synthesized)
cacccctagcctctccaactgagctcggcgccgggagaggattaagtttgatcactatgatcatctcacccacagacagaggatgcagggcttcatttttgttcccaaaaacaggggcac

SEQ ID NO: 92198 - DNA, 120 bp, Artificial Sequence
  ENSG00000088543_3 (sequence is synthesized)
cgtagatacgtaaacacccaggaaggcagggggctccctttatccaaggaggtggctgtgcaggtggccaccacaggtggcaggaaccacaggctggggcactccggagtcaggagtgag

SEQ ID NO: 92199 - DNA, 120 bp, Artificial Sequence
  ENSG00000088543_4 (sequence is synthesized)
tgggcaggttgactggcatcaggcagcctctcagccagggccctctccgcatcagcatgaactccaggaccgcatctgctaggggctggttcagcagccgcccacccacctctgagtctg

SEQ ID NO: 92200 - DNA, 120 bp, Artificial Sequence
  ENSG00000088543_5 (sequence is synthesized)
acctggaacctgccacagatgggccagcctccgagaccactaccctcagcccagaggccaccacctttaatgacaccagaatccctgatgcagctggtggcacggccggcgtgggtacca

SEQ ID NO: 92201 - DNA, 120 bp, Artificial Sequence
  ENSG00000088543_6 (sequence is synthesized)
tgcttctgtcctttgggatcatcacggtgataggcctggctgtggccttggttttgtacatcaggaagaagaagaggctggagaagctacgccaccagctcatgcccatgtacaacttcg

SEQ ID NO: 92202 - DNA, 120 bp, Artificial Sequence
  ENSG00000088543_7 (sequence is synthesized)
accccacggaggaacaagatgagttggagcaggagctgctggagcatgggcgggacgccgcctctgtacaggctgctacttctgtgcaggccatgcagggcaagactactctgccctccc

SEQ ID NO: 92203 - DNA, 120 bp, Artificial Sequence
  ENSG00000088543_8 (sequence is synthesized)
agggcccactgcagagacccagccggctggtgtttaccgatgtggccaatgccatccatgcgtgagtggcctgggacaagcctggacttctgatagagacccatcacggtgcctacagag

SEQ ID NO: 92204 - DNA, 120 bp, Artificial Sequence
  ENSG00000088543_9 (sequence is synthesized)
ctccccactccctgattgtcaagacctactctgaagatcttccctgccaagacacaagagggctgagccaggtcctagctgttctccagacccacctgctgactttagactctaagagag

SEQ ID NO: 92205 - DNA, 120 bp, Artificial Sequence
  ENSG00000088543_10 (sequence is synthesized)
ggccctagccaggctggacttctgaccactgacttctcctgacctgagggccctggcacagagggcatccctcatgctgagaaggtcaagagcctctgctggcttcctcatcccctgtcc

SEQ ID NO: 92206 - DNA, 120 bp, Artificial Sequence
  ENSG00000088543_11 (sequence is synthesized)
gtctgccccgctaatgtggaggaaatgagggagatacggagtgggagggattgggggaggaaaggggaggtttccctctgttagggagagacctgttttttggaatctggagcctcctct

SEQ ID NO: 92207 - DNA, 120 bp, Artificial Sequence
  ENSG00000088543_12 (sequence is synthesized)
ggggtggggagaggaaaccacccaagttatagggacagggtagggcagcatctgttatgggccctgagaagcccagagatggagctgaaactgtccagtatgcaaggatgccaggagaag

SEQ ID NO: 92208 - DNA, 120 bp, Artificial Sequence
  ENSG00000088543_13 (sequence is synthesized)
ggcaattcacacccagggtccatccatactacggagggtccaggaggtctcccagccacccatccttggcaaccagatgttactggggccaagctaggatgggagctgagggggaaggaa

SEQ ID NO: 92209 - DNA, 120 bp, Artificial Sequence
  ENSG00000088543_14 (sequence is synthesized)
gtaggggaatggaagtggaaggatgcagcccccccagacctgccgagaggcctcatgcatgtgcatgagtgtgcccatgggcagacatgtgcctgtcccagcacagcgggcagaatgaga

SEQ ID NO: 92210 - DNA, 120 bp, Artificial Sequence
  ENSG00000088543_15 (sequence is synthesized)
ttgtccacactggccccaccctccaagtcgacctctaccccatggtatgtagtggagcatcagggtaggctatcttctctgccttcaatcttcagggactgcagggaagagggaagcacg

SEQ ID NO: 92211 - DNA, 120 bp, Artificial Sequence
  ENSG00000088543_16 (sequence is synthesized)
cacagcacggttcctctctccactgcattgtttcactgggctcacctgcttctgaaaacggctccctgtcttgggctctaatgaggatctggggttgggagaggctgttggtctgagggc

SEQ ID NO: 92212 - DNA, 120 bp, Artificial Sequence
  ENSG00000088543_17 (sequence is synthesized)
agtaatcacaggctgcaggctagagggggcagttatgactgcctgaaagtgggtgagggattgcacttcagaaaaacatctaaaaaacttagtctatgtttgaattccccacctccatcc

SEQ ID NO: 92213 - DNA, 120 bp, Artificial Sequence
  ENSG00000088543_18 (sequence is synthesized)
catctatgggaagagccgttcagtgtttagagagtggggagatgggtccctgcacttggcctctccataagccttggagggtcagggctgataccaggggtcctggcaagccattgggca

SEQ ID NO: 92214 - DNA, 120 bp, Artificial Sequence
  ENSG00000088543_19 (sequence is synthesized)
gagacagaccacaagagcagggcatttttttacgctgggcatacatatgcacacaagcatgcacagaggcatgtcccgtgcccagcctctccaccgtcactgtccgctgctggctggagg

SEQ ID NO: 92215 - DNA, 120 bp, Artificial Sequence
  ENSG00000088543_20 (sequence is synthesized)
ggatgcaggggtagtgtatgcagaccttccactgggcaaatgccatgtgtcaggagggaaaggcctaggaagcccccatggggaaggttctggatttattccctcctctaaatgctataa

SEQ ID NO: 92216 - DNA, 120 bp, Artificial Sequence
  ENSG00000088543_21 (sequence is synthesized)
atacgttagcacttgagtcgactggaggctgccaggaattcaggatgcatacagctgtaatttaacccagagcagctccacgtgagagcattaaagatgtaatgaagatgtttacatgga

SEQ ID NO: 92217 - DNA, 69 bp, Artificial Sequence
  ENSG00000088543_22 (sequence is synthesized)
accatgcttctgtcctttgggatcatcacggtgataggcctggctgtggccttgagacggggtgtcagt

SEQ ID NO: 92218 - DNA, 120 bp, Artificial Sequence
  ENSG00000088543_23 (sequence is synthesized)
aaaaaaagaggcatgaaggtgaagggggagtggtgtatgtgtcattaggacggggacccacgggtctcttgttcatcagcctcagcatgtccccatccagaagggctgctgggttcctca

SEQ ID NO: 92219 - DNA, 120 bp, Artificial Sequence
  ENSG00000088543_24 (sequence is synthesized)
ttgggatcatcacggtgataggcctggctgtggccttggtgagagctggggtaggctgggggaggataatcagtgtttagatttatagagaacctaatcaatcagaagacaatctggttg

SEQ ID NO: 92220 - DNA, 120 bp, Artificial Sequence
  ENSG00000088543_25 (sequence is synthesized)
gagagtggcccctggacccagctgggtggagatggagaggtcacaagctctggtgccccaaaatggctctggtcctcagatatagttggttgccaccctgggagtgagaggaaccaggaa

SEQ ID NO: 92221 - DNA, 120 bp, Artificial Sequence
  ENSG00000088682_0 (sequence is synthesized)
gccgtgggcgacgtgcccgcttccaaaatggcggcggcggcggtatctggtgcgcttggccgggcgggctggaggctcctgcagctgcgatgcctgcccgtggcccgttgccgacaagcc

SEQ ID NO: 92222 - DNA, 120 bp, Artificial Sequence
  ENSG00000088682_1 (sequence is synthesized)
ctggtgccgcgtgccttccatgcttcagctgtggggctaaggtcttcagatgagcagaagcagcagcctcccaactcattttctcagcagcattctgagacacagggggcagaaaaacct

SEQ ID NO: 92223 - DNA, 120 bp, Artificial Sequence
  ENSG00000088682_2 (sequence is synthesized)
gatccagagtcttctcattcaccccccaggtatacagaccagggcggcgaggaggaggaggactatgaaagtgaggagcagttgcagcaccgcatcctgacggcagcccttgagtttgtg

SEQ ID NO: 92224 - DNA, 120 bp, Artificial Sequence
  ENSG00000088682_3 (sequence is synthesized)
cccgcccacgggtggacagcagaggcgattgcagaaggagcccagtctctgggtctctccagtgcagcagccagcatgttcgggaaggatggcagtgagctaatactgcattttgtgacc

SEQ ID NO: 92225 - DNA, 120 bp, Artificial Sequence
  ENSG00000088682_4 (sequence is synthesized)
cagtgcaatacccggctcacacgtgtgctagaagaggagcagaagctggtacagttgggccaggcggagaagaggaagacagaccagttcctgagggatgcagtggaaaccagactgaga

SEQ ID NO: 92226 - DNA, 120 bp, Artificial Sequence
  ENSG00000088682_5 (sequence is synthesized)
atgctgatcccatacattgagcactggccccgggccctcagcatcctcatgctccctcacaacatcccgtccagcctgagcctgctcaccagcatggtggatgacatgtggcattacgct

SEQ ID NO: 92227 - DNA, 120 bp, Artificial Sequence
  ENSG00000088682_6 (sequence is synthesized)
agctggtgatgatgcaggactcctctccagactttgaggacacttggcgcttcctggaaaaccgggttaatgatgcaatgaacatgggccacactgccaagcaggtaaagtccacaggag

SEQ ID NO: 92228 - DNA, 120 bp, Artificial Sequence
  ENSG00000088682_7 (sequence is synthesized)
aggcactggtgcaaggactcatgggtgcagcagtgacgctcaagaacttgacaggtctaaaccagcgtcggtgagaggaaggggtataagctacaatgcctagaagagaatgagcggaca

SEQ ID NO: 92229 - DNA, 120 bp, Artificial Sequence
  ENSG00000088682_8 (sequence is synthesized)
gattgaaagagctttgaaaagtataaggtgccatccacataacctggtgttcacgagaacacactaaaggactcctgagtcactaccacagccacctggaaaccacaaggcatttgatgc

SEQ ID NO: 92230 - DNA, 120 bp, Artificial Sequence
  ENSG00000088682_9 (sequence is synthesized)
taccgttctggtcagggattgggctgcttcttcagttcctaataccagaccaagcctcctgatgcctttctgcactgcaactgtgtgattgaaaaatgagatgttcatccaagcagtcaa

SEQ ID NO: 92231 - DNA, 120 bp, Artificial Sequence
  ENSG00000088682_10 (sequence is synthesized)
gccacagaaacccagcatgtccctgtcacaatctcatgggcaccttgatcatgtcttaaccttcccttaaccttggggctcccaagccagagtcaaggtctgacgccacctcaaggtgac

SEQ ID NO: 92232 - DNA, 120 bp, Artificial Sequence
  ENSG00000088682_11 (sequence is synthesized)
agctcatctccagcacagcacaggcgtgtgcacacagaggtgttccttgcagccccctccctctcaggtgtcctgagatgctgttcctgggagccccctcagaaaactgcctcacctgag

SEQ ID NO: 92233 - DNA, 120 bp, Artificial Sequence
  ENSG00000088682_12 (sequence is synthesized)
acaagtgcctgctggacagaggtgtgattccaggcctggtgtcacatgacaccagcatgcattgcaggattattagtgtattttgagtctgtaaaaataataaatatgtttgaagtagtt

SEQ ID NO: 92234 - DNA, 120 bp, Artificial Sequence
  ENSG00000088682_13 (sequence is synthesized)
gttacccaggtaacaagtggtagaaacaggtcaagatgctaggtagatcatttttcctggcttaccacttttgctaccacttcgtgtcccaaagttcccagtttacccaatatttttgtg

SEQ ID NO: 92235 - DNA, 120 bp, Artificial Sequence
  ENSG00000088682_14 (sequence is synthesized)
cccgcccacgggtggacagcagaggtgtgattccaggcctggtgtcacatgacaccagcatgcattgcaggattattagtgtattttgagtctgtaaaaataataaatatgtttgaagta

SEQ ID NO: 92236 - DNA, 120 bp, Artificial Sequence
  ENSG00000088682_15 (sequence is synthesized)
tcaagctgctgtcactaggaagaggctctagtgatgaacaggcaacaaatgtaccctacacttgggcaccgcttttctgttttctgtctccccttttgtagtctctgggtctctccagtg

SEQ ID NO: 92237 - DNA, 120 bp, Artificial Sequence
  ENSG00000088682_16 (sequence is synthesized)
tccaggccccagagcaacaataatcctaatatttatcattctcagcacctttcactcagatgactttgtacactgttcagaacttagcttctcaatctctataaacccgacaatacttag

SEQ ID NO: 92238 - DNA, 120 bp, Artificial Sequence
  ENSG00000088682_17 (sequence is synthesized)
tacacttggtaaagctgggtttcaaacttggacataccaaagagagtgactgagccatctgtgtctcagttcttggaaatgtgagtggtccgggtactggatcccatcctgggtggggtt

SEQ ID NO: 92239 - DNA, 120 bp, Artificial Sequence
  ENSG00000088682_18 (sequence is synthesized)
ctcctagtggtctgagtgtgccaccaggtctgcagggaggaggaatccatgcaggaggttagaagagtcagaagattttattggctgtcttcacttgaataacagccctgtggcatttta

SEQ ID NO: 92240 - DNA, 120 bp, Artificial Sequence
  ENSG00000088682_19 (sequence is synthesized)
gtgggcgacgtgcccgcttccaaaatggcggcggcggcggtatctggtgcgcttggccgggcgggctggaggctcctgcagctgcgatgcctgcccgtttctgtttcagtggcccgttgc

SEQ ID NO: 92241 - DNA, 120 bp, Artificial Sequence
  ENSG00000088682_20 (sequence is synthesized)
tacagttgggccaggcggagtaagtcccatggcattactactcagggtggcagctaaggatcagggaacttgggccctaccagctatgcccaggaggccaatccaagcagaacccaaaga

SEQ ID NO: 92242 - DNA, 120 bp, Artificial Sequence
  ENSG00000088682_21 (sequence is synthesized)
gactgaaacctggcagcctgtctctgacggctttagtcaggccagcgtcaggagctggtgggaccctcctccctagggctgagtaaaccgtggagcactgagcccctgcctttcactcag

SEQ ID NO: 92243 - DNA, 120 bp, Artificial Sequence
  ENSG00000088682_22 (sequence is synthesized)
ctggtctcagagaaccagagcttggcaggccccctcatacacctcttggagaggtagatgctggtcaactatgcaccattacctgtgagcagagcttactcctctgccattctctctcca

SEQ ID NO: 92244 - DNA, 120 bp, Artificial Sequence
  ENSG00000088682_23 (sequence is synthesized)
gccacctaaccaagatgagccaggatggagtcacaccaggcagagcggggggcctcatgccttcttccagtctagctcagagcccctcacagctgcaagattgactggtttttttccccc

SEQ ID NO: 92245 - DNA, 120 bp, Artificial Sequence
  ENSG00000088682_24 (sequence is synthesized)
aatagggtggaactggctttattttgtagttataaagaacataccatggagttggttcttgggagttgtgttctaaaggcaatctattaggcaagaattgtctgtgatcaaaactcccat

SEQ ID NO: 92246 - DNA, 120 bp, Artificial Sequence
  ENSG00000088682_25 (sequence is synthesized)
gtttcattgactctaagatgccattggttgtaagaagcatcatttttaaatgcatcagtaaaaaagaaaacatactgcccttcgaactatgacaaagcacttctgtgattcacactgatt

SEQ ID NO: 92247 - DNA, 120 bp, Artificial Sequence
  ENSG00000088682_26 (sequence is synthesized)
ttagaattaatgacatatggtgtttgaaaacccccaagaaggcaccactttggagaccaacacatcttattttcccagaaactctaatagcattttctgcattagtacagactgctgctt

SEQ ID NO: 92248 - DNA, 120 bp, Artificial Sequence
  ENSG00000088682_27 (sequence is synthesized)
tagattaggcagcaggctcatgttcaggccatgttgtagagaatcctccagcatagcaagataccatcctccaagagactgaggggatgacagagttgcatcttccatcccaggcttgct

SEQ ID NO: 92249 - DNA, 120 bp, Artificial Sequence
  ENSG00000088682_28 (sequence is synthesized)
gcagggcatctacccatggacaatgggcaaggttgctgctttactgaaatttaactgttatttccttgtcttctctcactcccaagtgcacatttggtaacagaagtctcattagtgaaa

SEQ ID NO: 92250 - DNA, 120 bp, Artificial Sequence
  ENSG00000088682_29 (sequence is synthesized)
tgtgggtgctctgactccactgtaggctcattgtgaaaactgaacaatacaaacaaatataaaaaagaatgtagaaaacacctataatcacaccaaagatcatactatcaacatttatgc

SEQ ID NO: 92251 - DNA, 120 bp, Artificial Sequence
  ENSG00000088682_30 (sequence is synthesized)
ctagatctttccaattaaaaccctttatatgattcattctttaaatgtttattgagcaaataatgtgccctaggcactgtgctagtccaagagacatgacaggggtcaaagtggtcaaga

SEQ ID NO: 92252 - DNA, 120 bp, Artificial Sequence
  ENSG00000088682_31 (sequence is synthesized)
tggatctgcttcctgcccttgttgagcttccagtctagcaacattaataaaatatatacaaatgtttacttagaagatgtggtaagtgctatcaaggaaaggtgctgttgggctgtataa

SEQ ID NO: 92253 - DNA, 120 bp, Artificial Sequence
  ENSG00000088682_32 (sequence is synthesized)
tggagggacccgatcattagatcaggtcacagctgcgagattgactggtttttttccctcaatagggtggaaatggctttattttgtagatataaaagtaatgaaccatggaattggttc

SEQ ID NO: 92254 - DNA, 120 bp, Artificial Sequence
  ENSG00000088682_33 (sequence is synthesized)
ttgagagttgtgttctaaaggcaacctattggcaagaattgtctgtgatcaaaactaccatatttcattgactctaagatgccattggttgtaagaagcaccatttttaagtacatcagt

SEQ ID NO: 92255 - DNA, 120 bp, Artificial Sequence
  ENSG00000088682_34 (sequence is synthesized)
gcctggctagcttcggccctgctccgctgtctgtgaggggcagatgcagcggggcagggcctgtcacccccatttcatggagttggcagagcctcagagagggctcgggtggcccgttgc

SEQ ID NO: 92256 - DNA, 120 bp, Artificial Sequence
  ENSG00000088726_0 (sequence is synthesized)
tttttaacttgtttaactaagggtggctcctgttgagaggtgacagcgtgttggcagccctcgcagccctcgcttgctcttggtgcctcctcagcctcggcgcccactctggccgcactt

SEQ ID NO: 92257 - DNA, 120 bp, Artificial Sequence
  ENSG00000088726_1 (sequence is synthesized)
cttcagcccgctgctgcactgtgggagtcccttcctgggatggccgaggccggagccggctccctcagccttccgggaggaaaagccatggagacttcagcatcctcctcccagcctcag

SEQ ID NO: 92258 - DNA, 120 bp, Artificial Sequence
  ENSG00000088726_2 (sequence is synthesized)
agcctcaggacaacagtcaagtccacagagaaacagaagatgtagactatggagagacagatttccacaagcaagatgggaaggctggactcttttcccaagaacaatatgagagaaaca

SEQ ID NO: 92259 - DNA, 120 bp, Artificial Sequence
  ENSG00000088726_3 (sequence is synthesized)
agtcttcttcctcctcctcctcttcctcctcatcctcctcatcttcttcatcctcctcctcctcagagagcaatgatgaggaccagcaacccagagcaaccggaaaacatcgacggagcc

SEQ ID NO: 92260 - DNA, 120 bp, Artificial Sequence
  ENSG00000088726_4 (sequence is synthesized)
acggctcacccggtcctgggcatggggagcctgacgttttgaaggatgagcttcaactctatggagatgctcctggagaggtggtaccctctggggaatcaggactccgaaggagaggct

SEQ ID NO: 92261 - DNA, 120 bp, Artificial Sequence
  ENSG00000088726_5 (sequence is synthesized)
ctgacccagcaagtggagaagtggaggcctctcagttaagaagactgaatataaagaaagatgatgagtttttccatttcgtcctcctgtgctttgccatcggggccttgctggtgtgtt

SEQ ID NO: 92262 - DNA, 120 bp, Artificial Sequence
  ENSG00000088726_6 (sequence is synthesized)
atcactattacgcagactggttcatgtctcttggggtcggcctgctcaccttcgcctccctggaaaccgttggcatctacttcggactagtgtaccgtatccacagcgtcctccaaggct

SEQ ID NO: 92263 - DNA, 120 bp, Artificial Sequence
  ENSG00000088726_7 (sequence is synthesized)
tcatccccctcttccagaagtttaggctgacagggttcaggaagactgactgaggccacttccaggtgggcagcagaggcaggccccagtgtgaccaccactgcgacccctgagcccaca

SEQ ID NO: 92264 - DNA, 120 bp, Artificial Sequence
  ENSG00000088726_8 (sequence is synthesized)
gtcactgctctcagaggacagcaagggaccctgagctctgcaagctgtgatctgtctgggttcatggtttttctcaaatcccaggctatctgcatgcgctctcaggtgctaccgagccat

SEQ ID NO: 92265 - DNA, 120 bp, Artificial Sequence
  ENSG00000088726_9 (sequence is synthesized)
cctgggagagatggatggtccactgctttgaggcagggagccatcgggctggggccccttggtgaacctgatgcaggtaagatgctgaggactaaaaccattttttttgcacccaaaaaa

SEQ ID NO: 92266 - DNA, 120 bp, Artificial Sequence
  ENSG00000088726_10 (sequence is synthesized)
aaaggcaggaaaatgatcatcagaaactaaatggcagccaggcatgggggctcacaactgtaatcctcgcactttgggaggctcaggctaagggtcgcttgaagctgagagttcaagacc

SEQ ID NO: 92267 - DNA, 88 bp, Artificial Sequence
  ENSG00000088726_11 (sequence is synthesized)
caacatagtgagacccccatctctacaatttttttttaatgaccaaatgtggcggtacatacctgtacatacctgcggctgcttgagc

SEQ ID NO: 92268 - DNA, 77 bp, Artificial Sequence
  ENSG00000088726_12 (sequence is synthesized)
ggaggactgcttgagcccaggagttcagggctgcagtgaggtagtttctctaaaattaaaaaaaaaaaaaaaagaca

SEQ ID NO: 92269 - DNA, 120 bp, Artificial Sequence
  ENSG00000088726_13 (sequence is synthesized)
ttgcatgtatttgtagtgtacaacatgttttgaaatatgtggaatggctaaatcaagctaattaacatatgtatccctcacataccctttttttatgatgagaacagtaaaaacctactg

SEQ ID NO: 92270 - DNA, 120 bp, Artificial Sequence
  ENSG00000088726_14 (sequence is synthesized)
tcagcaatttgcaaagtatacaatacattgttattaactatggtcaccatgctatgtgattgatatcctgaacttgaactgagttcttgatggtcacagacatgctgttctcaaaactca

SEQ ID NO: 92271 - DNA, 120 bp, Artificial Sequence
  ENSG00000088726_15 (sequence is synthesized)
gaagggtaacttctgaggttttgatttcaagtacttgtatgtaacctaatttaacgggagcccagagtgcacagatcagatatttattaaacatataaataaaacacagttttcacgata

SEQ ID NO: 92272 - DNA, 120 bp, Artificial Sequence
  ENSG00000088726_16 (sequence is synthesized)
atgtggtctgaatgttggcaccagcccgggcaggggcatctcatttgggcagtactgctgtgcaacccagctgcaaggatggaaggcagagggtgggtgtggggcctgaggcttcacagt

SEQ ID NO: 92273 - DNA, 120 bp, Artificial Sequence
  ENSG00000088726_17 (sequence is synthesized)
ctgtcctctccttcccctgaccagcccagcatccacatagtctacacagagctccccttgctgcccagacaagctgaaggaccacaggaaaagccatggagacttcagcatcctcctccc

SEQ ID NO: 92274 - DNA, 120 bp, Artificial Sequence
  ENSG00000088726_18 (sequence is synthesized)
ctccatccaggtcctgggcatggggagcctgacgttttgaaggatgagcttcaactctatggagatgagtttttccatttcgtcctcctgtgctttgccatcggggccttgctggtgtgt

SEQ ID NO: 92275 - DNA, 120 bp, Artificial Sequence
  ENSG00000088726_19 (sequence is synthesized)
gatgattggaagatcatacaagtgcctgtctgcccttgaggggaagaagatgacaggctaggagcaaggtcaccagggaactagaacaggcaccaagaaccacatggtgaatgatgctcc

SEQ ID NO: 92276 - DNA, 79 bp, Artificial Sequence
  ENSG00000088726_20 (sequence is synthesized)
caagcaatggcattttgattcatggagtacaagagttaccaaacttttttttttgtttgagatggagtatcgctctgtc

SEQ ID NO: 92277 - DNA, 70 bp, Artificial Sequence
  ENSG00000088726_21 (sequence is synthesized)
tgcggcccaaactttttcataattgggaagtttacctgaaaacctggcttctctggggaaattgacagac

SEQ ID NO: 92278 - DNA, 120 bp, Artificial Sequence
  ENSG00000088726_22 (sequence is synthesized)
ggtggtggctgcccctttagttggaacaggaaccctccagccggctccattccccacctggccgactccagattaagtgggaagtctccgagcaggatccaccttccctgaagcatgact

SEQ ID NO: 92279 - DNA, 120 bp, Artificial Sequence
  ENSG00000088726_23 (sequence is synthesized)
tctccccccccagaggatcatgggtatatgatcactgatttcctttctgtgcagatgctcctggagaggtggtaccctctggggaatcaggactccgaaggagaggctctgacccagcaa

SEQ ID NO: 92280 - DNA, 120 bp, Artificial Sequence
  ENSG00000088726_24 (sequence is synthesized)
gtggagaagtggaggcctctcagttaagaagactgaatataaagaaagatggtaaggaacttggtgtagcagagctgctttttcctgtctggctagatttctaggggtgaaatgcagctg

SEQ ID NO: 92281 - DNA, 120 bp, Artificial Sequence
  ENSG00000088726_25 (sequence is synthesized)
gtggcctagcacagcagtaatcatagcccacctctgtcgtgtgccctgcagtttacacattactcagctcagaatcacctcaacagggtgggacaatggttcccattttgcagatatgaa

SEQ ID NO: 92282 - DNA, 120 bp, Artificial Sequence
  ENSG00000088726_26 (sequence is synthesized)
ctctgacccaggaagatatacccaggatattaattctcaatgaggcagggaaaagaaaatcccacctcccgtcctgcatcaaagttaaatattcatctctctcttgttcttaaggagaag

SEQ ID NO: 92283 - DNA, 120 bp, Artificial Sequence
  ENSG00000088727_0 (sequence is synthesized)
gtggtgcccatcagcatgtggagccggccaccgcccctgcctccatagaagcccgctgccgcccagtccgcggtaccttgagggtcacgtcgcacagcttgccctgccgccggatctcct

SEQ ID NO: 92284 - DNA, 120 bp, Artificial Sequence
  ENSG00000088727_1 (sequence is synthesized)
ccatgacgccgtagccgcgactaggcaactcagacacggagaagtgcaccagatcctccagctcctccgcgccgtcctccaccatcttccccggccgctgcaactgcgcaggcctcgccg

SEQ ID NO: 92285 - DNA, 120 bp, Artificial Sequence
  ENSG00000088727_2 (sequence is synthesized)
gccggctagacactaaccagggcggggcgatagcgcacgccgacagccgctcggagcgcggagcagcaatcggacgggcctccgcggccgccgtagttgaatctcctcggcgccggaagc

SEQ ID NO: 92286 - DNA, 120 bp, Artificial Sequence
  ENSG00000088727_3 (sequence is synthesized)
cccgccactccgcttcctggttcatgtgcggccttcgttccctcgctatctcgaccttgacttcgcatgtgcatccgccgaagtctttctagatcaatcggccccatctctcgtcttccc

SEQ ID NO: 92287 - DNA, 120 bp, Artificial Sequence
  ENSG00000088727_4 (sequence is synthesized)
gattcggccatgacctcacccgtatcctcgacgtaggacctcggacttcatttccgccaccccgacacttccggaatccccggaagcgacccgttgccatggcgactatgtacacagcca

SEQ ID NO: 92288 - DNA, 120 bp, Artificial Sequence
  ENSG00000088727_5 (sequence is synthesized)
ggcagccccgcgtggggagtgcaggtggtttcggttgcggcagtcgcgtcccgggagcgtcgctgcctggtgaacgctagaatgggtactaggaaaaaagttcatgcatttgtccgtgtc

SEQ ID NO: 92289 - DNA, 120 bp, Artificial Sequence
  ENSG00000088727_6 (sequence is synthesized)
aaacccaccgatgactttgctcatgaaatgatcagatacggagatgacaaaagaagcattgatattcacttaaaaaaagacattcggagaggagttgtcaataaccaacagacagactgg

SEQ ID NO: 92290 - DNA, 120 bp, Artificial Sequence
  ENSG00000088727_7 (sequence is synthesized)
tcgtttaagttggatggagttcttcacgatgcctcccaggacttggtttatgagacagttgcaaaggatgtggtttctcaggccctcgatggctataatggcaccatcatgtgttatggg

SEQ ID NO: 92291 - DNA, 120 bp, Artificial Sequence
  ENSG00000088727_8 (sequence is synthesized)
cagacgggagctggcaagacatacaccatgatgggggcaactgagaattacaagcaccgggggatcctccctcgtgccctgcagcaggtttttaggatgatcgaagaacgccccacacat

SEQ ID NO: 92292 - DNA, 120 bp, Artificial Sequence
  ENSG00000088727_9 (sequence is synthesized)
gccatcactgtgcgtgtttcctacttggaaatctataatgagagcctgtttgatctcctgtccactctgccctatgttggaccctcagtcacaccaatgaccatcgtggaaaaccctcaa

SEQ ID NO: 92293 - DNA, 120 bp, Artificial Sequence
  ENSG00000088727_10 (sequence is synthesized)
ggagtcttcattaagggcttgtcagttcacctcacaagtcaggaggaggatgcattcagcctcctttttgagggtgagaccaacaggattatagcctcccacactatgaacaaaaactct

SEQ ID NO: 92294 - DNA, 120 bp, Artificial Sequence
  ENSG00000088727_11 (sequence is synthesized)
tccagatcacactgcattttcaccatctacttagaggcccattcccggaccttatcagaggaaaagtacatcacttccaaaattaacttggtggatctggcaggctcagagaggctgggg

SEQ ID NO: 92295 - DNA, 120 bp, Artificial Sequence
  ENSG00000088727_12 (sequence is synthesized)
aagtctgggtctgagggccaagtcctgaaggaagccacctacatcaacaaatcgctctcattcctggagcaggccatcattgcccttggggaccagaagcgggaccacatcccctttcgg

SEQ ID NO: 92296 - DNA, 120 bp, Artificial Sequence
  ENSG00000088727_13 (sequence is synthesized)
ctatggagaagctgcccagttagaagaaacgctatcttcactgagatttgccagcaggatgaagctagtcaccactgagcctgccatcaatgaaaagtatgatgctgagagaatggtcaa

SEQ ID NO: 92297 - DNA, 120 bp, Artificial Sequence
  ENSG00000088727_14 (sequence is synthesized)
gaacctggagaaggaactagcactactcaagcaggagctggctatccatgacagcctgaccaaccgcacctttgtgacctatgaccccatggatgaaatccagattgctgagatcaactc

SEQ ID NO: 92298 - DNA, 120 bp, Artificial Sequence
  ENSG00000088727_15 (sequence is synthesized)
ccaggtgcggaggtacctggaggggacactggacgagatcgacataatcagccttagacagatcaaggaggtgttcaaccagttccgggtggttctgagccaacaggaacaggaagtgga

SEQ ID NO: 92299 - DNA, 120 bp, Artificial Sequence
  ENSG00000088727_16 (sequence is synthesized)
gtccactttgcgcaggaagtacaccctcattgacaggaatgactttgcagccatttctgctatccagaaggcggggcttgtggatgttgatggccacctagtgggtgagcctgaaggaca

SEQ ID NO: 92300 - DNA, 120 bp, Artificial Sequence
  ENSG00000088727_17 (sequence is synthesized)
aaactttggactcggagtcgcccctttctctaccaaacctgggaagaaagccaagtccaagaagacattcaaagagccactcagctccttggcaagaaaggaaggtgccagcagccctgt

SEQ ID NO: 92301 - DNA, 120 bp, Artificial Sequence
  ENSG00000088727_18 (sequence is synthesized)
gaatgggaaggacttggattacgtttccacctccaagacccagctggtcccatcctccaaagatggggatgtcaaagacatgctttcgcgggaccgggaaacttccagcattgagcccct

SEQ ID NO: 92302 - DNA, 120 bp, Artificial Sequence
  ENSG00000088727_19 (sequence is synthesized)
tccctcagactccccgaaggaggaattacgcccaattaggcccgacaccccaccctccaaaccagtggcctttgaggagtttaagaatgagcaaggtagtgagatcaaccgaattttcaa

SEQ ID NO: 92303 - DNA, 120 bp, Artificial Sequence
  ENSG00000088727_20 (sequence is synthesized)
agaaaacaaatccatcttgaatgaacggaggaaaagggccagcgagaccacacagcacatcaatgccatcaagcgggagattgatgtgaccaaggaggccctgaatttccagaagtcact

SEQ ID NO: 92304 - DNA, 120 bp, Artificial Sequence
  ENSG00000088727_21 (sequence is synthesized)
acgggagaagcaaggcaagtacgaaaacaaggggctgatgatcatcgatgaggaagaattcctgctgatcctcaagctcaaagacctcaagaagcagtaccgcagcgagtaccaggacct

SEQ ID NO: 92305 - DNA, 120 bp, Artificial Sequence
  ENSG00000088727_22 (sequence is synthesized)
gcgtgacctcagggctgagatccagtattgccagcacctagtggatcagtgtcgccaccgcctgctcatggaatttgacatctggtacaatgagtcctttgtcatccctgaggacatgca

SEQ ID NO: 92306 - DNA, 120 bp, Artificial Sequence
  ENSG00000088727_23 (sequence is synthesized)
gatggcactgaagccaggcggcagcatccggccaggcatggtccctgtgaacaggattgtgtctctgggagaagatgaccaggacaaattcagccagctgcagcagagggtgcttcctga

SEQ ID NO: 92307 - DNA, 120 bp, Artificial Sequence
  ENSG00000088727_24 (sequence is synthesized)
gggccctgattccatctccttctacaatgccaaagtcaagatagagcagaagcataattacttgaaaaccatgatgggcctccagcaggcacatagaaaatagaacctcatcgccagtac

SEQ ID NO: 92308 - DNA, 120 bp, Artificial Sequence
  ENSG00000088727_25 (sequence is synthesized)
cttaaaggacaagaccagcaactcccacctactgtagtggagctgctcaaccacctgcccagagctgcagccccctctactccaatgctgggacccagcacagagaacacatttggcctg

SEQ ID NO: 92309 - DNA, 120 bp, Artificial Sequence
  ENSG00000088727_26 (sequence is synthesized)
catgttgggaggagcatcctccaaggacaaccttgctcatctccacagagcactttgggttttaattcactgtcttatatgcagggacaggataaaataactttctagtttggactttca

SEQ ID NO: 92310 - DNA, 120 bp, Artificial Sequence
  ENSG00000088727_27 (sequence is synthesized)
tgagaactttgtcttatttcctgtctgaaaggacatattctctatgtatgtgtgaggtcagaactgagtctcaagtaggaaggcagaaaagtagctcagccaggctcctcctggcaggcc

SEQ ID NO: 92311 - DNA, 120 bp, Artificial Sequence
  ENSG00000088727_28 (sequence is synthesized)
tttgtcacactggtcagcccctttcctggatagacatcctagggtgggggtggtgagctcggtctgaggagctctgcttctcacagctccctcagaccctaagttctctcaagacatctt

SEQ ID NO: 92312 - DNA, 120 bp, Artificial Sequence
  ENSG00000088727_29 (sequence is synthesized)
ttctgtgtttctgagccagtgaagaagacaggaggaggccctccttcatttggcaaccaggggaggataaggtctagccacagagaccagaaagggatgaggcagagctggctccatgta

SEQ ID NO: 92313 - DNA, 120 bp, Artificial Sequence
  ENSG00000088727_30 (sequence is synthesized)
acagccaggcagccccgcgtggggagtgcaggtggtttcggttgcggcagtcgcgtcccgggagcgtcgctgcctggtgaacgctgggtcgctcatctctgaaacccaggcgaaggaggg

SEQ ID NO: 92314 - DNA, 120 bp, Artificial Sequence
  ENSG00000088727_31 (sequence is synthesized)
ctcgacgtcgcgggagtcctttcaacctgaccgcggcttacggtcttcggagctaatgttcattggtcccacaaaggggtcccacgtcgcgtccaggacatagaggccgtgaggcaggga

SEQ ID NO: 92315 - DNA, 120 bp, Artificial Sequence
  ENSG00000088727_32 (sequence is synthesized)
gccagaggtcgtctggactcttccgtactagtcagttttcgaactagagggggctttgggatcaccagtcggagcccttcgtgttacagctagaatgggtactaggaaaaaagttcatgc

SEQ ID NO: 92316 - DNA, 120 bp, Artificial Sequence
  ENSG00000088727_33 (sequence is synthesized)
gggagcgtcgctgcctggtgaacggtgagcaggggctgctcgccggtgggagtggggagacgggaaaagggtgtgcgcccggactgctgaaagtggctggggtccaaaaaccgctttatc

SEQ ID NO: 92317 - DNA, 120 bp, Artificial Sequence
  ENSG00000088727_34 (sequence is synthesized)
gacctgaccacagacttatagcatttctccagaccaggaagactgctattcttagtggggcagctgctttattccatccaaagtggaactgacctttgctttgtagtctgagggccaagt

SEQ ID NO: 92318 - DNA, 120 bp, Artificial Sequence
  ENSG00000088727_35 (sequence is synthesized)
tgcagcagggtgagaccaacaggattatagcctcccacactatgaacaaaaactcttccagatcacactgcattttcaccatctacttagaggcccattcccggaccttatcagaggaaa

SEQ ID NO: 92319 - DNA, 120 bp, Artificial Sequence
  ENSG00000088727_36 (sequence is synthesized)
acccaccgatgactttgctcatgaaatgatcagatacggagatgacaaaagagtaagtgcgatgtgtttgccttcaactgactgggcctctctgtcccaccttgctatagtgtgaccgta

SEQ ID NO: 92320 - DNA, 120 bp, Artificial Sequence
  ENSG00000088727_37 (sequence is synthesized)
tttccaagcaacctttgaaggaccaagacagaattggacaggatccaatggactctagagcccatcaaatccaaaccaccccctcacacactgctaatgaagaaattaataaaatcccat

SEQ ID NO: 92321 - DNA, 120 bp, Artificial Sequence
  ENSG00000088727_38 (sequence is synthesized)
aagcaagacaggaaacaccacaggttactgggctttccctcgctaaatcacaaccctgttccaggccagcttccatgagtgatctccagatgtcacttggtttattcctgcaagtcagat

SEQ ID NO: 92322 - DNA, 120 bp, Artificial Sequence
  ENSG00000088727_39 (sequence is synthesized)
agatgcatcatctcactcacagggggtgcattttactcatttatttctcagaggagcagggcgtggtggcacacacttgtaatcctagcatcttgggaggctgaggcatgaaaatcgctt

SEQ ID NO: 92323 - DNA, 83 bp, Artificial Sequence
  ENSG00000088727_40 (sequence is synthesized)
ccaggaggcagaggttgtagtgaggtgaagactgtcttggaaaaaaaatataataacaattaaacaattatttctcagagggc

SEQ ID NO: 92324 - DNA, 120 bp, Artificial Sequence
  ENSG00000088727_41 (sequence is synthesized)
tggttataaggccagtatgagcagatggtattaagcacctgccatgtgcaccatgctatcttcactgagatttgccagcaggatgaagctagtcaccactgagcctgccatcaatgaaaa

SEQ ID NO: 92325 - DNA, 120 bp, Artificial Sequence
  ENSG00000088727_42 (sequence is synthesized)
gtatgatgctgaggaatggccaggatgtctgggcacagaatgaggaattgtacttttgctgtggaagagacagggtagcttctctgatgatccttcctgtcggcccccaccctaccatgt

SEQ ID NO: 92326 - DNA, 120 bp, Artificial Sequence
  ENSG00000088727_43 (sequence is synthesized)
gtcagttttcgaactagagggggctttgggatcaccagtcggagcccttcgtgttacagtagtgactgaagatagacccacatatgaagattcagctgccctctgacttccagccattac

SEQ ID NO: 92327 - DNA, 120 bp, Artificial Sequence
  ENSG00000088727_44 (sequence is synthesized)
catcaccaaccaccgccatttcctgaatacctactctgtgctgggctctgccctggacattgtgaggggattcaaaagagataaaaagcacaatccttgccttcaagcagcttgtaattt

SEQ ID NO: 92328 - DNA, 120 bp, Artificial Sequence
  ENSG00000088727_45 (sequence is synthesized)
aacggtatgtaaagacagtcagtgaaaccaggctggaatcccccttcatgggtgccagggcagggtaaggctccaggctggctaccctggcacagtggccatagacattgtcaagagtgg

SEQ ID NO: 92329 - DNA, 120 bp, Artificial Sequence
  ENSG00000088727_46 (sequence is synthesized)
aaggatccaggggtgagtctgagccacagttgctgagggggcccagagctaggatccacacaccaagcactaagctgtgcggaggaaaagggccagccagcaggcaggctcagcatggga

SEQ ID NO: 92330 - DNA, 120 bp, Artificial Sequence
  ENSG00000088727_47 (sequence is synthesized)
gtttcctggggtgctgctcctggaattgggatcaagaaggatcgttggtgacttgttctttataatcacacatgtttaaacatcttgaaaaccccacagggttccaggctgtggttataa

SEQ ID NO: 92331 - DNA, 120 bp, Artificial Sequence
  ENSG00000088727_48 (sequence is synthesized)
ggccagtatgagcagatggtattaagcacctgccatgtgcaccatggtaagcaggagtaacctggtagaaattagtcttaaatgcccttgggcctcagcatcctcaacccagaaagagag

SEQ ID NO: 92332 - DNA, 120 bp, Artificial Sequence
  ENSG00000088727_49 (sequence is synthesized)
agaagccatggtcctaagtaacgtgaggcccagagggaggagaccttcagaggaggccaggatgggggtgatggggaacttttcctgaagctggagtagggaaagatgggcactgagctg

SEQ ID NO: 92333 - DNA, 120 bp, Artificial Sequence
  ENSG00000088756_0 (sequence is synthesized)
acagaaggagaacttgaagcagaatggctgcaagatgtgggtttatcaactctgatctcaggtgatgaagaggaagatggcaaagccttgctctccacattgactcgaacccaagcagct

SEQ ID NO: 92334 - DNA, 120 bp, Artificial Sequence
  ENSG00000088756_1 (sequence is synthesized)
gccgtgcaaaagagataccatacctatacccaaaccatgaggaaaaaggataagcaatctatcagggatgtcagagacatttttggagtcagtgaatctcctcctcgtgatacctgtggc

SEQ ID NO: 92335 - DNA, 120 bp, Artificial Sequence
  ENSG00000088756_2 (sequence is synthesized)
aaccacactaatcagctggatggcaccaaggaagaaagagagcttccaagagttatcaagacaagtggttccatgccagatgatgcttctctcaacagtactaccctgtctgacgcatcc

SEQ ID NO: 92336 - DNA, 120 bp, Artificial Sequence
  ENSG00000088756_3 (sequence is synthesized)
caggataaagaagggagttttgcggttcccaggagtgactctgtggctatacttgagaccattccagttctaccagttcattccaatggatcaccggagcctggacagccagttcagaat

SEQ ID NO: 92337 - DNA, 120 bp, Artificial Sequence
  ENSG00000088756_4 (sequence is synthesized)
gcgataagtgatgatgattttctggaaaagaacattccaccagaggctgaagagctgtcatttgaagtgtcttattcagaaatggttacggaggctctaaaaagaaataaacttaagaaa

SEQ ID NO: 92338 - DNA, 120 bp, Artificial Sequence
  ENSG00000088756_5 (sequence is synthesized)
tcagagattaagaaagaagactatgttttaactaaatttaatgttcagaaaaccagatttggcttaactgaagcaggagatctgtctgctgaagacatgaagaaaatccgccatctctct

SEQ ID NO: 92339 - DNA, 120 bp, Artificial Sequence
  ENSG00000088756_6 (sequence is synthesized)
ctgattgaattgactgccttttttgatgcctttggaattcaactgaaaaggaacaaaacagagaaagtaaaaggacgagacaatgggatttttggagttccacttacagtcctcctggac

SEQ ID NO: 92340 - DNA, 120 bp, Artificial Sequence
  ENSG00000088756_7 (sequence is synthesized)
ggtgaccgaaagaaagaccctggagtgaaagttcccctggtattacaaaaattttttgagaaagttgaggaatcaggtctggaatctgaaggaatttttcgactttcaggatgtactgct

SEQ ID NO: 92341 - DNA, 120 bp, Artificial Sequence
  ENSG00000088756_8 (sequence is synthesized)
aaagtcaagcaataccgtgaagaacttgatgccaagtttaatgctgataaatttaaatgggacaaaatgtgccatagagaagctgcagtaatgttgaaagcgtttttcagagaactaccc

SEQ ID NO: 92342 - DNA, 120 bp, Artificial Sequence
  ENSG00000088756_9 (sequence is synthesized)
acctctctcttccctgtggaatatatacctgccttcatcagtctaatggaaagagggcctcacgtcaaagtacagtttcaagccttacacctcatggtcatggcgctgcctgatgccaac

SEQ ID NO: 92343 - DNA, 120 bp, Artificial Sequence
  ENSG00000088756_10 (sequence is synthesized)
agagatgcagctcaggccctcatgacattcttcaataaagtgattgccaatgaatcaaaaaaccgaatgagtctgtggaacatttctacagtgatggcaccaaaccttttcttcagtaga

SEQ ID NO: 92344 - DNA, 120 bp, Artificial Sequence
  ENSG00000088756_11 (sequence is synthesized)
agcaaacactctgattatgaagaattactgttagcaaacactgcggcccacatcatccgcctaatgcttaagtaccagaagattttgtggaaggttccatctttcttaatcactcaagta

SEQ ID NO: 92345 - DNA, 120 bp, Artificial Sequence
  ENSG00000088756_12 (sequence is synthesized)
agaagaatgaatgaagccacgatgctattgaagaagcagctcccaagtgtcaggaagctgctcaggaggaagaccctcgagcgggagactgcaagccccaagacttcaaaggtactgcaa

SEQ ID NO: 92346 - DNA, 120 bp, Artificial Sequence
  ENSG00000088756_13 (sequence is synthesized)
aaatcaccctcggcaagacgaatgtctgacgtgccggaaggagtcatacgggtccatgctccacttctctccaaggtgtccatggccattcaactcaacaatcaaaccaaagccaaagac

SEQ ID NO: 92347 - DNA, 120 bp, Artificial Sequence
  ENSG00000088756_14 (sequence is synthesized)
atattggcaaaatttcaatatgaaaacagtcatggttcatcagaatgtattaagattcagaaccaaaggttatatgaaattggaggaaatataggagagcattgcttggatccagatgct

SEQ ID NO: 92348 - DNA, 120 bp, Artificial Sequence
  ENSG00000088756_15 (sequence is synthesized)
tatatattggatgtatatcgtataaatcctcaagcagaatgggtgattaaaccccaacaaagttcttaaaatatcctcgagagagctgctatcatgtattatatgccaaaaagatcctac

SEQ ID NO: 92349 - DNA, 120 bp, Artificial Sequence
  ENSG00000088756_16 (sequence is synthesized)
attttggtagggaaaaaacaacactgtgtttgacgtatttgttcctacagcattctcagtatttctggccctcagcagtgggcattgtaagcatgaactatggaagaggcgccggttcac

SEQ ID NO: 92350 - DNA, 120 bp, Artificial Sequence
  ENSG00000088756_17 (sequence is synthesized)
caattcaactgaagctttctcatgacttttttttttataaaagtaaaggaaagatgatgtggtccttccagaagaaagaccaatctagaatatggaactctaatcacttctagtatttca

SEQ ID NO: 92351 - DNA, 120 bp, Artificial Sequence
  ENSG00000088756_18 (sequence is synthesized)
acttcctagcagaaatgaacttggccctagacctagggataagcaatgttctttatgtagccaatgctacgaaacaaaagaggtgaaagagacccttttttatacttaatgtacatatat

SEQ ID NO: 92352 - DNA, 120 bp, Artificial Sequence
  ENSG00000088756_19 (sequence is synthesized)
tgactttttgagcaagaatgccagaaatagccttcatttctaccctgcaaaataatccagatctgctttctaaaatgaatcagtttctaaagtgaaacatgcaatatttatgctctgact

SEQ ID NO: 92353 - DNA, 120 bp, Artificial Sequence
  ENSG00000088756_20 (sequence is synthesized)
gactcctgaattggaagaggaagaacttctgtttacagaaaactgtattgttatatatgtcaggctgtgtattgtgactatcagcattctggtgcaaatgaacttttctccatcatcgac

SEQ ID NO: 92354 - DNA, 120 bp, Artificial Sequence
  ENSG00000088756_21 (sequence is synthesized)
tgtggaaaattgatacttttaaagcatattcttctatgagcacaggtcctcctagtgaagcttagtttgacaaagggtgtcatatgctttcctaacctgatttgtagttaacattcacag

SEQ ID NO: 92355 - DNA, 120 bp, Artificial Sequence
  ENSG00000088756_22 (sequence is synthesized)
attacggttatgatgctcagtatctttccaagtgccaggcacgggcttccttttctgatcaaacataccattttttatatttcacaactatagacagtcacttctgcagtcccaatttaa

SEQ ID NO: 92356 - DNA, 120 bp, Artificial Sequence
  ENSG00000088756_23 (sequence is synthesized)
aaatgcagaactgctttatccaagaatgctgaaaaatactgttctatccaggtttcctaaactataaaagcagattttgcttttgtttgttaatcataggcatggccgagcattgtggat

SEQ ID NO: 92357 - DNA, 120 bp, Artificial Sequence
  ENSG00000088756_24 (sequence is synthesized)
tagcctgaggcttaaaatcagatgcatgtctggtaagatgaccactgtctcactatcaagagcctgcagagccattttccagacctgtgattgcccagaacacatagtccccacgtttct

SEQ ID NO: 92358 - DNA, 120 bp, Artificial Sequence
  ENSG00000088756_25 (sequence is synthesized)
aatttggagcaaatctaaaaggtgctgagggattggacagctctgactttcctcgagactatggatatagtccttctcagattagctggaaatggggacagagttctcatttatcccaga

SEQ ID NO: 92359 - DNA, 120 bp, Artificial Sequence
  ENSG00000088756_26 (sequence is synthesized)
tatatacattggcttttttggaatctatagattgagattttgatgaatttatattggttttaatgagacccaaatgactctctcttaacaattcaagcagtagacaaagttgctcacaaa

SEQ ID NO: 92360 - DNA, 120 bp, Artificial Sequence
  ENSG00000088756_27 (sequence is synthesized)
tacagaaaacatctttttgtctacttcgcaagtctcaaaacgtgataatatttaagcccatttgtagaagaaatcttgtatatactattattacaccttgatatctatacaaaacatcac

SEQ ID NO: 92361 - DNA, 120 bp, Artificial Sequence
  ENSG00000088756_28 (sequence is synthesized)
ttgtattaaaatatatagataactttctggcatttagaattttgttccattcatttaatttgttcatctgagaatttttttttttgcctgaaaacccattaaaagaaaacgtgccttctg

SEQ ID NO: 92362 - DNA, 120 bp, Artificial Sequence
  ENSG00000088756_29 (sequence is synthesized)
tataagtttatgtttattcctacattttattcatttttaatgtatgggtaattggtggcacatgactttacataatgactttctagactctgaaaaaaatgcttttatcatttttgcaat

SEQ ID NO: 92363 - DNA, 120 bp, Artificial Sequence
  ENSG00000088756_30 (sequence is synthesized)
tcagacaagggtaaacattttactttatgtaattgccacatcccaagatgtaaaacggcagtaatttatgaccacgtatggaagaaattcttcaaatagctaccttacatttctgcgtat

SEQ ID NO: 92364 - DNA, 120 bp, Artificial Sequence
  ENSG00000088756_31 (sequence is synthesized)
atatgaaaactgaatgatatttctcagtgtatttccttgcatttgaatggttcaattctgttgtgtttatgtagaaaattcacaaatctgttcatttaattttttaatttgagaattttt

SEQ ID NO: 92365 - DNA, 120 bp, Artificial Sequence
  ENSG00000088756_32 (sequence is synthesized)
atttcttttgactgaaaacacattagaacctatgagtaaattctgaaggttttaagatttacttcagcttgtcaccagtttcaaataaatccctaataggtaacaagtaaaatacaaatt

SEQ ID NO: 92366 - DNA, 120 bp, Artificial Sequence
  ENSG00000088756_33 (sequence is synthesized)
cttgtctactttcatgtggttttaaatggcagggacttcgctgagtcagtaagtataatcactctagtttattcaaggatgtgtggcaactttcaacttccatacgtatatatgtatgta

SEQ ID NO: 92367 - DNA, 120 bp, Artificial Sequence
  ENSG00000088756_34 (sequence is synthesized)
tggaaggccatgtcaatactagtatcattggatataactttgattcttaatcagagggcaaattcattagagaagaatttttagtagatacacagactaatatttgtgtggaggttcttt

SEQ ID NO: 92368 - DNA, 120 bp, Artificial Sequence
  ENSG00000088756_35 (sequence is synthesized)
tgaccaattttattcctaagaataaacaaacccctacagttaaaatgcaaagatgcctgtcatctaagtattgaaagaatttttgccttatcaagagttgttttttaaaaatttaataaa

SEQ ID NO: 92369 - DNA, 120 bp, Artificial Sequence
  ENSG00000088756_36 (sequence is synthesized)
ttcataaaaaagactcatatctttgcaaacaaaagaagggcagatactgggcttctacatgctatccttaagagcttctccccctcacccattcctagtgctcttggtatacacttggga

SEQ ID NO: 92370 - DNA, 120 bp, Artificial Sequence
  ENSG00000088756_37 (sequence is synthesized)
aaataatgtcctccaggagaaagtgttagagggaactaacattttaggaatgcttattcagaaaaaaatcctagagttgattcattgttttcctccatcctgcaaaagaagatccctttg

SEQ ID NO: 92371 - DNA, 120 bp, Artificial Sequence
  ENSG00000088756_38 (sequence is synthesized)
ttaagcagctcacttggaaatatgattcttggagtcaatgatctctaaacaaactggattatcaactatttacaacgtctatacagtataaactacctcacttgcctttcttgggaaaaa

SEQ ID NO: 92372 - DNA, 120 bp, Artificial Sequence
  ENSG00000088756_39 (sequence is synthesized)
aaaaatgaatggactttaacaattgttgttacaaactgtgcctgaatcttattatttaaatcacttcagttagctttcagtgtatgtttaataatatacatttaatgatgaaaaatattt

SEQ ID NO: 92373 - DNA, 120 bp, Artificial Sequence
  ENSG00000088756_40 (sequence is synthesized)
tcagcaaagctttaaaaccagaaatactgtgtaactgtgatctatgtggtatactctgagagaattctgtgtcctgctcattgtcttgagtttctaaccatgtgcagatgcaagcgttca

SEQ ID NO: 92374 - DNA, 120 bp, Artificial Sequence
  ENSG00000088756_41 (sequence is synthesized)
ggagtaggaattaatgtccatcttttctttcaggcattttcatctgctgtccacgtatttcacttgactgaaagctcatatgagttaaaatgtcccttcttcctagcgagcatatttcaa

SEQ ID NO: 92375 - DNA, 120 bp, Artificial Sequence
  ENSG00000088756_42 (sequence is synthesized)
ctgttcttcataaatgtttatgtgccttaaaagactttatgttaaaggattaaatagtttctctgacaggcagtttttaactgttttccacaaataaaaataatatgtcatgggattaaa

SEQ ID NO: 92376 - DNA, 120 bp, Artificial Sequence
  ENSG00000088756_43 (sequence is synthesized)
atgtttgttttcaagcatttttaacagttttacacacttacatacaccttaattaaaaatttttttctgtcagacatttaccaactattttctaaaactaatttgacaaatcatgacact

SEQ ID NO: 92377 - DNA, 120 bp, Artificial Sequence
  ENSG00000088756_44 (sequence is synthesized)
agaaaacgccaatgttttatgtctttgcccatctcaaaagctaatattgattcttctgttccatcagctttcattgttaagtagaatatgtatgttgcattttatccataagaaataaag

SEQ ID NO: 92378 - DNA, 120 bp, Artificial Sequence
  ENSG00000088756_45 (sequence is synthesized)
tacaggtatgagccaccacgcccggccaggcatttctttatagcaatgccaggatggtgtgccagactgtatcagagacaagtgatacaaagatgaccaagatacagtacttgcccagga

SEQ ID NO: 92379 - DNA, 120 bp, Artificial Sequence
  ENSG00000088756_46 (sequence is synthesized)
aggaagaagaattcctgtggccacctctgtcttatatcaagagataagtgtgaaacagagtatccacaacagtgtttgggaagacagtgtgagtggctcccaactctaccaacaaaggct

SEQ ID NO: 92380 - DNA, 120 bp, Artificial Sequence
  ENSG00000088756_47 (sequence is synthesized)
tcaaaggagtaatgacatttgaattgagtcttaaaggataaatgtattacttggcctgacaacacagaagaaaaggtcatttttgtcaaagaaatcaaccttgaaaaaatgccgcagttc

SEQ ID NO: 92381 - DNA, 120 bp, Artificial Sequence
  ENSG00000088756_48 (sequence is synthesized)
atgacttgtaccagtgaaggtagcaaggtctgtgtgttggtgatgaatttgcaggggatcaggctgaagaaacaagacttgggagagaggatgtgagacctttttatgacatgcatagag

SEQ ID NO: 92382 - DNA, 120 bp, Artificial Sequence
  ENSG00000088756_49 (sequence is synthesized)
acatgcatagagttggcacctcagcctttgcatggtagggagctagctgaaggctacctccatgacagatgtacactttgaaaagacaggccgggtgcggtggctcacgtctgtaatccc

SEQ ID NO: 92383 - DNA, 120 bp, Artificial Sequence
  ENSG00000088756_50 (sequence is synthesized)
gggaggctgaggtgggcaaatcacttgaagtcaggagttagagatcagcctggccaacacagtgaaacctggtctctactaaaaaaaataaaataattagccaggcatggtggcgcacac

SEQ ID NO: 92384 - DNA, 120 bp, Artificial Sequence
  ENSG00000088756_51 (sequence is synthesized)
caaaataaaggaagatacagctaatctatatttctttcaccagagatcaccaccactaacaattcatactggtcgtttttccctgaatgttttacctatgtaggaaaattttacatccca

SEQ ID NO: 92385 - DNA, 120 bp, Artificial Sequence
  ENSG00000088756_52 (sequence is synthesized)
atttttaatttaacactatgaaaagcatttctttttataataaagacactctattagtatacttttgatggcttcaaaactacttttgtatagatgcaaaattaaaatatcaaattgttt

SEQ ID NO: 92386 - DNA, 85 bp, Artificial Sequence
  ENSG00000088756_53 (sequence is synthesized)
gtctcactctgtcgcccaggctaattcctcccaggttaaagtgattctcatgccgcagcctcccgagaagctgggactacaggtg

SEQ ID NO: 92387 - DNA, 86 bp, Artificial Sequence
  ENSG00000088756_54 (sequence is synthesized)
ctcggctcactgcaagcttttcctcccaggttaaagtgattctcatgccgcagcctcccgagaagctgggactacaggtgtgcaaa

SEQ ID NO: 92388 - DNA, 120 bp, Artificial Sequence
  ENSG00000088756_55 (sequence is synthesized)
ctcccaaagtgctgggattgcaggcgtgggccaccgtgccctgcctcaaattgtttctttaatggttgttcccaaattttcataaataactttttacgtaacatttttgggcataaagtt

SEQ ID NO: 92389 - DNA, 120 bp, Artificial Sequence
  ENSG00000088756_56 (sequence is synthesized)
cataaataactttttacgtaacatttttgggcataaagttgtctaaaattattttcataggctagataccttaagtacacttaatgatttaaatcatacttaacattaagactttaatgt

SEQ ID NO: 92390 - DNA, 120 bp, Artificial Sequence
  ENSG00000088756_57 (sequence is synthesized)
tgctatattgatatttagtaaaagtacaaaacttgtgctttagagtttagacatattcaggatataagatagttttgttggatttggcgaacacttgccctaggagaataaaaaatgatg

SEQ ID NO: 92391 - DNA, 120 bp, Artificial Sequence
  ENSG00000088756_58 (sequence is synthesized)
aattagtccaaaatgttccagttttctaatttgtcagactcggtaaatggtatcatcaccaaccaagaaaaacagaagatacagggagagtagattttgcagaaaagataaggagttctg

SEQ ID NO: 92392 - DNA, 120 bp, Artificial Sequence
  ENSG00000088756_59 (sequence is synthesized)
tttgggacttgctgcctttgatatactgcactgggagaaaatccaagtcgaacagagtggacaagtgagaatgtgctgtggaatcaacaagaggggtggggagtctacctacctagattt

SEQ ID NO: 92393 - DNA, 120 bp, Artificial Sequence
  ENSG00000088756_60 (sequence is synthesized)
gagagcagtttggcaaataattgttagtaaatgtcatagaaattcgtgggagagagaagttgataagaacagaggggtaaaggatgaaacagaggaaacactgccgcttctcagggttgg

SEQ ID NO: 92394 - DNA, 120 bp, Artificial Sequence
  ENSG00000088756_61 (sequence is synthesized)
gtacaagagaagccagggaaatagactaagaaagagtgatcagggaaaccgggagacagtgttgtcacggaagcctggagtgtgagattttccagaaaagaaggaatgaaagaatgaatg

SEQ ID NO: 92395 - DNA, 120 bp, Artificial Sequence
  ENSG00000088756_62 (sequence is synthesized)
gtctgtagatccattactcagcactatcagacacattgtccccttttgatatcccataatgaaatttatagataatataatctacttgtgcacaaaattttagaaattaatataatgccc

SEQ ID NO: 92396 - DNA, 79 bp, Artificial Sequence
  ENSG00000088756_63 (sequence is synthesized)
ggacagaactaataggatatatatatataaaggggagtttataaagtattaacttacactatgagagccaggctgagtc

SEQ ID NO: 92397 - DNA, 90 bp, Artificial Sequence
  ENSG00000088756_64 (sequence is synthesized)
tccagcacaggagaaagacgcccatgttcctctgcctgctttatattcactggcagctgattggattgtgcccaccagattaagggtgga

SEQ ID NO: 92398 - DNA, 88 bp, Artificial Sequence
  ENSG00000088756_65 (sequence is synthesized)
tttgtatccttcaatccaattaagctgacactcagaattaaccatcacataaaggaagaagtaaaaggaaagtatattttatataata

SEQ ID NO: 92399 - DNA, 120 bp, Artificial Sequence
  ENSG00000088756_66 (sequence is synthesized)
ataaaggaagaagtaaaaggaaagtatattttatataataagtatttaaatatgtaaacattgggacatgactaaaactgactgaacacattgaaggagtcacttggttggtctgatgtg

SEQ ID NO: 92400 - DNA, 120 bp, Artificial Sequence
  ENSG00000088756_67 (sequence is synthesized)
cagaattaccatgcatgctacaaatggagaggggtctacatgagctgtattgcttgtggtgccgcagatgacttgaatttccagaatgaaaatccattcctcgctgccgaagaattaaca

SEQ ID NO: 92401 - DNA, 120 bp, Artificial Sequence
  ENSG00000088756_68 (sequence is synthesized)
ggatgctctccaatgaatccctccatcctcctgccttcagccgttccaactcagaagcctccgtagacagcgcctccatggaggatttctggcgggaaatagaaagtattaaagacagca

SEQ ID NO: 92402 - DNA, 120 bp, Artificial Sequence
  ENSG00000088756_69 (sequence is synthesized)
aatgggttaaaaaagaaagagaagagtcgacagagaccaacaggagccccaaacatgtattcctcttcactattggcctggacatctccacataggcagtcatatagagacttgaaatat

SEQ ID NO: 92403 - DNA, 120 bp, Artificial Sequence
  ENSG00000088756_70 (sequence is synthesized)
cattcaagggatttgggtatccagtagacttttagttacatatactacaaaactgactttgtactctcaagtagacctttcgtagaaagaaaatgtttctaataaaaatgtattagaact

SEQ ID NO: 92404 - DNA, 120 bp, Artificial Sequence
  ENSG00000088756_71 (sequence is synthesized)
acctcgggccgcgccgcccagctgctgacagcctcccggcgcgccggtccatgctggtcccggtctttgttctggggccggcgccgagacatgcgcggctgacgatggaggtggaggact

SEQ ID NO: 92405 - DNA, 120 bp, Artificial Sequence
  ENSG00000088756_72 (sequence is synthesized)
cgggcggcgtggtgctgaccgcctaccactcgtacgcgcgcgcccagccccccaacgccgagtcgcgctgcgcgccccgcgccgcagccagccacccgctcagcagaaaatccattcctc

SEQ ID NO: 92406 - DNA, 120 bp, Artificial Sequence
  ENSG00000088756_73 (sequence is synthesized)
acccggagccgctcccaccagggcggcgcagtcgcgctgggcttggggggttcgccgtgcagctgcgccttgtgcctgagcgcacgaccgccgtcactggatgttgtttcaagttttggt

SEQ ID NO: 92407 - DNA, 120 bp, Artificial Sequence
  ENSG00000088756_74 (sequence is synthesized)
aaagtaggccagtattgccagagaacaggagaggaggagagtatggtataagcatgtccagaaatgaaactcgtttgtactggcagatgctataagaagagagccctgactggaaataag

SEQ ID NO: 92408 - DNA, 120 bp, Artificial Sequence
  ENSG00000088756_75 (sequence is synthesized)
tacgagaataaaaagagaatgaagttagtagatatatgattgctaacaacaaaagttgtttttcaaaggaatttctagaaatgggattcttaataggtattgtctatcttcgtagcttca

SEQ ID NO: 92409 - DNA, 60 bp, Artificial Sequence
  ENSG00000088756_76 (sequence is synthesized)
atgggattcttaataggtattgtctatcttcgtagcttcatttattcagtgagttttacc

SEQ ID NO: 92410 - DNA, 120 bp, Artificial Sequence
  ENSG00000088756_77 (sequence is synthesized)
atatagcaagttagttttgtagatatcttgatagtccttcaggaataacattttcctaggcttgcattgactttaacatgcctgtatcagatagacattatgtagttaagtggataccat

SEQ ID NO: 92411 - DNA, 120 bp, Artificial Sequence
  ENSG00000088756_78 (sequence is synthesized)
agctgttactttcctttaaacatactaataataattcttagaatcagaatgatacttacaaaaattatttttgcaaatctgccatgatcaccttaaaggggcgcagatcatgacaatttt

SEQ ID NO: 92412 - DNA, 120 bp, Artificial Sequence
  ENSG00000088756_79 (sequence is synthesized)
tgtctggacatgcttactaaagaataaacatttgtcttcttgtttataaaggatgagaagcactcatttatccattgtagagcatgtatgatttgctgtctctagtgagactgatggatg

SEQ ID NO: 92413 - DNA, 120 bp, Artificial Sequence
  ENSG00000088756_80 (sequence is synthesized)
gccttaaaatgaagcattccaatcatgttgaaaagaagtagccttgttgagcaaaaaagccaactgtaaaagttaacatattgcatgattccacttatataacattttttaaattaaatt

SEQ ID NO: 92414 - DNA, 120 bp, Artificial Sequence
  ENSG00000088756_81 (sequence is synthesized)
gatgatttggaagggagatggttttggtcactaaaggccaacatgaaggacccttatggtgttggaacttgtggtgctgggatcttgactgtggtgatggataactgaccctctataaaa

SEQ ID NO: 92415 - DNA, 120 bp, Artificial Sequence
  ENSG00000088756_82 (sequence is synthesized)
ttctactgaaattaatacacacacacacaaatgagtataagtaaaacttggaaatctgaataagataggtaggttgtatcaatatcagtatcctgattgtgacattatgctgtagttctg

SEQ ID NO: 92416 - DNA, 120 bp, Artificial Sequence
  ENSG00000088756_83 (sequence is synthesized)
tgaattgttaccattgtggaaaatggcagaatacaaagaatctctctgtattatgtcttaaaaccacatgtgaatctacaattatctcaataaaaatttaatttaaaagaaaagtagcca

SEQ ID NO: 92417 - DNA, 120 bp, Artificial Sequence
  ENSG00000088756_84 (sequence is synthesized)
gtaaaagtcatctatggtgtgaggtaaggacggtagtgtttctaccatcaggagaaaaacttgagagatgggtgcaccaaaatctcagaaattaccactaaagggtgtagtggaaggtag

SEQ ID NO: 92418 - DNA, 120 bp, Artificial Sequence
  ENSG00000088756_85 (sequence is synthesized)
ggggtggaggaaggcatagtgaccaggaaggcatgctgatggcctcaaacgttttttttctccttttggtattagattatatgatgtgttcactttgtgaaaattcatcaagttgtatac

SEQ ID NO: 92419 - DNA, 120 bp, Artificial Sequence
  ENSG00000088756_86 (sequence is synthesized)
ttctgacttgtacattttatatataatatatacacatatacacacacacattaacccgttttccacttgctccaagaatactgcactggcagcgagctgcactttccttcctaaatggaa

SEQ ID NO: 92420 - DNA, 120 bp, Artificial Sequence
  ENSG00000088756_87 (sequence is synthesized)
attagttcttcacttagagaagaaactccattgccctttgtttctggccctgtgcggctggaggcggccagcactgtcctgtcctggttgaagcaattttaatgtgtgtggggtgctgaa

SEQ ID NO: 92421 - DNA, 120 bp, Artificial Sequence
  ENSG00000088756_88 (sequence is synthesized)
tgtgggctggggatggcttccctgcctttgggtcatggggagacacacttgcagaggggttttgtgggtcttcctcaagaatatcatccctgaaatttttaacctgctaaaagaatcacc

SEQ ID NO: 92422 - DNA, 120 bp, Artificial Sequence
  ENSG00000088766_0 (sequence is synthesized)
agtatggaggcagcggtagcccagtgtctgagtggttgccgggtctccatggagaagcggctcgccagtgtcccaggctgctgagctctcgccgcccgagaccccgcggcgcggccgcag

SEQ ID NO: 92423 - DNA, 80 bp, Artificial Sequence
  ENSG00000088766_1 (sequence is synthesized)
ggccatgctagccttgcgcgtggcgcgcggctcgtggggggccctgcgcggcgccgcttgggctccgggaacgcggccga

SEQ ID NO: 92424 - DNA, 120 bp, Artificial Sequence
  ENSG00000088766_2 (sequence is synthesized)
ctgctgcttgggctgcctggccgaacgctggaggctgcgtccggccgctcttggcttgcggctgcccgggatcggccagcggaaccactgttcgggcgcggggaaggcggctcccaggcc

SEQ ID NO: 92425 - DNA, 120 bp, Artificial Sequence
  ENSG00000088766_3 (sequence is synthesized)
agcggccggagcgggcgccgctgccgaagccccgggcggccagtggggcccggcgagcacccccagcctgtatgaaaacccatggacaatcccgaatatgttgtcaatgacgagaattgg

SEQ ID NO: 92426 - DNA, 120 bp, Artificial Sequence
  ENSG00000088766_4 (sequence is synthesized)
cttggccccagttctgggctatttgattattgaagaagattttaatattgcactaggagtttttgctttagctggactaacagatttgttggatggatttattgctcgaaactgggccaa

SEQ ID NO: 92427 - DNA, 120 bp, Artificial Sequence
  ENSG00000088766_5 (sequence is synthesized)
tcaaagatcagctttgggaagtgctcttgatccacttgctgataaaatacttatcagtatcttatatgttagcttgacctatgcagatcttattccagttccacttacttacatgatcat

SEQ ID NO: 92428 - DNA, 120 bp, Artificial Sequence
  ENSG00000088766_6 (sequence is synthesized)
ttcgagagatgtaatgttgattgctgctgttttttatgtcagataccgaactcttccaacaccacgaacacttgccaagtatttcaatccttgctatgccactgctaggttaaaaccaac

SEQ ID NO: 92429 - DNA, 120 bp, Artificial Sequence
  ENSG00000088766_7 (sequence is synthesized)
attcatcagcaaggtgaatacagcagtccagttaatcttggtggcagcttctttggcagctccagttttcaactatgctgacagcatttatcttcagatactatggtgttttacagcttt

SEQ ID NO: 92430 - DNA, 120 bp, Artificial Sequence
  ENSG00000088766_8 (sequence is synthesized)
caccacagctgcatcagcttatagttactatcattatggccggaagactgttcaggtgataaaagactgatgaaagtcatccctcactgttagtaaggaagcagtatacatcaatgggaa

SEQ ID NO: 92431 - DNA, 120 bp, Artificial Sequence
  ENSG00000088766_9 (sequence is synthesized)
cagggcccatggaaatgtacaggagtttccctattttggtgttcagcttgaaaaaggacttgtcagaatcaactgtgtcatcaaaatttaagtaatgtgcattgaaaataaggttgatca

SEQ ID NO: 92432 - DNA, 120 bp, Artificial Sequence
  ENSG00000088766_10 (sequence is synthesized)
tgggaatatgcagaatttccaatgtatttttaaatacaaataaaattgtaatttagaatttttaatcttaggtttcttgattaatttataagagatcaattattgtcagtcttttttgta

SEQ ID NO: 92433 - DNA, 120 bp, Artificial Sequence
  ENSG00000088766_11 (sequence is synthesized)
tgttttttaaaaacatagtccagagcatgggcagaattgacacctctcttttaagtgaaatttggattgctcacaaagcactaggaaatgtcatggggttcaaatatatatcctacacaa

SEQ ID NO: 92434 - DNA, 120 bp, Artificial Sequence
  ENSG00000088766_12 (sequence is synthesized)
ctgggcaatacatttttgtttgatttttaggtctgtgtatacattaacagttcatgtaattaatacctgatcatttgggataatgaaagtgaagttagttgtagatgaagtaaagttata

SEQ ID NO: 92435 - DNA, 120 bp, Artificial Sequence
  ENSG00000088766_13 (sequence is synthesized)
aaagagattaaaaatgcggtaactttttaagataataatcatacagaaggtatgaagttcattttcggtagtcttccaacctctcaggtgcctaataatttatgtttgaggataacaggt

SEQ ID NO: 92436 - DNA, 120 bp, Artificial Sequence
  ENSG00000088766_14 (sequence is synthesized)
aacaaagatagtcgagataggagaacgtgtctattagtctttgcatctaaaaggcagtgagttacgttcctgccttccactgtgtttctgacatagcaatgtttgtttgatattggaacc

SEQ ID NO: 92437 - DNA, 120 bp, Artificial Sequence
  ENSG00000088766_15 (sequence is synthesized)
tggattcatattttatgtaaataatatcaagctgtatatttttcaaaggttttttaaactttggagactctttcttttgttaagcagttaaaggaataaaagagctggaaaaaaaattgt

SEQ ID NO: 92438 - DNA, 120 bp, Artificial Sequence
  ENSG00000088766_16 (sequence is synthesized)
tcacttacacttaaattgtaaaaataattagtctgaccatctgactttaaaagactgttgctacacgtacatcatgtttaggagaatgtgggatatggggaaggggagaagaagacagtc

SEQ ID NO: 92439 - DNA, 120 bp, Artificial Sequence
  ENSG00000088766_17 (sequence is synthesized)
cagtggtgactagttgctgctgcttaacctatggcctattgctgcccattgtccctggttttaatccaagcctattatggaatactgcagtgagattatccattctcagcctgttgagct

SEQ ID NO: 92440 - DNA, 120 bp, Artificial Sequence
  ENSG00000088766_18 (sequence is synthesized)
gcattaaattagaatgggaggctgtaagtaaaactcatgcctcttggccaggcattctgcaccagcgtgtccctctgtggcttgctggtcctggttgttctcagactggcagctgagctg

SEQ ID NO: 92441 - DNA, 120 bp, Artificial Sequence
  ENSG00000088766_19 (sequence is synthesized)
cgcttggcttgaagcatactgaagcctgcagccagggacaccgccattgaatcagatggagggggatgaaaaagcagagaagggggcatgtggctggctattcttgctctctggagaaca

SEQ ID NO: 92442 - DNA, 120 bp, Artificial Sequence
  ENSG00000088766_20 (sequence is synthesized)
gcttcattgttaggagtagttaggctgaaagtggacttcccactgctgagccacccaagaggcacactgagcattagtgacgggtgagccacataagaataatgtttaaaaaagagagga

SEQ ID NO: 92443 - DNA, 120 bp, Artificial Sequence
  ENSG00000088766_21 (sequence is synthesized)
cttgaagtagctatgcgaaaatttagaactttgcactttgttaacgcttatttatggtttagtgttgatgccatttggagtgacctatgggttggacccatatctttttattattaaggt

SEQ ID NO: 92444 - DNA, 120 bp, Artificial Sequence
  ENSG00000088766_22 (sequence is synthesized)
ctcaatctggctctggttaataaacgtttcccgcttcatcccttaggaaaatggtccaagtctcctcaggcttttggatactgaattgttataaaacacatcaattctgccagtttataa

SEQ ID NO: 92445 - DNA, 120 bp, Artificial Sequence
  ENSG00000088766_23 (sequence is synthesized)
aacactggaattgtattagacatgtctgagtatgtacttgtttatagactcaaaacatgatgaaaattcatttcattgtcttcactgaatagacttaaccttgacagtaagcttaaagca

SEQ ID NO: 92446 - DNA, 120 bp, Artificial Sequence
  ENSG00000088766_24 (sequence is synthesized)
ttagtgtcatttaattacatgtctgaggaatttatgctaactagattttgggcttttgcagcgaattttagtcggggcctcattcctgagcccaagtgaccctttcacctcagcttccca

SEQ ID NO: 92447 - DNA, 61 bp, Artificial Sequence
  ENSG00000088766_25 (sequence is synthesized)
ttttttacaagcccacaacatcatagctttgcagtttttaaccaggagctggtggagatct

SEQ ID NO: 92448 - DNA, 120 bp, Artificial Sequence
  ENSG00000088766_26 (sequence is synthesized)
catagctttgcagtttttaaccaggagctggtggagatctttgaaatcatttaggccaattcttttagttacatttatgatgaaactagggatctaccttaaagttttgggaagctcttt

SEQ ID NO: 92449 - DNA, 120 bp, Artificial Sequence
  ENSG00000088766_27 (sequence is synthesized)
caaaacttcagacacctagaaatatatatagtgcagttcagttttagtttctgcagcatggtttggaaacaaaagatacataggatttaaactcgatttgttttcttcttacagtagaag

SEQ ID NO: 92450 - DNA, 120 bp, Artificial Sequence
  ENSG00000088766_28 (sequence is synthesized)
taaatgctcttgtggcttgaatcgcatctcccaagaaagatacgttcacgttcaaacccccagtactgtacatgtgaccttatttggaaatagggtctttttagatgcagtcaagataga

SEQ ID NO: 92451 - DNA, 120 bp, Artificial Sequence
  ENSG00000088766_29 (sequence is synthesized)
attagatcatactggattacagtgggccccaataactaggtttttttgttaaaaaaaaaaaaaaaggaaatgtgaacagagagagaatgccgtgagatgatggagggatagattggaatg

SEQ ID NO: 92452 - DNA, 120 bp, Artificial Sequence
  ENSG00000088766_30 (sequence is synthesized)
atgtctgcgagctaaggaatactgaggattgctgccaaccatccgaagctgggagaggagatggaacaactccctcggagcctccaagaggaaccaaccccactgatgctttgatttggg

SEQ ID NO: 92453 - DNA, 120 bp, Artificial Sequence
  ENSG00000088766_31 (sequence is synthesized)
atttccggcctgaactgtaggaaaataaatttctgttcttttaagccatttttaccagtttgtggtaacttgttacagcagctgcaggaaattaataaatgccaatgttgaaaattaaaa

SEQ ID NO: 92454 - DNA, 120 bp, Artificial Sequence
  ENSG00000088766_32 (sequence is synthesized)
agttgtacagcatgggttgaggtggccagatcctggcaggggtctcaactccactgatagctaaagcatgttggggtttgaatgctggatactttgaagttgccatatcctgactgaagt

SEQ ID NO: 92455 - DNA, 120 bp, Artificial Sequence
  ENSG00000088766_33 (sequence is synthesized)
ttttgttccaaaaatatagttttcaactttaaactgtttccctaattttaaactgttgaactgttttgtcaaactacttgtggattttagaatttatgtccttgttttactagtaaaatc

SEQ ID NO: 92456 - DNA, 120 bp, Artificial Sequence
  ENSG00000088766_34 (sequence is synthesized)
agttgctttcctagtaagattgtttaaaattaaaattgaataaatatttcacagtgccaattcatattactctgaaattttttggtgatacattatgtatttttagtgcctagcttttca

SEQ ID NO: 92457 - DNA, 120 bp, Artificial Sequence
  ENSG00000088766_35 (sequence is synthesized)
aaagcaatttagttttcctacgtttattatctttattaatatcgtttaatcataagtgagaactctgaaattctgaagatgtctataaaatttcacattatgtagaccctattatgcaat

SEQ ID NO: 92458 - DNA, 120 bp, Artificial Sequence
  ENSG00000088766_36 (sequence is synthesized)
ttttaaatcatatatatagtttgtacattatatgaatactttttctgataagatttcatgatttttttgctttgtattttgcatgtgcttttctgattgttcattttcttcttcagtcgt

SEQ ID NO: 92459 - DNA, 120 bp, Artificial Sequence
  ENSG00000088766_37 (sequence is synthesized)
cagccaccccagccttcagcaaccaccacactgatcagtcagcagctgtcaacattgagctactcagctctgctgttgtagtgtgaaagcagccacagaaaatatttaaattattccact

SEQ ID NO: 92460 - DNA, 120 bp, Artificial Sequence
  ENSG00000088766_38 (sequence is synthesized)
taaaatttctatttgtgaaaacagcagtttgtggtaaggctgaatgacatattattgtattcataatgcatattagtactcttcagaatcccagttaaaattattttatgtttgattttc

SEQ ID NO: 92461 - DNA, 120 bp, Artificial Sequence
  ENSG00000088766_39 (sequence is synthesized)
gagaaggatgaaaacaaattctttggcttatatgttaattagagagtggaaggcaaatccaagttaatttctacttagatttatgtccactgaacttagatctgtgtgtatttgttctgc

SEQ ID NO: 92462 - DNA, 120 bp, Artificial Sequence
  ENSG00000088766_40 (sequence is synthesized)
tatttattttgtattattatattttgtattattatattgtttctggtttaccatctggtaaattcttatttctggtttaagtcaatttctagaatattctgttaagtttaccgttttcag

SEQ ID NO: 92463 - DNA, 120 bp, Artificial Sequence
  ENSG00000088766_41 (sequence is synthesized)
atgctaataaaacttgtccatgatgtctggctttgtgggctatgtgatctctgttacagctactcagctctgctgttgtagtgtgaaagcagccacagaaaatatttaaattattccact

SEQ ID NO: 92464 - DNA, 120 bp, Artificial Sequence
  ENSG00000088782_0 (sequence is synthesized)
gcataagaatctaagtctctgaggaaggtagcatagtgtgcagttcactggaccaaaagctttggctgcacctcttctggaaagcctggccatggggctcttcatgatcattgcaattct

SEQ ID NO: 92465 - DNA, 120 bp, Artificial Sequence
  ENSG00000088782_1 (sequence is synthesized)
gctgttccagaaacccacagtaaccgaacaacttaagaagtgctggaataactatgtacaaggacattgcaggaaaatctgcagagtaaatgaagtgcctgaggcactatgtgaaaatgg

SEQ ID NO: 92466 - DNA, 120 bp, Artificial Sequence
  ENSG00000088782_2 (sequence is synthesized)
caaagccacctcgtccaaagccagcaacacttgcactgactcttcaagactatgttacaataatagaaaatttcccaagcctgaagacacagtctacataaatcaaatacaatttcgttt

SEQ ID NO: 92467 - DNA, 120 bp, Artificial Sequence
  ENSG00000088782_3 (sequence is synthesized)
tcacttgcttctcaacctagtctaataaactaaggtgatgagatatacatcttcttccttttggtttcttgatccttaaaatgaccttcgagcatattctaataaagtgcattgccagtt

SEQ ID NO: 92468 - DNA, 80 bp, Artificial Sequence
  ENSG00000088808_0 (sequence is synthesized)
aggctgtcgggctggggctgaggctgaggctgaggttgaggcggcggcggcggcggccgggtgcccgggacagcgacgca

SEQ ID NO: 92469 - DNA, 120 bp, Artificial Sequence
  ENSG00000088808_1 (sequence is synthesized)
gccggagagcacggcggcgggagcgcggccttaggaggcggccggagcggtgggcacagctcggcgcggagcgtcctgtcaggcggcggccgagggcgtcgcggactctccccgcgatga

SEQ ID NO: 92470 - DNA, 120 bp, Artificial Sequence
  ENSG00000088808_2 (sequence is synthesized)
gccgagggcgtcgcggactctccccgcgatgatgccgatgatattaactgttttcttgagcaacaatgaacagattttaacagaagttcctataacaccggaaacaacctgtcgagatgt

SEQ ID NO: 92471 - DNA, 120 bp, Artificial Sequence
  ENSG00000088808_3 (sequence is synthesized)
tgtagaattttgcaaggaacctggagaaggcagctgccatttagctgaagtgtggaggggaaatgaacgtcccataccctttgatcatatgatgtacgaacatcttcagaaatggggtcc

SEQ ID NO: 92472 - DNA, 120 bp, Artificial Sequence
  ENSG00000088808_4 (sequence is synthesized)
acggagggaagaagtgaaatttttccttcgacacgaggactccccaactgagaacagtgaacaaggtggccgtcagacccaagagcaacgaactcagagaaatgtaataaatgtacctgg

SEQ ID NO: 92473 - DNA, 120 bp, Artificial Sequence
  ENSG00000088808_5 (sequence is synthesized)
agaaaaacgtactgaaaatggggttgggaatccacgtgttgaacttaccctctcagagctccaagatatggcagctaggcaacagcagcagattgaaaatcagcagcagatgttggttgc

SEQ ID NO: 92474 - DNA, 120 bp, Artificial Sequence
  ENSG00000088808_6 (sequence is synthesized)
caaggaacagcgtttacattttctaaagcaacaggagcgccgtcagcagcagtctatttctgaaaatgaaaagcttcagaaattgaaagaacgagttgaagcccaggagaacaagctgaa

SEQ ID NO: 92475 - DNA, 120 bp, Artificial Sequence
  ENSG00000088808_7 (sequence is synthesized)
gaaaattcgtgcaatgagaggacaagtcgactacagcaaaatcatgaacggcaatctgtctgctgaaatagaaaggttcagtgccatgttccaggaaaagaagcaggaagtacagactgc

SEQ ID NO: 92476 - DNA, 120 bp, Artificial Sequence
  ENSG00000088808_8 (sequence is synthesized)
aattttaagggttgatcagcttagtcagcaattggaagatttaaagaaaggaaaactgaatgggttccagtcttacaatggcaaattgacgggaccagcggcggtggagttaaaaagact

SEQ ID NO: 92477 - DNA, 120 bp, Artificial Sequence
  ENSG00000088808_9 (sequence is synthesized)
gtaccaagaactacagattcgtaaccaacttaaccaggaacaaaattcaaaacttcagcagcagaaggaactcttaaataagcgcaacatggaggtggccatgatggacaagcgaatcag

SEQ ID NO: 92478 - DNA, 120 bp, Artificial Sequence
  ENSG00000088808_10 (sequence is synthesized)
tgaactgcgtgaacgtctctatgggaaaaaaattcagctgaaccgtgtgaatggcacgtcatcaccacagtcccctctgagcacatcgggcagggtcgctgctgtggggccttatatcca

SEQ ID NO: 92479 - DNA, 120 bp, Artificial Sequence
  ENSG00000088808_11 (sequence is synthesized)
ggttcccagtgccggaagctttcctgtgctgggggaccctataaagccccagtctctcagtattgcctcaaatgctgctcatggaagatccaaatccgctaatgatggaaactggccaac

SEQ ID NO: 92480 - DNA, 120 bp, Artificial Sequence
  ENSG00000088808_12 (sequence is synthesized)
attaaaacagaattctagctcttccgtgaaaccagtgcaggtggccggtgcagactggaaggatccgagcgtggaggggtctgtcaagcagggcactgtctccagccagcctgtgccctt

SEQ ID NO: 92481 - DNA, 120 bp, Artificial Sequence
  ENSG00000088808_13 (sequence is synthesized)
ctcagcactgggacccacggagaagccgggcatcgagattggtaaagtgccacctcccatcccgggtgtaggcaagcagctgcctccaagctatgggacatacccaagtcctacacctct

SEQ ID NO: 92482 - DNA, 120 bp, Artificial Sequence
  ENSG00000088808_14 (sequence is synthesized)
gggtcctgggtcgacaagctccctggaaaggaggaaggaaggcagcttgcccaggcccagtgcaggcctgccaagtcgacagaggcccaccctgctgcccgccacaggcagcacccccca

SEQ ID NO: 92483 - DNA, 120 bp, Artificial Sequence
  ENSG00000088808_15 (sequence is synthesized)
gccaggctcctcacaacagattcagcagaggatttccgtaccgccaagtcccacgtacccgccagcgggaccacctgcatttccagctggggacagcaagcctgaactcccactgacagt

SEQ ID NO: 92484 - DNA, 120 bp, Artificial Sequence
  ENSG00000088808_16 (sequence is synthesized)
ggccattaggcctttcctggctgataaagggtcaaggccacagtctcccaggaaaggaccccagacagtgaattcaagttccatatactccatgtacctccagcaagccacaccacctaa

SEQ ID NO: 92485 - DNA, 120 bp, Artificial Sequence
  ENSG00000088808_17 (sequence is synthesized)
gaattaccagccggcagcacacagcgccttaaataagtcagttaaagcagtgtatggtaagcccgttttaccttcgggttcaacctctccatcgccgctgccgtttcttcacgggtcact

SEQ ID NO: 92486 - DNA, 120 bp, Artificial Sequence
  ENSG00000088808_18 (sequence is synthesized)
gtccacgggcacaccacagcctcagccaccttcagaaagtactgagaaagagcctgagcaggatggccccgccgcccccgcagatggcagcaccgtggagagcctgccacggccactcag

SEQ ID NO: 92487 - DNA, 120 bp, Artificial Sequence
  ENSG00000088808_19 (sequence is synthesized)
ccccaccaagctcacgcccatcgtgcattcgccactgcgctaccagagtgatgcagacctggaggccctccgcaggaagctggccaacgcgccccggcccctgaaaaagcgcagctccat

SEQ ID NO: 92488 - DNA, 120 bp, Artificial Sequence
  ENSG00000088808_20 (sequence is synthesized)
cacagagcccgagggccccggcgggcccaacatccagaagctgctgtaccagcgcttcaacaccctggccggtggcatggagggcacccctttctaccagcccagcccctcccaggactt

SEQ ID NO: 92489 - DNA, 120 bp, Artificial Sequence
  ENSG00000088808_21 (sequence is synthesized)
catgggcaccttggccgatgtggacaatggaaacaccaatgccaatggaaacctggaagagctcccccctgcccagcccacagccccactccccgctgagcctgccccgtcatcagatgc

SEQ ID NO: 92490 - DNA, 120 bp, Artificial Sequence
  ENSG00000088808_22 (sequence is synthesized)
gccacggtccccaccacggagcagatcccgagtcctgtggctgaggccccatctccaggggaagagcaggtccctccagcacctcttccccctgccagccaccctcctgccacctccacg

SEQ ID NO: 92491 - DNA, 120 bp, Artificial Sequence
  ENSG00000088808_23 (sequence is synthesized)
aacaagcggaccaacttgaagaagcccaactcggagcggacggggcacgggctgagagtccggtttaaccccctggcactgctcctagacgcgtctctggaaggagagttcgatctggtg

SEQ ID NO: 92492 - DNA, 120 bp, Artificial Sequence
  ENSG00000088808_24 (sequence is synthesized)
cagaggatcatctatgaggtggaagatcccagcaagcccaacgacgaagggatcaccccactgcacaacgccgtctgcgccggccaccatcacatcgtgaagttcctgctggattttggt

SEQ ID NO: 92493 - DNA, 120 bp, Artificial Sequence
  ENSG00000088808_25 (sequence is synthesized)
gtcaacgtgaatgctgctgatagtgatggatggacgccgctgcactgcgctgcctcttgtaacagcgttcacctctgcaaacagctggtggagagtggtgccgccatttttgcctcaacc

SEQ ID NO: 92494 - DNA, 120 bp, Artificial Sequence
  ENSG00000088808_26 (sequence is synthesized)
ataagcgacattgaaactgctgcagacaagtgtgaggagatggaggaaggctacatccagtgctcccagtttctatatggggtgcaggaaaagctgggtgtgatgaacaaaggtgtggcg

SEQ ID NO: 92495 - DNA, 120 bp, Artificial Sequence
  ENSG00000088808_27 (sequence is synthesized)
tatgctctgtgggactacgaggcccagaacagtgacgagctgtccttccacgaaggggacgccctcaccatcctgaggcgcaaggacgaaagcgagactgagtggtggtgggctcgcctt

SEQ ID NO: 92496 - DNA, 120 bp, Artificial Sequence
  ENSG00000088808_28 (sequence is synthesized)
ggagaccgggagggctatgtgcccaaaaacctgctggggctgtatccacggatcaaaccccgacagcgaacactcgcctgaacttccttttggagcaccgcatggtcttgccagctacca

SEQ ID NO: 92497 - DNA, 120 bp, Artificial Sequence
  ENSG00000088808_29 (sequence is synthesized)
ggagccacttaagagattattgtgctgttttccaggaaagctgcagctagaaaatggtcttaatggtgctcactttagcagacagcgtccacaatgtgaatcctacagtttccaggtgag

SEQ ID NO: 92498 - DNA, 120 bp, Artificial Sequence
  ENSG00000088808_30 (sequence is synthesized)
gccctttctccagtttgcccattaactgggagaggtactttcgcctccaaggactgaattttgccaattactataaatccaaataaatacccactttcaaaacacccacccctcttgcca

SEQ ID NO: 92499 - DNA, 120 bp, Artificial Sequence
  ENSG00000088808_31 (sequence is synthesized)
ttaagaagtcccataacccccggttggttgccagtgaagacagaagctcttactgacttggccccgaggccatcaccccctccagcagtgaacactgtccgccgctgtgaggcctgctcc

SEQ ID NO: 92500 - DNA, 120 bp, Artificial Sequence
  ENSG00000088808_32 (sequence is synthesized)
cctgcgaccgccctgccccccgtcaccgaatcggacactcatcctttctcacacttcccacacatgatccttcttcccttcatcaccaaaggagcctctgtatggaaacatgtccagtgt

SEQ ID NO: 92501 - DNA, 120 bp, Artificial Sequence
  ENSG00000088808_33 (sequence is synthesized)
tgctgcccagtgtgtatgcctcccagtacccactctgctcggccgccttgggggttccgcttcctgttccagttcacctaaaggctgattgtgcaggcccagcactgtggctggactgcc

SEQ ID NO: 92502 - DNA, 120 bp, Artificial Sequence
  ENSG00000088808_34 (sequence is synthesized)
gcgccacgggcaccaggacccctaagaccaagtgacaactgggagagcctcagcatatactcttctcctccgatctcacagcctgtcatgctgctcagtgtggttctcacccctgcaagc

SEQ ID NO: 92503 - DNA, 120 bp, Artificial Sequence
  ENSG00000088808_35 (sequence is synthesized)
tcaaattcagttccctgaatggagtcaggtgctggaggccgtggcagcggagggtggttggggttggggctgggggtggactggtgtgagggcagaccagggccaggtagacggggctgt

SEQ ID NO: 92504 - DNA, 120 bp, Artificial Sequence
  ENSG00000088808_36 (sequence is synthesized)
ttggtgcctgaaggatggcagacgcctggtgtcaggaggggccgccaccaaggagcagcagctggggcagaggagctggggtcaggggccacccctctctgccgatctccctgcctgggc

SEQ ID NO: 92505 - DNA, 120 bp, Artificial Sequence
  ENSG00000088808_37 (sequence is synthesized)
tggctgtgaggccacctttgtcccaggcccagcctcaaggcaaggagggcgcttcactgaggtgtgaattgtacgtacaggctttttatataccaaaagtattttttgactagaccattc

SEQ ID NO: 92506 - DNA, 120 bp, Artificial Sequence
  ENSG00000088808_38 (sequence is synthesized)
aaagctacccgaactatgttggaaattttttttttctcattaaaatacaggcccttaggctctatttttcatgtatgagtcgtgtgtaatttatgtaaaaatgtgtgtacagactcactg

SEQ ID NO: 92507 - DNA, 120 bp, Artificial Sequence
  ENSG00000088808_39 (sequence is synthesized)
atgcagcactgtagcccatcaccttggagcactgactgtacatagtgtggtgaagaaaagtgaacgcccttgtagagcagcccgaccacaggagcatggccgctgccagcccagacgctg

SEQ ID NO: 92508 - DNA, 120 bp, Artificial Sequence
  ENSG00000088808_40 (sequence is synthesized)
ctgacgctgtgtaaatgtgcacaataaacccgtctcaccccggcggctgtgagtcttctttctggacccagactgcgctgtggcacgagggttcaggtgatctggacacaggaaggcgag

SEQ ID NO: 92509 - DNA, 120 bp, Artificial Sequence
  ENSG00000088808_41 (sequence is synthesized)
gccttgtccgtatgttcaaaatagtttttaatcataagctttatatacaaattgctgtacagtcatcttaataaagtgaaatagtgagtgaaaagtacaaaacacaaagcccccacgttc

SEQ ID NO: 92510 - DNA, 120 bp, Artificial Sequence
  ENSG00000088808_42 (sequence is synthesized)
cccttggtgaagtatcaaaggatcactcacagcccagaagccccaaattagtgacaaggtaagtggacaagtctgtgaaacaggctaaggcaagtgctgtaaactggctattagaggcga

SEQ ID NO: 92511 - DNA, 120 bp, Artificial Sequence
  ENSG00000088808_43 (sequence is synthesized)
acaggctccactgcagaccagaagcctgagttcctactgcccaaactggttctgtggaagaattaaatgaaatgaatattgatgggccagaaccttctagtagacctgcgaactcataaa

SEQ ID NO: 92512 - DNA, 120 bp, Artificial Sequence
  ENSG00000088808_44 (sequence is synthesized)
aatggtatatattatgctaaaaatagtttagcagtagtgtagctcagtctctcccacccccaattaagtattgacaatacacaaattctaaaacatgaagctgtttaaagcattaataaa

SEQ ID NO: 92513 - DNA, 120 bp, Artificial Sequence
  ENSG00000088808_45 (sequence is synthesized)
acagccgtgtccctctgtgcgtgagccagggactcaggcctcagacagggctctcccttgtagtgagcagagtggccctggcccttatttgaggtggtcacctgggcgctgctactgcta

SEQ ID NO: 92514 - DNA, 120 bp, Artificial Sequence
  ENSG00000088808_46 (sequence is synthesized)
ccactccagggctgcttcgcggagccactgtctttgggctttagctcccaccactccttcccagcaggcgtgggttcttagacttcagtggaccacctttaactggaaagcgtgcttcct

SEQ ID NO: 92515 - DNA, 120 bp, Artificial Sequence
  ENSG00000088808_47 (sequence is synthesized)
atttttgcagagatgcgtctccacccaaaggtcctaggtacctttgagcaattgtgaaagccataacccctcaccccgaaatgacctgtcctcatgcatatagaatcttacaatcacagg

SEQ ID NO: 92516 - DNA, 120 bp, Artificial Sequence
  ENSG00000088808_48 (sequence is synthesized)
ggttatggatcctatttagagcctatattgaaatcttgaggacgtcagtagttctctagaatccctgttccaggcgcctctgttcctgagcagtgttatgtgaacagtgtcctctgtctg

SEQ ID NO: 92517 - DNA, 120 bp, Artificial Sequence
  ENSG00000088808_49 (sequence is synthesized)
gcttagacagtaccggctacagcccttatcccgactccacgggtgtgagcacagaggctgagtcacctgcccgaagcagcacagcgaggaggaagagtatcctgagtaagagggaagctg

SEQ ID NO: 92518 - DNA, 120 bp, Artificial Sequence
  ENSG00000088808_50 (sequence is synthesized)
catgtggatcacggggaagttgctctgccctcacatcagctcctcatgtgtacagctccagatgggtgggtgttgtcggagaattgctcataggaagctacagttccttctccacagtct

SEQ ID NO: 92519 - DNA, 70 bp, Artificial Sequence
  ENSG00000088808_51 (sequence is synthesized)
aaatggggtaagtgacagtgaattaaattgaattttaaaaattgatggctaggtgcagtggtgagggcag

SEQ ID NO: 92520 - DNA, 120 bp, Artificial Sequence
  ENSG00000088808_52 (sequence is synthesized)
aggctgtcgggctggggctgaggctgaggctgagcctgccccgtcatcagatgccaatgataatgagttaccttcccccgaaccagaggagctcatctgtccccaaaccacccaccaaac

SEQ ID NO: 92521 - DNA, 120 bp, Artificial Sequence
  ENSG00000088808_53 (sequence is synthesized)
actctgcaggcgcattcccgtagccttcgcggttgtactgaggaaaggtgccgagtgcacggatttggagagccatcttaggaattcccttttcccgtatctgcaatgttgatgatatta

SEQ ID NO: 92522 - DNA, 120 bp, Artificial Sequence
  ENSG00000088808_54 (sequence is synthesized)
gttacaattcaacaagaagaagacaaccaacttaaaaatagacatctcatcaaagaagagagacaagtggctaacaggcatatgaaaagatgcttaacatttccagtcattggggaaacg

SEQ ID NO: 92523 - DNA, 120 bp, Artificial Sequence
  ENSG00000088808_55 (sequence is synthesized)
caaattgaaaccacagtgagacaccattacacatccacaagaattaagctataagcaaaaagacaaatattagcaagaatgtggacacactggtgtccattgctggtggaaatgtaaaat

SEQ ID NO: 92524 - DNA, 120 bp, Artificial Sequence
  ENSG00000088808_56 (sequence is synthesized)
agtgcaatcgctttggagaacagtttggcagtcttttaaaaagctaaacataaactcaccatacaagccaggaattccactcctaggtatctactcaagagaaatgaaatatctgctcgc

SEQ ID NO: 92525 - DNA, 120 bp, Artificial Sequence
  ENSG00000088808_57 (sequence is synthesized)
acagacttctatgcaaatgtgcacagcagcactgttactcataccagctaagaaatagcccaaatgtccattaactggtgaatggataaacaaattgtggtgtatccatctgactgaata

SEQ ID NO: 92526 - DNA, 120 bp, Artificial Sequence
  ENSG00000088808_58 (sequence is synthesized)
tgatgcagcattaaaaagaaaccactcaacacagatgaacctcaaaaacctcacagcaggtgtgaaagactacctatggtatgacttcacttatatgaagcgtccggaagaaagttggga

SEQ ID NO: 92527 - DNA, 120 bp, Artificial Sequence
  ENSG00000088808_59 (sequence is synthesized)
ataaggaaaacaggcgtgttctagacaattaggaagcacggaagagagaattagagcaagaacacccatcatttcatccttgaaagacagctgttgccagggtttccttgcctttttttc

SEQ ID NO: 92528 - DNA, 120 bp, Artificial Sequence
  ENSG00000088808_60 (sequence is synthesized)
cagccttttctcttgatgattttgttaaaaacgtggctgtggttatgctctttctgtgcctcgtcattaacattgcagtctaagcattctgtgaatcattccatcttccccttctcatat

SEQ ID NO: 92529 - DNA, 120 bp, Artificial Sequence
  ENSG00000088808_61 (sequence is synthesized)
ggaatgcctcgccaggacccacggggcttgactagagctgtctcagaagccgctgcctggagcctgcatcataacttcacagcccagcagtgtatgcagctggggttgcggtgcggctgc

SEQ ID NO: 92530 - DNA, 120 bp, Artificial Sequence
  ENSG00000088808_62 (sequence is synthesized)
atggtacgcaggggaggcctggggccacagtggtgctgtctgctgtggtactgccatggcaacagtcagccggtgccagagaagcttcagcacagctttctgtttgttttttttaagaca

SEQ ID NO: 92531 - DNA, 120 bp, Artificial Sequence
  ENSG00000088808_63 (sequence is synthesized)
ctacaggcttgtcccaccacagccagctaattttttgtactttttttttttttttgtagagacagtgtttcgccatgttgcccagggtggtctcgaacttctgggctccagcgatctgcc

SEQ ID NO: 92532 - DNA, 120 bp, Artificial Sequence
  ENSG00000088808_64 (sequence is synthesized)
aagtgctgggatcacaggtgtgagccaccgtgcctggcagcacagcattctcgagctgttccaccttcttcaggggcagccaggatgtctcactcgagtgaaggtcacactgccccttgt

SEQ ID NO: 92533 - DNA, 120 bp, Artificial Sequence
  ENSG00000088808_65 (sequence is synthesized)
tcacactgccccttgttttcattcctgaaaacatgtttgaaagtccatgttgttagaaggattctgtgccagattcccaagaaaacaaaatgacttggctgtgctttgcatagatgttct

SEQ ID NO: 92534 - DNA, 120 bp, Artificial Sequence
  ENSG00000088808_66 (sequence is synthesized)
gtacccttgcttctggaagcagggccagctcctttcctggggtggcctggggccctggccattccccggaaacatttgatgaatgaggctcatgtcctaattaagctgctttagccaggg

SEQ ID NO: 92535 - DNA, 120 bp, Artificial Sequence
  ENSG00000088808_67 (sequence is synthesized)
ccgcattttccaagagctggaacatcttctctattctgagtattaaacagtcacaagtcatttattccacacattacttgagaacatactatgtgccctacactggactctaggtttgaa

SEQ ID NO: 92536 - DNA, 120 bp, Artificial Sequence
  ENSG00000088808_68 (sequence is synthesized)
attatccatgaaaacagccatgtgatgccctctttggcccaagctcccacaacagagccaagcaacaaactctcaggctgtgtggcagggctaggggaggcacagcagcccccaggtgag

SEQ ID NO: 92537 - DNA, 120 bp, Artificial Sequence
  ENSG00000088808_69 (sequence is synthesized)
tcccgccagtgtgaggaggaggctgccgtcacagtggcaccaccacagggaagggaagctccccatggtcaccacaactgggtctcagaagcagagtgtcccacagaagggccctttctt

SEQ ID NO: 92538 - DNA, 120 bp, Artificial Sequence
  ENSG00000088808_70 (sequence is synthesized)
gggaacccacaagtagctgctcagtcagggctcagttgtgtgtagtttgttcattaccatccaagagcagtcacagctgctctagctagtgactttagaaatctgttctggctgtgattg

SEQ ID NO: 92539 - DNA, 120 bp, Artificial Sequence
  ENSG00000088808_71 (sequence is synthesized)
ctaagcgtcaccttaagaacagcacactcttgccctggggctcaggagctcgtttgtcctgtctgtcctgcaggacttagaaagggccggcagcaggagcagcagctgggccgggcaggg

SEQ ID NO: 92540 - DNA, 120 bp, Artificial Sequence
  ENSG00000088808_72 (sequence is synthesized)
gaggtatcgggtgggggccctagtcttcaatagtgtctcatctccctcgctggcctctgtggggcctgctgagagcagcctcggcagcagcacgactgtgtcctgttcctcgagcagggt

SEQ ID NO: 92541 - DNA, 120 bp, Artificial Sequence
  ENSG00000088812_0 (sequence is synthesized)
acagccccgccccgcacggccaggcgaagcggagccggccgtgcggtgtgtgtgtatgtgttcgcggggcgccgtctcagccccgggaagatggtggctgcagcggcggcaactgaggca

SEQ ID NO: 92542 - DNA, 120 bp, Artificial Sequence
  ENSG00000088812_1 (sequence is synthesized)
gcaactgaggcaaggctgaggaggaggacggcggcgacggcagcgctcgcgggcaggagcggcgggccgcactgggactgggacgtgaccagggctgggaggccggggctgggggccggg

SEQ ID NO: 92543 - DNA, 120 bp, Artificial Sequence
  ENSG00000088812_2 (sequence is synthesized)
cggctgctgtctccaccgctgcggccacggctgctgctgctgctgttgttgctctcgccgccgctgctgctgctgctgctgccctgtgaggccgaggccgcggcggcggcggcggcggtg

SEQ ID NO: 92544 - DNA, 120 bp, Artificial Sequence
  ENSG00000088812_3 (sequence is synthesized)
tcgggctcagccgcagccgaggccaaggaatgtgaccggccctgtgtcaacggcggtcgctgcaaccctggcaccggccagtgcgtctgccccgccggctgggtgggcgagcaatgccag

SEQ ID NO: 92545 - DNA, 120 bp, Artificial Sequence
  ENSG00000088812_4 (sequence is synthesized)
cactgcgggggccgcttcagactaactggatcttctgggtttgtgacagatggacctggaaattataaatacaaaacgaagtgcacgtggctcattgaaggacagccaaatagaataatg

SEQ ID NO: 92546 - DNA, 120 bp, Artificial Sequence
  ENSG00000088812_5 (sequence is synthesized)
agacttcgtttcaatcattttgctacagagtgtagttgggaccatttatatgtttatgatggggactcaatttatgcaccgctagttgctgcatttagtggcctcattgttcctgagaga

SEQ ID NO: 92547 - DNA, 120 bp, Artificial Sequence
  ENSG00000088812_6 (sequence is synthesized)
gatggcaatgagactgtccctgaggttgttgccacatcaggttatgccttgctgcatttttttagtgatgctgcttataatttgactggatttaatattacttacagttttgatatgtgt

SEQ ID NO: 92548 - DNA, 120 bp, Artificial Sequence
  ENSG00000088812_7 (sequence is synthesized)
ccaaataactgctcaggccgaggagagtgtaagatcagtaatagcagcgatactgttgaatgtgaatgttctgaaaactggaaaggtgaagcatgtgacattcctcactgtacagacaac

SEQ ID NO: 92549 - DNA, 120 bp, Artificial Sequence
  ENSG00000088812_8 (sequence is synthesized)
tgtggttttcctcatcgaggcatctgcaattcaagtgatgtcagaggatgctcctgcttctcagactggcagggtcctggatgttcagttcctgtaccagctaaccagtcattttggact

SEQ ID NO: 92550 - DNA, 120 bp, Artificial Sequence
  ENSG00000088812_9 (sequence is synthesized)
cgagaggaatattctaacttaaagctccccagagcatctcataaagctgtggtcaatggaaacattatgtgggttgttggaggatatatgttcaaccactcagattataacatggttcta

SEQ ID NO: 92551 - DNA, 120 bp, Artificial Sequence
  ENSG00000088812_10 (sequence is synthesized)
gcgtatgaccttgcttctagggagtggcttccactaaaccgttctgtgaacaatgtggttgttagatatggtcattctttggcattatacaaggataaaatttacatgtatggaggaaaa

SEQ ID NO: 92552 - DNA, 120 bp, Artificial Sequence
  ENSG00000088812_11 (sequence is synthesized)
attgattcaactgggaatgtgaccaatgagttgagagtttttcacattcataatgagtcatgggtgttgttgacccctaaggcaaaggagcagtatgcagtggttgggcactctgcacac

SEQ ID NO: 92553 - DNA, 120 bp, Artificial Sequence
  ENSG00000088812_12 (sequence is synthesized)
attgttacactgaagaatggccgagtggtcatgctggtcatctttggtcactgccctctctatggatatataagcaatgtgcaggaatatgatttggataagaacacatggagtatatta

SEQ ID NO: 92554 - DNA, 120 bp, Artificial Sequence
  ENSG00000088812_13 (sequence is synthesized)
cacacccagggtgcccttgtgcaagggggttacggccatagcagtgtttacgaccataggaccagggccctatacgttcatggtggctacaaggctttcagtgccaataagtaccggctt

SEQ ID NO: 92555 - DNA, 120 bp, Artificial Sequence
  ENSG00000088812_14 (sequence is synthesized)
gcagatgatctctaccgatatgatgtggatacccagatgtggaccattcttaaggacagccgatttttccgttacttgcacacagctgtgatagtgagtggaaccatgctggtgtttgga

SEQ ID NO: 92556 - DNA, 120 bp, Artificial Sequence
  ENSG00000088812_15 (sequence is synthesized)
ggaaacacacacaatgacacatctatgagccatggcgccaaatgcttctcttcagatttcatggcctatgacattgcctgtgaccgctggtcagtgcttcccagacctgatctccaccat

SEQ ID NO: 92557 - DNA, 120 bp, Artificial Sequence
  ENSG00000088812_16 (sequence is synthesized)
gatgtcaacagatttggccattcagcagtcttacacaacagcaccatgtatgtgttcggtggtttcaatagtctcctcctcagcgacatcctggtattcacctcggaacagtgtgatgcg

SEQ ID NO: 92558 - DNA, 120 bp, Artificial Sequence
  ENSG00000088812_17 (sequence is synthesized)
catcggagtgaagccgcttgtttagcagcaggacctggtattcggtgtgtgtggaacacagggtcgtctcagtgtatctcgtgggcgctggcaactgatgaacaagaagaaaagttaaaa

SEQ ID NO: 92559 - DNA, 120 bp, Artificial Sequence
  ENSG00000088812_18 (sequence is synthesized)
tcagaatgtttttccaaaagaactcttgaccatgacagatgtgaccagcacacagattgttacagctgcacagccaacaccaatgactgccactggtgcaatgaccattgtgtccccagg

SEQ ID NO: 92560 - DNA, 120 bp, Artificial Sequence
  ENSG00000088812_19 (sequence is synthesized)
aaccacagctgctcagaaggccagatctccatttttaggtatgagaattgccccaaggataaccccatgtactactgtaacaagaagaccagctgcaggagctgtgccctggaccagaac

SEQ ID NO: 92561 - DNA, 120 bp, Artificial Sequence
  ENSG00000088812_20 (sequence is synthesized)
tgccagtgggagccccggaatcaggagtgcattgccctgcccgaaaatatctgtggcattggctggcatttggttggaaactcatgtttgaaaattactactgccaaggagaattatgac

SEQ ID NO: 92562 - DNA, 120 bp, Artificial Sequence
  ENSG00000088812_21 (sequence is synthesized)
aatgctaaattgttctgtaggaaccacaatgcccttttggcttctcttacaacccagaagaaggtagaatttgtccttaagcagctgcgaataatgcagtcatctcagagcatgtccaag

SEQ ID NO: 92563 - DNA, 120 bp, Artificial Sequence
  ENSG00000088812_22 (sequence is synthesized)
ctcaccttaaccccatgggtcggccttcggaagatcaatgtgtcctactggtgctgggaagatatgtccccatttacaaatagtttactacagtggatgccgtctgagcccagtgatgct

SEQ ID NO: 92564 - DNA, 120 bp, Artificial Sequence
  ENSG00000088812_23 (sequence is synthesized)
ggattctgtggaattttatcagaacccagtactcggggactgaaggctgcaacctgcatcaacccactcaatggtagtgtctgtgaaaggcctgcaaaccacagtgctaagcagtgccgg

SEQ ID NO: 92565 - DNA, 120 bp, Artificial Sequence
  ENSG00000088812_24 (sequence is synthesized)
acaccatgtgccttgaggacagcatgtggagattgcaccagcggcagctctgagtgcatgtggtgcagcaacatgaagcagtgtgtggactccaatgcctacgtggcctccttccctttt

SEQ ID NO: 92566 - DNA, 120 bp, Artificial Sequence
  ENSG00000088812_25 (sequence is synthesized)
ggccagtgtatggaatggtatacgatgagcacctgcccccctgaaaattgttcaggctactgtacctgtagtcattgcttggagcaaccaggctgtggctggtgtactgatcccagcaat

SEQ ID NO: 92567 - DNA, 120 bp, Artificial Sequence
  ENSG00000088812_26 (sequence is synthesized)
actggcaaagggaaatgcatagagggttcctataaaggaccagtgaagatgccttcgcaagcccctacaggaaatttctatccacagcccctgctcaattccagcatgtgtctagaggac

SEQ ID NO: 92568 - DNA, 120 bp, Artificial Sequence
  ENSG00000088812_27 (sequence is synthesized)
agcagatacaactggtctttcattcactgtccagcttgccaatgcaacggccacagtaaatgcatcaatcagagcatctgtgagaagtgtgagaacctgaccacaggcaagcactgcgag

SEQ ID NO: 92569 - DNA, 120 bp, Artificial Sequence
  ENSG00000088812_28 (sequence is synthesized)
acctgcatatctggcttctacggtgatcccaccaatggagggaaatgtcagccatgcaagtgcaatgggcacgcgtctctgtgcaacaccaacacgggcaagtgcttctgcaccaccaag

SEQ ID NO: 92570 - DNA, 120 bp, Artificial Sequence
  ENSG00000088812_29 (sequence is synthesized)
ggcgtcaagggggacgagtgccagctatgtgaggtagaaaatcgataccaaggaaaccctctcagaggaacatgttattatactcttcttattgactatcagttcacctttagtctatcc

SEQ ID NO: 92571 - DNA, 120 bp, Artificial Sequence
  ENSG00000088812_30 (sequence is synthesized)
caggaagatgatcgctattacacagctatcaattttgtggctactcctgacgaacaaaacagggatttggacatgttcatcaatgcctccaagaatttcaacctcaacatcacctgggct

SEQ ID NO: 92572 - DNA, 120 bp, Artificial Sequence
  ENSG00000088812_31 (sequence is synthesized)
gccagtttctcagctggaacccaggctggagaagagatgcctgttgtttcaaaaaccaacattaaggagtacaaagatagtttctctaatgagaagtttgattttcgcaaccacccaaat

SEQ ID NO: 92573 - DNA, 120 bp, Artificial Sequence
  ENSG00000088812_32 (sequence is synthesized)
atcactttctttgtttatgtcagtaatttcacctggcccatcaaaattcagattgccttctctcagcacagcaattttatggacctggtacagttcttcgtgactttcttcagttgtttc

SEQ ID NO: 92574 - DNA, 120 bp, Artificial Sequence
  ENSG00000088812_33 (sequence is synthesized)
ctctctttgctcctggtggctgctgtggtttggaagatcaaacaaagttgttgggcctccagacgtagagagcaacttcttcgagagatgcaacagatggccagccgtccctttgcctct

SEQ ID NO: 92575 - DNA, 120 bp, Artificial Sequence
  ENSG00000088812_34 (sequence is synthesized)
gtaaatgtcgccttggaaacagatgaggagcctcctgatcttattggggggagtataaagactgttcccaaacccattgcactggagccgtgttttggcaacaaagccgctgtcctctct

SEQ ID NO: 92576 - DNA, 120 bp, Artificial Sequence
  ENSG00000088812_35 (sequence is synthesized)
gtgtttgtgaggctccctcgaggcctgggtggcatccctcctcctgggcagtcaggtcttgctgtggccagcgccctggtggacatttctcagcagatgccgatagtgtacaaggagaag

SEQ ID NO: 92577 - DNA, 120 bp, Artificial Sequence
  ENSG00000088812_36 (sequence is synthesized)
gagaaaccggaagcagcagccccctgcacagcctgggacctgcatctgatgctggggccagggactctcccacgcacgagctagtgagtggcacaccagagccatctgcagggaagggcg

SEQ ID NO: 92578 - DNA, 120 bp, Artificial Sequence
  ENSG00000088812_37 (sequence is synthesized)
tggcggggaaatggctgtgcggtgcgggacggaagactggaaaccctcaaagcatctgactcacctgcatgatcacaagctttctttgacggtttctcccatccgtgttccagcatctaa

SEQ ID NO: 92579 - DNA, 120 bp, Artificial Sequence
  ENSG00000088812_38 (sequence is synthesized)
ccttttacttttgcataggaaatacttgatttaattacaggtccagggatgagctgatggttgctggaggaggccagtgtagagccagtgagagaactaggaatgacactcaggttcact

SEQ ID NO: 92580 - DNA, 120 bp, Artificial Sequence
  ENSG00000088812_39 (sequence is synthesized)
gtggaaaactgttcttgggactgtctcaactgtgcaaaaaacaaaagatggagtgtttacaagtagacattcgtcatcagttgttcttgaacatggtcttttaaaaactagtcagatgaa

SEQ ID NO: 92581 - DNA, 120 bp, Artificial Sequence
  ENSG00000088812_40 (sequence is synthesized)
ttgttttcatctgaagcctgctatcttttttaaaagatgtgctatttattcttgcacgatttaggcaattatctctcttccagggagtacctttttttctagttgagaattaataatggt

SEQ ID NO: 92582 - DNA, 120 bp, Artificial Sequence
  ENSG00000088812_41 (sequence is synthesized)
ccatctcttttgatcatatcaagctaggatagaaggggggctattttaaatgtcaaggtcagcagtgttactttgaatgtaaactggtataataggtagttttctatagtaacttgatta

SEQ ID NO: 92583 - DNA, 120 bp, Artificial Sequence
  ENSG00000088812_42 (sequence is synthesized)
atttagtcttaatccatttgaaactctctcttcctttctctctgcctgtccctctccttctccatctcaccctccctctctcacacatacacacacaaacacatacacacaacactaagt

SEQ ID NO: 92584 - DNA, 120 bp, Artificial Sequence
  ENSG00000088812_43 (sequence is synthesized)
gcctagactttaaatagatctagcaattggaaagttagtaagcctaagtttttacataattgcattcctacattcttgtaaaatttaaatagctaccattggcaatctgctttttttcta

SEQ ID NO: 92585 - DNA, 120 bp, Artificial Sequence
  ENSG00000088812_44 (sequence is synthesized)
aaatctgatttgcagccaggaaagaattttctcacccaaggaacatttgatctagcagcagggatgagaggaaagcagaaatgaatgaactgtgaaagctcctgtttttattatcaaaaa

SEQ ID NO: 92586 - DNA, 120 bp, Artificial Sequence
  ENSG00000088812_45 (sequence is synthesized)
ggacactgtcaagaaggcgccccctgcccccacccccgtgtcaccctaggcctgataagcgatcagaggaaaggactcattcatgtcacgcttccttgagcagaaaagagcactgagagc

SEQ ID NO: 92587 - DNA, 120 bp, Artificial Sequence
  ENSG00000088812_46 (sequence is synthesized)
acttgggacccctggatcagagagcatctgtgtgtcctgcagcctcctctgaacttgtggttcattctcaggctggggtggactcagatgccaggaaagggacagcctcccattgtcagg

SEQ ID NO: 92588 - DNA, 120 bp, Artificial Sequence
  ENSG00000088812_47 (sequence is synthesized)
cagaagctgcccaaagcctggagaaggacttgtttgccctctttcccccaggaggggctcgacccacccaccctccctctcagaccaaggtggtggctgtgaggagggcagcaaatgctg

SEQ ID NO: 92589 - DNA, 120 bp, Artificial Sequence
  ENSG00000088812_48 (sequence is synthesized)
acaaggatgaaaagcacatggaaaaaaatggatgaggagggaaaactctgccaaatggaaaatgaccaaatttaagagggtgggacagtcccctgctcctctcccagagggcactgcttg

SEQ ID NO: 92590 - DNA, 120 bp, Artificial Sequence
  ENSG00000088812_49 (sequence is synthesized)
gaaattgtgttttccccatttatggtgctctgtattctggcattatgcagcagcctcccagaagctctcttctgcttcaaaacctgggatctctggcattaccctattgggatggaccgc

SEQ ID NO: 92591 - DNA, 120 bp, Artificial Sequence
  ENSG00000088812_50 (sequence is synthesized)
tggacagcaatgctcgagtttgtgaatttggagagatactcaaaagagctaaaactgcagcattttacctttaaatgcagtgcctagagagagagtattgtctcttccccaacactaacc

SEQ ID NO: 92592 - DNA, 120 bp, Artificial Sequence
  ENSG00000088812_51 (sequence is synthesized)
ccactcccatgaagaattgcctggaaagatgttttcaaggaatttgaaccataaaacactatctgatgcacagaacacctctactttgagactcacctctcataaagcttctttttcaca

SEQ ID NO: 92593 - DNA, 120 bp, Artificial Sequence
  ENSG00000088812_52 (sequence is synthesized)
ttactgttaaagaccagacgttctagaaaagacccctcctctcatgagctcccccatccctgctacagaacacagcacccatggcgcctgcagtggactggccccttaattcccacaggc

SEQ ID NO: 92594 - DNA, 120 bp, Artificial Sequence
  ENSG00000088812_53 (sequence is synthesized)
ccccccagcaaggccaaagggaggcccctgggtattgtcctcctacaaggaagatcctctttgtttgttcaaaggaccagttttcctaggccaaagaagtctcttccccatgttagtcct

SEQ ID NO: 92595 - DNA, 120 bp, Artificial Sequence
  ENSG00000088812_54 (sequence is synthesized)
atgccttgaaatatcatgcaccatgacccacagccatctggttatgtcttatttttttcctaaaagataatgtttatttttaaaaaggaaggaaggagcaagtgaagtttcattctgctc

SEQ ID NO: 92596 - DNA, 120 bp, Artificial Sequence
  ENSG00000088812_55 (sequence is synthesized)
cagcggtggggaagccgctgaatccacctgcttctcctttgcaaccgacagcaaacagctttctccggcctcagggcagaaaaagggaatggcagggagtaagaggcgctgggctcggag

SEQ ID NO: 92597 - DNA, 120 bp, Artificial Sequence
  ENSG00000088812_56 (sequence is synthesized)
cctgtttccaagaaggaattggttgtcatctggcagtgttgcgcgtcacaagagagcctgtatataaattaaaatagtcaagacaacactgaccttgcacttgtacataactatacagta

SEQ ID NO: 92598 - DNA, 120 bp, Artificial Sequence
  ENSG00000088812_57 (sequence is synthesized)
gtgtccagaatgttcagacattcggagtgtacataaaacagaaaaaatcttcatgtatttttattaaatataacaatgtctgagtttcacctaagatgtttttgtgccatatgctggata

SEQ ID NO: 92599 - DNA, 120 bp, Artificial Sequence
  ENSG00000088812_58 (sequence is synthesized)
tccaggttctcgccaggccccgatacatgaataacaaacccaagaaacgcatccccattgtgtgatgtgttcagatgcatctggcaccaattaggtatttcttaaaacaggactcatctg

SEQ ID NO: 92600 - DNA, 120 bp, Artificial Sequence
  ENSG00000088812_59 (sequence is synthesized)
tcagagtgcacatgaaaaatcaggcagggaatcgaaacgacagtgctggaggagactcaggaagcagaggcgtccctgccgctgcccttggccctgcaagcacatcatgaccctttctgg

SEQ ID NO: 92601 - DNA, 120 bp, Artificial Sequence
  ENSG00000088812_60 (sequence is synthesized)
cagcctcttggtgctctgggtagtgagggatgaccagtcttgtcctgagaaatgtttctcttagtctttaagttcaaagactaacctgtagcaatcagactttccaaaagggggttctcc

SEQ ID NO: 92602 - DNA, 120 bp, Artificial Sequence
  ENSG00000088812_61 (sequence is synthesized)
attttttgtagttttgtctaaatttttaatgaccatttcctggaatcagtttattatactgaaaactgggggtgggagtagggagctagtttgttgataaatagttcccatttccccatg

SEQ ID NO: 92603 - DNA, 120 bp, Artificial Sequence
  ENSG00000088812_62 (sequence is synthesized)
gagaatttgacataccctggactcctgtgtgcctcctgccatccctgcacacagcctggggagaagcctgtgcctccccgtgtggagagaaggcaaccccagatcccctgagctaacccg

SEQ ID NO: 92604 - DNA, 120 bp, Artificial Sequence
  ENSG00000088812_63 (sequence is synthesized)
gaggaaaggcagtcctggacagaagactgtcagcagaaggaaagtactggactacccgtgggtaagtcctgccattcaagactggagacacctgggaaataaaaagagcagggcactgct

SEQ ID NO: 92605 - DNA, 120 bp, Artificial Sequence
  ENSG00000088812_64 (sequence is synthesized)
ggtgggaagaggcattttaccttccagtgcaaatcctgctcctttgatttaatggggtgtactggggccaggggctgattcacttccttgggagatggtggtgttttcatgaacatcttt

SEQ ID NO: 92606 - DNA, 120 bp, Artificial Sequence
  ENSG00000088812_65 (sequence is synthesized)
gatccttccatttcatttattcatccatccattcaacaagtatttgctaaacactaacttaagctaatgctagggtagtgactgagatgtaaaaatagattttagaattaaaacaaaatc

SEQ ID NO: 92607 - DNA, 120 bp, Artificial Sequence
  ENSG00000088812_66 (sequence is synthesized)
caagtcctcacacccctgtcatcccaggagatctttccttgtggtggtttctgtgagaattggccatcctgaggacacagccaggacggcagaggcctcctggcctcagggcatgccctg

SEQ ID NO: 92608 - DNA, 120 bp, Artificial Sequence
  ENSG00000088812_67 (sequence is synthesized)
cctaccttctgaaatgtttaccccattgaccaaacttggctccagccattgcggtggtttctagatagccaggcccaccaagagatattgccccttgatgagagtcaaacaccctgccta

SEQ ID NO: 92609 - DNA, 120 bp, Artificial Sequence
  ENSG00000088812_68 (sequence is synthesized)
caaggagatgttttgaaatggagaggaaaattggcacctcatcttttaaaggcagtaatggaattgattttcagtaactgaatttgtgcacaaaacattctaaacactagtgaagcctgt

SEQ ID NO: 92610 - DNA, 120 bp, Artificial Sequence
  ENSG00000088812_69 (sequence is synthesized)
ttcgttgaactaattctggctctggaaatgtttttgttttatagttatttacgatttcgtttgtttggattcaagcttagtttgttaatatgtataatttagcatctattacactcatgt

SEQ ID NO: 92611 - DNA, 120 bp, Artificial Sequence
  ENSG00000088812_70 (sequence is synthesized)
aaatatggagtaagtattgtaaactatttcatcgcggggattgtgggtgttatacatacatttaggactgcaattttttggtattttttgtattgtaaaataacagctaatttaagcagg

SEQ ID NO: 92612 - DNA, 120 bp, Artificial Sequence
  ENSG00000088812_71 (sequence is synthesized)
aacaagagaactaagggaggtctgtgcattttaaacacaaatgtgaagaacttgtatataaacaaaagtaaatactataatacaaacttccttctgaaataaaagtagatctggtaaaaa

SEQ ID NO: 92613 - DNA, 62 bp, Artificial Sequence
  ENSG00000088812_72 (sequence is synthesized)
tgtttatgtcagtaatttcacctggcccatcaaaattcaggtgcaaactgaacaatgaggac

SEQ ID NO: 92614 - DNA, 120 bp, Artificial Sequence
  ENSG00000088826_0 (sequence is synthesized)
acacaggccgcggcggctggctcgggcccctacggtcccggcggcggctggaggaggaagccaggcggctggcggaggaggagagacggaggaggccgagaccggagcgccgctcgccgc

SEQ ID NO: 92615 - DNA, 120 bp, Artificial Sequence
  ENSG00000088826_1 (sequence is synthesized)
agacttacttccccggctcagcagggaaaggttcctagaaggtgagcgcggacggtatgcaaagttgtgaatccagtggtgacagtgcggatgaccctctcagtcgcggcctacggagaa

SEQ ID NO: 92616 - DNA, 120 bp, Artificial Sequence
  ENSG00000088826_2 (sequence is synthesized)
ggggacagcctcgtgtggtggtgatcggcgccggcttggctggcctggctgcagccaaagcacttcttgagcagggtttcacggatgtcactgtgcttgaggcttccagccacatcggag

SEQ ID NO: 92617 - DNA, 120 bp, Artificial Sequence
  ENSG00000088826_3 (sequence is synthesized)
gccgtgtgcagagtgtgaaacttggacacgccacctttgagctgggagccacctggatccatggctcccatgggaaccctatctatcatctagcagaagccaacggcctcctggaagaga

SEQ ID NO: 92618 - DNA, 120 bp, Artificial Sequence
  ENSG00000088826_4 (sequence is synthesized)
caaccgatggggaacgcagcgtgggccgcatcagcctctattccaagaatggcgtggcctgctaccttaccaaccacggccgcaggatccccaaggacgtggttgaggaattcagcgatt

SEQ ID NO: 92619 - DNA, 120 bp, Artificial Sequence
  ENSG00000088826_5 (sequence is synthesized)
tatacaacgaggtctataacttgacccaggagttcttccggcacgataaaccagtcaatgctgaaagtcaaaatagcgtgggggtgttcacccgagaggaggtgcgtaaccgcatcagga

SEQ ID NO: 92620 - DNA, 120 bp, Artificial Sequence
  ENSG00000088826_6 (sequence is synthesized)
atgaccctgacgacccagaggctaccaagcgcctgaagctcgccatgatccagcagtacctgaaggtggagagctgtgagagcagctcacacagcatggacgaggtgtccctgagcgcct

SEQ ID NO: 92621 - DNA, 120 bp, Artificial Sequence
  ENSG00000088826_7 (sequence is synthesized)
tcggggagtggaccgagatccccggcgctcaccacatcatcccctcgggcttcatgcgggttgtggagctgctggcggagggcatccctgcccacgtcatccagctagggaaacctgtcc

SEQ ID NO: 92622 - DNA, 120 bp, Artificial Sequence
  ENSG00000088826_8 (sequence is synthesized)
gctgcattcactgggaccaggcctcagcccgccccagaggccctgagattgagccccggggtgagggcgaccacaatcacgacactggggagggtggccagggtggagaggagccccggg

SEQ ID NO: 92623 - DNA, 120 bp, Artificial Sequence
  ENSG00000088826_9 (sequence is synthesized)
caggtgggatgaggatgagcagtggtcggtggtggtggagtgcgaggactgtgagctgatcccggcggaccatgtgattgtgaccgtgtcgctaggtgtgctaaagaggcagtacaccag

SEQ ID NO: 92624 - DNA, 120 bp, Artificial Sequence
  ENSG00000088826_10 (sequence is synthesized)
tttcttccggccaggcctgcccacagagaaggtggctgccatccaccgcctgggcattggcaccaccgacaagatctttctggaattcgaggagcccttctggggccctgagtgcaacag

SEQ ID NO: 92625 - DNA, 120 bp, Artificial Sequence
  ENSG00000088826_11 (sequence is synthesized)
cctacagtttgtgtgggaggacgaagcagagagccacaccctcacctacccacctgagctctggtaccgcaagatctgcggctttgatgtcctctacccgcctgagcgctacggccatgt

SEQ ID NO: 92626 - DNA, 120 bp, Artificial Sequence
  ENSG00000088826_12 (sequence is synthesized)
gctgagcggctggatctgcggggaggaggccctcgtcatggagaagtgtgatgacgaggcagtggccgagatctgcacggagatgctgcgtcagttcacagggaaccccaacattccaaa

SEQ ID NO: 92627 - DNA, 120 bp, Artificial Sequence
  ENSG00000088826_13 (sequence is synthesized)
acctcggcgaatcttgcgctcggcctggggcagcaacccttacttccgcggctcctattcatacacgcaggtgggctccagcggggcggatgtggagaagctggccaagcccctgccgta

SEQ ID NO: 92628 - DNA, 120 bp, Artificial Sequence
  ENSG00000088826_14 (sequence is synthesized)
cacagagagctcaaagacagcgcccatgcaggtgctgttttccggtgaggccacccaccgcaagtactattccaccacccacggtgctctgctgtccggccagcgtgaggctgcccgcct

SEQ ID NO: 92629 - DNA, 120 bp, Artificial Sequence
  ENSG00000088826_15 (sequence is synthesized)
cattgagatgtaccgagacctcttccagcaggggacctgagggctgtcctcgctgctgagaagagccactaactcgtgacctccagcctgccccttgctgccgtgtgctcctgccttcct

SEQ ID NO: 92630 - DNA, 120 bp, Artificial Sequence
  ENSG00000088826_16 (sequence is synthesized)
gatcctctgtagaaaggatttttatcttctgtagagctagccgccctgactgccttcagacctggccctgtagcttttctttttctccaggctgggccgtgagcaggtgggccgttgagt

SEQ ID NO: 92631 - DNA, 120 bp, Artificial Sequence
  ENSG00000088826_17 (sequence is synthesized)
tacctctgtgctggatcccgtgcccccacttgcctaccctctgtcctgccttgttattgtaagtgccttcaatactttgcattttgggataataaaaaaggctccctcccctgcccctca

SEQ ID NO: 92632 - DNA, 120 bp, Artificial Sequence
  ENSG00000088826_18 (sequence is synthesized)
ctttctgtgctgatcttggaggcagagtggctgcctgcattcattccacggtccattccacagcttgttccaaagacagtctgctcatgatgtagcttctgcacttgacaaattattttc

SEQ ID NO: 92633 - DNA, 120 bp, Artificial Sequence
  ENSG00000088826_19 (sequence is synthesized)
ggtccagctagcgaggaggaaagctgtgatggggtgcaggagtggaggagaaacgtggcaactgccgaataaacacaccaaccagggaagacggccaaggctgggcccagaatatctgga

SEQ ID NO: 92634 - DNA, 120 bp, Artificial Sequence
  ENSG00000088826_20 (sequence is synthesized)
aagctgagttgaccgtggaatttccgagcttggaggatgttcgtggttcctagaaggtgagcgcggacggtatgcaaagttgtgaatccagtggtgacagtgcggatgaccctctcagtc

SEQ ID NO: 92635 - DNA, 120 bp, Artificial Sequence
  ENSG00000088827_0 (sequence is synthesized)
atgggcttcttgcccaagcttctcctcctggcctcattcttcccagcaggccaggcctcatggggcgtctccagtccccaggacgtgcagggtgtgaaggggtcttgcctgcttatcccc

SEQ ID NO: 92636 - DNA, 120 bp, Artificial Sequence
  ENSG00000088827_1 (sequence is synthesized)
tgcatcttcagcttccctgccgacgtggaggtgcccgacggcatcacggccatctggtactacgactactcgggccagcggcaggtggtgagccactcggcggaccccaagctggtggag

SEQ ID NO: 92637 - DNA, 120 bp, Artificial Sequence
  ENSG00000088827_2 (sequence is synthesized)
gcccgcttccgcggccgcaccgagttcatggggaaccccgagcacagggtgtgcaacctgctgctgaaggacctgcagcccgaggactctggttcctacaacttccgcttcgagatcagt

SEQ ID NO: 92638 - DNA, 120 bp, Artificial Sequence
  ENSG00000088827_3 (sequence is synthesized)
gaggtcaaccgctggtcagatgtgaaaggcaccttggtcacagtaacagaggagcccagggtgcccaccattgcctccccggtggagcttctcgagggcacagaggtggacttcaactgc

SEQ ID NO: 92639 - DNA, 120 bp, Artificial Sequence
  ENSG00000088827_4 (sequence is synthesized)
tccactccctacgtatgcctgcaggagcaggtcagactgcagtggcaaggccaggaccctgctcgctctgtcaccttcaacagccagaagtttgagcccaccggcgtcggccacctggag

SEQ ID NO: 92640 - DNA, 120 bp, Artificial Sequence
  ENSG00000088827_5 (sequence is synthesized)
accctccacatggccatgtcctggcaggaccacggccggatcctgcgctgccagctctccgtggccaatcacagggctcagagcgagattcacctccaagtgaagtatgcccccaagggt

SEQ ID NO: 92641 - DNA, 120 bp, Artificial Sequence
  ENSG00000088827_6 (sequence is synthesized)
gtgaagatcctcctcagcccctcggggaggaacatccttccaggtgagctggtcacactcacctgccaggtgaacagcagctaccctgcagtcagttccattaagtggctcaaggatggg

SEQ ID NO: 92642 - DNA, 120 bp, Artificial Sequence
  ENSG00000088827_7 (sequence is synthesized)
gtacgcctccaaaccaagactggtgtgctgcacctgccccaggcagcctggagcgatgctggcgtctacacctgccaagctgagaacggcgtgggctctttggtctcaccccccatcagc

SEQ ID NO: 92643 - DNA, 120 bp, Artificial Sequence
  ENSG00000088827_8 (sequence is synthesized)
ctccacatcttcatggctgaggtccaggtgagcccagcaggtcccatcctggagaaccagacagtgacactagtctgcaacacacccaatgaggcacccagtgatctccgctacagctgg

SEQ ID NO: 92644 - DNA, 120 bp, Artificial Sequence
  ENSG00000088827_9 (sequence is synthesized)
tacaagaaccatgtcctgctggaggatgcccactcccataccctccggctgcacttggccactagggctgatactggcttctacttctgtgaggtgcagaacgtccatggcagcgagcgc

SEQ ID NO: 92645 - DNA, 120 bp, Artificial Sequence
  ENSG00000088827_10 (sequence is synthesized)
tcgggccctgtcagcgtggtagtcaaccacccgcctctcactccagtcctgacagccttcctggagacccaggcgggacttgtgggcatccttcactgctctgtggtcagtgagcccctg

SEQ ID NO: 92646 - DNA, 120 bp, Artificial Sequence
  ENSG00000088827_11 (sequence is synthesized)
gccacactggtgctgtcacatgggggtcatatcctggcctccacctccggggacagtgatcacagcccacgcttcagtggtacctctggtcccaactccctgcgcctggagatccgagac

SEQ ID NO: 92647 - DNA, 120 bp, Artificial Sequence
  ENSG00000088827_12 (sequence is synthesized)
ctggaggaaactgacagtggggagtacaagtgctcagccaccaactcccttggaaatgcaacctccaccctggacttccatgccaatgccgcccgtctcctcatcagcccggcagccgag

SEQ ID NO: 92648 - DNA, 120 bp, Artificial Sequence
  ENSG00000088827_13 (sequence is synthesized)
gtggtggaaggacaggcagtgacactgagctgcagaagcggcctaagccccacacctgatgcccgcttctcctggtacctgaatggagccctgcttcacgagggtcccggcagcagcctc

SEQ ID NO: 92649 - DNA, 120 bp, Artificial Sequence
  ENSG00000088827_14 (sequence is synthesized)
ctgctccccgcggcctccagcactgacgccggctcataccactgccgggcccgggacggccacagtgccagtggcccctcttcgccagctgttctcactgtgctctacccccctcgacaa

SEQ ID NO: 92650 - DNA, 120 bp, Artificial Sequence
  ENSG00000088827_15 (sequence is synthesized)
ccaacattcaccaccaggctggaccttgatgccgctggggccggggctggacggcgaggcctccttttgtgccgtgtggacagcgacccccccgccaggctgcagctgctccacaaggac

SEQ ID NO: 92651 - DNA, 120 bp, Artificial Sequence
  ENSG00000088827_16 (sequence is synthesized)
cgtgttgtggccacttccctgccatcagggggtggctgcagcacctgtgggggctgttccccacgcatgaaggtcaccaaagcccccaacttgctgcgtgtggagattcacaaccctttg

SEQ ID NO: 92652 - DNA, 120 bp, Artificial Sequence
  ENSG00000088827_17 (sequence is synthesized)
ctggaagaggagggcttgtacctctgtgaggccagcaatgccctgggcaacgcctccacctcagccaccttcaatggccaggccactgtcctggccattgcaccatcacacacacttcag

SEQ ID NO: 92653 - DNA, 120 bp, Artificial Sequence
  ENSG00000088827_18 (sequence is synthesized)
gagggcacagaagccaacttgacttgcaacgtgagccgggaagctgctggcagccctgctaacttctcctggttccgaaatggggtgctgtgggcccagggtcccctggagaccgtgaca

SEQ ID NO: 92654 - DNA, 120 bp, Artificial Sequence
  ENSG00000088827_19 (sequence is synthesized)
ctgctgcccgtggccagaactgatgctgccctttacgcctgccgcatcctgactgaggctggtgcccagctctccactcccgtgctcctgagtgtactctatcccccggaccgtccaaag

SEQ ID NO: 92655 - DNA, 120 bp, Artificial Sequence
  ENSG00000088827_20 (sequence is synthesized)
ctgtcagccctcctagacatgggccagggccacatggctctgttcatctgcactgtggacagccgccccctggccttgctggccttgttccatggggagcacctcctggccaccagcctg

SEQ ID NO: 92656 - DNA, 120 bp, Artificial Sequence
  ENSG00000088827_21 (sequence is synthesized)
ggtccccaggtcccatcccatggtcggttccaggctaaagctgaggccaactccctgaagttagaggtccgagaactgggccttggggactctggcagctaccgctgtgaggccacaaat

SEQ ID NO: 92657 - DNA, 120 bp, Artificial Sequence
  ENSG00000088827_22 (sequence is synthesized)
gttcttggatcatccaacacctcactcttcttccaggtccgaggagcctgggtccaggtgtcaccatcacctgagctccaagagggccaggctgtggtcctgagctgccaggtacacaca

SEQ ID NO: 92658 - DNA, 120 bp, Artificial Sequence
  ENSG00000088827_23 (sequence is synthesized)
ggagtcccagaggggacctcatatcgttggtatcgggatggccagcccctccaggagtcgacctcggccacgctccgctttgcagccataactttgacacaagctggggcctatcattgc

SEQ ID NO: 92659 - DNA, 120 bp, Artificial Sequence
  ENSG00000088827_24 (sequence is synthesized)
caagcccaggccccaggctcagccaccacgagcctagctgcacccatcagcctccacgtgtcctatgccccacgccacgtcacactcactaccctgatggacacaggccctggacgactg

SEQ ID NO: 92660 - DNA, 120 bp, Artificial Sequence
  ENSG00000088827_25 (sequence is synthesized)
ggcctcctcctgtgccgtgtggacagtgaccctccggcccagctgcggctgctccacggggatcgccttgtggcctccaccctacaaggtgtggggggacccgaaggcagctctcccagg

SEQ ID NO: 92661 - DNA, 120 bp, Artificial Sequence
  ENSG00000088827_26 (sequence is synthesized)
ctgcatgtggctgtggcccccaacacactgcgtctggagatccacggggctatgctggaggatgagggtgtctatatctgtgaggcctccaacaccctgggccaggcctcggcctcagct

SEQ ID NO: 92662 - DNA, 120 bp, Artificial Sequence
  ENSG00000088827_27 (sequence is synthesized)
gacttcgacgctcaagctgtgaatgtgcaggtgtggcccggggctaccgtgcgggaggggcagctggtgaacctgacctgccttgtgtggaccactcacccggcccagctcacctacaca

SEQ ID NO: 92663 - DNA, 120 bp, Artificial Sequence
  ENSG00000088827_28 (sequence is synthesized)
tggtaccaggatgggcagcagcgcctggatgcccactccatccccctgcccaacgtcacagtcagggatgccacctcctaccgctgcggtgtgggcccccctggtcgggcaccccgcctc

SEQ ID NO: 92664 - DNA, 120 bp, Artificial Sequence
  ENSG00000088827_29 (sequence is synthesized)
tccagacctatcaccttggacgtcctctacgcgccccgcaacctgcgcctgacctacctcctggagagccatggcgggcagctggccctggtactgtgcactgtggacagccgcccgccc

SEQ ID NO: 92665 - DNA, 120 bp, Artificial Sequence
  ENSG00000088827_30 (sequence is synthesized)
gcccagctggccctcagccacgccggtcgcctcttggcctcctcgacagcagcctctgtccccaacaccctgcgcctggagctgcgagggccacagcccagggatgagggtttctacagc

SEQ ID NO: 92666 - DNA, 120 bp, Artificial Sequence
  ENSG00000088827_31 (sequence is synthesized)
tgctctgcccgcagccctctgggccaggccaacacgtccctggagctgcggctggagggtgtgcgggtgatcctggctccggaggctgccgtgcctgaaggtgcccccatcacagtgacc

SEQ ID NO: 92667 - DNA, 120 bp, Artificial Sequence
  ENSG00000088827_32 (sequence is synthesized)
tgtgcggaccctgctgcccacgcacccacactctatacttggtaccacaacggtcgttggctgcaggagggtccagctgcctcactctcattcctggtggccacgcgggctcatgcaggc

SEQ ID NO: 92668 - DNA, 120 bp, Artificial Sequence
  ENSG00000088827_33 (sequence is synthesized)
gcctactcttgccaggcccaggatgcccagggcacccgcagctcccgtcctgctgccctgcaagtcctctatgcccctcaggacgctgtcctgtcctccttccgggactccagggccaga

SEQ ID NO: 92669 - DNA, 120 bp, Artificial Sequence
  ENSG00000088827_34 (sequence is synthesized)
tccatggctgtgatacagtgcactgtggacagtgagccacctgctgagctggccctatctcatgatggcaaggtgctggccacgagcagcggggtccacagcttggcatcagggacaggc

SEQ ID NO: 92670 - DNA, 120 bp, Artificial Sequence
  ENSG00000088827_35 (sequence is synthesized)
catgtccaggtggcccgaaacgccctacggctgcaggtgcaagatgtgcctgcaggtgatgacacctatgtttgcacagcccaaaacttgctgggctcaatcagcaccatcgggcggttg

SEQ ID NO: 92671 - DNA, 120 bp, Artificial Sequence
  ENSG00000088827_36 (sequence is synthesized)
caggtagaaggtgcacgcgtggtggcagagcctggcctggacgtgcctgagggcgctgccctgaacctcagctgccgcctcctgggtggccctgggcctgtgggcaactccacctttgca

SEQ ID NO: 92672 - DNA, 120 bp, Artificial Sequence
  ENSG00000088827_37 (sequence is synthesized)
tggttctggaatgaccggcggctgcacgcggagcctgtgcccactctcgccttcacccacgtggctcgtgctcaagctgggatgtaccactgcctggctgagctccccactggggctgct

SEQ ID NO: 92673 - DNA, 120 bp, Artificial Sequence
  ENSG00000088827_38 (sequence is synthesized)
gcctctgctccagtcatgctccgtgtgctctaccctcccaagacgcccaccatgatggtcttcgtggagcctgagggtggcctccggggcatcctggattgccgagtggacagcgagccg

SEQ ID NO: 92674 - DNA, 120 bp, Artificial Sequence
  ENSG00000088827_39 (sequence is synthesized)
ctcgccagcctgactctccaccttggcagtcgactggtggcctccagtcagccccagggtgctcctgcagagccacacatccatgtcctggcttcccccaatgccctgagggtggacatc

SEQ ID NO: 92675 - DNA, 120 bp, Artificial Sequence
  ENSG00000088827_40 (sequence is synthesized)
gaggcgctgaggcccagcgaccaaggggaatacatctgttctgcctcaaatgtcctgggctctgcctctacctccacctactttggggtcagagccctgcaccgcctgcatcagttccag

SEQ ID NO: 92676 - DNA, 120 bp, Artificial Sequence
  ENSG00000088827_41 (sequence is synthesized)
cagctgctctgggtcctgggactgctggtgggcctcctgctcctgctgttgggcctgggggcctgctacacctggagaaggaggcgtgtttgtaagcagagcatgggcgagaattcggtg

SEQ ID NO: 92677 - DNA, 120 bp, Artificial Sequence
  ENSG00000088827_42 (sequence is synthesized)
gagatggcttttcagaaagagaccacgcagctcattgatcctgatgcagccacatgtgagacctcaacctgtgccccacccctgggctgaccagtggtgttgcctgccctccggaggaga

SEQ ID NO: 92678 - DNA, 120 bp, Artificial Sequence
  ENSG00000088827_43 (sequence is synthesized)
aagtggccagaatctgtgatgactccagcctatgaatgtgaatgaggcagtgttgagtcctgcccgcctctacgaaaacagctctgtgacatctgactttttatgacctggccccaagcc

SEQ ID NO: 92679 - DNA, 120 bp, Artificial Sequence
  ENSG00000088827_44 (sequence is synthesized)
tcttgcccccccaaaaatgggtggtgagaggtctgcccaggagggtgttgaccctggaggacactgaagagcactgagctgatctcgctctctcttctctggatctcctcccttctctcc

SEQ ID NO: 92680 - DNA, 120 bp, Artificial Sequence
  ENSG00000088827_45 (sequence is synthesized)
atttctccctcaaaggaagccctgccctttcacatccttctcctcgaaagtcaccctggactttggttggattgcagcatcctgcatcctcagaggctcaccaaggcattctgtattcaa

SEQ ID NO: 92681 - DNA, 120 bp, Artificial Sequence
  ENSG00000088827_46 (sequence is synthesized)
cagagtatcagtcagcctgctctaacaagagaccaaatacagtgacttcaacatgatagaattttatttttctctcccacgctagtctggctgttacgatggtttatgatgttggggctc

SEQ ID NO: 92682 - DNA, 120 bp, Artificial Sequence
  ENSG00000088827_47 (sequence is synthesized)
aggatccttctatcttccttttctctatccctaaaatgatgcctttgattgtgaggctcaccatggccccgctttgtccacatgccctccagccagaagaaggaagagtggaggtagaag

SEQ ID NO: 92683 - DNA, 120 bp, Artificial Sequence
  ENSG00000088827_48 (sequence is synthesized)
cacacccatgcccatggtggacgcaactcagaagctgcacaggacttttccactcacttcccattggctggagtattgtcacatggctactgcaagctacaagggagactgggaaatgta

SEQ ID NO: 92684 - DNA, 120 bp, Artificial Sequence
  ENSG00000088827_49 (sequence is synthesized)
gtttttattttgagtccagaggacatttggaattggacttccaaaggactcccaactgtgagctcatccctgagacttttgacattgttgggaatgccaccagcaggccatgttttgtct

SEQ ID NO: 92685 - DNA, 120 bp, Artificial Sequence
  ENSG00000088827_50 (sequence is synthesized)
cagtgcccatctactgagggccagggtgtgcccctggccattctggttgtgggcttcctggaagaggtgatcactctcacactaagactgaggaaataaaaaaggtttggtgttttccta

SEQ ID NO: 92686 - DNA, 120 bp, Artificial Sequence
  ENSG00000088827_51 (sequence is synthesized)
gggagagagcatgccaggcagtggagttgcctaagcagacatccttgtgccagatttggcccctgaaagaagagatgccctcattcccaccaccaccccccctacccccagggactgggt

SEQ ID NO: 92687 - DNA, 120 bp, Artificial Sequence
  ENSG00000088827_52 (sequence is synthesized)
actaccttactggcccttacaagagtggagggcagacacagatgttgtcagcatccttattcctgctccagatgcatctctgttcatgactgtgtgagctcctgtccttttcctggagac

SEQ ID NO: 92688 - DNA, 120 bp, Artificial Sequence
  ENSG00000088827_53 (sequence is synthesized)
cctgtgtcgggctgttaaagagaatgagttaccaagaaggaatgacgtgcccctgcgaatcagggaccaacaggagagagctcttgagtgggctagtgactccccctgcagcctggtgga

SEQ ID NO: 92689 - DNA, 120 bp, Artificial Sequence
  ENSG00000088827_54 (sequence is synthesized)
gatggtgtgaggagcgaagagccctctgctctaggatttgggttgaaaaacagagagagaagtggggagttgccacaggagctaacacgctgggaggcagttgggggcgggtgaactttg

SEQ ID NO: 92690 - DNA, 120 bp, Artificial Sequence
  ENSG00000088827_55 (sequence is synthesized)
tgtagccgaggccgcaccctccctcattccaggctcattcattttcatgctccattgccagactcttgctgggagcccgtccagaatgtcctcccaataaaactccatcctatgacgcaa

SEQ ID NO: 92691 - DNA, 120 bp, Artificial Sequence
  ENSG00000088827_56 (sequence is synthesized)
ctttggggtcagaggtgaggggagggggctccatctcccaggccactctgcacaaaagcccagctcttaggcccaaaggcttccttccctgtatccctcctgctgcagcatgatttgcct

SEQ ID NO: 92692 - DNA, 120 bp, Artificial Sequence
  ENSG00000088827_57 (sequence is synthesized)
gtcgactctaaactgattgctcggggcacccttgtgtggagagcttcagcgataaagcaaaagttagaaggtgtcatcttgggtgggtccccttggaaggaagcactgggggcctgcagc

SEQ ID NO: 92693 - DNA, 120 bp, Artificial Sequence
  ENSG00000088827_58 (sequence is synthesized)
tgtggctgctctgagtcccgctctgtgttccagccctgcaccgcctgcatcagttccagcagctgctctgggtcctgggactgctggtgggcctcctgctcctgctgttgggcctggggg

SEQ ID NO: 92694 - DNA, 120 bp, Artificial Sequence
  ENSG00000088827_59 (sequence is synthesized)
cctgctacacctggaggtgggtctggagctgggagtgggccagaagattggggtaaggcagcccacctcgtcttctccccaaattcccccaggtcctttaggacctcctattaagttcac

SEQ ID NO: 92695 - DNA, 120 bp, Artificial Sequence
  ENSG00000088827_60 (sequence is synthesized)
aggctgcctacttcccagactgcccctccaaattggaaatcccttctagaattgtccctaaatcctccttgctgtagtttccttctttcctcctctctgccctggctgtgctaaagcaag

SEQ ID NO: 92696 - DNA, 120 bp, Artificial Sequence
  ENSG00000088827_61 (sequence is synthesized)
ggctagggaggaagacagaggaagcacccactctccatgaggttcccacgctcttgtggtctggagccagcctgtggggagcgggagaggaatgggggcaggaggtggggaggggagagg

SEQ ID NO: 92697 - DNA, 120 bp, Artificial Sequence
  ENSG00000088827_62 (sequence is synthesized)
ctctctgagtccactccgggccttgcagaaggaggcgtgtttgtaagcagagcatgggcgagaattcggtggagatggcttttcagaaagagaccacgcaggtatccattcaacacacac

SEQ ID NO: 92698 - DNA, 120 bp, Artificial Sequence
  ENSG00000088827_63 (sequence is synthesized)
atataatacccagctaacccacagtgccaactggcatctggagactgctgtcatttagaggatggtgcctgggaccaaggggaggttggggagagtgtgcagggaaccaggagcccctca

SEQ ID NO: 92699 - DNA, 120 bp, Artificial Sequence
  ENSG00000088827_64 (sequence is synthesized)
ggagataggagagccctgttctgctcggggcagagggaatccctgtgtcagctggcggctggcttagaggactaggggagactttctggacttggcagcatcccctccatttccaagaca

SEQ ID NO: 92700 - DNA, 120 bp, Artificial Sequence
  ENSG00000088827_65 (sequence is synthesized)
cgtatgttctgactcccccacctttgttctgaggcctcttccccactcccaagcctgcccgtcacctgggcagaagtgaaagtcagtttctcctcccctgtggtgtgtcccttctgcagc

SEQ ID NO: 92701 - DNA, 120 bp, Artificial Sequence
  ENSG00000088827_66 (sequence is synthesized)
tgattcacctggtaggccagggctccaagtcacacttccagccatgcacactcccaccaatcctcttgggaccccacctgaggctgggggcctgggggcctgccctggctcccagaggcc

SEQ ID NO: 92702 - DNA, 120 bp, Artificial Sequence
  ENSG00000088832_0 (sequence is synthesized)
ccgcccgcccgctcagcgtccgccgccgccatgggagtgcaggtggaaaccatctccccaggagacgggcgcaccttccccaagcgcggccagacctgcgtggtgcactacaccgggatg

SEQ ID NO: 92703 - DNA, 120 bp, Artificial Sequence
  ENSG00000088832_1 (sequence is synthesized)
cttgaagatggaaagaaatttgattcctcccgggacagaaacaagccctttaagtttatgctaggcaagcaggaggtgatccgaggctgggaagaaggggttgcccagatgagtgtgggt

SEQ ID NO: 92704 - DNA, 120 bp, Artificial Sequence
  ENSG00000088832_2 (sequence is synthesized)
cagagagccaaactgactatatctccagattatgcctatggtgccactgggcacccaggcatcatcccaccacatgccactctcgtcttcgatgtggagcttctaaaactggaatgacag

SEQ ID NO: 92705 - DNA, 120 bp, Artificial Sequence
  ENSG00000088832_3 (sequence is synthesized)
tcttgggtaaggaaatggaatactgaagggcccttcactgcctttgctcctcccatgttatgcccagcgtttgatgggtagcagagagaacaaaaaacaccacaaggctatttttccccc

SEQ ID NO: 92706 - DNA, 120 bp, Artificial Sequence
  ENSG00000088832_4 (sequence is synthesized)
tgcattctttctgtattgagtatcctttcagtgttattagtgtatgctttgaatgtaaaaattggtcaccctaaggaaaggaattggcatgtgtatgttcccagttcaactcatggagat

SEQ ID NO: 92707 - DNA, 120 bp, Artificial Sequence
  ENSG00000088832_5 (sequence is synthesized)
ggcagctgtttaaatgtttttctatgtagtttataaattaaaactgaattgaggactatggaaatgtaggccaaatttgtagtgccaacattttagttctttggaaataagactcttaat

SEQ ID NO: 92708 - DNA, 120 bp, Artificial Sequence
  ENSG00000088832_6 (sequence is synthesized)
cctgatgttccactccactttgtatagacatctgccctgactgaatgtgttctgtcactcagctttgcttccgacacctctgtttcctcttcccctttctcctcgtatgtgtgtttacct

SEQ ID NO: 92709 - DNA, 120 bp, Artificial Sequence
  ENSG00000088832_7 (sequence is synthesized)
aaactatatgccataaacctcaagttattcattttattttgttttcattttggggtgaagattcagtttcagtcttttggatataggtttccaattaagtacatggtcaagtattaacag

SEQ ID NO: 92710 - DNA, 120 bp, Artificial Sequence
  ENSG00000088832_8 (sequence is synthesized)
ttttggatgaaatttttatctattatatattaaacattcttgctgctgcgctgcaaagccatagcagatttgaggcgctgttgaggactgaattactctccaagttgagagatgtctttg

SEQ ID NO: 92711 - DNA, 120 bp, Artificial Sequence
  ENSG00000088832_9 (sequence is synthesized)
ggttaaattaaaagccctacctaaaactgaggtggggatggggagagcctttgcctccaccattcccacccaccctccccttaaaccctctgcctttgaaagtagatcatgttcactgca

SEQ ID NO: 92712 - DNA, 120 bp, Artificial Sequence
  ENSG00000088832_10 (sequence is synthesized)
atgctggacactacaggtatctgtccctgggccagcagggacctctgaagccttctttgtggccttttttttttttcatcctgtggtttttctaatggactttcaggaattttgtaatct

SEQ ID NO: 92713 - DNA, 120 bp, Artificial Sequence
  ENSG00000088832_11 (sequence is synthesized)
cataactttccaagctccaccacttcctaaatcttaagaactttaattgacagtttcaattgaaggtgctgtttgtagacttaacacccagtgaaagcccagccatcatgacaaatcctt

SEQ ID NO: 92714 - DNA, 120 bp, Artificial Sequence
  ENSG00000088832_12 (sequence is synthesized)
gaatgttctcttaagaaaatgatgctggtcatcgcagcttcagcatctcctgttttttgatgcttggctccctctgctgatctcagtttcctggcttttcctccctcagccccttctcac

SEQ ID NO: 92715 - DNA, 120 bp, Artificial Sequence
  ENSG00000088832_13 (sequence is synthesized)
ccctttgctgtcctgtgtagtgatttggtgagaaatcgttgctgcacccttcccccagcaccatttatgagtctcaagttttattattgcaataaaagtgctttatgccggcttttctca

SEQ ID NO: 92716 - DNA, 120 bp, Artificial Sequence
  ENSG00000088832_14 (sequence is synthesized)
tgccactctcgtcttcgatgtggagcttctaaaactggaatgacaggaatggcctcctcccttagctccctgttcttgggaaccagagggtcacagccaaggcctgggtgaggacacttt

SEQ ID NO: 92717 - DNA, 120 bp, Artificial Sequence
  ENSG00000088832_15 (sequence is synthesized)
tgtttgaaagccacaacaaatggctgccatcctatttgtgatggcagtcagagctacttgtaacctggtcctgttgtgcacatctatctgccatggagggatctggtgcctccagacatg

SEQ ID NO: 92718 - DNA, 120 bp, Artificial Sequence
  ENSG00000088832_16 (sequence is synthesized)
acagcattcaacagggagggcaggaactttcttcccgagtctttgtttttctttttactaatgaggtgggactttcctggaagatcccagtagacttcacagcaggtggtgactgcattc

SEQ ID NO: 92719 - DNA, 120 bp, Artificial Sequence
  ENSG00000088832_17 (sequence is synthesized)
acgtcgcgcgccgtgtggggcgcgcacgcagggctgggcgtgagggggcgtgcgcgtgcgcaggcgacgcgccgaggtactaggcagagccgtggaaccgccgccaggtcgctgttggtc

SEQ ID NO: 92720 - DNA, 120 bp, Artificial Sequence
  ENSG00000088832_18 (sequence is synthesized)
ttcaaaaataaaaaaagtgaaaagtctcaccctcatgccatcccatctgaccaatacccccacaagaagctcctgttgttaatgtttcttgtactgtggtttaagcacatataaaaacat

SEQ ID NO: 92721 - DNA, 120 bp, Artificial Sequence
  ENSG00000088832_19 (sequence is synthesized)
gcccgtcgcgccgcccgcccgctcagcgtccgccgccgccatgggagtgcaggtggaaaccatctccccaggagacggtgagtagtggcgcgcggcggctcggagtacctctgccgccgc

SEQ ID NO: 92722 - DNA, 120 bp, Artificial Sequence
  ENSG00000088832_20 (sequence is synthesized)
atgggagtgcaggtggaaaccatctccccaggagacgggcgcaccttccccaagcgcggccagacctgcgtggtgcactacaccggtggtgactgcattctggtaaacgaatgagctaaa

SEQ ID NO: 92723 - DNA, 120 bp, Artificial Sequence
  ENSG00000088833_0 (sequence is synthesized)
aagttcctctttggagaggcaagagggcaaagaagctgaggacccagaagacaggattgtgcctaagaaagtggccttggagcagaggcccaaagaaagcggggagagcgccttgcccat

SEQ ID NO: 92724 - DNA, 120 bp, Artificial Sequence
  ENSG00000088833_1 (sequence is synthesized)
cggtaagggaaaggtgctccaggcacagaagcagctaatgcaacggccctgaggcaaatgcaagataactggcaagttccaggaacagcaaggagggcaaggcgcctggagcagaggaag

SEQ ID NO: 92725 - DNA, 120 bp, Artificial Sequence
  ENSG00000088833_2 (sequence is synthesized)
ctagcggatcccttgatgagagggaggaactggcccatctctcatgggtcctgcaggcaggccatgagactgtcttttatgcggggcgagataacgaggcatggacgtgttgtgagcgga

SEQ ID NO: 92726 - DNA, 120 bp, Artificial Sequence
  ENSG00000088833_3 (sequence is synthesized)
ggcctagcctgttcaaggtctgaatttttacccctagaatgtaagaagcatgggagcagggactttgttttgctccctgccatatccacagccctagaaaaacgtcgggccattgatagc

SEQ ID NO: 92727 - DNA, 120 bp, Artificial Sequence
  ENSG00000088833_4 (sequence is synthesized)
tctcagtaaatgcttgacaagtaagtgaatgaacgaatgcacaattaatgaaatgagggctgcgtcaatgaataactgggaatctgactcctgcagggagccttcagcccacaggtgtat

SEQ ID NO: 92728 - DNA, 120 bp, Artificial Sequence
  ENSG00000088833_5 (sequence is synthesized)
gtaagacccgccccgcctctcatccttcgggctcccacccccgccgttaggctgcggttcgcgccgcggtcgccagagggcgcggagcggcggggcttcccgcacggagggctttgcgtg

SEQ ID NO: 92729 - DNA, 120 bp, Artificial Sequence
  ENSG00000088833_6 (sequence is synthesized)
cgcacggagggctttgcgtgaggcaccgcgtggggcggggctgcgggcgggctcccagctgctgggccctcatcggctgggcctcgtcgaccggcaagcggaacgcggcagcggggctgg

SEQ ID NO: 92730 - DNA, 120 bp, Artificial Sequence
  ENSG00000088833_7 (sequence is synthesized)
agcgctttggaaggcgcacggggcgaagatggcggcggagcgacaggaggcgctgagggagttcgtggcggtgacgggcgccgaggaggaccgggcccgcttctttctcgagtcggccgg

SEQ ID NO: 92731 - DNA, 120 bp, Artificial Sequence
  ENSG00000088833_8 (sequence is synthesized)
ctgggacttgcagatcgcgctagcgagcttttatgaggacggaggggatgaagacattgtgaccatttcgcaggcaacccccagttcagtgtccagaggcacagcccccagtgataatag

SEQ ID NO: 92732 - DNA, 120 bp, Artificial Sequence
  ENSG00000088833_9 (sequence is synthesized)
agtgacatccttcagagacctcattcatgaccaagatgaagatgaggaggaagaggaaggccagaggttttatgctgggggctcagagagaagtggacagcagattgttggccctcccag

SEQ ID NO: 92733 - DNA, 120 bp, Artificial Sequence
  ENSG00000088833_10 (sequence is synthesized)
gaagaaaagtcccaacgagctggtggatgatctctttaaaggtgccaaagagcatggagctgtagctgtggagcgagtgaccaagagccctggagagaccagtaaaccgagaccatttgc

SEQ ID NO: 92734 - DNA, 120 bp, Artificial Sequence
  ENSG00000088833_11 (sequence is synthesized)
aggaggtggctaccgccttggggcagcaccagaggaagagtctgcctatgtggcaggagaaaagaggcagcattccagccaagatgttcatgtagtattgaaactctggaagagtggatt

SEQ ID NO: 92735 - DNA, 120 bp, Artificial Sequence
  ENSG00000088833_12 (sequence is synthesized)
cagcctggataatggagaactcagaagctaccaagacccatccaatgcccagtttctggagtctatccgcagaggggaggtgccagcagagcttcggaggctagctcacggtggacaggt

SEQ ID NO: 92736 - DNA, 120 bp, Artificial Sequence
  ENSG00000088833_13 (sequence is synthesized)
gaacttggatatggaggaccatcgggacgaggactttgtgaagcccaaaggagccttcaaagccttcactggcgagggtcagaaactgggcagcactgccccccaggtgttgagtaccag

SEQ ID NO: 92737 - DNA, 120 bp, Artificial Sequence
  ENSG00000088833_14 (sequence is synthesized)
cggcttgcagacggcgggaggctggtgcagaaatttaaccacagccacaggatcagcgacatccgactcttcatcgtggatgcccggccagccatggctgccaccagctttatcctcatg

SEQ ID NO: 92738 - DNA, 120 bp, Artificial Sequence
  ENSG00000088833_15 (sequence is synthesized)
actactttcccgaacaaagagctggctgatgagagccagaccctgaaggaagccaacctgctcaatgctgtcatcgtgcagcggttaacataaccgcccagccagctgcctggcctccct

SEQ ID NO: 92739 - DNA, 120 bp, Artificial Sequence
  ENSG00000088833_16 (sequence is synthesized)
cctgtgtttcccatggccagtggccatgccccatggggatcgcccctcctgcccccttgtgcacacccagcagtccagtgcaacgtctcctccatagctctgggttcttagatcttggtt

SEQ ID NO: 92740 - DNA, 120 bp, Artificial Sequence
  ENSG00000088833_17 (sequence is synthesized)
ggacgtttgttttctccttagttgcatttcctgggtttttgtgatgatcaatggactttaatgaaaaaaaaaataaaaacaaccaaaaaaattgaaggaatatcaccagcatgttgtacg

SEQ ID NO: 92741 - DNA, 120 bp, Artificial Sequence
  ENSG00000088833_18 (sequence is synthesized)
gaaactctcccactgaagcaggctttaattgctttaaaattatatttatcttggggcctgtgggaggaaacttccttccatcttctctgcataaaaacttgtggcacacaatgcttattc

SEQ ID NO: 92742 - DNA, 120 bp, Artificial Sequence
  ENSG00000088833_19 (sequence is synthesized)
actagtgtgtcccacccgccagccccacagatgactggaggaaggaggggaaatgtgtagaaagaggcttcgccaccacttgttcccacgagaatatgtcacttgcccagataaaactgg

SEQ ID NO: 92743 - DNA, 120 bp, Artificial Sequence
  ENSG00000088833_20 (sequence is synthesized)
gcggcagccagagttccctgaagtgggaagtcagagctccatgcacacagtgtcttcagaaggtgaaaataaatatttccctgtgctccttttactcaacccctggggtatctaatcttg

SEQ ID NO: 92744 - DNA, 120 bp, Artificial Sequence
  ENSG00000088833_21 (sequence is synthesized)
ccaggtcttggccagttgagattctgttccacctgcctgcctggccctttcctccattaccatccagactgctcgcctcctggggattctcaggggctccattatggcttgatttactcc

SEQ ID NO: 92745 - DNA, 120 bp, Artificial Sequence
  ENSG00000088833_22 (sequence is synthesized)
acgtgcagaagtcttgagtggacctaggaggtaggtgggatattttttttcactaggatacagctcatgccaacccatcctaagtgagttcagaatcagggtatcttgccctataagata

SEQ ID NO: 92746 - DNA, 120 bp, Artificial Sequence
  ENSG00000088833_23 (sequence is synthesized)
aacagtcaaaatgccaccgagctgttcactagtgatgtgtggcaaatcaaatcaactgttgaagaaggggtgagttttctgtgctacaagcacctgtcactgttggtacttgcaggaggc

SEQ ID NO: 92747 - DNA, 120 bp, Artificial Sequence
  ENSG00000088833_24 (sequence is synthesized)
ttctgctgggtatgttttggaagtgagtgtcactacttggctttgcttagcaggttctgcttcacacttgttctttgacctgctgacttgtgacttgcagaaacataggcagtagtccta

SEQ ID NO: 92748 - DNA, 120 bp, Artificial Sequence
  ENSG00000088833_25 (sequence is synthesized)
gcctggtaaagaccctccaccacccctataagtttgattgctatgcaggtttgggagaggaggcctattgggctcttggatggaaccctttcccgtattaaacaaaccagagacagaatc

SEQ ID NO: 92749 - DNA, 120 bp, Artificial Sequence
  ENSG00000088833_26 (sequence is synthesized)
agtgctgactcaggatctcctggtttggaatcgtaatgtgcctcaatcctctttccaagcaggcctcaccagtctctttctctttcctgcttcacccctgcaatgagccaagaaccaaca

SEQ ID NO: 92750 - DNA, 120 bp, Artificial Sequence
  ENSG00000088833_27 (sequence is synthesized)
ctacatccacctagaactgcagaagggcttgtggtttcaaccaagacccatcctgagcaagggacttggcttggtgcttttgatcccaaagttcccacaccggcagtggcctgctggggc

SEQ ID NO: 92751 - DNA, 120 bp, Artificial Sequence
  ENSG00000088833_28 (sequence is synthesized)
aatggcatctgtcacggtgttttctccagcaggtggagattatggaacctacatatgggtctggaaaaactgtacactgttgtcaccttgaccattaaaaaccagaatgaggacaatgga

SEQ ID NO: 92752 - DNA, 120 bp, Artificial Sequence
  ENSG00000088833_29 (sequence is synthesized)
taatgtgtaaatcacctagaacaggacctggtaaacatgtttggttattgttagccattactactgtgggctggtctgtgtgggttatatcttaggaagtctcttctactccttgtagct

SEQ ID NO: 92753 - DNA, 120 bp, Artificial Sequence
  ENSG00000088833_30 (sequence is synthesized)
ccgagtaacttgcccacattactcaggagcgagggagctagcaataacgtatgaaatatatgactcagggtttgaagtgaattctgctggacctgtaagttccataagggcacgattttc

SEQ ID NO: 92754 - DNA, 120 bp, Artificial Sequence
  ENSG00000088833_31 (sequence is synthesized)
cctgtctgggtcaatagatcagcagcaccaaacaatgccaggcgcattgcaaatgctcagtaacagtccaagaagggattcccttcttgctaggggccttgtttctgcttgtgttctgat

SEQ ID NO: 92755 - DNA, 120 bp, Artificial Sequence
  ENSG00000088833_32 (sequence is synthesized)
aaaatatccattatggaaactacagactagtataatgaaaaagtcttaaactcatctaccctttggtaactacggttgatattctggcatatttccatccagtctttgttctgtatataa

SEQ ID NO: 92756 - DNA, 120 bp, Artificial Sequence
  ENSG00000088833_33 (sequence is synthesized)
atatggttttgctggatcaatgctacatctcagacgtttccccatgtccttaaaatccttcatatgccttttcatatgctataataataatccattatatgggatgcctgacatttagat

SEQ ID NO: 92757 - DNA, 120 bp, Artificial Sequence
  ENSG00000088833_34 (sequence is synthesized)
ttttttcaatgttttactactgtaaatatcagtgctatgaacatttttgtggattaattaaccacatttcagattttttttaggatagtttttaaaaatggaaataccaggtcaagggca

SEQ ID NO: 92758 - DNA, 120 bp, Artificial Sequence
  ENSG00000088833_35 (sequence is synthesized)
tgcatatttttaaggctcttgatcacaggctcccagttctgaagccagggctttgagatcccttaataaagactttatagtccatttagcagaacttcatctacctggaatgaacaagaa

SEQ ID NO: 92759 - DNA, 120 bp, Artificial Sequence
  ENSG00000088833_36 (sequence is synthesized)
tgaacgccagcctcatttcatgggttttggttctccacaggatctgcctcggtctgtcagacattcctaaggaaaattgtataataactatttcgggaatgcagttatctcatcatggtc

SEQ ID NO: 92760 - DNA, 120 bp, Artificial Sequence
  ENSG00000088833_37 (sequence is synthesized)
agtctttggggaagtgggctgagaaattacatgtgttctattctctattttcattcctattgtgaccttcacaccgactcaaaaccttccttttagatacttctggatataaaaatatat

SEQ ID NO: 92761 - DNA, 120 bp, Artificial Sequence
  ENSG00000088833_38 (sequence is synthesized)
gttaattttggggtttcacactcctgagtgaaaggcagtgtcatcaagtacgtgaatgcccagctcctaaatgtctttctcgttctcctcccacccagtcacgtcctccaggcagtgacc

SEQ ID NO: 92762 - DNA, 120 bp, Artificial Sequence
  ENSG00000088833_39 (sequence is synthesized)
ttcctttatttcacattccgcttacttccttgacccctcagcatttcagacctgaaaggacactggtactgttgtccttgtcggggcctgtggctttgcctctcattccctggtgaatgt

SEQ ID NO: 92763 - DNA, 120 bp, Artificial Sequence
  ENSG00000088833_40 (sequence is synthesized)
caggaaatagagggctgagactaatttttataggttctcaatttttcttgcttggggacaagctgttgacttagctctgaataggagtaataaggaggcagtgggccaggctgcatgaca

SEQ ID NO: 92764 - DNA, 120 bp, Artificial Sequence
  ENSG00000088833_41 (sequence is synthesized)
actggttttcaggcccatataaaaaagtactaactttattatctcaagccatgcctggcctattgcaaagcccagtgtgggtgtcttggggcttgtatttgagattggagcttctctgac

SEQ ID NO: 92765 - DNA, 120 bp, Artificial Sequence
  ENSG00000088833_42 (sequence is synthesized)
ctccagtaccctttcctcaggggccacagtgtgtgtcacatgaatggcaaggtgaggtgaggcttgggggagctcctggtgctgtgtcacaccaccttacctgtgtgcattactctgtgc

SEQ ID NO: 92766 - DNA, 120 bp, Artificial Sequence
  ENSG00000088833_43 (sequence is synthesized)
gggaagctgaaacagcaggaaagcatggaggtggttctccactaactggagccaccctcattgaatcctgaaacgtggttgaaagctgactctgtgccaggccctaatcagtgtgctgag

SEQ ID NO: 92767 - DNA, 120 bp, Artificial Sequence
  ENSG00000088833_44 (sequence is synthesized)
aaagaaacagaagtctgctctctcagagcttacctcctcccgagagaagacagacaatgagcaagtaaccctagggtggacagaagaggcctcctgataaagtgacatttgagcagacac

SEQ ID NO: 92768 - DNA, 120 bp, Artificial Sequence
  ENSG00000088833_45 (sequence is synthesized)
ctgaaggaggtgaggaagagagccctgcagatacccaggggaagagctgaaaagtacaaggaacagcgaatgcaaaggtcctgaggcaggagcgtgcttgacttgcacaagaacagcaaa

SEQ ID NO: 92769 - DNA, 120 bp, Artificial Sequence
  ENSG00000088833_46 (sequence is synthesized)
ccgtaaacgcctgaactacatacatggcagagatgaagcacacagtctcggaaatctggctgtgcaggttcaaattccagttctcctacttatctcttggtgataatagagtgacatcct

SEQ ID NO: 92770 - DNA, 120 bp, Artificial Sequence
  ENSG00000088833_47 (sequence is synthesized)
gaccagagcgttcaggcctgggtgtgtggaccaggtctgaatgagaaggttagactgagtcaatgggtagtacttcccagcaggcctcagtcatttcctatacagagatgcatgactttt

SEQ ID NO: 92771 - DNA, 120 bp, Artificial Sequence
  ENSG00000088833_48 (sequence is synthesized)
aactgggtgtggtttatggttcaatcctgggggaaaccacaaacctacttttaagacttttacttatgtagtatgaggaatgaccactgcaactctaaagtttttaagtaaaagccaaaa

SEQ ID NO: 92772 - DNA, 120 bp, Artificial Sequence
  ENSG00000088833_49 (sequence is synthesized)
aacttcctttcaagggtgctatagatgtgaaagtttaggcgaaatgacttaggaaagctgttttgatattttaggatgcccgttaccttattaagaagtcttgtacaaaataaacctgtg

SEQ ID NO: 92773 - DNA, 120 bp, Artificial Sequence
  ENSG00000088836_0 (sequence is synthesized)
ctttctccctagggtggcgtgggttgcatccctcggaagagcgaaggaatgagccaggtcggggggcggggagacaggtgcacacaggaggtccagggcttggtccatggggctggtgac

SEQ ID NO: 92774 - DNA, 120 bp, Artificial Sequence
  ENSG00000088836_1 (sequence is synthesized)
ctttctgcttcccttgcagaaaactctcccaccatgtcgcagaatggatacttcgaggattcaagctactacaagtgtgacacagatgacaccttcgaagcccgagaggagatcctgggg

SEQ ID NO: 92775 - DNA, 120 bp, Artificial Sequence
  ENSG00000088836_2 (sequence is synthesized)
gatgaggccttcgacactgccaactcctccatcgtgtctggcgagagtatccgtttttttgtcaatgtcaaccttgagatgcaggccaccaacactgagaatgaagcgacttccggtggc

SEQ ID NO: 92776 - DNA, 120 bp, Artificial Sequence
  ENSG00000088836_3 (sequence is synthesized)
tgtgtgctcctgcacacctcccgaaagtacctgaagttaaagaacttcaaggaagagatccgtgcgcaccgcgacctagatggcttcctggcgcaggccagcatcgtcctgaacgagacg

SEQ ID NO: 92777 - DNA, 120 bp, Artificial Sequence
  ENSG00000088836_4 (sequence is synthesized)
gccacctccctggataacgtgctgcggaccatgcttcgccgcttcgccagggaccctgacaacaatgagcccaactgcaacctggacctgctcatggccatgctcttcaccgatgccggg

SEQ ID NO: 92778 - DNA, 120 bp, Artificial Sequence
  ENSG00000088836_5 (sequence is synthesized)
gcacccatgcggggtaaagtccacctgctgtcagataccatccaaggggtcaccgccacagtgacaggggtgcggtaccagcagtcgtggctctgcatcatctgtaccatgaaggcccta

SEQ ID NO: 92779 - DNA, 120 bp, Artificial Sequence
  ENSG00000088836_6 (sequence is synthesized)
cagaagcggcacgtgtgcatcagccgcctggttcgcccacagaactggggggagaattcctgtgaggttcggttcgtcatcctggtgctggccccacccaagatgaaaagcactaagact

SEQ ID NO: 92780 - DNA, 120 bp, Artificial Sequence
  ENSG00000088836_7 (sequence is synthesized)
gcgatggaggtggcgcgcacgtttgccaccatgttctcggatatcgccttccgccagaagctcctggagacccgcacagaggaggaattcaaggaggccttggtgcatcagagacagctg

SEQ ID NO: 92781 - DNA, 120 bp, Artificial Sequence
  ENSG00000088836_8 (sequence is synthesized)
ctcaccatggtgagccacggtccagtggcgccgagaacgaaggaacgcagcacagtctccctccctgcccacagacacccagagcccccaaagtgcaaggactttgtcccttttgggaag

SEQ ID NO: 92782 - DNA, 120 bp, Artificial Sequence
  ENSG00000088836_9 (sequence is synthesized)
ggcatccgggaggacatcgcacgcaggttccccttgtaccccttggacttcactgatggcattattgggaaaaacaaggctgtgggcaaatacatcaccaccaccctgttcctctacttc

SEQ ID NO: 92783 - DNA, 120 bp, Artificial Sequence
  ENSG00000088836_10 (sequence is synthesized)
gcctgcctcctgcccaccatcgctttcgggtctctcaatgacgagaacacagacggggccatcgacgtgcagaagaccatagccgggcagagcatcgggggcctgctctacgcgctcttc

SEQ ID NO: 92784 - DNA, 120 bp, Artificial Sequence
  ENSG00000088836_11 (sequence is synthesized)
tctgggcagccattggtgattctgctgaccaccgcgcccctggcgctctacatccaggtgattcgtgtcatctgtgatgactatgacctggacttcaactccttctacgcatggacgggc

SEQ ID NO: 92785 - DNA, 120 bp, Artificial Sequence
  ENSG00000088836_12 (sequence is synthesized)
tcttcatttccatcacgtttgtgctggatgccgtcaagggcacggttaaaatcttctggaagtactactatgggcattacttggacgactatcacacaaaaaggacttcatcccttgtca

SEQ ID NO: 92786 - DNA, 120 bp, Artificial Sequence
  ENSG00000088836_13 (sequence is synthesized)
gcctgtcaggcctcggcgccagcctcaacgccagcctccacactgccctcaacgccagcttcctcgccagccccacggagctgccctcggccacacactcaggccaggcgaccgccgtgc

SEQ ID NO: 92787 - DNA, 120 bp, Artificial Sequence
  ENSG00000088836_14 (sequence is synthesized)
tcagcctcctcatcatgctgggcacgctctggctgggctacaccctctaccaattcaagaagagcccctacctgcacccctgcgtgcgagagatcctgtccgactgcgccctgcccatcg

SEQ ID NO: 92788 - DNA, 120 bp, Artificial Sequence
  ENSG00000088836_15 (sequence is synthesized)
cggtgctcgccttctccctcatcagctcccatggcttccgggaaatcgagatgagcaagttccgctacaaccccagcgagagcccctttgcgatggcgcagatccagtcgctgtccctga

SEQ ID NO: 92789 - DNA, 120 bp, Artificial Sequence
  ENSG00000088836_16 (sequence is synthesized)
gggccgtcagcggtgccatgggcctcggcttcctgctgtccatgctcttcttcatcgagcagaacttggtggccgccttggtgaatgcaccggagaacaggctggtgaagggcactgcct

SEQ ID NO: 92790 - DNA, 120 bp, Artificial Sequence
  ENSG00000088836_17 (sequence is synthesized)
accactgggacctcctgctcctcgccatcatcaacacagggctgtctctgtttgggctgccttggatccatgccgcctacccccactccccgctgcacgtgcgagccctggccttagtgg

SEQ ID NO: 92791 - DNA, 120 bp, Artificial Sequence
  ENSG00000088836_18 (sequence is synthesized)
aggagcgtgtggagaacggacacatctatgacacgattgtgaacgtgaaggagacgcggctgacctcgctgggcgccagcgtcctggtgggcctgtccctgttgctgctgccggtcccgc

SEQ ID NO: 92792 - DNA, 120 bp, Artificial Sequence
  ENSG00000088836_19 (sequence is synthesized)
ttcagtggatccccaagcccgtgctctatggcctcttcctctacatcgcgctcacctccctcgatggcaaccagctcgtccagcgcgtggccctgctgctcaaggagcagactgcgtacc

SEQ ID NO: 92793 - DNA, 120 bp, Artificial Sequence
  ENSG00000088836_20 (sequence is synthesized)
ccccgacacactacatccggagggtgccccagaggaagatccactacttcacgggcctgcaggtgcttcagctgctgctgctgtgtgccttcggcatgagctccctgccctacatgaaga

SEQ ID NO: 92794 - DNA, 120 bp, Artificial Sequence
  ENSG00000088836_21 (sequence is synthesized)
tgatctttcccctcatcatgatcgccatgatccccatccgctatatcctgctgccccgaatcattgaagccaagtacttggatgtcatggacgctgagcacaggccttgactggcagacc

SEQ ID NO: 92795 - DNA, 120 bp, Artificial Sequence
  ENSG00000088836_22 (sequence is synthesized)
ctgcccacgccccattcgccagccctccacgtcctcccaggctggctctggagctgtgaggggaggtgtaggtgtgtgggtgactgctctgtgctgcgccttctcatggctgactcaggc

SEQ ID NO: 92796 - DNA, 120 bp, Artificial Sequence
  ENSG00000088836_23 (sequence is synthesized)
ctggggcatctgggcattgtaggggtgcagtggtatgtgcccacccctctcccattatcctttagctttaggccaagagcgttgctcagggcagcttctgcccagggtgggtgggactga

SEQ ID NO: 92797 - DNA, 120 bp, Artificial Sequence
  ENSG00000088836_24 (sequence is synthesized)
gcaggatggattttcttttgataaaagagtcgatgcctgaaagagaaaccatttccttgattgtgtaaggaacttgctggacgcacattagagaataaagctcctgtttctaggctccta

SEQ ID NO: 92798 - DNA, 120 bp, Artificial Sequence
  ENSG00000088836_25 (sequence is synthesized)
cttccaggcggccgggacgcggtcccaggactggagaccgttgcctgtcggcccccgtgtgacccggggcgcgtgacgggggtcgggggaactgcgcctgcaatgggcgtttatggcccc

SEQ ID NO: 92799 - DNA, 120 bp, Artificial Sequence
  ENSG00000088836_26 (sequence is synthesized)
caggaccggtctgagagtgagaagagggatgtgcagagagatcccccgccttggcatccgaggagagagggggagaggcccgctcgggcccggtcccttcctctcgctgcagcggggcag

SEQ ID NO: 92800 - DNA, 120 bp, Artificial Sequence
  ENSG00000088836_27 (sequence is synthesized)
ggagcgccgcgtgaggagcccggccgtgagtgcgcgagtgtgccatggccgcggccaccaggcgcgtgttccatctgcagccgtgcggtgggtgcctgaacccgggggcgcggcgggaag

SEQ ID NO: 92801 - DNA, 120 bp, Artificial Sequence
  ENSG00000088836_28 (sequence is synthesized)
tttatgcctttttcaacctcagcctggtcatgagtctcttcaagaggtgactggcccttccgtgagctgctgggaccctcaaggcttgggatctggttcagccccctgtaaccccagggt

SEQ ID NO: 92802 - DNA, 120 bp, Artificial Sequence
  ENSG00000088836_29 (sequence is synthesized)
ggtgggggtgcccccaccatattgctgccccaaggggctggggtgggctcaggcaaggcctggggccctggccttcttcctggcagggggaggcaggggactgtgcaggggctcagggag

SEQ ID NO: 92803 - DNA, 120 bp, Artificial Sequence
  ENSG00000088836_30 (sequence is synthesized)
tcccatggcttccgggaaatcgagagtgagttggggccgggcggtgggtgacgtggggtagctccccaggcgctgcaggcatagcagtagcctgtcccctactgcagtgagcaagttccg

SEQ ID NO: 92804 - DNA, 120 bp, Artificial Sequence
  ENSG00000088836_31 (sequence is synthesized)
tttaccttccgcccgggcatcttcccgtccggcgccgcggtgggagccccggaacccctggagttttgggagtcccgggacccctgaccgtgccctgcgcggccgcagcggtttctccct

SEQ ID NO: 92805 - DNA, 120 bp, Artificial Sequence
  ENSG00000088836_32 (sequence is synthesized)
ggggtctgcctcagtcgcacagctcggtgggctcgtggcgcagtcgaacgttttcccagaagctccccggccccgtccagcccctaaactcgcgacgctgggtctgctgggtccggcgcg

SEQ ID NO: 92806 - DNA, 120 bp, Artificial Sequence
  ENSG00000088836_33 (sequence is synthesized)
cgggtctactcggtttggcccagcagctgcgggcggcggggagcagcccagcccggctggagcagcctcccgcggaaaactctcccaccatgtcgcagaatggatacttcgaggattcaa

SEQ ID NO: 92807 - DNA, 120 bp, Artificial Sequence
  ENSG00000088854_0 (sequence is synthesized)
gccgccctgcgggcaactgagaccctcgcagctgcaccgtcctcctccgccgccagtcgtccgccgccatggacgtgtaccccccgcgccggcaggggctgccccgcgctcggtcccctg

SEQ ID NO: 92808 - DNA, 120 bp, Artificial Sequence
  ENSG00000088854_1 (sequence is synthesized)
gcggctccagccgcgggtcaccctccgtcagctgcagtcgacttcggcaggttcagagcatcctgacccagagcagcaagtctcggccggatgggatcctctgcatcctaggaatcgata

SEQ ID NO: 92809 - DNA, 120 bp, Artificial Sequence
  ENSG00000088854_2 (sequence is synthesized)
gcaggtacaatgaaggctgcagagagctggcaaattatcttctatttggtttgtacaatcagaataccagtgattttgagaaaacgggattttctgaagaagtactagatgatgtaatta

SEQ ID NO: 92810 - DNA, 120 bp, Artificial Sequence
  ENSG00000088854_3 (sequence is synthesized)
tattgattaaatcggatagcgtccatctgtactgtaatcctgtaaactttcgctatctcttaccttatgtggcacattggagaaatctgcatttccactgcatgaccgaaaatgagtatg

SEQ ID NO: 92811 - DNA, 120 bp, Artificial Sequence
  ENSG00000088854_4 (sequence is synthesized)
aagatgaagaagccgcagaagaatttaaaattaccagctttgtggacatggttcgagactgtagtagaattggcattccttacagctcccaaggtcacttgcagatatttgatatgtttg

SEQ ID NO: 92812 - DNA, 120 bp, Artificial Sequence
  ENSG00000088854_5 (sequence is synthesized)
tggtggagaaatggccaattgtacaggcctttgcacttgagggcattggaggggatggattttttaccatgaaatatgagttgcaggatgtgagtttgaatctatggaatgtctacagca

SEQ ID NO: 92813 - DNA, 120 bp, Artificial Sequence
  ENSG00000088854_6 (sequence is synthesized)
agatggatcctatgtctctggagagtttgctttcagatgatttggtggcttttgaacatcagtggactagcttcttcgctaattttgacacagaaattcctttcctgctagaactttcag

SEQ ID NO: 92814 - DNA, 120 bp, Artificial Sequence
  ENSG00000088854_7 (sequence is synthesized)
aatctcaggcgggtgagccattcagaagttatttcagtcatggaatgatctctagccatataactgaaaacagccctaaccggcagccatttgttctctttggtaatcactccacacgag

SEQ ID NO: 92815 - DNA, 120 bp, Artificial Sequence
  ENSG00000088854_8 (sequence is synthesized)
aaaacctgaatgctggcaactttaacttcccttctgaaggacatctggtacgaagcactggtcccggcgggagctttgccaagcacatggtagcccagtgtgtctcaccaaagggacctc

SEQ ID NO: 92816 - DNA, 120 bp, Artificial Sequence
  ENSG00000088854_9 (sequence is synthesized)
ttgcttgttcgagaacatacttttttggagctactcatgttccttacttgggtggtgacagcaagctgcccaagaaaactgaacaaattaggctattgtcccagatatatgctgctgtta

SEQ ID NO: 92817 - DNA, 120 bp, Artificial Sequence
  ENSG00000088854_10 (sequence is synthesized)
ttgaggctgttttggctggcattgcatgttatgctaaaacttccagtctaacaaaggccaaggaggtagcagagcaaactctgggatctgggttagattcctttgagttgattccgttta

SEQ ID NO: 92818 - DNA, 120 bp, Artificial Sequence
  ENSG00000088854_11 (sequence is synthesized)
aggcagccctgcgctccaagatgacttttcatatacatgctgtgaataatcagggaagaattgtaccgctggacagtgaagatagcttatcctttgtgaagacggcttgtatggccgtct

SEQ ID NO: 92819 - DNA, 120 bp, Artificial Sequence
  ENSG00000088854_12 (sequence is synthesized)
atgacattcctgacttactgggaggcaatggttgtttaggatctgtggttttctctgaatcatttttgacttctcagatcttagttaaagaaaaggatggcactgttaccacagaaacca

SEQ ID NO: 92820 - DNA, 120 bp, Artificial Sequence
  ENSG00000088854_13 (sequence is synthesized)
gctccgtagtcctgactgctgctgtacccagattctgctcctggctggtggaagataatgaagtaaaattgtctgagaaaacccagcaagcagtgaggggggatgagtctttcctgggca

SEQ ID NO: 92821 - DNA, 120 bp, Artificial Sequence
  ENSG00000088854_14 (sequence is synthesized)
cttatctaacaggaggagaaggagcatatctttattccagcaatctacagtcctggcctgaggaagggaatgttcatttcttctctagtggccttctgttttctcactgtcgtcatagaa

SEQ ID NO: 92822 - DNA, 120 bp, Artificial Sequence
  ENSG00000088854_15 (sequence is synthesized)
gtatcatcatttccaaggatcacatgaattccatttccttctatgatggggattccaccagtactgttgctgctcttctcatagacttcaaaagctcattgcttcctcacctcccagttc

SEQ ID NO: 92823 - DNA, 120 bp, Artificial Sequence
  ENSG00000088854_16 (sequence is synthesized)
atttccatggatcaagcaattttctgatgattgcccttttccccaaatcgaagatataccaagcattttactcagaggtcttctccctctggaaacagcaggataactcagggatctctt

SEQ ID NO: 92824 - DNA, 120 bp, Artificial Sequence
  ENSG00000088854_17 (sequence is synthesized)
taaaagtgatccaggaagatggattatctgtggaacaaaagagattgcactccagtgcacagaagctcttcagtgccctgagccagcctgctggggagaaacggagttccctaaagttac

SEQ ID NO: 92825 - DNA, 120 bp, Artificial Sequence
  ENSG00000088854_18 (sequence is synthesized)
tctcagccaaactcccagagctggactggtttctccagcatttcgccatcagcagcattagccaggagcctgtgatgcggacccatcttcctgtgctgctgcagcaagctgaaatcaaca

SEQ ID NO: 92826 - DNA, 120 bp, Artificial Sequence
  ENSG00000088854_19 (sequence is synthesized)
ctactcacagaatagaaagtgacaaggtaattatcagcattgtaaccggcctcccaggctgtcacgctagcgagctctgtgcttttctggtcactctgcataaggaatgtggcagatgga

SEQ ID NO: 92827 - DNA, 120 bp, Artificial Sequence
  ENSG00000088854_20 (sequence is synthesized)
tggtgtatcgccaaatcatggacagctctgaatgttttcatgctgcacacttccagagatacctttccagtgccctagaggcccagcagaaccgctctgcgcgccagtcagcctacatcc

SEQ ID NO: 92828 - DNA, 120 bp, Artificial Sequence
  ENSG00000088854_21 (sequence is synthesized)
gcaagaagaccagactgctggtggtgttacaaggctacacagatgttattgatgttgtccaggccctgcagacccacccagactcaaatgtcaaggcctccttcaccattggtgccatca

SEQ ID NO: 92829 - DNA, 120 bp, Artificial Sequence
  ENSG00000088854_22 (sequence is synthesized)
cagcatgtgtggagcccatgagctgctacatggagcacagatttctctttcctaaatgtcttgaccagtgttcacaaggcctggtgagtaacgtggtattcaccagtcacaccacggagc

SEQ ID NO: 92830 - DNA, 120 bp, Artificial Sequence
  ENSG00000088854_23 (sequence is synthesized)
agcggcaccctctccttgttcagctgcagagcctcatcagggctgccaatcctgctgcagccttcattcttgcagaaaatgggattgtcaccaggaatgaagacattgagctgattctct

SEQ ID NO: 92831 - DNA, 120 bp, Artificial Sequence
  ENSG00000088854_24 (sequence is synthesized)
cagaaaacagtttttcaagtcctgagatgctacgatctcgatatttaatgtatcctggctggtatgaaggtaaattgaatgctggatcagtctatcccctaatggttcagatctgcgtat

SEQ ID NO: 92832 - DNA, 120 bp, Artificial Sequence
  ENSG00000088854_25 (sequence is synthesized)
ggtttggccgtcccttggagaagactcgctttgtggccaaatgtaaagcaattcagtcctccatcaagccaagtcccttctccggaaacatctaccacatcctgggcaaagtgaagtttt

SEQ ID NO: 92833 - DNA, 120 bp, Artificial Sequence
  ENSG00000088854_26 (sequence is synthesized)
cagactctgagaggaccatggaggtctgctacaacacactggccaactccttgagcatcatgccagttttggaaggacccacaccaccaccagactccaaaagcgtatctcaagacagca

SEQ ID NO: 92834 - DNA, 120 bp, Artificial Sequence
  ENSG00000088854_27 (sequence is synthesized)
gcgggcagcaggagtgctaccttgtgttcatcggctgctccctgaaggaagacagcatcaaggactggctgcggcagtcagctaagcagaagcctcagaggaaagccctgaagaccaggg

SEQ ID NO: 92835 - DNA, 120 bp, Artificial Sequence
  ENSG00000088854_28 (sequence is synthesized)
atccacgtaaaacgccacttggaacccctacctgcaggctacttttataatggcacccaatttgttaacttctttggtgacaaaactgattttcacccactcatggaccagttcatgaat

SEQ ID NO: 92836 - DNA, 120 bp, Artificial Sequence
  ENSG00000088854_29 (sequence is synthesized)
gactacgtggaagaagccaaccgggaaattgagaagtataaccaggagctggaacagcaggagtatcatgacctctttgagctgaagccctagaggaaggctgggcccgtacgtcctgca

SEQ ID NO: 92837 - DNA, 120 bp, Artificial Sequence
  ENSG00000088854_30 (sequence is synthesized)
gaatgtccaccttggagatggacgaacgggtgtcttaacctcagctctgctggaggcctctcccttaaggggctgtctttgttctccttggcctgtgtgggctggcttgagtgcatgttg

SEQ ID NO: 92838 - DNA, 120 bp, Artificial Sequence
  ENSG00000088854_31 (sequence is synthesized)
tctttattccctgtatagcgctgaagagcatcacctgcaccattgattttgggggtcgggggaatactcaaggatgagcagatggggcctgcccgtctacgtgtgcaactggcagtccag

SEQ ID NO: 92839 - DNA, 120 bp, Artificial Sequence
  ENSG00000088854_32 (sequence is synthesized)
gagctctgggtttctgataacaggatctcctttgggctcttgaggttggggagaagcattaggattacacagaggagctactgggacttagaaggaaccctggctgcctgaactgtggcc

SEQ ID NO: 92840 - DNA, 120 bp, Artificial Sequence
  ENSG00000088854_33 (sequence is synthesized)
gtgtctgggaggcgaggccacgacaggcctcaagcctcagatgctgctccacgagagccatcttccccagtggagtgcctgcctcccctgctaggcccgtttccctgaaggagctggccg

SEQ ID NO: 92841 - DNA, 120 bp, Artificial Sequence
  ENSG00000088854_34 (sequence is synthesized)
tactggccgtgggcccagtcctgggaggagcagcacagccttgcccaggcccagtccacagagccagcagcttgggttgagatgaatgatgtgttcacaaatgaggggatttcccttctg

SEQ ID NO: 92842 - DNA, 120 bp, Artificial Sequence
  ENSG00000088854_35 (sequence is synthesized)
gactaaactgaaggagaggcttgttgctttccagaggtgtgtggctcttaagttgacatcagcttttccccttgtgggtggttctttagctctcctgtcacaccattcgggtgtcctaat

SEQ ID NO: 92843 - DNA, 120 bp, Artificial Sequence
  ENSG00000088854_36 (sequence is synthesized)
gtagggacaagagcaagcctgctgctcaggccccctggcgaggcttcacctcactgtggaagggggcgtcctgcagctggttagtcttaggcctggtggctgatcacttgtggggtcagt

SEQ ID NO: 92844 - DNA, 120 bp, Artificial Sequence
  ENSG00000088854_37 (sequence is synthesized)
ctccagcacccagcgctcccacaagccttgccaaggaaggcctgcttttcagccacaaacttcaggaaactcatccccccgctccccaaagtgttgttgctggccctgggcttgtgtggc

SEQ ID NO: 92845 - DNA, 120 bp, Artificial Sequence
  ENSG00000088854_38 (sequence is synthesized)
tcctgaggattgggaatttcaaataattgcaatacctgagttagaattccttctaatggcatcgttttaagctggaccataaagcagaggggaattacaagtgtgtcccatgcctgacct

SEQ ID NO: 92846 - DNA, 120 bp, Artificial Sequence
  ENSG00000088854_39 (sequence is synthesized)
tcataattggtgtgggggacaggggagtcacagccactgatatttaggtgatgtctcttaggacttcagtgcctcagctgcctgaactgtaaatgttttctgaatttcacatattttttt

SEQ ID NO: 92847 - DNA, 120 bp, Artificial Sequence
  ENSG00000088854_40 (sequence is synthesized)
ttgcatgccttaggaagaagcacataggtaaaaccagcagtttccagtaatatagggggtttttgagcaaggcccctggagcagcggagagacaagatggagcacatgtagtctgtgtgc

SEQ ID NO: 92848 - DNA, 120 bp, Artificial Sequence
  ENSG00000088854_41 (sequence is synthesized)
ctggtcacacagaggcctgcatgcaagtagcaaagcagctctcaagggcttgtcagtaaaatatattagaaaaaaaaaaaaaacaatttgaagccaaatgaacaaaactccagataccat

SEQ ID NO: 92849 - DNA, 120 bp, Artificial Sequence
  ENSG00000088854_42 (sequence is synthesized)
tgataagaaattttgcatcaagaagggcttctgaaaagacccacgtgctccagtcccagctccaaaagccactgatgacaagggccccactgtggaacctaagtctgggagccccctgac

SEQ ID NO: 92850 - DNA, 120 bp, Artificial Sequence
  ENSG00000088854_43 (sequence is synthesized)
ttctggctggccagaggctgcggtccgtcaagggcttgcctcgcttcagaatcagtaacatagatcttaagtgcaattgattaataagcagtgagttactgtagcttcctttagctctac

SEQ ID NO: 92851 - DNA, 120 bp, Artificial Sequence
  ENSG00000088854_44 (sequence is synthesized)
cgaactctttttaaaaactcaaacttgagcagccttagaaaaggggttggggggtgggaaccacaggccatttctctaagtgggctgctgtgaagttttaaatgaaagctctagctttag

SEQ ID NO: 92852 - DNA, 120 bp, Artificial Sequence
  ENSG00000088854_45 (sequence is synthesized)
gagcttgagccatttcctgactgcactggcctggcagtctggctgctgcagaagagtttttaaagaggggtcggagcccgcccgtgagagcgggtcttctcaccatgtggggctgtacta

SEQ ID NO: 92853 - DNA, 120 bp, Artificial Sequence
  ENSG00000088854_46 (sequence is synthesized)
cgtggtggtctttgtttctcttcacagaaatgctctctcaccaacttgccccactgtcccaactcctctcctcttagagaaaaaactgtgattacctcaacttgaatatgaaactgtgat

SEQ ID NO: 92854 - DNA, 120 bp, Artificial Sequence
  ENSG00000088854_47 (sequence is synthesized)
tgaaaaaagtcaaaacgtgaagaagcatcaaagccaaaaaggcaaaactggctgaggcctctgttgatgctcctcagcctactcgggaacgtgaaggggcagctggcgaaagggcattcc

SEQ ID NO: 92855 - DNA, 120 bp, Artificial Sequence
  ENSG00000088854_48 (sequence is synthesized)
tggggccacttgctctgccccactgataaggcacacccgcggtgcactgtgagctctttgaggactgaggccaggggatgcctcctggaacctgccaggcctctctgttctgtgaaggtc

SEQ ID NO: 92856 - DNA, 120 bp, Artificial Sequence
  ENSG00000088854_49 (sequence is synthesized)
agtatccacttgattcctccaggcggcgctccaggtgggaggagcagggtcttctgctgtttccaaaggaatggccatgacactgcttttgaccttagaagtggatccagggacccagca

SEQ ID NO: 92857 - DNA, 120 bp, Artificial Sequence
  ENSG00000088854_50 (sequence is synthesized)
aagagcgggggtgggttcccagggacaggcagtcctcccggggcttacatgctttttgctaactttcctattagcagcttcagtttatatcacccagagtgcgtgggataatgttgaagt

SEQ ID NO: 92858 - DNA, 120 bp, Artificial Sequence
  ENSG00000088854_51 (sequence is synthesized)
cgctgaagttacgggttattttatgtttttacatgggatttttctgtttttgattggaagaaggagacagaaattggaggaaatgggattattatcctagggaagggccgttggcaagga

SEQ ID NO: 92859 - DNA, 120 bp, Artificial Sequence
  ENSG00000088854_52 (sequence is synthesized)
gttgagccggcccctctgagccctgggggctatctgacctgaagcctggacactgggcccttcaggtcgcaagaaaaagttccctcctaaattctattaggattttggagaatttttgca

SEQ ID NO: 92860 - DNA, 120 bp, Artificial Sequence
  ENSG00000088854_53 (sequence is synthesized)
cagtaagaagctctgggttgctccttgggcttctcaaaagggaaaagttcaattcaaagattgtaaactacgaagtattccagccgtgttgctgatctagttggatagttgtacctcaaa

SEQ ID NO: 92861 - DNA, 120 bp, Artificial Sequence
  ENSG00000088854_54 (sequence is synthesized)
aaagtaggtgagaactggcttcctcattgtcccaggatgtcaaatactaatgacataagagctcacttacgtgccaaaattcacttttatactagtttttcagtgctttaatatttgtaa

SEQ ID NO: 92862 - DNA, 120 bp, Artificial Sequence
  ENSG00000088854_55 (sequence is synthesized)
cttaaattttaaaactcgtatttacaaacactactgtaacttcagtgaaactgaattgtgcgattgaagctttttgcttatcatagtatttattacactacttaattcagtaaatatata

SEQ ID NO: 92863 - DNA, 120 bp, Artificial Sequence
  ENSG00000088854_56 (sequence is synthesized)
aaagtagccttcaatttatttttatattattttacatgtttttacctgcagttgtgtatgtgaatttaccttggtaatcgagatgtcatgctaaggaccaataaactatcactgaacaag

SEQ ID NO: 92864 - DNA, 120 bp, Artificial Sequence
  ENSG00000088854_57 (sequence is synthesized)
tccctaaaaacagttgtttttttctgaagtgaaatacaggtggagactaacacatcccctctgcttgtcataagctcattagctggacctcaggtcctagtgagagagcccaccaaggcc

SEQ ID NO: 92865 - DNA, 120 bp, Artificial Sequence
  ENSG00000088854_58 (sequence is synthesized)
ttgggctctgagcccaggtgaccagcagacatctcaggtgtgtcagggcctgagagcactggacatggacatggtggaaggactgtccagccagtgtcctggaaatatttgaacacagtg

SEQ ID NO: 92866 - DNA, 120 bp, Artificial Sequence
  ENSG00000088854_59 (sequence is synthesized)
ctctgcaggatgcctcgcattatgtaacacaggggtcttggcttctgaaagggtcaacacagacatttcaatgctgccaacttgcaggtagccggtgcccttgggggaatagaaggcaag

SEQ ID NO: 92867 - DNA, 120 bp, Artificial Sequence
  ENSG00000088854_60 (sequence is synthesized)
gctgggtatggtggcacatgcctgtagtctcagctagtcaggaggccggggtggaagggttacttgagcccaggaattcaaggttgcagtgagccgtgaccatgccattgcacttcagcc

SEQ ID NO: 92868 - DNA, 120 bp, Artificial Sequence
  ENSG00000088854_61 (sequence is synthesized)
gtgagccgtgaccatgccattgcacttcagcctgagtgatgaaacaagaccctttctcaaaaaaaaaaacgaaaaatgtccccactgccaggagccagtgtggctgtgaggggccacgtc

SEQ ID NO: 92869 - DNA, 120 bp, Artificial Sequence
  ENSG00000088854_62 (sequence is synthesized)
tcacagccctgacccgggccaagcatggtgttgggcgccgggcccgtctcacctgtcttggggggcgcccagtgtcttactctgtcaccccgggtagagtgcagtggtgcggtcctggct

SEQ ID NO: 92870 - DNA, 120 bp, Artificial Sequence
  ENSG00000088854_63 (sequence is synthesized)
cactgcagccttgacctcctaggctcaggttatcctcccgcttagcaggtgggactacagaggttgcagaacttgaagctaatttaccttgtacatgtaaagtgcattttcctgatccaa

SEQ ID NO: 92871 - DNA, 120 bp, Artificial Sequence
  ENSG00000088854_64 (sequence is synthesized)
acaagcttcactgttctcagctaacagtaactccagatgagggttactaccagggtggaaaatttcagcttgaaaccgaagttcccgatgtgtacaacatggtgcctcccaaagtgaaat

SEQ ID NO: 92872 - DNA, 120 bp, Artificial Sequence
  ENSG00000088854_65 (sequence is synthesized)
gcctgaccaagatctggcaccccaacatcacagagacaggggaaatatgtctgagtttactgagagaacattcaattgacggcactggctgggctcccatgagaacattaaaggatgtcg

SEQ ID NO: 92873 - DNA, 120 bp, Artificial Sequence
  ENSG00000088854_66 (sequence is synthesized)
tttggggattaaactctttgtttactgatttttgaattttgatgatccactgaatattgaagctgcagaacatcatttgcaggacaaggaggacttccagaataaagtggacaactacat

SEQ ID NO: 92874 - DNA, 120 bp, Artificial Sequence
  ENSG00000088854_67 (sequence is synthesized)
cacgcgttatgccagataataaaaggggacggttgcaggcccatggactgtgttacagtttgtctctaatgtgaaacagcaggaggtagccccacctcccatcctcacgctccctctcag

SEQ ID NO: 92875 - DNA, 120 bp, Artificial Sequence
  ENSG00000088854_68 (sequence is synthesized)
tcccctggattgccccagtcctgtgaccatgttgccctgaagaagaccatcttcgtgactgctcattgtagatggggaattcaacataaatacagcaagaaaatgtgtttgggcttcttt

SEQ ID NO: 92876 - DNA, 120 bp, Artificial Sequence
  ENSG00000088876_0 (sequence is synthesized)
ggtcggtggccgagatcccgggcacgctggctctggtccaccttctccaatccctgcctgctgggagaggacgatctcttgagaaaggaaagacttctgtgctcccgagaacttcctatc

SEQ ID NO: 92877 - DNA, 120 bp, Artificial Sequence
  ENSG00000088876_1 (sequence is synthesized)
aggtcctggctgcagggaaacaagctgggctttttataattaaggttggaagaagtcaccacaggcagcagaactccatcttgagatgaaataacatctacctggacctctggcagaatt

SEQ ID NO: 92878 - DNA, 120 bp, Artificial Sequence
  ENSG00000088876_2 (sequence is synthesized)
tcaaggcacacactgggctgactctggcgccatgatgttgccttatccttcagcactgggagatcaatactgggaagagattttgcttccaaagaatggggaaaatgtagagactatgaa

SEQ ID NO: 92879 - DNA, 120 bp, Artificial Sequence
  ENSG00000088876_3 (sequence is synthesized)
gaaattgacccaaaatcataaagcgaaaggcttgccttctaatgatactgactgcccccagaaaaaggagggaaaggcccaaatagtggtaccagttacattcagggatgtgactgtgat

SEQ ID NO: 92880 - DNA, 120 bp, Artificial Sequence
  ENSG00000088876_4 (sequence is synthesized)
cttcacagaagcagaatggaagagactgagtccagagcagaggaatctatacaaagaagtgatgctggagaattacaggaatcttctctcattggcagaaccaaagccagaaatctacac

SEQ ID NO: 92881 - DNA, 120 bp, Artificial Sequence
  ENSG00000088876_5 (sequence is synthesized)
ttgttcctcctgccttctggccttctcctgtcagcagttcctcagtcaacatgtacttcagatcttcctgggcttatgtgcagaaaatcacttccatccagggaattctagcccagggca

SEQ ID NO: 92882 - DNA, 120 bp, Artificial Sequence
  ENSG00000088876_6 (sequence is synthesized)
ttggaaacagcaggggcagcagtattcccatgtaagctgttggtttgaaaatgcagaaggtcaggagagaggaggtggctccaaaccctggtctgcaaggacagaggagagagaaacctc

SEQ ID NO: 92883 - DNA, 120 bp, Artificial Sequence
  ENSG00000088876_7 (sequence is synthesized)
aagggcattccccagcccactccaaagacagtcagcaagtcctagaaaaggcaacatggtggtagaaacagagcccagctcagcccaaagaccaaaccctgtgcagctagacaaaggctt

SEQ ID NO: 92884 - DNA, 120 bp, Artificial Sequence
  ENSG00000088876_8 (sequence is synthesized)
gaaggaattagaaaccttgagatttggagcaatcaactgtagagagtatgaaccggaccataacctggaatcaaactttattacaaacccgaggaccctcttagggaagaagccctacat

SEQ ID NO: 92885 - DNA, 120 bp, Artificial Sequence
  ENSG00000088876_9 (sequence is synthesized)
ttgcagtgattgtgggcgaagctttaaagatagatcaaccctcatcagacaccatcgtatacactcgatggagaagccttatgtgtgcagtgagtgcgggcgaggttttagccagaagtc

SEQ ID NO: 92886 - DNA, 120 bp, Artificial Sequence
  ENSG00000088876_10 (sequence is synthesized)
caacctcagcagacaccagagaacacattcagaagagaagccttatttgtgcagggagtgtgggcaaagctttagaagtaagtccatcctcaatagacatcagtggactcactcagagga

SEQ ID NO: 92887 - DNA, 120 bp, Artificial Sequence
  ENSG00000088876_11 (sequence is synthesized)
gaagccctatgtttgcagcgagtgtgggcgaggctttagcgagaagtcatccttcatcagacaccagaggacacactccggtgagaaaccctatgtgtgcctggagtgtggacgaagctt

SEQ ID NO: 92888 - DNA, 120 bp, Artificial Sequence
  ENSG00000088876_12 (sequence is synthesized)
ttgtgataagtcaaccctcagaaaacaccagaggatacactcaggggagaagccttatgtttgcagggagtgtgggcgaggctttagccagaactcagatctcatcaaacaccagaggac

SEQ ID NO: 92889 - DNA, 120 bp, Artificial Sequence
  ENSG00000088876_13 (sequence is synthesized)
acacttggatgagaagccttatgtttgcagggagtgtgggcgaggcttttgtgacaagtcaaccctcatcatacacgagcggacgcactctggagagaagccttatgtgtgtggtgagtg

SEQ ID NO: 92890 - DNA, 120 bp, Artificial Sequence
  ENSG00000088876_14 (sequence is synthesized)
ggggagaagcattatgtctgcagggagtgtaggcgaggttttagccagaagtcaaatctcatcagacaccagaggacgcactcaaatgagaagccttatatttgcagggaatgtgggcga

SEQ ID NO: 92891 - DNA, 120 bp, Artificial Sequence
  ENSG00000088876_15 (sequence is synthesized)
ggcttttgtgacaagtcaaccctcattgtacatgagaggacacactcaggagagaagccttacgtgtgcagtgagtgtggccgaggctttagccggaaatcactcctccttgtccaccag

SEQ ID NO: 92892 - DNA, 120 bp, Artificial Sequence
  ENSG00000088876_16 (sequence is synthesized)
aggacacactcaggggagaagcattatgtttgtagggagtgtgggcgaggctttagtcataagtcaaatctcatcagacaccagaggacacactgacgggagaaacctgtgtatgcaggg

SEQ ID NO: 92893 - DNA, 120 bp, Artificial Sequence
  ENSG00000088876_17 (sequence is synthesized)
gtcatgaacaagacctgagtgaccagtcaagcctcatgttaccccagagagacacatggggagtagaccctgtgtacacagattgtgagtgaagttccagagatgtgtcagcccttatca

SEQ ID NO: 92894 - DNA, 120 bp, Artificial Sequence
  ENSG00000088876_18 (sequence is synthesized)
ggcatgggagggacacgttcaggagaggagccttatgagtatagagtacgggcaactgtagccatcagtcagccttgagcatgcacaaaaggacacacttaggagagaagtttatgtgta

SEQ ID NO: 92895 - DNA, 120 bp, Artificial Sequence
  ENSG00000088876_19 (sequence is synthesized)
gggactgtgggaaggctttagcaataatcaacatttaccagacatccaatgacagcctcaggggaaagcacccttgtctggggagtgttggggagcatcagtaaaagaatggacactcag

SEQ ID NO: 92896 - DNA, 120 bp, Artificial Sequence
  ENSG00000088876_20 (sequence is synthesized)
gcacagagtggccctcaggaaggaggtctttgtttgtaggatgtatgggcaaagcttttgtgatcacacaccacagggagaatctgcatgtggggacactgtggagctctgcccagatga

SEQ ID NO: 92897 - DNA, 120 bp, Artificial Sequence
  ENSG00000088876_21 (sequence is synthesized)
ccttttcaggggtaacaccccagctgcttgagagaacagtgttgctgctggcagagatgcattccagagatgcactccgctctggaactcactctcagccacagggagctgcatgcacca

SEQ ID NO: 92898 - DNA, 120 bp, Artificial Sequence
  ENSG00000088876_22 (sequence is synthesized)
caggggcaatgcacctttgcaggggtaccttctggccccaacccttgactcaacggggacaactccagaaggtcattccagatccagagatccccatcgaactgaaggatcactgggttg

SEQ ID NO: 92899 - DNA, 120 bp, Artificial Sequence
  ENSG00000088876_23 (sequence is synthesized)
cagacacattgcaggtcagcttcttcctctgcccagtcctgccctcactccccagtgaatcctcaattttctgtctcgttgtctgtccagataattgattctaagacatgttaggtatat

SEQ ID NO: 92900 - DNA, 120 bp, Artificial Sequence
  ENSG00000088876_24 (sequence is synthesized)
aaggagtgtagataaggcttcagccatgagtcaccccgcagtaagccccagagtatattgaatagaaattctgcatgtgtggggagaatggacaaggacttaggaaaaagtcctcatcaa

SEQ ID NO: 92901 - DNA, 120 bp, Artificial Sequence
  ENSG00000088876_25 (sequence is synthesized)
agaacagcttttttgggacaagctttacatgggtggggagggaaaatgtgaaacacattagcaataagttaaacctcatcttgtactaaaggaggacacactcagggagaagacctctgt

SEQ ID NO: 92902 - DNA, 120 bp, Artificial Sequence
  ENSG00000088876_26 (sequence is synthesized)
gggcagggcttgtgggtggagcttcatcccgatgtcactcctcaactgacttaggaggacagtcttgctaccccaagtcactacctcactcacctctgagggattttcaggaaatgtctt

SEQ ID NO: 92903 - DNA, 120 bp, Artificial Sequence
  ENSG00000088876_27 (sequence is synthesized)
gactcccccatgtactctgtatgtgagcgaagatggcagtaactgttaaataagcattcttttctacttcttggaatcagatgaaataaaaaagcaggctttatttaagtaatcaaaaaa

SEQ ID NO: 92904 - DNA, 120 bp, Artificial Sequence
  ENSG00000088876_28 (sequence is synthesized)
tgcgattcggggcaggggcaggcagtggggggacagcctggaaccagaacgcgaaacccagcctcacggtccaccttctccaatccctgcctgctgggagaggacgatctcttgagaaag

SEQ ID NO: 92905 - DNA, 120 bp, Artificial Sequence
  ENSG00000088876_29 (sequence is synthesized)
gaaagacttctgtgctcccgagaacttcctatcagtagaaccacagtccctcttcggacatgctgttctcagaacaaaagaaatggtggaattatgcaatgcttagaaatggcatcgtcg

SEQ ID NO: 92906 - DNA, 75 bp, Artificial Sequence
  ENSG00000088876_30 (sequence is synthesized)
caatctcggctcaccatcgagtagttgggattacagcagaaccaaagccagaaatctacacttgttcctcctgcc

SEQ ID NO: 92907 - DNA, 120 bp, Artificial Sequence
  ENSG00000088876_31 (sequence is synthesized)
cctttctgaaaggcctccagatcctctgcgaaggccccctgggctcccccggcggggcccgcagctctcccccgcgctgaatctgaggaactgggcccggaagctcgcgagtctcggtcc

SEQ ID NO: 92908 - DNA, 120 bp, Artificial Sequence
  ENSG00000088876_32 (sequence is synthesized)
gtagtcttttttttgcagaatgggccaaggggacagagacttcactcgggagccagaacctgttttcaacatgggtattttaagaagagacggagaggctgtcactgcagtggtcactgt

SEQ ID NO: 92909 - DNA, 120 bp, Artificial Sequence
  ENSG00000088876_33 (sequence is synthesized)
atcccgggcacgctggctctggtgagcgcggcctccgcggctccttggccccaggatgccctctctcgtggggaaaggagggtcgggaaaggccgagcgtaggtccaccttctccaatcc

SEQ ID NO: 92910 - DNA, 120 bp, Artificial Sequence
  ENSG00000088876_34 (sequence is synthesized)
ttctgtgctcagttatgctcctcacaggttttaacagaaagccaggcagacagtagtgctcagaagaacttcatatggagaaccatatattctgacgaattacatcaacttgcatatcca

SEQ ID NO: 92911 - DNA, 120 bp, Artificial Sequence
  ENSG00000088881_0 (sequence is synthesized)
tgagctagacgcccgcagcctcagcgggaccggatccggggcggcgggggcgctcactcaccgcgcgccctcatgttccctgcgcaggacgctctgccccgcagcgggctgaacctgaag

SEQ ID NO: 92912 - DNA, 120 bp, Artificial Sequence
  ENSG00000088881_1 (sequence is synthesized)
gaggagccgctgctgcccgccggcctgggctcagtgcgctcctggatgcagggcgcgggcatcctggacgccagcaccgcggcgcagagtggcgtgggtctggcacgagcacattttgag

SEQ ID NO: 92913 - DNA, 120 bp, Artificial Sequence
  ENSG00000088881_2 (sequence is synthesized)
aagcagcctccctccaacctcaggaaatccaacttcttccacttcgtgctggccatgtacgaccggcaggggcagcccgtggaggtggagcgcacagccttcatcgacttcgtggaaaag

SEQ ID NO: 92914 - DNA, 120 bp, Artificial Sequence
  ENSG00000088881_3 (sequence is synthesized)
gaccgagagcccggggcggaaaagactaacaatgggatccattaccgcctccggctggtgtataacaatggactgcggacagagcaagacctctacgtgcgtctcatcgactccatgtcc

SEQ ID NO: 92915 - DNA, 120 bp, Artificial Sequence
  ENSG00000088881_4 (sequence is synthesized)
aaacaggccatcatctatgaggggcaggacaagaaccccgaaatgtgccgagtgctgctcacccatgagatcatgtgcagccggtgctgtgaccggaagagctgtggcaaccggaatgag

SEQ ID NO: 92916 - DNA, 120 bp, Artificial Sequence
  ENSG00000088881_5 (sequence is synthesized)
acgccctcagaccccgtcatcattgacaggttcttcctcaagttcttcctcaaatgcaaccagaactgcctgaagaatgcggggaatcccagagacatgcgccgcttccaggtggtggtg

SEQ ID NO: 92917 - DNA, 120 bp, Artificial Sequence
  ENSG00000088881_6 (sequence is synthesized)
tccacgacggtgagcgtggacggacacgtgctggccgtgtccgacaacatgtttgtgcacaacaactccaagcatggccgcagggcgcgccgcctggacccctccgaagctgccaccccc

SEQ ID NO: 92918 - DNA, 120 bp, Artificial Sequence
  ENSG00000088881_7 (sequence is synthesized)
tgcatcaaggccatcagccccggggagggctggaccacgggcggcgccaccgtcattgtcatcggcgacaacttcttcgacgggttgcaggtcgtgttcggaaacgtgctcgtgtggagc

SEQ ID NO: 92919 - DNA, 120 bp, Artificial Sequence
  ENSG00000088881_8 (sequence is synthesized)
gttttgcaagggatgccccggccgctttgtctacacagctctgaacgagcccaccattgactacggattccagaggctacagaaagtcattcccagacaccccggagaccccgagaggct

SEQ ID NO: 92920 - DNA, 120 bp, Artificial Sequence
  ENSG00000088881_9 (sequence is synthesized)
gcccaaggaagtgctgctgaagcgggcggccgacttggcagaagccctgtacggagtgcccggcagtaaccaggagctgctcctgaagcgcgcggcggacgtggccgaggctctgtacag

SEQ ID NO: 92921 - DNA, 120 bp, Artificial Sequence
  ENSG00000088881_10 (sequence is synthesized)
ctgtacagcaccccccgcgcacccgggccgctcgcacccctggccccgagccacccacaccccgccgtcgtgggcatcaacgccttcagcagcccgctggccatcgccgtcggggacgcc

SEQ ID NO: 92922 - DNA, 80 bp, Artificial Sequence
  ENSG00000088881_11 (sequence is synthesized)
gcccgagccgggctacgcgcgcagctgcagcagcgcgtccccccgcgggttcgcgcccagccccggctcgcagcagagcg

SEQ ID NO: 92923 - DNA, 120 bp, Artificial Sequence
  ENSG00000088881_12 (sequence is synthesized)
cgcgccgggcgtggccggcctcggcgtgcctgggtcccccagcttcctcaatggctccaccgccacctcgcccttcgccatcatgccctctagccccccgctggcggctgcctcctccat

SEQ ID NO: 92924 - DNA, 120 bp, Artificial Sequence
  ENSG00000088881_13 (sequence is synthesized)
gtccctcccggccgctgcccccaccaccagcgtgttctccttctcgcctgtcaacatgatctccgccgtcaaacagaggagcgccttcgcccccgtgctgcgccccccaagctccccacc

SEQ ID NO: 92925 - DNA, 120 bp, Artificial Sequence
  ENSG00000088881_14 (sequence is synthesized)
ccaggcctgccccagagcccacggagaggggcttccagaccagtcttttgaggattctgacaagtttcactctccagcccgggggcttcagggcctggcatactcctaattacggtctgc

SEQ ID NO: 92926 - DNA, 120 bp, Artificial Sequence
  ENSG00000088881_15 (sequence is synthesized)
agctgttcccatggagcccggactggaggtccctctgggattcacagccacaccccggatggtggcacagacagatgcagggccagggccatgggcggacctcaacccgtgagctgaacg

SEQ ID NO: 92927 - DNA, 120 bp, Artificial Sequence
  ENSG00000088881_16 (sequence is synthesized)
ttggcaggacagcatcgcagggaggtgctgggattctgggcctcactgtctgggtcttggttcctctgaaagagatggatcttgtgcagaccagggttgttgagtgaggggagcgtggga

SEQ ID NO: 92928 - DNA, 120 bp, Artificial Sequence
  ENSG00000088881_17 (sequence is synthesized)
tggggaccgtgggaaagaggacagctcagggagaagtgacctggaaaggtcctgtttgcatctgacccatctcaactggcccagcatcccaacttctctgcagcgaaagggtggcgcccc

SEQ ID NO: 92929 - DNA, 120 bp, Artificial Sequence
  ENSG00000088881_18 (sequence is synthesized)
gcagcctcgggaggcctgcccaggctcccgtggagcttccaacagctgcttggccccgcagctgcccccacttcctttgagacctgcactctcatgcttgccgcatcatgcctccctgtg

SEQ ID NO: 92930 - DNA, 120 bp, Artificial Sequence
  ENSG00000088881_19 (sequence is synthesized)
ggggctttgggcatggaggaggcagaagagggggtgccaggcctcctgtatttggggtcttcccccagtggatgtctcatggactctggccccacacactcacaatgactctggctggcc

SEQ ID NO: 92931 - DNA, 120 bp, Artificial Sequence
  ENSG00000088881_20 (sequence is synthesized)
ccacgcagcgggcccagccgccccccaggtggcctcacattctgctctgctaagtttggagaaaacagaacaataaaccagatgcaggtggtgcccgcccggcctctcacctgcctcctt

SEQ ID NO: 92932 - DNA, 80 bp, Artificial Sequence
  ENSG00000088881_21 (sequence is synthesized)
gagtcggccgggctgctgctgctgctgctccaggtgctgccgcccggggctacggcagggccgggacgccggggcacgcg

SEQ ID NO: 92933 - DNA, 80 bp, Artificial Sequence
  ENSG00000088881_22 (sequence is synthesized)
gcggccccagcctttccccgggacgcgcggctgctgctgctcctgccgccgctgccgccactgtcgccgccgccgccgag

SEQ ID NO: 92934 - DNA, 120 bp, Artificial Sequence
  ENSG00000088881_23 (sequence is synthesized)
tggcaaggagagcatatttgaggaggaagttggagtgctgtttgtgatgctgggcagagaggcttataacaggagcctgtgcgttcccccaaacttcatccctaactacttgttccagct

SEQ ID NO: 92935 - DNA, 120 bp, Artificial Sequence
  ENSG00000088881_24 (sequence is synthesized)
cttctgtgactcctgaactatgactctagccttggcaccccaagcaaggctcataaatgtttcctagcatctcagaatcccaggggttttcagcagaaatcctgaagtagtccagctgtt

SEQ ID NO: 92936 - DNA, 120 bp, Artificial Sequence
  ENSG00000088881_25 (sequence is synthesized)
gctcatctcatttttggggggtacctcccactgtttgttttttttgaatgttctggttttgcttttgtctttacctggtctggccctgtcatccccagccccgagaaaaggtctccagaa

SEQ ID NO: 92937 - DNA, 120 bp, Artificial Sequence
  ENSG00000088881_26 (sequence is synthesized)
ccgctgagaggtcagggctggcccaggaccctcacagctcccagtgagatctgagcctggtacctgtgtcagcagcccatgtggggccccagccaagctgctcactctggtgctgtctcc

SEQ ID NO: 92938 - DNA, 120 bp, Artificial Sequence
  ENSG00000088881_27 (sequence is synthesized)
ccatgagatcatgtgcaggttcttcctcaagttcttcctcaaatgcaaccagaactgcctgaagaatgcggggaatcccagagacatgcgccgcttccaggtggtggtgtccacgacggt

SEQ ID NO: 92939 - DNA, 120 bp, Artificial Sequence
  ENSG00000088881_28 (sequence is synthesized)
ctgaagcgggcggccgacttggcagaagccctgtacggagtgcccggcagtaaccaggtatggcgcctccgccctcccagcgccgccgggaccggggccccccagcacgcggcgcccgcg

SEQ ID NO: 92940 - DNA, 120 bp, Artificial Sequence
  ENSG00000088882_0 (sequence is synthesized)
ctggcactcaatccccgccatgtgggggctcctgctcgccctggccgccttcgcgccggccgtcggcccggctctgggggcgcccaggaactcggtgctgggcctcgcgcagcccgggac

SEQ ID NO: 92941 - DNA, 120 bp, Artificial Sequence
  ENSG00000088882_1 (sequence is synthesized)
caggaactcggtgctgggcctcgcgcagcccgggaccaccaaggtcccaggctcgaccccggccctgcatagcagcccggcacagccgccggcggagacagctaacgggacctcagaaca

SEQ ID NO: 92942 - DNA, 120 bp, Artificial Sequence
  ENSG00000088882_2 (sequence is synthesized)
gcatgtccggattcgagtcatcaagaagaaaaaggtcattatgaagaagcggaagaagctaactctaactcgccccaccccactggtgactgccgggccccttgtgacccccactccagc

SEQ ID NO: 92943 - DNA, 120 bp, Artificial Sequence
  ENSG00000088882_3 (sequence is synthesized)
agggaccctcgaccccgctgagaaacaagaaacaggctgtcctcctttgggtctggagtccctgcgagtttcagatagccggcttgaggcatccagcagccagtcctttggtcttggacc

SEQ ID NO: 92944 - DNA, 120 bp, Artificial Sequence
  ENSG00000088882_4 (sequence is synthesized)
acaccgaggacggctcaacattcagtcaggcctggaggacggcgatctatatgatggagcctggtgtgctgaggagcaggacgccgatccatggtttcaggtggacgctgggcaccccac

SEQ ID NO: 92945 - DNA, 120 bp, Artificial Sequence
  ENSG00000088882_5 (sequence is synthesized)
ccgcttctcgggtgttatcacacagggcaggaactctgtctggaggtatgactgggtcacatcatacaaggtccagttcagcaatgacagtcggacctggtggggaagtaggaaccacag

SEQ ID NO: 92946 - DNA, 120 bp, Artificial Sequence
  ENSG00000088882_6 (sequence is synthesized)
cagtgggatggacgcagtatttcctgccaattcagacccagaaactccagtgctgaacctcctgccggagccccaggtggcccgcttcattcgcctgctgccccagacctggctccaggg

SEQ ID NO: 92947 - DNA, 120 bp, Artificial Sequence
  ENSG00000088882_7 (sequence is synthesized)
aggcgcgccttgcctccgggcagagatcctggcctgcccagtctcagaccccaatgacctattccttgaggcccctgcgtcgggatcctctgaccctctagactttcagcatcacaatta

SEQ ID NO: 92948 - DNA, 120 bp, Artificial Sequence
  ENSG00000088882_8 (sequence is synthesized)
caaggccatgaggaagctgatgaagcaggtacaagagcaatgccccaacatcacccgcatctacagcattgggaagagctaccagggcctgaagctgtatgtgatggaaatgtcggacaa

SEQ ID NO: 92949 - DNA, 120 bp, Artificial Sequence
  ENSG00000088882_9 (sequence is synthesized)
gcagttcctgtgccatgagttcctgcgagggaacccacgggtgacccggctgctctctgagatgcgcattcacctgctgccctccatgaaccctgatggctatgagatcgcctaccaccg

SEQ ID NO: 92950 - DNA, 120 bp, Artificial Sequence
  ENSG00000088882_10 (sequence is synthesized)
gggttcagagctggtgggctgggccgagggccgctggaacaaccagagcatcgatcttaaccataattttgctgacctcaacacaccactgtgggaagcacaggacgatgggaaggtgcc

SEQ ID NO: 92951 - DNA, 120 bp, Artificial Sequence
  ENSG00000088882_11 (sequence is synthesized)
ccacatcgtccccaaccatcacctgccattgcccacttactacaccctgcccaatgccaccgtggctcctgaaacgcgggcagtaatcaagtggatgaagcggatcccctttgtgctaag

SEQ ID NO: 92952 - DNA, 120 bp, Artificial Sequence
  ENSG00000088882_12 (sequence is synthesized)
tgccaacctccacgggggtgagctcgtggtgtcctacccattcgacatgactcgcaccccgtgggctgcccgcgagctcacgcccacaccagatgatgctgtgtttcgctggctcagcac

SEQ ID NO: 92953 - DNA, 120 bp, Artificial Sequence
  ENSG00000088882_13 (sequence is synthesized)
tgtctatgctggcagtaatctggccatgcaggacaccagccgccgaccctgccacagccaggacttctccgtgcacggcaacatcatcaacggggctgactggcacacggtccccgggag

SEQ ID NO: 92954 - DNA, 120 bp, Artificial Sequence
  ENSG00000088882_14 (sequence is synthesized)
catgaatgacttcagctacctacacaccaactgctttgaggtcactgtggagctgtcctgtgacaagttccctcacgagaatgaattgccccaggagtgggagaacaacaaagacgccct

SEQ ID NO: 92955 - DNA, 120 bp, Artificial Sequence
  ENSG00000088882_15 (sequence is synthesized)
cctcacctacctggagcaggtgcgcatgggcattgcaggagtggtgagggacaaggacacggagcttgggattgctgacgctgtcattgccgtggatgggattaaccatgacgtgaccac

SEQ ID NO: 92956 - DNA, 120 bp, Artificial Sequence
  ENSG00000088882_16 (sequence is synthesized)
ggcgtggggcggggattattggcgtctgctgaccccaggggactacatggtgactgccagtgccgagggctaccattcagtgacacggaactgtcgggtcacctttgaagagggcccctt

SEQ ID NO: 92957 - DNA, 120 bp, Artificial Sequence
  ENSG00000088882_17 (sequence is synthesized)
cccctgcaatttcgtgctcaccaagactcccaaacagaggctgcgcgagctgctggcagctggggccaaggtgcccccggaccttcgcaggcgcctggagcggctaaggggacagaagga

SEQ ID NO: 92958 - DNA, 120 bp, Artificial Sequence
  ENSG00000088882_18 (sequence is synthesized)
ttgatacctgcggtttaagagccctagggcaggctggacctgtcaagacgggaaggggaagagtagagagggagggacaaagtgaggaaaaggtgctcattaaagctaccgggcacctta

SEQ ID NO: 92959 - DNA, 120 bp, Artificial Sequence
  ENSG00000088888_0 (sequence is synthesized)
ctcctcgctgcgggaagggtcctgggccccgggcggcggtcgccaggtctcagggccgggggtacccgagtctcgtttcctctcagtccatccacccttcatggggccagagccctctct

SEQ ID NO: 92960 - DNA, 120 bp, Artificial Sequence
  ENSG00000088888_1 (sequence is synthesized)
ccagaatctgagcagcaatgccgtttgctgaagacaagacctataagtatatctgccgcaatttcagcaatttttgcaatgtggatgttgtagagattctgccttacctgccctgcctca

SEQ ID NO: 92961 - DNA, 120 bp, Artificial Sequence
  ENSG00000088888_2 (sequence is synthesized)
cagcaagagaccaggatcgactgcgggccacctgcacactctcagggaaccgggacaccctctggcatctcttcaatacccttcagcggcggcccggctgggtggagtacttcattgcgg

SEQ ID NO: 92962 - DNA, 120 bp, Artificial Sequence
  ENSG00000088888_3 (sequence is synthesized)
cactgaggggctgtgagctagttgatctcgcggacgaagtggcctctgtctaccagagctaccagcctcggacctcggaccgtcccccagacccactggagccaccgtcacttcctgctg

SEQ ID NO: 92963 - DNA, 120 bp, Artificial Sequence
  ENSG00000088888_4 (sequence is synthesized)
agaggccagggccccccacacctgctgcggcccacagcatcccctacaacagctgcagagagaaggagccaagttaccccatgcctgtccaggagacccaggcgccagagtccccaggag

SEQ ID NO: 92964 - DNA, 120 bp, Artificial Sequence
  ENSG00000088888_5 (sequence is synthesized)
agaattcagagcaagccctgcagacgctcagccccagagccatcccaaggaatccagatggtggccccctggagtcctcctctgacctggcagccctcagccctctgacctccagcgggc

SEQ ID NO: 92965 - DNA, 120 bp, Artificial Sequence
  ENSG00000088888_6 (sequence is synthesized)
atcaggagcaggacacagaactgggcagtacccacacagcaggtgcgacctccagcctcacaccatcccgtgggcctgtgtctccatctgtctccttccagcccctggcccgttccaccc

SEQ ID NO: 92966 - DNA, 120 bp, Artificial Sequence
  ENSG00000088888_7 (sequence is synthesized)
ccagggcaagccgcttgcctggacccacagggtcagttgtatctactggcacctccttctcctcctcatcccctggcttggcctctgcaggggctgcagagggtaaacagggtgcagaga

SEQ ID NO: 92967 - DNA, 120 bp, Artificial Sequence
  ENSG00000088888_8 (sequence is synthesized)
gtgaccaggccgagcctatcatctgctccagtggggcagaggcacctgccaactctctgccctccaaagtgcctaccaccttgatgcctgtgaacacagtggccctgaaagtgcctgcca

SEQ ID NO: 92968 - DNA, 120 bp, Artificial Sequence
  ENSG00000088888_9 (sequence is synthesized)
acccagcatctgtcagcacagtgccctccaagttgccaactagctcaaagccccctggtgcagtgccttctaatgcgctcaccaatccagcaccatccaaattgcccatcaactcaaccc

SEQ ID NO: 92969 - DNA, 120 bp, Artificial Sequence
  ENSG00000088888_10 (sequence is synthesized)
gtgctggcatggtgccatccaaagtgcctactagcatggtgctcaccaaggtgtctgccagcacagtccccactgacgggagcagcagaaatgaggagaccccagcagctccaacacccg

SEQ ID NO: 92970 - DNA, 120 bp, Artificial Sequence
  ENSG00000088888_11 (sequence is synthesized)
ccggcgccactggaggcagctcagcctggctagacagcagctctgagaataggggccttgggtcggagctgagtaagcctggcgtgctggcatcccaggtagacagcccgttctcgggct

SEQ ID NO: 92971 - DNA, 120 bp, Artificial Sequence
  ENSG00000088888_12 (sequence is synthesized)
gcttcgaggatcttgccatcagtgccagcacctccttgggcatggggccctgccatggcccagaggagaatgagtataagtccgagggcacctttgggatccacgtggctgagaacccca

SEQ ID NO: 92972 - DNA, 120 bp, Artificial Sequence
  ENSG00000088888_13 (sequence is synthesized)
gcatccagctcctggagggcaaccctgggccacctgcggacccggatggcggccccaggccacaagccgaccggaagttccaggagagggaggtgccatgccacaggccctcacctgggg

SEQ ID NO: 92973 - DNA, 120 bp, Artificial Sequence
  ENSG00000088888_14 (sequence is synthesized)
ctctgtggctccaggtggctgtgacaggggtgctggtagtcacactcctggtggtgctgtaccggcggcgtctgcactagtgaagccctgggctcttcccaccacccatctgttccgttc

SEQ ID NO: 92974 - DNA, 120 bp, Artificial Sequence
  ENSG00000088888_15 (sequence is synthesized)
ctgcagtacacctggcccctctccgaagccccttgtccctttcttggggattgtggaggctgggtcagaggggagttaagggactgcaggcctggcagcaggacatgccttggctgaacc

SEQ ID NO: 92975 - DNA, 120 bp, Artificial Sequence
  ENSG00000088888_16 (sequence is synthesized)
aagtcctgagagcagcatctctgtccccacggtgccttgtgtgggtccccgtccttggctttctgggtcctgggctgcccccagtgctccagaccttccccactggcaatccaggttatc

SEQ ID NO: 92976 - DNA, 120 bp, Artificial Sequence
  ENSG00000088888_17 (sequence is synthesized)
atccatgtcctccagaggagcttcctcctccaggcctcagccctgttggcccaggtggagcaggagggaccactggaacatgtggtgcttgggaatgcctctcctgttgcattggtccct

SEQ ID NO: 92977 - DNA, 120 bp, Artificial Sequence
  ENSG00000088888_18 (sequence is synthesized)
gaaggcctcagggcaggtatgtggtgtgtgggcgactccacaagacctgcctcccatcctggcagcccagcctgagaccgttgcattgaggcaggcaggagcggcagggtggctgctctc

SEQ ID NO: 92978 - DNA, 120 bp, Artificial Sequence
  ENSG00000088888_19 (sequence is synthesized)
caggagcccaactgccttgagttcctgccccactgggccccctcccctgctgggcaatcctgggaaggtctggaggttcctgtggacctcagggaagccaggggcagctgtcaggcctga

SEQ ID NO: 92979 - DNA, 120 bp, Artificial Sequence
  ENSG00000088888_20 (sequence is synthesized)
ggaagacctgtggagctcctctccagcctcctctttccctcccctctggtctccattctcttcagctccctacatgggctggggaggagacacctggtgggcagagctcaggcagaggtt

SEQ ID NO: 92980 - DNA, 120 bp, Artificial Sequence
  ENSG00000088888_21 (sequence is synthesized)
tggatttcagctccctcacttccggggctgtgtggctttggcagatgtcagacttctggtcttgcttctccacgtggacagtgagtatctggctcattcttcactgggttcttctgagat

SEQ ID NO: 92981 - DNA, 120 bp, Artificial Sequence
  ENSG00000088888_22 (sequence is synthesized)
tgaacctacaggtgtttgccaagtgcctggcccagagcaagtggccactgcttctcccatctctctcctgcccaacctggtagagctgagggcatgagaggcagagtgcacagtggtcaa

SEQ ID NO: 92982 - DNA, 120 bp, Artificial Sequence
  ENSG00000088888_23 (sequence is synthesized)
gggtgcagctctgcagcacaggcagcctaggcctgcgtcccaacctgcctctcaccagctctgtgaccttgggcaagggatttatctgtctgtcccttagttttctcacctgtaaaagga

SEQ ID NO: 92983 - DNA, 120 bp, Artificial Sequence
  ENSG00000088888_24 (sequence is synthesized)
ggataagtatatatatatatttcccagtgttgtgaagattaaaggagtttatcgatgtaggtcttaggatgagtcctggcatttaccaagggttggatatatgttattatcactattaag

SEQ ID NO: 92984 - DNA, 120 bp, Artificial Sequence
  ENSG00000088888_25 (sequence is synthesized)
taagtgttgagggtccaggcatgctgggcaacagggaccccatctctacaaaaaagtttaaaaaattagccaggcgtggtggtgcacctgtcgtcttagctacttgggaggctgaggtgg

SEQ ID NO: 92985 - DNA, 120 bp, Artificial Sequence
  ENSG00000088888_26 (sequence is synthesized)
atcgtgccactgcactccaacctgggtgagagagcgagaccctgtctcaagaaaaagaaaaatgcagagaaacaggagtcttggctactcctttagaggcagactcagaccctcctgcct

SEQ ID NO: 92986 - DNA, 120 bp, Artificial Sequence
  ENSG00000088888_27 (sequence is synthesized)
ttggctactcctttagaggcagactcagaccctcctgcctcacagctttatctttgtatttgccccttactttatcttgtgccttgagaaattgctggggagagaggtatgtccactggg

SEQ ID NO: 92987 - DNA, 120 bp, Artificial Sequence
  ENSG00000088888_28 (sequence is synthesized)
cagctgtacaggatggaggatatagggcgtttccactcccagcagccaggttccctcaccccaagctcacccactgttggggagattatctacaataacaccagaaacacattggggtgg

SEQ ID NO: 92988 - DNA, 120 bp, Artificial Sequence
  ENSG00000088888_29 (sequence is synthesized)
attgggggtatccttatgggttcttttcagggaaccattgctggacaaggcacaggagccacctccatttctgagctctgcaagggacaagaactagagccatcaggggctgggctcact

SEQ ID NO: 92989 - DNA, 120 bp, Artificial Sequence
  ENSG00000088888_30 (sequence is synthesized)
gtggccccaccccaagccgtcagcctccagggatctacaccctgccttggctgctacagctttttcactccactgccctaggggagttcagcaacctaatgatctctatctctgaacatc

SEQ ID NO: 92990 - DNA, 120 bp, Artificial Sequence
  ENSG00000088888_31 (sequence is synthesized)
tcttcatcccatgctccaagtccagcaacctgcaccctggaaccaggagtggaccctacccgagctgtctgtattaatccccatcccccaccaccaatcttaaaaagccctctgtccccc

SEQ ID NO: 92991 - DNA, 120 bp, Artificial Sequence
  ENSG00000088888_32 (sequence is synthesized)
taccctaaaccccagttaggtacccatgctgggcaggtcagttaacaatttatgcacaggtactagttttattgtattaccgttccagggtagctttgaaaaaagtatctcaaaaaggca

SEQ ID NO: 92992 - DNA, 78 bp, Artificial Sequence
  ENSG00000088888_33 (sequence is synthesized)
ggccaacagggtgaaaccccgtctctacaaaaataagaaaattagccaggtgtagtggcagacccatgaacccaggat

SEQ ID NO: 92993 - DNA, 120 bp, Artificial Sequence
  ENSG00000088888_34 (sequence is synthesized)
ccactgcgctccagcctgggcgacagagtggtattctgtttcaaaaaaaaaaaaaaaggcagtatgtagccccgaagactgttgcccaagtggtagaatgttagcacactaccagcctag

SEQ ID NO: 92994 - DNA, 88 bp, Artificial Sequence
  ENSG00000088888_35 (sequence is synthesized)
gactgttgcccaagtggtagaatgttagcacactaccagcctaggtaaaaaatacaaaaagtaactgggcatggcggcgcccatctaa

SEQ ID NO: 92995 - DNA, 120 bp, Artificial Sequence
  ENSG00000088888_36 (sequence is synthesized)
caccactgcactccagcctgggtgaccgagtgatactctgtctcaaagaaaaaaaattataattttagcacagtaaccagccatgatgggagataccctgggtaaggcatgtagaaaggg

SEQ ID NO: 92996 - DNA, 120 bp, Artificial Sequence
  ENSG00000088888_37 (sequence is synthesized)
atgtagaaagggttgagggaccttcccagtcccctagccccgcctcccatcctcccatctttttcttttttcttttttttagagaatcacccagcctggagcgaagtggtgcaatcataa

SEQ ID NO: 92997 - DNA, 89 bp, Artificial Sequence
  ENSG00000088888_38 (sequence is synthesized)
atccttaaactcccgggcttactaggacttcaggtacctgtcaccatgcctggctaattaaatttttttttcttttttttttttgagat

SEQ ID NO: 92998 - DNA, 86 bp, Artificial Sequence
  ENSG00000088888_39 (sequence is synthesized)
aaattttttatagagatgaggtcatgctgttatgttgcccaggttggcctcatgagatcttgccttagcctcccaaagtgctggga

SEQ ID NO: 92999 - DNA, 120 bp, Artificial Sequence
  ENSG00000088888_40 (sequence is synthesized)
tcccaaagtgctgggattacagatgtgagacactgcacccaaaccccaccacttttttttttcctttttctttttttgagacagtcttactccgttgcccaggctggagtgtagtggcat

SEQ ID NO: 93000 - DNA, 120 bp, Artificial Sequence
  ENSG00000088888_41 (sequence is synthesized)
gctgttcttgaactcctgacctcaagtgctccacctgcgttggcttcccaaagtgctgggatacaggagtgagccactgcgcctggctgatcccagcacttttcaaatgatgccgctcaa

SEQ ID NO: 93001 - DNA, 120 bp, Artificial Sequence
  ENSG00000088888_42 (sequence is synthesized)
ccagcacttttcaaatgatgccgctcaaagccgtgacttggcctactttgaacagcaaacttgttgctgctgttgtcaacctgaaggcctctcaaatgccagcttcaagcagggtgtgaa

SEQ ID NO: 93002 - DNA, 120 bp, Artificial Sequence
  ENSG00000088888_43 (sequence is synthesized)
ttggccagtgtcagatctcaggagtcctgtgttgagagtgtggctttcagctgcggggagctgcacttggtggggaaagccaggcaggtcaccctcacagccagataatgtggaggtcag

SEQ ID NO: 93003 - DNA, 120 bp, Artificial Sequence
  ENSG00000088888_44 (sequence is synthesized)
gaaggctgggtggggccagagggaccagtgccctcctcagtgcttaggggcagagccacctgcagcaatggtatctgcatattagcccctctccaccttctttctcccgctgaatcattt

SEQ ID NO: 93004 - DNA, 120 bp, Artificial Sequence
  ENSG00000088888_45 (sequence is synthesized)
ccctcaaagcccaagagctgtcactgcttctttctccctgggaagaatgcgtggactctgcctggtgatagactgaagccagaacagtgccacaccctcgccttaattccttgctaggtg

SEQ ID NO: 93005 - DNA, 120 bp, Artificial Sequence
  ENSG00000088888_46 (sequence is synthesized)
gccacaccctcgccttaattccttgctaggtgttctcagatttatgagacttcttagtcaaatatgagggaggttggatgtggtggcttgtgcctgtaatcccagcattttgggaagccg

SEQ ID NO: 93006 - DNA, 75 bp, Artificial Sequence
  ENSG00000088888_47 (sequence is synthesized)
gatgctctttaccctgcctggcctcaaactattaatagcttcctttgagcaacattatttattatgaactttcaa

SEQ ID NO: 93007 - DNA, 120 bp, Artificial Sequence
  ENSG00000088888_48 (sequence is synthesized)
tagcttcctttgagcaacattatttattatgaactttcaaacacaaaaaagtagagagagtagaataacaaatccccatgagcccatcacccaacttcagtaattatcaattcatggcca

SEQ ID NO: 93008 - DNA, 120 bp, Artificial Sequence
  ENSG00000088888_49 (sequence is synthesized)
catcacccaacttcagtaattatcaattcatggccatcttgttcacccctgcctgcttccctgcttcccctcattctgcagaggttcttttcttttgagacagagtgttgctctgttgcc

SEQ ID NO: 93009 - DNA, 69 bp, Artificial Sequence
  ENSG00000088888_50 (sequence is synthesized)
ggtgcctggccactgtacaggttatttatagaagttggagagtgaagggttgagaaagccaaggggcag

SEQ ID NO: 93010 - DNA, 120 bp, Artificial Sequence
  ENSG00000088888_51 (sequence is synthesized)
agaagttggagagtgaagggttgagaaagccaaggggcagatgcgggtctggaggattttgtgcctaaggccctctctttgctcccagacagcatgaagtaacaatgaggcatccacctc

SEQ ID NO: 93011 - DNA, 120 bp, Artificial Sequence
  ENSG00000088888_52 (sequence is synthesized)
ttggttttgtggcctctgtggatgacgtctctcaccttgaaccagttcagagttggagtagcgcaggatcctgtcttcagaggaggggccgaagcgggttcctctgttgtcaagctcttt

SEQ ID NO: 93012 - DNA, 120 bp, Artificial Sequence
  ENSG00000088888_53 (sequence is synthesized)
ggaggtgcctggctgctactactgtcccagagaggtgatgatgaatgatgggtgtgtccagtggcagtttgccccactgaggcaggggcttccactaggccctgacagagcccttccagc

SEQ ID NO: 93013 - DNA, 120 bp, Artificial Sequence
  ENSG00000088888_54 (sequence is synthesized)
aggcagaaatccctgtgctaggcaagattcaaactccgtagcatgtctcctgctcccatctcttaggaatggagtccttcaggccttgagtcccacattttccatgatgctccattaagc

SEQ ID NO: 93014 - DNA, 120 bp, Artificial Sequence
  ENSG00000088888_55 (sequence is synthesized)
agctgatagcacccccacctccagggaaagtgagttcagagtccttggtctaatgcatctgtgttgaaattgaggccttcccctgtgttcacctttctgctctttttcttttagcccaag

SEQ ID NO: 93015 - DNA, 120 bp, Artificial Sequence
  ENSG00000088888_56 (sequence is synthesized)
gctatgaaggcctcattcggtgctgggcatggtcactcctagcattcctcactctgttgctaacagcaacagcaataataataagggttacaacttactccataccttactgtctgccag

SEQ ID NO: 93016 - DNA, 120 bp, Artificial Sequence
  ENSG00000088888_57 (sequence is synthesized)
gcattaagctaagtgctttacatatattaagtcatttaatcctcataatgaccctatgaaagagataccatctcaacccaattgacagctggtttgcaagattaggagggatgaaggacc

SEQ ID NO: 93017 - DNA, 120 bp, Artificial Sequence
  ENSG00000088888_58 (sequence is synthesized)
caggggacaatgcgagggaaaactctgaccccggggccccaggctggatgttctttatgcctgtgaaccacagcttatcacatgtctggagttagggaccccacttaaagtgagattttg

SEQ ID NO: 93018 - DNA, 85 bp, Artificial Sequence
  ENSG00000088888_59 (sequence is synthesized)
cataaggactgcttgaggccaggagttcaaaaccagtgtaggtaacagctagaccctatctctacaaaaaatttaaaaattagct

SEQ ID NO: 93019 - DNA, 120 bp, Artificial Sequence
  ENSG00000088888_60 (sequence is synthesized)
ctgcacttcagcctaggcaacagagggagaccctgtctttaaagtacatagaggtttttcacaccaacacatctctgcccagtgtgccaacatctgccacctgctataatagtactataa

SEQ ID NO: 93020 - DNA, 120 bp, Artificial Sequence
  ENSG00000088888_61 (sequence is synthesized)
cactcaatatgtaattaatgtagtctcagggatgttatgacaatatgattacaactatcacgtgtgtgcccagccaggctcaatgccccaggctgggcgaggtggggcaggggacacagc

SEQ ID NO: 93021 - DNA, 120 bp, Artificial Sequence
  ENSG00000088888_62 (sequence is synthesized)
ctaaaatgccaggcctcaggaagccatttggtttagcagacattgtttattaaaggagttacctatgccagatcgaaggcctaagatgattaagacactatgagtgccttcaagtggttg

SEQ ID NO: 93022 - DNA, 120 bp, Artificial Sequence
  ENSG00000088888_63 (sequence is synthesized)
gggacgttcatgattgtggtacagacaaataggctttcacatcattcttttatgtaatcatacaacagatatttgcacctacatgtgcagagcactgtgataggcctcagtgacacagaa

SEQ ID NO: 93023 - DNA, 120 bp, Artificial Sequence
  ENSG00000088888_64 (sequence is synthesized)
taatacggcaaagaccccacccgatgagccccctcccaccacccaccagtacagtagggggtggtttaatggagtgttcctggaatatgaagtgggggcaggcattaggggtggcaaagg

SEQ ID NO: 93024 - DNA, 120 bp, Artificial Sequence
  ENSG00000088888_65 (sequence is synthesized)
gacaagtgtttatctgatcagttatgtactgtttataataagtaaatcagcagagggggaataatacttagaacctatagagagtaaatctgacaagatgaaatgctgatgaaaatatgg

SEQ ID NO: 93025 - DNA, 120 bp, Artificial Sequence
  ENSG00000088888_66 (sequence is synthesized)
aggaaatgaaactctcatgggttttgcagggaatctaagtcagtgctgtgttgtgaatgtaggtgtaccctttgaattcatatgttgaatcctaacccccaaagcaatggcattaagagg

SEQ ID NO: 93026 - DNA, 84 bp, Artificial Sequence
  ENSG00000088888_67 (sequence is synthesized)
tggggcctttggggctgggttgctggcagggggcagatcacttgaagccaggagtctgagatcagcctggccaacatggtgaaa

SEQ ID NO: 93027 - DNA, 77 bp, Artificial Sequence
  ENSG00000088888_68 (sequence is synthesized)
aatacaaaaattagccaggtgtgatggcgtacatctgtaattttaggtggagatttcagtgagccgagatcgtgcca

SEQ ID NO: 93028 - DNA, 120 bp, Artificial Sequence
  ENSG00000088888_69 (sequence is synthesized)
gcgagactccatctcaaaaaaataataaagatgtggggcctgtgggaggtggttaggtcatgagggtggagatcatgaatggggttagcaccttataaaacaggcttgagggagcccttc

SEQ ID NO: 93029 - DNA, 120 bp, Artificial Sequence
  ENSG00000088888_70 (sequence is synthesized)
ggggttagcaccttataaaacaggcttgagggagcccttctgtcccttctaccatgtgtggatgcagtgagaaggcaccgtatctctgaagcagagagcccgccctggacactggatctg

SEQ ID NO: 93030 - DNA, 120 bp, Artificial Sequence
  ENSG00000088888_71 (sequence is synthesized)
ttcccagcctctagaactgtgagaaataattttttgttgtttacaaattacccaggctaaggtgtttcattgtaacctgaatggaccaagctggtgtgaccctgttggaaaactggcagt

SEQ ID NO: 93031 - DNA, 120 bp, Artificial Sequence
  ENSG00000088888_72 (sequence is synthesized)
cctgttggaaaactggcagtatctaccaaaagccgaacatacgtataaactgatccagcagttccactcctgggtatgtacaccacagaaagctatgtccaccgagacattggcaagaat

SEQ ID NO: 93032 - DNA, 120 bp, Artificial Sequence
  ENSG00000088888_73 (sequence is synthesized)
gtttctaaccacacgctgactgtagccccaaacctgaaacaacccaaatgtccatccaccaacccaaatgtccatccacagttgaagctacagtgaagtcacagggtcgaatactactgc

SEQ ID NO: 93033 - DNA, 120 bp, Artificial Sequence
  ENSG00000088888_74 (sequence is synthesized)
acagcaacgaatatgaatgaaaatatcgctatgcacagcaacatggataaatttcacagacatgaggtcaagcaaaagaggtcagagtcctcatcatcaagagagaattcattgtatgat

SEQ ID NO: 93034 - DNA, 120 bp, Artificial Sequence
  ENSG00000088888_75 (sequence is synthesized)
tctcttcctacaaaaagtacagaaataagcaaaactgatccatggtgttagaagccaggggaacagttaacaggggagggatactggggaggggcatcctggagtgctggtctacctcat

SEQ ID NO: 93035 - DNA, 120 bp, Artificial Sequence
  ENSG00000088888_76 (sequence is synthesized)
ctgggtgttgatttcacgagtattgtcagtttgtttccagactccctgttggagatgtggaaataaaaaccacctaaacaagagcagagaggccatttggtcaaagtttgcaaaggagtc

SEQ ID NO: 93036 - DNA, 120 bp, Artificial Sequence
  ENSG00000088888_77 (sequence is synthesized)
agccatgattgcttgtatttggcaggggtcaaaggcaggcagggactgtgaaatgttatagtggaaaaaaagggaaggctctgggtgtgctgtgattggagattgttggcatggggacag

SEQ ID NO: 93037 - DNA, 120 bp, Artificial Sequence
  ENSG00000088888_78 (sequence is synthesized)
agcggactaactggaggggcatctttggttggttgggggggtatatttggctttctctggttggtctggagttggaagagggggtgtggtggctggggattgggaagaagctggcagcca

SEQ ID NO: 93038 - DNA, 120 bp, Artificial Sequence
  ENSG00000088888_79 (sequence is synthesized)
ctaagttcagactgttctgggtccgattgctgctgaggctgtggtttggcttccttggcttcccaggctggtcatgggtttctggccagagtctattgtcatatgtggcctggccattgt

SEQ ID NO: 93039 - DNA, 120 bp, Artificial Sequence
  ENSG00000088888_80 (sequence is synthesized)
ccagttgtatgttcagtctcttggaaggaagggtattgactctgagaggggccaccatcgctggaatgggggacacacagtacttcctccagctgcctacacccccctagggtcagtggc

SEQ ID NO: 93040 - DNA, 120 bp, Artificial Sequence
  ENSG00000088888_81 (sequence is synthesized)
gcctgcctgtgagggtgagcccaatggctagagggctctgctccaagtcattgcttactacacccacaaacattcttcgttctttaaggcctaacttaaagcccagatcctacaggaaac

SEQ ID NO: 93041 - DNA, 120 bp, Artificial Sequence
  ENSG00000088888_82 (sequence is synthesized)
cttgattagacccctctctttattaagcttcctaagatcaaaccctgcttttgtgtaaatgctgacctccttgcctacattttaaaaacctagagctgggcatgatggccccagcctgta

SEQ ID NO: 93042 - DNA, 120 bp, Artificial Sequence
  ENSG00000088888_83 (sequence is synthesized)
atcccagtgattcaggagactgaggtgggaggattgctagaagccaggagttcgagaccagcctgggtaacatagctagaccacatctcttaaaataaaatagttaatttagccaggcat

SEQ ID NO: 93043 - DNA, 120 bp, Artificial Sequence
  ENSG00000088888_84 (sequence is synthesized)
gatgatatatgcctgtagtcccaactacttggaaggctgaggtgtgaggatctttgagcccgggaggtcgaggctacagtaagctatgatctcaccactgtactccagcctgggtgacag

SEQ ID NO: 93044 - DNA, 120 bp, Artificial Sequence
  ENSG00000088888_85 (sequence is synthesized)
agcgagacccagactcaaaaaataaaaataaaaaccctgaatatcttccttctacttcttcagtgctgtttttatttaaaaaaaaaaaaaaccagccaaaaccacaactttttactgaag

SEQ ID NO: 93045 - DNA, 120 bp, Artificial Sequence
  ENSG00000088888_86 (sequence is synthesized)
tgtaatgtaaatgctgtaaaaggcagtgaaaggcacaagggaggtggaggggtaggaagggtggaagtggcgggaggaagtggcagggcaggcaaaatgaagggaagccctgggttcttg

SEQ ID NO: 93046 - DNA, 120 bp, Artificial Sequence
  ENSG00000088888_87 (sequence is synthesized)
tcctgcatccgcagccagctcccactttcctcaccctccaggacctgtaaactgtgaggctggaccagttatgtcaaatctgtcctcccccagagctcagtccctctgcccttgggtgtc

SEQ ID NO: 93047 - DNA, 120 bp, Artificial Sequence
  ENSG00000088888_88 (sequence is synthesized)
cttggcacaaggcaggctaggctgcaccagcttcctccatctccgtcctgcctcccccatccccaggtgccattcccacaccatctgaatcactgatttcctcgcaatcagacgctatct

SEQ ID NO: 93048 - DNA, 120 bp, Artificial Sequence
  ENSG00000088888_89 (sequence is synthesized)
tccagttaatcacttcgcttgtatttaacataagaaagaaaaaccctttcattatcacatacagctggaaatcggcttcttgcaggaggcgtatccaaaggaattggagaagagataaac

SEQ ID NO: 93049 - DNA, 120 bp, Artificial Sequence
  ENSG00000088888_90 (sequence is synthesized)
tggtaattggtgaaagaattactttaattttttttcctacttgctgtcatgatgatgtccttagaattgtgagcccgtggacacttctgtacaataaatctgctattattacttctagaa

SEQ ID NO: 93050 - DNA, 120 bp, Artificial Sequence
  ENSG00000088899_0 (sequence is synthesized)
cgcttgtgggccggccttgggggagggggacgcgcacccacagaaggactcagagggcttcacggtaagctgagcagggtcaaggtccacagggagcgggagagggtagtaatccgggaa

SEQ ID NO: 93051 - DNA, 120 bp, Artificial Sequence
  ENSG00000088899_1 (sequence is synthesized)
gtcttcctggtggcagtgaattctttgcggggttcggcaggcgcaggatccttggggccgcgcaccctgcagcggcccctcccctcccctcccccctcccacctgtgggaaacgcaggcc

SEQ ID NO: 93052 - DNA, 120 bp, Artificial Sequence
  ENSG00000088899_2 (sequence is synthesized)
ctgagagaggctccgtcagtgccagcagctggcgccactgcgtcccctgccccggcctcagccagccctgggacctctgcggaggactgatcccgggaagggggccctgtcttcccaggg

SEQ ID NO: 93053 - DNA, 120 bp, Artificial Sequence
  ENSG00000088899_3 (sequence is synthesized)
ccccggtgcggccgagctgggaagaccttggggagggcaggcctgccacctactgcagccgcggcccccgtccatccgggagggacaggctgtgcccttggcggcgcccacccgcgaccc

SEQ ID NO: 93054 - DNA, 120 bp, Artificial Sequence
  ENSG00000088899_4 (sequence is synthesized)
agatgtgcgtcgcctacccaccctcccccagacccccgtttcctcaggcgctcgccgcctcggggcgcctggcacgcggcagccccgcaaggtaggtccttcattcctcccatttcgcag

SEQ ID NO: 93055 - DNA, 120 bp, Artificial Sequence
  ENSG00000088899_5 (sequence is synthesized)
aggagaaaactgcagtccgggatggctcagtcggcccctccaaagtcgcgcagctggttcgggccgagccccgactgcgagagtgaggcacatggcccctgcagaccgggcctcggaggg

SEQ ID NO: 93056 - DNA, 120 bp, Artificial Sequence
  ENSG00000088899_6 (sequence is synthesized)
tcccaggcttgaggacccgtcggcccctcaaccccttggaaaggcaaggagagaagcctgcgctggtagtgagcttccacttctgccctgactgcaacacttaggttagggggctgggaa

SEQ ID NO: 93057 - DNA, 120 bp, Artificial Sequence
  ENSG00000088899_7 (sequence is synthesized)
ggacccccaccctcaatttttggataggggtgtatttctctccctcccctaatttctgaggttggttccctgttggattcaggtactgctctccccttccaaccccatttccccagccca

SEQ ID NO: 93058 - DNA, 120 bp, Artificial Sequence
  ENSG00000088899_8 (sequence is synthesized)
tgaggttgggatattagggtcccagacccaagataaagaaccccaaaattctggggttgcagcaaagagttgagagggtcactgagcctgggaagctcatggcggaggtggggctaaggc

SEQ ID NO: 93059 - DNA, 120 bp, Artificial Sequence
  ENSG00000088899_9 (sequence is synthesized)
agaagtttaggaatggaacgctgagctgagctgagctgagctgagctgagcaacgctgggggctatgtgcatggagccctgggggttgggctttatcaggtgggcaacaggcagccccca

SEQ ID NO: 93060 - DNA, 120 bp, Artificial Sequence
  ENSG00000088899_10 (sequence is synthesized)
ttcccaagttctctcttttatcccagccttattccttcaccttggatgcctgggaactttttgtacccattgtagggaaggggacactgaggggcagagcggtgccgggttgacttggct

SEQ ID NO: 93061 - DNA, 120 bp, Artificial Sequence
  ENSG00000088899_11 (sequence is synthesized)
ggggtggtgggaataggagtagggtcttacctatctctgccttcccacctgtgcccacagtgcccccctggcttagtcatggcgaagctggagacgctgcctgtgcgcgctgacccaggg

SEQ ID NO: 93062 - DNA, 120 bp, Artificial Sequence
  ENSG00000088899_12 (sequence is synthesized)
cgggatcctctcctggcctttgccccacggccctccgagcttggacccccggacccccgcctggccatgggcagcgtgggcagtggggtggcccatgcccaggagtttgccatgaagagc

SEQ ID NO: 93063 - DNA, 120 bp, Artificial Sequence
  ENSG00000088899_13 (sequence is synthesized)
gtgggtacccgcacagggggtgggggcagccagggcagtttccctggcccccgaggcagtggcagtggggccagcagggagaggccgggccgctacccctcagaggacaagggtctcgcc

SEQ ID NO: 93064 - DNA, 120 bp, Artificial Sequence
  ENSG00000088899_14 (sequence is synthesized)
aactccctctacctcaatggtgagctgcggggcagtgaccacaccgatgtctgtggcaacgtggttggcagcagcggaggcagcagcagcagtggtggcagtgacaaagccccaccgcag

SEQ ID NO: 93065 - DNA, 120 bp, Artificial Sequence
  ENSG00000088899_15 (sequence is synthesized)
tatcgtgagcccagccacccacccaagctcctggccacctctggcaagctagaccagtgctcagaaccactagttcggccgtcggccttcaagcctgtcgtacccaagaatttccactcc

SEQ ID NO: 93066 - DNA, 120 bp, Artificial Sequence
  ENSG00000088899_16 (sequence is synthesized)
atgcagaatttgtgccccccgcagaccaatgggactcctgagggacggcagggccctggtggcctcaaaggcggactggacaagtctcggaccatgactccagcgggtgggagtgggagt

SEQ ID NO: 93067 - DNA, 120 bp, Artificial Sequence
  ENSG00000088899_17 (sequence is synthesized)
ggcctctcagactcaggccggaactccctcacaagcctgcccacctacagctccagctacagccagcacctggcacccctcagtgcctccaccagccacattaaccgcattggcactgcc

SEQ ID NO: 93068 - DNA, 120 bp, Artificial Sequence
  ENSG00000088899_18 (sequence is synthesized)
agctatggtagtggtagtggcggcagcagcggtggggggtcgggctaccaggacctggggacctccgatagtggacgggcctccagcaagagtgggtcgtcgtcatctatggggcggcca

SEQ ID NO: 93069 - DNA, 120 bp, Artificial Sequence
  ENSG00000088899_19 (sequence is synthesized)
ggccacctgggctctggggagggcggaggtggaggcctgcctttcgcggcctgctcaccgccctcccccagtgcactcatccaggagctggaggagcggctgtgggagaaggagcaggag

SEQ ID NO: 93070 - DNA, 120 bp, Artificial Sequence
  ENSG00000088899_20 (sequence is synthesized)
gtggcagctctgcggcgcagcctggagcagagcgaggcggctgtggcccaggtactggaggagcggcagaaggcgtgggagcgggagctggccgagctgcggcagggctgcagcgggaag

SEQ ID NO: 93071 - DNA, 120 bp, Artificial Sequence
  ENSG00000088899_21 (sequence is synthesized)
cggcccggctgatgcggcagcgggaagagctggaggacaaggtggccgcctgccagaaggagcaggccgacttcctgccccggatagaggaaactaagtgggaggtgtgccagaaggctg

SEQ ID NO: 93072 - DNA, 120 bp, Artificial Sequence
  ENSG00000088899_22 (sequence is synthesized)
gcgagatctccctcctgaagcagcagctgaaggactcgcaggcggatgtgtcgcagaagttgagtgagatcgtgggactgcgctcgcagctgcgggagggccgggcttcgctgcgggaga

SEQ ID NO: 93073 - DNA, 120 bp, Artificial Sequence
  ENSG00000088899_23 (sequence is synthesized)
aggaggagcagctgctcagcctgcgggactccttcagcagcaagcaggccagcctggagctgggcgaaggcgagctgcctgccgcctgcctcaagccggcgctgacccccgtggacccgg

SEQ ID NO: 93074 - DNA, 120 bp, Artificial Sequence
  ENSG00000088899_24 (sequence is synthesized)
ccgagccacaggatgctctggccacctgcgagagcgacgaggctaagatgcgccgtcaggccggggtggccgctgccgcctccttggtttccgtggacggggaggcggaggctggcgggg

SEQ ID NO: 93075 - DNA, 120 bp, Artificial Sequence
  ENSG00000088899_25 (sequence is synthesized)
cctgcggcgggaggtggggcggctgcaggccgagctggcggctgagcggcgggcccgggagcgccagggtgccagcttcgccgaggagcgccgcgtgtggctggaggagaaggagaaggt

SEQ ID NO: 93076 - DNA, 120 bp, Artificial Sequence
  ENSG00000088899_26 (sequence is synthesized)
aggagaaggagaaggtgatcgagtaccagaagcagctgcagctgagctacgtggagatgtaccagcgcaaccagcagctggagcgcaggctgcgggagcgcggggccgcagggggtgcaa

SEQ ID NO: 93077 - DNA, 120 bp, Artificial Sequence
  ENSG00000088899_27 (sequence is synthesized)
gcacgcccactccccagcatggcgaggagaagaaggcctggaccccctcccgcctcgagcgcattgagtccacagaaatctgatcgacctgggcactcggcattttgacacatgtcctgt

SEQ ID NO: 93078 - DNA, 120 bp, Artificial Sequence
  ENSG00000088899_28 (sequence is synthesized)
caaaaggccagagtccccagtgtcccctcccctccatctctcttccccatagaccccataaccccagaccaaagaggttctctaagcagctgtgaccaggttcctccctccccacctgcc

SEQ ID NO: 93079 - DNA, 120 bp, Artificial Sequence
  ENSG00000088899_29 (sequence is synthesized)
ctcctagctccagcactgcccccgtggcagcccacttggacccccctaaaaggagggaataggaggagggcagggtgagtgggggcaatcctaggtggtgggggagtcatgctccctttc

SEQ ID NO: 93080 - DNA, 120 bp, Artificial Sequence
  ENSG00000088899_30 (sequence is synthesized)
tcggcacccccttgttggagatggaggcagcagacgtgcagtgccataaggtgccccagtccttctggaggcctgggctgctactgttggccaccctgtgtctagtgatgctctctgtgc

SEQ ID NO: 93081 - DNA, 120 bp, Artificial Sequence
  ENSG00000088899_31 (sequence is synthesized)
tcacctcctaggccatggagcctgagggggcctgcaccaggtttgctgaaactgacagagcctgggctccagacctctctccctcctacagtgctctccctccctgggcagattggcagg

SEQ ID NO: 93082 - DNA, 120 bp, Artificial Sequence
  ENSG00000088899_32 (sequence is synthesized)
acaagtgggagcagatggcctgcctttggctgagagggctacctgcccagcccctcccccaacaagatctcttggactcaggcctcagagcctggcctggttgtgagtgtgtgtccctgt

SEQ ID NO: 93083 - DNA, 120 bp, Artificial Sequence
  ENSG00000088899_33 (sequence is synthesized)
gtgtgtgttgcgggaggggaggactggggctggaagtccagcacccagggaagatctgtcctcctgttcttgggaagcgttgcctgacggcttctcggctctaccctcacccttctggcc

SEQ ID NO: 93084 - DNA, 120 bp, Artificial Sequence
  ENSG00000088899_34 (sequence is synthesized)
aggatcccgcagggcaacagccccatctgcttggctgaccccacacccaggaccactgtccggctctaacacagctattaagtgctacctgcctctcaggcactctcctcgcccagtttc

SEQ ID NO: 93085 - DNA, 120 bp, Artificial Sequence
  ENSG00000088899_35 (sequence is synthesized)
tgaggtcagacgagtgtctgcgatgtcttcccgcactctattcccccagcctctttctgctttcatgctcagcacatcatcttcctaggcagtctcttccccaaagtctcaccttttctt

SEQ ID NO: 93086 - DNA, 120 bp, Artificial Sequence
  ENSG00000088899_36 (sequence is synthesized)
ccaatagaaaattccgcttgacctttggtgcactgcccacttcccagctccactggcccaagtctgagccggaggcccttgttttgggggcggggggagagttggatgtgattgcccttg

SEQ ID NO: 93087 - DNA, 120 bp, Artificial Sequence
  ENSG00000088899_37 (sequence is synthesized)
aagaacaaggctgacctgagaggttcctggcgccctgaggtggctcagcacctgcccagggtaggcctggcatgaggggttaggtcagccaatgtcagctgcttctcttggggccctctc

SEQ ID NO: 93088 - DNA, 120 bp, Artificial Sequence
  ENSG00000088899_38 (sequence is synthesized)
agagtctatctccccaagacaggaagggaaaagcaaatttctaattcaccagcaataaaaattggaggaggcttggccctcagcccttatatctctctctttttcactctcttcctccca

SEQ ID NO: 93089 - DNA, 120 bp, Artificial Sequence
  ENSG00000088899_39 (sequence is synthesized)
cccccaagactgagttttggggggcaaggtggagagagctggcaactactgtgagcaagtcccctagcccctgaccagcctcctcccatgactggtgactgtttaatgagctgtgcatcc

SEQ ID NO: 93090 - DNA, 120 bp, Artificial Sequence
  ENSG00000088899_40 (sequence is synthesized)
cccacaaaaacatgagtgcccctctgtgtggcctctaaccctctgcacagcccttctgggtggtcctcaccaggtctctgagctgggtgggaggccatcctggcgaccactgcccattcc

SEQ ID NO: 93091 - DNA, 120 bp, Artificial Sequence
  ENSG00000088899_41 (sequence is synthesized)
attcacccctcactgtacctgccctagaacctgggcctaggccacaggggcagggagaagagaaggcattagtaagaaaaaaatagaaaaaaatatgaacagactcagctttgggacgtc

SEQ ID NO: 93092 - DNA, 120 bp, Artificial Sequence
  ENSG00000088899_42 (sequence is synthesized)
caaccacaaaagaaattatatataaatatatataaatatatatctctaccatatgtgatggaaagactttttgttttcctttcccaaagaaataaaacggaaaaagcctcttgagtggta

SEQ ID NO: 93093 - DNA, 120 bp, Artificial Sequence
  ENSG00000088899_43 (sequence is synthesized)
ggcccgcgcagcgcgccccgccgggcgtgcttcgggctgcgccagcaagcggggccggtggcgcccgtgtcggagaccccgcgccggaccctgaggcagcgaaggagaaaactgcagtcc

SEQ ID NO: 93094 - DNA, 120 bp, Artificial Sequence
  ENSG00000088926_0 (sequence is synthesized)
aaatgcagctttggctagcaggcacacaggcaaaatcaagttctacatctgtccctgtgtatgtcacttgtttgaatacgaaataaaattaaaaaaataaattcagtgtattgagaaagc

SEQ ID NO: 93095 - DNA, 120 bp, Artificial Sequence
  ENSG00000088926_1 (sequence is synthesized)
aagcaattctctcaaggtatatttctgacatactaagattttaacgactttcacaaatatgctgtactgagagagaatgttacataacattgagaactagtacaagtaaatattaaagtg

SEQ ID NO: 93096 - DNA, 120 bp, Artificial Sequence
  ENSG00000088926_2 (sequence is synthesized)
aagtgaccatttcctacacaagctcattcagaggaggatgaagaccattttggaggaagaaaagcacccttattaagaattgcagcaagtaagccaacaaggtcttttcaggatgatttt

SEQ ID NO: 93097 - DNA, 120 bp, Artificial Sequence
  ENSG00000088926_3 (sequence is synthesized)
cttatatcaagtggtacatttcattttatttacttcagtttctggtgaatgtgtgactcagttgttgaaggacacctgctttgaaggaggggacattactacggtcttcacaccaagcgc

SEQ ID NO: 93098 - DNA, 120 bp, Artificial Sequence
  ENSG00000088926_4 (sequence is synthesized)
caagtactgccaggtagtctgcacttaccacccaagatgtttactcttcactttcacggcggaatcaccatctgaggatcccacccgatggtttacttgtgtcctgaaagacagtgttac

SEQ ID NO: 93099 - DNA, 120 bp, Artificial Sequence
  ENSG00000088926_5 (sequence is synthesized)
agaaacactgccaagagtgaataggacagcagcgatttctgggtattctttcaagcaatgctcacaccaaataagcgcttgcaacaaagacatttatgtggacctagacatgaagggcat

SEQ ID NO: 93100 - DNA, 120 bp, Artificial Sequence
  ENSG00000088926_6 (sequence is synthesized)
aaactataacagctcagttgccaagagtgctcaagaatgccaagaaagatgcacggatgacgtccactgccactttttcacgtacgccacaaggcagtttcccagcctggagcatcgtaa

SEQ ID NO: 93101 - DNA, 120 bp, Artificial Sequence
  ENSG00000088926_7 (sequence is synthesized)
catttgtctactgaagcacacccaaacagggacaccaaccagaataacgaagctcgataaagtggtgtctggattttcactgaaatcctgtgcactttctaatctggcttgtattaggga

SEQ ID NO: 93102 - DNA, 120 bp, Artificial Sequence
  ENSG00000088926_8 (sequence is synthesized)
cattttccctaatacggtgtttgcagacagcaacatcgacagtgtcatggctcccgatgcttttgtctgtggccgaatctgcactcatcatcccggttgcttgttttttaccttcttttc

SEQ ID NO: 93103 - DNA, 120 bp, Artificial Sequence
  ENSG00000088926_9 (sequence is synthesized)
gctgcaggcacagcatcccagtgttctgccattcttcattttaccatgacactgatttcttgggagaagaactggatattgttgctgcaaaaagtcacgaggcctgccagaaactgtgca

SEQ ID NO: 93104 - DNA, 120 bp, Artificial Sequence
  ENSG00000088926_10 (sequence is synthesized)
ccaatgccgtccgctgccagttttttacctataccccagcccaagcatcctgcaacgaagggaagggcaagtgttacttaaagctttcttcaaacggatctccaactaaaatacttcacg

SEQ ID NO: 93105 - DNA, 120 bp, Artificial Sequence
  ENSG00000088926_11 (sequence is synthesized)
ggagaggaggcatctctggatacacattaaggttgtgtaaaatggataatgagtgtaccaccaaaatcaagcccaggatcgttggaggaactgcgtctgttcgtggtgagtggccgtggc

SEQ ID NO: 93106 - DNA, 120 bp, Artificial Sequence
  ENSG00000088926_12 (sequence is synthesized)
aggtgaccctgcacacaacctcacccactcagagacacctgtgtggaggctccatcattggaaaccagtggatattaacagccgctcactgtttctatggggtagagtcacctaagattt

SEQ ID NO: 93107 - DNA, 120 bp, Artificial Sequence
  ENSG00000088926_13 (sequence is synthesized)
tgcgtgtctacagtggcattttaaatcaatctgaaataaaagaggacacatctttctttggggttcaagaaataataatccatgatcagtataaaatggcagaaagcgggtatgatattg

SEQ ID NO: 93108 - DNA, 120 bp, Artificial Sequence
  ENSG00000088926_14 (sequence is synthesized)
ccttgttgaaactggaaaccacagtgaattacacagattctcaacgacccatatgcctgccttccaaaggagatagaaatgtaatatacactgattgctgggtgactggatgggggtaca

SEQ ID NO: 93109 - DNA, 120 bp, Artificial Sequence
  ENSG00000088926_15 (sequence is synthesized)
gaaaactaagagacaaaatacaaaatactctccagaaagccaagatacccttagtgaccaacgaagagtgccagaagagatacagaggacataaaataacccataagatgatctgtgccg

SEQ ID NO: 93110 - DNA, 120 bp, Artificial Sequence
  ENSG00000088926_16 (sequence is synthesized)
gctacagggaaggagggaaggacgcttgcaagggagattcgggaggccctctgtcctgcaaacacaatgaggtctggcatctggtaggcatcacgagctggggcgaaggctgtgctcaaa

SEQ ID NO: 93111 - DNA, 120 bp, Artificial Sequence
  ENSG00000088926_17 (sequence is synthesized)
gggagcggccaggtgtttacaccaacgtggtcgagtacgtggactggattctggagaaaactcaagcagtgtgaatgggttcccaggggccattggagtccctgaaggacccaggatttg

SEQ ID NO: 93112 - DNA, 120 bp, Artificial Sequence
  ENSG00000088926_18 (sequence is synthesized)
ctgggagagggtgttgagttcactgtgccagcatgcttcctccacagtaacacgctgaaggggcttggtgtttgtaagaaaatgctagaagaaaacaaactgtcacaagttgttatgtcc

SEQ ID NO: 93113 - DNA, 120 bp, Artificial Sequence
  ENSG00000088926_19 (sequence is synthesized)
cgatgaaaatctctggatggctcaagacttcttaaaaagcaagtcaattacgtcgtatctcatacattctgttttcctcacaataaatttccctaagacaagaaggagcattcggcacca

SEQ ID NO: 93114 - DNA, 120 bp, Artificial Sequence
  ENSG00000088926_20 (sequence is synthesized)
ctttttggctttctgtgtgctgacttttaagatccattattttaaaaacataaattcctattcattaatatgtattttttaaaaaaacaggtttacttgtgtcctgaaagacagtgttac

SEQ ID NO: 93115 - DNA, 120 bp, Artificial Sequence
  ENSG00000088926_21 (sequence is synthesized)
ttgaacccctaaaagacatttctataatagtactcctagttttcttcatgaaaaatacacttaaagcctaatttggatgcatttcatttatggtaaggagtctatcttttaataacactg

SEQ ID NO: 93116 - DNA, 120 bp, Artificial Sequence
  ENSG00000088926_22 (sequence is synthesized)
tcagaaaaatatatatacttggctaatttcaaaagcgctacacttttaaattggcacttttgaaacagctgcaattggtatgattgtcagtgcccttcccagtctaaaaaatgttacagt

SEQ ID NO: 93117 - DNA, 120 bp, Artificial Sequence
  ENSG00000088926_23 (sequence is synthesized)
ttccttacctaagacaaaatactcatgtaaaaagtcttatcctgctccatactggattttgaaatatttcaaggataaatctatcacataaggatttaaaaattatctgatctctaataa

SEQ ID NO: 93118 - DNA, 120 bp, Artificial Sequence
  ENSG00000088926_24 (sequence is synthesized)
ccaaatctgtgttctcatctttaaaaatttactagggaaatagattattaatttgtatattcagaaatatttgagatgatttagattttcatagtaaactgcatttatctggaatcaaca

SEQ ID NO: 93119 - DNA, 120 bp, Artificial Sequence
  ENSG00000088930_0 (sequence is synthesized)
gccgctgctcccgtctctttggttacgctcgtcagccggtcggccgccgcctccagccgtgtgccgctatgggagtcccggcgttcttccgctggctcagccgcaagtacccgtccatca

SEQ ID NO: 93120 - DNA, 120 bp, Artificial Sequence
  ENSG00000088930_1 (sequence is synthesized)
tagtcaactgcgtggaagagaagccaaaagaatgcaatggtgtaaagattccagttgatgccagtaaacctaatccaaatgatgtggagtttgataatctgtatttggatatgaatggaa

SEQ ID NO: 93121 - DNA, 120 bp, Artificial Sequence
  ENSG00000088930_2 (sequence is synthesized)
tcatccatccctgtactcatcctgaagacaaaccagcaccaaaaaatgaagatgaaatgatggttgcaatttttgagtacattgacagacttttcagtattgtaagaccaagaagacttc

SEQ ID NO: 93122 - DNA, 120 bp, Artificial Sequence
  ENSG00000088930_3 (sequence is synthesized)
tctacatggcaatagatggagtggcaccacgtgctaaaatgaaccagcagcgttcaaggaggttcagggcatcaaaagaaggaatggaagcagcagtcgagaagcagcgagtcagggaag

SEQ ID NO: 93123 - DNA, 120 bp, Artificial Sequence
  ENSG00000088930_4 (sequence is synthesized)
aaatattggcaaaaggtggctttcttcctccagaagaaataaaagaaagatttgacagcaactgtattacaccaggaactgaattcatggacaatcttgctaaatgccttcgctattaca

SEQ ID NO: 93124 - DNA, 120 bp, Artificial Sequence
  ENSG00000088930_5 (sequence is synthesized)
tagctgatcgtttaaataatgaccctgggtggaaaaatttgacagttattttatctgatgctagtgctcctggtgaaggagaacataaaatcatggattacattagaaggcaaagagccc

SEQ ID NO: 93125 - DNA, 120 bp, Artificial Sequence
  ENSG00000088930_6 (sequence is synthesized)
agcctaaccatgacccaaatactcatcattgtttatgtggagcagatgctgatctcattatgcttggccttgccacacatgaaccgaactttaccattattagagaagaattcaaaccaa

SEQ ID NO: 93126 - DNA, 120 bp, Artificial Sequence
  ENSG00000088930_7 (sequence is synthesized)
acaagcccaaaccatgtggtctttgtaatcagtttggacatgaggtcaaagattgtgaaggtttgccaagagaaaagaagggaaagcatgatgaacttgccgatagtcttccttgtgcag

SEQ ID NO: 93127 - DNA, 120 bp, Artificial Sequence
  ENSG00000088930_8 (sequence is synthesized)
aaggagagtttatcttccttcggcttaatgttcttcgtgagtatttggaaagagaactcacaatggccagcctaccattcacatttgatgttgagaggagcattgatgactgggttttca

SEQ ID NO: 93128 - DNA, 120 bp, Artificial Sequence
  ENSG00000088930_9 (sequence is synthesized)
tgtgcttctttgtgggaaatgacttcctccctcatttgccatcgttagagattagggaaaatgcaattgaccgtttggttaacatatacaaaaatgtggtacacaaaactgggggttacc

SEQ ID NO: 93129 - DNA, 120 bp, Artificial Sequence
  ENSG00000088930_10 (sequence is synthesized)
ttacagaaagtggttatgtcaatctgcaaagagtacagatgatcatgttagcagttggtgaagttgaggatagcatttttaaaaagagaaaggatgatgaggacagttttagaagacgac

SEQ ID NO: 93130 - DNA, 120 bp, Artificial Sequence
  ENSG00000088930_11 (sequence is synthesized)
agaaagaaaaaagaaagagaatgaagagagatcaaccagctttcactcctagtggaatattaactcctcatgccttgggttcaagaaattcaccaggttctcaagtagccagtaatccga

SEQ ID NO: 93131 - DNA, 120 bp, Artificial Sequence
  ENSG00000088930_12 (sequence is synthesized)
gacaagcagcctatgaaatgaggatgcagaataactctagtccttcgatatctcctaatacgagtttcacatctgatggctccccgtctccattaggaggaattaagcgaaaagcagaag

SEQ ID NO: 93132 - DNA, 120 bp, Artificial Sequence
  ENSG00000088930_13 (sequence is synthesized)
acagtgacagtgaacctgagccagaggataatgtcaggttatgggaagctggctggaagcagcggtactacaagaacaaatttgatgtggatgcagctgatgagaaattccgtcggaaag

SEQ ID NO: 93133 - DNA, 120 bp, Artificial Sequence
  ENSG00000088930_14 (sequence is synthesized)
accagggctgtgcttcctggaagtggtattatccatttcattatgcaccatttgcttcagactttgaaggcattgcagacatgccatctgattttgagaagggtacgaaaccgtttaaac

SEQ ID NO: 93134 - DNA, 120 bp, Artificial Sequence
  ENSG00000088930_15 (sequence is synthesized)
cactagaacaacttatgggggtatttccagctgcaagtggtaattttctacctccatcatggcggaagctcatgagtgatcctgattctagtataattgacttctatcctgaagattttg

SEQ ID NO: 93135 - DNA, 120 bp, Artificial Sequence
  ENSG00000088930_16 (sequence is synthesized)
ctattgatttgaatgggaagaaatatgcatggcaaggtgttgctctcttgccattcgtggatgagcgaaggctacgagctgccctagaagaggtatacccagacctcactccagaagaga

SEQ ID NO: 93136 - DNA, 120 bp, Artificial Sequence
  ENSG00000088930_17 (sequence is synthesized)
ccagaagaaacagccttggaggtgatgtcttatttgtggggaaacatcacccactccatgacttcattttagagctgtaccagacaggttccacagagccagtggaggtaccccctgaac

SEQ ID NO: 93137 - DNA, 120 bp, Artificial Sequence
  ENSG00000088930_18 (sequence is synthesized)
tatgtcatgggattcaaggaaagttttctttggatgaagaagccattcttccagatcaaatagtatgttctcctgttcctatgttaagggatctgacacagaacactgtagtcagtatta

SEQ ID NO: 93138 - DNA, 120 bp, Artificial Sequence
  ENSG00000088930_19 (sequence is synthesized)
attttaaagacccacagtttgctgaagattacatttttaaagctgtaatgcttccaggagcaagaaagccagcagcagtactgaaacctagtgactgggaaaaatccagcaatggacggc

SEQ ID NO: 93139 - DNA, 120 bp, Artificial Sequence
  ENSG00000088930_20 (sequence is synthesized)
agtggaagcctcagcttggctttaaccgtgaccggaggcctgtgcacctggatcaggcagccttcaggactttgggccatgtgatgccaagaggctcaggaactggcatttacagcaatg

SEQ ID NO: 93140 - DNA, 120 bp, Artificial Sequence
  ENSG00000088930_21 (sequence is synthesized)
ctgcaccaccacctgtgacttaccagggaaacttatacaggccgcttttgagaggacaagcccagattccaaaacttatgtcaaatatgaggccccaggattcctggcgaggtcctcctc

SEQ ID NO: 93141 - DNA, 120 bp, Artificial Sequence
  ENSG00000088930_22 (sequence is synthesized)
cccttttccagcagcaaaggtttgacagaggcgttggggctgaacctctgctcccatggaaccggatgctgcaaacccagaatgcagccttccagccaaaccagtaccagatgctagctg

SEQ ID NO: 93142 - DNA, 120 bp, Artificial Sequence
  ENSG00000088930_23 (sequence is synthesized)
ggcctggtgggtatccacccagacgagatgatcgtggagggagacagggatatcccagagaaggaaggaaataccctttgccaccaccctcaggaagatacaattggaattaagcttttg

SEQ ID NO: 93143 - DNA, 120 bp, Artificial Sequence
  ENSG00000088930_24 (sequence is synthesized)
taaagctttcccaaatcctttcatcattctacagttttatgctatttgtggaaagatttctttctcaagtagtagtttttaataaaactacagtactttgtgtatttcttttaactgtgt

SEQ ID NO: 93144 - DNA, 120 bp, Artificial Sequence
  ENSG00000088930_25 (sequence is synthesized)
atatttctactgatctgatctcactgtttatgttgctttccaaagatgtatgttgcataatacagtggatctgaatttattattgcttataaaacacatttgatggaataggagtactgg

SEQ ID NO: 93145 - DNA, 120 bp, Artificial Sequence
  ENSG00000088930_26 (sequence is synthesized)
tttttcataatggttaaaaatgaaaccagctgtggatttcaaaacacagtgtattctagatcatctaagatccatgctgatttttattgcacaagaattaggtttgaactcgagctggaa

SEQ ID NO: 93146 - DNA, 120 bp, Artificial Sequence
  ENSG00000088930_27 (sequence is synthesized)
cctcagcaaactagagtatatattgttcagtatttctttggaaacatttcattaatgtacttgtcttacagaaatttctgaactttagtaaaaaaaaataaagttaaacttttaaaactc

SEQ ID NO: 93147 - DNA, 120 bp, Artificial Sequence
  ENSG00000088970_0 (sequence is synthesized)
agaggctgtgctgagctggcgcagcggcagcagcatgagccggaccctcgcatcggccgtgcccctgtcgagtcccgactactacgagaggctgggccaactccagcacgggctgcggga

SEQ ID NO: 93148 - DNA, 120 bp, Artificial Sequence
  ENSG00000088970_1 (sequence is synthesized)
cagtgaaaagaagagattggacctggaaaagaaactttatgaatataatcagtctgatacatgcagagttaagctgaaatatgtaaaactaaagaattatctgaaggaaatatgtgaatc

SEQ ID NO: 93149 - DNA, 120 bp, Artificial Sequence
  ENSG00000088970_2 (sequence is synthesized)
tgaaaagaaggctcatactcgaaaccaagaatatttaaagcgatttgagcgtgtccaagctcatgttgtacacttcaccacaaatacagagaagcttcaaaaactgaagctcgaatatga

SEQ ID NO: 93150 - DNA, 120 bp, Artificial Sequence
  ENSG00000088970_3 (sequence is synthesized)
gactcaaattaagaagatgctatgctcaaaagatagcctgggactaaaagaggaactgacagatgaagacagagaaaaggttgcagtgcacgaggggattaactcaggaacagccatgtc

SEQ ID NO: 93151 - DNA, 120 bp, Artificial Sequence
  ENSG00000088970_4 (sequence is synthesized)
aagaggattgtatcaaccagcaacaatctttatgggccgccaaatgtcagccatcttaagcatgagagatttcagtacagagcacaaatctccccagcccacaaagaacttttcaattcc

SEQ ID NO: 93152 - DNA, 120 bp, Artificial Sequence
  ENSG00000088970_5 (sequence is synthesized)
tgacccacattcacaccgacagacagcccagagcagtaatgtgacagacagctgtgtagtacaaactagtaatgacacacagtgcttaaataagtctgacaacatagatggaaaggcatc

SEQ ID NO: 93153 - DNA, 120 bp, Artificial Sequence
  ENSG00000088970_6 (sequence is synthesized)
tcttcagattggtgagaaaatgccagtcacagccagtgtattgtctgaggaggaacaaactcattgcttggagataggaagtaacacacgtcatggcaagagtaatttatctgaaggcaa

SEQ ID NO: 93154 - DNA, 120 bp, Artificial Sequence
  ENSG00000088970_7 (sequence is synthesized)
aaagtctgctgaactcaattccccgttacgggaaagattaagtccagagaacagaaccactgatttaaagtgtgacagttccagcggatcagagggagaaatactgacacgggaacatat

SEQ ID NO: 93155 - DNA, 120 bp, Artificial Sequence
  ENSG00000088970_8 (sequence is synthesized)
aatctgaaaataagtggtctcaagagaagcattctccttgggaaggtgtttcagatcatcttgctcacagggaaccaaagtcacaaaagcccttcagaaaaatgcaggaagaggaggagg

SEQ ID NO: 93156 - DNA, 120 bp, Artificial Sequence
  ENSG00000088970_9 (sequence is synthesized)
aaagttggagcaccagcagtgaccttaccatttcaataagtgaagatgatctgattttagagagcccagaaccacagccaaatccaggtggcaagatggagggagaagatggaatagagg

SEQ ID NO: 93157 - DNA, 120 bp, Artificial Sequence
  ENSG00000088970_10 (sequence is synthesized)
ccttaaaattaatccatgctgagcaagaaagagttgccctatccactgaaaaaaattgtattttgcaaaccctaagctctcctgattcagaaaaggaatcctccactaacgcaccaacaa

SEQ ID NO: 93158 - DNA, 120 bp, Artificial Sequence
  ENSG00000088970_11 (sequence is synthesized)
gagaacctggacaaacaccagactcagacgtaccgagggcacaggtgggtcagcatgttgccaccttgaaagaacatgataattctgtcaaagaagaggcaacagcattattgagaaaag

SEQ ID NO: 93159 - DNA, 120 bp, Artificial Sequence
  ENSG00000088970_12 (sequence is synthesized)
cccttacagaagagtgtggccgtaggtcagctattcacagtagtgaatcatcttgcagcttgccatctattctgaatgacaatagtggaataaaggaagccaaacctgctgtatggctca

SEQ ID NO: 93160 - DNA, 120 bp, Artificial Sequence
  ENSG00000088970_13 (sequence is synthesized)
acagtgttcctacaagggaacaagaagtttcaagtggctgtggagacaagagcaagaaagaaaatgtggctgcagatatcccaatcacagaaacagaagcctatcagttgctgaagaagg

SEQ ID NO: 93161 - DNA, 120 bp, Artificial Sequence
  ENSG00000088970_14 (sequence is synthesized)
ccacccttcaggataatacaaatcaaactgaaaacaggtttcaaaagacagatgcttctgtgtcacacttgtcaggtttgaatattggcagcggtgcattcgagacaaagacagctaaca

SEQ ID NO: 93162 - DNA, 120 bp, Artificial Sequence
  ENSG00000088970_15 (sequence is synthesized)
aaattgcttcggaagctagtttttcatctagtgaaggaagtcctttgtcaaggcatgaaaacaaaaagaaacccgtgatcaatttaaaatctaatgccctctgggatgagtctgatgaca

SEQ ID NO: 93163 - DNA, 120 bp, Artificial Sequence
  ENSG00000088970_16 (sequence is synthesized)
gtaactcagaaattgaggctgctttacgccccagaaaccataacaccgatgattctgatgatttttatgactaacgtgctgtgacattggtttcaaataaagtctttaaacaaactaaaa

SEQ ID NO: 93164 - DNA, 120 bp, Artificial Sequence
  ENSG00000088970_17 (sequence is synthesized)
atacatcaattaatacatattttgttgcccagccctgtgtgatccttctctctctctgcagtatgcataatgcatagaagcatagtgaagacttggaaaagactttcagcaaaggaattg

SEQ ID NO: 93165 - DNA, 120 bp, Artificial Sequence
  ENSG00000088970_18 (sequence is synthesized)
aatcagtctgatacatgcaggtttcttcctccactattaagagcagatcttaaatattttaatttctattttataaaaactgaactttatccttaagccaaaagtatggcattacctctt

SEQ ID NO: 93166 - DNA, 120 bp, Artificial Sequence
  ENSG00000088970_19 (sequence is synthesized)
atattattcatatgaagaacttctggctttgatagcattaagtttgtaatttatccatgtcacactatgagtgagaaatgaaaagatctcatccagaagagagagaggccaagaatcctt

SEQ ID NO: 93167 - DNA, 120 bp, Artificial Sequence
  ENSG00000088970_20 (sequence is synthesized)
cagaagtctggcaagaccaggaccactttcccaccaggcagcaattggctgaagccaaggagcagctgtgctctatagacaagtcatgtgcctccttgcctgctacagggcaggcccttc

SEQ ID NO: 93168 - DNA, 120 bp, Artificial Sequence
  ENSG00000088970_21 (sequence is synthesized)
tagtttttcatctagtgaaggaagtcctttgtcaaggtaaagttgtgaaagcctttctgaatagcagcaacaagatgagaaatgtcacagcgcaatgaattaaactctggctgcgtatta

SEQ ID NO: 93169 - DNA, 120 bp, Artificial Sequence
  ENSG00000088970_22 (sequence is synthesized)
tctatgagaaagtgctctgtctttggaagctcgaatatgagactcaaattaagaagatgctatgctcaaaagatagcctgggactaaaagaggaactgacagatgaagacagagaaaagg

SEQ ID NO: 93170 - DNA, 120 bp, Artificial Sequence
  ENSG00000088970_23 (sequence is synthesized)
cacttgtcaggcatgaaaacaaaaagaaacccgtgatcaatttaaaatctaatggtgagagagataatcggacactagattttctttttctgttttaaccaaaaaactctgtgacatgca

SEQ ID NO: 93171 - DNA, 120 bp, Artificial Sequence
  ENSG00000088970_24 (sequence is synthesized)
ttttaaccaaaaaactctgtgacatgcatttgttgtttgcaccctcatgtgagtcctgaagcgggcatgctcacagggactgccattgcagctgtccctggggtggaacctgagggcttc

SEQ ID NO: 93172 - DNA, 120 bp, Artificial Sequence
  ENSG00000088970_25 (sequence is synthesized)
tggaggctcagttcttcacagacaggaccacacgggtgccatggaccacaggggcagagcattgtaatttgcaagtatgaatttgcaggggatcctggcctccatgtctaattaattatc

SEQ ID NO: 93173 - DNA, 120 bp, Artificial Sequence
  ENSG00000088970_26 (sequence is synthesized)
agcaccctgtattttaccaatgaaatgtttcttgcctctctcctcatcctcagaagcacccattgctcatgaccggacaggctcttggagtaactctaactggtttcctcatacccagtt

SEQ ID NO: 93174 - DNA, 120 bp, Artificial Sequence
  ENSG00000088970_27 (sequence is synthesized)
aactcccagctcctccacctggccaccagcctccaaaccctggcttcccccgaccttcctgtgtaaggacggccaatgcctccccgtaccttcagggtagagtctgagctttctccattc

SEQ ID NO: 93175 - DNA, 120 bp, Artificial Sequence
  ENSG00000088970_28 (sequence is synthesized)
ctgggaggccccagccctgctctccagcttattcctcccaaggtcgcctctttgggtcaagccacagtcagcttttttcagctgtagcacacctatgcctctgtacctttgcccatgttg

SEQ ID NO: 93176 - DNA, 120 bp, Artificial Sequence
  ENSG00000088970_29 (sequence is synthesized)
ttccttctgtagggagttccttttccttttcctcagcccagtgagctcctattcatccttcaacacccaactcacgggaaaaatctagccctcctaccataacactgtggcatatcccct

SEQ ID NO: 93177 - DNA, 120 bp, Artificial Sequence
  ENSG00000088970_30 (sequence is synthesized)
gcccagcttgggctctctcacctcctgtctccttaaaccccttataccttaaattaaaggtataatttgattaatagttttactgacaataacaaaaatattcgctgtttatttagcccc

SEQ ID NO: 93178 - DNA, 120 bp, Artificial Sequence
  ENSG00000088970_31 (sequence is synthesized)
agtatgtcccactttgctaacccagtatggaaactgattcagagctgctgtagaacctaggcctaggaatctgcctttttagcaagcaccccactgtgaatcactcttctagaaggacag

SEQ ID NO: 93179 - DNA, 120 bp, Artificial Sequence
  ENSG00000088970_32 (sequence is synthesized)
ctacctactgtgggggagacaagtacccagtgggttgtgatggagagtatgggcttgagtcagatgacttggatgggactcccagcttggccactcactggcattgtgattgtggccaat

SEQ ID NO: 93180 - DNA, 120 bp, Artificial Sequence
  ENSG00000088970_33 (sequence is synthesized)
ttcttaacccccttcagcgtccgtttgtttgcacagtgaaatggaaacattaatacttaccttgccaggctggtgcgaggatgagatggggttgtgtatgagaagtcagcacagagctgg

SEQ ID NO: 93181 - DNA, 120 bp, Artificial Sequence
  ENSG00000088970_34 (sequence is synthesized)
caggtggtgccatgcaggtgtcagcagagttaagggattgttgatgtagtagacgtggtccgctccactacaccttgccagaccacctgcagggcacctcagctccaattcacagacgcg

SEQ ID NO: 93182 - DNA, 120 bp, Artificial Sequence
  ENSG00000088970_35 (sequence is synthesized)
cctacagcttcctgcaccaagcagctgtgtctctctgcctgagggctttctctggctgcaggagcgtgctcagccctcacaaggcagcccaaagtaccagggagttgatgccctgggttg

SEQ ID NO: 93183 - DNA, 120 bp, Artificial Sequence
  ENSG00000088970_36 (sequence is synthesized)
agagcaaccctcaaccaacagaggcaagttggtggatcagtaaccccactcccttgctcttcactgggacaatctggggagagttctgcagtctctcagggggccccagcaggctgagcc

SEQ ID NO: 93184 - DNA, 120 bp, Artificial Sequence
  ENSG00000088970_37 (sequence is synthesized)
ttgcctgtccactcactgccaggcacccactcgtcatcatacccttcattggcttcctgtcttccttgtgtcactgtccccatggttcctgggatcacctctcaagtaaatgatgtggac

SEQ ID NO: 93185 - DNA, 120 bp, Artificial Sequence
  ENSG00000088970_38 (sequence is synthesized)
caaagtcctgtctcagggtaaccatctctgcttattcctctgccacgtctttcccttctcctctctgctctcataaagaagaatgggagatgaaagtggaggggcagctgaggtggggcg

SEQ ID NO: 93186 - DNA, 120 bp, Artificial Sequence
  ENSG00000088970_39 (sequence is synthesized)
gcatcaggctgatacaacaccccagggaaccctgcttccatgtaaccctgaccttaaatccctatcctataataaagagttgggcacaacagaagggaaaaggaagtattctgcaaattg

SEQ ID NO: 93187 - DNA, 120 bp, Artificial Sequence
  ENSG00000088970_40 (sequence is synthesized)
ttttccataacagtgcagaggacacactttgcaatgtgtaatttgtgcagtatgacatgcatttgggtgtgtctggtcaggtacatcatgtggtgtccctgttatgcattttgcagactg

SEQ ID NO: 93188 - DNA, 120 bp, Artificial Sequence
  ENSG00000088970_41 (sequence is synthesized)
acactctgcttaaccagtccttccgtgctgtgctgttttgtaagctcttaaccagaatgcaaaaatgttaaataactgtctggttttattttccagccctctgggatgagtctgatgaca

SEQ ID NO: 93189 - DNA, 120 bp, Artificial Sequence
  ENSG00000088986_0 (sequence is synthesized)
agatgcgccacggtttcggtagcgacggtatctctagccgggcctgagctgtgctagcacctcccccaggagaccgttgcagtcggccagcccccttctccacggtaaccatgtgcgacc

SEQ ID NO: 93190 - DNA, 120 bp, Artificial Sequence
  ENSG00000088986_1 (sequence is synthesized)
gaaaggccgtgatcaaaaatgcggacatgtcggaagagatgcaacaggactcggtggagtgcgctactcaggcgctggagaaatacaacatagagaaggacattgcggctcatatcaaga

SEQ ID NO: 93191 - DNA, 120 bp, Artificial Sequence
  ENSG00000088986_2 (sequence is synthesized)
atgtgacacatgaaaccaaacacttcatctacttctacctgggccaagtggccattcttctgttcaaatctggttaaaagcatggactgtgccacacacccagtgatccatccaaaaaca

SEQ ID NO: 93192 - DNA, 120 bp, Artificial Sequence
  ENSG00000088986_3 (sequence is synthesized)
aggactgcagcctaaattccaaataccagagactgaaattttcagccttgctaagggaacatctcgatgtttgaacctttgttgtgttttgtacagggcattctctgtactagtttgtcg

SEQ ID NO: 93193 - DNA, 120 bp, Artificial Sequence
  ENSG00000088986_4 (sequence is synthesized)
tggttataaaacaattagcagaatagcctacatttgtatttattttctattccatacttctgcccacgttgttttctctcaaaatccattcctttaaaaaataaatctgatgcagatgtg

SEQ ID NO: 93194 - DNA, 120 bp, Artificial Sequence
  ENSG00000088986_5 (sequence is synthesized)
gctgacagggagagcctggggccgggccgtgtggatgccatccccgagcgcggttcgcgctcggctgaggcgctggacaagtggcttgggctcccgcgcctcagtttctctctgtggcgc

SEQ ID NO: 93195 - DNA, 120 bp, Artificial Sequence
  ENSG00000088986_6 (sequence is synthesized)
cgcctacctcacagacttgtgagcactcactgacgtgggtagcgcccagggcctgcggggcgcaggagagctggagtcaggcggagaccgcaggctgaccccgcagcggccgggctgtcg

SEQ ID NO: 93196 - DNA, 120 bp, Artificial Sequence
  ENSG00000088986_7 (sequence is synthesized)
agatgcgccacggtttcggtagcgacggtatctctagccgggcctgagctgtgctagcacctcccccaggagaccgttgcagtcggccagcccccttctccacggtgagaaactcggggg

SEQ ID NO: 93197 - DNA, 120 bp, Artificial Sequence
  ENSG00000088986_8 (sequence is synthesized)
gccagggggtgtcctcgctgccttatttcgccccactccggacttagccctccgcgtagcccgcgcttcctgagaagtggggtggggggcgtcgtcccgtggtggcgccggccggggtgg

SEQ ID NO: 93198 - DNA, 120 bp, Artificial Sequence
  ENSG00000088986_9 (sequence is synthesized)
cggcttggggcgtagaagcttccagaaaggacgcagatgcattttgcgctcctgtggagaagaccagacccccggcgtccgaagtttttttttttttttttttaattacccagctccgcg

SEQ ID NO: 93199 - DNA, 120 bp, Artificial Sequence
  ENSG00000088986_10 (sequence is synthesized)
gggggaaagcgccacctagcaacggtatctaagatcagggagcagcggttcccccttctgtgtggttcctgcgccgaggatccatctgggtgttccggaggggggagctgcgtgggtgtt

SEQ ID NO: 93200 - DNA, 120 bp, Artificial Sequence
  ENSG00000088986_11 (sequence is synthesized)
tggtgggtggtggcggggctgggggctggggtaggggcttggtaaatggcagtctagaaagccggcaggactgccaacttctcgagcagtgtttgctggaagggaagaaagctggcagcc

SEQ ID NO: 93201 - DNA, 120 bp, Artificial Sequence
  ENSG00000088986_12 (sequence is synthesized)
taagccgtgggagggttccagtcgagaatgggaagatgaaagacttcagatggaacagaaataaatgccttttttgacaaacgcagcagtgcgtgcctctagcttgcaagagcgttactc

SEQ ID NO: 93202 - DNA, 120 bp, Artificial Sequence
  ENSG00000088986_13 (sequence is synthesized)
cccttcatagctttaaaaggttttcgcactgcgtgcagttagagtagctaaatcttgtgtgacgctccacaaacacttgtaagaattttgcagagaaagataaccgttgccacccaatgc

SEQ ID NO: 93203 - DNA, 120 bp, Artificial Sequence
  ENSG00000088986_14 (sequence is synthesized)
cccccacaggcattctactccccagtacctcttagggtgggagaaatggtgaagagttgttcctacaacttgctaacctagtggacagggtagtagattagcatcatccggatagatgtg

SEQ ID NO: 93204 - DNA, 120 bp, Artificial Sequence
  ENSG00000088986_15 (sequence is synthesized)
aagaggacggctgtttggataataattaaggataaaatttggccagttgacagattctgtttccagcagtttttacagcaacagtggagtgcttcagtattgtgttcctgtaaatttaat

SEQ ID NO: 93205 - DNA, 120 bp, Artificial Sequence
  ENSG00000088986_16 (sequence is synthesized)
tttgatccgcaatcatttggtatacaatgctgtttgaagttttgtcctattggaaaagtcttgtgttgcaggggtgcagttaagatctttgtgatgaggaatgggatgggctaatttttt

SEQ ID NO: 93206 - DNA, 120 bp, Artificial Sequence
  ENSG00000088986_17 (sequence is synthesized)
cacctcagagccactggtggccgcagaagacagtccacgtgtcttaaccagacttacaagactccaaagatgggtgccttgtatcaagcaggtgctcaacaaatgtctgctgaaaaaatg

SEQ ID NO: 93207 - DNA, 90 bp, Artificial Sequence
  ENSG00000088986_18 (sequence is synthesized)
taaggaaagactgcctcacctgagcaagaagcttcaccctggacaaaaaccccggggctcaacactcccaaatccacccggatccccatc

SEQ ID NO: 93208 - DNA, 120 bp, Artificial Sequence
  ENSG00000088986_19 (sequence is synthesized)
cccggggctcaacactcccaaatccacccggatccccatccccaaccccttaaaggatgtccgcattgcttggcagagaccccactcttggggataatcccttaattcgtaaccatgtgc

SEQ ID NO: 93209 - DNA, 120 bp, Artificial Sequence
  ENSG00000088986_20 (sequence is synthesized)
cctgtctttagggctgacctttcgtcctttgacctcctcagcctccattcccatcttcgctcagactgcaagtatgtttgtattaatgtactatgtaggcggcttggagctggggaacat

SEQ ID NO: 93210 - DNA, 120 bp, Artificial Sequence
  ENSG00000088986_21 (sequence is synthesized)
tctttcattctaagaatttgcagatgctgacgttcctcctttctgcccctacaggctctggcttatccaagaggcaaacactgacctctggtaattaaaatcctagttcttttcttttgt

SEQ ID NO: 93211 - DNA, 80 bp, Artificial Sequence
  ENSG00000088992_0 (sequence is synthesized)
ggaacccgcggctccgagccttcgccggcgtcccgacccgaggccggacccgaggccagtcccgccgctgcgcagccgaa

SEQ ID NO: 93212 - DNA, 120 bp, Artificial Sequence
  ENSG00000088992_1 (sequence is synthesized)
ccgccgcgggcaccatgggcgctgcccactccgcgtctgaggaggtgcgggagctcgagggcaagaccggcttctcatcggatcagatcgagcagctccatcggagatttaagcagctga

SEQ ID NO: 93213 - DNA, 120 bp, Artificial Sequence
  ENSG00000088992_2 (sequence is synthesized)
gtggagatcagcctaccattcgcaaggagaacttcaacaatgtcccggacctggagctcaaccccatccgatccaaaattgttcgtgccttcttcgacaacaggaacctgcgcaagggac

SEQ ID NO: 93214 - DNA, 120 bp, Artificial Sequence
  ENSG00000088992_3 (sequence is synthesized)
ccagtggcctggctgatgagatcaatttcgaggacttcctgaccatcatgtcctacttccggcccatcgacaccaccatggacgaggaacaggtggagctgtcccggaaggagaagctga

SEQ ID NO: 93215 - DNA, 120 bp, Artificial Sequence
  ENSG00000088992_4 (sequence is synthesized)
agcgacggccgcatcactctggaagaatatcgaaatgtggtcgaggagctgctgtcgggaaaccctcacatcgagaaggagtccgctcgctccatcgccgacggggccatgatggaggcg

SEQ ID NO: 93216 - DNA, 120 bp, Artificial Sequence
  ENSG00000088992_5 (sequence is synthesized)
gccagcgtgtgcatggggcagatggagcctgatcaggtgtacgaggggatcaccttcgaggacttcctgaagatctggcaggggatcgacattgagaccaagatgcacgtccgcttcctt

SEQ ID NO: 93217 - DNA, 120 bp, Artificial Sequence
  ENSG00000088992_6 (sequence is synthesized)
aacatggaaaccatggccctctgccactgacccaccgccacctccgcggagaaactgcactttgcaatggggccgcctccccgcgtagctggagcagcccaggcccggcggacagcctct

SEQ ID NO: 93218 - DNA, 120 bp, Artificial Sequence
  ENSG00000088992_7 (sequence is synthesized)
tcctgcagcgccggtacatagccaaggctcgtctgcgcaccttgtgtcttgtagggtatggtatgtgggacttcgctgtttttatctccaataaaaaaaaaaaaaaggtttgttaattaa

SEQ ID NO: 93219 - DNA, 120 bp, Artificial Sequence
  ENSG00000088992_8 (sequence is synthesized)
agaagggggttgtgcggtggatgtgaaacaaggcccttgatgcaaagacctgggttccagtgtggcccgtctcaccagccatgtgaccttgaaccttgacccagaacgtggttctgttcc

SEQ ID NO: 93220 - DNA, 120 bp, Artificial Sequence
  ENSG00000088992_9 (sequence is synthesized)
agagcactttgcccggagcccagcgtcctcccctgagttcgctgagtctcccgggaccagcaaaggctgcgcgccccgcatcggcccggaggcggggagccctgggaggcctggccgagc

SEQ ID NO: 93221 - DNA, 120 bp, Artificial Sequence
  ENSG00000088992_10 (sequence is synthesized)
tgggtcctgaactcggcatggccagttctgcctctggctgtggaccagggtgtggactggagaccgcgggggccagtctcatcggatcagatcgagcagctccatcggagatttaagcag

SEQ ID NO: 93222 - DNA, 120 bp, Artificial Sequence
  ENSG00000088992_11 (sequence is synthesized)
gcctcctgggttcaaacgattctcctgcgtcagcctccccagaagctgggactacagtctcatcggatcagatcgagcagctccatcggagatttaagcagctgagtggagatcagccta

SEQ ID NO: 93223 - DNA, 120 bp, Artificial Sequence
  ENSG00000088992_12 (sequence is synthesized)
attggcttgggggcttggagggcttggggccaccagccctcgtccctgtgaggctggcattgctgtctcccgttcccggcaccttcatcctaaacattcctcagcagcttgtggcttcct

SEQ ID NO: 93224 - DNA, 120 bp, Artificial Sequence
  ENSG00000089006_0 (sequence is synthesized)
tcctcgtggagcggagcaagggtaggccccacgtggcgtctttgcccggctccaagatggacggcagcggggactgggaggctgctctgggggagcacgtggcgccctgctcgcctgctc

SEQ ID NO: 93225 - DNA, 80 bp, Artificial Sequence
  ENSG00000089006_1 (sequence is synthesized)
ccggggcagctgggatggtggcggagtccggaggcctcctgccgccgtcgggcagggaggccggcggaggcggggccgtg

SEQ ID NO: 93226 - DNA, 120 bp, Artificial Sequence
  ENSG00000089006_2 (sequence is synthesized)
cagcttcttctttcctcgcacagccaggcggcccctgctcgagtcccgcgtcgccatggccgcggttcccgagttgctgcagcagcaggaggaggaccgcagcaagctgagatctgtatc

SEQ ID NO: 93227 - DNA, 120 bp, Artificial Sequence
  ENSG00000089006_3 (sequence is synthesized)
tgtggacctgaatgttgatccctcgcttcagattgacatacctgatgcgctcagtgagagagacaaagtcaaatttacagtgcacacaaagaccacactgcccacgtttcagagcccaga

SEQ ID NO: 93228 - DNA, 120 bp, Artificial Sequence
  ENSG00000089006_4 (sequence is synthesized)
gttttctgttacaaggcaacatgaagactttgtgtggctacatgacactcttattgaaacaacagactatgctgggcttattattccacctgctcctacgaagcccgactttgatggtcc

SEQ ID NO: 93229 - DNA, 120 bp, Artificial Sequence
  ENSG00000089006_5 (sequence is synthesized)
tcgagagaagatgcagaaactgggagaaggtgaagggtctatgaccaaagaagaatttgccaagatgaaacaagaactggaagctgagtatctcgctgtgtttaagaagactgtgtcctc

SEQ ID NO: 93230 - DNA, 120 bp, Artificial Sequence
  ENSG00000089006_6 (sequence is synthesized)
ccatgaagtctttcttcagcggctttcttctcaccctgttctcagtaaagatcgcaactttcatgttttcctggaatatgatcaggatctaagtgttaggcggaaaaatactaaagagat

SEQ ID NO: 93231 - DNA, 120 bp, Artificial Sequence
  ENSG00000089006_7 (sequence is synthesized)
gtttggtggcttcttcaaaagtgtggtgaaaagtgctgatgaagtcctttttactggagttaaggaggtagatgacttctttgagcaagagaagaacttccttattaactattacaatag

SEQ ID NO: 93232 - DNA, 120 bp, Artificial Sequence
  ENSG00000089006_8 (sequence is synthesized)
gatcaaagattcttgtgtgaaagctgacaaaatgaccagatctcataaaaatgttgccgatgactatatccacaccgcagcctgcttacatagcctggctttagaagagcccacagtcat

SEQ ID NO: 93233 - DNA, 120 bp, Artificial Sequence
  ENSG00000089006_9 (sequence is synthesized)
tgctcaacattgaagctgctaaggatctcttatacagacgcaccaaagccctcattgactatgagaactcaaacaaagctctggataaggcccggttaaagagcaaagacgtcaagttgg

SEQ ID NO: 93234 - DNA, 120 bp, Artificial Sequence
  ENSG00000089006_10 (sequence is synthesized)
ctgaggcacaccagcaggagtgctgccagaaatttgaacaactttccgaatctgcaaaagaagaactgataaatttcaaacggaagagagtggcagcatttagaaagaatctaattgaaa

SEQ ID NO: 93235 - DNA, 120 bp, Artificial Sequence
  ENSG00000089006_11 (sequence is synthesized)
tgtctgaactggaaataaaacatgccaggaacaatgtctcccttttgcagagctgtattgacttgttcaagaataactgatatgccttcactcagaagaaaagaaatgaatgtgaaagaa

SEQ ID NO: 93236 - DNA, 120 bp, Artificial Sequence
  ENSG00000089006_12 (sequence is synthesized)
agccaagcatcacttgcacttaaatcattaccacggaagatatattagcttcaactttagtttaaaattatgtgaataaatattttgatttctacaaatcttaacatttaaccatgttgg

SEQ ID NO: 93237 - DNA, 120 bp, Artificial Sequence
  ENSG00000089006_13 (sequence is synthesized)
tttaaaaatattattgcttgctacttggacataactaatttttccttgtgcatttaatacctctgggcagaatccaaatactgggttctcccgtagttcgtctttagttactaagaaagg

SEQ ID NO: 93238 - DNA, 120 bp, Artificial Sequence
  ENSG00000089006_14 (sequence is synthesized)
gtgtaggacacattagccttctggaaacaagtagaagccatcacctggcccatgtccctacaaacccatgattgtcagggaggtgccagttacagcaggtgattcagctacttgaggtcg

SEQ ID NO: 93239 - DNA, 120 bp, Artificial Sequence
  ENSG00000089006_15 (sequence is synthesized)
gtaacagaccttccattcctcactgaaggtggggtttgtgtttttgttttgccctgttactccactggtagtcatctggtgtttgtactataacaacagcaagaaaatctcatttatctt

SEQ ID NO: 93240 - DNA, 120 bp, Artificial Sequence
  ENSG00000089006_16 (sequence is synthesized)
tatatactctttgcacctcctttttttagtcgagatataaatatttgaggggagagaaatatctacaggtatatatggaaacaaataatgtggtctgctttataagatggccagatctac

SEQ ID NO: 93241 - DNA, 120 bp, Artificial Sequence
  ENSG00000089006_17 (sequence is synthesized)
attaggaaaagtataagccccctccctaatggccgctggggggtgagggcggtgtgttgtatgtctttgggtgtttgtttttttataaagcatataataaaataatcgtgctactaatgt

SEQ ID NO: 93242 - DNA, 120 bp, Artificial Sequence
  ENSG00000089006_18 (sequence is synthesized)
ggcctccgccaacgcgccaccagttagaggcagggagtacctctccgagcggaagggccggcgtctccgaagcgcgggagcctccaaatcgcgcccttctgctctcacgagatctggtga

SEQ ID NO: 93243 - DNA, 120 bp, Artificial Sequence
  ENSG00000089006_19 (sequence is synthesized)
cgtcagcgctcgctgccatcttggactcgggctgagtaataaattccccccgcaccgaaacgcggtctttctctagacgcgtcttgctgggagagtgtccgttgcttcccgtccgtgtcg

SEQ ID NO: 93244 - DNA, 120 bp, Artificial Sequence
  ENSG00000089006_20 (sequence is synthesized)
ggagattgaagaaaaaacataaaactttaaaaaatgatgccaattcaggtctacctttactgcctaaagttttcgcccacattgattatatcctatattcaaaatgccagataggtacac

SEQ ID NO: 93245 - DNA, 120 bp, Artificial Sequence
  ENSG00000089006_21 (sequence is synthesized)
tatctaaaaatacagtattctgtggaatgctgagattggtgggtcttaacctgtttgcctttggtataagtgctttctgagacttgcagctgagctgacgactagagttgagtcagtggg

SEQ ID NO: 93246 - DNA, 120 bp, Artificial Sequence
  ENSG00000089006_22 (sequence is synthesized)
taagggctggtttcacaggaggtgaatagttaagtgtatggagccctggtactgtgtgtaggtctagaggaaggcagggagcttatcttcacccaggatatccaagggactgataaacat

SEQ ID NO: 93247 - DNA, 120 bp, Artificial Sequence
  ENSG00000089006_23 (sequence is synthesized)
caccttgtagtgcaagcactatagacttgacatatcactatgaaatttgtgactttttaacttggatgtggctgcttgtattgtagttcttttgcacagcactgtagagacaggaaggag

SEQ ID NO: 93248 - DNA, 120 bp, Artificial Sequence
  ENSG00000089006_24 (sequence is synthesized)
ggtgagtctgctctgaacacttgagcaccagcagaaggttgggtgatggtcaaagttttagtcaagtaaaactgcaagacagaacttgatgtcacaaattcaatgaaggaattagggcgg

SEQ ID NO: 93249 - DNA, 120 bp, Artificial Sequence
  ENSG00000089006_25 (sequence is synthesized)
gaattagggcggacatgcatattcttggtttgttccaatttccaatgggtcattaatgccgaattctgatggcaataggagtagatgaaatgaaaaagggctgggtgcagtggctcacgc

SEQ ID NO: 93250 - DNA, 120 bp, Artificial Sequence
  ENSG00000089006_26 (sequence is synthesized)
ccgtctcaagaaaaaaaaagaaaaaggagtagatgaaaaggaagcatgccctaaagatcatcaagtaaacctgtcttgaatacgtgtagcagtttttcactgttttggatttaaaaatgt

SEQ ID NO: 93251 - DNA, 120 bp, Artificial Sequence
  ENSG00000089006_27 (sequence is synthesized)
tttaagttttatttttaatcgacaagtcattgtattgcatttgtggaatacagtgtgatgctttgcaggtacataatgtgaaattattagatcaagctaattaacatctttcattttttt

SEQ ID NO: 93252 - DNA, 120 bp, Artificial Sequence
  ENSG00000089006_28 (sequence is synthesized)
cagtggtaatacatttgaaatttgctgtttcaatatatattattgactgtagtcaccctgttgtgcagtagatctcaaaatttattccttgagtttagctgcagccttctacccattctc

SEQ ID NO: 93253 - DNA, 120 bp, Artificial Sequence
  ENSG00000089006_29 (sequence is synthesized)
tttcccaccttccccagcaccccaccctcatcctctgataaccatcattctgttctctacttctaggagttcaacttaagattttacctgtaagtgagatcatgtaatgtttgtctttct

SEQ ID NO: 93254 - DNA, 120 bp, Artificial Sequence
  ENSG00000089006_30 (sequence is synthesized)
gtgcctggtttattttatttggcataatgtcctctaagatccatccacattgtcccatatgagagaattttgttattttaaaaggccggatagtataatgtatctatactacattgtctt

SEQ ID NO: 93255 - DNA, 120 bp, Artificial Sequence
  ENSG00000089006_31 (sequence is synthesized)
catccactgatggataattctcaattgattttgtattttggctattgtaaataatgctgcagtgaacatggaagtacggatatcccattgagatactgatttcagttccttttatattcc

SEQ ID NO: 93256 - DNA, 120 bp, Artificial Sequence
  ENSG00000089006_32 (sequence is synthesized)
aattctatttttagttttttgaggaacctctataccattttccatggtggctgtactaatttacattcccagcaacggtgtagaagagttcacttttctctgcattgttgctaacactga

SEQ ID NO: 93257 - DNA, 120 bp, Artificial Sequence
  ENSG00000089006_33 (sequence is synthesized)
caacggtgtagaagagttcacttttctctgcattgttgctaacactgatctttcatctatttgagaaaatgcattctagcaggtgtgaggtaatctcattgtggttttaatttgcatttc

SEQ ID NO: 93258 - DNA, 120 bp, Artificial Sequence
  ENSG00000089006_34 (sequence is synthesized)
cagccctgttcccagtcactggtacctagagggtgagagtgaggctgctcatcaacgtgttctccaagtcataagctgctgctctcccactcacgatgcttggtgattcagtgatgtttt

SEQ ID NO: 93259 - DNA, 120 bp, Artificial Sequence
  ENSG00000089006_35 (sequence is synthesized)
ccacttaaagacagtgatagctgtatcaccacagttaatagatgtctgatgtgtcccagtcacagagataatacaaatgtgaggaaataatgctggtgcctgaaagcattggagaccatt

SEQ ID NO: 93260 - DNA, 120 bp, Artificial Sequence
  ENSG00000089006_36 (sequence is synthesized)
tgtaagaatgccatttggtagttaaagtgaacatgaaaattgtttagtttttcttggtttcataaacattttttcttcctgtagaactgataaatttcaaacggaagagagtggcagcat

SEQ ID NO: 93261 - DNA, 120 bp, Artificial Sequence
  ENSG00000089006_37 (sequence is synthesized)
ttagaaagaatctaattgaaatgtctgaactggaaataaaacatgccagggtaagtgttttctacagatgaagccaacatcttttatggttttttccaagttatttcccagtttactaac

SEQ ID NO: 93262 - DNA, 120 bp, Artificial Sequence
  ENSG00000089006_38 (sequence is synthesized)
ccattgtcatcaggcagttggggtggccttgtggtattaatcgtctgtagtacttagttgatgggagccactcattgtttatttgtagtcttgtttataatgtcacccatgactaatttt

SEQ ID NO: 93263 - DNA, 79 bp, Artificial Sequence
  ENSG00000089006_39 (sequence is synthesized)
atttgtagtcttgtttataatgtcacccatgactaatttttagcaacttttttttttttacttgaacccctgacctcag

SEQ ID NO: 93264 - DNA, 120 bp, Artificial Sequence
  ENSG00000089006_40 (sequence is synthesized)
aggtgtgagctaaagctcccagccctaatttctagcaacttttattcaatctttccaaggcccttgccttcatggaacaacgcactgatagtgtcttaagaagttacagtaagcaggatc

SEQ ID NO: 93265 - DNA, 120 bp, Artificial Sequence
  ENSG00000089006_41 (sequence is synthesized)
acatttaggagcaagcaggtgagggcagaggtgctggagtgaacgtcggctctttggctggtagccttacccactgagggagaggagctgaaacatgaaatggggatgcgtggtacgttg

SEQ ID NO: 93266 - DNA, 120 bp, Artificial Sequence
  ENSG00000089006_42 (sequence is synthesized)
cagttcacctgggatttgatgaagagaagggccagcttgctctggctgactttaaacctcccgtgaaaagccgtgttggtgtacttgagtcattccaggtatatggcaagttttaataat

SEQ ID NO: 93267 - DNA, 120 bp, Artificial Sequence
  ENSG00000089006_43 (sequence is synthesized)
ctttccgaatctgcaaaagaaggttgagcaggacattcttctttctgtactgtaatttgaaaataatttcaaacttagaaaagttctacaaatagtgcaaaaaacacccatgtatccttc

SEQ ID NO: 93268 - DNA, 120 bp, Artificial Sequence
  ENSG00000089006_44 (sequence is synthesized)
acccagtgtcagcacttcacccctctgccttatcacttgcacatgcacagtcatcctcatggctttgcgtgcttacaaacgttacacacctggtttttctgtaccattggagattaagtt

SEQ ID NO: 93269 - DNA, 120 bp, Artificial Sequence
  ENSG00000089006_45 (sequence is synthesized)
gcatatgtcatgcttcttttagccctaaaaacgttgtggtttatttcctaagactgaagacattctcttgtatggttacagtatggttgtttgctgtgataaacttaactttgggtctac

SEQ ID NO: 93270 - DNA, 120 bp, Artificial Sequence
  ENSG00000089006_46 (sequence is synthesized)
cgtggctgctcgccgccatccccagcgcgggaagcacccgtgagacccgggcggcccctctccctggtcttcactgaaggctgccccggggaatccctgtggatgtcccggattctatta

SEQ ID NO: 93271 - DNA, 120 bp, Artificial Sequence
  ENSG00000089006_47 (sequence is synthesized)
ggacagaaccagagacgcgggaccttagccccagctcaggcgccggtgccgagcggacttggagagatgatctctggagaccccggaatgttctttttaaaactttcctcggcttcgtgg

SEQ ID NO: 93272 - DNA, 120 bp, Artificial Sequence
  ENSG00000089006_48 (sequence is synthesized)
tgaccagtaggtgaacgtgaaattgacttaacatgcgacagaccagtttggtttgttgcccccaaaataccctccttccccccaccttttactgagaagacttttttggggggggggccc

SEQ ID NO: 93273 - DNA, 120 bp, Artificial Sequence
  ENSG00000089006_49 (sequence is synthesized)
aaacaacttgggaaattgcatcaagcgtccgaacatgctgcttacaactttagaaacgcaaaatgcgttgttgtgggagttgtgtaatttttagtaggtgctcaaatacttgctgaactt

SEQ ID NO: 93274 - DNA, 120 bp, Artificial Sequence
  ENSG00000089006_50 (sequence is synthesized)
ggtgtctatttttaagtcttgcccattgatgtaaactgtccctaggtcacgtgtatcttgaggtctaaaagattatttatgcaataaattgaaattcccatagccaattaaagattcaga

SEQ ID NO: 93275 - DNA, 120 bp, Artificial Sequence
  ENSG00000089006_51 (sequence is synthesized)
ccgcaccgaaacgcggtctttctctagacgcgtcttgctgggagagtgtccgttgcttcccgtccgtgtcgcggccctgcggttggcggcctcctcgtggagcggagcaagggcggcccc

SEQ ID NO: 93276 - DNA, 120 bp, Artificial Sequence
  ENSG00000089006_52 (sequence is synthesized)
atgtatcatgtgaatctttaatatttgtggacattaatacaaatctagagtgtgacagaacatctttgaattttatattctcacttaacaaatattggactaggcaaggtgtggatatct

SEQ ID NO: 93277 - DNA, 120 bp, Artificial Sequence
  ENSG00000089006_53 (sequence is synthesized)
ttccagctgaaaatctgatcaaggaggcaggcttcttggctccatgctaagaatcatcgatgatttgtcatattggccctcttgctggcaaaatcttagtttcttaggcagtggaatgaa

SEQ ID NO: 93278 - DNA, 120 bp, Artificial Sequence
  ENSG00000089006_54 (sequence is synthesized)
acataacaaaacaaaatccctagaggctaggaacagatagtttgaaagagaagacactgtagcatgtgctgcttaagtacatatcttctgcttttggaatggaaactaggaagtcattta

SEQ ID NO: 93279 - DNA, 120 bp, Artificial Sequence
  ENSG00000089006_55 (sequence is synthesized)
aatagatatgtgtcttttttatcctatctgtagtaatttatgtgggatattcaaataggaaaatacaggctagcactgcatattgtatccatgtcttacattgtatacaaatgactatta

SEQ ID NO: 93280 - DNA, 120 bp, Artificial Sequence
  ENSG00000089006_56 (sequence is synthesized)
gatttaaatgactgttcaactagccccaatctaacagatcagagattgtggagtttcacttctttggactgtgtctttttcattttggcactgagtctgcagtcaccataaccacttaga

SEQ ID NO: 93281 - DNA, 120 bp, Artificial Sequence
  ENSG00000089006_57 (sequence is synthesized)
aaaaactgtattttttctgttctcctggtgggttctgagttttagaatcttgccttttgtgttgttcagtcatccaggtgccctttgccctctgtaagccattaaaccttttgaagaggc

SEQ ID NO: 93282 - DNA, 120 bp, Artificial Sequence
  ENSG00000089006_58 (sequence is synthesized)
agctttgctggtagagtcgtaagtgaaatttggaccaaaagtgagtttatgaagactggtgggcaggagctcaacagctgcagggttgtcctgcagccagtgtctgatgtgccccagctg

SEQ ID NO: 93283 - DNA, 120 bp, Artificial Sequence
  ENSG00000089006_59 (sequence is synthesized)
gatcagtattttatcccactctcagaactacactgtccagtttggtcaccaactacaggtgatagagaagcacttgacatgcaacctagctggcacaactaaggaaccaaactttagatt

SEQ ID NO: 93284 - DNA, 120 bp, Artificial Sequence
  ENSG00000089006_60 (sequence is synthesized)
ttatttacatactggatttcaaggcgttagcacaaagacaagaatacaaaataacgtttccgttaccgttagaggaggtagatgacttctttgagcaagagaagaacttccttattaact

SEQ ID NO: 93285 - DNA, 120 bp, Artificial Sequence
  ENSG00000089006_61 (sequence is synthesized)
ttaatatattgcttatagttagttgaaccagttgtttctcacacaccagtgccataatctaaagctgagattgaacacagatagtcatccaggtgccctttgccctctgtaagccattaa

SEQ ID NO: 93286 - DNA, 120 bp, Artificial Sequence
  ENSG00000089006_62 (sequence is synthesized)
gctgggcttattgagtggagtggttgtctcctgtggaccagcaagagtagaatgaggcaccaactagaaaacatcgctgctgggacaagaggctcatgagttcctgcctctgctgcagat

SEQ ID NO: 93287 - DNA, 120 bp, Artificial Sequence
  ENSG00000089009_0 (sequence is synthesized)
atgattgcttatagaccggaagccgggaccttaattctctttcccatcttgcaagatggcgggtgaaaaagttgagaagccagatactaaagagaagaaacccgaagccaagaaggttga

SEQ ID NO: 93288 - DNA, 120 bp, Artificial Sequence
  ENSG00000089009_1 (sequence is synthesized)
tgctggtggcaaggtgaaaaagggtaacctcaaagctaaaaagcccaagaaggggaagccccattgcagccgcaaccctgtccttgtcagaggaattggcaggtattcccgatctgccat

SEQ ID NO: 93289 - DNA, 120 bp, Artificial Sequence
  ENSG00000089009_2 (sequence is synthesized)
gtattccagaaaggccatgtacaagaggaagtactcagccgctaaatccaaggttgaaaagaaaaagaaggagaaggttctcgcaactgttacaaaaccagttggtggtgacaagaacgg

SEQ ID NO: 93290 - DNA, 120 bp, Artificial Sequence
  ENSG00000089009_3 (sequence is synthesized)
gaaaactgcgagccagcattacccccgggaccattctgatcatcctcactggacgccacaggggcaagagggtggttttcctgaagcagctggctagtggcttattacttgtgactggac

SEQ ID NO: 93291 - DNA, 120 bp, Artificial Sequence
  ENSG00000089009_4 (sequence is synthesized)
ctctggtcctcaatcgagttcctctacgaagaacacaccagaaatttgtcattgccacttcaaccaaaatcgatatcagcaatgtaaaaatcccaaaacatcttactgatgcttacttca

SEQ ID NO: 93292 - DNA, 120 bp, Artificial Sequence
  ENSG00000089009_5 (sequence is synthesized)
agaagaagaagctgcggaagcccagacaccaggaaggtgagatcttcgacacagaaaaagagaaatatgagattacggagcagcgcaagattgatcagaaagctgtggactcacaaattt

SEQ ID NO: 93293 - DNA, 120 bp, Artificial Sequence
  ENSG00000089009_6 (sequence is synthesized)
taccaaaaatcaaagctattcctcagctccagggctacctgcgatctgtgtttgctctgacgaatggaatttatcctcacaaattggtgttctaaatgtcttaagaacctaattaaatag

SEQ ID NO: 93294 - DNA, 120 bp, Artificial Sequence
  ENSG00000089009_7 (sequence is synthesized)
atcttgcaaggtaagaatcgcgggcctgtctgcaagacttgagttcaggactcccaatccttcgccatccgaacctggagggcatccagtcgacacctacaggggtcggacatgtccaag

SEQ ID NO: 93295 - DNA, 120 bp, Artificial Sequence
  ENSG00000089009_8 (sequence is synthesized)
gtggttaaacttcgcaaaatggtaagatgtggggactgtaaattggattttctgtttatgcttgaatactgtgaagatgtttttgaatacttagatactgtaagtttctgcataccggag

SEQ ID NO: 93296 - DNA, 120 bp, Artificial Sequence
  ENSG00000089009_9 (sequence is synthesized)
aatttctgatagaaaataaagggctctgggtttgtaacttggcttcaacatttactgttaatcttaagtaatttaaattactcgtctgtgctttgttcctttgcatataatatgggaatg

SEQ ID NO: 93297 - DNA, 120 bp, Artificial Sequence
  ENSG00000089009_10 (sequence is synthesized)
gtttctacttgtcatctcctgtgttagcactggcccttctacctgggagtgaaaagaaacaggttgcacaaaaagaagaaaaatgaaaggttaaataatgaggaatgctgggagatactt

SEQ ID NO: 93298 - DNA, 120 bp, Artificial Sequence
  ENSG00000089009_11 (sequence is synthesized)
aatcctaaagtttggtggaattgtgtgggaattaactgctaccatcgtattgggaatgtgcccttacttatccttgatgtgtcctaaagtatacaaaagcttaagagctacttttattac

SEQ ID NO: 93299 - DNA, 120 bp, Artificial Sequence
  ENSG00000089009_12 (sequence is synthesized)
attaaaaaatgggttgtgtttcacagcattccaaggaaaggattgtcaaaattgtctttaatgttttctaaatattcttggggattagtacttgtgagacaggactccttagttgaccta

SEQ ID NO: 93300 - DNA, 120 bp, Artificial Sequence
  ENSG00000089009_13 (sequence is synthesized)
cgcttcatttttgttgtttgggtttgcggcagggcacaaagagggtgaggtagaatgccgtagtggctccctccggttcttcgccactctcttgggctgggggaacgaggccctttcggg

SEQ ID NO: 93301 - DNA, 120 bp, Artificial Sequence
  ENSG00000089009_14 (sequence is synthesized)
gacccgtagcagactggtgggtgttagaggaagcggggagacggcgcgtgcactgtgttcctggtcctgggttccagaggatgacactgagcctgtcgcagccacgttggggttccgcac

SEQ ID NO: 93302 - DNA, 120 bp, Artificial Sequence
  ENSG00000089009_15 (sequence is synthesized)
tgaagccaaaaggtttcgcgtctcccagcgtccccgaccggaagtcgcctcttggtctttgcgatctttttctctggctcaatttgggctgattccgtttgtgtccgcaattcctaaatc

SEQ ID NO: 93303 - DNA, 120 bp, Artificial Sequence
  ENSG00000089009_16 (sequence is synthesized)
ttagaggaagcggggagacggcgcgtgcactgtgttcctggtcctgggttccagaggatgacactgagcctgtcgcagccacgttggggttccgcactgaagccaaaagatggcgggtga

SEQ ID NO: 93304 - DNA, 120 bp, Artificial Sequence
  ENSG00000089009_17 (sequence is synthesized)
ggcctgtctgcaagacttgagttcaggactcccaatccttcgccatccgaacctggagggcatccagtcgacacctacagggatggcgggtgaaaaagttgagaagccagatactaaaga

SEQ ID NO: 93305 - DNA, 120 bp, Artificial Sequence
  ENSG00000089009_18 (sequence is synthesized)
cagaaaggccatgtacaagaggaagtactcagccgctaaatccaaggtaagggaagaggaccacggaccattatgtcttaaccttaattggcattctcttactgttgatgcatttgtgtc

SEQ ID NO: 93306 - DNA, 79 bp, Artificial Sequence
  ENSG00000089009_19 (sequence is synthesized)
aacccgggaggcagcttcatctcaaaaaaagataagatgggaatgagggtttacctcaaagagtttttatggagattaa

SEQ ID NO: 93307 - DNA, 120 bp, Artificial Sequence
  ENSG00000089009_20 (sequence is synthesized)
tgtttcttggccccctttaccacacacaagacccaatgtaatctcaggatttgctctgtaattttcattatgggaacattcccaaataagttaacaccatacagtttcacagttgaagat

SEQ ID NO: 93308 - DNA, 120 bp, Artificial Sequence
  ENSG00000089009_21 (sequence is synthesized)
tactgcatgagagggaagatgacagttgttttgtgaactcgttttcccattaggtgatcatgtttgtggtgaaagtgagactgcactaatgatatggtatagttggaaataggttattgt

SEQ ID NO: 93309 - DNA, 120 bp, Artificial Sequence
  ENSG00000089009_22 (sequence is synthesized)
gagttatttgtagtcatgtctttaatggcccttgcatggtgtctaacttctgcaataaatgatctgccagtcctagtgtctggctttatgcaatttgttttcctttgtggatgaagtggg

SEQ ID NO: 93310 - DNA, 120 bp, Artificial Sequence
  ENSG00000089009_23 (sequence is synthesized)
agtaagacttgttgctgtgaggatcagatgaagtggctaggatatggacacactttacttgaattggaaaacaagccatgtatccctaatctgcaaaatgtggcatgtcacacgtgtaat

SEQ ID NO: 93311 - DNA, 120 bp, Artificial Sequence
  ENSG00000089009_24 (sequence is synthesized)
ctctgaggtttagtttttgctcaagattgcaaaggtgacttgcttgatgctttctttgcttgagcacacatctcattcattaaatggtgtctccttttttgcacacaggatgcagaagca

SEQ ID NO: 93312 - DNA, 120 bp, Artificial Sequence
  ENSG00000089009_25 (sequence is synthesized)
taattgaccttttccaagtctacttagcagaaatgaaaatggaatcatataaatacagtattatactttaaaataaaaaggctgtagcaaaagtttggctgacatagcttgcttctagta

SEQ ID NO: 93313 - DNA, 120 bp, Artificial Sequence
  ENSG00000089009_26 (sequence is synthesized)
atctgaatggcttatttaaataagttggatctatggactctccacagcctagatattatcctactgaagatgtgcctcgaaagctgttgagccacggcaaaaaacccttcagtcagcacg

SEQ ID NO: 93314 - DNA, 120 bp, Artificial Sequence
  ENSG00000089009_27 (sequence is synthesized)
aggtgagagtacctgtgcttggggcgcttcactgcagctgcctggggtgcctggtggcaatgcgtttgcacgctaggtgtacttttcctttatttacctatgtttggggcaaggggaaat

SEQ ID NO: 93315 - DNA, 120 bp, Artificial Sequence
  ENSG00000089009_28 (sequence is synthesized)
atggtgatttattagccatttcctgctgttgattatgttacacatgttcatttactcaaaaacgtgtttatgtctggagtactaccttagtagcttgctgtggttgcttccagaactgcc

SEQ ID NO: 93316 - DNA, 120 bp, Artificial Sequence
  ENSG00000089009_29 (sequence is synthesized)
gagctgtatacatatacatgtagaaatttcctttacccaaatttagatgcctgtgattttatgaattcagaagtcagtttttaattgcagaaaactaattattttctttttaacttacag

SEQ ID NO: 93317 - DNA, 120 bp, Artificial Sequence
  ENSG00000089009_30 (sequence is synthesized)
aaataatggttgtacggacttctgaccgctcagtatttggcaaaaaacctaataggtgtgaggtagtttcaaattctcaaaaaaaaagtttatagtgtattggggagacaaaccccaaat

SEQ ID NO: 93318 - DNA, 120 bp, Artificial Sequence
  ENSG00000089009_31 (sequence is synthesized)
gagtcatagtgaaggttggagtagaatgggtagagtttgagaggaaggcctgtatcttaccgggggagggattgtagtctggggagcccagcccattcatgtacaggttcattattgtct

SEQ ID NO: 93319 - DNA, 120 bp, Artificial Sequence
  ENSG00000089009_32 (sequence is synthesized)
gtcagcggaggaccgagcgacggccgggaatggcagcgcgggggctccgcggaggcgccacgcacagtgtccaaagcatccttgcttcctcctggaaaccgcggccgccagtgaatcaga

SEQ ID NO: 93320 - DNA, 120 bp, Artificial Sequence
  ENSG00000089009_33 (sequence is synthesized)
accagaaaaaggctaaatgattcccagagacacagccatgaagcaggtggtttcgatctgaaaaaatcaaggtgaaaagctctagcaaccagaaagaaacgaatggaggaaaatggaaaa

SEQ ID NO: 93321 - DNA, 120 bp, Artificial Sequence
  ENSG00000089012_0 (sequence is synthesized)
agagcagggcctgacatctccccagaacagacgtttgaacagagcaggcttctgaggtctccaaaatgcctgtcccagcctcctggccccatcctcctggtcctttcctgcttctgactc

SEQ ID NO: 93322 - DNA, 120 bp, Artificial Sequence
  ENSG00000089012_1 (sequence is synthesized)
tactgctgggacttacagaagtggcaggtgaggaggagctacagatgattcagcctgagaagctcctgttggtcacagttggaaagacagccactctgcactgcactgtgacctccctgc

SEQ ID NO: 93323 - DNA, 120 bp, Artificial Sequence
  ENSG00000089012_2 (sequence is synthesized)
ttcccgtgggacccgtcctgtggttcagaggagttggaccaggccgggaattaatctacaatcaaaaagaaggccacttccccagggtaacaacagtttcagacctcacaaagagaaaca

SEQ ID NO: 93324 - DNA, 120 bp, Artificial Sequence
  ENSG00000089012_3 (sequence is synthesized)
acatggacttttccatccgcatcagtagcatcaccccagcagatgtcggcacatactactgtgtgaagtttcgaaaagggagccctgagaacgtggagtttaagtctggaccaggcactg

SEQ ID NO: 93325 - DNA, 120 bp, Artificial Sequence
  ENSG00000089012_4 (sequence is synthesized)
agatggctttgggtgccaaaccctctgcccccgtggtattgggccctgcggcgaggaccacacctgagcatacagtgagtttcacctgtgagtcccatggcttctctcccagagacatca

SEQ ID NO: 93326 - DNA, 120 bp, Artificial Sequence
  ENSG00000089012_5 (sequence is synthesized)
ccctgaaatggttcaaaaatgggaatgagctctcagacttccagaccaacgtggaccccacaggacagagtgtggcctacagcatccgcagcacagccagggtggtactggacccctggg

SEQ ID NO: 93327 - DNA, 120 bp, Artificial Sequence
  ENSG00000089012_6 (sequence is synthesized)
acgttcgctctcaggtcatctgcgaggtggcccatgtcaccttgcagggggaccctcttcgtgggactgccaacttgtctgaggccatccgagttccacccaccttggaggttactcaac

SEQ ID NO: 93328 - DNA, 120 bp, Artificial Sequence
  ENSG00000089012_7 (sequence is synthesized)
gccaggtgaggaagttctacccccagagcctacagctgacctggtcggagaatggaaacgtgtgccagagagaaacagcctcgacccttacagagaacaaggatggtacctacaactgga

SEQ ID NO: 93329 - DNA, 120 bp, Artificial Sequence
  ENSG00000089012_8 (sequence is synthesized)
caagctggttcctggtgaacatatctgaccaaagggatgatgtggtcctcacctgccaggtgaagcatgatgggcagctggcggtcagcaaacgccttgccctagaggtcacagtccacc

SEQ ID NO: 93330 - DNA, 120 bp, Artificial Sequence
  ENSG00000089012_9 (sequence is synthesized)
agaaggaccagagctcagatgctacccctggcccggcatcatcccttactgcgctgctcctcatagctgtcctcctgggccccatctacgtcccctggaagcagaagacctgactctcct

SEQ ID NO: 93331 - DNA, 120 bp, Artificial Sequence
  ENSG00000089012_10 (sequence is synthesized)
tccttcctcccctgccacgtgggaccctcatctctgctgcctccttcctttcctgagaggctcagcttgagagaatgagccagtgagaagcttctctagacttggctccaaacatctccc

SEQ ID NO: 93332 - DNA, 120 bp, Artificial Sequence
  ENSG00000089012_11 (sequence is synthesized)
ctcccaagacatctgcctgcccacaggctcctgttgctccttcacacagacctggatgccccagagcaaggtcttcattcatggtcctgagcaggtgccatgggattgggctctgggcac

SEQ ID NO: 93333 - DNA, 120 bp, Artificial Sequence
  ENSG00000089012_12 (sequence is synthesized)
tgacttaacggcacctccctagaaggcgagaaacatgccaaatctaaacacaccaggactcccatccatcgccttgagactgaccgtaaaccacagacgctctccaggttctcaagagtt

SEQ ID NO: 93334 - DNA, 120 bp, Artificial Sequence
  ENSG00000089012_13 (sequence is synthesized)
atcctgccttccagattcctgcctatcccaactccccagccttgttgaggttctctattgcctcttgaatacaaatgcactcccaaagtggttttaagaaaataaaaagattatccttcc

SEQ ID NO: 93335 - DNA, 120 bp, Artificial Sequence
  ENSG00000089012_14 (sequence is synthesized)
aagcatgatgggttttactagaacgtttcagtgtcactaagtcacagaagaggaggacaagaagaggaattatggcagggaccagctttatcacagtggtgtacctggtttggcagggtg

SEQ ID NO: 93336 - DNA, 120 bp, Artificial Sequence
  ENSG00000089012_15 (sequence is synthesized)
ctctcattgtgaagccatcctcaagccacctgcctacccttttatagtcattaaaatgtccctaggaatttggacttgttttgttccaaaggacatggtctcagggatcaacctaaggaa

SEQ ID NO: 93337 - DNA, 120 bp, Artificial Sequence
  ENSG00000089012_16 (sequence is synthesized)
ttccctagcagaatggaatgacaatccctgctcccataggcttgtgagggtcaagtgaggaaccccgttgccacatgtatgaatacctgagtacacaccccctccacctcttccctccag

SEQ ID NO: 93338 - DNA, 120 bp, Artificial Sequence
  ENSG00000089022_0 (sequence is synthesized)
ccacgaggcccaggggcccgagtgccgagccctttgctccctcggccgcgcggggacagggctgctgagcagcctccgcctctcccggctgtgggggccccactgagtatgtcggaggag

SEQ ID NO: 93339 - DNA, 120 bp, Artificial Sequence
  ENSG00000089022_1 (sequence is synthesized)
agcgacatggacaaagccatcaaggaaacttccattttagaagaatacagtatcaattggactcagaagctgggagctggaattagtggtccagttagagtctgtgtaaagaaatctact

SEQ ID NO: 93340 - DNA, 120 bp, Artificial Sequence
  ENSG00000089022_2 (sequence is synthesized)
caagaacggtttgcgctgaaaattcttcttgatcgtccaaaagctagaaatgaggtacgtctgcacatgatgtgtgccacacacccaaacatagttcagattattgaagtgtttgctaac

SEQ ID NO: 93341 - DNA, 120 bp, Artificial Sequence
  ENSG00000089022_3 (sequence is synthesized)
agtgtccagtttccccatgagtccagccctagggcccgactcttaattgtaatggagatgatggaagggggagagctatttcacagaatcagccagcaccggcactttacagagaagcaa

SEQ ID NO: 93342 - DNA, 120 bp, Artificial Sequence
  ENSG00000089022_4 (sequence is synthesized)
gccagccaagtaacaaagcagatagctttggctctgcggcactgtcacttgttaaacattgcgcacagagacctcaagcctgaaaatctgctttttaaggataactctttggatgcccca

SEQ ID NO: 93343 - DNA, 120 bp, Artificial Sequence
  ENSG00000089022_5 (sequence is synthesized)
gtgaagttgtgtgactttggatttgccaagattgaccaaggtgacttgatgacaccccagttcaccccttattatgtagcaccccaggtactggaggcgcaaagaaggcatcagaaggag

SEQ ID NO: 93344 - DNA, 120 bp, Artificial Sequence
  ENSG00000089022_6 (sequence is synthesized)
gggtgattatctatgtgatgctgtgcggataccctcctttttactccaaacaccacagccggactatcccaaaggatatgcgaagaaagatcatgacaggcagttttgagttcccagagg

SEQ ID NO: 93345 - DNA, 120 bp, Artificial Sequence
  ENSG00000089022_7 (sequence is synthesized)
aagagtggagtcagatctcagagatggccaaagatgttgtgaggaagctcctgaaggtcaaaccggaggagagactcaccatcgagggagtgctggaccacccctggctcaattccaccg

SEQ ID NO: 93346 - DNA, 120 bp, Artificial Sequence
  ENSG00000089022_8 (sequence is synthesized)
aggccctggataatgtgctgccttctgctcagctgatgatggacaaggcagtggttgcaggaatccagcaggctcacgcggaacagttggccaacatgagaatccaggatctgaaagtca

SEQ ID NO: 93347 - DNA, 120 bp, Artificial Sequence
  ENSG00000089022_9 (sequence is synthesized)
gcctcaaacccctgcactcagtgaacaaccccattctgcggaagaggaagttacttggcaccaagccaaaggacagtgtctatatccacgaccatgagaatggagccgaggattccaatg

SEQ ID NO: 93348 - DNA, 120 bp, Artificial Sequence
  ENSG00000089022_10 (sequence is synthesized)
ttgccttggaaaaactccgagatgtgattgctcagtgtattctcccccaggctggtaaaggagagaatgaagatgagaaactgaatgaagtaatgcaggaggcttggaagtataaccggg

SEQ ID NO: 93349 - DNA, 120 bp, Artificial Sequence
  ENSG00000089022_11 (sequence is synthesized)
aatgcaaactcctaagagatactctgcagagcttcagctggaatggtcgtggattcacagataaagtagatcgactaaaactggcagaaattgtgaagcaggtgatagaagagcaaacca

SEQ ID NO: 93350 - DNA, 120 bp, Artificial Sequence
  ENSG00000089022_12 (sequence is synthesized)
cgtcccacgaatcccaataatgacagcttcagactttgtttttttaacaatttgaaaaattattctttaatgtataaagtaattttatgtaaattaataaatcataatttcatttccaca

SEQ ID NO: 93351 - DNA, 120 bp, Artificial Sequence
  ENSG00000089022_13 (sequence is synthesized)
gtcccggcgatgtgtggcgctgaggcggcggcgggagcagcggcgccgagctctgcttcggcttcggcttcggcttcgcggcggtgcaggcggcggaggcggaggcgcaggctcttcttt

SEQ ID NO: 93352 - DNA, 120 bp, Artificial Sequence
  ENSG00000089022_14 (sequence is synthesized)
aggacctggcgagcccaggtctaagcggcggccccgcgaggcccttgcacggcgccccgggtcgaggccctccccgcctcgccctaccccaggagcctgcctccccagctggggatgagg

SEQ ID NO: 93353 - DNA, 120 bp, Artificial Sequence
  ENSG00000089022_15 (sequence is synthesized)
gaggcggccgcgtggggcccagcacaaagacctgtccccaggggccgccgcctccgccgctgctgctgccgccagcctagagccgcccgccgaagcagagccggcgccggggtcctcatc

SEQ ID NO: 93354 - DNA, 120 bp, Artificial Sequence
  ENSG00000089022_16 (sequence is synthesized)
tagatttagggtgcaggacttaataatagtatagttattgtttgtttttaagaaaagctcagttctagagacatactattactttaggactgtgtagttgtatatttgtaagatgacaga

SEQ ID NO: 93355 - DNA, 120 bp, Artificial Sequence
  ENSG00000089022_17 (sequence is synthesized)
tgatgctgtcaagcaatattgttttatttgtaataaaatatacaaaaatcacttgccagcagtagaaaaaggaccgactataccgacctttctgattagtaaacagttgaatcaaggact

SEQ ID NO: 93356 - DNA, 120 bp, Artificial Sequence
  ENSG00000089022_18 (sequence is synthesized)
ctggattctggtttcaattgccctgtgtgtttattttccacaccattgctagattagctctactgccaagacatttttgtggctgtcattgcagactgcttgctggaactcacaggaggc

SEQ ID NO: 93357 - DNA, 120 bp, Artificial Sequence
  ENSG00000089022_19 (sequence is synthesized)
acacttgagcttggggagccaacttccatgatggaagaagagggaggtgagccctcatttctcctgccccctaattcccaagagaaaagcaggaacatttcctttttgtcatatctgtta

SEQ ID NO: 93358 - DNA, 80 bp, Artificial Sequence
  ENSG00000089022_20 (sequence is synthesized)
agagaaaagcaggaacatttcctttttgtcatatctgttaaaagggtactggtgtgtttcttaaatctaacagggttttc

SEQ ID NO: 93359 - DNA, 88 bp, Artificial Sequence
  ENSG00000089022_21 (sequence is synthesized)
tattctttatatgtttaaccggagcttccctttccccttccaggaggtcctgctttgtcctttccccttccctgcagccttcaccagc

SEQ ID NO: 93360 - DNA, 120 bp, Artificial Sequence
  ENSG00000089022_22 (sequence is synthesized)
cctgctttgtcctttccccttccctgcagccttcaccagctccattactccttatttctgttccctgttcctctggtcctgtttttggaataacttgtccgagaaatttacatataatta

SEQ ID NO: 93361 - DNA, 120 bp, Artificial Sequence
  ENSG00000089022_23 (sequence is synthesized)
attgaagtgggactattggattatcatgtaagatgatccagttttggtttttttttttataaggctgccctgtttctctgtaatatgtctgtctgggttttgtgttggcatcctctgggc

SEQ ID NO: 93362 - DNA, 120 bp, Artificial Sequence
  ENSG00000089022_24 (sequence is synthesized)
tgcatttatcttgtttattacccttcattttcaggaagcatggttttggccccgagagcagctgtttgaaggaaaaataaggctaggtccttttttagttttctgttgtgagtatgggtt

SEQ ID NO: 93363 - DNA, 120 bp, Artificial Sequence
  ENSG00000089022_25 (sequence is synthesized)
gtgtgtgtgtgtgtgtgtgtgtgtgaagcagtttttggtgggtacttacgttggtacatagaaaagctggcaggtagactccagctcgcagagcagagggagaggatagtcatctgttat

SEQ ID NO: 93364 - DNA, 120 bp, Artificial Sequence
  ENSG00000089022_26 (sequence is synthesized)
gcagagggagaggatagtcatctgttattcaattttttctcatctcattctcttcgatcaaaattgatctcaccagcaacttattttctaactcctccactgtgctgagtaattcctcca

SEQ ID NO: 93365 - DNA, 120 bp, Artificial Sequence
  ENSG00000089022_27 (sequence is synthesized)
ccctgaatcttcagggtgacatttggttagtatgccctgtatgtgtgtgactgcctgtgggaatagatgataaaaaacaagtgtcttaagaattaccttattacattgcttccttttttt

SEQ ID NO: 93366 - DNA, 120 bp, Artificial Sequence
  ENSG00000089022_28 (sequence is synthesized)
caggtgtgagccactgcacccagcctacattggttcctttttatcttggagaatttaattgaaagatattttttgagataaagttcactaatcttaggtgactgataactgttataaatg

SEQ ID NO: 93367 - DNA, 120 bp, Artificial Sequence
  ENSG00000089022_29 (sequence is synthesized)
aagttcactaatcttaggtgactgataactgttataaatggatttcctgtaaggagaatatgtctcccccccaccccccaccctgctgccaccaagacagagtctcgctctgtcccccag

SEQ ID NO: 93368 - DNA, 120 bp, Artificial Sequence
  ENSG00000089022_30 (sequence is synthesized)
tgcgcgacctgaatacttttcatgatggcaaaatctcaccggcaacagaagaaaaaccaatgtttttaaatttactgaccagaaaacttgactgagagttgaattaagtgcctgttgttg

SEQ ID NO: 93369 - DNA, 120 bp, Artificial Sequence
  ENSG00000089022_31 (sequence is synthesized)
tgtttttcagtgaaatgcaaatcttacagatcacttcttacagttaggaatactgcacttgtttgtgtaatattagaacaactgtagttttcctatcttagggcagaggttcagtattcc

SEQ ID NO: 93370 - DNA, 120 bp, Artificial Sequence
  ENSG00000089022_32 (sequence is synthesized)
atggggagaaaaaaacagtaattatctttgttactcttcttctttagaggaatattctagcatatccattatatccataacttcttaaatttgtgacttgggtgtcttctaaaaaggctc

SEQ ID NO: 93371 - DNA, 120 bp, Artificial Sequence
  ENSG00000089022_33 (sequence is synthesized)
aggatgattattttttccttcagtgtatgctgaattttaggtgcgatggaaaaggtatccaaagtgatactccctttgactctgagcatcagttgcccgtgtttcagtcacttcaagctg

SEQ ID NO: 93372 - DNA, 120 bp, Artificial Sequence
  ENSG00000089022_34 (sequence is synthesized)
aattcatgccctcaatgtaagtgctgtgtccagacacatccaaatgagcaccaagctggaagtttgtgaacactctggaggatgccccagctgttgtaatgcaacagcataccttgaaaa

SEQ ID NO: 93373 - DNA, 120 bp, Artificial Sequence
  ENSG00000089022_35 (sequence is synthesized)
aaaacagtagctcccaagggactcagcatggcttggtcttcgaagtggagttttgtttgtgtattcctagtccagcagtaaattctgctttaacataactgtcaggtttgctactcgaaa

SEQ ID NO: 93374 - DNA, 120 bp, Artificial Sequence
  ENSG00000089022_36 (sequence is synthesized)
tttgcacataactggaagtgaaacgatatctttctcatattttttggcctaacaaacacctatacctgtggaaacataacactgtaaatataattcttataaagcagcaggttatgctct

SEQ ID NO: 93375 - DNA, 120 bp, Artificial Sequence
  ENSG00000089022_37 (sequence is synthesized)
cattactggtcaatcagatacttttagactttaccacagttataaaagtcagcttgatgtagtaaaaaaacttgtctctctctgactaatatgtatgaatataggagaatcccagtctga

SEQ ID NO: 93376 - DNA, 90 bp, Artificial Sequence
  ENSG00000089022_38 (sequence is synthesized)
tctgactaatatgtatgaatataggagaatcccagtctgaatttactgtttgaaacatagatgaggctcagcgtggtggctcatgccttt

SEQ ID NO: 93377 - DNA, 78 bp, Artificial Sequence
  ENSG00000089022_39 (sequence is synthesized)
gaaataaaaaagagacgtgatcctgctatgttgcccaagttagactcaagctcctgggctcaagcaatcctcctgcct

SEQ ID NO: 93378 - DNA, 120 bp, Artificial Sequence
  ENSG00000089022_40 (sequence is synthesized)
tcctgcctcagccttctaagtagctgggactacaggagcaaaccactgtgcctggcaggaattactctttaaaaagagtttatgttgcttgtattcatttgagaaaaaatgagttgaaga

SEQ ID NO: 93379 - DNA, 120 bp, Artificial Sequence
  ENSG00000089022_41 (sequence is synthesized)
gagaaaaaatgagttgaagaaatggtaattgttggtcaaagaagccaaaagatttaaataaggtcttgtgtgtgggtatgtgtatgtgcatgtatttattgaagaaaataagtttcaatt

SEQ ID NO: 93380 - DNA, 120 bp, Artificial Sequence
  ENSG00000089022_42 (sequence is synthesized)
tgagaattagaaaattggatatttcattttaattatttatttaaagagtagagtgttcttccattattgaatcttcttttatcccaccaaatggcttaacctaatttgcgctgcctattt

SEQ ID NO: 93381 - DNA, 120 bp, Artificial Sequence
  ENSG00000089022_43 (sequence is synthesized)
tggttaagaaacagggaaacaccctaaaatctgtgataattttcaaaatacaattttaagaagctttgcgcttacataaatcacaagaaatacagctggaaatcatttcacttttcttgc

SEQ ID NO: 93382 - DNA, 120 bp, Artificial Sequence
  ENSG00000089022_44 (sequence is synthesized)
tgtaaatttttttagtgggtttgtgacagtataaattttcttgctagatgctaatgatacattgtattatctgtattaggaattaaatatttaataggaatagtgaataaattgatctgc

SEQ ID NO: 93383 - DNA, 120 bp, Artificial Sequence
  ENSG00000089022_45 (sequence is synthesized)
tctcatgctgttatctaagatcttatgctaccattacattcctttctgtagtcgtatctcatatttgaaaggtctcatgttgtaaatatttgacttgctgtaaaattatacaagataaaa

SEQ ID NO: 93384 - DNA, 120 bp, Artificial Sequence
  ENSG00000089022_46 (sequence is synthesized)
aatgtagagttttatttttcttcatctagaatgcacagaataactgcgtaaggaatgggtgcatagggcttcttttccttttaaatttgtactgctaaatacaccaaggaaattgacatc

SEQ ID NO: 93385 - DNA, 120 bp, Artificial Sequence
  ENSG00000089022_47 (sequence is synthesized)
aaaaccaaattcaaggacttccacagacatttcaggtcaattttagttccaaaccgaagaaatcttttaaaagttcttatatagcccagttttcttttcttgatgaaatgttaactagac

SEQ ID NO: 93386 - DNA, 120 bp, Artificial Sequence
  ENSG00000089022_48 (sequence is synthesized)
gttttcttttcttgatgaaatgttaactagacacctggttagtcagcttttattttgaccccacagttttttttttgagacggattctcactctgttgcccaggttggagtgcaatggtg

SEQ ID NO: 93387 - DNA, 79 bp, Artificial Sequence
  ENSG00000089022_49 (sequence is synthesized)
ggttcaagcgattctcctgcctcacccgctaatttttgcatttttagtagggacagggtttcaccatgctggccaggct

SEQ ID NO: 93388 - DNA, 76 bp, Artificial Sequence
  ENSG00000089022_50 (sequence is synthesized)
gccccacactttgtttttatgttagggcagttggaggaactgaactttgatcctgatcctttatatactcccatgg

SEQ ID NO: 93389 - DNA, 120 bp, Artificial Sequence
  ENSG00000089022_51 (sequence is synthesized)
gaactgaactttgatcctgatcctttatatactcccatggtgaaacttgagcccattttacttaacacaatatatccgtgcattaggaaaacttggtagagaagattatatgcagatata

SEQ ID NO: 93390 - DNA, 120 bp, Artificial Sequence
  ENSG00000089022_52 (sequence is synthesized)
aaatatctaaactcatttgttatgaaccaacgataatgagggaaaacttggacatccacatacagattttcttgaattaaagaaaaaaaccagacactgacaaaggagagctgaactgat

SEQ ID NO: 93391 - DNA, 120 bp, Artificial Sequence
  ENSG00000089022_53 (sequence is synthesized)
aaatggtaccctgaaaactgcagaaatgagggaaagaggcagtgggccacaaagaactttgtccttttcagagatccccagagaagccctgcccccttccccccaccccctgacagaatg

SEQ ID NO: 93392 - DNA, 120 bp, Artificial Sequence
  ENSG00000089022_54 (sequence is synthesized)
ttgtgtttcaaagaatgagcagattaatggatatcaagttgtgtggcctgagctgaggataaagaataatttgcctgaggagttacagtactggctggatcactacaggccttctacttg

SEQ ID NO: 93393 - DNA, 120 bp, Artificial Sequence
  ENSG00000089022_55 (sequence is synthesized)
gaatatcttcccatgaaagtaaaaggaatataactaaggaagattaaagttgttgctgttggaaggaagacatactaaagaaactgccgaaggccaggagagaagcaggaagagaaacac

SEQ ID NO: 93394 - DNA, 120 bp, Artificial Sequence
  ENSG00000089022_56 (sequence is synthesized)
ggcttgaagttctgtaagaatcagagttgggcaagaactgccaataagggagccagcgtagatctgagtactaaacacctgagcctccgagggtttgtgtgcgagggagagctctgctga

SEQ ID NO: 93395 - DNA, 120 bp, Artificial Sequence
  ENSG00000089022_57 (sequence is synthesized)
tggacataggcccagaatcattaactgatttatttgggccatgtcactggtggcattattaaaagactctgccaacatcctgctttatggaaaaaccaagtggccttggaagaggctaag

SEQ ID NO: 93396 - DNA, 120 bp, Artificial Sequence
  ENSG00000089022_58 (sequence is synthesized)
ataaagtttcaaacttgggctccacagaagtggaacttaaggctggggctagtaccaggaccttcatgtatcaggttagagattttgatgcttttggtgatttttgtgccaagcatgtac

SEQ ID NO: 93397 - DNA, 120 bp, Artificial Sequence
  ENSG00000089022_59 (sequence is synthesized)
tgtcacctgggatcaatctattactctttctatgaaataattattccaaagaggctgacagtccagggaggagatagcccagtggaaggactgtcctacttgttacttatgcaaggccag

SEQ ID NO: 93398 - DNA, 120 bp, Artificial Sequence
  ENSG00000089022_60 (sequence is synthesized)
aagcacctggttcatctgaaggtgaagagaaaccattttgtgaataactttccagtctacagttaccacaatggcctcctggggcaagaatcgcctttcatctcacatgactgccactat

SEQ ID NO: 93399 - DNA, 120 bp, Artificial Sequence
  ENSG00000089022_61 (sequence is synthesized)
gaaggctacatagaaggagtgtcaggttcttttgtttctgtcaacatctgtgcaggtctcaggggcacatcctcctgattaaggaggaaaaatcttacagcattgagcccatggactctt

SEQ ID NO: 93400 - DNA, 120 bp, Artificial Sequence
  ENSG00000089022_62 (sequence is synthesized)
caagacggtttgaacatgtgttatacaccatggcacatcaagcgtgagtctcctgtggtgtctactagctggcaacaagggagcaggaagcctcatgatctacaggcactgtcctacttg

SEQ ID NO: 93401 - DNA, 120 bp, Artificial Sequence
  ENSG00000089022_63 (sequence is synthesized)
tggtcacacaaaaagtacgtggagatgtttgtcgtggtcaacaaccagcggttccagatgtggggcagtaacgtcaatgagacggtccagacagtagtggatgtcattgctctggccaac

SEQ ID NO: 93402 - DNA, 120 bp, Artificial Sequence
  ENSG00000089022_64 (sequence is synthesized)
agcttcactaggggaataaacacagaggtggtgctggctggaatggagatttggaccgagggggacctaatagatgtcacagtggacttgcaaatcacactcaggaatttcaatcactgg

SEQ ID NO: 93403 - DNA, 120 bp, Artificial Sequence
  ENSG00000089022_65 (sequence is synthesized)
agacaagagatgctcttccatcgtgcaaaacacgatgttgcccacatgatcgttgggcatcaccctggacagaatatgggccaggcctttctcagtggtgcctgctcaagcggttttgcg

SEQ ID NO: 93404 - DNA, 120 bp, Artificial Sequence
  ENSG00000089022_66 (sequence is synthesized)
gcagctgttgaatccttccatcatgaagatgtgctgttgtttgcagccctgatggcccatgagctcgggcacaacctgggtattcagcacgaccactcggcctgcttttgtaaagataag

SEQ ID NO: 93405 - DNA, 120 bp, Artificial Sequence
  ENSG00000089022_67 (sequence is synthesized)
cacttttgcctcatgcatgaaaatatcacaaaagaaagtggcttcagcagctgcagctctgactacttctaccagttccttcgagaacacaaaggggcctgcctatttaacaagccacgg

SEQ ID NO: 93406 - DNA, 120 bp, Artificial Sequence
  ENSG00000089022_68 (sequence is synthesized)
cccaggggccgcaagcgtagggattctgcctgtggaaatggtgtggtggaggacacggagcagtgtgactgtggttctctatgtcagcatcatgcatgctgtgatgaaaactgtatactg

SEQ ID NO: 93407 - DNA, 120 bp, Artificial Sequence
  ENSG00000089022_69 (sequence is synthesized)
aaggcgaaagcagagtgcagtgatggtccatgttgtcataagtgtaaatttcaccgtaagggatatccttgctgtccttctagtcgttcctgtgatctcccagaattttgcaatggtaca

SEQ ID NO: 93408 - DNA, 120 bp, Artificial Sequence
  ENSG00000089022_70 (sequence is synthesized)
tctgcattatgccccaacaacaggcataagcaagatggctcaaaatgtcatacaatttacgagtgccttaaagttcattgtatggaccctaataatcagtgcttacaattatatggatat

SEQ ID NO: 93409 - DNA, 120 bp, Artificial Sequence
  ENSG00000089022_71 (sequence is synthesized)
ggtgcaaaatcagcctcacaagagtgttacaattcaatgaacagcaaaggggaccaatttggaaactgtggcatttctaccagtcctgggtcacaatatgttcggtgttcagatggtaat

SEQ ID NO: 93410 - DNA, 120 bp, Artificial Sequence
  ENSG00000089022_72 (sequence is synthesized)
atattttgtgggaaacttatatgttcaggtattacaggcttaccaaaaatcaatctccaacatacaatgattcaggtccctcagggagatggctcatgttggagcatggatgcctatatg

SEQ ID NO: 93411 - DNA, 120 bp, Artificial Sequence
  ENSG00000089022_73 (sequence is synthesized)
agtactgacattcctgatgaaggagatgtgcacaatggcacttactgtgcaccaaacaaagtctgcctgaattccgcctgcacagataaaaccccagtgatttctgcctgcaacccagaa

SEQ ID NO: 93412 - DNA, 120 bp, Artificial Sequence
  ENSG00000089022_74 (sequence is synthesized)
aaaacgtgtaatgggaagggagtttgtaatgatttagggcactgccactgtaatgaagggcatgccccccctgactgtgttactgcaggaagtggaggtagtgtggacagtggccctcct

SEQ ID NO: 93413 - DNA, 120 bp, Artificial Sequence
  ENSG00000089022_75 (sequence is synthesized)
ggtaagctaggtgggacaccttcaggagaaggtgaaaatcacaatatgactcattccagacgtgaagaacatgctgtagacatgatgatattatcattcattatactttttataatatta

SEQ ID NO: 93414 - DNA, 120 bp, Artificial Sequence
  ENSG00000089022_76 (sequence is synthesized)
ttattaagtacaattatttgatctgcttgcttaaaaaatcaccagaggctgccccggcagaagctcctccagcagtggctccaccaccggccccagaaataaagccagaagcagcagaag

SEQ ID NO: 93415 - DNA, 120 bp, Artificial Sequence
  ENSG00000089022_77 (sequence is synthesized)
tggccacagaagaaaaagaagagaaggaggaagaaaaagaagaggaggaggaggaagaagaggaggaagaatcagattcctaaggttagaaatagggagatgaagccaagtatatcaaac

SEQ ID NO: 93416 - DNA, 120 bp, Artificial Sequence
  ENSG00000089022_78 (sequence is synthesized)
tcctcaagtactgagtgggaatgagatgtttggtgaagtagaaatagatagctttagtggctctgactcagatatactgatgtagaaggaaggattctttcacttttattatttattttg

SEQ ID NO: 93417 - DNA, 120 bp, Artificial Sequence
  ENSG00000089022_79 (sequence is synthesized)
gtaattaaatttacattaatttaatatgttaaatattttagtaccttttgctttttcacatttcatttgaaccattaacatgcatctttggacatcaatgtccttgtctttttggcccaa

SEQ ID NO: 93418 - DNA, 120 bp, Artificial Sequence
  ENSG00000089022_80 (sequence is synthesized)
ttgttttagtcaccagaaactttttcaggacatgctatcttctatttgtttgacatacagaatcatatgtacctgaatttattactaactctgggattttcattttaagtaacaactacc

SEQ ID NO: 93419 - DNA, 120 bp, Artificial Sequence
  ENSG00000089022_81 (sequence is synthesized)
tattatgtgaggacagttgtttatgtgattggttgttctaacttgccctataaatgtgcattcatcaaaggagaagtttttaaatccaaaaacaaataaaacccgattcatattagacaa

SEQ ID NO: 93420 - DNA, 120 bp, Artificial Sequence
  ENSG00000089022_82 (sequence is synthesized)
cagccttctggaaatctgcagttggaaaaaggaagcattgagtttacttaggaaaagttaacagttcctgtgacttaactgcacttaaaccaaaagaaaagcaaatgtgtgttcgaaaat

SEQ ID NO: 93421 - DNA, 120 bp, Artificial Sequence
  ENSG00000089022_83 (sequence is synthesized)
atttctagtttagacttaattggcagtgtcaggtgcaagcatgcaattttgtgttttcttagtttgacaacaagggcacaggttgggggatggagaatggaaaatgtgggtagggtctga

SEQ ID NO: 93422 - DNA, 120 bp, Artificial Sequence
  ENSG00000089022_84 (sequence is synthesized)
atctcattgcaggctgttaaccatttccagagcctttagagtgcaaggctgccattagctcataaataagagaatacctccttagttcagaagtggctcctgctgctactcatgtcatgg

SEQ ID NO: 93423 - DNA, 120 bp, Artificial Sequence
  ENSG00000089022_85 (sequence is synthesized)
gcagagtgacttacacgtgggtcctttggagtgagagctttctttcgttatgttctctctccactcatcggcgggtgaggggctattctcagcagataaatgagatgcttcacgtactag

SEQ ID NO: 93424 - DNA, 120 bp, Artificial Sequence
  ENSG00000089022_86 (sequence is synthesized)
gccagaaaacagttgggttgacctatctatctccctagattccttgggttttaagagaactcatgtagtgtacctcagatagctttctaaagtaagaaatgagcttaggggagagaaagt

SEQ ID NO: 93425 - DNA, 120 bp, Artificial Sequence
  ENSG00000089022_87 (sequence is synthesized)
agcccactctcccactttttggtctttggttgaccaggtgtcttttgttcagcaatagagtctgccacagcctatttcccatcccctggtgctaagactctggggccatcagtggatttg

SEQ ID NO: 93426 - DNA, 120 bp, Artificial Sequence
  ENSG00000089022_88 (sequence is synthesized)
gcggtctacataatgtagggactagcagtaaagcccttgtctggtgaagttttgcacattcagtcaacatttttcaaccagttggacatcacgtccctccatctctcacactaaaacccc

SEQ ID NO: 93427 - DNA, 120 bp, Artificial Sequence
  ENSG00000089022_89 (sequence is synthesized)
atgtcctgccatatggtgacatctaggagttttatattgggtagcaacctgcttttccagaacctcatgacccttcaactaattctgcagccactatcagccaaaaagagcactctgagt

SEQ ID NO: 93428 - DNA, 120 bp, Artificial Sequence
  ENSG00000089022_90 (sequence is synthesized)
tccttttggaagttaaagcccattgtcctagaaacctcagtatggagattcaaggtctgaggaactataagccatatgtaggattaccttattaaaccctagaactcaaaagtatcactg

SEQ ID NO: 93429 - DNA, 120 bp, Artificial Sequence
  ENSG00000089022_91 (sequence is synthesized)
gattaagcccttttctaccattttaatctcactttttccagtatacaaaggactgcctcaagccatagtacccctacaagtggttggagactagaatcccatctgtgctctgcaggtgga

SEQ ID NO: 93430 - DNA, 73 bp, Artificial Sequence
  ENSG00000089022_92 (sequence is synthesized)
tgagtctcaaaaaaattcttgttgtgaaaattcaggtggtacagccgtgttaaaaagtaaaagttccctttca

SEQ ID NO: 93431 - DNA, 120 bp, Artificial Sequence
  ENSG00000089022_93 (sequence is synthesized)
aggtggtacagccgtgttaaaaagtaaaagttccctttcattccctgccacagtcacacccctcagaggtgaggtaatctatggcttgatgtatacttcctgatcgttttctgggataca

SEQ ID NO: 93432 - DNA, 120 bp, Artificial Sequence
  ENSG00000089022_94 (sequence is synthesized)
cacacacacacacacacacacattctgtccttcttttaaagtacaaaaatggaaaaaaaaatacaaaaatgggatcatattcctatgaagccttctgatgatttcgtctgcccgtagtga

SEQ ID NO: 93433 - DNA, 120 bp, Artificial Sequence
  ENSG00000089022_95 (sequence is synthesized)
cgtctgcccgtagtgagattatacactgttcataaaagcacaaacttccagagttccagactccatgacagctatttctcactgtaaattacttgactggttgtggcctcggtcatgtgg

SEQ ID NO: 93434 - DNA, 120 bp, Artificial Sequence
  ENSG00000089022_96 (sequence is synthesized)
cctcagccttggccatgtgagatggtcagggctctgagctgtcagggctgaggtgaatcaataccgtctgtaaggcttcttgggcagcagcctgccagcctttccgctgatgtccatatg

SEQ ID NO: 93435 - DNA, 120 bp, Artificial Sequence
  ENSG00000089022_97 (sequence is synthesized)
tgcctctttacacttcccctcagtagtggctttgagtggggttcctgctggtatttcttactcgcatttctgtccccccaccagggaagaagggctagttgttgtgtgacctttggttgg

SEQ ID NO: 93436 - DNA, 120 bp, Artificial Sequence
  ENSG00000089022_98 (sequence is synthesized)
tgttgatccatggggaaaagtcctttgccttatcaaaatatttatattccttcagcataagagtgaaattaccttcttagtactttgagcttttcctttccactttcttagactggcttt

SEQ ID NO: 93437 - DNA, 120 bp, Artificial Sequence
  ENSG00000089022_99 (sequence is synthesized)
ctattaagtgtcaatgaatgggacgaagagagccctactactactactacacgtttcgatcactccccaaggccgccagcatttgcttccggatggtctacagaacttggagagttggaa

SEQ ID NO: 93438 - DNA, 120 bp, Artificial Sequence
  ENSG00000089022_100 (sequence is synthesized)
gccttctggaaatctgcagttggaaaaaggtggttcgccgtacaaaacctgtcctttggggaataggttgtcctcacttttccgtgtattctcccctttttctttttcctcttctttctc

SEQ ID NO: 93439 - DNA, 120 bp, Artificial Sequence
  ENSG00000089022_101 (sequence is synthesized)
ctaggaagcattgagtttacttaggaaaagttaacagttcctgtgacttaactgcacttaaaccaaaagaaaagcaaatgtgtgttcgaaaattacacaaataaaataagttttctaaaa

SEQ ID NO: 93440 - DNA, 120 bp, Artificial Sequence
  ENSG00000089041_0 (sequence is synthesized)
tttcattttgcagttactgggagggggcttgctgtggccctgtcaggaagagtagagctctggtccagctccgcgcagggagggaggctgtcaccatgccggcctgctgcagctgcagtg

SEQ ID NO: 93441 - DNA, 120 bp, Artificial Sequence
  ENSG00000089041_1 (sequence is synthesized)
atgttttccagtatgagacgaacaaagtcactcggatccagagcatgaattatggcaccattaagtggttcttccacgtgatcatcttttcctacgtttgctttgctctggtgagtgaca

SEQ ID NO: 93442 - DNA, 120 bp, Artificial Sequence
  ENSG00000089041_2 (sequence is synthesized)
agctgtaccagcggaaagagcctgtcatcagttctgtgcacaccaaggtgaaggggatagcagaggtgaaagaggagatcgtggagaatggagtgaagaagttggtgcacagtgtctttg

SEQ ID NO: 93443 - DNA, 120 bp, Artificial Sequence
  ENSG00000089041_3 (sequence is synthesized)
acaccgcagactacaccttccctttgcaggggaactctttcttcgtgatgacaaactttctcaaaacagaaggccaagagcagcggttgtgtcccgagtatcccacccgcaggacgctct

SEQ ID NO: 93444 - DNA, 120 bp, Artificial Sequence
  ENSG00000089041_4 (sequence is synthesized)
gttcctctgaccgaggttgtaaaaagggatggatggacccgcagagcaaaggaattcagaccggaaggtgtgtagtgtatgaagggaaccagaagacctgtgaagtctctgcctggtgcc

SEQ ID NO: 93445 - DNA, 120 bp, Artificial Sequence
  ENSG00000089041_5 (sequence is synthesized)
ccatcgaggcagtggaagaggccccccggcctgctctcttgaacagtgccgaaaacttcactgtgctcatcaagaacaatatcgacttccccggccacaactacaccacgagaaacatcc

SEQ ID NO: 93446 - DNA, 120 bp, Artificial Sequence
  ENSG00000089041_6 (sequence is synthesized)
tgccaggtttaaacatcacttgtaccttccacaagactcagaatccacagtgtcccattttccgactaggagacatcttccgagaaacaggcgataatttttcagatgtggcaattcagg

SEQ ID NO: 93447 - DNA, 120 bp, Artificial Sequence
  ENSG00000089041_7 (sequence is synthesized)
gcggaataatgggcattgagatctactgggactgcaacctagaccgttggttccatcactgccgtcccaaatacagtttccgtcgccttgacgacaagaccaccaacgtgtccttgtacc

SEQ ID NO: 93448 - DNA, 120 bp, Artificial Sequence
  ENSG00000089041_8 (sequence is synthesized)
ctggctacaacttcagatacgccaagtactacaaggaaaacaatgttgagaaacggactctgataaaagtcttcgggatccgttttgacatcctggtttttggcaccggaggaaaatttg

SEQ ID NO: 93449 - DNA, 120 bp, Artificial Sequence
  ENSG00000089041_9 (sequence is synthesized)
acattatccagctggttgtgtacatcggctcaaccctctcctacttcggtctggccgctgtgttcatcgacttcctcatcgacacttactccagtaactgctgtcgctcccatatttatc

SEQ ID NO: 93450 - DNA, 120 bp, Artificial Sequence
  ENSG00000089041_10 (sequence is synthesized)
cctggtgcaagtgctgtcagccctgtgtggtcaacgaatactactacaggaagaagtgcgagtccattgtggagccaaagccgacattaaagtatgtgtcctttgtggatgaatcccaca

SEQ ID NO: 93451 - DNA, 120 bp, Artificial Sequence
  ENSG00000089041_11 (sequence is synthesized)
ttaggatggtgaaccagcagctactagggagaagtctgcaagatgtcaagggccaagaagtcccaagacctgcgatggacttcacagatttgtccaggctgcccctggccctccatgaca

SEQ ID NO: 93452 - DNA, 120 bp, Artificial Sequence
  ENSG00000089041_12 (sequence is synthesized)
cacccccgattcctggacaaccagaggagatacagctgcttagaaaggaggcgactcctagatccagggatagccccgtctggtgccagtgtggaagctgcctcccatctcaactccctg

SEQ ID NO: 93453 - DNA, 120 bp, Artificial Sequence
  ENSG00000089041_13 (sequence is synthesized)
agagccacaggtgcctggaggagctgtgctgccggaaaaagccgggggcctgcatcaccacctcagagctgttcaggaagctggtcctgtccagacacgtcctgcagttcctcctgctct

SEQ ID NO: 93454 - DNA, 120 bp, Artificial Sequence
  ENSG00000089041_14 (sequence is synthesized)
accaggagcccttgctggcgctggatgtggattccaccaacagccggctgcggcactgtgcctacaggtgctacgccacctggcgcttcggctcccaggacatggctgactttgccatcc

SEQ ID NO: 93455 - DNA, 120 bp, Artificial Sequence
  ENSG00000089041_15 (sequence is synthesized)
tgcccagctgctgccgctggaggatccggaaagagtttccgaagagtgaagggcagtacagtggcttcaagagtccttactgaagccaggcaccgtggctcacgtctgtaatcccagcgc

SEQ ID NO: 93456 - DNA, 89 bp, Artificial Sequence
  ENSG00000089041_16 (sequence is synthesized)
cacctgaggtcgggagttggagacccgcctggctaacaaggccagccagacatggtggcatgcacctgcaatcccagctactcgggagg

SEQ ID NO: 93457 - DNA, 86 bp, Artificial Sequence
  ENSG00000089041_17 (sequence is synthesized)
cagattgtgccactgctctccagcctgggaggcacagcaaactgtcccccaaaaaaaaaaaagagtccttaccaatagcaggggct

SEQ ID NO: 93458 - DNA, 120 bp, Artificial Sequence
  ENSG00000089041_18 (sequence is synthesized)
ccccaaaaaaaaaaaagagtccttaccaatagcaggggctgcagtagccatgttaacatgacatttaccagcaacttgaacttcacctgcaaagctctgtggccacattttcagccaaag

SEQ ID NO: 93459 - DNA, 120 bp, Artificial Sequence
  ENSG00000089041_19 (sequence is synthesized)
ggaaatatgctttcatcttctgttgctctctgtgtctgagagcaaagtgacctggttaaacaaaccagaatccctctacatggactcagagaaaagagattgagatgtaagtctcaactc

SEQ ID NO: 93460 - DNA, 120 bp, Artificial Sequence
  ENSG00000089041_20 (sequence is synthesized)
tgtccccaggaagttgtgtgaccctaggcctctcacctctgtgcctctgtctccttgttgcccaactactatctcagagatattgtgaggacaaattgagacagtgcacatgaactgtct

SEQ ID NO: 93461 - DNA, 120 bp, Artificial Sequence
  ENSG00000089041_21 (sequence is synthesized)
aacaaacccttttcatcctggctggagaatgtggagaactaaaggtggccacaaattctttgacactcaagtcccccaagacctaagggttttatctcctccccttgaatatgggtggct

SEQ ID NO: 93462 - DNA, 120 bp, Artificial Sequence
  ENSG00000089041_22 (sequence is synthesized)
ctgattgctttatccaaaagtggaagtgacattgtgtcagtttcagatcctgatcttaagaggctgacagcttctacttgctgtcccttggaactcttgctatcggggaagccagacgcc

SEQ ID NO: 93463 - DNA, 74 bp, Artificial Sequence
  ENSG00000089041_23 (sequence is synthesized)
taaagtcaggagtccaagaccagactcgccaacatggtgaaaccgtatctctaataaaaatacaaaaattagct

SEQ ID NO: 93464 - DNA, 81 bp, Artificial Sequence
  ENSG00000089041_24 (sequence is synthesized)
gaaaccgtgggcacctgtagtcctagctatcaagaggctgagacaggagaaacacttgaacctgggaggtggaggttgcat

SEQ ID NO: 93465 - DNA, 74 bp, Artificial Sequence
  ENSG00000089041_25 (sequence is synthesized)
tgtctgcctatcctgagactgccctgctgtgaggaagcccaagcagtcacgtggacagtgcctgaccagcccca

SEQ ID NO: 93466 - DNA, 120 bp, Artificial Sequence
  ENSG00000089041_26 (sequence is synthesized)
aagcccaagcagtcacgtggacagtgcctgaccagccccagctttcaagccatccaagcccagtcaccaaacatgagagagaagaagccttcaggtgattctggactccactaacatatg

SEQ ID NO: 93467 - DNA, 120 bp, Artificial Sequence
  ENSG00000089041_27 (sequence is synthesized)
actgataccgcatgatacatcccaagtgagaactgccccataaatccagaaaaccacattgctatcttaagtccctaagtttggggcttatttgttccacagcaacaggtaactggaaca

SEQ ID NO: 93468 - DNA, 120 bp, Artificial Sequence
  ENSG00000089041_28 (sequence is synthesized)
gagggcaagcctgatgaatgggcacacagactcagcccataccttccctggttctaatgttctcagggagcccggaccaaccctgggagcctcaggaacttaggtttccactggacagtt

SEQ ID NO: 93469 - DNA, 120 bp, Artificial Sequence
  ENSG00000089041_29 (sequence is synthesized)
ctagaagggctatagaccaaatcaggtaactcaccagaccagccttggaatctatcaaatctaactgctgagctacccaatgcattccgatcctcatcacaattctttgactgaaggccg

SEQ ID NO: 93470 - DNA, 120 bp, Artificial Sequence
  ENSG00000089041_30 (sequence is synthesized)
gagcaagactctgtctcaaaaaacaacaacaacaacaacaaaacaattctatgactgaaagtgactaaaaagctggctttatgccattaacactctgtactttgcagccaatcagaactg

SEQ ID NO: 93471 - DNA, 120 bp, Artificial Sequence
  ENSG00000089041_31 (sequence is synthesized)
tttgcagccaatcagaactgacgcagtctgggtgctagctgcttcaaaagcaacccacaccacacttttaccatttccatacatcaactgctgagaatatgaaaatgcacagtgacaggt

SEQ ID NO: 93472 - DNA, 120 bp, Artificial Sequence
  ENSG00000089041_32 (sequence is synthesized)
tttaggatcctgcttcaggatttccttttcctggtttggtcactagagttggctatttatctgtttctaaacaatagctattttatcgaatagtttagagaccactattaaatattgtga

SEQ ID NO: 93473 - DNA, 120 bp, Artificial Sequence
  ENSG00000089041_33 (sequence is synthesized)
ctgatgaaggatctgtgaatttttttatatatgttctaagagttaccattttgataccttttaaaaaccagcagctttctactatattcatgtaagacagcatgaataaaaccatttttt

SEQ ID NO: 93474 - DNA, 120 bp, Artificial Sequence
  ENSG00000089041_34 (sequence is synthesized)
gatacagggttttatttggctttaaactcaggaaccaagttaattatgccagattgaactttgatttttactaccttttcaaagatattttaaaaagtggattactacatatgatttctt

SEQ ID NO: 93475 - DNA, 120 bp, Artificial Sequence
  ENSG00000089041_35 (sequence is synthesized)
tggagcttacatttctttacttcacgaattctatgtcactgttacaagtttccattctgatggcttctgggcctttgtacctttgtttttggtgccttattcctagtatgtttctatcac

SEQ ID NO: 93476 - DNA, 120 bp, Artificial Sequence
  ENSG00000089041_36 (sequence is synthesized)
cttaatgaggccgcagatggagtcagaatgtgaaattacaaataatcactggatccatctactgttttccatcaccttccccactgatgctctgggcgagagagtgatgtgtcacttcaa

SEQ ID NO: 93477 - DNA, 120 bp, Artificial Sequence
  ENSG00000089041_37 (sequence is synthesized)
ctgtgtgtaatatgtcagacacgtcctacaataacaggcgtcatatttgtattatttttagtttactgtagaaaataatgtcaccgccaaaggtgatgagagtcacgttttgtaggatct

SEQ ID NO: 93478 - DNA, 120 bp, Artificial Sequence
  ENSG00000089041_38 (sequence is synthesized)
gttttcttatacttaaagacagacttctgctacggtaattgccagtattcatggcttcctttctgtgtcagaagagaagggatctgctttctcttggctgatttcacatagcattggtaa

SEQ ID NO: 93479 - DNA, 120 bp, Artificial Sequence
  ENSG00000089041_39 (sequence is synthesized)
tagacatgcatttctctttctaaaggggagtaactttttaaacccttcctgattttagcctggcaatgtaagtgtccttaatgtgactgttttgataattaaaaaaaggtatataattta

SEQ ID NO: 93480 - DNA, 120 bp, Artificial Sequence
  ENSG00000089041_40 (sequence is synthesized)
ggatggatggacccgcagagcaaaggatgggcttgatggaagctgaagctgcgtgggttggaaagcctggtcaaagcctagtctctcgcccgggttgagttaatgatgtccctcctggag

SEQ ID NO: 93481 - DNA, 120 bp, Artificial Sequence
  ENSG00000089041_41 (sequence is synthesized)
acttcggtctggtaagagattctcttttccatgctttaggaaaatggtttggagaaggaagtgactaacgcagcgcttgtctgcattctccccaggccgctgtgttcatcgacttcctca

SEQ ID NO: 93482 - DNA, 120 bp, Artificial Sequence
  ENSG00000089048_0 (sequence is synthesized)
gcggacggtgagtggggatggactggagttgaagagctcgagatgaagggcttgagggcgtgtgttatttgttttcttcaagcatttggtcgagattaagaattaaaaatgtcatccaaa

SEQ ID NO: 93483 - DNA, 120 bp, Artificial Sequence
  ENSG00000089048_1 (sequence is synthesized)
caagaaataatgagtgaccagcggtttagacgggttgcaaaggacccgagattttgggaaatgccagaaaaggatcgaaaagtcaaaattgacaagagatttcgagccatgtttcatgac

SEQ ID NO: 93484 - DNA, 120 bp, Artificial Sequence
  ENSG00000089048_2 (sequence is synthesized)
aagaagttcaagttgaactatgccgtggataaaagagggcgccccattagccatagcactacagaggatttgaagcgtttttacgacctttcagattctgattccaatctctctggtgaa

SEQ ID NO: 93485 - DNA, 120 bp, Artificial Sequence
  ENSG00000089048_3 (sequence is synthesized)
gatagcaaagcattgagtcaaaagaaaataaagaagaaaaaaacccagactaaaaaagaaatcgattcaaaaaatctagttgagaaaaagaaagaaaccaagaaggctaatcacaagggt

SEQ ID NO: 93486 - DNA, 120 bp, Artificial Sequence
  ENSG00000089048_4 (sequence is synthesized)
tctgaaaataaaactgatttagataattctataggaattaaaaaaatgaaaacctcatgtaaatttaagatagattcaaacataagtccgaagaaggatagcaaagaatttacacaaaaa

SEQ ID NO: 93487 - DNA, 120 bp, Artificial Sequence
  ENSG00000089048_5 (sequence is synthesized)
aataagaaagagaaaaaaaacattgttcaacatactacagactcttctctcgaagaaaaacaaaggacattagactcaggcacctctgaaattgtgaaatctcccagaatcgagtgttct

SEQ ID NO: 93488 - DNA, 120 bp, Artificial Sequence
  ENSG00000089048_6 (sequence is synthesized)
aagacaagaagagaaatgcaatcagtggttcaactcataatgacaagagacagtgatggttatgaaaactcaacagatggtgaaatgtgtgacaaagatgctctggaggaagattcagaa

SEQ ID NO: 93489 - DNA, 120 bp, Artificial Sequence
  ENSG00000089048_7 (sequence is synthesized)
agcgttagtgaaataggaagtgatgaggaatctgaaaatgaaattacaagtgttggtagagcttcaggtgatgacgatggaagtgaagatgatgaagaggaggatgaagatgaagaggag

SEQ ID NO: 93490 - DNA, 120 bp, Artificial Sequence
  ENSG00000089048_8 (sequence is synthesized)
gatgaagatgaggatagtgaggatgatgataaaagtgacagtggccctgatcttgcaaggggtaaaggaaatatagaaactagttctgaagatgaagatgatacggcagatttgtttcca

SEQ ID NO: 93491 - DNA, 120 bp, Artificial Sequence
  ENSG00000089048_9 (sequence is synthesized)
gaagaatctggttttgagcatgcttggagagaattagataaagatgctcctcgtgctgatgagattacacgtcgattagcagtttgtaacatggactgggatagattaaaggcaaaagat

SEQ ID NO: 93492 - DNA, 120 bp, Artificial Sequence
  ENSG00000089048_10 (sequence is synthesized)
ttgctggctctgttcaattcatttaaacccaaaggaggtgtaatattttccgtcaagatatatccttcagaatttggaaaggagaggatgaaggaagagcaagttcaaggaccagtagag

SEQ ID NO: 93493 - DNA, 120 bp, Artificial Sequence
  ENSG00000089048_11 (sequence is synthesized)
ctattaagtattcctgaagatgccccagaaaaagactggacgtctagagaaaaattgagagattatcaattcaaacgactgaagtactattatgcagtagtagactgtgattctccggaa

SEQ ID NO: 93494 - DNA, 120 bp, Artificial Sequence
  ENSG00000089048_12 (sequence is synthesized)
acagctagtaaaatttatgaggattgtgatggcctggaatttgaaagtagttgttctttcatagatctaaggtttataccagatgatattacttttgatgatgagcctaaggatgtagcc

SEQ ID NO: 93495 - DNA, 120 bp, Artificial Sequence
  ENSG00000089048_13 (sequence is synthesized)
gaaagaattacaatgctcaacaggaagtttaaaaaggaagagcttttggacatggattttcaagcctacttagcttcctctagtgaagatgaagaggagatagaagaggagctacaaggt

SEQ ID NO: 93496 - DNA, 120 bp, Artificial Sequence
  ENSG00000089048_14 (sequence is synthesized)
gatgatggagtcaatgtagaagaagatgggaaaacaaagaaaagtcagaaggatgatgaagaacaaattgctaaatacaggcagctcttgcaggttattcaagaaaaagaaaagaaaggc

SEQ ID NO: 93497 - DNA, 120 bp, Artificial Sequence
  ENSG00000089048_15 (sequence is synthesized)
aaagaaaatgatatggaaatggaaattaaatgggttccaggtcttaaagaaagtgcagaagagatggtcaaaaacaaattggaaggaaaggataaactgaccccttgggaacaattttta

SEQ ID NO: 93498 - DNA, 120 bp, Artificial Sequence
  ENSG00000089048_16 (sequence is synthesized)
gagaagaagaaagagaaaaaaagactgaaaaggaaacagaaggctcttgctgaagaggccagtgaagaggaacttccctctgatgttgatttgaatgacccatactttgctgaagaagtt

SEQ ID NO: 93499 - DNA, 120 bp, Artificial Sequence
  ENSG00000089048_17 (sequence is synthesized)
aaacaaataggtataaataaaaaatcggtaaaatctgcaaaagatggcacatctccagaagaagaaattgaaatagaaagacaaaaggctgaaatggctttgcttatgatggatgaggac

SEQ ID NO: 93500 - DNA, 120 bp, Artificial Sequence
  ENSG00000089048_18 (sequence is synthesized)
gaggacagtaagaaacacttcaattacaacaagattgtggagcaccagaatctgagcaaaaagaagaaaaagcagctcatgaaaaagaaggaattaatagaggatgactttgaggtaaat

SEQ ID NO: 93501 - DNA, 120 bp, Artificial Sequence
  ENSG00000089048_19 (sequence is synthesized)
gttaacgatgcacggtttcaggcaatgtacacttcccacttgttcaatttggacccctcagatcccaatttcaagaaaacaaaagctatggaaaaaatccttgaggagaaggcccggcaa

SEQ ID NO: 93502 - DNA, 120 bp, Artificial Sequence
  ENSG00000089048_20 (sequence is synthesized)
agagaacggaaagaacaagaacttactcaggcaataaagaaaaaagagagtgagattgaaaaggaatcacaaaggaagtccattgatcctgctttgtcaatgttgattaaatctataaaa

SEQ ID NO: 93503 - DNA, 120 bp, Artificial Sequence
  ENSG00000089048_21 (sequence is synthesized)
accaaaacagagcagtttcaagcaagaaaaaagcaaaaagtcaaataactggatgttacttatttttgaactgaatacatcttttcctaaaatgtacaaaaataataggagggaatattt

SEQ ID NO: 93504 - DNA, 120 bp, Artificial Sequence
  ENSG00000089048_22 (sequence is synthesized)
attgggaacaaagctatctttcaagaacatgaataaaatctttttctggacatagtaaaatttttctccataaataattgtacttaattgtggatgactgacaaatttttattgtatatt

SEQ ID NO: 93505 - DNA, 120 bp, Artificial Sequence
  ENSG00000089048_23 (sequence is synthesized)
cctacagatcagtcataattaaattacctgcattatagggtttataaaatttttatattttacaatgttcagttctaactagtggaaagttactctagctttttaaaaggctgtttacaa

SEQ ID NO: 93506 - DNA, 120 bp, Artificial Sequence
  ENSG00000089048_24 (sequence is synthesized)
ttctgtgtaaaaatagagcagtatctactcaagtttgtgtaaatgttagggataatttgaaaaatatatatatttaatacattaatttctctggaagcaggaggcatgtttaaataacta

SEQ ID NO: 93507 - DNA, 120 bp, Artificial Sequence
  ENSG00000089048_25 (sequence is synthesized)
ttaaaataatttatttttctagccataaaggatggaagtcaagaactttttgttgtttagtcatgttaagtatagtttatgaaattaacttgtaaataaaagtgtaaaatattttcatta

SEQ ID NO: 93508 - DNA, 120 bp, Artificial Sequence
  ENSG00000089050_0 (sequence is synthesized)
gcaggctgggctcagctccgctggacccgcgctggggaactctggcctcgctgcactcatggcttctcctagcaaggcagtgattgttcccgggaacggaggcggggatgtgaccaccca

SEQ ID NO: 93509 - DNA, 120 bp, Artificial Sequence
  ENSG00000089050_1 (sequence is synthesized)
cggctggtatggctgggtgaaaaaggagctggagaagatacctggtttccagtgtttggctaaaaacatgcccgacccaattacagcacgagagagcatctggctgcccttcatggagac

SEQ ID NO: 93510 - DNA, 120 bp, Artificial Sequence
  ENSG00000089050_2 (sequence is synthesized)
agagctgcactgtgatgagaagactatcatcattggccacagttctggggccatcgcggccatgaggtatgcagaaacacatcgagtatatgctattgtattagtgtctgcgtacacatc

SEQ ID NO: 93511 - DNA, 120 bp, Artificial Sequence
  ENSG00000089050_3 (sequence is synthesized)
agacttgggggatgaaaatgagcgtgcaagtggatacttcacccgcccctggcagtgggagaagatcaaggccaactgcccttacattgtgcagtttggctctactgacgacccgttcct

SEQ ID NO: 93512 - DNA, 120 bp, Artificial Sequence
  ENSG00000089050_4 (sequence is synthesized)
tccctggaaggaacaacaagaagtggccgataggttggaaaccaaattgcacaaattcactgactgtggccactttcagaacacagagtttcatgaactgattactgttgtaaagtcttt

SEQ ID NO: 93513 - DNA, 120 bp, Artificial Sequence
  ENSG00000089050_5 (sequence is synthesized)
gctgaaagtaccagcatagactgtatgatttctgctattttgcatcccaatataggagtagaataatatctactatcagctgattactagacacatagaacatccagttaagttccgtaa

SEQ ID NO: 93514 - DNA, 120 bp, Artificial Sequence
  ENSG00000089050_6 (sequence is synthesized)
gtgcctgaaaaacaaacacaagtttcaacattcaatctaagttacaaatagcacttccattttccatagactctaaaactccccaaattgctatgaactaccacagtattttcctcattt

SEQ ID NO: 93515 - DNA, 120 bp, Artificial Sequence
  ENSG00000089050_7 (sequence is synthesized)
gataagaaacataaggacagcttaactacccttctctatccgaagtgagtcagaaacagaacccaggtttcttgattcccactcctgagtaaaattaaataggttttatgtatgttgcag

SEQ ID NO: 93516 - DNA, 120 bp, Artificial Sequence
  ENSG00000089050_8 (sequence is synthesized)
gtattgcacacttttcctctttgaaatcaaacttttctatttcactggggaaagaaaacatgactgaaagtccagagtgttagcttagagctcaaaatactagctgctgtttcaagctgg

SEQ ID NO: 93517 - DNA, 120 bp, Artificial Sequence
  ENSG00000089050_9 (sequence is synthesized)
ccccagacattaaactcagactagggccttcacctctgacacttgcccctaagtccttcagacatgttgagagagactgagacaggagtcttccggagtcaggcaggaaggagaagcaca

SEQ ID NO: 93518 - DNA, 120 bp, Artificial Sequence
  ENSG00000089050_10 (sequence is synthesized)
gcaatatacattcataatatacgtacaactgactagatttgtttgagacaagagtggtgggatcagagccatgtggagagctcatggcctgtctaaattgttgccatgtggaaatggggc

SEQ ID NO: 93519 - DNA, 120 bp, Artificial Sequence
  ENSG00000089050_11 (sequence is synthesized)
catgtggaaatggggcagagtgttgccaattttctgattttttgtgtggaaaaaaatctccaaattgtagtttttaaatttggggaatgcaaatatatatatatatacacacacacacac

SEQ ID NO: 93520 - DNA, 120 bp, Artificial Sequence
  ENSG00000089050_12 (sequence is synthesized)
tccatatacatatggagtatgtaagttggcaataacagtatacatcaaaaaatttacaaacactgcaagacaaataaaatccaagccatccatttgtgaccacagtcataagcattcact

SEQ ID NO: 93521 - DNA, 120 bp, Artificial Sequence
  ENSG00000089050_13 (sequence is synthesized)
tagccaggggcttttagataattgtctgtgaagtctgagaaaagactaagataaccaagatgaacataatgtcaaaggacgaaatcatggggacaatttggattttgttccaaaagacaa

SEQ ID NO: 93522 - DNA, 120 bp, Artificial Sequence
  ENSG00000089050_14 (sequence is synthesized)
gtgtttttaaaaagaacctttccatacttcgtgttctgttctatagagttaaaccttttaacttccatggccctttagatctctttcaagcacattccattttcttctgatcatacttcc

SEQ ID NO: 93523 - DNA, 64 bp, Artificial Sequence
  ENSG00000089050_15 (sequence is synthesized)
ttgtattgcttgaggccaggtgtttgaggccagccagggcaacacagcaagaccccatctctac

SEQ ID NO: 93524 - DNA, 120 bp, Artificial Sequence
  ENSG00000089050_16 (sequence is synthesized)
catggtggtgcacacctgtagtcctagcttcttgggaggctgaggcaggattgcttgagcccaggagtttgagccttcagtgagctatgatcgcgccactgtactccatcctgggtgatg

SEQ ID NO: 93525 - DNA, 120 bp, Artificial Sequence
  ENSG00000089050_17 (sequence is synthesized)
ctatgatcgcgccactgtactccatcctgggtgatggagcgaagaacctgtctcttaaaaaaaaaaatttttttttaattaaaaaaacccaccctttttcatttcccaacattttttggc

SEQ ID NO: 93526 - DNA, 120 bp, Artificial Sequence
  ENSG00000089050_18 (sequence is synthesized)
tattatgatcgctatgtgttccttcaaataatttccagtgaatccacacttgatgttgcaaagcctaagtttgctgcagaaatacaatttcctacacttcatacctaaaggagattcaga

SEQ ID NO: 93527 - DNA, 120 bp, Artificial Sequence
  ENSG00000089050_19 (sequence is synthesized)
gctatcgctcaaaaccaaaagtcttggtttttaaatgtgcttagacaaaaaaaatcaggaaaggtaccctaatcgttcaacagcaatcatctttggggaatgggcattttggtaggtaaa

SEQ ID NO: 93528 - DNA, 120 bp, Artificial Sequence
  ENSG00000089050_20 (sequence is synthesized)
gtgtggtggacgtccttattattatttttgagacagtgtcttgctctgtctcccaggctggaggtcagtggcacaaatctcagctcactctaacctgcacctcccgggttcaagtgattc

SEQ ID NO: 93529 - DNA, 70 bp, Artificial Sequence
  ENSG00000089050_21 (sequence is synthesized)
cagctcactctaacctgcacctcccgggttcaagtgattctcatctcagcctcccaagtagtgtgaacta

SEQ ID NO: 93530 - DNA, 76 bp, Artificial Sequence
  ENSG00000089050_22 (sequence is synthesized)
tcagccgcttattttactttatcctcctgattatttgaatttgttacactaagcatgtattttataatcaaaaata

SEQ ID NO: 93531 - DNA, 120 bp, Artificial Sequence
  ENSG00000089050_23 (sequence is synthesized)
tttataatcaaaaataattaagatttaaaacaatgtatttgactactaaaaagcaaattatataaatcagttgaataataatgttgttaaagaggctgtttagcactaatttgaccaaat

SEQ ID NO: 93532 - DNA, 120 bp, Artificial Sequence
  ENSG00000089050_24 (sequence is synthesized)
aaatctatagtcaaagtttgattctacttgaattttttggaaatttgctgttgtattacttattctttgccttgttctctgtgaagtcctttcctaaaaaagaaacttatacaatttagt

SEQ ID NO: 93533 - DNA, 120 bp, Artificial Sequence
  ENSG00000089050_25 (sequence is synthesized)
tcacaaaactttgttgacctctttctctgtagaaatgaaaactaaatatatataattgagaaataattctgatactcttcattcctataaaagtaattaagatagacctataggattgtt

SEQ ID NO: 93534 - DNA, 120 bp, Artificial Sequence
  ENSG00000089050_26 (sequence is synthesized)
gaactttgctgccaaatatagtaaccagtaaccacagctagctgtaaaattgaaaattcagttcagtcaaactagccatatttcaagtgctcaacagccactggtggctattggttacct

SEQ ID NO: 93535 - DNA, 120 bp, Artificial Sequence
  ENSG00000089050_27 (sequence is synthesized)
tactgaccagccaatataggctatttccgtcattatagaaagctctattggacaacattggtctaggacatatattttgtattttcccctcacccaccatccaataatgagtaatagcac

SEQ ID NO: 93536 - DNA, 120 bp, Artificial Sequence
  ENSG00000089050_28 (sequence is synthesized)
aaagtaaaagtgacttaatttgaaattacttctgtttggctagtttgcttagctgatcaccaccaacatcataggtctataaatcacccaactaagatcaggggtgtttcatgggaaaat

SEQ ID NO: 93537 - DNA, 120 bp, Artificial Sequence
  ENSG00000089050_29 (sequence is synthesized)
ctacacaaactattcattaaaaaccatagagccatggactgtcatttctgatttctgtttgattctttgtggtcatcattgaatatacaggggcctctatacactctggggagtatctat

SEQ ID NO: 93538 - DNA, 120 bp, Artificial Sequence
  ENSG00000089050_30 (sequence is synthesized)
tctcaggtgagcaaaataccgaatactgaatggaaatcaactgtaagtattaggacttcatatgcaacttgaatttttggtgctgtccggagtctagagccccacaatctgttttggtta

SEQ ID NO: 93539 - DNA, 120 bp, Artificial Sequence
  ENSG00000089050_31 (sequence is synthesized)
cagtttatccctgtaggataaatgatccatttaactattcatcagaggtgctgtaattttaaattgtctcttgtctccttcagttaattttcagaattaaaaacataccatgggaaaaaa

SEQ ID NO: 93540 - DNA, 120 bp, Artificial Sequence
  ENSG00000089050_32 (sequence is synthesized)
tgcactcatggcttctcctagcaaggcagtgattgttcccgggaacggaggcggggatgtgaccacccacggctggtatggctgggtgaaaaaggagctggagaagttacagcacgagag

SEQ ID NO: 93541 - DNA, 120 bp, Artificial Sequence
  ENSG00000089053_0 (sequence is synthesized)
ggtagtgttgtgccttgtggtgacaactggcggcagcgcgccgcgggcccgagacttagtctcgggccgccatggccagcgtccacgagagcctctacttcaatcccatgatgaccaatg

SEQ ID NO: 93542 - DNA, 120 bp, Artificial Sequence
  ENSG00000089053_1 (sequence is synthesized)
gggttgtgcacgccaatgtgttcggcatcaaggactgggtgacgccgtacaagatcgcggtgctggtgctgctgaacgagatgagccgcacaggcgagggcgccgtcagcctcatggagc

SEQ ID NO: 93543 - DNA, 120 bp, Artificial Sequence
  ENSG00000089053_2 (sequence is synthesized)
ggcggaggctcaaccagctgctcctgcccctgctgcagggcccagatattacactgtcaaaactttacaagttaattgaagagtcttgtccacagctggcaaattcagtgcagatcagaa

SEQ ID NO: 93544 - DNA, 120 bp, Artificial Sequence
  ENSG00000089053_3 (sequence is synthesized)
tcaaactgatggctgaaggcgagttgaaggatatggaacagttttttgatgacctttcagattctttctctggaactgaaccagaggttcacaaaacaagtgtagtaggtttgtttctgc

SEQ ID NO: 93545 - DNA, 120 bp, Artificial Sequence
  ENSG00000089053_4 (sequence is synthesized)
gtcacatgatcttggcctacagtaagctttctttcagccaagtgtttaaactgtacactgcccttcagcagtacttccagaatggtgagaaaaagacagtggaggatgctgatatggaac

SEQ ID NO: 93546 - DNA, 120 bp, Artificial Sequence
  ENSG00000089053_5 (sequence is synthesized)
tgaccagtagagatgagggtgaaagaaaaatggaaaaagaagaacttgatgtatctgtaagagaagaggaggtatcttgcagtgggcctctgtcccaaaaacaagcagaattttttcttt

SEQ ID NO: 93547 - DNA, 120 bp, Artificial Sequence
  ENSG00000089053_6 (sequence is synthesized)
ctcaacaggcttctttgctaaagaatgatgagactaaggccctcactccagcttccttgcagaaggaattaaacaatttgttgaaatttaatcctgattttgctgaagcgcattatctca

SEQ ID NO: 93548 - DNA, 120 bp, Artificial Sequence
  ENSG00000089053_7 (sequence is synthesized)
gctacttaaacaacctccgtgtccaagatgttttcagttcaacacacagtctcctccattattttgatcgtctgattcttaccggagccgaaagcaaaagtaatggggaagagggctatg

SEQ ID NO: 93549 - DNA, 120 bp, Artificial Sequence
  ENSG00000089053_8 (sequence is synthesized)
gccggagcttgagatacgccgctctgaatcttgccgccctgcactgccgcttcggtcactatcaacaggcagagctcgccctgcaggaggcaattaggattgcccaggagtccaacgatc

SEQ ID NO: 93550 - DNA, 120 bp, Artificial Sequence
  ENSG00000089053_9 (sequence is synthesized)
acgtgtgtctccagcactgtttgagctggctttatgtgctggggcagaagagatccgatagctatgttctgctggagcattctgtgaagaaggcagtacattttgggttaccgtacctcg

SEQ ID NO: 93551 - DNA, 120 bp, Artificial Sequence
  ENSG00000089053_10 (sequence is synthesized)
caaacaagctgatggatgccctaaaggactccgacctcctgcactggaaacacagcctgtcagagctcatcgatatcagcatcgcacagaaaacggccatctggaggctgtatggccgca

SEQ ID NO: 93552 - DNA, 120 bp, Artificial Sequence
  ENSG00000089053_11 (sequence is synthesized)
gcaccatggcactgcaacaggcccagatgttgctgagcatgaacagcctggaggcggtgaatgcgggcgtgcagcagaacaacacagagtcctttgctgtcgcactctgccacctcgcag

SEQ ID NO: 93553 - DNA, 120 bp, Artificial Sequence
  ENSG00000089053_12 (sequence is synthesized)
agctacacgcggagcagggctgttttgctgcagcttctgaagtgttaaagcacttgaaggaacgatttccgcctaatagtcagcacgcccagttatggatgctatgtgatcaaaaaatac

SEQ ID NO: 93554 - DNA, 120 bp, Artificial Sequence
  ENSG00000089053_13 (sequence is synthesized)
agtttgacagagcaatgaatgatggcaaatatcatttggctgattcacttgttacaggaatcacagctctcaatagcatagagggtgtttataggaaagcggttgtattacaagctcaga

SEQ ID NO: 93555 - DNA, 120 bp, Artificial Sequence
  ENSG00000089053_14 (sequence is synthesized)
accaaatgtcagaggcacataagcttttacaaaaattgttggttcattgtcagaaactgaagaacacagaaatggtgatcagtgtcctactgtccgtggcagagctgtactggcgatctt

SEQ ID NO: 93556 - DNA, 120 bp, Artificial Sequence
  ENSG00000089053_15 (sequence is synthesized)
cctcccctaccatcgcgctgcccatgctcctgcaggctctggccctctccaaggagtaccggttacagtacttggcctctgaaacagtgctgaacttggcttttgcgcagctcattcttg

SEQ ID NO: 93557 - DNA, 120 bp, Artificial Sequence
  ENSG00000089053_16 (sequence is synthesized)
gaatcccagaacaggccttaagtcttctccacatggccatcgagcccatcttggctgacggggctatcctggacaaaggtcgtgccatgttcttagtggccaagtgccaggtggcttcag

SEQ ID NO: 93558 - DNA, 120 bp, Artificial Sequence
  ENSG00000089053_17 (sequence is synthesized)
cagcttcctacgatcagccgaagaaagcagaagctctggaggctgccatcgagaacctcaatgaagccaagaactattttgcaaaggttgactgcaaagagcgcatcagggacgtcgttt

SEQ ID NO: 93559 - DNA, 120 bp, Artificial Sequence
  ENSG00000089053_18 (sequence is synthesized)
acttccaggccagactctaccataccctggggaagacccaggagaggaaccggtgtgcgatgctcttccggcagctgcatcaggagctgccctctcatggggtacccttgataaaccatc

SEQ ID NO: 93560 - DNA, 120 bp, Artificial Sequence
  ENSG00000089053_19 (sequence is synthesized)
tctagagaggacatccctgctgggctgctgtgcagagtataagattttggacttgttcatgtcccctctctccctataaatgatgtatttgtgacaccctatcttgtcaataaacagcat

SEQ ID NO: 93561 - DNA, 120 bp, Artificial Sequence
  ENSG00000089053_20 (sequence is synthesized)
tctgattagtttgtcttattttgttgctagtaactacgtatttgttttattccccttttcttcccttttggtagcaaaggacaccaactttttcttaataaatgggtattttgctaacaa

SEQ ID NO: 93562 - DNA, 120 bp, Artificial Sequence
  ENSG00000089053_21 (sequence is synthesized)
ggtatgaaactcttctaagaagagcagagagtattttcattgaagtgagcagctttctaagtcatgtctatcattgttctgctatatctgtgaacagacacagtggggatgttggaggtg

SEQ ID NO: 93563 - DNA, 120 bp, Artificial Sequence
  ENSG00000089053_22 (sequence is synthesized)
ttgcagtttgtatttattgccttactgttttgatctatatttaaatcattaactgtggaaaagcaccttctgttttgtctacaatagtaagagtcagagcctggtcctggggtttttagg

SEQ ID NO: 93564 - DNA, 120 bp, Artificial Sequence
  ENSG00000089053_23 (sequence is synthesized)
ggttcccagctctttctcacagtcctctggatcacttgcctgcatggtccatctgtaagtgagggtcaccagcccagacttatgaagagaggtaagtaaaaatacattattgatatagta

SEQ ID NO: 93565 - DNA, 120 bp, Artificial Sequence
  ENSG00000089053_24 (sequence is synthesized)
tgcaaagtgagggcatacgtggtgtttctttgatgcttttctattagctttatcccatgctctatccctctggcttttttgcatggtaatttttatgttattcagcgtgagctatttctc

SEQ ID NO: 93566 - DNA, 120 bp, Artificial Sequence
  ENSG00000089053_25 (sequence is synthesized)
tctctcttcctatgtgccaggctctggacgtgtaagatagacatggaatttcctcttatggagattacctctggttgggggagccagttggtaaaagtaaacacataaatatcatttcag

SEQ ID NO: 93567 - DNA, 120 bp, Artificial Sequence
  ENSG00000089053_26 (sequence is synthesized)
atagtgtaacagccatgaagaaagtaaaatggaagccttcaggtggaggtggggtgggtagattgtgccctgtataagaagaaaccagctttgtaaaggactggggaagaacattccagg

SEQ ID NO: 93568 - DNA, 120 bp, Artificial Sequence
  ENSG00000089053_27 (sequence is synthesized)
aggagggaatggcaactgcaagtgtctctttcttactcttctgaaggaagaattccagcagacagtcattgccattgtggagttgccattgcgtagcctggatgtcagttaatgctttcc

SEQ ID NO: 93569 - DNA, 120 bp, Artificial Sequence
  ENSG00000089053_28 (sequence is synthesized)
gcagagatcttcagcagcaaaaggaaacaaagctggctttatgtgctggggcagaagagatccgatagctatgttctgctggagcattctgtgaagaaggcagtacattttgggttaccg

SEQ ID NO: 93570 - DNA, 120 bp, Artificial Sequence
  ENSG00000089053_29 (sequence is synthesized)
agctagcaagctggttctgtgaaaggccatacatacaagatttacctgccttggatagatgttgttcctgcaggggactatgttttagactataaaacattttgtattttgcacagactg

SEQ ID NO: 93571 - DNA, 120 bp, Artificial Sequence
  ENSG00000089053_30 (sequence is synthesized)
aaaacttttttcccatgcatgttccttcttactcctcccaaccactttgtgaggtaatgggtgggtgatctccatgctgggagagtaaaccagggttcacacatctgatctacccgcgat

SEQ ID NO: 93572 - DNA, 120 bp, Artificial Sequence
  ENSG00000089053_31 (sequence is synthesized)
cgcaaacgcagttaacaagtgacagagaaaggactcaaacccacgtcatctgactccaagcaccgggctcctctgctctgtgacaggaaccttcctgtttataggaggcatgatccatgg

SEQ ID NO: 93573 - DNA, 120 bp, Artificial Sequence
  ENSG00000089053_32 (sequence is synthesized)
ttgctctagttgagtgtcacctgaaccccaaaactattgtgtaaaagaaagttgcttttctgttaactgaggtgttttctgtggaatattttcatcttattgtgtactttcacatttagc

SEQ ID NO: 93574 - DNA, 120 bp, Artificial Sequence
  ENSG00000089053_33 (sequence is synthesized)
cacttttagcctggaagtaaactttgttgccgcattttaatcctggagttctgtcgctacctcacccctcacttagacagtctgtttctaggaattcagtaatgaaaggaagtgcctttt

SEQ ID NO: 93575 - DNA, 120 bp, Artificial Sequence
  ENSG00000089053_34 (sequence is synthesized)
ttaccagtcttgtttttgtatttcagataattttttggcacggtgtgctctgaaacagctgcagacactggccactgcttacattgccagagcagtctgtgccaggatggcatcgggtct

SEQ ID NO: 93576 - DNA, 120 bp, Artificial Sequence
  ENSG00000089053_35 (sequence is synthesized)
gtctcctcgcgctgcacatccaggatgcttttctgcctttcttatcctgagggcaaggttgctggcactgggaggcatctgctcccaagaaagccagagcctgtgaggtgtatgacttta

SEQ ID NO: 93577 - DNA, 120 bp, Artificial Sequence
  ENSG00000089053_36 (sequence is synthesized)
atgtcagaggcaggtctccaaccgaaacctggttgactccaaagaagagcagtgggaatgggacataatcttgatgacttacagctcaagtaatttgacgagattctctttataagggat

SEQ ID NO: 93578 - DNA, 120 bp, Artificial Sequence
  ENSG00000089053_37 (sequence is synthesized)
caattaaagtatctcttctgctactgtaggctttatcttccctttattcaaaatatcttctttcatgggaaagagtcagggaaaactattttatctaaagccctccatctcagtaaacac

SEQ ID NO: 93579 - DNA, 120 bp, Artificial Sequence
  ENSG00000089053_38 (sequence is synthesized)
cttattttcagtacttccagaatggtgagaaaaagacagtggaggatgctgatatggaactgaccagtagagatgagggtgaaagaaaaatggaaaaagaagaacttgatgtatctgtaa

SEQ ID NO: 93580 - DNA, 120 bp, Artificial Sequence
  ENSG00000089053_39 (sequence is synthesized)
tgttttgcagttggagcagagatcttcagcagcaaaaggaaacaagttaggtggtcatgggaattcagaaagggcaacttatctttacttacctttcttaattcatgacatctgttttgc

SEQ ID NO: 93581 - DNA, 120 bp, Artificial Sequence
  ENSG00000089053_40 (sequence is synthesized)
ttttggcatatatctgctctacaaagtttaatgcaacttgccatgaaagaagagaaacctttatcacatttagcactggcattaacaaaagatgtatactacacttagtaactgggtgag

SEQ ID NO: 93582 - DNA, 120 bp, Artificial Sequence
  ENSG00000089053_41 (sequence is synthesized)
atgttgtcctgtaatagcaaaatcaccagggcagtggaacacagaagctacttgacaagcacctgagaatcttatttctcaattgaaggccatatgggagcttcatgctttttttctgaa

SEQ ID NO: 93583 - DNA, 120 bp, Artificial Sequence
  ENSG00000089053_42 (sequence is synthesized)
acacctgccactcagtggctgtcaggtgaagcagaacaatgactcatttatttcagcctggttttaatgatgttgatatgtttgacaggtctcattgagattcttgatatttcttgaaag

SEQ ID NO: 93584 - DNA, 120 bp, Artificial Sequence
  ENSG00000089053_43 (sequence is synthesized)
agtatttgagaggattcattttgtcccttttaaattctttcttatgaccacattgatatttcactagaacatcagccattgccactgttatgatatattttgatgatttctcttgccaga

SEQ ID NO: 93585 - DNA, 120 bp, Artificial Sequence
  ENSG00000089053_44 (sequence is synthesized)
ttacaggcgttagccaccatgcctggtcttaaaatatttttaaaataaattgtattagcctttaaataatggcccttagaaatttgagtctctggccaggcatggtggctcacgcctgta

SEQ ID NO: 93586 - DNA, 120 bp, Artificial Sequence
  ENSG00000089053_45 (sequence is synthesized)
atcgcgccactgcactccagcagggctacagagcgagactctgtcccaaaaaaaaaaaagaaagaaaagaaatttgagtctctgaccagtatctctcaggttgctgcatcaagaacggga

SEQ ID NO: 93587 - DNA, 120 bp, Artificial Sequence
  ENSG00000089053_46 (sequence is synthesized)
aagacctgcggacctgggcgtggcggaaggcgcgctgcggcgctgctttctcggttgggtgtttgaaatgggagatagcgtccctgaggaagctgctgcggctttctgggctaggtggtc

SEQ ID NO: 93588 - DNA, 120 bp, Artificial Sequence
  ENSG00000089053_47 (sequence is synthesized)
aagtttccggggaggggagcgcgggaagggccgtggtgaatttgaacacgccggttggctcgaaggcctttgttatgaccgtcagagcagggcctcagatttccttcccagacgttcccg

SEQ ID NO: 93589 - DNA, 120 bp, Artificial Sequence
  ENSG00000089053_48 (sequence is synthesized)
caggcttctttgctaaagaatgatgagactaaggccctcactccagcttccttgcagaaggaattaaacaatttgttgaaatttaatcctgattttgctgaagcgcaagactccgtctca

SEQ ID NO: 93590 - DNA, 120 bp, Artificial Sequence
  ENSG00000089053_49 (sequence is synthesized)
cctgggaaagaaactcatacgtacagaattgattataatgacaaaagtggctccttgaagtaagcgcaggcttaactacaatttttgccatgaatttaagctggcattttttagttgagc

SEQ ID NO: 93591 - DNA, 120 bp, Artificial Sequence
  ENSG00000089053_50 (sequence is synthesized)
tcttttaaaaagatacctttattaccctaggttgttttcccaagagcctttacttaattctgttttgttgaaaaatggatagctttttctttggagacagggtctcattctgttgcccag

SEQ ID NO: 93592 - DNA, 120 bp, Artificial Sequence
  ENSG00000089053_51 (sequence is synthesized)
acaatggtgcaatcagggctcaacgcagcctggacttcctgagctcaggtgatcttcccacctcagactcccaagtagctgggactacaagcatacaccaccaaacctggctaatttttt

SEQ ID NO: 93593 - DNA, 120 bp, Artificial Sequence
  ENSG00000089053_52 (sequence is synthesized)
acctcgcaaagtgctgggattacaagtgtgagcaaccgcacctggctgaaaaatgggtaacattaagcatactgttttatagcttttttccccaaattttattattccttatggatccat

SEQ ID NO: 93594 - DNA, 120 bp, Artificial Sequence
  ENSG00000089053_53 (sequence is synthesized)
cttactctttttagtcattgcagataattgaatgtttattggttgatgtgatagtttgacaaattttatgatcaagaaaacaacaatgatacttttcagaaatacgggagtaacattttg

SEQ ID NO: 93595 - DNA, 120 bp, Artificial Sequence
  ENSG00000089053_54 (sequence is synthesized)
aattatgaagtttgttttatgagccaccattttatacaaatctctgaattgcctgtaaaatacattatttgaggtaattgaggaatatgaaacatgagaaattattcaaagggcctttct

SEQ ID NO: 93596 - DNA, 74 bp, Artificial Sequence
  ENSG00000089053_55 (sequence is synthesized)
tgtgttgcccaggctggtcttgaactcatggcctcaagtgatcttcctgcctcatctagtgtaccattttaatt

SEQ ID NO: 93597 - DNA, 120 bp, Artificial Sequence
  ENSG00000089053_56 (sequence is synthesized)
gtgtaccattttaattctctcttttttttttaaacatactaacaccaaccggaatctcttgtttcttttgctttattcttttgagttattttctggattgttacctttctcccacctagt

SEQ ID NO: 93598 - DNA, 120 bp, Artificial Sequence
  ENSG00000089053_57 (sequence is synthesized)
tcaacccctcagaatcaccaagctaaaggatattaatgctggatctttttgtaaagacaagaaccttttcatagtgtgaataaccgccccctgctatatttgtcatagtctgaaatcaga

SEQ ID NO: 93599 - DNA, 120 bp, Artificial Sequence
  ENSG00000089053_58 (sequence is synthesized)
ttgtcacatgttgtgttttctaggaatgtggttcctgttttaacgtagtacatgtcaggtaaaaggtaagccagagatagccattcaggagagaactgccagaaatgaaacgcttcctgg

SEQ ID NO: 93600 - DNA, 120 bp, Artificial Sequence
  ENSG00000089053_59 (sequence is synthesized)
aaaaaataaataaagatttgctattttgggagaaaagaaaagggaaaagaaatggaagaaatgaattctcaaatgttaattgtgatgcatttttaaaaaatgtattttttaaaaagaaga

SEQ ID NO: 93601 - DNA, 120 bp, Artificial Sequence
  ENSG00000089053_60 (sequence is synthesized)
taggaaagcagctcatcaacctggactagtcagtaacttccatagagggaaccttattggcactggaacagtttatgaaaaccttctgcctaaatagtctgccccctagtgtcactatgt

SEQ ID NO: 93602 - DNA, 120 bp, Artificial Sequence
  ENSG00000089053_61 (sequence is synthesized)
aacattgccgtcttagtgcctagcctctttcattacttctaagaacaacaggccgttcagtgaaaaagaaattaggtcattaggccagagagtccctaaaggattttttggaggtaaaaa

SEQ ID NO: 93603 - DNA, 120 bp, Artificial Sequence
  ENSG00000089053_62 (sequence is synthesized)
tggggatgcagaagctatttttagtatttcaaaaagccagaaggcagttgtacctttactggatgaaagactacataggcttactgaaagtcaggtttgctttcaggtagaattcaggct

SEQ ID NO: 93604 - DNA, 120 bp, Artificial Sequence
  ENSG00000089053_63 (sequence is synthesized)
gctcagtcaggtgacactggtttatactgttgcctcagtgtgcctctgtttttaatgaatagaaataggaaaatcgatcaattatgttttagtaaatagaattaagtagataaaacaact

SEQ ID NO: 93605 - DNA, 120 bp, Artificial Sequence
  ENSG00000089053_64 (sequence is synthesized)
ttcaaaacatggaggctatcttggaaataatgaaataatgtaaataatggtgaaaggtgggaaattactaattcaaagatcccttcacccccccacctgccctgtggctttttaccagtt

SEQ ID NO: 93606 - DNA, 120 bp, Artificial Sequence
  ENSG00000089053_65 (sequence is synthesized)
gagagaagtgtggtctttgctacaggcatccttctatacagactatagcgtgtattaatgggagcatagtgttcacagttcaataatggagacatctatccctttctctgtgtcaggcag

SEQ ID NO: 93607 - DNA, 120 bp, Artificial Sequence
  ENSG00000089053_66 (sequence is synthesized)
gagacatctatccctttctctgtgtcaggcagcacctagggaattctttttatctctggttgtcaggtttttgtttttgtttttaagagacaaggtctcactcagtcacccaggctggag

SEQ ID NO: 93608 - DNA, 90 bp, Artificial Sequence
  ENSG00000089053_67 (sequence is synthesized)
ggctggagtgcagtagtatgatcatagctaactgtaacctcaaactcatgggctcaagcaagcagtccatctcagcctcctagctgtgac

SEQ ID NO: 93609 - DNA, 75 bp, Artificial Sequence
  ENSG00000089053_68 (sequence is synthesized)
ttttttaaaaattattttttgtagaggtaggatcttgctttgttacccaggctggtttcaaactcctggcttcca

SEQ ID NO: 93610 - DNA, 120 bp, Artificial Sequence
  ENSG00000089053_69 (sequence is synthesized)
atgtagacaagctgaagcttgtgtggggagggaacagtctcagggtgttgagacattcaaagccatatcatataagtaatgtgggagggatgtgagacatgtttagcctggaaaaaaatg

SEQ ID NO: 93611 - DNA, 120 bp, Artificial Sequence
  ENSG00000089053_70 (sequence is synthesized)
acttatccaagcatgtgtttgacatcttcatgtagtgaaaagtcatgtgaaaagagcttagattgattgagggtatggctacgggagaagattgagagctggtaagtaagtgtaggttaa

SEQ ID NO: 93612 - DNA, 120 bp, Artificial Sequence
  ENSG00000089053_71 (sequence is synthesized)
aggacaaaatatttctgctcattataaggaaacagtttccccttattgaaccctctgaggaaggtgtcagtgaggtgctgaggcctagaccaaagatgttattaagggtattcaaacatc

SEQ ID NO: 93613 - DNA, 120 bp, Artificial Sequence
  ENSG00000089053_72 (sequence is synthesized)
agattgatagttgtacccaaaaatatttaaggctcctcaaaactccatgatttttgcaacattccatgatatcttgtaataactaacttcttttggtcttcccacatttaataacctctc

SEQ ID NO: 93614 - DNA, 120 bp, Artificial Sequence
  ENSG00000089053_73 (sequence is synthesized)
gatcagagcctttctttttttatgtactcaaaaataatagaaatgccatttttaatatttaccaataacctatttaacttagtaaggaactgcttcccctgggggttagaaatttgtaca

SEQ ID NO: 93615 - DNA, 83 bp, Artificial Sequence
  ENSG00000089053_74 (sequence is synthesized)
agtaaggaactgcttcccctgggggttagaaatttgtacacagccttctggatacaaataatctttatttaattaattaattt

SEQ ID NO: 93616 - DNA, 61 bp, Artificial Sequence
  ENSG00000089053_75 (sequence is synthesized)
ggctggagtgcagtggctcgatctcgactcactgccatctcgccacctgggttcaggtaaa

SEQ ID NO: 93617 - DNA, 120 bp, Artificial Sequence
  ENSG00000089053_76 (sequence is synthesized)
caaataatattttgatgaacagaatttcttctttttatttttaaaaatatagagacaaggttttgctatgttgcccaggttgttcttgaacgcctggtctcaagtgatcctcccaccttg

SEQ ID NO: 93618 - DNA, 120 bp, Artificial Sequence
  ENSG00000089053_77 (sequence is synthesized)
tataggcataagctactgcacccatctcagaatttgtctatgtttacaatattatcaatgggtagacagctaattgcacagaatataaatgaggagaggtagatttttattaatgtgtac

SEQ ID NO: 93619 - DNA, 120 bp, Artificial Sequence
  ENSG00000089053_78 (sequence is synthesized)
attttccttaattcctgatttactcaggcccaggcttctttgtttctggtcttggatctatgggcctgtgtaaatctttgtcacttagctaaaaggatttcttgaaaatccttgtagttg

SEQ ID NO: 93620 - DNA, 120 bp, Artificial Sequence
  ENSG00000089053_79 (sequence is synthesized)
tttattgagcatttactgtgtactaggcactattgtaggtactagggatacagcagtgaaaaagaaaaaaaaaaacttgttatagagcttatatcaggggaaatagggaataaacaacgc

SEQ ID NO: 93621 - DNA, 120 bp, Artificial Sequence
  ENSG00000089053_80 (sequence is synthesized)
taagcatagttgtaatatctcagatagtgatagaccaggataagaggttagaaagtgaaggtgaagtgctcttgttttcctgagtaacactcttactccagatacatatacaggtcactc

SEQ ID NO: 93622 - DNA, 120 bp, Artificial Sequence
  ENSG00000089053_81 (sequence is synthesized)
aactccttcaatttgtaaatctctggttaaatagaaaggtagcagatcagccctccttgatctctgccaacttaatatttgaacagagatttaaaggaaaaaatattacagaagtgggaa

SEQ ID NO: 93623 - DNA, 82 bp, Artificial Sequence
  ENSG00000089053_82 (sequence is synthesized)
gaacagagatttaaaggaaaaaatattacagaagtgggaatcctcaaaatactttctaaaactagctttgggctgggcacca

SEQ ID NO: 93624 - DNA, 82 bp, Artificial Sequence
  ENSG00000089053_83 (sequence is synthesized)
gccagaagtttaccagcctggggaacatagtgagactctatatctatttttaaaaaaattagccgaccaagcatggtggtga

SEQ ID NO: 93625 - DNA, 120 bp, Artificial Sequence
  ENSG00000089053_84 (sequence is synthesized)
tctatttttaaaaaaattagccgaccaagcatggtggtgagtgccttagtcccagctactcaggaggctgaggtccatcgcctgagtccaggaattcaaggctgcagtgagctaggattg

SEQ ID NO: 93626 - DNA, 120 bp, Artificial Sequence
  ENSG00000089053_85 (sequence is synthesized)
ggtgacagagggagaccctgtctctaaaaaacaaacaaacaaacataaaagtgattttgaaaaaatgataaaagtaacaaatgcacatagtaagaaaaaaggtcaaataatgtaggagag

SEQ ID NO: 93627 - DNA, 120 bp, Artificial Sequence
  ENSG00000089053_86 (sequence is synthesized)
ggtcaaataatgtaggagagaatgccatgaaaagtaaaatattatatcctctccttgcccttcccctcagcagtggacctttaaaataaacatcttagaagcggagataaaagcctttgc

SEQ ID NO: 93628 - DNA, 120 bp, Artificial Sequence
  ENSG00000089053_87 (sequence is synthesized)
tttatgcccttttcgtagcaattccccttagaagagacatgtcctatatttccactgtcagtgttttctgctgctagggttggggcacgcctctgagagaataagcccagaaatagttac

SEQ ID NO: 93629 - DNA, 120 bp, Artificial Sequence
  ENSG00000089053_88 (sequence is synthesized)
agcttccaacccagagacctgcatttggatgactgtgtacagatgacttcctgctatggttgcttatgcatgtttgtgattattaatgggatattaatgtttagtctgtcattagtcaac

SEQ ID NO: 93630 - DNA, 120 bp, Artificial Sequence
  ENSG00000089053_89 (sequence is synthesized)
aacacagaaatggtgatcaggctctggccctctccaaggagtaccggttacagtacttggcctctgaaacagtgctgaacttggcttttgcgcaggtagtcttcctgtgcaagccctcca

SEQ ID NO: 93631 - DNA, 120 bp, Artificial Sequence
  ENSG00000089053_90 (sequence is synthesized)
aggaggcctgtggaggtgtgaacctggtgacaaactgacactttccagtggcactggctttcctgagctgtgtattcagtaaggaggactcgcctcttcagtgagaacacctgcatcata

SEQ ID NO: 93632 - DNA, 120 bp, Artificial Sequence
  ENSG00000089053_91 (sequence is synthesized)
ttaatgattagctgacacagagtgatgcttgatttagcaacaaggggatgtgaataaagaaatgaggaacacagatgttcattgaaagcttttggaaatcaaattgtattttatgtttgt

SEQ ID NO: 93633 - DNA, 120 bp, Artificial Sequence
  ENSG00000089057_0 (sequence is synthesized)
gccattttgcaggcggctgtcgcggggaccggaggcggaggctgcagcgggcactgcggcgccgaggcgcggcggcaggacgggaaccacgcgagctgcagccagctaggtcttgactcc

SEQ ID NO: 93634 - DNA, 120 bp, Artificial Sequence
  ENSG00000089057_1 (sequence is synthesized)
actaacggggacttctcatacggctttgaacttggaccttggtgcataagcaaatgtaactcagcgaattgtaatggaaagcatatggacaggtctacgccacatcacttaggtgctaag

SEQ ID NO: 93635 - DNA, 120 bp, Artificial Sequence
  ENSG00000089057_2 (sequence is synthesized)
agatgccgtttgcaggcctcatctctgcttgagaatcgggggctccaggcactagaagagccggctgatcctgggctcctagcttgaataagccttcacttccagctgctctccccaacg

SEQ ID NO: 93636 - DNA, 120 bp, Artificial Sequence
  ENSG00000089057_3 (sequence is synthesized)
gctgtgtaaactactcgtttctcttaatgatgggtattggtaagaataccacatccaaatcaatggaggctggaagttcaacagaaggcaaatacgaagacgaggcaaagcacccagctt

SEQ ID NO: 93637 - DNA, 120 bp, Artificial Sequence
  ENSG00000089057_4 (sequence is synthesized)
tcttcactcttccggtggtgataaatggaggcgccacctccagcggtgagcaggacaatgaggacactgagctcatggcgatctacactacggaaaacggcattgcagaaaagagctctc

SEQ ID NO: 93638 - DNA, 120 bp, Artificial Sequence
  ENSG00000089057_5 (sequence is synthesized)
tcgctgagaccctggatagcactggcagtctggacccccagcgatcagacatgatttataccatagaagatgttcctccctggtacctgtgtatatttctggggctacagcactacctga

SEQ ID NO: 93639 - DNA, 120 bp, Artificial Sequence
  ENSG00000089057_6 (sequence is synthesized)
catgcttcagcggcacgatcgcagtgcccttcctgttggccgatgccatgtgtgtggggtacgaccagtgggccaccagccagctcattgggaccattttcttctgtgtgggaatcacta

SEQ ID NO: 93640 - DNA, 120 bp, Artificial Sequence
  ENSG00000089057_7 (sequence is synthesized)
ctttgctacagacaacgtttggatgcaggttacccctgtttcaggccagtgcttttgcatttttggcccctgctcgagccatcctgtctttagataaatggaaatgtaacaccacagatg

SEQ ID NO: 93641 - DNA, 120 bp, Artificial Sequence
  ENSG00000089057_8 (sequence is synthesized)
tttcagttgccaatggaacagcagagctgttgcacacagaacacatctggtatccccggatccgagagatccagggggccatcatcatgtcctcactgatagaagtagtcatcggcctcc

SEQ ID NO: 93642 - DNA, 120 bp, Artificial Sequence
  ENSG00000089057_9 (sequence is synthesized)
tcggcctgcctggggctctactgaagtacatcggtcccttgaccattacacccacggtggccctaattggcctctctggtttccaggcagcgggggagagagccgggaagcactggggca

SEQ ID NO: 93643 - DNA, 120 bp, Artificial Sequence
  ENSG00000089057_10 (sequence is synthesized)
ttgccatgctgacaatattcctagtattactgttttctcaatacgccagaaatgttaaatttcctctcccgatttataaatccaagaaaggatggactgcgtacaagttacagctgttca

SEQ ID NO: 93644 - DNA, 120 bp, Artificial Sequence
  ENSG00000089057_11 (sequence is synthesized)
aaatgttccctatcatcctggccatcctggtatcctggctgctctgcttcatcttcacggtgacagatgtcttccctcccgacagcacaaagtatggcttctatgctcgcacagatgcca

SEQ ID NO: 93645 - DNA, 120 bp, Artificial Sequence
  ENSG00000089057_12 (sequence is synthesized)
ggcaaggcgtgcttctggtagccccgtggtttaaggttccatacccatttcagtggggactgcccaccgtgtctgcggccggtgtcatcggcatgctcagtgccgtggtcgccagcatca

SEQ ID NO: 93646 - DNA, 120 bp, Artificial Sequence
  ENSG00000089057_13 (sequence is synthesized)
tcgagtctattggtgactactacgcctgtgcacggctgtcctgtgccccacccccccccatccacgcaataaacaggggaattttcgtggaaggcctctcctgtgttcttgatggcatat

SEQ ID NO: 93647 - DNA, 120 bp, Artificial Sequence
  ENSG00000089057_14 (sequence is synthesized)
ttggtactgggaatggctctacttcatccagtcccaacattggagttttgggaattacaaaggtcggcagccgccgcgtgatacagtgcggagcagccctcatgctcgctctgggcatga

SEQ ID NO: 93648 - DNA, 120 bp, Artificial Sequence
  ENSG00000089057_15 (sequence is synthesized)
tcgggaagttcagcgccctctttgcgtcccttccggatcctgtgctgggagccctgttctgcacgctctttggaatgatcacagctgttggcctctctaacctgcagttcattgatttaa

SEQ ID NO: 93649 - DNA, 120 bp, Artificial Sequence
  ENSG00000089057_16 (sequence is synthesized)
attcttcccggaacctctttgtgcttggattttcgatcttctttgggctcgtccttccaagttacctcagacagaaccctctggtcacagggataacaggaatcgatcaagtgttgaacg

SEQ ID NO: 93650 - DNA, 120 bp, Artificial Sequence
  ENSG00000089057_17 (sequence is synthesized)
tccttctcacaactgctatgtttgtagggggctgtgtggcttttatcctggataacaccatcccaggcactccagaggaaagaggaatccggaaatggaagaagggtgtgggcaaaggga

SEQ ID NO: 93651 - DNA, 120 bp, Artificial Sequence
  ENSG00000089057_18 (sequence is synthesized)
acaaatcactcgacggcatggagtcgtacaatttgccatttggcatgaacattataaaaaaatacagatgcttcagctacttacccatcagcccaacctttgtgggctacacatggaaag

SEQ ID NO: 93652 - DNA, 120 bp, Artificial Sequence
  ENSG00000089057_19 (sequence is synthesized)
gcctcaggaagagcgacaacagccggagttcagatgaagactcccaggccacgggatagcctttgctgtgccctgtggcctggccgcagtgaggcatgtatctgtagttccttgctgagt

SEQ ID NO: 93653 - DNA, 120 bp, Artificial Sequence
  ENSG00000089057_20 (sequence is synthesized)
aacaagaagtaaaatacatgtttgtatatctacatttacattctgcgccccagagctaagacagactgcgaatcacttttctgctgtgagggtgatggtgcctgatgcggtgtctcgcct

SEQ ID NO: 93654 - DNA, 120 bp, Artificial Sequence
  ENSG00000089057_21 (sequence is synthesized)
atctccttatttaagcccttaactccttgccctttgagagtgtccattgctggccatggtcactaaatttgaagttccagtcctccctttggagtggacatttaaaatctgcagccattc

SEQ ID NO: 93655 - DNA, 120 bp, Artificial Sequence
  ENSG00000089057_22 (sequence is synthesized)
cttgcttcagttcccttccaccacccagggctggctttcctataagccacctccagggtccaggggctttctctctctctccgaagcccctggacctgtttccttgtcatttgaccctcg

SEQ ID NO: 93656 - DNA, 120 bp, Artificial Sequence
  ENSG00000089057_23 (sequence is synthesized)
tctgtgcccgcggagacctcctctgaccaaggggcactagtatgccttgcgctatcatgactgactggcccagtatgattctgttgtcgctgatctcccggaggaggaggctgttgacct

SEQ ID NO: 93657 - DNA, 120 bp, Artificial Sequence
  ENSG00000089057_24 (sequence is synthesized)
gaaaacagtggcgtggctcccctgtgcccagatctggccatgggtgaggcctgcacagatgttgaatgaacatctgtttggggcattggagggaaaaggaaaggaccctgaagccaatat

SEQ ID NO: 93658 - DNA, 120 bp, Artificial Sequence
  ENSG00000089057_25 (sequence is synthesized)
ctgattctcggctgcaccttctcttggccaccctggccctgaccgggccagcacgtgcacactggcctcttttcatttcactagtggccgagacaccctctctggcatttatcactgttg

SEQ ID NO: 93659 - DNA, 120 bp, Artificial Sequence
  ENSG00000089057_26 (sequence is synthesized)
gccggtgtgatgagtatagagtgccacccaaggcaccagtcacacaagctgatgggcgtcttggctctgccgtcatgtggatgttattgtcgcgcgcgtctataattacaaggttttatt

SEQ ID NO: 93660 - DNA, 120 bp, Artificial Sequence
  ENSG00000089057_27 (sequence is synthesized)
cctatttaatgttattgactatagcagattttggaaatcagtgttttccatgtgaccctctttccttgcatccctattccttgtcccccacccactcttccccccatcaagaaaagaacc

SEQ ID NO: 93661 - DNA, 120 bp, Artificial Sequence
  ENSG00000089057_28 (sequence is synthesized)
tactgtaatgcctaatctatttatcaaaactgactactggaccggagcccagaaaccatgggtcaagttacacgtgaatttgttttgtgaagaagggaagctggggcaggtaacacgcag

SEQ ID NO: 93662 - DNA, 120 bp, Artificial Sequence
  ENSG00000089057_29 (sequence is synthesized)
agccgccacgtggaacggtctgtccgccggtctgtcccgcttgccgggcttctgttgcaagtcttggcttaaggagacttcctgtgggttgccatgtcgcacgtccgttagatcttgatt

SEQ ID NO: 93663 - DNA, 120 bp, Artificial Sequence
  ENSG00000089057_30 (sequence is synthesized)
ttacaggtgagggtggttgccaaaggtgataagaaaagcagccaacaggctccctctcacttaagagagttctaattaataacactaaattcttcctgagaaatgactcctcttggtttg

SEQ ID NO: 93664 - DNA, 120 bp, Artificial Sequence
  ENSG00000089057_31 (sequence is synthesized)
gtttgaagtttttcagtgaaggaaaaggcctgagataggaagcagtgccctcgcttcatgaggtggcacatcttcggtggccgttggcctggtcgagctttggtcagctgcgtgggtgcc

SEQ ID NO: 93665 - DNA, 120 bp, Artificial Sequence
  ENSG00000089057_32 (sequence is synthesized)
tgtctcctgtctccagcggcagggcatggttcttggcagcctggtgtccacacggtgcattcctgtccccctcggccccaggctggctcagctctccagtgctgcggcgctgtctttgca

SEQ ID NO: 93666 - DNA, 120 bp, Artificial Sequence
  ENSG00000089057_33 (sequence is synthesized)
gcattgccatgtcaccgtagcccccttcactcttggaagtttggggcttcaaggtttattctggcaagaacacctcggagccactgcattgttttgccaaaaacttactgcagattaagt

SEQ ID NO: 93667 - DNA, 120 bp, Artificial Sequence
  ENSG00000089057_34 (sequence is synthesized)
aaagaacttagatgctaaattacatctaattttgtatgtttttttaaatgtgtctttgatgcatactttagaagcacactggctcgcggtttccatccctcttgccttgggacactcttg

SEQ ID NO: 93668 - DNA, 120 bp, Artificial Sequence
  ENSG00000089057_35 (sequence is synthesized)
aggctggcagccctcctgcaatgagttgctctcagttccttctgtttggattttgctcaacatctccagtttctctgctctgaaaaatggggaaaactgctaaacatcccagagatttgc

SEQ ID NO: 93669 - DNA, 120 bp, Artificial Sequence
  ENSG00000089057_36 (sequence is synthesized)
aatcttctagctctccaggtgagcagaaagaccaaatatccaaataaaagcctgaaagccattggtgatccaggggcaccttctcttcagcttgactgggcgtcttccgctgcataacac

SEQ ID NO: 93670 - DNA, 120 bp, Artificial Sequence
  ENSG00000089057_37 (sequence is synthesized)
tcaaggtgtctgctctagtcatccagaaacccactcccttctgaagcccctccttgggccgggttgtatcaggaggattcaaccccgctaacatgtggggtgccctctgtaggccttcac

SEQ ID NO: 93671 - DNA, 120 bp, Artificial Sequence
  ENSG00000089057_38 (sequence is synthesized)
acagggaaggaagccctaccctttcaactcctgttggagtgagagtttcctgttctgattccactgtggccaacccaataattctgtccgaggaggggtaagggaataggaggtggggag

SEQ ID NO: 93672 - DNA, 120 bp, Artificial Sequence
  ENSG00000089057_39 (sequence is synthesized)
caaagagggcagcctgactagatgcccctgctgaatctggtactttctgcacagccttgagtgattggagtcccctaatgactaataaacttgaacatgtaacacacacacacacacaca

SEQ ID NO: 93673 - DNA, 120 bp, Artificial Sequence
  ENSG00000089057_40 (sequence is synthesized)
cacacaccattttaggaagtggttctcctactggaaaatatgctacagaatgaaagtttgtaattgaaagaaaaagaatgtattcatctgcttcttgggtttaagcacacacctgaaggg

SEQ ID NO: 93674 - DNA, 120 bp, Artificial Sequence
  ENSG00000089057_41 (sequence is synthesized)
gagatattgggggacacggtggccactcgcggtctgtgtcatgacacttcccattcacatcattggcctgcgttgctggggctttgaaccaccaccccgtactttgttttgcctgtagag

SEQ ID NO: 93675 - DNA, 120 bp, Artificial Sequence
  ENSG00000089057_42 (sequence is synthesized)
tgttgtaaaatattttggatgtgaatgtccttgcaggccggttagtctccagtttccacagagaccacctacccaccaccttcccaggtcacctgcctggtccctgaaagaaagcatttg

SEQ ID NO: 93676 - DNA, 120 bp, Artificial Sequence
  ENSG00000089057_43 (sequence is synthesized)
tgtgggcaatcccaacatgaaatgtagacagcgtgaatacggacaggaggtgatgccatattcacagtgggggatggagggcccccacccctgcttcacagaataatgggaagtgactct

SEQ ID NO: 93677 - DNA, 120 bp, Artificial Sequence
  ENSG00000089057_44 (sequence is synthesized)
agtctttgtaagcaattttcattctcattaggaagttaaatgtagattcacagatacatttactttcagaatcctcaagaggatttcaaatgctaacttttagtttcttgggattgatca

SEQ ID NO: 93678 - DNA, 120 bp, Artificial Sequence
  ENSG00000089057_45 (sequence is synthesized)
aggcaagagaagtggctttaaccatgccagccagaatgaagcatcatgggtcctgatggtttcccgttttcatggtaacaaattcgcacagaggttttgctttatgctgtagaataccga

SEQ ID NO: 93679 - DNA, 120 bp, Artificial Sequence
  ENSG00000089057_46 (sequence is synthesized)
ctttcatgatgacaacttggtttatgcatgaatattgcagtatttccatatagcaaaataacatttctacccaggataatagtcacagttttccagggagggaatgatataattttcatg

SEQ ID NO: 93680 - DNA, 120 bp, Artificial Sequence
  ENSG00000089057_47 (sequence is synthesized)
acaatgtcatgtgatgatagaatttctccattgatgaatctctagtatgtgtgtatactttatttacccatacgtatattttatgaccatgagctaagttgttatttctttcattcatat

SEQ ID NO: 93681 - DNA, 120 bp, Artificial Sequence
  ENSG00000089057_48 (sequence is synthesized)
ccctgctgaaatattggtactagcaacttaaagttggcaagtctcatcttcagtaatacggatgccatgggagtggccaggccagattgaaggtgaatatggagcagtagcagaagcctc

SEQ ID NO: 93682 - DNA, 120 bp, Artificial Sequence
  ENSG00000089057_49 (sequence is synthesized)
attccagaacccatctggccagagaagcagcagcatcctgggggatggccgtgcatggggtgtacactcgctataggcataggcccggcatggctgtcgctggacgccagctgtgcacac

SEQ ID NO: 93683 - DNA, 120 bp, Artificial Sequence
  ENSG00000089057_50 (sequence is synthesized)
ccagccacacctgctgcacgccgcgttagtgtgcggctccgggcctgagcattcgcaaagctcgcttctccagggagcctcctcttggctttggaaaagagcccagggacttaacgtgct

SEQ ID NO: 93684 - DNA, 120 bp, Artificial Sequence
  ENSG00000089057_51 (sequence is synthesized)
gcctgttgtactctgtcccctcatgactttttagacacagggactaggacatcgaccaccctctgcccctcctgcagtcagaacccgagtagtgcaagaacggccacccggttttgccag

SEQ ID NO: 93685 - DNA, 120 bp, Artificial Sequence
  ENSG00000089057_52 (sequence is synthesized)
cgttcagcgtctgcccatggacccataaggcacattagcgttgggggtctcttttcagcagcctcacagacattcccgtcctttctggttggtgttgactgtgtttcagcatcactctac

SEQ ID NO: 93686 - DNA, 120 bp, Artificial Sequence
  ENSG00000089057_53 (sequence is synthesized)
cctcccatgtccttagcattgctgtgcgtgtttccaggcacttaggacacccttccccacgttgccatcttactgacagttcaaatgactctccttttttgttcgttagtaacaatcttc

SEQ ID NO: 93687 - DNA, 120 bp, Artificial Sequence
  ENSG00000089057_54 (sequence is synthesized)
atttgacaccttaatacatttctgactgttcttaaaacagtggggatgcctatattttccttgagtttttgtgactgactttggctatatatacctttctggggttttgtttgtttttta

SEQ ID NO: 93688 - DNA, 120 bp, Artificial Sequence
  ENSG00000089057_55 (sequence is synthesized)
tttttattttgattaccgagggtatttggggtggggttgttttttgagatgtgtaattcttttatggagtttttaaaaagaattttcatattgtttttctaacatggcttcattaaacgt

SEQ ID NO: 93689 - DNA, 120 bp, Artificial Sequence
  ENSG00000089057_56 (sequence is synthesized)
ttaagtattttaaaaatatgtaatatttggaccagatgttgtgaataatagtagagataaagctattttattctgtatttttaaaactgttccgtacaaataaaagctctcctggacaca

SEQ ID NO: 93690 - DNA, 120 bp, Artificial Sequence
  ENSG00000089057_57 (sequence is synthesized)
cattcatcttctcctgcccttggacatcacagctccaggaactcagatcttcagactcagggtgaaggacaccaccagctttccaggttccccagcttgcagacggcatacgctaggtct

SEQ ID NO: 93691 - DNA, 120 bp, Artificial Sequence
  ENSG00000089057_58 (sequence is synthesized)
gctgtcctgtgccccacccccccccatccacgcaataaacaggtacgttcctgagaagacaagttcctgattggtcccagcaccttgttactttgttcttaggtttacattaccttgaag

SEQ ID NO: 93692 - DNA, 120 bp, Artificial Sequence
  ENSG00000089057_59 (sequence is synthesized)
acaaaaccaagagtttcagcaggagcccagccaagcagcaggactctagcgactgtttgatgcatcaccacctttgtttactttcgactgtctgatacaccactgcctttgtttactttc

SEQ ID NO: 93693 - DNA, 120 bp, Artificial Sequence
  ENSG00000089057_60 (sequence is synthesized)
attttcctcgtccatgacgtggaacggaattcctacccttccttaattgcagtgacatcaaataacacactctctgcgaaaccactgtaagccttaaattcaaaaaccacatgccaagca

SEQ ID NO: 93694 - DNA, 120 bp, Artificial Sequence
  ENSG00000089060_0 (sequence is synthesized)
cagcaggcggggcacccggactggcggcttcgctggcgcaaggtcggtccggcggccagggacctggaaggctgcgaggccctgcgaggtcgaggttcggagtttgctggtcccaggccc

SEQ ID NO: 93695 - DNA, 120 bp, Artificial Sequence
  ENSG00000089060_1 (sequence is synthesized)
ggcccgaggccaccggagccgccagctgtttggaactgagctactgcagaaagggaagtggagagtaagggccaggccccgtgggggcagatggccggcagaaggctgaatctgcgctgg

SEQ ID NO: 93696 - DNA, 120 bp, Artificial Sequence
  ENSG00000089060_2 (sequence is synthesized)
gcactgagtgtgctttgtgtgctgctaatggcggagacagtgtctgggactaggggctcgtctacaggagctcacattagcccccagtttccagcttcaggtgtgaaccagacccccgtg

SEQ ID NO: 93697 - DNA, 120 bp, Artificial Sequence
  ENSG00000089060_3 (sequence is synthesized)
gtagactgccgcaaggtgtgtggcctgaatgtctctgaccgctgtgacttcatccggaccaaccctgactgccacagtgatggggggtacctggactacctggaaggcatcttctgccac

SEQ ID NO: 93698 - DNA, 120 bp, Artificial Sequence
  ENSG00000089060_4 (sequence is synthesized)
ttccctcccagcctcctccctctggctgtcactctctacgtttcctggctgctctacctgtttctgattctgggagtcaccgcagccaagtttttctgccccaacttgtcggccatttct

SEQ ID NO: 93699 - DNA, 120 bp, Artificial Sequence
  ENSG00000089060_5 (sequence is synthesized)
accacactgaagctctcccacaacgtggcaggcgtcaccttcctggcatttgggaatggtgcacctgacatcttcagtgccctggtggccttctctgacccgcacacagccggcctggcc

SEQ ID NO: 93700 - DNA, 120 bp, Artificial Sequence
  ENSG00000089060_6 (sequence is synthesized)
cttggggcactgtttggcgctggcgtgctggttaccacagtggtggccggaggcattaccatcctacaccccttcatggctgcctccaggcccttcttcagggacatcgttttctacatg

SEQ ID NO: 93701 - DNA, 120 bp, Artificial Sequence
  ENSG00000089060_7 (sequence is synthesized)
gtggctgtgttcctgaccttcctcatgctcttccgtggcagggtcaccctggcatgggctctgggttacctgggcttgtatgtgttctatgtggtcactgtgattctctgcacctggatc

SEQ ID NO: 93702 - DNA, 120 bp, Artificial Sequence
  ENSG00000089060_8 (sequence is synthesized)
taccaacggcaacggagaggatctctgttctgccccatgccagttactccagagatcctctcagactccgaggaggaccgggtatcttctaataccaacagctatgactacggtgatgag

SEQ ID NO: 93703 - DNA, 120 bp, Artificial Sequence
  ENSG00000089060_9 (sequence is synthesized)
taccggccgctgttcttctaccaggagaccacggctcagatcctggtccgggccctcaatcccctggattacatgaagtggagaaggaaatcagcatactggaaagccctcaaggtgttc

SEQ ID NO: 93704 - DNA, 120 bp, Artificial Sequence
  ENSG00000089060_10 (sequence is synthesized)
aagctgcctgtggagttcctgctgctcctcacagtccccgtcgtggacccggacaaggatgaccagaactggaaacggcccctcaactgtctgcatctggttatcagccccctggttgtg

SEQ ID NO: 93705 - DNA, 120 bp, Artificial Sequence
  ENSG00000089060_11 (sequence is synthesized)
gtcctgaccctgcagtcggggacctatggtgtctatgagataggcggcctcgttcccgtctgggtcgtggtggtgatcgcaggcacagccttggcttcagtgaccttttttgccacatct

SEQ ID NO: 93706 - DNA, 120 bp, Artificial Sequence
  ENSG00000089060_12 (sequence is synthesized)
catcttgcggtccctgggtgtggtcttccggctgagcaacactgtgctggggctcacgctgctggcctgggggaacagcattggagatgccttctcggatttcacactggctcgccaggg

SEQ ID NO: 93707 - DNA, 120 bp, Artificial Sequence
  ENSG00000089060_13 (sequence is synthesized)
ctacccacggatggcgttctccgcctgctttggcggcatcatcttcaacatcctcgtgggtgtggggctgggctgcctgctccagatctcccgaagccacacagaagtgaagctggagcc

SEQ ID NO: 93708 - DNA, 120 bp, Artificial Sequence
  ENSG00000089060_14 (sequence is synthesized)
agacggactgctggtgtgggtcctggcaggcgccctggggctcagcctcgtcttctccctggtctcagtcccattgcagtgcttccagctcagcagagtctatggcttctgcctgctcct

SEQ ID NO: 93709 - DNA, 120 bp, Artificial Sequence
  ENSG00000089060_15 (sequence is synthesized)
cttctacctgaacttccttgtcgtggccctcctcactgaatttggagtgattcacctgaaaagcatgtgactgaagccgcttagtgctgtggcctcactgcaggcaggagccccgcccct

SEQ ID NO: 93710 - DNA, 120 bp, Artificial Sequence
  ENSG00000089060_16 (sequence is synthesized)
cctgccgggggaggcccagggaccggagcatttctgcaaggcccttgtgggcacgagagtgcggcccttgctgctggagatctgaggtcactgctgtgagctgggagaactgctgtgtac

SEQ ID NO: 93711 - DNA, 120 bp, Artificial Sequence
  ENSG00000089060_17 (sequence is synthesized)
ctcttgctgccagcacccaacagccttgccgtggggaccttggaaacctggctttgctctggacaaagggttccagagagaagctagaagtcccccttgaatgacccccagagcccctct

SEQ ID NO: 93712 - DNA, 120 bp, Artificial Sequence
  ENSG00000089060_18 (sequence is synthesized)
gagaagggctggagtttgggggaaggggatggctggatgtgctccaggccatgctggaggtacccccgaggcacaggcactgcccgttccccttgcctgggcttcaggccttctggcacc

SEQ ID NO: 93713 - DNA, 120 bp, Artificial Sequence
  ENSG00000089060_19 (sequence is synthesized)
ttctcaggacacaagtggctgcccaaccctgactcagagaatgagggtggcttggacccctgggaatcaggccgccgagggctgagctccagagccgcaccatctgccacaaacagaatt

SEQ ID NO: 93714 - DNA, 120 bp, Artificial Sequence
  ENSG00000089060_20 (sequence is synthesized)
cgagacatacttaattttgaatttctccttgccacgttaataaagccaaaagcagcgggtgctattcgtggcaacacacttcactgaacccacttgcttccaaaacgatgccagcccgag

SEQ ID NO: 93715 - DNA, 120 bp, Artificial Sequence
  ENSG00000089060_21 (sequence is synthesized)
gcactgctacgccagcagctgccacatgggatggtggctcaggcgctccctccaggattctgcccctgcctgtccacagactcctttgtgctggaacctgggctcctccagctgccaggc

SEQ ID NO: 93716 - DNA, 120 bp, Artificial Sequence
  ENSG00000089060_22 (sequence is synthesized)
aggagtcggtaggactgtgcctgtgcctccctcagcggggccctgggcggggttccaaggcctgcgagctgggaaaggacagatgaggggacctcgtgccttcttgctgtcatgcaatga

SEQ ID NO: 93717 - DNA, 120 bp, Artificial Sequence
  ENSG00000089060_23 (sequence is synthesized)
ccccgccttatgttgccgaaataagcaactcttaggtttgcctgactgccttatgctggtaaagaaaagggattcaactgtctcttttccaaataaaaaaaaagtcaaaatttcaagtgt

SEQ ID NO: 93718 - DNA, 120 bp, Artificial Sequence
  ENSG00000089060_24 (sequence is synthesized)
cgaggttcggagtttgctggtcccaggcccggcccgagcaggtcggcgaccatccgagcgctgggcatcggcccacgcgtacagaaggcgctcaataaatgctcactagtgaatcagtaa

SEQ ID NO: 93719 - DNA, 120 bp, Artificial Sequence
  ENSG00000089060_25 (sequence is synthesized)
aataaatcggcagcaaagagagacgagacgcatgctgatcttcaggtgttggggacatcagggacgcgaacatttattgagctcttattgtataccgcgtcggccagcatttgtgtccat

SEQ ID NO: 93720 - DNA, 120 bp, Artificial Sequence
  ENSG00000089060_26 (sequence is synthesized)
ttcacacatgaggaataagaggcccagagaggtgaagtgacttccttaaggccacacagatagtaagtggccgagacgaatttgaaaccaggggtgtcctgtttgaacttggtgccaaat

SEQ ID NO: 93721 - DNA, 120 bp, Artificial Sequence
  ENSG00000089060_27 (sequence is synthesized)
tcactgggtgaggaactgaggctgtgttcctgttggggctggccttggtcccacagcaaaccattccctccgcagctctttgctttcctgggctttctgaccagcgccctgtggatcaac

SEQ ID NO: 93722 - DNA, 120 bp, Artificial Sequence
  ENSG00000089060_28 (sequence is synthesized)
gggcagttgtggggaggctgggagatagggtcatgtctatccccgtgtggggaagctgggggatagggtcgaaggcctgggtgggctgcagctgcgatcctggcccgccttgacatgctc

SEQ ID NO: 93723 - DNA, 120 bp, Artificial Sequence
  ENSG00000089060_29 (sequence is synthesized)
cccacatggcgtcaccttcctggcatttgggaatggtgcacctgacatcttcagtgccctggtggccttctctgacccgcacacagccggcctggcccttggggcactgtttggtgagag

SEQ ID NO: 93724 - DNA, 120 bp, Artificial Sequence
  ENSG00000089060_30 (sequence is synthesized)
tgggtgagcagctctggggctcaggcgtgagatcccagggctgatgggcaggaggtttaggaggtgcctgggacagagaggtgtgaggggtggtcagtgggggctttgatttgattacaa

SEQ ID NO: 93725 - DNA, 120 bp, Artificial Sequence
  ENSG00000089060_31 (sequence is synthesized)
gtgacagaaaccctcctcaagctggcttgagcaaaaatgggaacatgtgggtcacataaccaaagaggcctggcagagctgggggctggggagggagtattcaaaagtgtcacaattttt

SEQ ID NO: 93726 - DNA, 120 bp, Artificial Sequence
  ENSG00000089060_32 (sequence is synthesized)
gtattcaaaagtgtcacaattttttggccaagcgtgatggctcacacctatcatcccagcaatttgagaggctgaggcaggaggatcactttggttcaggagtttgagaccagcctgggc

SEQ ID NO: 93727 - DNA, 120 bp, Artificial Sequence
  ENSG00000089060_33 (sequence is synthesized)
gccacggtgcctagaaacagcccacacggtacctcatgtcttcactgcgtgttggatatacctgctaagtgtggaaggaagagaagcggggaggggacatttcagtcccttttactcttc

SEQ ID NO: 93728 - DNA, 120 bp, Artificial Sequence
  ENSG00000089060_34 (sequence is synthesized)
tgtactgcttgaaaatatgtcagcaaccatgtgtgacatgtataccatagatagtgttagttccctagtgctgccataactgaccacaaaccagggggctgacaacagcagaaattgagt

SEQ ID NO: 93729 - DNA, 120 bp, Artificial Sequence
  ENSG00000089060_35 (sequence is synthesized)
cgggcagtgccacctccaagctccagaggaggatccttcctcacctcttccagctgctgttggctcctgacgttccttgcccagtgggcccatctctgcagtctctgcctctgtgttccc

SEQ ID NO: 93730 - DNA, 120 bp, Artificial Sequence
  ENSG00000089060_36 (sequence is synthesized)
atggccatctctctcttcttcttacggagacatgagtcattggatttaggggccaccctaagtccaagatgattgtatcttgaaacccttagcttattatatttgcaaagaccctatttc

SEQ ID NO: 93731 - DNA, 120 bp, Artificial Sequence
  ENSG00000089060_37 (sequence is synthesized)
aatggggacctggaggtctctcgctgtgcttgggtattacctccttgattgcaagggagacaggaagggagatggtcctggaaggcaggaggaaggagtggggagctcaaggaaaaggcc

SEQ ID NO: 93732 - DNA, 120 bp, Artificial Sequence
  ENSG00000089060_38 (sequence is synthesized)
atttacccactggtacctggatgggctaacacagattgccaccgctaacacgcaccactgatagaactgccagctgttgttctctagacctgcaccaggacaccacttggtgacggcgtg

SEQ ID NO: 93733 - DNA, 120 bp, Artificial Sequence
  ENSG00000089060_39 (sequence is synthesized)
acccggactggcggcttcgctggcgcaaggtcggtccggcggccagggacctggaaggctgcgaggccctgcgaggtcgaggttcggagtttgctggtcccaggcccggcccgaggttac

SEQ ID NO: 93734 - DNA, 120 bp, Artificial Sequence
  ENSG00000089060_40 (sequence is synthesized)
tgtttagtgcttaatgattttttaaaattttagtttttacttttggaaactcaatgaatgtaccaaccgaagggtgttgaattttcagcaaatggatcatttagggaagttgccttttac

SEQ ID NO: 93735 - DNA, 120 bp, Artificial Sequence
  ENSG00000089060_41 (sequence is synthesized)
tacttagggaaaattgtctttcactgttttttcaagtaccgacgtgtgccacaacatggatcacccttgaaaacatgatgctgagtgagagaagactgtagcagaggatcacacactgtg

SEQ ID NO: 93736 - DNA, 120 bp, Artificial Sequence
  ENSG00000089060_42 (sequence is synthesized)
gcattccattgatgtgaaatgtccacgaggcacattcagagagacagagagcagagtagtggtcgagttgggctggtggggtggggctagggagtgaccgctaatgagtacagggatact

SEQ ID NO: 93737 - DNA, 120 bp, Artificial Sequence
  ENSG00000089060_43 (sequence is synthesized)
tattgggatgatgggtggtatttggttcatagactggaaatctgatgaaagtgataaggaaccctttccagacaaaataatatttttttttagtatatgaaagggaggtttttttgtttt

SEQ ID NO: 93738 - DNA, 87 bp, Artificial Sequence
  ENSG00000089060_44 (sequence is synthesized)
atgaaagggaagacagagtctcactcagtcgcccaggctagagtacactggcatgatctaggctcactgcaacttctgcctcccggg

SEQ ID NO: 93739 - DNA, 120 bp, Artificial Sequence
  ENSG00000089060_45 (sequence is synthesized)
gcctcccaaagtgctgcgattacaggcggtgagccaccgtgcccggcctgaaagggagtttattaaggaaaaaagaaaataatattgaactcacgttttattgagcactaactttgcaca

SEQ ID NO: 93740 - DNA, 120 bp, Artificial Sequence
  ENSG00000089060_46 (sequence is synthesized)
taactttgcacaggcaccaatgcatatagtaacgtgttttatactcataataagctcatgaggtagatactgttatcatcccgtttcacaggtgaggaactgaggctgtgttcctgttgg

SEQ ID NO: 93741 - DNA, 120 bp, Artificial Sequence
  ENSG00000089060_47 (sequence is synthesized)
gccactgtgcccagctggtagccgcgtttttcacacctgcaaagttgttcctggtgtgaaagagtggggtaaaggaattaaggagggaagtgtgtcttcccagatgctgtgccccctcac

SEQ ID NO: 93742 - DNA, 120 bp, Artificial Sequence
  ENSG00000089060_48 (sequence is synthesized)
acagcaccccaccagctagtgcccaggcacacttgggcatccatctgtgtttgttgcctgaatgaccgtgggtgagaatgaaggcgtggatgaccagggagggtgggggaagcgactcac

SEQ ID NO: 93743 - DNA, 120 bp, Artificial Sequence
  ENSG00000089060_49 (sequence is synthesized)
aggatactaaatgggtctatgtgactttagggaccctctgcttttggactagcctggaacccaggttcagtcctgctgacctggcactggaagggaggcagggtgctggcacccacgagc

SEQ ID NO: 93744 - DNA, 120 bp, Artificial Sequence
  ENSG00000089060_50 (sequence is synthesized)
ctgggattacaggtgtgagccactgcgtctggccccaagtaactttttaacacagttcttcaactgcataccttcaatctaagaatggtgatatctaagcctcaccctagctaccagggt

SEQ ID NO: 93745 - DNA, 120 bp, Artificial Sequence
  ENSG00000089060_51 (sequence is synthesized)
attctggagttacttctcaagcagcagatgacctggggaaaagctgaccccggagtaggatgaccccggagcaggcttggagattgtgacacacagacactactgtgaacgcccctgtgc

SEQ ID NO: 93746 - DNA, 120 bp, Artificial Sequence
  ENSG00000089063_0 (sequence is synthesized)
ctgtttccggcacgccacttccggcgcactgatcccgcctggggccggctgagtggcacttaagcgggccatgccatgcaaccttgggcgctgccaaccgtgggcgagctctgggtgtgc

SEQ ID NO: 93747 - DNA, 120 bp, Artificial Sequence
  ENSG00000089063_1 (sequence is synthesized)
gggcggcctggcgcggcgctccgctgtgtcagcgtgttatgatgccgtcccgtaccaacctggctactggaatccccagtagtaaagtgaaatattcaaggctctccagcacagacgatg

SEQ ID NO: 93748 - DNA, 120 bp, Artificial Sequence
  ENSG00000089063_2 (sequence is synthesized)
gctacattgaccttcagtttaagaaaacccctcctaagatcccttataaggccatcgcacttgccactgtgctgtttttgattggcgcctttctcattattataggctccctcctgctgt

SEQ ID NO: 93749 - DNA, 120 bp, Artificial Sequence
  ENSG00000089063_3 (sequence is synthesized)
caggctacatcagcaaagggggggcagaccgggccgttccagtgctgatcattggcattctggtgttcctacccggattttaccacctgcgcatcgcttactatgcatccaaaggctacc

SEQ ID NO: 93750 - DNA, 120 bp, Artificial Sequence
  ENSG00000089063_4 (sequence is synthesized)
gtggttactcctatgatgacattccagactttgatgactagcacccaccccatagctgaggaggagtcacagtggaactgtcccagctttaagatatctagcagaaactatagctgagga

SEQ ID NO: 93751 - DNA, 120 bp, Artificial Sequence
  ENSG00000089063_5 (sequence is synthesized)
ctaaggaattctgcagcttgcagatgtttaagaaaataatggccagattttttgggtccttcccaaagatgttaagtgaacctacagttagctaattaggacaagctctatttttcatcc

SEQ ID NO: 93752 - DNA, 120 bp, Artificial Sequence
  ENSG00000089063_6 (sequence is synthesized)
gtatcatggaagaatagaggttattctgtaatggaaaagtgttgcctgccaccaccctctgtagagctgagcatttcttttaaatagtcttcattgccaatttgttcttgtagcaaatgg

SEQ ID NO: 93753 - DNA, 120 bp, Artificial Sequence
  ENSG00000089063_7 (sequence is synthesized)
aacaatgtggtatggctaatttcttattattaagtaatttattttaaaaatatctgagtatattatcctgtacacttatccctaccttcatgttccagtggaagaccttagtaaaatcaa

SEQ ID NO: 93754 - DNA, 120 bp, Artificial Sequence
  ENSG00000089063_8 (sequence is synthesized)
agatcagtgagttcatctgtaatattttttttacttgctttcttactgacagcaaccaggaatttttttatcctgcagagcaagttttcaaaatgtaaatacttcctctgtttaacagtc

SEQ ID NO: 93755 - DNA, 120 bp, Artificial Sequence
  ENSG00000089063_9 (sequence is synthesized)
cttggaccattctgatccagttcaccagtaggttggacagcatataatttgcatcattttgtcccttgtaaatcaagatgttctgcagattattcctttaacggccggacttttggctgt

SEQ ID NO: 93756 - DNA, 120 bp, Artificial Sequence
  ENSG00000089063_10 (sequence is synthesized)
ttcctaatgaaacatgtagtggttattatttagagtttatagccgtattgctagcaccttgtagtatgtcatcattctgctcatgattccaaggatcagcctggatgcctagaggactag

SEQ ID NO: 93757 - DNA, 120 bp, Artificial Sequence
  ENSG00000089063_11 (sequence is synthesized)
atcaccttagtttgattctattttttagcttgcaaaaagtgacttatattccaaagaaattaaaatgttgaaatccaaatcctagaaataaaatgagttaacttcaaacatttcagaaaa

SEQ ID NO: 93758 - DNA, 120 bp, Artificial Sequence
  ENSG00000089063_12 (sequence is synthesized)
gtccgagaccgcgctccccgccgaaatcaagctccgagtcatccgtgtggggcattcgtcccccctggcacagttggcctctttccagaagcccgttttgtttgttttacgtctaaattc

SEQ ID NO: 93759 - DNA, 120 bp, Artificial Sequence
  ENSG00000089063_13 (sequence is synthesized)
ggcacttaagcgggccatgccatgcaaccttgggcgctgccaaccgtgggcgagctctgggtgtgcgggcggcctggcgcggcgctccggtaaggcgtgtgtgcggcagggcggggacag

SEQ ID NO: 93760 - DNA, 66 bp, Artificial Sequence
  ENSG00000089063_14 (sequence is synthesized)
gaagacgggacctccgtctcccaggctcaagctattctcgtgcctcagccttccaaatagctggga

SEQ ID NO: 93761 - DNA, 120 bp, Artificial Sequence
  ENSG00000089063_15 (sequence is synthesized)
gatgggaggcatcagtgggaggagtcccgaaggaggactcagctcaaggcttccagaaggaagaggaacacaggtgtcatcacctgactgaggttctgaccaatggaacacaggtggaag

SEQ ID NO: 93762 - DNA, 120 bp, Artificial Sequence
  ENSG00000089063_16 (sequence is synthesized)
actgatcccgcctggggccggctgagtggcacttaagcgggccatgccatgcaaccttgggcgctgccaaccgtgggcgagctctgggtgtgcgggcggcctggcgcggcgctccgatgg

SEQ ID NO: 93763 - DNA, 78 bp, Artificial Sequence
  ENSG00000089063_17 (sequence is synthesized)
gctctgggtgtgcgggcggcctggcgcggcgctccgatggagtctagttctgtcgcccaggctggagccttcaagcga

SEQ ID NO: 93764 - DNA, 120 bp, Artificial Sequence
  ENSG00000089063_18 (sequence is synthesized)
agagcttctcctactaagagcaggatatgtggagggaatgttccatatgcctagaggagcaggccaaaggaattccagctgccctctaccccctatgcaactcctcttgtgaatggtgag

SEQ ID NO: 93765 - DNA, 120 bp, Artificial Sequence
  ENSG00000089063_19 (sequence is synthesized)
aatggcgcagaccactccccatggccccacctctgttcctgagggtaggaggattcctgtccccttcataccatccttggtactgagagcgatgctgaagagactgggatgctcatattc

SEQ ID NO: 93766 - DNA, 120 bp, Artificial Sequence
  ENSG00000089063_20 (sequence is synthesized)
tcacaaagggactgcagggtggtacagatggctggatgcccagtactacatccattctcccctttttctttagtaatagaaccactgaaccttagctggatgagtaataaaaccgctgga

SEQ ID NO: 93767 - DNA, 120 bp, Artificial Sequence
  ENSG00000089063_21 (sequence is synthesized)
taatcttggcctaacatggtgatatgatttggctctgtgtccccacccgaatctcactttgaattgtaatccctgtaattcccatgtatcaaaggaggtactaggtggaggtaattggat

SEQ ID NO: 93768 - DNA, 83 bp, Artificial Sequence
  ENSG00000089063_22 (sequence is synthesized)
cccatgtatcaaaggaggtactaggtggaggtaattggatcatggggtggtttcccccaagctgttcttgtgatagtgagtga

SEQ ID NO: 93769 - DNA, 120 bp, Artificial Sequence
  ENSG00000089063_23 (sequence is synthesized)
gacaagactgactggctgtgtttctgttaagttagcaggaagaccttccagatggagattttgctaactgtccttggggattagaaggagcaacaagaagaaaactcagctctgagaccc

SEQ ID NO: 93770 - DNA, 120 bp, Artificial Sequence
  ENSG00000089091_0 (sequence is synthesized)
agatgcctatgggaaagcactgggaaaggaactccaggcgggtaccaggctccctgcggagcggcaggggccggtctagttgctaagaagctgagtctccaccaatcatctgcccagcac

SEQ ID NO: 93771 - DNA, 120 bp, Artificial Sequence
  ENSG00000089091_1 (sequence is synthesized)
ccagtgggcggggcgcggctcgccgcgtctgtggtaacccgggcggcggcgaaggaggaggcaagaggcgagagagagagagagagaaaatgactgctggttcagtgtgtgtccctcaga

SEQ ID NO: 93772 - DNA, 120 bp, Artificial Sequence
  ENSG00000089091_2 (sequence is synthesized)
tcataccattacgagtgcctcagcctggaaaagctaaccatgaaattgataacaatacgcttttggaaatgaaatcagacactccagatgtcaacatatattatactctggatggcagca

SEQ ID NO: 93773 - DNA, 120 bp, Artificial Sequence
  ENSG00000089091_3 (sequence is synthesized)
aacctgaatttctaaagagaattggttatggggaaaataacacatttaagtatataaaacctattactctgcctgatggaaaaatacaagttaaagctattgctgtctctaaagactgca

SEQ ID NO: 93774 - DNA, 120 bp, Artificial Sequence
  ENSG00000089091_4 (sequence is synthesized)
gacagagtggcattgtgacaaaggtgtttcacgtagactatgaaccaccaaatatagtctctcctgaagacaatgttgaaaatgttctcaaagattcttcaaggcaggaattcaaaaatg

SEQ ID NO: 93775 - DNA, 120 bp, Artificial Sequence
  ENSG00000089091_5 (sequence is synthesized)
gatttgttggatcaaaactaaagaaaaaatataagaactctgaaaatcaacgcagctggaatgttaaccttagaaagtttccagagagtccattggaaatcccagcttatggtggaggat

SEQ ID NO: 93776 - DNA, 120 bp, Artificial Sequence
  ENSG00000089091_6 (sequence is synthesized)
caggttctagaccacccacccgccagtcccagtcccccggttttgcacacgtaagcggtcagaagtgtttgacaagcacggagataatgagaattcaaagggagacagactttctcaagt

SEQ ID NO: 93777 - DNA, 120 bp, Artificial Sequence
  ENSG00000089091_7 (sequence is synthesized)
gtgcccactgccttgccccccggccatcagatccctttgctcgcttctgtcaagaatgtggctctcctgtcccacccatatttggctgtcgtctcccacccccagaaggagctcagatgg

SEQ ID NO: 93778 - DNA, 120 bp, Artificial Sequence
  ENSG00000089091_8 (sequence is synthesized)
gcttgtgtgcagaatgcagaagcttggtacccatgaacactcccatctgtgtggtgtgtgaggcccctcttgctctacagctgcagccacaggcaagcctccacttgaaggagaaggtaa

SEQ ID NO: 93779 - DNA, 120 bp, Artificial Sequence
  ENSG00000089091_9 (sequence is synthesized)
tttgccgggcctgtggtacaggaaatcctgctcacctgagatactgtgtcacctgtgagggggccctgccttcatcacaagagtcgatgtgcagtggggataaagcccctcctccgccca

SEQ ID NO: 93780 - DNA, 120 bp, Artificial Sequence
  ENSG00000089091_10 (sequence is synthesized)
ctcagaaaggggggaccatttcctgctacagatgtggtcgctggaatctctgggaggcgtccttctgcggctggtgtggagccatgctcggcattcctgctggctgttctgtttgcccta

SEQ ID NO: 93781 - DNA, 120 bp, Artificial Sequence
  ENSG00000089091_11 (sequence is synthesized)
aatgtggggccagcaatcacctgtctgcccgattctgtggctcctgtggtatttgtgtgaagtccctagtgaaacttagcttggacagaagcctggctctagctgctgaggaacctcgcc

SEQ ID NO: 93782 - DNA, 120 bp, Artificial Sequence
  ENSG00000089091_12 (sequence is synthesized)
ctttttctgagtccctgaatattcctttgcccagatctgatgttgggactaagagggacataggaacacagactgttggcctcttctacccatctggcaagctgctagcaaaaaaggaac

SEQ ID NO: 93783 - DNA, 120 bp, Artificial Sequence
  ENSG00000089091_13 (sequence is synthesized)
aggaactagcctctcaaaagcagaggcaggagaaaatgagtgaccataaacccctcctgacagccatcagcccaggaagagggtactggagaagacagctggatcacatctctgctcacc

SEQ ID NO: 93784 - DNA, 120 bp, Artificial Sequence
  ENSG00000089091_14 (sequence is synthesized)
acaaccctgaattccgggccttgattgcagaacccaggatgggaaagcttatctctgctactgtccacgaagatggttgtgaagttagcatcagactgaattatagtcaagtctcaaaca

SEQ ID NO: 93785 - DNA, 120 bp, Artificial Sequence
  ENSG00000089091_15 (sequence is synthesized)
agaacctttacctgaacaaggcagtgaatttcagcgatcaccttctgagcagtgctgccgagggtgatggggggctgtgcggcagcaggtccagctgggtgagtgactacagccagagta

SEQ ID NO: 93786 - DNA, 120 bp, Artificial Sequence
  ENSG00000089091_16 (sequence is synthesized)
cctcagatactattgaaaaaatcaaaaggataaagaatttcaagaccaaaacttttcaagaaaagaaggagcagcttatacctgaaaacagactcctgctgaaggaagtcggacccacgg

SEQ ID NO: 93787 - DNA, 120 bp, Artificial Sequence
  ENSG00000089091_17 (sequence is synthesized)
gggaaggaagagtctctgtgattgaacagctgctggatgagggagcagaccccaactgctgtgatgaagacaatcgacccgtcataaccgtggctgttatgaataagcaccatgaagcga

SEQ ID NO: 93788 - DNA, 120 bp, Artificial Sequence
  ENSG00000089091_18 (sequence is synthesized)
ttccagttctcgtgcagagaggagcagacatcgaccagcagtgggggccgctcagaaatacagctcttcatgaagcaactctgcttggccttgcaggaagagagagcaccgccactttac

SEQ ID NO: 93789 - DNA, 120 bp, Artificial Sequence
  ENSG00000089091_19 (sequence is synthesized)
tgggatgcaatgcaagcatccaaaagaagaatgcaggaggccagacagcatacgacctggctctgaacactggagatgaccttgtcacctcactctttgctgccaagtttggccaagggc

SEQ ID NO: 93790 - DNA, 120 bp, Artificial Sequence
  ENSG00000089091_20 (sequence is synthesized)
ttgaggaccaactcgctcaaactaggagcctcagcctggatgactgttagccctgaggcctccacgggacttcatttaagaatacgtgcatggctggcacagtggcttacgcctgtaatc

SEQ ID NO: 93791 - DNA, 120 bp, Artificial Sequence
  ENSG00000089091_21 (sequence is synthesized)
aaactccatctcaaaaaaaaaaaagaatatgtgcagctctggctattctttaatcatgtctttctgaaatgtgtatttgagattagaaattgaggttgagaggaactcaggagatttttt

SEQ ID NO: 93792 - DNA, 120 bp, Artificial Sequence
  ENSG00000089091_22 (sequence is synthesized)
ttttaaatcatatgacagtataagccatcagtactaaatggacagctcccagtatactgtggactgtgataaactgaatgtatgttttttaatggtttattgctgcaggttttttgtgta

SEQ ID NO: 93793 - DNA, 120 bp, Artificial Sequence
  ENSG00000089091_23 (sequence is synthesized)
tttgatttttagtttttaacttatttttcaataggtaataattgcacatggttcaaagctaaaaggtatgaagtattatgtagggatacgtccctcccattctgtcccacagccaccacc

SEQ ID NO: 93794 - DNA, 120 bp, Artificial Sequence
  ENSG00000089091_24 (sequence is synthesized)
tctctcctcagccagcaatgacatcagcgtcgacttgcctttcccggggttgtgcagagttagatatgcacatacatgtggtataagcacatgtacagaggagtacacatagcatataaa

SEQ ID NO: 93795 - DNA, 120 bp, Artificial Sequence
  ENSG00000089091_25 (sequence is synthesized)
catgtctgtagcacatatatattctttcccctcttttaaaacaaatggtagcaaaccaaccacacactgttctgtatcttgctctgtttgcttgatacatcttgtaagtggctcctaatt

SEQ ID NO: 93796 - DNA, 120 bp, Artificial Sequence
  ENSG00000089091_26 (sequence is synthesized)
actatgtaaagattgaccttatttaaatttttttatgttgaaatcatcaatattcccatcattatggtgtgttctttgattgacaaatcagctctcaataaaccacttataagaatgtgt

SEQ ID NO: 93797 - DNA, 120 bp, Artificial Sequence
  ENSG00000089091_27 (sequence is synthesized)
gcgtctgtggtaacccgggcggcggcgaaggaggaggcaagaggcgttttgctgcatttaaattaagtgctgctcttcagcttttgtgtacattggaatttatatgtatatatatataga

SEQ ID NO: 93798 - DNA, 120 bp, Artificial Sequence
  ENSG00000089091_28 (sequence is synthesized)
gaggcggtgagaggctggcgactgggttgggcgcggcagagatgcattaggggtcccgatcccgggccccgcggttagaggaagaggagggcggctagaggaggggaagagcttccctta

SEQ ID NO: 93799 - DNA, 120 bp, Artificial Sequence
  ENSG00000089091_29 (sequence is synthesized)
agtaatgtttgaacaggtatatgtcctttttcagctagtgggatggggtaacaatttttttttttttttgagacagaatcttgttctgtcacacaggctggagtgcagtagcgcaatctc

SEQ ID NO: 93800 - DNA, 61 bp, Artificial Sequence
  ENSG00000089091_30 (sequence is synthesized)
cgcatggctaatttttatatttttagtagacatggggtttcatcatcttggccaggctggt

SEQ ID NO: 93801 - DNA, 83 bp, Artificial Sequence
  ENSG00000089091_31 (sequence is synthesized)
gcgaagccaccatgcccgccaggatggggtaacaattgataagctaatatacatgaacaaaatccattctatttttagtaagg

SEQ ID NO: 93802 - DNA, 120 bp, Artificial Sequence
  ENSG00000089091_32 (sequence is synthesized)
ctaatatacatgaacaaaatccattctatttttagtaaggtatgctgtccaagagtttaatttgccaataggatctataatattaagagagatatgtaggattgtattccctgaacatgg

SEQ ID NO: 93803 - DNA, 120 bp, Artificial Sequence
  ENSG00000089091_33 (sequence is synthesized)
aattttttacttcatatatttaaactccaacattgcagttagtgttgatttataattttgtccttaaagtggctcatacttttgtttgccttatttgattataggttcttgttatggaga

SEQ ID NO: 93804 - DNA, 120 bp, Artificial Sequence
  ENSG00000089091_34 (sequence is synthesized)
aaaagaatgactagaactagtcacatggaagaaaaagttatgtatcatcacttacatccaaaaaactttgctcaaaaaatgatatcatactgtgaacatttttttgatagaatctttaaa

SEQ ID NO: 93805 - DNA, 120 bp, Artificial Sequence
  ENSG00000089091_35 (sequence is synthesized)
catacaactaaatattttctccattcttcaatttacagtcccatttacttcctctttaatcccaagtaaaggtcactagaggataaaatagatttaatagagggaatttgggggattaaa

SEQ ID NO: 93806 - DNA, 120 bp, Artificial Sequence
  ENSG00000089091_36 (sequence is synthesized)
aaactaagaatttttagcaataagggaaatgcatggcattatgtacaggccataacactcctaaaatggccttgtgggttgtatatgggcaaaatgtattcagagaaaagataaatccac

SEQ ID NO: 93807 - DNA, 120 bp, Artificial Sequence
  ENSG00000089091_37 (sequence is synthesized)
tttttctttcaccttcaagctccctttagcatgaagagttcacaagtgtacaaggctgtgtgagccttcagaaatgagattttgaataactggccaggccaaagtcagtttcaggacatc

SEQ ID NO: 93808 - DNA, 120 bp, Artificial Sequence
  ENSG00000089091_38 (sequence is synthesized)
gtgttatgctcagaacaaccctgaattccgggccttgattgcagaacccaggatgggaaaggtgggtgagatgaaatttccactccacaagtgtccacgggatcaggctgaaggaaccct

SEQ ID NO: 93809 - DNA, 120 bp, Artificial Sequence
  ENSG00000089091_39 (sequence is synthesized)
ccatggactttgcctgaaactgcatcttgcctggctcctttccctttcctgctctgctttctacactttcttactcttctgccttgtgagctctgctctaataaatcacttgcacatgaa

SEQ ID NO: 93810 - DNA, 120 bp, Artificial Sequence
  ENSG00000089091_40 (sequence is synthesized)
aatctttattcccaaatatctgcaaagcctccccactgtgaagagtcaattagatccatctgagaaggatgtgtgacgcttcaggcactgggtgtgagcatcgataagaaagattcaagg

SEQ ID NO: 93811 - DNA, 120 bp, Artificial Sequence
  ENSG00000089091_41 (sequence is synthesized)
agttaggccagaggatgggctagcctacagtaaggcggccaacccagaggtcttggtcacagggatgttgttgggattgacagaggaagtttataggggtttcacttaagcttgaccatg

SEQ ID NO: 93812 - DNA, 120 bp, Artificial Sequence
  ENSG00000089091_42 (sequence is synthesized)
aacctgatgctagagaggaggttggtagatgcaggcatgggtgggactcaagtgtgatcaaggcaaggatctacactgggcaggggccgccttcgggggctaagccaacatatgtcagca

SEQ ID NO: 93813 - DNA, 120 bp, Artificial Sequence
  ENSG00000089091_43 (sequence is synthesized)
agtgcttaggcttgaatcaggtgtgagggaccaagtccatggagaaagtccagagagaagagtgtttaaggactgtgtgtgggcaggtggtgtgcagaagtctgattttggtctgactct

SEQ ID NO: 93814 - DNA, 120 bp, Artificial Sequence
  ENSG00000089091_44 (sequence is synthesized)
accctgcctttgccctctggacttggtggtccctctgttgttacccagactcccacagttgtaacatcctgcctgcatgtgctgctccctgcctcctgccttggccacttcacctggtga

SEQ ID NO: 93815 - DNA, 120 bp, Artificial Sequence
  ENSG00000089091_45 (sequence is synthesized)
gggctacatccagatgtgctgccagctgagcagcccagtccagatacaaagctgcatgtttccagaataaagtgaaacaggggtcactttgtacaaatgaccataaactctttcaaataa

SEQ ID NO: 93816 - DNA, 120 bp, Artificial Sequence
  ENSG00000089091_46 (sequence is synthesized)
agatgcaggaaagtatgttagagaaaatgttggtgaccagtggctgagtgtggattagtagtgaagtctatgctctattggattacagagctgaaaaggatagatatcttccaggcatca

SEQ ID NO: 93817 - DNA, 120 bp, Artificial Sequence
  ENSG00000089091_47 (sequence is synthesized)
agcaggccggcaaacaccccttgatttgctgacttttagataataaatggctaatcctggatcaggctggaagttgctgagaaagacaggagcaaggaagatgaggcaaaggctggaaaa

SEQ ID NO: 93818 - DNA, 120 bp, Artificial Sequence
  ENSG00000089094_0 (sequence is synthesized)
gtacgtgtgtgtgtccacatctttgagtgccgggagtttaaaagttaggcagtccttataggtatggaagccgagctaatttccttctgagccccccaaatgcctcctccacatggcggg

SEQ ID NO: 93819 - DNA, 120 bp, Artificial Sequence
  ENSG00000089094_1 (sequence is synthesized)
tccgcaaatggggggatctgcagaggatcaccccccacgaaaaagacatgcagcagaaaagcaaaaaaagaaaacagttatatatacaaaatgctttgaatttgagtcggccacacagcg

SEQ ID NO: 93820 - DNA, 120 bp, Artificial Sequence
  ENSG00000089094_2 (sequence is synthesized)
cccgattgaccgccagcgatacgacgagaacgaggacttgtcggacgtggaggagatcgtcagcgtccgcggcttcagcctggaggagaagcttcgcagccagctgtaccagggggactt

SEQ ID NO: 93821 - DNA, 120 bp, Artificial Sequence
  ENSG00000089094_3 (sequence is synthesized)
cgtgcacgccatggagggcaaagatttcaactatgagtacgtacagagagaagctctcagggttcccctgatatttcgagaaaaggatggactgggaattaagatgcctgaccctgattt

SEQ ID NO: 93822 - DNA, 120 bp, Artificial Sequence
  ENSG00000089094_4 (sequence is synthesized)
cacagtccgagacgtcaaactcctagtggggagccggcggcttgtggacgtgatggatgtgaacacccagaagggcacggagatgagcatgtcccagtttgtgcgttactacgagacgcc

SEQ ID NO: 93823 - DNA, 120 bp, Artificial Sequence
  ENSG00000089094_5 (sequence is synthesized)
cgaggcccagcgggacaagctgtacaacgtcatcagcctagagttcagccacaccaagctggagcacttggtcaagcgtccgactgtggtagacctggtggactgggtggacaacatgtg

SEQ ID NO: 93824 - DNA, 120 bp, Artificial Sequence
  ENSG00000089094_6 (sequence is synthesized)
gccccagcatctgaaggagaagcagacagaagccacgaacgccattgcagagatgaagtacccgaaagtgaaaaagtactgtctgatgagcgtgaaaggttgtttcaccgacttccacat

SEQ ID NO: 93825 - DNA, 120 bp, Artificial Sequence
  ENSG00000089094_7 (sequence is synthesized)
cgactttggaggcacttccgtttggtaccatgttttccggggtgggaagattttttggctgattcctccaacgctgcacaatttggcgctgtacgaggagtgggtgctgtcaggcaaaca

SEQ ID NO: 93826 - DNA, 120 bp, Artificial Sequence
  ENSG00000089094_8 (sequence is synthesized)
gagtgacatctttctgggagaccgtgtggaacgatgccaaagaattgagctgaagcagggctacacatttttcatcccttccggttggatccatgccgtctacacccctgtagactcttt

SEQ ID NO: 93827 - DNA, 120 bp, Artificial Sequence
  ENSG00000089094_9 (sequence is synthesized)
ggtgttcggcggaaacatcctgcacagctttaacgtgcccatgcagctgcggatctacgagatcgaggacaggacgcgggtgcagcccaaattccgttaccccttctactatgagatgtg

SEQ ID NO: 93828 - DNA, 120 bp, Artificial Sequence
  ENSG00000089094_10 (sequence is synthesized)
ctggtatgtcctggagagatacgtgtactgtgtgacccagcgctcccacctcactcaggaataccagagggagtcgatgcttattgatgccccgaggaagcccagcatagacggcttctc

SEQ ID NO: 93829 - DNA, 120 bp, Artificial Sequence
  ENSG00000089094_11 (sequence is synthesized)
ttcggattcctggctggagatggaggaggaggcctgtgatcagcagcctcaggaggaggaggagaaggacgaggagggcgagggcagggacagggcacccaaaccgcccaccgatggctc

SEQ ID NO: 93830 - DNA, 120 bp, Artificial Sequence
  ENSG00000089094_12 (sequence is synthesized)
cacttcacccaccagcacgccctctgaggaccaggaggccctcgggaagaagcccaaagcacctgccctgcgattcctcaaaaggactttgtctaatgagtcggaggaaagtgtgaagtc

SEQ ID NO: 93831 - DNA, 120 bp, Artificial Sequence
  ENSG00000089094_13 (sequence is synthesized)
caccacattggccgtagactaccccaagacccccaccggctctcccgccacggaggtctctgccaaatggacccatctcactgagtttgaactgaagggcctgaaagctctggtggagaa

SEQ ID NO: 93832 - DNA, 120 bp, Artificial Sequence
  ENSG00000089094_14 (sequence is synthesized)
actggaatccctcccggagaacaagaagtgtgtccccgagggcatcgaggacccccaggcactcctggagggtgtgaagaacgtcctgaaggagcacgcagatgatgaccctagtctggc

SEQ ID NO: 93833 - DNA, 120 bp, Artificial Sequence
  ENSG00000089094_15 (sequence is synthesized)
catcactggggtccctgtggtgacttggccaaagaagactccaaagaaccgggctgtgggtcggcccaaggggaagctgggcccggcctccgcggtgaagttggccgccaaccggacaac

SEQ ID NO: 93834 - DNA, 120 bp, Artificial Sequence
  ENSG00000089094_16 (sequence is synthesized)
ggcaggagctcggcggcgccggacgcgatgccgcaagtgcgaggcctgcctgcggaccgagtgcggagagtgccacttctgcaaggacatgaagaagttcgggggccccgggcgcatgaa

SEQ ID NO: 93835 - DNA, 120 bp, Artificial Sequence
  ENSG00000089094_17 (sequence is synthesized)
gcagagctgcatcatgcggcagtgcatcgcgccagtgctgccccacaccgccgtgtgccttgtgtgtggcgaggcggggaaggaagacacggtggaagaggaggaaggcaagtttaacct

SEQ ID NO: 93836 - DNA, 120 bp, Artificial Sequence
  ENSG00000089094_18 (sequence is synthesized)
catgctcatggagtgctccatctgcaatgaaatcatccaccctggatgccttaagattaaggagtcagagggtgtggtcaacgacgagcttccaaactgctgggagtgtccgaagtgtaa

SEQ ID NO: 93837 - DNA, 120 bp, Artificial Sequence
  ENSG00000089094_19 (sequence is synthesized)
ccacgccggcaagaccgggaaacaaaagcgtggccctggctttaagtacgcctccaacctgcccggctccctgctcaaggagcagaagatgaaccgggacaacaaggaagggcaggaacc

SEQ ID NO: 93838 - DNA, 120 bp, Artificial Sequence
  ENSG00000089094_20 (sequence is synthesized)
tgccaagcggaggagtgagtgtgaggaggcgccccggcgcaggtcggatgagcactcgaagaaggtgccgccggacggccttctgcgcagaaagtctgacgacgtgcacctgaggaagaa

SEQ ID NO: 93839 - DNA, 120 bp, Artificial Sequence
  ENSG00000089094_21 (sequence is synthesized)
gcggaaatacgagaagccccaggagctgagtggacgcaagcgggcctcatcgcttcaaacgtcccccggttcctcctctcacctctcgccgaggccccctctaggcagcagcctcagccc

SEQ ID NO: 93840 - DNA, 120 bp, Artificial Sequence
  ENSG00000089094_22 (sequence is synthesized)
agctcaaacctggcaaagaagataagcttttcaggaaaaagcggcggtcctggaagaacgccgaggaccgcatggcgctggccaacaagcccctccggcgcttcaagcaggaacccgagg

SEQ ID NO: 93841 - DNA, 120 bp, Artificial Sequence
  ENSG00000089094_23 (sequence is synthesized)
acgaactgcccgaggcgccccccaagaccagggagagcgaccactcccgctccagctcccccaccgcgggacccagcaccgaaggggccgagggcccggaggagaagaagaaggtgaaga

SEQ ID NO: 93842 - DNA, 120 bp, Artificial Sequence
  ENSG00000089094_24 (sequence is synthesized)
tgcgccggaagcggcggcttcccaacaaggagctgagcagggagctgagcaaggagctcaaccacgagatccagaggacggagaacagcctggccaacgagaaccagcagcccatcaagt

SEQ ID NO: 93843 - DNA, 120 bp, Artificial Sequence
  ENSG00000089094_25 (sequence is synthesized)
cggagcctgagagcgagggcgaggagcccaagcggcccccgggcatctgcgagcgtccccaccgcttcagcaaggggctcaacggcaccccccgggagctgcggcaccagctggggccca

SEQ ID NO: 93844 - DNA, 120 bp, Artificial Sequence
  ENSG00000089094_26 (sequence is synthesized)
gcctgcgcagcccgccccgtgtcatctcccggcccccaccctccgtgtccccgcccaagtgtatccagatggagcgccatgtgatccggccaccccccatcagccccccgcctgactcgc

SEQ ID NO: 93845 - DNA, 120 bp, Artificial Sequence
  ENSG00000089094_27 (sequence is synthesized)
tacccctggacgatggggcagcccacgtcatgcacagggaggtgtggatggccgtcttcagctacctcagccaccaagacctgtgtgtgtgcatgcgggtctgcaggacctggaaccgct

SEQ ID NO: 93846 - DNA, 120 bp, Artificial Sequence
  ENSG00000089094_28 (sequence is synthesized)
ggtgctgcgataagcggttgtggacccgcattgacctgaaccactgcaagtctatcacacccctgatgctgagtggcatcatccggcgacagcccgtctccctcgacctcagctggacca

SEQ ID NO: 93847 - DNA, 120 bp, Artificial Sequence
  ENSG00000089094_29 (sequence is synthesized)
atatctccaagaagcagctgagctggctcatcaaccggctgcctgggctccgggacttggtgctgtcaggctgctcatggatcgcggtctcggccctttgcagctccagttgtccgctgc

SEQ ID NO: 93848 - DNA, 120 bp, Artificial Sequence
  ENSG00000089094_30 (sequence is synthesized)
tccggaccctggatgtccagtgggtggagggactaaaggatgcccagatgcgggatctcctgtccccgcccacagacaacaggccaggtcagatggacaatcggagcaagctccggaaca

SEQ ID NO: 93849 - DNA, 120 bp, Artificial Sequence
  ENSG00000089094_31 (sequence is synthesized)
tcgtggagctgcgcctggcaggcctggacatcacagatgcctccctgcggctcatcatccgccacatgcccctgctctccaagctccacctcagttactgtaaccacgtcaccgaccagt

SEQ ID NO: 93850 - DNA, 120 bp, Artificial Sequence
  ENSG00000089094_32 (sequence is synthesized)
ctatcaacctgctcactgctgttggcaccaccacccgagactccttaaccgagatcaacctgtctgactgcaataaggtcactgatcagtgcctgtccttcttcaaacgctgtggaaaca

SEQ ID NO: 93851 - DNA, 120 bp, Artificial Sequence
  ENSG00000089094_33 (sequence is synthesized)
tctgtcatattgacctgaggtactgcaagcaagtcaccaaggaaggctgtgagcagttcatagccgagatgtctgtgagtgtccagtttgggcaagtagaagaaaaactcctgcaaaaac

SEQ ID NO: 93852 - DNA, 120 bp, Artificial Sequence
  ENSG00000089094_34 (sequence is synthesized)
tgagttagtccaaggataagtatgtaaatacggggcgggctctgggaggggagagactttacaaaaatgagggcttttattttccatttggaacgtgggacaacagaccacaacgcaatt

SEQ ID NO: 93853 - DNA, 120 bp, Artificial Sequence
  ENSG00000089094_35 (sequence is synthesized)
ccattttgcaagtctttccaagggagaagctgttcaaccacccgtttgggggatgagtgagccgacactttcctttggtctttctgaatcgtaactgcactgctttctggaccatttcta

SEQ ID NO: 93854 - DNA, 120 bp, Artificial Sequence
  ENSG00000089094_36 (sequence is synthesized)
aggcggcctttacaagaagacattcctgtcggagaggagggtggacttcggagaaattctcatactgaagcatgagcttaggagtttctgttagtggtagtggtgttttggacacttcat

SEQ ID NO: 93855 - DNA, 120 bp, Artificial Sequence
  ENSG00000089094_37 (sequence is synthesized)
tccttgcaacaccgaggttttgggtgttgacataaagtggaccacacaccacatctgctgccgtcttgacacttttttttgtttggttggttttgttacatcttacattatgcagaacta

SEQ ID NO: 93856 - DNA, 120 bp, Artificial Sequence
  ENSG00000089094_38 (sequence is synthesized)
tttttgtacaaattgtttaaaagttatttatgcaaggtttgaatgcataccagtgtttttattgttttgagattgccaattttcctgatttccttaaggtaggagagaatttaacgtgta

SEQ ID NO: 93857 - DNA, 120 bp, Artificial Sequence
  ENSG00000089094_39 (sequence is synthesized)
cttcatcgacacaacccatctacaaatgtgcccagatctaacaaagtaggctaagaccttccacttaaaagcatgtttaactggaagttgagagtctgctttgtacctcaagagttacat

SEQ ID NO: 93858 - DNA, 120 bp, Artificial Sequence
  ENSG00000089094_40 (sequence is synthesized)
gagcatgttgtggataaatgtaaattatagtcaaagtaagatactctgccaagtttcctctgtagagaattcacttttctcaaattttaaaatttcgacttcagcctttgcactcaggag

SEQ ID NO: 93859 - DNA, 120 bp, Artificial Sequence
  ENSG00000089094_41 (sequence is synthesized)
gttctgctccagcatgagctcttgtacttacatagatctaatttatacagtgagtcaagacgtagaataaatgctcccacatagcctttcttttgcttttgcttctctcctctgaagtgt

SEQ ID NO: 93860 - DNA, 120 bp, Artificial Sequence
  ENSG00000089094_42 (sequence is synthesized)
gagttgagttctcatttaggtttgtaacatggctatttcctagttgtaaagttctgcatttataagtgccattgttgtaaggtggtgtttcctagaccttccctgatgcgattttacctt

SEQ ID NO: 93861 - DNA, 120 bp, Artificial Sequence
  ENSG00000089094_43 (sequence is synthesized)
tgttgaatttgtataaacaattgtacaaaaaaaaccactcttgaactttgagggtttctgttctaggagtggactagaagtttaagcccagagtcagtaaacactgttttgaagtccaaa

SEQ ID NO: 93862 - DNA, 120 bp, Artificial Sequence
  ENSG00000089094_44 (sequence is synthesized)
ccaacaacaaaacagcgatgccacggcgctaacggcgcccggtgcctcccgggctccctccccgccccatacctcctcgggccgccgcccccacccccccaagcccgggccgagagcccc

SEQ ID NO: 93863 - DNA, 120 bp, Artificial Sequence
  ENSG00000089094_45 (sequence is synthesized)
cccaaatagcccggccgcgggctccgagcgcgatcggcaacaatgtttacgttccggggattatgacgtcgacgcctccccccccccacaactgctgaaaatggtttcctaggactttgc

SEQ ID NO: 93864 - DNA, 120 bp, Artificial Sequence
  ENSG00000089094_46 (sequence is synthesized)
aaacggatctgcctaagtgttggtgcaaaactttgtagatctcggctctggcttgctttatttatttattttttggtttgttttctttggtcttccctccttcccccctcggccaaaatg

SEQ ID NO: 93865 - DNA, 120 bp, Artificial Sequence
  ENSG00000089094_47 (sequence is synthesized)
atactgctgagcccccggtccacctgaaagcgaggtgcaaaaggcagccagagggagggggcaccaggagccctccgccttctaaccagctcagccccactccccgcattatctccactc

SEQ ID NO: 93866 - DNA, 120 bp, Artificial Sequence
  ENSG00000089094_48 (sequence is synthesized)
gtgccggcgcgctgctggctcctccctgtccgtccccgccccattccttccctcttccccaaaccatggaaaggcaaagtgcagcggggaaaagaggtcagtggggtactgtctgatgag

SEQ ID NO: 93867 - DNA, 120 bp, Artificial Sequence
  ENSG00000089094_49 (sequence is synthesized)
agcagacttaccactggtctggccctttgaacatgcttaaagctgctgttattgcctgggcccttggagggaggtctttctctggatggtattatataagagactctggtcttgaaagcc

SEQ ID NO: 93868 - DNA, 120 bp, Artificial Sequence
  ENSG00000089094_50 (sequence is synthesized)
actccctaattttctttgggccttcatttcctcacctgtgaagtgaaggggtcaggagagacccccttctatctctgaaatgatataaagggaggaagggagtttgtgttagcggcaact

SEQ ID NO: 93869 - DNA, 120 bp, Artificial Sequence
  ENSG00000089094_51 (sequence is synthesized)
tttttgtttgtccgcacttttcctttccgctctttgagccatgatagttgagaattgtgtttttttacttccttaaattcagaagtgagcttttgagagtcctcaaaggaaatcaacctc

SEQ ID NO: 93870 - DNA, 120 bp, Artificial Sequence
  ENSG00000089094_52 (sequence is synthesized)
aagataattcttttgctcctgattggtaatgggaaaaacctttgagaagaattcctgcttacagacatctctctctctctcctttttttttttttttgagacagaatatcactctgttgc

SEQ ID NO: 93871 - DNA, 120 bp, Artificial Sequence
  ENSG00000089094_53 (sequence is synthesized)
tgagccaccgtgcctggcctagacatttctcttgatgtattatgttatttgggtgactctatacccctgtaggcttgaccaatcacaatgaagtggaagcatgattggcatgttatgagc

SEQ ID NO: 93872 - DNA, 120 bp, Artificial Sequence
  ENSG00000089094_54 (sequence is synthesized)
catgttatgagcccctcctctttctttagaggctcctactgagtagagtggccagcaagaggtcagatacaaacttcagacaacaaggtagcctttttttttttttttgagatggagtct

SEQ ID NO: 93873 - DNA, 120 bp, Artificial Sequence
  ENSG00000089094_55 (sequence is synthesized)
gtgagccaccgcgcccagccatcaaggtagcttttaaaaagctgagacctttgggaatggagtgatgtggggtggggtgggggggttagggtgtattcttttgcttgttgtttctgttgc

SEQ ID NO: 93874 - DNA, 75 bp, Artificial Sequence
  ENSG00000089094_56 (sequence is synthesized)
gggggttagggtgtattcttttgcttgttgtttctgttgcaactttgagaagattctgaaaaataagaggggagt

SEQ ID NO: 93875 - DNA, 76 bp, Artificial Sequence
  ENSG00000089094_57 (sequence is synthesized)
ggagagtaaggaaggaaactcagaacagatacgtttcggcaaagagcaagtcgactgggattttttctatagtggg

SEQ ID NO: 93876 - DNA, 120 bp, Artificial Sequence
  ENSG00000089094_58 (sequence is synthesized)
cggcaaagagcaagtcgactgggattttttctatagtgggtgtgtaaatttcagactttaaaatccactcagtaaaactgacatccctgcttattcacttttgccgactctgctagaagc

SEQ ID NO: 93877 - DNA, 120 bp, Artificial Sequence
  ENSG00000089094_59 (sequence is synthesized)
ctcctgagttttgtttacaaggtctccggcacacagcctgccttctttgaaaggccaggccaggaccagcctgcccatcccttctgttctcactggatttcgtggccagtggcctggacg

SEQ ID NO: 93878 - DNA, 120 bp, Artificial Sequence
  ENSG00000089094_60 (sequence is synthesized)
tgactaacagatggccattgcagagctgatcacctgatttcatggcttattcttgggaaagcctctgatctttttacagaaggttatccatcccttggtaaatccttccccttgtataga

SEQ ID NO: 93879 - DNA, 120 bp, Artificial Sequence
  ENSG00000089094_61 (sequence is synthesized)
atttagtgttaccttggacaggtggatgatatgtatgccaagtcctccttagcttgtgtttagctttggttttgatgcttataacagctttggtcgttctagctcatggtcatgagctct

SEQ ID NO: 93880 - DNA, 120 bp, Artificial Sequence
  ENSG00000089094_62 (sequence is synthesized)
ttcagagaggctgctggcttaagtgcccgatagactttttttttgaatgaatgaagatctatctggatttctagcaacacttttcttcaggagtgggctgcagctggagtgagcactagg

SEQ ID NO: 93881 - DNA, 120 bp, Artificial Sequence
  ENSG00000089094_63 (sequence is synthesized)
aacctttgcagcttaagaattcagaaacccacacctccccagccagcctaaggggcagccagtctcctaggagagctgggttctggcctgcgacgtcctccacctttcggaggtcaactc

SEQ ID NO: 93882 - DNA, 120 bp, Artificial Sequence
  ENSG00000089094_64 (sequence is synthesized)
agaaggcggtacctgtccaagggagggggcgcccacctcagggtagagtcagggcgttctgacagcccccgtcaggcgactcgagtggaactcccgcctgcactacttgaccctgcaaag

SEQ ID NO: 93883 - DNA, 120 bp, Artificial Sequence
  ENSG00000089094_65 (sequence is synthesized)
gcgaacccgagtgccggaggtgcagcgccaggaggccggcccagcccaaccgcccgcgtcgggggagactgggctctcagagcttatccaggccagcggtcctgcaggctctgggtcggg

SEQ ID NO: 93884 - DNA, 120 bp, Artificial Sequence
  ENSG00000089094_66 (sequence is synthesized)
ggttcccgggttcgtgcgcttcaggtcctggtcctgcagcgagtgcaaacccggcagcccgtgtgcctgctgcaagggacctggggacccgctcctggcgtcgggtgcagagtcgtcccc

SEQ ID NO: 93885 - DNA, 120 bp, Artificial Sequence
  ENSG00000089094_67 (sequence is synthesized)
cacggcccgggcgcccccgggcttccgcgagacgccccacgggaccacacaaaggaccccaccccaggccgggcgcgcatttcctgttgcagcggtggcggcgtgcagccacccatgtgc

SEQ ID NO: 93886 - DNA, 80 bp, Artificial Sequence
  ENSG00000089094_68 (sequence is synthesized)
cccagtccccgcgctccggccgcgagggaccgccctcggcggcccgcccccgtgtcaccgcaggccgggctccctttgtg

SEQ ID NO: 93887 - DNA, 80 bp, Artificial Sequence
  ENSG00000089094_69 (sequence is synthesized)
cgcgccattggcccgcccgcccggggggccagccccttcctggctcgcctcatgcatatgcatggcgccccggccctccc

SEQ ID NO: 93888 - DNA, 80 bp, Artificial Sequence
  ENSG00000089094_70 (sequence is synthesized)
cgcggcgcggctccctcctcgcggcagcgggagcccgagcccgagcccgagcccgagccagggcgagccgagcctgctcc

SEQ ID NO: 93889 - DNA, 120 bp, Artificial Sequence
  ENSG00000089094_71 (sequence is synthesized)
ctccgggcgggcggcggcggcggcgccgctccagccatgtcagcgcgcgcgagcctgggcccaccatgagccatggccatgtccgtgagcgccgaggacgacgactatgaatcggagccg

SEQ ID NO: 93890 - DNA, 120 bp, Artificial Sequence
  ENSG00000089094_72 (sequence is synthesized)
caccacctgcccatttagacttttaactgcctctcaaaacaaagtccccacgggagaaggcaggagcaggtgtgagctgcaaccgtttcattctggagaacaggtagggttgcagtctta

SEQ ID NO: 93891 - DNA, 120 bp, Artificial Sequence
  ENSG00000089094_73 (sequence is synthesized)
cccaggcagcgccccaaagttggtgctgcaggtgcagcaaccctcctgccgccctcctccccggctggcccggccgtggcaggcgggaacccccaagggctcggttcgggggctcccgat

SEQ ID NO: 93892 - DNA, 120 bp, Artificial Sequence
  ENSG00000089094_74 (sequence is synthesized)
gatctgccgccaacttggagggtgccttgctgcacagaagccacctgagctgggggcggccgggggcggccgaggcccaggcggaagccgggctagccggctggccgtggggagagctta

SEQ ID NO: 93893 - DNA, 120 bp, Artificial Sequence
  ENSG00000089094_75 (sequence is synthesized)
acattttgactttttcaagtccttgagacctgggagttctagatacactcgagaaaccttttgttgtcatctcctgaggtcactcagcttgaagatgacttggacctccgaggaagggct

SEQ ID NO: 93894 - DNA, 120 bp, Artificial Sequence
  ENSG00000089094_76 (sequence is synthesized)
gaggccaggtgccgctgagtgggccctgaggtcctctggtagacggatgacctgcaggctgggagcattgcatgccttgtgactgccttgccttttgttttggactgacgttggttaact

SEQ ID NO: 93895 - DNA, 120 bp, Artificial Sequence
  ENSG00000089094_77 (sequence is synthesized)
caatttggtgaggctccgagtctgtcaacaaataatgttgagcaaccgtatgtttaatgtccccaggcatgtggctgaaaccttttgaaggcgaagggtggaaggcgacaacctgtttgt

SEQ ID NO: 93896 - DNA, 120 bp, Artificial Sequence
  ENSG00000089094_78 (sequence is synthesized)
aagtcaattctttgcaaatttttgtttcccgcagtcctctcttggaaaaaaaaataaataaataaataaaaatttgaattccttcatcagcatttgttttcacccagctggtttccattg

SEQ ID NO: 93897 - DNA, 120 bp, Artificial Sequence
  ENSG00000089094_79 (sequence is synthesized)
attatctccactcgtgccggcgcgctgctggctcctccctgtccgtccccgccccattccttccctcttccccaaaccatggaaaggcaaagtgcagcggggaaaagaggtactgtctga

SEQ ID NO: 93898 - DNA, 120 bp, Artificial Sequence
  ENSG00000089094_80 (sequence is synthesized)
gctgaaaccttttgaaggcgaagggtggaaggcgacaacctgtttgtgcagcccaaattccgttaccccttctactatgagatgtgctggtatgtcctggagagatacgtgtactgtgtg

SEQ ID NO: 93899 - DNA, 120 bp, Artificial Sequence
  ENSG00000089094_81 (sequence is synthesized)
gaaatcatccaccctggatgccttaaggtgagtggcccagtggggacaggtggtgctgacgctctggggcaggtagggttgctggagatgctggtgagatggtgggatgcaggtcgtgca

SEQ ID NO: 93900 - DNA, 120 bp, Artificial Sequence
  ENSG00000089094_82 (sequence is synthesized)
gtgaattcctggaggacccctgagtctgggtgatcctgtgtgtcaagggataagcccggggcaaggagggcctggagtacctcagagacccagtgtcatcaaaggaataaacacaccccc

SEQ ID NO: 93901 - DNA, 120 bp, Artificial Sequence
  ENSG00000089094_83 (sequence is synthesized)
acctcccaggatgtcagaaccagagagggtttccagagcctcagcagatggcaaacacaggctgcttgtttgtagctgggccagaggaagcgcctccaggtggctccaggcttctgggag

SEQ ID NO: 93902 - DNA, 120 bp, Artificial Sequence
  ENSG00000089094_84 (sequence is synthesized)
aacaaggccccacaccacactccttcccccagcacccagtagagtcctctgcagagtcctttctgcatgccaggcgctgagctcatggctttacctgggtcatacccccccagtgagatg

SEQ ID NO: 93903 - DNA, 120 bp, Artificial Sequence
  ENSG00000089094_85 (sequence is synthesized)
ggcacactaacttttatggccgagggcaccagcccacagagacggagtgtcttgcccagggtcccagagaagcaaaggggctcagcctctgaaccctggcctggatccacagctgcccgt

SEQ ID NO: 93904 - DNA, 120 bp, Artificial Sequence
  ENSG00000089094_86 (sequence is synthesized)
ctctgccagcctctgcagctgtgttttcttttgcctggaaacgggatagatgtgacgttggggagggggtgctgctgcttctggaagacgtggcgtcacagagccttgtgcccgtgggcc

SEQ ID NO: 93905 - DNA, 120 bp, Artificial Sequence
  ENSG00000089094_87 (sequence is synthesized)
tccagtctcacttacttccagcagcaggtgctcccacgacgcacgccctcctgaggccccggggactggcgagtcctgggctgtcccccaccccaccccgctggtcctccaccccactgc

SEQ ID NO: 93906 - DNA, 120 bp, Artificial Sequence
  ENSG00000089094_88 (sequence is synthesized)
tgcctctcctgaggcttcccaggtctcggccccagatctctggctcgtggttctggcttggggcctgggaagctgtctgtgcctagagcctctgttggttgggatggaagctgtgagtcc

SEQ ID NO: 93907 - DNA, 120 bp, Artificial Sequence
  ENSG00000089094_89 (sequence is synthesized)
agggaacctctgaggagcctggtggccctgctccacccacgggccgtgctgtcaccagccacaaggtggcgccaggagtctctcccagctctagccattcctgctgggccggggattccc

SEQ ID NO: 93908 - DNA, 120 bp, Artificial Sequence
  ENSG00000089094_90 (sequence is synthesized)
gggtgggaggtcagttgggtgggaacagttcaactgtactcctacttccagcttcttccttgaaagctgcaggcagggctcgcccgtctgtcggtcagacgtggagatggcatttgtggg

SEQ ID NO: 93909 - DNA, 120 bp, Artificial Sequence
  ENSG00000089094_91 (sequence is synthesized)
gaaggcctccctccagcccctcctctggagactgtggactcgtggtggggtggggtgtcgaggagaccaaatcccacgagcccggggagcaagctctgcgtcctttctttttcgtgacag

SEQ ID NO: 93910 - DNA, 120 bp, Artificial Sequence
  ENSG00000089094_92 (sequence is synthesized)
ctcaaacctggcaaagaagataagcttttcaggaaaaaggtaccatcttcccctccctcctgtgccccaggcctgagcggttagagctgcaccgcagctccctgggccacagtcccgtgg

SEQ ID NO: 93911 - DNA, 120 bp, Artificial Sequence
  ENSG00000089094_93 (sequence is synthesized)
gtgagttgccaggctgggggtttctgtgggggtggggtgagcgagctagactgttggatctgcttttaccctcagaccccagctgttccccaaaggacatagggatgagtctctgctgcc

SEQ ID NO: 93912 - DNA, 120 bp, Artificial Sequence
  ENSG00000089094_94 (sequence is synthesized)
atgttctcagtttgcttcaggcacagaggggatctgggaggaggcaggggctcctgtgcacacgtgagactcgctcctggggctccgcgtgcgtctctctgctttcctgttgactcgctc

SEQ ID NO: 93913 - DNA, 120 bp, Artificial Sequence
  ENSG00000089094_95 (sequence is synthesized)
atggggctctgcgtgtgtctcactgctttcttattgactcgctcatggggctctgcgtgcatctcacttcttttctgttgacttgcccctcgttggtttcaagcctccactgccatcggg

SEQ ID NO: 93914 - DNA, 120 bp, Artificial Sequence
  ENSG00000089094_96 (sequence is synthesized)
atcagtgtggttgtgcaaaggcttccaggatggcacctccccctggactgggctggactgcctaggtccgtgcttctcgccaagccatggggatcggagatgctgcgcagcctctgcact

SEQ ID NO: 93915 - DNA, 120 bp, Artificial Sequence
  ENSG00000089094_97 (sequence is synthesized)
ggttggctgatgactactgggtggaatgtgggcatagtgtttctaggtcttttagtttttcaagagaatctgaaaatctaagttttgatgtggagtctgatttttcactgttggaattat

SEQ ID NO: 93916 - DNA, 120 bp, Artificial Sequence
  ENSG00000089094_98 (sequence is synthesized)
gattttgggaggaagcagtttataactaaatgaaatctgagtgttctgtctggctggtgggccttttagagtgtcatgtcagcatgaccaggcctcctcggtcagattgacgggttgccc

SEQ ID NO: 93917 - DNA, 120 bp, Artificial Sequence
  ENSG00000089094_99 (sequence is synthesized)
atattgtcgatgactctggctggaagcaggaggcagatgccagcgttcccagcccaggcagcagcctgggagcaccggctctcatgcttcctgggctgtcgagaggccatcggaggaggg

SEQ ID NO: 93918 - DNA, 120 bp, Artificial Sequence
  ENSG00000089094_100 (sequence is synthesized)
tgcctgcagcgggcggccgcttcccacctccttcccacctcctgtagggtgaacagccgcgactttttgggtagctatggggcctcctgagatgaaggcaccgcagttaagatgaaggat

SEQ ID NO: 93919 - DNA, 120 bp, Artificial Sequence
  ENSG00000089094_101 (sequence is synthesized)
tttggtgatttgttccatgtttttgtttttaaaagggggttgctttacctagctgtgggaactgcgaacagtgccgcctggtggtcacttggaaaactggggggtgctgacacctcgcct

SEQ ID NO: 93920 - DNA, 120 bp, Artificial Sequence
  ENSG00000089094_102 (sequence is synthesized)
ttccctgtggttaggtggattttctgtctctccttccctcactcccttgcttcttcccttccttttcccttttcctttaattgcttcatgggctgtcttctcctcttttgaaaggaactt

SEQ ID NO: 93921 - DNA, 120 bp, Artificial Sequence
  ENSG00000089094_103 (sequence is synthesized)
tttctcagtgtgtaaaactggttgatgctcaacataaaaatgtctaatcggtcgagcgcggtggctcacgccataatctcagcattttgggaagtctaggcgggtggatcacctgaggtc

SEQ ID NO: 93922 - DNA, 76 bp, Artificial Sequence
  ENSG00000089094_104 (sequence is synthesized)
agagactgcaccactgcactccagtctgggctacaaagtgagactctatctcaaaaaataaaataaaataaaataa

SEQ ID NO: 93923 - DNA, 120 bp, Artificial Sequence
  ENSG00000089101_0 (sequence is synthesized)
aggctgcgcgtcctccttgcggcagcgcgtggagtgcggcgtcctggagctgcggatgagtggacttttttctctcttttggggacaggataaaaaatgtcagtactcacttctccaaga

SEQ ID NO: 93924 - DNA, 120 bp, Artificial Sequence
  ENSG00000089101_1 (sequence is synthesized)
ggaaaggtagaagttgttcattgccgaagaacagaatcacaggatgtttattgtatcaaaagccttattagaaaatttacctgcaagctgtttgggaagctaaatatcatctatcttcta

SEQ ID NO: 93925 - DNA, 120 bp, Artificial Sequence
  ENSG00000089101_2 (sequence is synthesized)
gaaaaggccaaccttgctgttaccctctgcaatgacaaggaggagatcatggcccaggccaccttcctggactaccccaactggaatgttgccaagcaggatgactgggtgtcagtgttc

SEQ ID NO: 93926 - DNA, 120 bp, Artificial Sequence
  ENSG00000089101_3 (sequence is synthesized)
cgggagctcgacagtgacatcccatgcacacccctgaatacgttgttcatgcacctctttgtggccgtggatgagtattctgttggctgttgcaaagagattcttcgaaccgtgtataag

SEQ ID NO: 93927 - DNA, 120 bp, Artificial Sequence
  ENSG00000089101_4 (sequence is synthesized)
gcagtgccagagctgcacttcatatttctcatcgtgccatcctacatgagcctaggctcaactctcataactgtttttgaccaagtggggaacatcccgtgtctgacgtatgaggaagac

SEQ ID NO: 93928 - DNA, 120 bp, Artificial Sequence
  ENSG00000089101_5 (sequence is synthesized)
tttgcagtgcatatatgtcacaggcacagccactatcctcagctgcacgttcgcaaagccagggtggaagaccatgacgatctcatgccaatatttatgcgctatgacacaattctgaag

SEQ ID NO: 93929 - DNA, 120 bp, Artificial Sequence
  ENSG00000089101_6 (sequence is synthesized)
gaaacttacggtgaatacttcctggccgaactaatagaggcccaagatgaagagaatcatgctgttgtgtgtgaggtggaaggcacagctgttgggttcatgagtgtgtgctcaagagtg

SEQ ID NO: 93930 - DNA, 120 bp, Artificial Sequence
  ENSG00000089101_7 (sequence is synthesized)
aacatgcaactgctgcatgagtgctttgacttgggccctttccacggactctgtttcccacatcctgatgacgttctggaatcaccacaagacctaagtgtccgaagaagtcaagatgct

SEQ ID NO: 93931 - DNA, 120 bp, Artificial Sequence
  ENSG00000089101_8 (sequence is synthesized)
gagctcaggagtagcagccaaggttcccaaaaaatagtcgaggagttgcaggaacctgtctctccagataccatggaaaacatccagggaaatattgccagagaagctgcatccgaggaa

SEQ ID NO: 93932 - DNA, 120 bp, Artificial Sequence
  ENSG00000089101_9 (sequence is synthesized)
gctttaacagcagtccaaagtggaaatgttagtgaaccggaggacatagaaaaactcagtgacatctccactggatatgcacagtatcaccatgtcagcagtaggagcttggcatcgctc

SEQ ID NO: 93933 - DNA, 120 bp, Artificial Sequence
  ENSG00000089101_10 (sequence is synthesized)
gtactgcctgaagagcccgtccacttccgccccatctacaggggagcctcagctgctttttgtattcagctgttttgtattgatgagaaatatgaagcaaggtcgctggattttatgaat

SEQ ID NO: 93934 - DNA, 120 bp, Artificial Sequence
  ENSG00000089101_11 (sequence is synthesized)
tttgttttcagtcttttttctgataagaacttctgtgtaatttctctgccccatctcacccccgagttcttcctcatccagaacttcgtgaaaatggtccctttcaacacctgcaccctc

SEQ ID NO: 93935 - DNA, 120 bp, Artificial Sequence
  ENSG00000089101_12 (sequence is synthesized)
gagcaggacctctacgtcttccaccgggctggattgctcaagtccattaatataagatttgccactctcttggatactcctggtgtggaaaatcttgtcagcaccctcatgttgaataaa

SEQ ID NO: 93936 - DNA, 120 bp, Artificial Sequence
  ENSG00000089101_13 (sequence is synthesized)
agcatattggaggacttagaccgttacaacaaggctcgcaaagaccctgatggaacactgctgcaggcatttgtagctgaagttgcagaacaaatagttggtattgcagtgatcagaaat

SEQ ID NO: 93937 - DNA, 120 bp, Artificial Sequence
  ENSG00000089101_14 (sequence is synthesized)
gaaatggacattgagtacatacggtcccattacaacattgaagatttcatctacttcagtcaccaccagcgcgaagaacacgggcacatgcatcactttgccctcaaccccattttccgg

SEQ ID NO: 93938 - DNA, 120 bp, Artificial Sequence
  ENSG00000089101_15 (sequence is synthesized)
cactacaccaagttctttctgaaggagatcctgcgtttaggctttaaatcctgtctctactaccgtgtttacccaaaatccagagaaggcaagttccagaacccctacgcccactccctg

SEQ ID NO: 93939 - DNA, 120 bp, Artificial Sequence
  ENSG00000089101_16 (sequence is synthesized)
acatctgcccttcattacttggttcccgtgcgaccacgacgacagattgtctatcctctggaaaagcttggcataaacgctccatcaaaggcggtctccaaggatccgatgagttatgct

SEQ ID NO: 93940 - DNA, 120 bp, Artificial Sequence
  ENSG00000089101_17 (sequence is synthesized)
aaactaacattggaacctaaaattactgtcaatgccaagatcattgtggttggtgcatccagtgttggaatttccttcctagagacattggtattttgctctcacatgaagtttaataat

SEQ ID NO: 93941 - DNA, 120 bp, Artificial Sequence
  ENSG00000089101_18 (sequence is synthesized)
cttaccctgatttcaactcatggactcccaggaaaaaaacttctggacactgaacaaaggaaatttttagccagcgaccactgttttaatgataaagattatgcactgatgtcactgtgc

SEQ ID NO: 93942 - DNA, 120 bp, Artificial Sequence
  ENSG00000089101_19 (sequence is synthesized)
tcctgggttaatgtcgtggtgggtagaatgaccggcatagaccgagcagccaagcacgttgtgctttccacggacgagatcgtgccctacgaccacctcatcctctgcaccgggcagcag

SEQ ID NO: 93943 - DNA, 120 bp, Artificial Sequence
  ENSG00000089101_20 (sequence is synthesized)
taccaggtcccatgccctacagaggctgatattagtcaacacctgacaaacagggaggttcccaacagcagtcagcggcggtacacggggaaagttccttgcaaccatttcactctcaac

SEQ ID NO: 93944 - DNA, 120 bp, Artificial Sequence
  ENSG00000089101_21 (sequence is synthesized)
gaggaagaggattgctttaaggcactgatttggataaggaataactccatcaccacagaagggaatatcattgtctatgggaatacaattgatacttacaccaccgtggagacgctctta

SEQ ID NO: 93945 - DNA, 120 bp, Artificial Sequence
  ENSG00000089101_22 (sequence is synthesized)
aaccttggcgtgagcggcagccgcatccacctcgtgcagcccccgcccgcctccaccatcacctgcatcaacaactactcggtggagagcgccgtggcggacgcgctaggagccgccgga

SEQ ID NO: 93946 - DNA, 120 bp, Artificial Sequence
  ENSG00000089101_23 (sequence is synthesized)
gtcactatgtaccgggatgcgatcctggcccagtggaatgacggcctgcacccagaccccatctacagcgcctccttcaccacacccaccaagcctttcagactccagtgctctatgttc

SEQ ID NO: 93947 - DNA, 120 bp, Artificial Sequence
  ENSG00000089101_24 (sequence is synthesized)
ttcagcttctgtgagaagaatgtggattatgaaacgtttaaagccctcaatgatgcatgtcttgtgtatgacagtcgacttgtgattgataccaacttccacaccaacgacatagccatc

SEQ ID NO: 93948 - DNA, 120 bp, Artificial Sequence
  ENSG00000089101_25 (sequence is synthesized)
agagctgctggctccctcaccaaattctccaatagatactactcaaatgagtggactcacagcaacttcagttccaaagaaattggctttcagctggcagcagctatgctacatctcttt

SEQ ID NO: 93949 - DNA, 120 bp, Artificial Sequence
  ENSG00000089101_26 (sequence is synthesized)
gatccaacccttgagcctgtgaccgagccaccagctaatcttgaccggctcatccccatgtacaagggagccaagattcaagggggcattcttcctgggtcttaccattatctgcatatt

SEQ ID NO: 93950 - DNA, 120 bp, Artificial Sequence
  ENSG00000089101_27 (sequence is synthesized)
gccaagcctgccattccaactcccttggaggtacaaatggcacagcctaattatggtttagaactagtaaccggcagtgcgaaaaatgggacttacttccgaattcatattaacaagtat

SEQ ID NO: 93951 - DNA, 120 bp, Artificial Sequence
  ENSG00000089101_28 (sequence is synthesized)
aaaatggtggaaaccatcacgtgcctttctagggagcccttccccgcctccaactacatccgcttgtttggccagcacgagcaactcctcaacaacctgtgtgctcggtacgatgaaaac

SEQ ID NO: 93952 - DNA, 120 bp, Artificial Sequence
  ENSG00000089101_29 (sequence is synthesized)
ctgatcacagatctctatagctacttcaccgagccgtggtgcctggccctgttccacgatcgttttattgatctcaggaaagagttacgccaaatcttagcctccaaggaggaggaagat

SEQ ID NO: 93953 - DNA, 120 bp, Artificial Sequence
  ENSG00000089101_30 (sequence is synthesized)
cttccttccatagagcagttagcccatcaaatagaagatgaggaaatcaacccgactgagaagcccaggcaatacctcaaaagagtttttgaggaatccatctacaaaaccctggtggag

SEQ ID NO: 93954 - DNA, 120 bp, Artificial Sequence
  ENSG00000089101_31 (sequence is synthesized)
agaagcactcttgactacctgcactataaccgctaccacctgcccatgtacgcgtggccaggcatcgtttagttgtaggcagggtctcccctttatggttttcatttatttagttcctgg

SEQ ID NO: 93955 - DNA, 120 bp, Artificial Sequence
  ENSG00000089101_32 (sequence is synthesized)
aaacgcgctctgtagaaatagaaaagttctctgcagcctggtttgacagcgaagccagcccctggtggttttgttcattcctttccttccctgacttatgcctgtagttttctatcatcc

SEQ ID NO: 93956 - DNA, 120 bp, Artificial Sequence
  ENSG00000089101_33 (sequence is synthesized)
cagtaggtggcacacggccgtgtgcctctcttctggggcaggctcgctttacaaatcccaggcatgttcctgtgcagaataatccatttcagcaataaaatgagatcatagtgtgtaaaa

SEQ ID NO: 93957 - DNA, 120 bp, Artificial Sequence
  ENSG00000089101_34 (sequence is synthesized)
ctaaacaatcaaggaagtgcagtgggctgtgtggttcttcccagccttcatccctccctgggctgtgtcatttgctgtgtgattttgaggttcctccttctaaagatgagttatgcttta

SEQ ID NO: 93958 - DNA, 120 bp, Artificial Sequence
  ENSG00000089101_35 (sequence is synthesized)
tggtgagttgtttcactctattgattgattggtttttaaataataaaaattatcttcctacatctgaagagaacaccatcagagaacagacctgagattgtttggtactccacacaccct

SEQ ID NO: 93959 - DNA, 120 bp, Artificial Sequence
  ENSG00000089101_36 (sequence is synthesized)
gcctatgtggatggatgaatcagtagaagaatattctagatcaggggttagcaaactatagccctgaggccaggcctggcttgccaactgcttttgtaaataaagctttattggaacaca

SEQ ID NO: 93960 - DNA, 120 bp, Artificial Sequence
  ENSG00000089101_37 (sequence is synthesized)
ttagaaaggtgatgtgtgaggcccggcagctgttggtgttacagctattgtgtgggaaacaaaagccattctgttctgttccccagcctgcctttgtatcacggatagaggagctgtttc

SEQ ID NO: 93961 - DNA, 120 bp, Artificial Sequence
  ENSG00000089101_38 (sequence is synthesized)
cacggccagagtggacttttcttccttgtgctcagagctagctcggagcaccgtagccacattgcagcccacagggaagggtggaatgagaaatggaagaggggaagcactttcctctta

SEQ ID NO: 93962 - DNA, 120 bp, Artificial Sequence
  ENSG00000089101_39 (sequence is synthesized)
ggggacatgaatcacctctgttcatattatgtgatcaggaacttggttgcatggccctacttagctgcaagggagcctggaagatatgttgctggtaggttgggcatgtgtccagtaaaa

SEQ ID NO: 93963 - DNA, 120 bp, Artificial Sequence
  ENSG00000089101_40 (sequence is synthesized)
aactcagttgattccttaattaaaaagaagaggaaaaaggatactatgggaacattatatctagtttttatcttgtgtatgtatagaagttctaaaaagttacacaggatttcagtaacc

SEQ ID NO: 93964 - DNA, 120 bp, Artificial Sequence
  ENSG00000089101_41 (sequence is synthesized)
ttatatgcctctgggaaacaggactgggaattgtaggtgaagatggtgactgactttgcattatgtctatctgttatgtttgatttttttgttttaattaataaacttttttttttttga

SEQ ID NO: 93965 - DNA, 120 bp, Artificial Sequence
  ENSG00000089101_42 (sequence is synthesized)
actgatttggataaggaataactccatcaccacagaagatggaggaagagcatcagtgttattctgctgacttgcccagttgtcagggatggtgatgctgtggtgcccccttaaagggaa

SEQ ID NO: 93966 - DNA, 120 bp, Artificial Sequence
  ENSG00000089101_43 (sequence is synthesized)
atgttttttcaagatttaagactgactcccagcagccagtgcataaagccatttggagtgcctgcttttgtccaccaaatagccaggataagaagtatgtggaaattagtttcctgtctt

SEQ ID NO: 93967 - DNA, 120 bp, Artificial Sequence
  ENSG00000089101_44 (sequence is synthesized)
agctgcggatgaggtgggtaacgccgtgctgactagcagcgacgcaaggactgcggtgcagggcgtccagggcgcatccccaggtcagcctccggaactgggatgaccaggcgaggacga

SEQ ID NO: 93968 - DNA, 120 bp, Artificial Sequence
  ENSG00000089101_45 (sequence is synthesized)
gcgtggagtgcggcgtcctggagctgcggatgaggtgggtaacgccgtgctgactagcagcgacgcaaggactgcggtgcagggcgtccagggcgcatccccaggataaaaaatgtcagt

SEQ ID NO: 93969 - DNA, 120 bp, Artificial Sequence
  ENSG00000089101_46 (sequence is synthesized)
ccctcagagttctggcatcttccttctgtggcctctcgagaacagaagagatcattagagggtcctcgtgttgcctagcaacctgtgaatgctgtttgctatcatgttattaatatggta

SEQ ID NO: 93970 - DNA, 120 bp, Artificial Sequence
  ENSG00000089101_47 (sequence is synthesized)
cagtggccaatgatttcatcaaccatgcctacacgatgaagcctccataaaaccctaaccaaagcggttaggagaacttctgggtgagaagtcatttctccagtttgtggctgaccctgt

SEQ ID NO: 93971 - DNA, 120 bp, Artificial Sequence
  ENSG00000089101_48 (sequence is synthesized)
attgagaatgatacctggagtgccagctagctgacacatgtcagataggattcgagtagaatgttgcagaaacccggaggccatttctgaacactttacactactcaaggtggcaaagga

SEQ ID NO: 93972 - DNA, 120 bp, Artificial Sequence
  ENSG00000089101_49 (sequence is synthesized)
gagacatggagccatttgaggtcagaagacttcatcatacctggcgatggatatgtttttaattaaaacctgggcacaaaattgggttgactgtgaatcattgtgatgcctgatcactct

SEQ ID NO: 93973 - DNA, 120 bp, Artificial Sequence
  ENSG00000089101_50 (sequence is synthesized)
atggatgacagtgactgaaagcagcccagctggtgtccccgcgaccctccgtgtgactagagagaaacactgattcataggaagcaccggtgggcactggaaagcccgggttccccttgt

SEQ ID NO: 93974 - DNA, 120 bp, Artificial Sequence
  ENSG00000089101_51 (sequence is synthesized)
ggcttaagagagagcctcttcagaactccaagatttggatgtttttctatttttcccagaagaattcgtgttgaggtggaaggcacagctgttgggttcatgagtgtgtgctcaagagtg

SEQ ID NO: 93975 - DNA, 120 bp, Artificial Sequence
  ENSG00000089101_52 (sequence is synthesized)
taatatcaaatttgcaccttgctgctcagtttctgggcctttatgggaacacaacaataagcattcatttcaatgccaaatcatgctgtaatctttttgaagacattgtcagaagcactt

SEQ ID NO: 93976 - DNA, 120 bp, Artificial Sequence
  ENSG00000089101_53 (sequence is synthesized)
aaactcaacacatattgtgcgtataatgcacatgactctcttgaagtgatgacaatgaacagccatggccaagcacccatgcacaggtcagaagacttcatcatacctggcgatggatat

SEQ ID NO: 93977 - DNA, 120 bp, Artificial Sequence
  ENSG00000089101_54 (sequence is synthesized)
gggagccttcagggaaacctgacctggccaagttcatttaactctgtgtagaggcccttttcaagtaaattctcaagtaaaaaaagttaagaaaaaatgttaacatcttgccttaaaaaa

SEQ ID NO: 93978 - DNA, 120 bp, Artificial Sequence
  ENSG00000089116_0 (sequence is synthesized)
agacaaagatgaggatccggaccgcttgaaagtgggggaaagtgccggcgcctccgccaccggggaaagccgctccgcagcgccgaggccagcagccacccgagatacctggggaagccc

SEQ ID NO: 93979 - DNA, 120 bp, Artificial Sequence
  ENSG00000089116_1 (sequence is synthesized)
ggaacaggcgccggggcgtgcggcccgtggcatgaggttgtgaacgccacccgccccccaccaccccactccgggcagcccagcgccaggccagagattgcccaaggactggaccggctg

SEQ ID NO: 93980 - DNA, 120 bp, Artificial Sequence
  ENSG00000089116_2 (sequence is synthesized)
agtcttggtccggaccagactcgccctgcagctgctgagacaagaggcgaagggcagcggagggcccggcaggcccgagggccaggggcccaaagggagggcaaggcggccgaagccgcc

SEQ ID NO: 93981 - DNA, 120 bp, Artificial Sequence
  ENSG00000089116_3 (sequence is synthesized)
ggggcgcggggctatgatggtgcactgcgccggttgcgagcggcccatcctcgaccgctttctgctgaacgtgctggaccgcgcgtggcacatcaaatgtgttcagtgctgcgagtgcaa

SEQ ID NO: 93982 - DNA, 120 bp, Artificial Sequence
  ENSG00000089116_4 (sequence is synthesized)
aaccaacctctcggagaagtgcttctcgcgcgagggcaagctctactgcaaaaatgactttttcaggcgctttggcacgaaatgcgccggctgcgcgcaaggcatctcgcccagcgacct

SEQ ID NO: 93983 - DNA, 120 bp, Artificial Sequence
  ENSG00000089116_5 (sequence is synthesized)
ggtgcgcaaggcccggagcaaagtctttcacctcaactgtttcacctgcatggtgtgtaacaagcagctgtccaccggcgaggagctctacgtcatcgacgagaacaagttcgtgtgcaa

SEQ ID NO: 93984 - DNA, 120 bp, Artificial Sequence
  ENSG00000089116_6 (sequence is synthesized)
agacgactacctgagctcatccagcctcaaggagggcagcctcaactcagtgtcatcctgtacggaccgcagtttgtccccggacctccaggacgcactgcaggacgaccccaaagagac

SEQ ID NO: 93985 - DNA, 120 bp, Artificial Sequence
  ENSG00000089116_7 (sequence is synthesized)
ggacaactcgacctcgtcggacaaggagacggccaacaacgagaacgaggagcagaactcgggcaccaagcggcgcggcccccgcaccaccatcaaggccaagcagctggagacgctcaa

SEQ ID NO: 93986 - DNA, 120 bp, Artificial Sequence
  ENSG00000089116_8 (sequence is synthesized)
ggctgccttcgccgccacgcccaagcccacgcgccacatccgcgagcagctggcgcaggagaccggcctcaacatgcgcgtcatccaggtgtggtttcagaaccgacggtccaaagaacg

SEQ ID NO: 93987 - DNA, 120 bp, Artificial Sequence
  ENSG00000089116_9 (sequence is synthesized)
ccggatgaaacagctgagcgccctaggcgcccggaggcacgccttcttccggagtccgcggcgcatgcgtccgctgggcggccgcttggacgagtctgagatgttggggtccaccccgta

SEQ ID NO: 93988 - DNA, 120 bp, Artificial Sequence
  ENSG00000089116_10 (sequence is synthesized)
cacctactacggagactaccaaggcgactactacgcgccgggaagcaactacgacttcttcgcgcacggcccgccttcgcaggcgcagtccccggccgactccagcttcctggcggcctc

SEQ ID NO: 93989 - DNA, 120 bp, Artificial Sequence
  ENSG00000089116_11 (sequence is synthesized)
cacaccgagccccgagccaggcctgccgggcacgctgcaccccatgcccggcgaggtattcagcggcgggcccagcccgcccttcccaatgagcggcaccagcggctacagcggacccct

SEQ ID NO: 93990 - DNA, 120 bp, Artificial Sequence
  ENSG00000089116_12 (sequence is synthesized)
gtcgcatcccaaccccgagctcaacgaagccgccgtgtggtaaggccgccgggccgccccccgcgctcggcccccgggggccccgccccgaagcagcctcctgaaaccaaaacgcccgac

SEQ ID NO: 93991 - DNA, 120 bp, Artificial Sequence
  ENSG00000089116_13 (sequence is synthesized)
gcagacgcggtgggagacgtgggtgtccctcgggggttctctctcgggtccgcactcaactggcagctgctcctcggctgggcgccgagggggggccgacccccatctccaccccgcggg

SEQ ID NO: 93992 - DNA, 120 bp, Artificial Sequence
  ENSG00000089116_14 (sequence is synthesized)
ctctccaggagcctcagcccaccgccagtactctcccagcaaccgcgagcaatttcttgggaccaaagtcaatactccggagggtcaagagatttcgagcacgctctagactttccccgg

SEQ ID NO: 93993 - DNA, 120 bp, Artificial Sequence
  ENSG00000089116_15 (sequence is synthesized)
gcccccacccacccacccagccaccgccacctctttggactgagagagggtgaggccaaggggcggagacggtgtttttccctctctctgcaatccgagtggcattttgtaatcttattt

SEQ ID NO: 93994 - DNA, 120 bp, Artificial Sequence
  ENSG00000089116_16 (sequence is synthesized)
ctcgctgtgctttccccgtctttaaaaaaaaagatgataagaaaaggagagagattgaaagagagggagaggaaagggggcaagatgaggaggagatggagagacagcgtcagccagagg

SEQ ID NO: 93995 - DNA, 120 bp, Artificial Sequence
  ENSG00000089116_17 (sequence is synthesized)
gagaagacggagagcgagcgaggaactcgcgtgaaccgggagccaccgagagggagaccgagccacctgcacgctggcgctccctggtggccaatcttgaggctcaaggtcagcttctct

SEQ ID NO: 93996 - DNA, 120 bp, Artificial Sequence
  ENSG00000089116_18 (sequence is synthesized)
aggaatagggctgtgggtcaggaagtggccagccgggtccagctcccgctcttccttactttgacgtttatgttgagcccgagggagcaggccggactcgaacacgcacacatcctgctc

SEQ ID NO: 93997 - DNA, 120 bp, Artificial Sequence
  ENSG00000089116_19 (sequence is synthesized)
tccccctgggtggggcgccaggattgctgggctcagacccacagaccaccctccctgcccagggcctggaggctgggccgtcaggatgtacaatattatacttttttggaagttgaacgc

SEQ ID NO: 93998 - DNA, 120 bp, Artificial Sequence
  ENSG00000089116_20 (sequence is synthesized)
ttctagtttccttattttgtataaagaagaaacaaataaagtatgtttttgtgtttactgtttatttattgtactctagttatccggggttggacatttttatatttttaagaggaggta

SEQ ID NO: 93999 - DNA, 84 bp, Artificial Sequence
  ENSG00000089116_21 (sequence is synthesized)
tatccggggttggacatttttatatttttaagaggaggtagggcagagtgacggaggggaagcagaaagaggtttacctttttt

SEQ ID NO: 94000 - DNA, 120 bp, Artificial Sequence
  ENSG00000089116_22 (sequence is synthesized)
ggggagcgaagtgtggggcgtggggcaacttctgcaagttccagggatggcgaagggggcaggggtacctcccggactaggccttggaacccgtgacccccaaatatttgtgaggagaaa

SEQ ID NO: 94001 - DNA, 120 bp, Artificial Sequence
  ENSG00000089116_23 (sequence is synthesized)
gagagaggaagagagacgcaattttcgtttcgcgctgcccccgccccgtcagccccaaactggaagcaacgctgtagccaatttagatatgctataaatttaagaggttgccatggccac

SEQ ID NO: 94002 - DNA, 120 bp, Artificial Sequence
  ENSG00000089123_0 (sequence is synthesized)
gactacttccggtgcagtgaaggctcggggctgaagcggggtaattcctctcctgcaattacttttggatggaagtatgcccctttctcagtagaagatggtaatcttggagaatgacca

SEQ ID NO: 94003 - DNA, 120 bp, Artificial Sequence
  ENSG00000089123_1 (sequence is synthesized)
tggagaaggggatgagttctggagaagggctgccttccagatcatctcaggtttcggctggtaaaataacagccaaagagttggaaacaaagcagtcctataaagagaaacgaggaggct

SEQ ID NO: 94004 - DNA, 120 bp, Artificial Sequence
  ENSG00000089123_2 (sequence is synthesized)
ttgtgttggtgcatgcaggtgcaggttatcattctgaatccaaagccaaggagtataaacatgtatgcaaacgagcttgtcagaaggcaattgaaaagctgcaggccggtgctcttgcaa

SEQ ID NO: 94005 - DNA, 120 bp, Artificial Sequence
  ENSG00000089123_3 (sequence is synthesized)
ctgacgcagtcactgcagcactggtggaacttgaggattctccttttacaaatgcaggaatgggatctaatctaaatctgttaggtgaaattgagtgtgatgccagcataatggatggaa

SEQ ID NO: 94006 - DNA, 120 bp, Artificial Sequence
  ENSG00000089123_4 (sequence is synthesized)
aatccttaaattttggagcagttggagcactgagtggaatcaagaacccagtctcggttgccaacagactcttatgtgaagggcagaagggcaagctctcggctggcagaattcctccct

SEQ ID NO: 94007 - DNA, 120 bp, Artificial Sequence
  ENSG00000089123_5 (sequence is synthesized)
gctttttagttggagaaggagcctacagatgggcagtagatcatggaataccctcttgccctcctaacatcatgaccacaagattcagtttagctgcatttaaaagaaacaagaggaaac

SEQ ID NO: 94008 - DNA, 120 bp, Artificial Sequence
  ENSG00000089123_6 (sequence is synthesized)
tagagctggcagaaagggtggacacagattttatgcaactaaagaaaagaagacaatcaagtgagaaggaaaatgactcaggcactttggacacggtaggcgctgtggttgtggaccacg

SEQ ID NO: 94009 - DNA, 120 bp, Artificial Sequence
  ENSG00000089123_7 (sequence is synthesized)
aagggaatgttgctgctgctgtctccagtggaggcttggccttgaaacatccggggagagttgggcaggctgctctttatggatgtggctgctgggctgaaaatactggagctcataacc

SEQ ID NO: 94010 - DNA, 120 bp, Artificial Sequence
  ENSG00000089123_8 (sequence is synthesized)
cctactccacagctgtgagtacctcaggatgtggagagcatcttgtgcgcaccatactggctagagaatgttcacatgctttacaagctgaggatgctcaccaagccctgttggagacta

SEQ ID NO: 94011 - DNA, 120 bp, Artificial Sequence
  ENSG00000089123_9 (sequence is synthesized)
attgtcctccgttcatgcagatgttctgccgagcctgactcctcccaaaataagcagacacttctagtggaatttctgtggagccacacgacggagagcatgtgtgtcggatatatgtca

SEQ ID NO: 94012 - DNA, 120 bp, Artificial Sequence
  ENSG00000089123_10 (sequence is synthesized)
gcccaggatgggaaagccaagactcacatttcaagacttcctcctggtgcggtggcaggacagtctgtggcaatcgaaggtggggtgtgccgcctggagagcccagtgaactgacccttc

SEQ ID NO: 94013 - DNA, 120 bp, Artificial Sequence
  ENSG00000089123_11 (sequence is synthesized)
aggctgagtgtgaagcgtctcagaggcatttcagaacctgagcttttgggggtttttaactgaagttggttgttttatctttcttgttttataattcctattgcaacctcgtgcactgct

SEQ ID NO: 94014 - DNA, 120 bp, Artificial Sequence
  ENSG00000089123_12 (sequence is synthesized)
cgagacacaagtgctgctgtagttagcgcttagtgacacgcgggcctttggtgggtgagcgggactgtgtgtgagtgtgtgcgcgtatgtgcgcacatatgtgtatgtgtggagtatgtg

SEQ ID NO: 94015 - DNA, 120 bp, Artificial Sequence
  ENSG00000089123_13 (sequence is synthesized)
tgtttgcttctccgtggatgaaatagaaactcctcattgtgtgaccaggaatggttaaatcatctttacaaaatgtgtgctttaactgtttacaagtaaaacctaaagttgcaggaaaca

SEQ ID NO: 94016 - DNA, 120 bp, Artificial Sequence
  ENSG00000089123_14 (sequence is synthesized)
ttttttatttcgtaaagaggtaccaactgtcgctgatgtgatatgtcagaactgaagagtaaatctacttgtttaaatgacttgacagtggtagtgctccatttaataacagtaataagt

SEQ ID NO: 94017 - DNA, 120 bp, Artificial Sequence
  ENSG00000089123_15 (sequence is synthesized)
aataaagtgtttttatttgttaaccagtttaagtggatcctgtggtaacttaaactgttgttctcatcccttatatggggcatttttctttaacaaagaatggtttcagtgaaacaatct

SEQ ID NO: 94018 - DNA, 120 bp, Artificial Sequence
  ENSG00000089123_16 (sequence is synthesized)
agcagagaattaatgtcagaacctttttaaataatagtctgattgatacagtttgtacttatttcatcaagcttttctaagcttaaatattgcatagcttcgagctgtatggactatatt

SEQ ID NO: 94019 - DNA, 120 bp, Artificial Sequence
  ENSG00000089123_17 (sequence is synthesized)
atgaaagaatatgtaaagagaacatacagtaatgcacagtccttaatttgtgtataatggaaagttatttacaatataacactgtaaataagaaagcaaagtttatgggaaaattcaata

SEQ ID NO: 94020 - DNA, 120 bp, Artificial Sequence
  ENSG00000089123_18 (sequence is synthesized)
ttatctttgtttttgtttaaatatatttttaagataaaggcacaaaaataaaagaagcgtattactgggtatagtatgtgactcctcttctcagactaataaattatcttttgaatcctt

SEQ ID NO: 94021 - DNA, 120 bp, Artificial Sequence
  ENSG00000089123_19 (sequence is synthesized)
cagtcactgcagcactggtggaacttgagctcatgtggaaaggacaatttcaggtactgtgtgtgctaactaacctcttcctggacatcataaagaatccaactaaaacaaagtttaaaa

SEQ ID NO: 94022 - DNA, 120 bp, Artificial Sequence
  ENSG00000089123_20 (sequence is synthesized)
ctatttcaaatgtgaaagtttattgaagccaatattctattttagagatttgtgttatgtttttgacaagtaactgtactgtaattatgtggctttcaattaaaaaatgtgaaaactgtt

SEQ ID NO: 94023 - DNA, 120 bp, Artificial Sequence
  ENSG00000089123_21 (sequence is synthesized)
tctgaacaagggaaatgtatcctgaagagctgtacgcagatgggaggcaacttgtttgcttgttctgctgctagagcattgatttaattagaagacaggctgtgggtggccatgtgcaga

SEQ ID NO: 94024 - DNA, 120 bp, Artificial Sequence
  ENSG00000089123_22 (sequence is synthesized)
caaagaagcaccagacagagcccatttagcctgggacagtaaaatgtttatagttttaacccctacatgtaggtgtatggtccttttcaaaaacaatttttcctgaattctagtgtgagg

SEQ ID NO: 94025 - DNA, 120 bp, Artificial Sequence
  ENSG00000089127_0 (sequence is synthesized)
ccagagcagagttcagagaaaggctgggctgcttgttgctggctaaaggacaaagggtaagtttcaggaagcagaagagtgagcagatgaaattcagcactgggatcaggggagtgtctg

SEQ ID NO: 94026 - DNA, 120 bp, Artificial Sequence
  ENSG00000089127_1 (sequence is synthesized)
atttgcaaaaggaaagtgcaaagacagctcctcccttctgaggaaacgaaaccaacagcagtccaagctcagtcagcagaagagataaaagcaaacaggtctgggaggcagttctgttgc

SEQ ID NO: 94027 - DNA, 120 bp, Artificial Sequence
  ENSG00000089127_2 (sequence is synthesized)
cactctctctcctgtcaatgatggatctcagaaataccccagccaaatctctggacaagttcattgaagactatctcttgccagacacgtgtttccgcatgcaaatcaaccatgccattg

SEQ ID NO: 94028 - DNA, 120 bp, Artificial Sequence
  ENSG00000089127_3 (sequence is synthesized)
acatcatctgtgggttcctgaaggaaaggtgcttccgaggtagctcctaccctgtgtgtgtgtccaaggtggtaaagggtggctcctcaggcaagggcaccaccctcagaggccgatctg

SEQ ID NO: 94029 - DNA, 120 bp, Artificial Sequence
  ENSG00000089127_4 (sequence is synthesized)
acgctgacctggttgtcttcctcagtcctctcaccacttttcaggatcagttaaatcgccggggagagttcatccaggaaattaggagacagctggaagcctgtcaaagagagagagcat

SEQ ID NO: 94030 - DNA, 120 bp, Artificial Sequence
  ENSG00000089127_5 (sequence is synthesized)
tttccgtgaagtttgaggtccaggctccacgctggggcaacccccgtgcgctcagcttcgtactgagttcgctccagctcggggagggggtggagttcgatgtgctgcctgcctttgatg

SEQ ID NO: 94031 - DNA, 120 bp, Artificial Sequence
  ENSG00000089127_6 (sequence is synthesized)
ccctgggtcagttgactggcggctataaacctaacccccaaatctatgtcaagctcatcgaggagtgcaccgacctgcagaaagagggcgagttctccacctgcttcacagaactacaga

SEQ ID NO: 94032 - DNA, 120 bp, Artificial Sequence
  ENSG00000089127_7 (sequence is synthesized)
cttcctgaagcagcgccccaccaagctcaagagcctcatccgcctagtcaagcactggtaccaaaattgtaagaagaagcttgggaagctgccacctcagtatgccctggagctcctgac

SEQ ID NO: 94033 - DNA, 120 bp, Artificial Sequence
  ENSG00000089127_8 (sequence is synthesized)
ggtctatgcttgggagcgagggagcatgaaaacacatttcaacacagcccagggatttcggacggtcttggaattagtcataaactaccagcaactctgcatctactggacaaagtatta

SEQ ID NO: 94034 - DNA, 120 bp, Artificial Sequence
  ENSG00000089127_9 (sequence is synthesized)
tgactttaaaaaccccattattgaaaagtacctgagaaggcagctcacgaaacccaggcctgtgatcctggacccggcggaccctacaggaaacttgggtggtggagacccaaagggttg

SEQ ID NO: 94035 - DNA, 120 bp, Artificial Sequence
  ENSG00000089127_10 (sequence is synthesized)
gaggcagctggcacaagaggctgaggcctggctgaattacccatgctttaagaattgggatgggtccccagtgagctcctggattctgctgacccagcacactccaggcagcatccaccc

SEQ ID NO: 94036 - DNA, 120 bp, Artificial Sequence
  ENSG00000089127_11 (sequence is synthesized)
cacaggcagaagaggactggacctgcaccatcctctgaatgccagtgcatcttgggggaaagggctccagtgttatctggaccagttccttcattttcaggtgggactcttgatccagag

SEQ ID NO: 94037 - DNA, 120 bp, Artificial Sequence
  ENSG00000089127_12 (sequence is synthesized)
aggacaaagctcctcagtgagctggtgtataatccaggacagaacccaggtctcctgactcctggccttctatgccctctatcctatcatagataacattctccacagcctcacttcatt

SEQ ID NO: 94038 - DNA, 120 bp, Artificial Sequence
  ENSG00000089127_13 (sequence is synthesized)
ccacctattctctgaaaatattccctgagagagaacagagagatttagataagagaatgaaattccagccttgactttcttctgtgcacctgatgggagggtaatgtctaatgtattatc

SEQ ID NO: 94039 - DNA, 120 bp, Artificial Sequence
  ENSG00000089127_14 (sequence is synthesized)
ctccatgaagcttgagacatatagctggagaccattctttccaaagaacttacctcttgccaaaggccatttatattcatatagtgacaggctgtgctccatattttacagtcattttgg

SEQ ID NO: 94040 - DNA, 120 bp, Artificial Sequence
  ENSG00000089127_15 (sequence is synthesized)
tcacaatcgagggtttctggaattttcacatcccttgtccagaattcattcccctaagagtaataataaataatctctaacaccatttattgactgtctgcttcgggctcaggttctgtc

SEQ ID NO: 94041 - DNA, 120 bp, Artificial Sequence
  ENSG00000089127_16 (sequence is synthesized)
ctaagccctttaatatgcactctctcattaaatagtcacaacaatcccatgaggcatttttaaaaattttttattattttagattcagagggcacatgtgccatttgttacacagctata

SEQ ID NO: 94042 - DNA, 120 bp, Artificial Sequence
  ENSG00000089127_17 (sequence is synthesized)
ttgtgtaatggtggggtttgggcctctattgatcctgtcgcccaaatagtgaacagagtacccaaaaagaattttttcaacctttgcctttctcccttcctcctccctgttggagtccct

SEQ ID NO: 94043 - DNA, 120 bp, Artificial Sequence
  ENSG00000089127_18 (sequence is synthesized)
agtgtctattgttcccatctttagcagatgttaagtatttgattttctgtttctgggttaattcacttcggataatggcctccagctgcaaccatgatttcattctttcttatggctgca

SEQ ID NO: 94044 - DNA, 120 bp, Artificial Sequence
  ENSG00000089127_19 (sequence is synthesized)
taatactccatggtgtagatataccacactttctttatccagttcacactgatgggcacttaagttgattccatgactttgctattgtgaatcgtactgcgataaacatacgagtgccgg

SEQ ID NO: 94045 - DNA, 120 bp, Artificial Sequence
  ENSG00000089127_20 (sequence is synthesized)
acactggttggcagaaggaactataccaataattagtgaacatgcggtgaatttgcaacagacaagaggagcctcattatcctatagtttccaggttgcttagggaggcagaaatcacag

SEQ ID NO: 94046 - DNA, 120 bp, Artificial Sequence
  ENSG00000089127_21 (sequence is synthesized)
taataaacagacgtctcataaaattaattgcaacccaacctctctctctacttaaaattagcatctatttccagctctgctttcaatgccccatatgaatacatgtgaactccctccctc

SEQ ID NO: 94047 - DNA, 120 bp, Artificial Sequence
  ENSG00000089127_22 (sequence is synthesized)
tcttcctccctgtctccttctctctctctctgtccctcattaaaaaataaaatttaagaaaaaaatacaaggtagatttacacaaatagtgggatctcagtcttgagttagctgtgtatg

SEQ ID NO: 94048 - DNA, 85 bp, Artificial Sequence
  ENSG00000089127_23 (sequence is synthesized)
cacaaatagtgggatctcagtcttgagttagctgtgtatgactgaaaaggatgctgtggttaataattatcataaaaacaatgac

SEQ ID NO: 94049 - DNA, 86 bp, Artificial Sequence
  ENSG00000089127_24 (sequence is synthesized)
atggccagcccctgtaatcccagctaatcaggagtctgaggcaggcgaatcacttgaacctgggggctggtggttgcagtgagccg

SEQ ID NO: 94050 - DNA, 66 bp, Artificial Sequence
  ENSG00000089127_25 (sequence is synthesized)
agcccctgtaatcccagctaatcaggagtctgaggcaggcgaatcacttgaacctgggggctggtg

SEQ ID NO: 94051 - DNA, 120 bp, Artificial Sequence
  ENSG00000089127_26 (sequence is synthesized)
ccccacagtaacacaaaagtaataaaactgctgctatttactcagtgcttatctgatgccagccactttgctaagcctatgaatgcattatttccccgttgctacagatgagagaattga

SEQ ID NO: 94052 - DNA, 120 bp, Artificial Sequence
  ENSG00000089127_27 (sequence is synthesized)
ggttcagacaggttgaaatcattgctcccaaagtcacacaactggtgagtggcagagctgggatgcaaaccctaaactgccagccctcaaagcctgtgctcttaatctccaccctgctgt

SEQ ID NO: 94053 - DNA, 120 bp, Artificial Sequence
  ENSG00000089127_28 (sequence is synthesized)
gcttccttgtccatttaattaagctccacaggcacacattccacgccctcctttgctgtacaatcccaggcaagtcgctcagcttctctgagcctcagtttcataatctgtcaaatggag

SEQ ID NO: 94054 - DNA, 120 bp, Artificial Sequence
  ENSG00000089127_29 (sequence is synthesized)
gtaacacaaataattcctagttgtgaccaagaatcatcatagaaatctgccatttccagcctattgtgcaattcctcaagcactgtgactccaagtggcatcagctcctggaagaacaca

SEQ ID NO: 94055 - DNA, 120 bp, Artificial Sequence
  ENSG00000089127_30 (sequence is synthesized)
ctgtcttactgttgtttcctcctttgtcaactgatccccccttgaacctcactctacctctgctctcaatgccccatctactgccacctgattaaataaaatcttttttgaaaatcataa

SEQ ID NO: 94056 - DNA, 120 bp, Artificial Sequence
  ENSG00000089127_31 (sequence is synthesized)
tgccccaacagggcatctctctaaagcagggtgggaggagatcttaggatctgtcccggggcaagaatgaatacggtcatgatctatcacaggagagacattaaacagcaaattggcata

SEQ ID NO: 94057 - DNA, 120 bp, Artificial Sequence
  ENSG00000089127_32 (sequence is synthesized)
atccccacctctcatctgaccaatgggagactctgagcagctgagtgacttgggttgtcacacagctaaacaggggcaaaggacccagtcttggatctttccacctccaagcaggaatct

SEQ ID NO: 94058 - DNA, 120 bp, Artificial Sequence
  ENSG00000089127_33 (sequence is synthesized)
gtctgattccaggggattgatgatgttgcagatggctaggaagcagactccaggatggaatttagtatgcaggatgttctgggggagagccactggaaccagcactcagggaaagggggg

SEQ ID NO: 94059 - DNA, 120 bp, Artificial Sequence
  ENSG00000089127_34 (sequence is synthesized)
aagaaaggataggaaggaagcatgaaagagaatagggagaagtgaacagggatgcagagcgaatgccagtttcagccaactccaaggacagccctggagctggaatggcctttagagctg

SEQ ID NO: 94060 - DNA, 120 bp, Artificial Sequence
  ENSG00000089127_35 (sequence is synthesized)
ccccatggtgacagaggtggccaggcttctatacccctacgtggatcactcactgtgcttgggcaccttgggaaagggcatggctttgagcaaaaggctctctgcagctgaggcaacccc

SEQ ID NO: 94061 - DNA, 120 bp, Artificial Sequence
  ENSG00000089127_36 (sequence is synthesized)
agaaggcagctcacgaaacccaggtatgctatccccacatggcttagctcccctatgtaaatgaacacctggatacaggtacagtgccttggaaatggaggaggtgggagggctccccac

SEQ ID NO: 94062 - DNA, 120 bp, Artificial Sequence
  ENSG00000089127_37 (sequence is synthesized)
ttagtgagaatctcctgttgcccatcattgtactgggcattttactactgccatctgttttaaacacctacctccaaccctgtgaggcaggcactatgccaattattttacaggtgagta

SEQ ID NO: 94063 - DNA, 120 bp, Artificial Sequence
  ENSG00000089154_0 (sequence is synthesized)
ggagtcagccccggcaggatggcggcggacacgcaggtttccgagacactaaagcgttttgcagggaaggtgacaacagccagtgtaaaggaacggagagaaatcctcagtgaacttggg

SEQ ID NO: 94064 - DNA, 120 bp, Artificial Sequence
  ENSG00000089154_1 (sequence is synthesized)
aagtgtgttgctggaaaagatcttccagagggagcagtgaaggggctctgcaaattgttctgcttgactctgcatcgatatagagatgcagcctcccgcagggccttgcaggcagccatc

SEQ ID NO: 94065 - DNA, 120 bp, Artificial Sequence
  ENSG00000089154_2 (sequence is synthesized)
cagcagttggctgaggcccagccagaagccactgctaagaaccttctacactctctgcagtcttctggtataggctccaaagcaggtgttcccagtaagagcagtggctctgccgccttg

SEQ ID NO: 94066 - DNA, 120 bp, Artificial Sequence
  ENSG00000089154_3 (sequence is synthesized)
ctggccttgacctggacctgcctcctggtgcgcattgtctttccatcgagagccaagcgacaaggagacatctggaacaaactggtggaagtgcagtgcctgctcttgctggaggtgctg

SEQ ID NO: 94067 - DNA, 120 bp, Artificial Sequence
  ENSG00000089154_4 (sequence is synthesized)
ggtggctcccacaagcacgccgtggatggtgctgtgaagaaactcacgaagctgtggaaagagaaccccgggctggtggaacagtacttgtcagccattctcagcctagagcccaaccag

SEQ ID NO: 94068 - DNA, 120 bp, Artificial Sequence
  ENSG00000089154_5 (sequence is synthesized)
aactatgctggcatgctggggctgctggtgcagttctgcacgagtcacaaggagatggacgtggtcagtcagcacaagagcgccctactggacttttacatgaagaacatcctgatgagc

SEQ ID NO: 94069 - DNA, 120 bp, Artificial Sequence
  ENSG00000089154_6 (sequence is synthesized)
aaagtcaagcctccgaagtacctgttggatagctgtgcccctctgctccgatacctgtcccactcagaatttaaggatctgatactgcccaccatacagaagtccttactgaggagtcca

SEQ ID NO: 94070 - DNA, 120 bp, Artificial Sequence
  ENSG00000089154_7 (sequence is synthesized)
gagaatgttattgaaactatttctagtctgctggcatcagtgacgcttgacctcagccagtatgccatggacatcgtgaaaggactggctggtcacctgaaatccaacagtccccgcctg

SEQ ID NO: 94071 - DNA, 120 bp, Artificial Sequence
  ENSG00000089154_8 (sequence is synthesized)
atggatgaagctgtgctggcactgcggaacctggcacgccagtgcagtgactcttcggccatggaatccctgaccaagcacctatttgctatcctcggaggctcggaaggaaaactaact

SEQ ID NO: 94072 - DNA, 120 bp, Artificial Sequence
  ENSG00000089154_9 (sequence is synthesized)
gttgtagcccagaagatgagcgtcctctcagggattgggagcgtcagtcatcacgtggtgtctggaccttccagtcaggtcctgaatgggatcgtggctgagctgttcatcccgttcctt

SEQ ID NO: 94073 - DNA, 120 bp, Artificial Sequence
  ENSG00000089154_10 (sequence is synthesized)
cagcaggaagttcatgaagggaccttggtacacgctgtctcagtcctggctctctggtgtaaccgattcactatggaagtgcccaagaagctcactgaatggttcaaaaaagctttcagc

SEQ ID NO: 94074 - DNA, 120 bp, Artificial Sequence
  ENSG00000089154_11 (sequence is synthesized)
cttaaaacctccacatctgcggtgaggcatgcctacctgcagtgcatgttggcctcttaccggggtgacacgctgttgcaggccctggacttactgcccttgctcatccagacagtggag

SEQ ID NO: 94075 - DNA, 120 bp, Artificial Sequence
  ENSG00000089154_12 (sequence is synthesized)
aaggcagcctcccaaagcactcaggttcccaccatcactgaaggggttgccgcagccttgttgctcttaaagttgtcagtggctgactcacaggctgaggccaaactgagcagtttctgg

SEQ ID NO: 94076 - DNA, 120 bp, Artificial Sequence
  ENSG00000089154_13 (sequence is synthesized)
cagttgattgtggatgagaaaaagcaggttttcacttctgagaaattcctggtcatggcttcagaggatgccctgtgtactgtgttgcatctgacagagagacttttccttgaccacccg

SEQ ID NO: 94077 - DNA, 120 bp, Artificial Sequence
  ENSG00000089154_14 (sequence is synthesized)
catagactcactggcaacaaagttcagcagtaccaccgggctctggtggcggtgctcctgagccgcacctggcacgtccgcaggcaggctcagcagacagttcggaagctgctgtcctct

SEQ ID NO: 94078 - DNA, 120 bp, Artificial Sequence
  ENSG00000089154_15 (sequence is synthesized)
cttgggggctttaagctggcgcacggactcttggaggagctgaagactgtcctcagttctcacaaggtgctgcccttagaggctttggtgactgatgctggagaggtgactgaggcaggc

SEQ ID NO: 94079 - DNA, 120 bp, Artificial Sequence
  ENSG00000089154_16 (sequence is synthesized)
aaggcctacgtgcctccacgggtcctgcaggaggctctgtgtgtcatctccggtgtgccagggctcaagggtgatgtcaccgacactgaacaactggcccaggaaatgctgatcatctcc

SEQ ID NO: 94080 - DNA, 120 bp, Artificial Sequence
  ENSG00000089154_17 (sequence is synthesized)
caccacccatccttagttgccgtgcagtctggactttggccagcacttcttgccaggatgaagatcgatcctgaagcctttatcaccaggcacctggatcagatcattcccaggatgacc

SEQ ID NO: 94081 - DNA, 120 bp, Artificial Sequence
  ENSG00000089154_18 (sequence is synthesized)
acacagagtcccctaaaccagtcctccatgaatgccatgggctccctttccgtcctgtcgccggaccgggtcctcccacagctcatcagcaccatcactgcctccgtgcagaaccctgca

SEQ ID NO: 94082 - DNA, 120 bp, Artificial Sequence
  ENSG00000089154_19 (sequence is synthesized)
ctgcgcctggtgacgcgggaggagtttgccattatgcagacccctgctggggagctgtatgacaaatccatcattcagagtgcccagcaggacagcataaaaaaggccaacatgaagcga

SEQ ID NO: 94083 - DNA, 120 bp, Artificial Sequence
  ENSG00000089154_20 (sequence is synthesized)
gagaacaaagcttattccttcaaagagcagatcatcgagctggagctgaaggaggagataaagaagaagaaaggcatcaaagaggaggtgcagctgaccagcaagcagaaggagatgctg

SEQ ID NO: 94084 - DNA, 120 bp, Artificial Sequence
  ENSG00000089154_21 (sequence is synthesized)
caggcccagctagacagggaggcgcaggtccggaggcggctgcaggagctggatggggagctggaggcggcgcttggactgctggacatcatcctggccaagaacccgtccggcctgacc

SEQ ID NO: 94085 - DNA, 120 bp, Artificial Sequence
  ENSG00000089154_22 (sequence is synthesized)
cagtacatccctgttttggtcgactcttttctgcccttgctgaagtctcccctggctgctcccaggatcaagaaccccttcttgtccttggctgcctgtgtcatgccctctaggctcaag

SEQ ID NO: 94086 - DNA, 120 bp, Artificial Sequence
  ENSG00000089154_23 (sequence is synthesized)
gctttgggcactttggtgagccacgtgaccctgcgcctgctgaagccagagtgtgtcctggataagtcctggtgccaggaagagctgtcggtggctgtgaagagggcggtgatgctgctg

SEQ ID NO: 94087 - DNA, 120 bp, Artificial Sequence
  ENSG00000089154_24 (sequence is synthesized)
cacacccacaccatcaccagcagggtgggcaagggggagccaggtgctgcgcccttgtccgcgccagccttctccttagtcttcccgtttctgaagatggtgctgacggagatgccccac

SEQ ID NO: 94088 - DNA, 120 bp, Artificial Sequence
  ENSG00000089154_25 (sequence is synthesized)
cacagtgaggaggaggaggagtggatggcccagattcttcagatcctcactgtccaagcccagctgagggcctcccccaacaccccacccgggcgggtggacgagaatggcccggagttg

SEQ ID NO: 94089 - DNA, 120 bp, Artificial Sequence
  ENSG00000089154_26 (sequence is synthesized)
ctgcctcgcgtggccatgctgcgtcttctgacttgggtgatcgggacgggctcgcctcgcttacaggttctggcttcagacaccctgaccaccctgtgtgccagcagcagtggtgatgat

SEQ ID NO: 94090 - DNA, 120 bp, Artificial Sequence
  ENSG00000089154_27 (sequence is synthesized)
ggctgtgcctttgcagagcaggaggaggtggacgtgctgctctgtgccttgcagtccccgtgtgccagcgtgcgggaaaccgtgctccgggggctgatggaactccacatggtattgcca

SEQ ID NO: 94091 - DNA, 120 bp, Artificial Sequence
  ENSG00000089154_28 (sequence is synthesized)
gcacctgatactgatgagaagaatggcctgaaccttctgcggagactctgggtggtcaagtttgacaaggaggaggagatccggaagctggctgagaggctctggtcaatgatgggccta

SEQ ID NO: 94092 - DNA, 120 bp, Artificial Sequence
  ENSG00000089154_29 (sequence is synthesized)
gacctgcagccagacctctgctccttgctgattgacgacgtgatctatcatgaggcggctgtaaggcaggcaggggccgaagccctctcccaagcagtggcacgttaccagcggcaggcg

SEQ ID NO: 94093 - DNA, 120 bp, Artificial Sequence
  ENSG00000089154_30 (sequence is synthesized)
gcggaggttatgggcaggctcatggagatttaccaggaaaagctctaccggccgcccccagtgctggatgctttgggacgagttatttcagaatctcctccagatcagtgggaagccagg

SEQ ID NO: 94094 - DNA, 120 bp, Artificial Sequence
  ENSG00000089154_31 (sequence is synthesized)
tgtggcttggcgttggccctcaacaagctctcccagtatttggacagctctcaggtgaagccactctttcagttttttgtccctgatgccctcaatgaccgacacccagatgtccggaag

SEQ ID NO: 94095 - DNA, 120 bp, Artificial Sequence
  ENSG00000089154_32 (sequence is synthesized)
tgcatgttggatgcagccctcgcaacgctcaacactcatgggaaggagaacgtcaactcgctgttgccagtattcgaggagttcctgaagaacgcgcccaatgatgccagctatgatgct

SEQ ID NO: 94096 - DNA, 120 bp, Artificial Sequence
  ENSG00000089154_33 (sequence is synthesized)
gtgcgacagagtgtggtggtcctgatgggctctctggccaagcacctggacaagagtgaccccaaagtgaagcccattgttgccaagctcatcgctgccctctccaccccctcccagcag

SEQ ID NO: 94097 - DNA, 120 bp, Artificial Sequence
  ENSG00000089154_34 (sequence is synthesized)
gtccaggagtccgtagccagctgcttgccaccccttgtgccagccatcaaggaggatgctggagggatgatccagaggcttatgcagcagctgctggagtcagacaagtacgcagagcgc

SEQ ID NO: 94098 - DNA, 120 bp, Artificial Sequence
  ENSG00000089154_35 (sequence is synthesized)
aaaggggccgcctatggcctggcgggcctggtgaagggcctgggcatcctctcgctgaagcaacaggagatgatggcggcactgactgatgccatccaagataagaagaacttccgccgg

SEQ ID NO: 94099 - DNA, 120 bp, Artificial Sequence
  ENSG00000089154_36 (sequence is synthesized)
gctggggaaactttttgagccgtatgtggttcacgtgctgccccatctgctcctgtgctttggggatggaaaccagtatgtgcgtgaggctgcagatgactgtgccaaggctgtgatgag

SEQ ID NO: 94100 - DNA, 120 bp, Artificial Sequence
  ENSG00000089154_37 (sequence is synthesized)
caacttgagtgctcacggggtgaagctggtgctcccctccttactggctgccctggaggaggaatcgtggcggaccaaagctgggtcagtggagcttcttggggcaatggcgtactgtgc

SEQ ID NO: 94101 - DNA, 120 bp, Artificial Sequence
  ENSG00000089154_38 (sequence is synthesized)
tcctaagcagctgtcatcctgtctacccaacattgtgcccaagcttacggaggtgctgaccgactcccatgtcaaagtccagaaggctggacagcaggcgctcaggcagatcggctccgt

SEQ ID NO: 94102 - DNA, 120 bp, Artificial Sequence
  ENSG00000089154_39 (sequence is synthesized)
tatcaggaacccggagatcctggccattgctccagtcctcctggatgccctgacggatccctccaggaagacccagaagtgcttgcagaccctgctggacaccaagtttgtccacttcat

SEQ ID NO: 94103 - DNA, 120 bp, Artificial Sequence
  ENSG00000089154_40 (sequence is synthesized)
tgatgccccatccctggccctcatcatgcccattgtccagagagccttccaggaccgttccacggacacgcggaagatggcagcccagattattggcaacatgtactccctgacagacca

SEQ ID NO: 94104 - DNA, 120 bp, Artificial Sequence
  ENSG00000089154_41 (sequence is synthesized)
gaaggacttggctccgtacctgcccagcgtgacgcctggcctgaaagcatcgcttttggaccctgtgcctgaggtgcggaccgtatctgcaaaggcccttggggccatggtgaagggcat

SEQ ID NO: 94105 - DNA, 120 bp, Artificial Sequence
  ENSG00000089154_42 (sequence is synthesized)
gggggagtcgtgctttgaggacttgctgccgtggctgatggagacactgacctatgagcagagctctgtggatcgctcaggcgctgcacaggggttggctgaggtcatggccggtttggg

SEQ ID NO: 94106 - DNA, 120 bp, Artificial Sequence
  ENSG00000089154_43 (sequence is synthesized)
ggtggagaagttggagaagttgatgccagaaatcgtggctacagccagcaaagtggacattgcaccccatgtccgagatggctacattatgatgtttaactacctgcccatcacctttgg

SEQ ID NO: 94107 - DNA, 120 bp, Artificial Sequence
  ENSG00000089154_44 (sequence is synthesized)
agacaagtttactccttatgtggggcccatcatcccctgtatcctcaaagctcttgctgatgagaatgagtttgtgcgtgacaccgccctgcgcgcgggccagcgggttatctccatgta

SEQ ID NO: 94108 - DNA, 120 bp, Artificial Sequence
  ENSG00000089154_45 (sequence is synthesized)
cgctgagacagccatcgccctgctgctgccccagctagagcaaggcctctttgatgacctttggagaatcaggttcagctctgttcagctccttggggatctcctgtttcacatctcagg

SEQ ID NO: 94109 - DNA, 120 bp, Artificial Sequence
  ENSG00000089154_46 (sequence is synthesized)
agtcactgggaagatgaccacagaaactgcctctgaggatgataactttggaactgcccagtccaacaaggcgatcatcactgccctgggggtagagcggcggaaccgggtgttggcagg

SEQ ID NO: 94110 - DNA, 120 bp, Artificial Sequence
  ENSG00000089154_47 (sequence is synthesized)
gctgtacatgggccgctcagacacccagctggtggtgcggcaggcgtccctgcatgtctggaagattgttgtctccaataccccccgcaccttgcgtgagatcctacccactctctttgg

SEQ ID NO: 94111 - DNA, 120 bp, Artificial Sequence
  ENSG00000089154_48 (sequence is synthesized)
gctcctgctgggtttcctggccagcacgtgtgcagataagagaacgattgcagcgagaacattgggagatcttgtgcggaagttaggggagaaaatcctccccgagatcatccccatcct

SEQ ID NO: 94112 - DNA, 120 bp, Artificial Sequence
  ENSG00000089154_49 (sequence is synthesized)
tgaggaaggcctgaggtctcagaagagcgatgagaggcagggtgtgtgcattggcctaagtgagatcatgaagtccaccagccgggatgccgtgctgtatttctctgaatccctcgtgcc

SEQ ID NO: 94113 - DNA, 120 bp, Artificial Sequence
  ENSG00000089154_50 (sequence is synthesized)
cacggcaaggaaggctttgtgtgacccactggaggaggtcagagaggcggcagccaagactttcgagcagctgcattccaccatcggccaccaggctctggaggacattctcccattttt

SEQ ID NO: 94114 - DNA, 120 bp, Artificial Sequence
  ENSG00000089154_51 (sequence is synthesized)
actaaagcagctggatgacgaggaggtgtcagagtttgccttggatggtctgaagcaagtcatggctattaagagtcgtgtggtgctgccctaccttgtgcccaagctgacaacgccacc

SEQ ID NO: 94115 - DNA, 120 bp, Artificial Sequence
  ENSG00000089154_52 (sequence is synthesized)
tgtcaacacccgggtgctggctttcctttcgtcagtggctggtgatgccctcacccgtcatcttggcgtgatcctcccagcggtcatgctggccctgaaggaaaagcttgggaccccaga

SEQ ID NO: 94116 - DNA, 120 bp, Artificial Sequence
  ENSG00000089154_53 (sequence is synthesized)
tgagcagctggagatggccaattgtcaggctgtgatcctctccgtagaggatgacacagggcaccggatcatcatcgaggatctgctggaggccacccgcagccctgaggtgggcatgag

SEQ ID NO: 94117 - DNA, 120 bp, Artificial Sequence
  ENSG00000089154_54 (sequence is synthesized)
gcaagctgctgccatcatcctcaacatctactgttcccgctcaaaggctgactacaccagccacctgcggagcctggtctcgggcctgatccgcctcttcaatgactccagccctgtggt

SEQ ID NO: 94118 - DNA, 120 bp, Artificial Sequence
  ENSG00000089154_55 (sequence is synthesized)
tctggaggagagctgggatgccctaaatgccatcactaagaagctggatgctggcaaccagttggcactcattgaagagctgcacaaggaaatccggctcatagggaacgagagcaaagg

SEQ ID NO: 94119 - DNA, 120 bp, Artificial Sequence
  ENSG00000089154_56 (sequence is synthesized)
cgagcatgtgccaggattctgcctcccgaagaagggagtgacctccatccttccagtgttgcgggaaggagtcctgactggcagccctgagcagaaggaggaggcagccaaagccttagg

SEQ ID NO: 94120 - DNA, 120 bp, Artificial Sequence
  ENSG00000089154_57 (sequence is synthesized)
cttggtaatccgcctgacctcggctgacgccctgaggccctccgtggtcagcatcactggccctctgatccgcatcctgggggacaggttcagctggaatgtgaaggcggctctgctcga

SEQ ID NO: 94121 - DNA, 120 bp, Artificial Sequence
  ENSG00000089154_58 (sequence is synthesized)
gacactcagcctcttgttggctaaggttgggattgccctgaagcccttcctgccccagctgcagaccactttcaccaaagccctgcaggactccaaccggggggtgcgcctgaaggccgc

SEQ ID NO: 94122 - DNA, 120 bp, Artificial Sequence
  ENSG00000089154_59 (sequence is synthesized)
agatgctctggggaagctcatttccatccacattaaggtggaccccctcttcacagagctgctcaatggcatccgcgccatggaggacccaggtgtcagggacaccatgctgcaggccct

SEQ ID NO: 94123 - DNA, 120 bp, Artificial Sequence
  ENSG00000089154_60 (sequence is synthesized)
gaggtttgtgattcagggagcaggggccaaagtggatgccgtcatccggaaaaacatcgtctcactcctgctgagcatgctgggacacgatgaggacaacactcgcatctcctcagccgg

SEQ ID NO: 94124 - DNA, 120 bp, Artificial Sequence
  ENSG00000089154_61 (sequence is synthesized)
gtgcctaggggaactgtgtgcctttttgactgaagaggagcttagtgccgttctacagcagtgcttgctggcggacgtgtccggcattgactggatggttcggcacgggcggagcctggc

SEQ ID NO: 94125 - DNA, 120 bp, Artificial Sequence
  ENSG00000089154_62 (sequence is synthesized)
actttccgtggctgtgaatgtggctcctggcagactttgtgccggcagatatagcagtgatgttcaggaaatgatcctgagcagtgccacggcggacaggatccccattgcggtgagcgg

SEQ ID NO: 94126 - DNA, 120 bp, Artificial Sequence
  ENSG00000089154_63 (sequence is synthesized)
ggtccggggcatgggctttctcatgagacaccacatcgagacaggcggagggcagttgccggccaaactttccagcctgttcgttaagtgtctgcagaacccatccagcgacatcaggct

SEQ ID NO: 94127 - DNA, 120 bp, Artificial Sequence
  ENSG00000089154_64 (sequence is synthesized)
ggtggctgagaagatgatctggtgggcaaataaggacccactgcctcccctggacccccaggccatcaagcccatcctgaaggctcttcttgacaacaccaaggataagaacaccgtggt

SEQ ID NO: 94128 - DNA, 120 bp, Artificial Sequence
  ENSG00000089154_65 (sequence is synthesized)
cagggcctacagcgaccaggcaattgtcaacctcctcaagatgcggcagggtgaagaggtgtttcagtccctctccaagatcctggatgtggccagtttggaggtgctgaacgaggttaa

SEQ ID NO: 94129 - DNA, 120 bp, Artificial Sequence
  ENSG00000089154_66 (sequence is synthesized)
ccgaaggtccctgaagaagctggccagccaggccgactccacggagcaggtggacgacaccatcctgacatgagaggcctgggccagcagcagcattgccgctccacatctttgctcaat

SEQ ID NO: 94130 - DNA, 120 bp, Artificial Sequence
  ENSG00000089154_67 (sequence is synthesized)
gttttcatttttgaaaatacatttgttccaatggggagcttggaagatggcgttcccagaaagtattttaatatcaatagaccacagccaaagccttaaatcaaacccacacacaactga

SEQ ID NO: 94131 - DNA, 120 bp, Artificial Sequence
  ENSG00000089154_68 (sequence is synthesized)
aaattgcctcctccatctctcaccttttcctgtggagaagagaaggaaaagcacacgcatgcgcctcagcaaatggcagcccaggagctgtttgtccagtttagcatggctaggtctgga

SEQ ID NO: 94132 - DNA, 120 bp, Artificial Sequence
  ENSG00000089154_69 (sequence is synthesized)
actataatagcagggtcagactgtgggttcctcttctcctgtgcttgagctctggtttgagagctggcgctaccaacctttttcctatatcccgagtggggcacagacggtggatctctg

SEQ ID NO: 94133 - DNA, 120 bp, Artificial Sequence
  ENSG00000089154_70 (sequence is synthesized)
cccagtgtggtgtgtctggcttggcttttcaatattgtgaggtctgaatggatctgacccctgtcagatgaaaatgattcacagctctggcagttcccaagtctggggaggggtataggt

SEQ ID NO: 94134 - DNA, 120 bp, Artificial Sequence
  ENSG00000089154_71 (sequence is synthesized)
ttgaaaggctgtttgaaagaggaatgtttaataaaggctttgatttaatcttgatataaacagatttttaaaaatctccacccattaaacatgaagcttcctgcatcaggaataaggaaa

SEQ ID NO: 94135 - DNA, 120 bp, Artificial Sequence
  ENSG00000089154_72 (sequence is synthesized)
agaatgtcaggatctaaccagagctttgtgttctctagagcgccctactggacttttacatgaagaacatcctgatgagcaaagtcaagcctccgaagtacctgttggtgagcgagaggt

SEQ ID NO: 94136 - DNA, 120 bp, Artificial Sequence
  ENSG00000089154_73 (sequence is synthesized)
ggacgttactcacctggacaactgatcccattttcaattctgggatgctgaactcttttttgcttcttggtccgttcccatgagggctaggtgccttattcctttttctttgtaggatag

SEQ ID NO: 94137 - DNA, 120 bp, Artificial Sequence
  ENSG00000089154_74 (sequence is synthesized)
tgctgcagaggagggtttgtcagcaaagcccaccccagcagcttcaggatggagtagatcagctctgggggatgtggtgagctgcgtcgtggggtaaccttttgtttcttgcagaggcca

SEQ ID NO: 94138 - DNA, 120 bp, Artificial Sequence
  ENSG00000089154_75 (sequence is synthesized)
ggtggggccggttgtatgatccagaatgttcccccgtgggtgagaggatgccctgccgttggccgcctgggttacagacctccccacagcctcatctcgacttacctgccgttctctcct

SEQ ID NO: 94139 - DNA, 120 bp, Artificial Sequence
  ENSG00000089154_76 (sequence is synthesized)
gcttggtgaggaaagcagacgcagactccagccggccactgtgatgggcattgcccaggagtaacaaggcagtggcataaagaaggggagccagtgctaggggcattcaggtgtggtgga

SEQ ID NO: 94140 - DNA, 120 bp, Artificial Sequence
  ENSG00000089154_77 (sequence is synthesized)
catggagatttaccaggaaaagctctacgtgagtgacctgtgcagccctgatgcagtctgggtgtgtgcggttgggtgggtctctgctcaccccgctactgctccagacaggaatctcgg

SEQ ID NO: 94141 - DNA, 120 bp, Artificial Sequence
  ENSG00000089154_78 (sequence is synthesized)
ggctcacggtggctcagggtagctgcggctagtttcctgcctcacaatcctggtgcccaggtcattgatctgcccgttgcaaagcatttaccaacttgtctgttgcagcggccgccccca

SEQ ID NO: 94142 - DNA, 120 bp, Artificial Sequence
  ENSG00000089157_0 (sequence is synthesized)
gtctgacgggcgatggcgcagccaatagacaggagcgctatccgcggtttctgattggctactttgttcgcattataaaaggcacgcgcgggcgcgaggcccttctctcgccaggcgtcc

SEQ ID NO: 94143 - DNA, 120 bp, Artificial Sequence
  ENSG00000089157_1 (sequence is synthesized)
tcgtggaaggcccgggaccgcgggatgggtgtcggcgtgaccaggcctgagctccctgtctctcctcagtgacatcgtctttaaaccctgcgtggcaatccctgacgcaccgccgtgatg

SEQ ID NO: 94144 - DNA, 120 bp, Artificial Sequence
  ENSG00000089157_2 (sequence is synthesized)
cccagggaagacagggcgacctggaagtccaactacttccttaagatcatccaactattggatgattatccgaaatgtttcattgtgggagcagacaatgtgggctccaagcagatgcag

SEQ ID NO: 94145 - DNA, 120 bp, Artificial Sequence
  ENSG00000089157_3 (sequence is synthesized)
cagatccgcatgtcccttcgcgggaaggctgtggtgctgatgggcaagaacaccatgatgcgcaaggccatccgagggcacctggaaaacaacccagctctggagaaactgctgcctcat

SEQ ID NO: 94146 - DNA, 120 bp, Artificial Sequence
  ENSG00000089157_4 (sequence is synthesized)
atccgggggaatgtgggctttgtgttcaccaaggaggacctcactgagatcagggacatgttgctggccaataaggtgccagctgctgcccgtgctggtgccattgccccatgtgaagtc

SEQ ID NO: 94147 - DNA, 120 bp, Artificial Sequence
  ENSG00000089157_5 (sequence is synthesized)
ttaggtatcaccactaaaatctccaggggcaccattgaaatcctgagtgatgtgcagctgatcaagactggagacaaagtgggagccagcgaagccacgctgctgaacatgctcaacatc

SEQ ID NO: 94148 - DNA, 120 bp, Artificial Sequence
  ENSG00000089157_6 (sequence is synthesized)
tcccccttctcctttgggctggtcatccagcaggtgttcgacaatggcagcatctacaaccctgaagtgcttgatatcacagaggaaactctgcattctcgcttcctggagggtgtccgc

SEQ ID NO: 94149 - DNA, 120 bp, Artificial Sequence
  ENSG00000089157_7 (sequence is synthesized)
aatgttgccagtgtctgtctgcagattggctacccaactgttgcatcagtaccccattctatcatcaacgggtacaaacgagtcctggccttgtctgtggagacggattacaccttccca

SEQ ID NO: 94150 - DNA, 120 bp, Artificial Sequence
  ENSG00000089157_8 (sequence is synthesized)
cttgctgaaaaggtcaaggccttcttggctgatccatctgcctttgtggctgctgcccctgtggctgctgccaccacagctgctcctgctgctgctgcagccccagctaaggttgaagcc

SEQ ID NO: 94151 - DNA, 120 bp, Artificial Sequence
  ENSG00000089157_9 (sequence is synthesized)
aaggaagagtcggaggagtcggacgaggatatgggatttggtctctttgactaatcaccaaaaagcaaccaacttagccagttttatttgcaaaacaaggaaataaaggcttacttcttt

SEQ ID NO: 94152 - DNA, 120 bp, Artificial Sequence
  ENSG00000089157_10 (sequence is synthesized)
aggcgtcctcgtggaaggttcgtgtgctagttagatgggcgccaggggtcgccggcgggaagcatggaggggtctttgggggcctttgggaacatggagtcctattctgttccgcctggg

SEQ ID NO: 94153 - DNA, 120 bp, Artificial Sequence
  ENSG00000089157_11 (sequence is synthesized)
atcgtaagtgcagggtctgaggtcaggaatgactcattgtaaggaagcaagctgttgcatatttaggacctgtcagccaagaaacttaagtgtccaatgacttttggatggcctttgagc

SEQ ID NO: 94154 - DNA, 120 bp, Artificial Sequence
  ENSG00000089157_12 (sequence is synthesized)
caggggcaccattgaaatcctggtgagtggacctggtttgcctgtgctaaccaggcaaatggggagctgcttttagtggccatggatctgctggttgtccaacaggtgtttactgcccca

SEQ ID NO: 94155 - DNA, 120 bp, Artificial Sequence
  ENSG00000089157_13 (sequence is synthesized)
gacaagtgaatgaagttcacatctggaaatcgttgaacatttttcgttcatggaactcaatggctacgttagtcgtttatgcttttcactgttgtggtaggggctttggaagtaaatgcc

SEQ ID NO: 94156 - DNA, 120 bp, Artificial Sequence
  ENSG00000089157_14 (sequence is synthesized)
atcaacaatggatacagaagacctggatttggaataagggcaaaatttatttgatggggctgaattgctctgccaggagcatttggtatgagatgaaatggcctctcttgagactgagct

SEQ ID NO: 94157 - DNA, 120 bp, Artificial Sequence
  ENSG00000089157_15 (sequence is synthesized)
tggctaaagagactttgttgttgctccttaaagcaaaatggaccattctcaggttgtgtgagtggagaggcttttctcactgtttgttgtctttgtcaggtgccagctgctgcccgtgct

SEQ ID NO: 94158 - DNA, 120 bp, Artificial Sequence
  ENSG00000089157_16 (sequence is synthesized)
agacctcctttttccaggctttaggtatcaccactaaaatctccaggggcaccattgaaatcctgtggccatggatctgctggttgtccaacaggtgtttactgccccactattatctgg

SEQ ID NO: 94159 - DNA, 120 bp, Artificial Sequence
  ENSG00000089157_17 (sequence is synthesized)
tcagactgagtccctgtaaccaaggactgtgttttcatctgtctacctacctcatctgtaaaatgtcagtaacaacataagattgttgaaggattttttttttttttttttggagacaga

SEQ ID NO: 94160 - DNA, 120 bp, Artificial Sequence
  ENSG00000089157_18 (sequence is synthesized)
cgagtcctggccttgtctgtggagacggattacaccttcccacttgctgaaaaggtaaaaggatcccaccaggaccacagtgggcctgactgtgacaaattagcagggtgatgtggcctt

SEQ ID NO: 94161 - DNA, 120 bp, Artificial Sequence
  ENSG00000089157_19 (sequence is synthesized)
ctaccttactgcttttatagttgtattttatatagcagataattttgtgaggggatatttgagaggttgggaggcagggaaggcgtttctcacttgagaaatgacaagagacccaaagag

SEQ ID NO: 94162 - DNA, 120 bp, Artificial Sequence
  ENSG00000089157_20 (sequence is synthesized)
tctgacaggaaaggcttcacacggactttgatattgttggtccttaaactctaccaaggcaggagggtggtgggtaatagaggagtgtggatgaccattttgaccacttcccccctcctt

SEQ ID NO: 94163 - DNA, 120 bp, Artificial Sequence
  ENSG00000089157_21 (sequence is synthesized)
aactacttccttaagatcatcgtaagtgcagggtgggtcgcctctgctcttcatgttgccccagcgcaaatagggacagtcagctgctatgtgctgagggtctactcacaccggctactg

SEQ ID NO: 94164 - DNA, 120 bp, Artificial Sequence
  ENSG00000089157_22 (sequence is synthesized)
aattaggccatttttgggaaaatactgtttagttaacaatttcctgagataggtcccttctgttgcagataaacgggctcaggcaagttaagtgggtcctaagatgacagcattcgtatc

SEQ ID NO: 94165 - DNA, 90 bp, Artificial Sequence
  ENSG00000089157_23 (sequence is synthesized)
aggcaagttaagtgggtcctaagatgacagcattcgtatccaggtctgtctggcttctaaaagagcgcgctttatactttttttttttta

SEQ ID NO: 94166 - DNA, 78 bp, Artificial Sequence
  ENSG00000089157_24 (sequence is synthesized)
ggcctcccacattacagttttactccatttttgagaaggtctgaggtcaggaatgactcattgtaaggaagcaagctg

SEQ ID NO: 94167 - DNA, 120 bp, Artificial Sequence
  ENSG00000089157_25 (sequence is synthesized)
gtctgaggtcaggaatgactcattgtaaggaagcaagctgttgcatatttaggacctgtcagccaagaaacttaagtgtccaatgacttttggatggcctttgaggtgggtctcccttgc

SEQ ID NO: 94168 - DNA, 120 bp, Artificial Sequence
  ENSG00000089157_26 (sequence is synthesized)
ccagaaatgctgactgtactgcgcttaagcaattaggcagcattgtagagcatagcttgtattacattttcccacacttagaaggttttcagacacaaaacccaaaggaattgtgtaaca

SEQ ID NO: 94169 - DNA, 120 bp, Artificial Sequence
  ENSG00000089157_27 (sequence is synthesized)
aatgctgtgaatctagccctcctcttgaccaacttacttggaacattccttttttatcctgttaaccattttagtgaatcagaagcatgcctggtaattgggaaaaattaaaaactaagt

SEQ ID NO: 94170 - DNA, 120 bp, Artificial Sequence
  ENSG00000089157_28 (sequence is synthesized)
aaaaaaagaaaaaactccttgattgaatgtagaaacctaattttcagcgttcatacccagctagccaatcatccagtttggcagtgttacaacgtagctcccaatctccctctgacttca

SEQ ID NO: 94171 - DNA, 120 bp, Artificial Sequence
  ENSG00000089157_29 (sequence is synthesized)
aaagcttagaagaaagggagtgggatggaaacaaattgtggggttcagtttcttctggcattttttccctctctcttcctgttaaacttggctcctctggcttgttttttgtagcaacta

SEQ ID NO: 94172 - DNA, 120 bp, Artificial Sequence
  ENSG00000089159_0 (sequence is synthesized)
cgcgcggcggcggcgcgttccgttccgggccgaggctcgcggcggaaaagttgcggggcatagacgagcggccccgggacgggcagctagcgcgaccctgagccggcgcccgtggtccgg

SEQ ID NO: 94173 - DNA, 120 bp, Artificial Sequence
  ENSG00000089159_1 (sequence is synthesized)
agccggcgcccgtggtccggccatggacgacctcgacgccctgctggcggacttggagtctaccacctcccacatctccaaacggcctgtgttcttgtcggaggagaccccctactcata

SEQ ID NO: 94174 - DNA, 120 bp, Artificial Sequence
  ENSG00000089159_2 (sequence is synthesized)
cccaactggaaaccacacataccaggagattgccgtgccaccccccgtccccccacccccgtccagcgaggccctcaatggcacaatccttgaccccttagaccagtggcagcccagcag

SEQ ID NO: 94175 - DNA, 120 bp, Artificial Sequence
  ENSG00000089159_3 (sequence is synthesized)
ctcccgattcatccaccagcagcctcagtcctcatcacctgtgtacggctccagtgccaaaacttccagtgtctccaaccctcaggacagtgttggctctccgtgctcccgagtgggtga

SEQ ID NO: 94176 - DNA, 120 bp, Artificial Sequence
  ENSG00000089159_4 (sequence is synthesized)
ggaggagcacgtctacagcttccccaacaagcagaaatcagctgagccttcacccaccgtaatgagcacgtccctgggcagcaacctttctgaactcgaccgcctgctgctggaactgaa

SEQ ID NO: 94177 - DNA, 120 bp, Artificial Sequence
  ENSG00000089159_5 (sequence is synthesized)
cgctgtacagcataacccgccaggcttccctgcagatgaggccaactcaagccccccgcttcctggggccctgagccccctctatggtgtcccagagactaacagccccttgggaggcaa

SEQ ID NO: 94178 - DNA, 120 bp, Artificial Sequence
  ENSG00000089159_6 (sequence is synthesized)
agctgggcccctgacgaaagagaagcctaagcggaatgggggccggggcctggaggacgtgcggcccagtgtggagagtctcttggatgaactggagagctccgtgcccagccccgtccc

SEQ ID NO: 94179 - DNA, 120 bp, Artificial Sequence
  ENSG00000089159_7 (sequence is synthesized)
tgccatcactgtgaaccagggcgagatgagcagcccgcagcgcgtcacctccacccaacagcagacacgcatctcggcctcctctgccaccagggagctggacgagctgatggcttcgct

SEQ ID NO: 94180 - DNA, 120 bp, Artificial Sequence
  ENSG00000089159_8 (sequence is synthesized)
gtcggatttcaagatccagggcctggagcaaagagcggatggggagcggtgctgggcggccggctggcctcgggacggcgggcggagcagccccggagggcaggacgagggagggttcat

SEQ ID NO: 94181 - DNA, 120 bp, Artificial Sequence
  ENSG00000089159_9 (sequence is synthesized)
ggcccaggggaagacagggagcagctcaccccctggggggcccccgaagcccgggagccagctggacagcatgctggggagcctgcagtctgacctgaacaagctgggggtcgccacagt

SEQ ID NO: 94182 - DNA, 120 bp, Artificial Sequence
  ENSG00000089159_10 (sequence is synthesized)
cgccaaaggagtctgcggggcctgcaagaagcccatcgccgggcaggttgtgaccgccatggggaagacgtggcaccccgagcacttcgtctgcacccactgccaggaggagatcggatc

SEQ ID NO: 94183 - DNA, 120 bp, Artificial Sequence
  ENSG00000089159_11 (sequence is synthesized)
ccggaacttcttcgagcgggatggacagccctactgtgaaaaggactaccacaacctcttctccccgcgctgctactactgcaacggccccatcctggataaagtggtgacagcccttga

SEQ ID NO: 94184 - DNA, 120 bp, Artificial Sequence
  ENSG00000089159_12 (sequence is synthesized)
ccggacgtggcaccctgaacacttcttctgtgcacagtgtggagccttctttggtcccgaagggttccacgagaaggacggcaaggcctactgtcgcaaggactacttcgacatgttcgc

SEQ ID NO: 94185 - DNA, 120 bp, Artificial Sequence
  ENSG00000089159_13 (sequence is synthesized)
acccaagtgtggcggctgcgcccgggccatcctggagaactatatctcagccctcaacacgctgtggcatcctgagtgctttgtgtgccgggaatgcttcacgccattcgtgaacggcag

SEQ ID NO: 94186 - DNA, 120 bp, Artificial Sequence
  ENSG00000089159_14 (sequence is synthesized)
cttcttcgagcacgacgggcagccctactgtgaggtgcactaccacgagcggcgcggctcgctgtgttctggctgccagaagcccatcaccggccgctgcatcaccgccatggccaagaa

SEQ ID NO: 94187 - DNA, 120 bp, Artificial Sequence
  ENSG00000089159_15 (sequence is synthesized)
agcagaacgacaagccttactgtcagaactgcttcctcaagctcttctgctaggtgccctgcccctgtctctgccccccttccccagccagcatccccaactgcgactgtgacctagaga

SEQ ID NO: 94188 - DNA, 120 bp, Artificial Sequence
  ENSG00000089159_16 (sequence is synthesized)
cttcacccgggggtgaaggggtaaacccgactgaaactggaacccttgtcctccgctggtgcgggatggacagagggccgtgaggggtccccctgcttgtcttcacccctgccagagcct

SEQ ID NO: 94189 - DNA, 120 bp, Artificial Sequence
  ENSG00000089159_17 (sequence is synthesized)
ctgggccccctcctccctcctgtagctctccctaggctgcccactctccatcctccccaggggtagaggctgggggctccaccccagcccatgtacgtccccacgaactggcctggccag

SEQ ID NO: 94190 - DNA, 120 bp, Artificial Sequence
  ENSG00000089159_18 (sequence is synthesized)
caccccacactggagccatctcttcctcatatttcagcagtgcagccggggggcagggaagggcaggcagggtctgttggggtctctttttatccttattcctcccccgacctaattgtc

SEQ ID NO: 94191 - DNA, 120 bp, Artificial Sequence
  ENSG00000089159_19 (sequence is synthesized)
tttgttctgtgattattgggggacacccggctccctccagacaatgccagcataaatccatccatccaaaggcagagaaccaaaggggccatggaaggttctctgtgctcctcctaccct

SEQ ID NO: 94192 - DNA, 120 bp, Artificial Sequence
  ENSG00000089159_20 (sequence is synthesized)
tccagtgccctaggcctggcgactgcccctgccttttagacccgccctccccttttatacctgctcttgttctactgagaaaagcctctccagcaataatgttttctagtcacttcctcc

SEQ ID NO: 94193 - DNA, 120 bp, Artificial Sequence
  ENSG00000089159_21 (sequence is synthesized)
gtctccgggacggcgtgcctggacactgtaccgactttgatagatttctacactgaggtttgaattcatatcgcctgagttgcttttacttctctatacaaaatgattttgaagagattt

SEQ ID NO: 94194 - DNA, 120 bp, Artificial Sequence
  ENSG00000089159_22 (sequence is synthesized)
taaagacgttcccttttgtattctcttcctcatccaccgccactgggcctgtcactgatggtggctctggtgtgaagtttgctttgtactgagggttggggtggggaagcaatttgtatt

SEQ ID NO: 94195 - DNA, 120 bp, Artificial Sequence
  ENSG00000089159_23 (sequence is synthesized)
ttattgtttcttagcacaagcaggtgaactgggagcagctctgtgactccccctctttcacttcatagctcaccaggactgttttataaactgctgtatttggaaaccccttctttactt

SEQ ID NO: 94196 - DNA, 120 bp, Artificial Sequence
  ENSG00000089159_24 (sequence is synthesized)
cccaggccagcaagctcttcactgaaactggttgaagggtgttgcacccttttgggcctagaattctgaactttatctgttctgtttctgtgggaggagaaggggaagtatgttttgggg

SEQ ID NO: 94197 - DNA, 120 bp, Artificial Sequence
  ENSG00000089159_25 (sequence is synthesized)
ggctgcttcctgtctgagtaagccctcaggagcctctgctcccctgtgaacccactgaaccttctgagcccccactgcttctatggggctctctcttctgccttctcaggaaagctggtg

SEQ ID NO: 94198 - DNA, 120 bp, Artificial Sequence
  ENSG00000089159_26 (sequence is synthesized)
tctgattttggccatcaggactctgacgtctctttggtcttgttgatttcctctgggcatatcccttccccagatctgctcctcccctttcacaggtgggatcggcactcagggggtctg

SEQ ID NO: 94199 - DNA, 120 bp, Artificial Sequence
  ENSG00000089159_27 (sequence is synthesized)
gaaagaaggtcataagggagcatgataggatttggggcagagggacaggctcctctggggaaaccccccagagctctttaccaaggatgaaagaggagccaggccttgggctcctgatga

SEQ ID NO: 94200 - DNA, 120 bp, Artificial Sequence
  ENSG00000089159_28 (sequence is synthesized)
ggagaaaggggccccaccggggtctaatggtgacagtccaaaccactccactggcctcctggcagaagccgagtgtgctggggtctccgaagagggtccctcctttttgggggaaggtca

SEQ ID NO: 94201 - DNA, 120 bp, Artificial Sequence
  ENSG00000089159_29 (sequence is synthesized)
gcccagcccctccaaaggtctgatgtctccactttcacccgcaggccttaccgctctgtttatagtgacccaccctagatcttccccaagagggactggggtttctggggtccattctct

SEQ ID NO: 94202 - DNA, 120 bp, Artificial Sequence
  ENSG00000089159_30 (sequence is synthesized)
gagtcagtggttatttgaaaatttgattttgattttattttttctctgtaaacttccaagctggcttttcccatttcaattcctgtgatttatgccaataaagtttgcccatgattttca

SEQ ID NO: 94203 - DNA, 120 bp, Artificial Sequence
  ENSG00000089159_31 (sequence is synthesized)
gtcggatttcaagggctcctggcccctggaggaggttgtacttcttgtctccatcagctcatctgtccaggagggagaaaagtacccccatccctgtgctgccagacaccgtaccccgag

SEQ ID NO: 94204 - DNA, 120 bp, Artificial Sequence
  ENSG00000089159_32 (sequence is synthesized)
ttcccctgtgtactcctggctcggctggccggctaaggcagtttctcatcactgatgtgctctgggacagctgagtgggatgggctcctctggggtgggtgtggaggagtggtcgtgatg

SEQ ID NO: 94205 - DNA, 120 bp, Artificial Sequence
  ENSG00000089159_33 (sequence is synthesized)
cctggaacactgcagtcactcctcagagacacgacttggcagccctcctgagcctgcctggtcacatgctgcctgtcttggaaggtcctctgtcccaagcagtggatgtgcagtttcttc

SEQ ID NO: 94206 - DNA, 120 bp, Artificial Sequence
  ENSG00000089159_34 (sequence is synthesized)
tttgaggtcagagttattcaagagcttactgagacaacaggccctgagaagctaagcgatttgccctgtggcatggatggtagagaggggagctggcacttgaactcaggtctggctcga

SEQ ID NO: 94207 - DNA, 120 bp, Artificial Sequence
  ENSG00000089159_35 (sequence is synthesized)
cctcagaatgagtgatcttgtgtctctgtgccccaggactgcatcctctcaccaatacttcaccagcctagggatctgtgctcccaagagcctgttgacattgtaaacctgaatccaatc

SEQ ID NO: 94208 - DNA, 120 bp, Artificial Sequence
  ENSG00000089159_36 (sequence is synthesized)
cataaaccaaaagcccaggcttagaatcacattgtggtggagcgggtgtttggtggagtccctgattcaaaatgtttgacaaggaagcctgaccatttgtcttctgttgggtgtttggag

SEQ ID NO: 94209 - DNA, 120 bp, Artificial Sequence
  ENSG00000089159_37 (sequence is synthesized)
tccaagagacctgagatcagagtccagcattgtcacttcatccagccttggcagtgtgggatgtgactctgcctctgaaccgcagttataccatctgtgctggtggcgttgtgaggatgg

SEQ ID NO: 94210 - DNA, 120 bp, Artificial Sequence
  ENSG00000089159_38 (sequence is synthesized)
tccactgtggctctgagtgccccggggctgtccagctctgctccgtcctcatactgctcccttcctccttctcctcctcccatgccatctgtatttctgccacccaccactataccctcc

SEQ ID NO: 94211 - DNA, 120 bp, Artificial Sequence
  ENSG00000089159_39 (sequence is synthesized)
cctcgaggccagggccacactccggagttcccttgtactgagcagagtggacgaggccttctacctcctgtagcccccagctggcttgatttggctggtcttggggtgatgcctgacacc

SEQ ID NO: 94212 - DNA, 120 bp, Artificial Sequence
  ENSG00000089159_40 (sequence is synthesized)
ttcaactcaaggtctccctctgtggagggttctctgtgggcagtgggcacagagagtcagggtcgagattggaggcacctgccgaccatcacaagtgagctctctggggctccccgctgc

SEQ ID NO: 94213 - DNA, 120 bp, Artificial Sequence
  ENSG00000089159_41 (sequence is synthesized)
cacactgtaccctgtgctgggagcacagctctccaagagcctggggagccccaggggccaccagccagcccttcgtgcccagaggaggccttggctgccacatgggagcagccatgggct

SEQ ID NO: 94214 - DNA, 120 bp, Artificial Sequence
  ENSG00000089159_42 (sequence is synthesized)
tcggaggtattcgggcctgagagaatgcccccctctggagctgctcgaagcttccaagaagtaacagagccagctgtagtggcagtggaccggcaggccatcttcccagatacctggact

SEQ ID NO: 94215 - DNA, 120 bp, Artificial Sequence
  ENSG00000089159_43 (sequence is synthesized)
ctcacggaggaacatggcctacagcaggagaggccaaggccagagccagggaggctgggaagcagctcccctgcctcagttaccacggagcagctaggtgcaaagatgaccgagagggga

SEQ ID NO: 94216 - DNA, 120 bp, Artificial Sequence
  ENSG00000089159_44 (sequence is synthesized)
gccaggccaacccagggacctgaaaccccaaggagcccagagggcaccacggaagctgccacccaggacgggaaggaacagccagagcttccatgtgccatggccatgggcacacccagc

SEQ ID NO: 94217 - DNA, 120 bp, Artificial Sequence
  ENSG00000089159_45 (sequence is synthesized)
accacggagaggatttccacctctggccagatccgatctgtgatcaggaggagctgggagtctggccacgcacaccccatgtcccgggagccctcccctcgccgccggctggaccctgcc

SEQ ID NO: 94218 - DNA, 120 bp, Artificial Sequence
  ENSG00000089159_46 (sequence is synthesized)
accttgagcaggaccccatcccaggaacagctcatcgcggagctgcaggggcggctgggcatccagcctgaggcagaggagccggcggaggcggcggggccctctgcccaggactggctg

SEQ ID NO: 94219 - DNA, 120 bp, Artificial Sequence
  ENSG00000089159_47 (sequence is synthesized)
accgagggcgtcatcatcactgtgcagccacgtgggaagcgggccggggggcagctcgtagagaaggttgtcttccctcctggctctcccattcccctgagaagaaccatctctgtcctg

SEQ ID NO: 94220 - DNA, 120 bp, Artificial Sequence
  ENSG00000089159_48 (sequence is synthesized)
gcttctccttctgtccctttgctccagcatcgcacagacgccgcggccagcagctcttctcccctgcccagcctgctcgcctcctcccccctggggccctcagcttatacctgtggttct

SEQ ID NO: 94221 - DNA, 120 bp, Artificial Sequence
  ENSG00000089159_49 (sequence is synthesized)
tctggggtccagagtgcaggggaagagccccatgatgagggggtgcagggccctgcccttcccattcctgcaccccacaccatgaggtccgtgggctgccagactgatgaggacccgctc

SEQ ID NO: 94222 - DNA, 120 bp, Artificial Sequence
  ENSG00000089159_50 (sequence is synthesized)
ggttgcccttttcatggtttgctcatattctacccagaaaagacttaggagacttagaagaagttagtactttgcatcctacctacactgctctccttggaggaagaccttattctggat

SEQ ID NO: 94223 - DNA, 120 bp, Artificial Sequence
  ENSG00000089159_51 (sequence is synthesized)
agccacgtgggaagcgggccggggggcagctcgtagagaaggtggcgaggagatgcccatggctggggctgggccagagccaagcacctggggtccgggttcttccctggccccagtgct

SEQ ID NO: 94224 - DNA, 120 bp, Artificial Sequence
  ENSG00000089159_52 (sequence is synthesized)
ggccggaggggagatctggggagagggtgggggtttcttgcctcctgtgactttggaagactggccccactcttggtgcagagtgggaaggcccagggggagcctggggaggtcccgcca

SEQ ID NO: 94225 - DNA, 120 bp, Artificial Sequence
  ENSG00000089159_53 (sequence is synthesized)
agagacaggaagccaggcctcctccatgggacccggagggcggggcgggctgtaggacctgaacttccttggaggtcaggcgaccagacccggggtcctgggccttggaacagacatccc

SEQ ID NO: 94226 - DNA, 120 bp, Artificial Sequence
  ENSG00000089159_54 (sequence is synthesized)
ctctgtccatctgggcaggagcatgggattcagagttccagacaggcacttcactcgcggctgcgcggccctgtcaggagggaacgcagtgccaggtgcctgactcccagagacgccctg

SEQ ID NO: 94227 - DNA, 120 bp, Artificial Sequence
  ENSG00000089159_55 (sequence is synthesized)
aaaagttgcggggcatagacgagcggccccgggacgggcagctagcgcgaccctgagccggcgcccgtggtccggccatggacgacctcggctctgaggagtagattcagcagacaggac

SEQ ID NO: 94228 - DNA, 120 bp, Artificial Sequence
  ENSG00000089163_0 (sequence is synthesized)
gcaaatgcaatcagacggtcccactgtggggtgtgaagtgtccgtagagctgtgagagaatgaagatgagctttgcgttgactttcaggtcagcaaaaggccgttggatcgcaaacccca

SEQ ID NO: 94229 - DNA, 120 bp, Artificial Sequence
  ENSG00000089163_1 (sequence is synthesized)
gccagccgtgctcgaaagcctccattgggttatttgtgccagcaagtcctcctctggaccctgagaaggtcaaagagttacagcgcttcatcaccctttccaagagactccttgtgatga

SEQ ID NO: 94230 - DNA, 120 bp, Artificial Sequence
  ENSG00000089163_2 (sequence is synthesized)
ctggggcaggaatctccaccgaatcggggataccagactacaggtcagaaaaagtggggctttatgcccgcactgaccgcaggcccatccagcatggtgattttgtccggagtgccccaa

SEQ ID NO: 94231 - DNA, 120 bp, Artificial Sequence
  ENSG00000089163_3 (sequence is synthesized)
tccgccagcggtactgggcgagaaacttcgtaggctggcctcaattctcctcccaccagcctaaccctgcacactgggctttgagcacctgggagaaactcggaaagctgtactggttgg

SEQ ID NO: 94232 - DNA, 120 bp, Artificial Sequence
  ENSG00000089163_4 (sequence is synthesized)
tgacccaaaatgtggatgctttgcacaccaaggcggggagtcggcgcctgacagagctccacggatgcatggacagggtcctgtgcttggattgtggggaacagactccccggggggtgc

SEQ ID NO: 94233 - DNA, 120 bp, Artificial Sequence
  ENSG00000089163_5 (sequence is synthesized)
gtcctgaaccccacctggagtgctgaggcccatggcctggctcctgatggtgacgtctttctctcagaggagcaagtccggagctttcaggtcccaacctgcgttcaatgtggaggccat

SEQ ID NO: 94234 - DNA, 120 bp, Artificial Sequence
  ENSG00000089163_6 (sequence is synthesized)
ctgaaaccagatgtcgttttcttcggggacacagtgaaccctgacaaggttgattttgtgcacaagcgtgtaaaagaagccgactccctcttggtggtgggatcatccttgcaggtatac

SEQ ID NO: 94235 - DNA, 120 bp, Artificial Sequence
  ENSG00000089163_7 (sequence is synthesized)
tctggttacaggtttatcctcactgcctgggagaagaagctcccgattgcaatactgaacattgggcccacacggtcggatgacttggcgtgtctgaaactgaattctcgttgtggagag

SEQ ID NO: 94236 - DNA, 120 bp, Artificial Sequence
  ENSG00000089163_8 (sequence is synthesized)
ttgctgcctttgatagacccatgctgaccacagcctgatattccagaacctggaacagggactttcacttgaatcttgctgctaaatgtaaatgccttctcaaatgacagattccagttc

SEQ ID NO: 94237 - DNA, 120 bp, Artificial Sequence
  ENSG00000089163_9 (sequence is synthesized)
ccattcaacagagtagggtgcactgacaaagtatagaaggttctaggtatcttaatgtgtggatattcttaattaaaactcattttttttaaataaaaaattgttcagctttatatgaaa

SEQ ID NO: 94238 - DNA, 120 bp, Artificial Sequence
  ENSG00000089169_0 (sequence is synthesized)
ggacagtctgagggagccactgtcccttgtccactgactcactggctggtccgagttttctccgcttctggcagtggcacctccgctgagcttttaaaccaagtcattgggacttagcgt

SEQ ID NO: 94239 - DNA, 120 bp, Artificial Sequence
  ENSG00000089169_1 (sequence is synthesized)
ctttctacccggcagggaagggaggagttggcaagaatttggctcacccattccccctgcaagcctccagcgtcgcggagcactagacatctactatgactgacaccgtgttcagcaaca

SEQ ID NO: 94240 - DNA, 120 bp, Artificial Sequence
  ENSG00000089169_2 (sequence is synthesized)
gttctaaccgttggatgtaccccagtgaccggccccttcaatcaaagctccaggcaggctggtccgtccaccccggtggtcagcctgacaggcagaggaagcaggaagagctgactgatg

SEQ ID NO: 94241 - DNA, 120 bp, Artificial Sequence
  ENSG00000089169_3 (sequence is synthesized)
aggagaaagaaatcatcaacagggtgattgctcgagctgagaaaatggaagagatggagcaggagcgaatcggacgcctggtggaccgcctagaaaacatgaggaagaacgtggctggag

SEQ ID NO: 94242 - DNA, 120 bp, Artificial Sequence
  ENSG00000089169_4 (sequence is synthesized)
atggggtgaaccgctgcatactgtgtggagaacagctggggatgctgggctctgcctgtgtagtatgtgaggactgtaagaagaacgtctgcaccaagtgcggagtggagaccaacaacc

SEQ ID NO: 94243 - DNA, 120 bp, Artificial Sequence
  ENSG00000089169_5 (sequence is synthesized)
gcctgcattctgtgtggctctgcaaaatctgcattgagcagagggaggtgtggaagcgttctggagcgtggttcttcaaaggcttccccaaacaggtcctcccacagcctatgcctataa

SEQ ID NO: 94244 - DNA, 120 bp, Artificial Sequence
  ENSG00000089169_6 (sequence is synthesized)
agaagaccaagccccagcagcctgtcagtgagcctgctgcccctgaacagcctgctcctgagcccaagcaccctgcccgggctccagctcgaggtgacagtgaagataggaggggcccgg

SEQ ID NO: 94245 - DNA, 120 bp, Artificial Sequence
  ENSG00000089169_7 (sequence is synthesized)
gtcagaagacaggccctgacccagcctctgctcccgggcgaggaaactatgggcctcccgtgcgcagggcctccgaggcacgaatgagctcatctagccgagattcagagagctgggacc

SEQ ID NO: 94246 - DNA, 120 bp, Artificial Sequence
  ENSG00000089169_8 (sequence is synthesized)
acagtgggggtgctggagactccagccggagcccagcaggtttgagacgggccaactcagtccaggcctccagacctgccccaggctcggtgcagagcccagcgccacctcagcctgggc

SEQ ID NO: 94247 - DNA, 120 bp, Artificial Sequence
  ENSG00000089169_9 (sequence is synthesized)
agccagggaccccaggaggaagcagaccgggtcctgggccagcaggacgctttccagatcagaagccagaggtggctccgagcgaccctgggaccactgccccaccccgagaggagagaa

SEQ ID NO: 94248 - DNA, 120 bp, Artificial Sequence
  ENSG00000089169_10 (sequence is synthesized)
cagggggagtcgggggctacccagcagttggagccagagaggaccgaatgagccacccctccggaccctattcccaagcatctgcagctgccccccagcctgctgcagcccgccagccac

SEQ ID NO: 94249 - DNA, 120 bp, Artificial Sequence
  ENSG00000089169_11 (sequence is synthesized)
cacccccagaggaggaggaagaggaagccaacagctacgattcggatgaagcaaccaccctgggtgccctggaattcagccttctctacgaccaggacaacagctccctgcagtgcacca

SEQ ID NO: 94250 - DNA, 120 bp, Artificial Sequence
  ENSG00000089169_12 (sequence is synthesized)
ccagcaagtccaacaagcttcgtacaaaaactctgcggaatacccggaaccccatctggaatgagaccctcgtgtatcacggcatcaccgatgaggacatgcaaaggaagaccctcagga

SEQ ID NO: 94251 - DNA, 120 bp, Artificial Sequence
  ENSG00000089169_13 (sequence is synthesized)
tctccgtctgtgatgaggacaaatttggccacaatgaatttattggtgagaccagattctccctcaagaaactgaagcccaaccagaggaagaatttcaacatctgcctggagcgagtga

SEQ ID NO: 94252 - DNA, 120 bp, Artificial Sequence
  ENSG00000089169_14 (sequence is synthesized)
ttcctatgaaacgtgctgggaccaccgggtcagcccgaggcatggccctttatgaggaagagcaggtggagcgtgttggtgacatcgaggagcgtggcaagatcctggtctccctcatgt

SEQ ID NO: 94253 - DNA, 120 bp, Artificial Sequence
  ENSG00000089169_15 (sequence is synthesized)
acagcacacagcagggaggcctcattgtgggcatcatacgctgcgtgcacctggctgccatggacgctaatggctactcagacccattcgtcaagctctggctgaaaccggacatgggaa

SEQ ID NO: 94254 - DNA, 120 bp, Artificial Sequence
  ENSG00000089169_16 (sequence is synthesized)
agaaggccaaacacaagactcaaattaaaaagaaaaccttgaatcccgaattcaatgaggagtttttctatgacatcaaacacagtgacctggcaaagaagtcactggacatttcagtct

SEQ ID NO: 94255 - DNA, 120 bp, Artificial Sequence
  ENSG00000089169_17 (sequence is synthesized)
gggactatgacatcggcaagtccaatgattacatcggaggctgccagctggggatctctgccaagggagagcgcttaaaacactggtacgagtgtctgaaaaataaagacaagaagatag

SEQ ID NO: 94256 - DNA, 120 bp, Artificial Sequence
  ENSG00000089169_18 (sequence is synthesized)
agcgctggcaccagctacagaatgagaaccacgtgtcaagtgattaggctagtgcccaggtccccatctccatgtcccgggtcccccccagcctgctctagctgcccaccgcaccctgat

SEQ ID NO: 94257 - DNA, 120 bp, Artificial Sequence
  ENSG00000089169_19 (sequence is synthesized)
ctctcttctctatgcctacctccccccataccctgctgatctccctgagcctgcctttgagcccccgtcacgttgggcactgctgccaaagactccctcctccctgatgctgggatgtgg

SEQ ID NO: 94258 - DNA, 120 bp, Artificial Sequence
  ENSG00000089169_20 (sequence is synthesized)
gctctgaatacagcccctctctcatccctgggatggagcaatggggatggggttggggagacgtttacaaagaggttgatcatttaataacctctcagtttgggtaaattacaaaggttc

SEQ ID NO: 94259 - DNA, 81 bp, Artificial Sequence
  ENSG00000089169_21 (sequence is synthesized)
catttaataacctctcagtttgggtaaattacaaaggttcttcatcatttaggactgtttttagaccctcctagccttgaa

SEQ ID NO: 94260 - DNA, 120 bp, Artificial Sequence
  ENSG00000089169_22 (sequence is synthesized)
ttgtcagcagacccggacaatgctgtgagagaagcattggggcacaaatagagcctccgggctcccactgccccctgagatgtacaccctgattgccaggaaaacagactgctgtgttca

SEQ ID NO: 94261 - DNA, 120 bp, Artificial Sequence
  ENSG00000089169_23 (sequence is synthesized)
gtaacacaccctccctgctccaagtgcaccaggatgcaaatgcacagaattcaccaggggcttggacgctctcctctttccgaatgtcacctgtgtgcttcctagcaaaacaaaaacaaa

SEQ ID NO: 94262 - DNA, 120 bp, Artificial Sequence
  ENSG00000089169_24 (sequence is synthesized)
acacagggctttgcagtagtggtggcagccgcggcagaaactggctctggggaagcaattgattcgtctactgccagcagcccggagttgcctacgcggactggaaaggaagggagaagg

SEQ ID NO: 94263 - DNA, 120 bp, Artificial Sequence
  ENSG00000089169_25 (sequence is synthesized)
tccctgcctttcttccctttgcctttctctctctctaaagcagtaacaccgcaaaaacaacagcaaaaaaagtgtatgttaacctagcctcacccccttgctctcaccagcctgaccagg

SEQ ID NO: 94264 - DNA, 120 bp, Artificial Sequence
  ENSG00000089169_26 (sequence is synthesized)
aaactgagaaactggcccaaacctgagattccacttgggcccacgcttcttaactgacccactcctcccgttggcagaaccagacattcccagggcttgggccaatggctggcactgccc

SEQ ID NO: 94265 - DNA, 120 bp, Artificial Sequence
  ENSG00000089169_27 (sequence is synthesized)
tgagtgcatggcagcatccctcaagctgtgtagatgccccatagaggactctctcatccgtgggctccccgggtgggcacggaggcatttagaagaccagggccatgggtctgaggaagc

SEQ ID NO: 94266 - DNA, 120 bp, Artificial Sequence
  ENSG00000089169_28 (sequence is synthesized)
ctcagccaaagcctccagcctttctcctttctccgctcttaggtaaatgaacaagctaccctcctccccaatgcccttgactctgtttcattgactcttttgcatcccatctctcactca

SEQ ID NO: 94267 - DNA, 120 bp, Artificial Sequence
  ENSG00000089169_29 (sequence is synthesized)
gaaccccctccagtctctctgtctctctttgtctgtctctctgtctcctgcactctcgttactaagcttcctgggagaatcaaataatatcatggctatggaacagtagagagagacagg

SEQ ID NO: 94268 - DNA, 120 bp, Artificial Sequence
  ENSG00000089169_30 (sequence is synthesized)
cctgatgccaaaggctttgggctcatcatcaatctttcactttcttcctataaaaaaaattattttataaaggaggaaaaggcaatgtgggcaaacattacaaatttgaggttgaagtca

SEQ ID NO: 94269 - DNA, 120 bp, Artificial Sequence
  ENSG00000089169_31 (sequence is synthesized)
ggcaatcttcaatgccctgtgagaaaggttcgattttcccaattttgatgaagtcttccctcatgaaaatcactcccagtcatcccaaacccctgacattctctacagaagcatcagaca

SEQ ID NO: 94270 - DNA, 120 bp, Artificial Sequence
  ENSG00000089169_32 (sequence is synthesized)
gatactcaaactctcactttccccaaatcacatctcttaacttttcaacgccctccaccctcagctccctgcacaattcatgggaggactcatttcttgccttgaataaccattttctaa

SEQ ID NO: 94271 - DNA, 120 bp, Artificial Sequence
  ENSG00000089169_33 (sequence is synthesized)
acatcgagctcttcaccttccccaaggtggccaacagcttcctggctgccatctttccttttgaccttatctttccccattagtccctggtggcacctactctcagcccacctccctcac

SEQ ID NO: 94272 - DNA, 120 bp, Artificial Sequence
  ENSG00000089169_34 (sequence is synthesized)
cacagtttccccttaggagacagcatgctggctgtgtcgcccaagcctgatgctggtgtaggcgctggaatcagcatgcagcaagctcacagtgcccctagtctgggtgcccgctgtccc

SEQ ID NO: 94273 - DNA, 120 bp, Artificial Sequence
  ENSG00000089169_35 (sequence is synthesized)
cgacaaatgtaaccacctccctgcctagaatacacacacgtcctccggtgcatgcacaaccacccagcatctttctttgtgatgatgtagccaaaaataaagtaggagcatccaagaaaa

SEQ ID NO: 94274 - DNA, 120 bp, Artificial Sequence
  ENSG00000089169_36 (sequence is synthesized)
tttctttttgtcttggtcctgcatgatttaggggtagttgatgtgtctgtgtgtctacgtgtgtgcactggtgctttgattttattttgggaagagtaggagagtcaaatgaacaatttt

SEQ ID NO: 94275 - DNA, 120 bp, Artificial Sequence
  ENSG00000089169_37 (sequence is synthesized)
gttcctaacccttgatcttggcttgttaaccctttctgagcttccctttagcggggggatgaggatggtcggctgtttccacatttaagggcagagctgggtgaagggtggtgttagtgc

SEQ ID NO: 94276 - DNA, 120 bp, Artificial Sequence
  ENSG00000089169_38 (sequence is synthesized)
tcgagggtcacgcgcgggtggctttgccgcggtggtggcagcggtggcagaggcgacaccgctggaggcggcggagggacgggcccaccaacgctgcaggccggcacctccgctgagctt

SEQ ID NO: 94277 - DNA, 84 bp, Artificial Sequence
  ENSG00000089169_39 (sequence is synthesized)
ctttgccgcggtggtggcagcggtggcagaggcgacaccgctggaggcggcggagggacgggcccaccaacgctgagcagatca

SEQ ID NO: 94278 - DNA, 120 bp, Artificial Sequence
  ENSG00000089169_40 (sequence is synthesized)
tagttcaccgcaacctccgcctcctgggctccagtgatccttccatcttagcctcctgagtagctgggaccacagcccctggacaccatgtttctattttctgcttctgtgaaattgcct

SEQ ID NO: 94279 - DNA, 120 bp, Artificial Sequence
  ENSG00000089169_41 (sequence is synthesized)
actgcagaacatgaggatctcagttagtgagctcttgggacctcagttccccacccatcaaatgactcagtctctttctcaagattcttcctgctcagaatctacagtattttgggggtg

SEQ ID NO: 94280 - DNA, 120 bp, Artificial Sequence
  ENSG00000089169_42 (sequence is synthesized)
gtccatggccaaagaacagatccatgtgggctgtctttcacatttcctttgaatgaagatttagttaacaaagaacacacaggtcagggacaagtttggtttctaagagtaatttgattt

SEQ ID NO: 94281 - DNA, 120 bp, Artificial Sequence
  ENSG00000089169_43 (sequence is synthesized)
tatttcctcgtatgacccaagagaggaaatgagctcaaggggtgctgtccagcactccattagaggtcagccatgtgcagattggttttcttaaataattctctctaccaccccctcccc

SEQ ID NO: 94282 - DNA, 120 bp, Artificial Sequence
  ENSG00000089169_44 (sequence is synthesized)
cacctacccaatccttccagaagaagtagaattgccgtggtcactactgaagcagctgacctgctgggtgcagttatgggagaaaaaatgggagaccactaagcagtttctgatcaaata

SEQ ID NO: 94283 - DNA, 120 bp, Artificial Sequence
  ENSG00000089169_45 (sequence is synthesized)
aagattttttaaaagccagaacttcccattatttttgcttagctctttggtaacttctaattcctcatttttgtctcttcttaaaaattatcctcaaaaccacttctgtagatgagaatg

SEQ ID NO: 94284 - DNA, 120 bp, Artificial Sequence
  ENSG00000089169_46 (sequence is synthesized)
aaatgttcgccctctttacaggtcaagaaacagaggcacggtaaagttacgctcatgtttaaagttgctccgctggtgacaacctgaatcagaatccaaatgtcccagcccttaggagtg

SEQ ID NO: 94285 - DNA, 120 bp, Artificial Sequence
  ENSG00000089169_47 (sequence is synthesized)
tttagcccattgtgtttactcacccaggaaatattttgttttgtttggtttgtgttttgttctctctctcttttttaagagacagggtctcgctctattgcccaggctgtagtgcagtgg

SEQ ID NO: 94286 - DNA, 120 bp, Artificial Sequence
  ENSG00000089169_48 (sequence is synthesized)
atcatagctcactgcagcctcgaactctggggctcaagagatccttccacctcagcttcctgagtacctgggactgaaggcatacatcactgtgcccagataatttttgttattttttat

SEQ ID NO: 94287 - DNA, 90 bp, Artificial Sequence
  ENSG00000089169_49 (sequence is synthesized)
tttggcctcctaaagtgcagagattacaggcacgagccaccatacgcagcctcacccagaaaatattgattgagtacctactatgtgcca

SEQ ID NO: 94288 - DNA, 120 bp, Artificial Sequence
  ENSG00000089169_50 (sequence is synthesized)
ctcacccagaaaatattgattgagtacctactatgtgccagacactgggcctcactggaaaagagccctgtaggcagaagaaacagtttgctcaaaggcccttgggtggaaaggagaagt

SEQ ID NO: 94289 - DNA, 120 bp, Artificial Sequence
  ENSG00000089169_51 (sequence is synthesized)
aaggagtggggtgaggaggatggcataaggttaggttgggatggagcagaaacccaacacacacggtcttaaggccacatgaaggattttgaactctcccctgagtttaaaaggaaccca

SEQ ID NO: 94290 - DNA, 120 bp, Artificial Sequence
  ENSG00000089169_52 (sequence is synthesized)
aagtggagtgacaataatcagatttgcatcttcccctttctgtgcatacacccagcctctctctagggattgggggcagcctaaggtgggatagatggtaaaatgccaggcaccaccagc

SEQ ID NO: 94291 - DNA, 120 bp, Artificial Sequence
  ENSG00000089169_53 (sequence is synthesized)
catggccatcaatttgacttatggggagaaagtgagcatgctaagaacacagactctagatgcaacatctggattcaatcccagctgtgtgagctagggcacacttctgcctctctggat

SEQ ID NO: 94292 - DNA, 120 bp, Artificial Sequence
  ENSG00000089169_54 (sequence is synthesized)
ctcagtttctgtttctgtaaactgagtggttgtggttctactgcctagggtcatgtggggattaaatatgcctaagttgctcagtcaagtgcctggtaccaagcagatgctctaatgcat

SEQ ID NO: 94293 - DNA, 120 bp, Artificial Sequence
  ENSG00000089169_55 (sequence is synthesized)
attggtcattatcaatgttgatccctttctgatttattcatcaattcaccctgataaagaaggggcctttggggtcaagaggctgttcttattcattaaacgtcatccataatagcatgt

SEQ ID NO: 94294 - DNA, 120 bp, Artificial Sequence
  ENSG00000089169_56 (sequence is synthesized)
ccttctgaagctggacttgaacctgagaaaatgtgacctggggctgctggcggccagcttgtccccgttaggtgacaataagcagacagaagagccaagcagctatggaggaaaatcagg

SEQ ID NO: 94295 - DNA, 120 bp, Artificial Sequence
  ENSG00000089169_57 (sequence is synthesized)
gagagggaggaagaggagggagaggggcgatggagaaggtcatcagttgggtcaaagatggagctactagccaggcctgagacctgagcccctggacaccatgtttctattttctgcttc

SEQ ID NO: 94296 - DNA, 120 bp, Artificial Sequence
  ENSG00000089169_58 (sequence is synthesized)
tgtgaaattgcctcttctacatacctcatgcaacgttcgttctacataattcagcaccagcttagattctcactatcaaattgaaccctttcccctttgctatccacacaggagcactag

SEQ ID NO: 94297 - DNA, 120 bp, Artificial Sequence
  ENSG00000089169_59 (sequence is synthesized)
aagcctccagcgtcgcggagcactagacatctactatgactgacaccgtgttcagcaacagttctaaccgttggatgtaccccagtgaccggccccttcaatcaaagttgcagcattcta

SEQ ID NO: 94298 - DNA, 120 bp, Artificial Sequence
  ENSG00000089169_60 (sequence is synthesized)
ggtggactttgaaggattggttgtgctttcaagtgtctgttaagagtcttaagccaacaaattgcccttcctctgtagatggtttttccttccactgataaagaacagctccaggcaggc

SEQ ID NO: 94299 - DNA, 120 bp, Artificial Sequence
  ENSG00000089169_61 (sequence is synthesized)
gctgtgtactattggaccagtccttaagattttggatattcccctttctccatccaaactccactttcttcatgggtaaactgaagccctttctactgagttttcagggtggatgggctg

SEQ ID NO: 94300 - DNA, 120 bp, Artificial Sequence
  ENSG00000089169_62 (sequence is synthesized)
aataaatatgaattgtgcagggctctgtagtaataataaaagtgtgctggctattgtgtcagtgtgctttggatgaggaggaaagataaaaatgggcactcatgaaggtaagagcaacag

SEQ ID NO: 94301 - DNA, 120 bp, Artificial Sequence
  ENSG00000089169_63 (sequence is synthesized)
aaggacagatcttagccaactggtctacctgagggatggcctgacatcatgtctgtgtttccacccagttgttgcatggtcagcttctgcacttgggtctaggactcctatatctccttc

SEQ ID NO: 94302 - DNA, 120 bp, Artificial Sequence
  ENSG00000089169_64 (sequence is synthesized)
agagttcaccataaatcgttaccaagagggtagcacagggaactctccagcaatgccaagccgcccagaggcttcattgtcatccctggtggcatatctagtgtacaagaggtggaaatt

SEQ ID NO: 94303 - DNA, 120 bp, Artificial Sequence
  ENSG00000089169_65 (sequence is synthesized)
aaaattaggaactgagagagactttcaccaccaagatcacactggagcctgggagaatactcggcttgctgagaaggccttcctggaccctgttatttctcctactatccataagcaagt

SEQ ID NO: 94304 - DNA, 120 bp, Artificial Sequence
  ENSG00000089169_66 (sequence is synthesized)
ctgatttggactaattaaaagtgaaagatgaatagaaggaaatcagtaaaagaaaattactgctactaaattgctactattgacattatcactattatccaagtattatgattaattatt

SEQ ID NO: 94305 - DNA, 120 bp, Artificial Sequence
  ENSG00000089169_67 (sequence is synthesized)
aaaatgattaagagggagaagcaaaacagtaaaaattttaaaaagcaaccatagtaaaaatacattttagttggactagaccactaggactgaccagataaagcccttgcaataatttca

SEQ ID NO: 94306 - DNA, 120 bp, Artificial Sequence
  ENSG00000089169_68 (sequence is synthesized)
attgatgctaagtgataaaatctggactaaatgacaattccagattgagtgcaggcggtacttctgaaaggaagggtacagcgtttttcataagataacttatcaaggcacttagcacaa

SEQ ID NO: 94307 - DNA, 120 bp, Artificial Sequence
  ENSG00000089169_69 (sequence is synthesized)
tgcctgccacctaagaggcattcaacaaatgttttcttcctgacaaggcaagagcaatttctactccttgcagagaatcaccaaattgccaacatatattgcatccctgaggagtcccca

SEQ ID NO: 94308 - DNA, 120 bp, Artificial Sequence
  ENSG00000089169_70 (sequence is synthesized)
gttttcaccactaaaatactccttcttcctagttcttctaggctgagaaggctgtatagcataattgttctttataaagcctgtgtatgctcatatgtgtttgtgcatgcaaaaaaaaat

SEQ ID NO: 94309 - DNA, 120 bp, Artificial Sequence
  ENSG00000089169_71 (sequence is synthesized)
gtgaaattgtaaacaggagctagatcaaagaggaggttgggagaaagacttttaatttttaaaacatattcttaggcaatagtcaatgaacccctttgtaggcttcttaagtaccggttt

SEQ ID NO: 94310 - DNA, 120 bp, Artificial Sequence
  ENSG00000089169_72 (sequence is synthesized)
ttttattcctaagcaataaaaaaggggatgccccttcataaactaccagaggggaaggactatgttcatggccatttacctacaaggaaacttgagctctattagaaaaacctcaccagc

SEQ ID NO: 94311 - DNA, 120 bp, Artificial Sequence
  ENSG00000089169_73 (sequence is synthesized)
cttcccaatttcaagcagagaattcactgaaaagaggatgacagtgctttgttacacagagtgtttgttggaaggggatcacgggacctggggcagaggatcggcacgggaagacctcct

SEQ ID NO: 94312 - DNA, 120 bp, Artificial Sequence
  ENSG00000089169_74 (sequence is synthesized)
tgctcccagaatgccagctcaaggacctctccttggcccataacccctaggactcggcctcttacctcccaatgctgtgggttcagagggctcttacccacatgtcttcctctgttgtat

SEQ ID NO: 94313 - DNA, 84 bp, Artificial Sequence
  ENSG00000089169_75 (sequence is synthesized)
gggcccaccaacgctgcaggccggtcagcatggctcactgcagcctcgaccccctaggctcaagtgatcctcctgcttcagcct

SEQ ID NO: 94314 - DNA, 120 bp, Artificial Sequence
  ENSG00000089169_76 (sequence is synthesized)
ccagacagtttcaccaagatcgttgtacactgagacccagagagggcaaggaacctgcccaaggtcacagtgaaacaaatgcctacaactggcaagaatgtgggtctggagtctcaggca

SEQ ID NO: 94315 - DNA, 120 bp, Artificial Sequence
  ENSG00000089169_77 (sequence is synthesized)
gtgcactcctggaggatataagatggtgttttgttcatcttagcacagggattggcacttggtagacacccactggatgcttgttgaatgaacaaatgaatgaatggacaaatgaacagg

SEQ ID NO: 94316 - DNA, 120 bp, Artificial Sequence
  ENSG00000089169_78 (sequence is synthesized)
gcctcaagtgaacaaacaaatggcagtgctaatgtgggaacctgggacaagacttggtgatttgtaagcccccaggcagaggtggtaaagcaccttttgttatgtgtattcaagcatcca

SEQ ID NO: 94317 - DNA, 120 bp, Artificial Sequence
  ENSG00000089169_79 (sequence is synthesized)
tccagccaaaagtgctggattcaggaaagatggcatctagcccagtgaggtgaggaaactgaggcccagagaggacaggtcacttgagcaacgtcacacaggtggaaggaggattgtaga

SEQ ID NO: 94318 - DNA, 120 bp, Artificial Sequence
  ENSG00000089169_80 (sequence is synthesized)
acctgtgctttttaacaactgctgctgctgtgactcaccagagtctgagtattgagaagaaagaacacactgaaggcagaagagtcagaaagagctgagcgagtttgagacgggccaact

SEQ ID NO: 94319 - DNA, 120 bp, Artificial Sequence
  ENSG00000089169_81 (sequence is synthesized)
gtctttctacccggcagggaagggaggagttggcaagaatttggctcacccattccccctgcaagcctccagcgtcgcggggcaagaagaggagaagaggaagattgtggtccattcatg

SEQ ID NO: 94320 - DNA, 120 bp, Artificial Sequence
  ENSG00000089177_0 (sequence is synthesized)
gcaggtggggctgccgcggaactccaggtccggccgggagcagaggggcgggggcgagagggaagtgggcgggagccgcgatctgagtagccagcgtcgccggcgaccgcggagttctgg

SEQ ID NO: 94321 - DNA, 120 bp, Artificial Sequence
  ENSG00000089177_1 (sequence is synthesized)
gctagtgggaccccgcgcgggctggttcgggatgagcgatggcatcggtcaaggtggccgtgagggtccggcccatgaatcgcagggaaaaggacttggaggccaagttcattattcaga

SEQ ID NO: 94322 - DNA, 120 bp, Artificial Sequence
  ENSG00000089177_2 (sequence is synthesized)
tggagaaaagcaaaacgacaatcacaaacttaaagataccagaaggaggcactggggactcaggaagagaacggaccaagaccttcacctatgacttttctttttattctgctgatacaa

SEQ ID NO: 94323 - DNA, 120 bp, Artificial Sequence
  ENSG00000089177_3 (sequence is synthesized)
aaagcccagattacgtttcacaagaaatggttttcaaaaccctcggcacagatgtcgtgaagtctgcatttgaaggttataatgcttgtgtctttgcatatgggcaaactggatctggaa

SEQ ID NO: 94324 - DNA, 120 bp, Artificial Sequence
  ENSG00000089177_4 (sequence is synthesized)
agtcatacactatgatgggaaattctggagattctggcttaatacctcggatctgtgaaggactcttcagtcggataaatgaaaccaccagatgggatgaagcttcttttcgaactgaag

SEQ ID NO: 94325 - DNA, 120 bp, Artificial Sequence
  ENSG00000089177_5 (sequence is synthesized)
tcagctacttagaaatttataacgaacgtgtgagagatctacttcggcggaagtcatctaaaaccttcaatttgagagtccgtgagcatcccaaagaaggcccttatgttgaggatttat

SEQ ID NO: 94326 - DNA, 120 bp, Artificial Sequence
  ENSG00000089177_6 (sequence is synthesized)
ccaaacatttagtacagaattatggtgacgtagaagaacttatggatgcgggcaatatcaaccggaccaccgcagcgactgggatgaacgacgtcagtagcaggtctcatgccatcttca

SEQ ID NO: 94327 - DNA, 120 bp, Artificial Sequence
  ENSG00000089177_7 (sequence is synthesized)
ccatcaagttcactcaggctaaatttgattctgaaatgccatgtgaaaccgtcagtaagatccacttggttgatcttgccggaagtgagcgtgcagatgccaccggagccaccggggtta

SEQ ID NO: 94328 - DNA, 120 bp, Artificial Sequence
  ENSG00000089177_8 (sequence is synthesized)
ggctaaaggaagggggaaatattaacaagtccctcgtgactctggggaacgtcatttctgccttagctgatttatctcaggatgctgcaaatactcttgcaaagaagaagcaagttttcg

SEQ ID NO: 94329 - DNA, 120 bp, Artificial Sequence
  ENSG00000089177_9 (sequence is synthesized)
tgccttacagggattctgtgttgacttggttgttaaaagatagccttggaggaaactctaaaactatcatgattgccaccatttcacctgctgatgtcaattatggagaaaccctaagta

SEQ ID NO: 94330 - DNA, 120 bp, Artificial Sequence
  ENSG00000089177_10 (sequence is synthesized)
ctcttcgctatgcaaatagagccaaaaacatcatcaacaagcctaccattaatgaggatgccaacgtcaaacttatccgtgagctgcgagctgaaatagccagactgaaaacgctgcttg

SEQ ID NO: 94331 - DNA, 120 bp, Artificial Sequence
  ENSG00000089177_11 (sequence is synthesized)
ctcaagggaatcagattgccctcttagactcccccacagctttaagtatggaggaaaaacttcagcagaatgaagcaagagttcaagaattgaccaaggaatggacaaataagtggaatg

SEQ ID NO: 94332 - DNA, 120 bp, Artificial Sequence
  ENSG00000089177_12 (sequence is synthesized)
aaacccaaaatattttgaaagaacaaactctagccctcaggaaagaagggattggagttgttttggattctgaactgcctcatttgattggcatcgatgatgaccttttgagtactggaa

SEQ ID NO: 94333 - DNA, 120 bp, Artificial Sequence
  ENSG00000089177_13 (sequence is synthesized)
tcatcttatatcatttaaaggaaggtcagacatacgttggtagagacgatgcttccacggagcaagatattgttcttcatggccttgacttggagagtgagcattgcatctttgaaaata

SEQ ID NO: 94334 - DNA, 120 bp, Artificial Sequence
  ENSG00000089177_14 (sequence is synthesized)
tcggggggacagtgactctgatacccctgagtgggtcccagtgctctgtgaatggtgttcagatcgtggaggccacacatctaaatcaaggtgctgtgattctcttgggaagaaccaata

SEQ ID NO: 94335 - DNA, 120 bp, Artificial Sequence
  ENSG00000089177_15 (sequence is synthesized)
tgtttcgctttaaccatccaaaggaagccgccaagctcagggagaagaggaagagtggccttctgtcctccttcagcttgtccatgaccgacctctcgaagtcccgtgagaacctgtctg

SEQ ID NO: 94336 - DNA, 120 bp, Artificial Sequence
  ENSG00000089177_16 (sequence is synthesized)
cagtcatgttgtataaccccggacttgaatttgagaggcaacagcgtgaagaacttgaaaaattagaaagtaaaaggaaactcatagaagaaatggaggaaaagcagaaatcagacaagg

SEQ ID NO: 94337 - DNA, 120 bp, Artificial Sequence
  ENSG00000089177_17 (sequence is synthesized)
ctgaactggagcggatgcagcaggaggtggagacccagcgcaaggagacagaaatcgtgcagctccagattcgcaagcaggaggagagcctcaaacgccgcagcttccacatcgagaaca

SEQ ID NO: 94338 - DNA, 120 bp, Artificial Sequence
  ENSG00000089177_18 (sequence is synthesized)
agctaaaggatttacttgcggagaaggaaaaatttgaagaggagaggctgagggaacagcaggaaatcgagctgcagaagaagagacaagaagaagagacctttctccgcgtccaagaag

SEQ ID NO: 94339 - DNA, 120 bp, Artificial Sequence
  ENSG00000089177_19 (sequence is synthesized)
aactccaacgactcaaagaactcaacaacaacgagaaggctgagaagtttcagatatttcaagaactggaccagctccaaaaggaaaaagatgaacagtatgccaagcttgaactggaaa

SEQ ID NO: 94340 - DNA, 120 bp, Artificial Sequence
  ENSG00000089177_20 (sequence is synthesized)
aaaagagactagaggagcaggagaaggagcaggtcatgctcgtggcccatctggaagagcagctccgagagaagcaggagatgatccagctcctgcggcgtggggaggtacagtgggtgg

SEQ ID NO: 94341 - DNA, 120 bp, Artificial Sequence
  ENSG00000089177_21 (sequence is synthesized)
caactgcgtttcttcgaattcaagagaaggcagcttgtcaagctagtgaacttggagaaggacctggttcagcagaaagacatcctgaaaaaagaagtccaagaagaacaggagatccta

SEQ ID NO: 94342 - DNA, 120 bp, Artificial Sequence
  ENSG00000089177_22 (sequence is synthesized)
gagtgtttaaaatgtgaacatgacaaagaatctagattgttggaaaaacatgatgagagtgtcacagatgtcacggaagtgcctcaagatttcgagaaaataaagccagtggagtacagg

SEQ ID NO: 94343 - DNA, 120 bp, Artificial Sequence
  ENSG00000089177_23 (sequence is synthesized)
ctgcaatataaagaacgccagctacagtacctcctgcagaatcacttgccaactctgttggaagaaaagcagagagcatttgaaattcttgacagaggccctctcagcttagacaacact

SEQ ID NO: 94344 - DNA, 120 bp, Artificial Sequence
  ENSG00000089177_24 (sequence is synthesized)
ctttatcaagtagaaaaggaaatggaagaaaaagaagaacagcttgcacagtaccaggccaatgcaaaccagctgcaaaagctccaagccacctttgaattcactgccaacattgcacgt

SEQ ID NO: 94345 - DNA, 120 bp, Artificial Sequence
  ENSG00000089177_25 (sequence is synthesized)
caggaggaaaaagtgaggaaaaaggaaaaggagattttggagtccagagagaagcagcagagagaggcgctggagcgggccctggccaggctggagaggagacattctgcgctgcagagg

SEQ ID NO: 94346 - DNA, 120 bp, Artificial Sequence
  ENSG00000089177_26 (sequence is synthesized)
cactccaccctgggcatggagattgaagagcagaggcagaaacttgccagtctgaacagtggcagcagagagcagtcagggctccaggctagcctggaggctgagcaggaagccctggag

SEQ ID NO: 94347 - DNA, 120 bp, Artificial Sequence
  ENSG00000089177_27 (sequence is synthesized)
aaggaccaggagaggttagaatatgaaatccagcagctgaaacagaagatttatgaggtcgatggtgttcaaaaagatcatcatgggaccctggaagggaaggtggcttcttccagcttg

SEQ ID NO: 94348 - DNA, 120 bp, Artificial Sequence
  ENSG00000089177_28 (sequence is synthesized)
ccagtcagtgctgaaaaatcacacctggttcccctcatggatgccaggatcaatgcttacattgaagaagaagtccaaagacgccttcaggatttgcatcgtgtgattagtgaaggctgc

SEQ ID NO: 94349 - DNA, 120 bp, Artificial Sequence
  ENSG00000089177_29 (sequence is synthesized)
agtacatctgcagacacgatgaaggataatgagaaacttcacaatggcaccattcaacgtaaactaaaatatgagcggatggtttctcgctctttgggcgcaaatccagatgacctgaag

SEQ ID NO: 94350 - DNA, 120 bp, Artificial Sequence
  ENSG00000089177_30 (sequence is synthesized)
gacccaattaaaattagtatcccacgctacgtcctctgcgggcaaggaaaggatgcacacttcgagtttgaggtcaagattactgtcctagatgagacatggactgtattcaggcgttac

SEQ ID NO: 94351 - DNA, 120 bp, Artificial Sequence
  ENSG00000089177_31 (sequence is synthesized)
agtcgttttcgagaaatgcataaaacattgaagttaaagtatgcagagcttgctgcccttgaatttcctccaaagaaactatttggaaataaggatgaacgtgtgattgctgagagacga

SEQ ID NO: 94352 - DNA, 120 bp, Artificial Sequence
  ENSG00000089177_32 (sequence is synthesized)
agtcacttagagaaatacctcagggactttttcagcgtgatgctccagtccgcaacatctcccctccacatcaacaaagtgggactgactctctcgaaacataccatttgtgagttttca

SEQ ID NO: 94353 - DNA, 120 bp, Artificial Sequence
  ENSG00000089177_33 (sequence is synthesized)
ccattcttcaagaaaggagtctttgactacagcagccacgggacggggtagagccaggggtgatggaggaaccaccacagcagtgccttctcgtcgaagcgggctccgatgcagggcagc

SEQ ID NO: 94354 - DNA, 120 bp, Artificial Sequence
  ENSG00000089177_34 (sequence is synthesized)
tcccccatgcgaggatccgggtctgcctcctcctgctgaagacagacatgcagcagcgggcccgggccacctcacgtttccatacctagtgcctgagtttggggatgggatgctctgcct

SEQ ID NO: 94355 - DNA, 120 bp, Artificial Sequence
  ENSG00000089177_35 (sequence is synthesized)
gctgatgtggccctgacaggcagccgttaccgttccattgcggttgaacgtggccttttcccacagtgcttccttctcactgcgcagcaaagttcgtcccctgtggcaagatagatgtgg

SEQ ID NO: 94356 - DNA, 120 bp, Artificial Sequence
  ENSG00000089177_36 (sequence is synthesized)
ttgggccatcgtgggttccctgagcccagccagcctgggacctcccaaagtgggtggcttaccagaccacccttaaatgactttcatctggtttcctctttcaccaaaatatactcgtat

SEQ ID NO: 94357 - DNA, 120 bp, Artificial Sequence
  ENSG00000089177_37 (sequence is synthesized)
tttttatatttcttccatgtggctggctatattccaagaaaagcattttaaattatttcattgtatttttttctttttttccctcatttgaatcagaacttttatataaaacccaaacac

SEQ ID NO: 94358 - DNA, 120 bp, Artificial Sequence
  ENSG00000089177_38 (sequence is synthesized)
tgatgtttacacagaatttcatattctgcaaaagggattttttgatccaatcatgactgtagtcttccatgcttgacaaattggatgtagacaacattacttaaaacttctataaatccc

SEQ ID NO: 94359 - DNA, 120 bp, Artificial Sequence
  ENSG00000089177_39 (sequence is synthesized)
tacaattaggatatttatttaaccttgaatattcaagaacattctcccaaatctaaatggctactgtgcattcttgagctttttctgctaagcacaaaatgaacgcaaagctaaatgcat

SEQ ID NO: 94360 - DNA, 120 bp, Artificial Sequence
  ENSG00000089177_40 (sequence is synthesized)
atttttaagtattattcacattttttgttacagaatctattggatctttggctggaaaactagaatttatagcagtttattaatgataccttaaattactcaggacttaatgtagcattg

SEQ ID NO: 94361 - DNA, 120 bp, Artificial Sequence
  ENSG00000089177_41 (sequence is synthesized)
cacttctgtgtacagtaaaactgctttgttttactaaagagaaaaatgtgagtggaaaaaatatgtatgtggtatatactcaaatgtatataattctatctatagatttatatatgtata

SEQ ID NO: 94362 - DNA, 120 bp, Artificial Sequence
  ENSG00000089177_42 (sequence is synthesized)
cattctgtacagtagttccatcaaaatatgtaataattcacaccaattttattaaatgtatttgctttttcaaaatttaaattgagctgctatcaatattaaatgaagttatggcatcta

SEQ ID NO: 94363 - DNA, 120 bp, Artificial Sequence
  ENSG00000089177_43 (sequence is synthesized)
ctgatgccagagcctgatgccgctgcctgcgctaatcatcccttgctccagcaagatctggttcagctttctcttgattggaaaacagaaatccctgatttagttttgccaaatggagtt

SEQ ID NO: 94364 - DNA, 120 bp, Artificial Sequence
  ENSG00000089177_44 (sequence is synthesized)
caggtgtcatccaaattccagactaccttggttgacatgatttactttcttcatggaaatatggaagtcaatgtcccttccctggcagaagttcagttactgctctacacaacagtgaaa

SEQ ID NO: 94365 - DNA, 120 bp, Artificial Sequence
  ENSG00000089177_45 (sequence is synthesized)
gtcatgggtgactctggccatgaccagtgccagtcgctagtccttctgaacacccacattgcactggtgaaggaagactgtgttttttatccacgcattcgatctcgaaacatacctcct

SEQ ID NO: 94366 - DNA, 120 bp, Artificial Sequence
  ENSG00000089177_46 (sequence is synthesized)
ccgggtgcacaatttgatgtgatcaaatgccatgctttaagtgaattcaggtgtgttgttgttccagaaaagaaaaatgtgtcaacagtagaactagtcttcttacagaaactcaaacct

SEQ ID NO: 94367 - DNA, 120 bp, Artificial Sequence
  ENSG00000089177_47 (sequence is synthesized)
tcagtgggttccagaaatagtccacctgagcaccttcaggaagccccaaatgtccagttgttcaccaccccattgtatcttcaaggcagtcagaatgtcgcacctgaggtctggaaactt

SEQ ID NO: 94368 - DNA, 120 bp, Artificial Sequence
  ENSG00000089177_48 (sequence is synthesized)
actttcaattctcaagatgaggctctttggctaatctcacatttgacaagactctaaggaggagacttttaaagatgcactacatgttttttgagatcattaataaaataagcattgtga

SEQ ID NO: 94369 - DNA, 120 bp, Artificial Sequence
  ENSG00000089177_49 (sequence is synthesized)
aaacagtcaaggcaatatgaatatctccgtgtagctaattgaattggaactggaaaaatgcagacctctaaaattgaaaatgtaaatattttaaatatctacaataaaataaaaacagct

SEQ ID NO: 94370 - DNA, 120 bp, Artificial Sequence
  ENSG00000089177_50 (sequence is synthesized)
aatagcagagccccaataaaatatctttatcatcaccttgcttcattttcttgaaactcaggcttgtaaatttgtgcctgcttcattatttgtgaggtgattaaagcatttctgattgtt

SEQ ID NO: 94371 - DNA, 120 bp, Artificial Sequence
  ENSG00000089177_51 (sequence is synthesized)
gataatgagaaacttcacaatggcaccattcaacgtaaactaaaatatgagaaaaggcagttttgcccagcatggtatcttgacccgcttctgcccagagatgccactgacacttccagc

SEQ ID NO: 94372 - DNA, 120 bp, Artificial Sequence
  ENSG00000089177_52 (sequence is synthesized)
ctcattaaagaggagaggagggaggtggatcagaacgaccactgggatcatcccatgctgtggagcgtctcaggccctaaaacaacttcctcagcatcacaagagagaactcaccagcag

SEQ ID NO: 94373 - DNA, 120 bp, Artificial Sequence
  ENSG00000089177_53 (sequence is synthesized)
agggatcagtcctcagtacccgaggtattccaggacagtgaaaacaaatatggtcatcctgagcatgctggccattttgaaccaaaatgttttaatctacctaaaatctcttttcttaac

SEQ ID NO: 94374 - DNA, 120 bp, Artificial Sequence
  ENSG00000089177_54 (sequence is synthesized)
gaaagtaacaccgatgatgcagaagattttcagagtcagtcagaaaatttcagtgagctgatgactcataaagataaacatggcttgagagtcaagtccagttggactttgctgcaacat

SEQ ID NO: 94375 - DNA, 120 bp, Artificial Sequence
  ENSG00000089177_55 (sequence is synthesized)
acgtcccaagaagtgtctataaatagcggaggcaagcaggccaggcaaggcaaggtgctctgcttggttctgtctgaaggcatttcccatgaggagagagcatcctgcagtgccccgcag

SEQ ID NO: 94376 - DNA, 120 bp, Artificial Sequence
  ENSG00000089177_56 (sequence is synthesized)
agcgtactggcgtctgagttttatagtgagcagcaaggtgaggaagagttggatgctaaaaaaatgagctcatcggagtcactggtaaatatcagaacagaaggaaacaatggactggga

SEQ ID NO: 94377 - DNA, 120 bp, Artificial Sequence
  ENSG00000089177_57 (sequence is synthesized)
tatttttaccacaagttctcagacctttataaagataccagcagtcacctgcttcaggctggcacaaaggtgatcagccaagccaggcttgtggggaatctgtgtgccccgagggggctc

SEQ ID NO: 94378 - DNA, 120 bp, Artificial Sequence
  ENSG00000089177_58 (sequence is synthesized)
ccctcccaggtaacaacattcgtcagaagcctgccatttctgaagcacttagccccacacatgcccttgaagactgacatgcagtcaacagaatctcattctccggaagctcgggttggc

SEQ ID NO: 94379 - DNA, 120 bp, Artificial Sequence
  ENSG00000089177_59 (sequence is synthesized)
agcagcgagagcgaagctgcagggagcctgaggccagcagagggtgcggcgccttaccgggcctctgtctttgcagctacaggtttaccaggttcctcgccaagctcagtttttcgcctt

SEQ ID NO: 94380 - DNA, 120 bp, Artificial Sequence
  ENSG00000089177_60 (sequence is synthesized)
gaatatgaagatgctagaaagagctctgcatttaagcagagccttgtgcaattcccggaccaaatgctgaaactgcaagagtgccctttaaaagaccttcttaggcatgtgacttgttct

SEQ ID NO: 94381 - DNA, 120 bp, Artificial Sequence
  ENSG00000089177_61 (sequence is synthesized)
gaccctcaaccagcgtgtttgctcctgcttcagtcaactttatatgctttggtcctgtcagataatctcggctcaatgagcatttttcatgctctacctctctctggtctacaggagatt

SEQ ID NO: 94382 - DNA, 120 bp, Artificial Sequence
  ENSG00000089177_62 (sequence is synthesized)
cagattggctttggtggacagagtgttcgattcctgagctctgcagagggtcttctgctcactgtattcagttacaacaaatacctctctcaacagctgtgtcgtgacctcctgtgtgtc

SEQ ID NO: 94383 - DNA, 120 bp, Artificial Sequence
  ENSG00000089195_0 (sequence is synthesized)
gcaacacgtgggggcggtgccggtcggagggctcctagtgcgccaggttgtgggaagtgaggctggcggtggcgacaaccgaggaggaggggcgggacgccgtggagcacggcgaccggc

SEQ ID NO: 94384 - DNA, 120 bp, Artificial Sequence
  ENSG00000089195_1 (sequence is synthesized)
tgagcgtcatggagggctcaggggagcagccgggcccacaaccacagcatcccggagaccaccgcatccgcgacggcgacttcgtggtgctgaaacgtgaagatgtgtttaaagcagtac

SEQ ID NO: 94385 - DNA, 120 bp, Artificial Sequence
  ENSG00000089195_2 (sequence is synthesized)
aagtccagcggagaaaaaaagtaactttcgaaaaacagtggttctacctggataacgtcattggccatagttatggaactgcatttgaagtgaccagtggaggaagtctacagcccaaga

SEQ ID NO: 94386 - DNA, 120 bp, Artificial Sequence
  ENSG00000089195_3 (sequence is synthesized)
agaagagggaagagcctactgcagagactaaagaagcgggcactgataatcgaaatatagttgatgatgggaaatctcagaaacttactcaagatgacataaaagctttgaaggacaagg

SEQ ID NO: 94387 - DNA, 120 bp, Artificial Sequence
  ENSG00000089195_4 (sequence is synthesized)
gcattaaaggagaggaaatagttcagcagttaattgaaaatagtacaacattccgagacaagacagaatttgcccaagataaatatattaaaaagaagaaaaaaaaatatgaagccatca

SEQ ID NO: 94388 - DNA, 120 bp, Artificial Sequence
  ENSG00000089195_5 (sequence is synthesized)
ttactgttgtgaagccatccacccgtattctttcaattatgtattatgcaagagaacctggaaaaattaaccacatgagatacgatacactagcccagatgttgacgttgggaaatatcc

SEQ ID NO: 94389 - DNA, 120 bp, Artificial Sequence
  ENSG00000089195_6 (sequence is synthesized)
gtgctggcaacaaaatgattgtgatggaaacgtgtgcaggcttggtgctgggtgcaatgatggaacgaatgggaggttttggctccattattcagctataccctggaggaggacctgttc

SEQ ID NO: 94390 - DNA, 120 bp, Artificial Sequence
  ENSG00000089195_7 (sequence is synthesized)
gggcagcaacagcatgttttggatttcccaaatcttttctcagtggtctttatgaattccctctcaacaaagtggacagtcttctacatggaacattttctgccaagatgttatcttcag

SEQ ID NO: 94391 - DNA, 120 bp, Artificial Sequence
  ENSG00000089195_8 (sequence is synthesized)
agccaaaagacagtgctttggttgaagaaagtaatggcacactggaggaaaaacaggcttctgaacaagagaatgaagacagcatggcagaggccccagagagcaaccacccagaagacc

SEQ ID NO: 94392 - DNA, 120 bp, Artificial Sequence
  ENSG00000089195_9 (sequence is synthesized)
aggaaacaatggaaacaatttctcaagatccagaacataaggggcctaaagagagaggaagcaaaaaagattatattcaggaaaaacagaggagacaagaagagcagaggaaaagacatt

SEQ ID NO: 94393 - DNA, 120 bp, Artificial Sequence
  ENSG00000089195_10 (sequence is synthesized)
tagaggctgccgctctgctgagtgaaagaaacgcagatggtttaattgtagctagtcgtttccaccccactcccctgctgctgtctttgctggactttgtggccccttcaaggccgtttg

SEQ ID NO: 94394 - DNA, 120 bp, Artificial Sequence
  ENSG00000089195_11 (sequence is synthesized)
tggtctactgtcagtacaaagagcctctgttggaatgctacacaaaactgcgggagaggggaggggtcatcaacctcaggctgtctgaaacctggctcagaaattatcaggttttgccag

SEQ ID NO: 94395 - DNA, 120 bp, Artificial Sequence
  ENSG00000089195_12 (sequence is synthesized)
ctccggcttcaccgttgccatggacaaccttaaagcagacaccagcctcaaatctaatgcaagcactttagaatcacacgagactgaggagcctgcagctaaaaaacgaaaatgcccaga

SEQ ID NO: 94396 - DNA, 120 bp, Artificial Sequence
  ENSG00000089195_13 (sequence is synthesized)
gtctgactcttaacccttttgagaattgctctgaattttgttctcaggcattatacagttagtaattaaactttaaatgccattactacttgttttttcatatcccaagaataagaacat

SEQ ID NO: 94397 - DNA, 120 bp, Artificial Sequence
  ENSG00000089195_14 (sequence is synthesized)
gtctatgtacccgtttctaggaaggaggagtatatgccttttgtctatttctgacacagatgcatttggtctgtcaaaactgcaaccatggggtatgtagtatgaccaactgcatttaac

SEQ ID NO: 94398 - DNA, 120 bp, Artificial Sequence
  ENSG00000089195_15 (sequence is synthesized)
aaaactcctctaagtacttctaaatattctgtgcaaatatcttgagaacttcaacatcctaaaaatgtgtttctacaagactttatattttaagctaagtggaataatacaacgtaacta

SEQ ID NO: 94399 - DNA, 120 bp, Artificial Sequence
  ENSG00000089195_16 (sequence is synthesized)
aaacatggcgggtaccgaaaggagggcaattcatggaagaaatttcctctgttcattccgttctcttcaacctaagcaatatggatgtgtgagtgtgtgatttattatggtaccaaaaat

SEQ ID NO: 94400 - DNA, 120 bp, Artificial Sequence
  ENSG00000089195_17 (sequence is synthesized)
gtccaccttctttcctgcagcggaataagcttttttgaaatgctgaggttttattttaatagttgacaacctgggaaagttctgagtatttattttactgctcttttttgtgcatagaaa

SEQ ID NO: 94401 - DNA, 120 bp, Artificial Sequence
  ENSG00000089195_18 (sequence is synthesized)
ggtttagtagggtacttttttgcattaatttgccaatactcttattctttgttctaaataaagtgactagaatttttgtgtactattcaattaaaggaaacaaatgtcttttccccctct

SEQ ID NO: 94402 - DNA, 120 bp, Artificial Sequence
  ENSG00000089195_19 (sequence is synthesized)
atggtcttatggatacacatttgcacacacacacatatgtatatagatgttggtatatatacacacatatatttatatatacacagatatatacatacacatgcaagtggagacatagat

SEQ ID NO: 94403 - DNA, 120 bp, Artificial Sequence
  ENSG00000089195_20 (sequence is synthesized)
tgtaccacctgtatgaatatgtatgtacacatggggacagaaagagtgtgcagtctatttgaactgtatcaaagtcttgtgcaggacttagaccaattctcattgtattagtgtcattcc

SEQ ID NO: 94404 - DNA, 120 bp, Artificial Sequence
  ENSG00000089195_21 (sequence is synthesized)
ttgtcaaatgtccctaaagtgcctttcttgattattaatgctgaagaactctgtcatgattagatggttaccctttctaagctctgaaaaactctaatcatttgatcatgtgctgtagca

SEQ ID NO: 94405 - DNA, 120 bp, Artificial Sequence
  ENSG00000089195_22 (sequence is synthesized)
aagaaagtgtttagaatcagccaaggctcttgttcatttgagagattgagtcttgctcactggaacatggtcatcgtttgcgttgctcctgtcatagaataggcctgtatcatacagcaa

SEQ ID NO: 94406 - DNA, 120 bp, Artificial Sequence
  ENSG00000089195_23 (sequence is synthesized)
ggaacatctcagaaaaaaaattttttttccaaatagcatgtgctatgccaatgtgattactaagtacaattttgagtcctttatcctaattgctattaaagaataaaaatgtcggccggg

SEQ ID NO: 94407 - DNA, 120 bp, Artificial Sequence
  ENSG00000089195_24 (sequence is synthesized)
aggcaggagactcctcagtgcatgtgggctctgcttcagacagattggcattctctttctccttgtctgctttgactctagtgggacccgagatgaggattttgtcttgggggttttttt

SEQ ID NO: 94408 - DNA, 120 bp, Artificial Sequence
  ENSG00000089195_25 (sequence is synthesized)
aaagaaaggaggctgaggctggcaggggtggggaattgatgatgctggtttcagggtttcagaagaaattgaatcttctccatcactgcatcaagatgggccctgtggtcccactggatg

SEQ ID NO: 94409 - DNA, 120 bp, Artificial Sequence
  ENSG00000089195_26 (sequence is synthesized)
taaaaaatcaagaatgtcattaaatgcgacttagagttgccaagtaccacaagagcttctaacctagttcgcgtttcctagaaagaaatagctcatgattgtattctgttttggatttct

SEQ ID NO: 94410 - DNA, 120 bp, Artificial Sequence
  ENSG00000089195_27 (sequence is synthesized)
agaatgttatatttaaatctcttctctttgtgagtcatgcaaattaaatacatgatcattttaaatgcattttaaaacctgtgctccactttgagggtgtagagaaataatttgtctggc

SEQ ID NO: 94411 - DNA, 120 bp, Artificial Sequence
  ENSG00000089195_28 (sequence is synthesized)
attttccttacagtttaattgtagctagtcgtttccaccccactcccctgctgctgtctttgctggactttgtggccccttcaaggccgtttgtggtctactgtcagtacaaagaggtaa

SEQ ID NO: 94412 - DNA, 120 bp, Artificial Sequence
  ENSG00000089199_0 (sequence is synthesized)
acaccgcggggaccaggaggcacgctggttttccggggccgctccatcgcgccttcctcctgcgcctcgcttctccggtccagccgccatcttcctttccgcacaggggccgccgagcgg

SEQ ID NO: 94413 - DNA, 120 bp, Artificial Sequence
  ENSG00000089199_1 (sequence is synthesized)
ggccatgcagccaacgctgcttctcagcctcctgggagccgtggggctggcggctgtcaattccatgccagtggataacaggaaccacaatgaaggaatggtgactcgctgcatcattga

SEQ ID NO: 94414 - DNA, 120 bp, Artificial Sequence
  ENSG00000089199_2 (sequence is synthesized)
ggtcctctcaaatgccttgtcgaagtccagcgctccacccatcacccctgagtgccgccaagtcctgaagacgagtagaaaagacgtcaaagacaaagagacaactgaaaatgaaaacac

SEQ ID NO: 94415 - DNA, 120 bp, Artificial Sequence
  ENSG00000089199_3 (sequence is synthesized)
aaagtttgaagtaagattgttaagagacccagctgatgcctcggaagcccacgagtcctccagcaggggagaggcaggagccccaggggaggaggacatccaaggcccaacaaaggcaga

SEQ ID NO: 94416 - DNA, 120 bp, Artificial Sequence
  ENSG00000089199_4 (sequence is synthesized)
cacagagaaatgggcagagggaggcgggcacagccgagagcgagcggatgagccccagtggagcctctatccctccgacagccaagtctctgaagaagtgaagacacgccattctgagaa

SEQ ID NO: 94417 - DNA, 120 bp, Artificial Sequence
  ENSG00000089199_5 (sequence is synthesized)
gagccagagagaggatgaggaggaggaggagggagagaactatcaaaaaggggagcgaggggaagatagcagtgaagagaaacaccttgaagagccaggagagacacaaaacgcttttct

SEQ ID NO: 94418 - DNA, 120 bp, Artificial Sequence
  ENSG00000089199_6 (sequence is synthesized)
caatgaaagaaagcaggcttcagctataaaaaaagaggagttagtggccagatcggaaacacatgctgccgggcattctcaggagaagacacatagccgagagaagagtagccaggagag

SEQ ID NO: 94419 - DNA, 120 bp, Artificial Sequence
  ENSG00000089199_7 (sequence is synthesized)
tggagaggagacagggagccaggagaatcacccccaggagtctaaaggccaaccccgaagccaggaagaatctgaggaaggtgaggaagatgccacctctgaggtggacaaacgacgcac

SEQ ID NO: 94420 - DNA, 120 bp, Artificial Sequence
  ENSG00000089199_8 (sequence is synthesized)
gaggcccagacaccaccacgggaggagcaggcccgacaggtcctctcaaggagggagtcttccctctgaggaaaagggacacccccaggaggaatctgaggagtcaaacgtcagcatggc

SEQ ID NO: 94421 - DNA, 120 bp, Artificial Sequence
  ENSG00000089199_9 (sequence is synthesized)
cagtttaggggaaaagagggaccaccattcaacccactacagggcttcagaggaagaacctgaatatggagaagaaataaagggttatccaggcgtccaggcccctgaggacctggagtg

SEQ ID NO: 94422 - DNA, 120 bp, Artificial Sequence
  ENSG00000089199_10 (sequence is synthesized)
gttgggatgaggaggacaagagaaactaccccagcttagagcttgataagatggcacatggatatggtgaagaaagtgaggaagagaggggccttgagccgggaaagggacgccatcaca

SEQ ID NO: 94423 - DNA, 120 bp, Artificial Sequence
  ENSG00000089199_11 (sequence is synthesized)
gaggcaggggaggggagccacgtgcctatttcatgtctgacaccagagaagagaaaaggttcttgggtgaaggacaccaccgtgtccaagaaaaccagatggacaaggcaaggaggcatc

SEQ ID NO: 94424 - DNA, 120 bp, Artificial Sequence
  ENSG00000089199_12 (sequence is synthesized)
cacaaggtgcgtggaaagagctggacagaaattatctcaactacggtgaggaaggagccccagggaagtggcagcagcagggagacctgcaggacactaaagaaaacagggaggaagcta

SEQ ID NO: 94425 - DNA, 120 bp, Artificial Sequence
  ENSG00000089199_13 (sequence is synthesized)
ggtttcaagataaacaatatagctcccatcacacagctgaaaagaggaagagattaggggaactgttcaacccatactacgaccctctccagtggaagagcagccattttgaaagaagag

SEQ ID NO: 94426 - DNA, 120 bp, Artificial Sequence
  ENSG00000089199_14 (sequence is synthesized)
acaacatgaatgacaattttctcgagggtgaggaggaaaatgagctgaccttgaacgagaagaatttcttcccagaatacaactatgactggtgggagaaaaagcccttctctgaggatg

SEQ ID NO: 94427 - DNA, 120 bp, Artificial Sequence
  ENSG00000089199_15 (sequence is synthesized)
tgaactgggggtatgagaagagaaacctcgccagggtccccaagctggacctgaaaaggcaatatgacagggtggcccaactggaccagctccttcactacaggaagaagtcagctgagt

SEQ ID NO: 94428 - DNA, 120 bp, Artificial Sequence
  ENSG00000089199_16 (sequence is synthesized)
ttccagacttctatgattctgaggagccggtgagcacccaccaggaggcagaaaatgaaaaggacagggctgaccagacagtcctgacagaggacgagaaaaaagaactcgaaaacttgg

SEQ ID NO: 94429 - DNA, 120 bp, Artificial Sequence
  ENSG00000089199_17 (sequence is synthesized)
ctgcaatggatttggaactacagaagatagctgagaaattcagccaaaggggctgactgtcattggagcggtgggcactgttaagaagcagccatcacatgatctgtttttcaccacttc

SEQ ID NO: 94430 - DNA, 120 bp, Artificial Sequence
  ENSG00000089199_18 (sequence is synthesized)
actgaaagacaccatttatctacccaagggcagaaagtagaacttactattcattaaatgtttgacacaattggaattgtctttaatttctgtcagaatgctattgaaaatgtgaattgc

SEQ ID NO: 94431 - DNA, 120 bp, Artificial Sequence
  ENSG00000089199_19 (sequence is synthesized)
atgacttgtagcatattcttttctgcaaaatagacatattaacatgcttatgacaatgactgtgctactgtctttggaaaaatgtttgtctcagttggaaataataaaagattcacctga

SEQ ID NO: 94432 - DNA, 120 bp, Artificial Sequence
  ENSG00000089199_20 (sequence is synthesized)
acggatgcataaacgagcttgttcaggcaaaggccttgcgggtgaaaaatgaggtaattaattatggaagacatccataaccatgtttttgtcaaggaagtaagttttgggaggatatat

SEQ ID NO: 94433 - DNA, 120 bp, Artificial Sequence
  ENSG00000089199_21 (sequence is synthesized)
ttttggaaacagagatacggagagagagccacagatctttacctatttggggtaggcagagaaggaccaaggagggcattcttgttttattagacttagtttggtttaaacttttttttt

SEQ ID NO: 94434 - DNA, 120 bp, Artificial Sequence
  ENSG00000089199_22 (sequence is synthesized)
tacaagcatgagccaccgcacccagccctagcttaaacttttaattgaaataaaatatatagaaaatggaacagatcatgagtatacagcttaatacgcacacctgtgtaaccagcactg

SEQ ID NO: 94435 - DNA, 120 bp, Artificial Sequence
  ENSG00000089199_23 (sequence is synthesized)
cagcactgagattaaaaaatgggacatttctggttccccagaagtcccctccttgtctgtggtctagatttgatttataccggatctaaaatagcatttgtttccaaatatatttaagac

SEQ ID NO: 94436 - DNA, 120 bp, Artificial Sequence
  ENSG00000089199_24 (sequence is synthesized)
attgccaggggaaaaacaacaactaatgtggggtgattttgtcagttggggtcacacagctttcaaaaaccaactcaagtcattttccattctttttctccttcaaagctgtcaattcca

SEQ ID NO: 94437 - DNA, 120 bp, Artificial Sequence
  ENSG00000089199_25 (sequence is synthesized)
ataatgcactaggaagagtattgattgactaggccagtatctgggagacagaagatatgactcctagttcctgctttaccacttcgcagctgtgtgactataggaaagacagtttgcctc

SEQ ID NO: 94438 - DNA, 120 bp, Artificial Sequence
  ENSG00000089199_26 (sequence is synthesized)
tcttttcctcaaagtaaaatgaaggagttgaactcagtgatagtctttcagatgtctatccgttcttaaattccttagttccatactttggatttttagaaccggacttcctttgggtgg

SEQ ID NO: 94439 - DNA, 120 bp, Artificial Sequence
  ENSG00000089199_27 (sequence is synthesized)
agggggtttgggaaatgctggtttgtgattagatgaggaggggggttatggaagtgttggacaatgacagagggagatttaaaaatcattcttctctttgccttttgctcttctgacagt

SEQ ID NO: 94440 - DNA, 120 bp, Artificial Sequence
  ENSG00000089199_28 (sequence is synthesized)
gagaatcaggaagctgagaagcaagaaacttagaaaggtgacttaaaattctggcctatttacacaacaaattagctaagatattttaatgtatagcttactagaatagaaggtgccacc

SEQ ID NO: 94441 - DNA, 120 bp, Artificial Sequence
  ENSG00000089199_29 (sequence is synthesized)
aaatggtaccaggagttccaggcctgagaactggaagggtttcaggtagaggcagtgcattccagtgaggcagactaatggctttctgagtccagcctgtgaagtgttctcaatatgaaa

SEQ ID NO: 94442 - DNA, 120 bp, Artificial Sequence
  ENSG00000089199_30 (sequence is synthesized)
ccatttctgctgaaaataaaatttgaacagtaatataagcagtacccattggaaattgacattatgaggtcaattttacaaaactatgcagtctctgttatgcatgaagccacactgatt

SEQ ID NO: 94443 - DNA, 120 bp, Artificial Sequence
  ENSG00000089199_31 (sequence is synthesized)
caaacaaatccagaaaacactgccctcttcaacactgtcctctgcttttaaacttttagtcaggctgggaacagtagattttatcttattttttcacctttaaaaatctttcaggtgggc

SEQ ID NO: 94444 - DNA, 120 bp, Artificial Sequence
  ENSG00000089199_32 (sequence is synthesized)
ttctcagcctcctgggagccgtggggctggcggtcatttatttgcagaagatattacagatttccagcggaaagagaaagtgctgaaatgggtgtgttctcaagtagccatttggaggat

SEQ ID NO: 94445 - DNA, 120 bp, Artificial Sequence
  ENSG00000089220_0 (sequence is synthesized)
agtgtgctgagctctccgcgtcgcctctgtcgcccgcgcctggcctaccgcggcactcccggctgcacgctctgcttggcctcgccatgccggtggacctcagcaagtggtccgggccct

SEQ ID NO: 94446 - DNA, 120 bp, Artificial Sequence
  ENSG00000089220_1 (sequence is synthesized)
tgagcctgcaagaagtggacgagcagccgcagcacccgctgcatgtcacctacgccggggcggcggtggacgagctgggcaaagtgctgacgcccacccaggttaagaatagacccacca

SEQ ID NO: 94447 - DNA, 120 bp, Artificial Sequence
  ENSG00000089220_2 (sequence is synthesized)
gcatttcgtgggatggtcttgattcagggaagctctacaccttggtcctgacagacccggatgctcccagcaggaaggatcccaaatacagagaatggcatcatttcctggtggtcaaca

SEQ ID NO: 94448 - DNA, 120 bp, Artificial Sequence
  ENSG00000089220_3 (sequence is synthesized)
tgaagggcaatgacatcagcagtggcacagtcctctccgattatgtgggctcggggcctcccaagggcacaggcctccaccgctatgtctggctggtttacgagcaggacaggccgctaa

SEQ ID NO: 94449 - DNA, 120 bp, Artificial Sequence
  ENSG00000089220_4 (sequence is synthesized)
agtgtgacgagcccatcctcagcaaccgatctggagaccaccgtggcaaattcaaggtggcgtccttccgtaaaaagtatgagctcagggccccggtggctggcacgtgttaccaggccg

SEQ ID NO: 94450 - DNA, 120 bp, Artificial Sequence
  ENSG00000089220_5 (sequence is synthesized)
ttgcatgtataatagatttctcctcttcctgccccccttggcatgggtgagacctgaccagtcagatggtagttgagggtgacttttcctgctgcctggcctttataattttactcactc

SEQ ID NO: 94451 - DNA, 120 bp, Artificial Sequence
  ENSG00000089220_6 (sequence is synthesized)
actctgatttatgttttgatcaaatttgaacttcattttggggggtattttggtactgtgatggggtcatcaaattattaatctgaaaatagcaacccagaatgtaaaaaagaaaaaact

SEQ ID NO: 94452 - DNA, 120 bp, Artificial Sequence
  ENSG00000089220_7 (sequence is synthesized)
ggggggaaaaagaccaggtctacagtgatagagcaaagcatcaaagaatctttaagggaggtttaaaaaaaaaaaaaaaaaaaaagattggttgcctctgcctttgtgatcctgagtcca

SEQ ID NO: 94453 - DNA, 120 bp, Artificial Sequence
  ENSG00000089220_8 (sequence is synthesized)
gaatggtacacaatgtgattttatggtgatgtcactcacctagacaaccagaggctggcattgaggctaacctccaacacagtgcatctcagatgcctcagtaggcatcagtatgtcact

SEQ ID NO: 94454 - DNA, 120 bp, Artificial Sequence
  ENSG00000089220_9 (sequence is synthesized)
ctggtccctttaaagagcaatcctggaagaagcaggagggagggtggctttgctgttgttgggacatggcaatctagaccggtagcagcgctcgctgacagcttgggaggaaacctgaga

SEQ ID NO: 94455 - DNA, 120 bp, Artificial Sequence
  ENSG00000089220_10 (sequence is synthesized)
tctgtgttttttaaattgatcgttcttcatgggggtaagaaaagctggtctggagttgctgaatgttgcattaattgtgctgtttgcttgtagttgaataaaaatagaaacctgaatgaa

SEQ ID NO: 94456 - DNA, 120 bp, Artificial Sequence
  ENSG00000089225_0 (sequence is synthesized)
catgccttatgcaagagacctcagtcccccggaacaactcgatttccttccaatagaggtctgaggtggactcccacctcccttcgtgaagagttccctcctctcccccttcctaagaaa

SEQ ID NO: 94457 - DNA, 120 bp, Artificial Sequence
  ENSG00000089225_1 (sequence is synthesized)
gtcgatcttggctctatttgtgtcttatgttcatcaccctcattcctccggagaaagccgggttggtttatgtctttatttattcccggggccaagacgtccggaacctgtggctgcgca

SEQ ID NO: 94458 - DNA, 120 bp, Artificial Sequence
  ENSG00000089225_2 (sequence is synthesized)
gacccggcactgataggcgaagacggagagaaatttacctcccgccgctgccccccagccaaacgtgacagcgcgcgggccggttgcgtgactcgtgacgtctccaagtcctataggtgc

SEQ ID NO: 94459 - DNA, 120 bp, Artificial Sequence
  ENSG00000089225_3 (sequence is synthesized)
agcggctggtgagatagtcgctatcgcctggttgcctctttattttactggggtatgcctggtaataaacagtaatatttaatttgtcggagaccacaaaccaaccttgagctgggaggt

SEQ ID NO: 94460 - DNA, 120 bp, Artificial Sequence
  ENSG00000089225_4 (sequence is synthesized)
acgtgctcttcttgacagacgttggaagaagacctggcctaaagaggtctcttttggtggtccttttcaaagtcttcacctgagccctgctctccagcgaggcgcactcctggcttttgc

SEQ ID NO: 94461 - DNA, 120 bp, Artificial Sequence
  ENSG00000089225_5 (sequence is synthesized)
gctccaaagaagaggtgggatagttggagagcagaaccttgcgcgggcacagggccctgggcgcaccatggccgacgcagacgagggctttggcctggcgcacacgcctctggagcctga

SEQ ID NO: 94462 - DNA, 120 bp, Artificial Sequence
  ENSG00000089225_6 (sequence is synthesized)
cgcaaaagacctgccctgcgattcgaaacccgagagcgcgctcggggcccccagcaagtccccgtcgtccccgcaggccgccttcacccagcagggcatggagggaatcaaagtgtttct

SEQ ID NO: 94463 - DNA, 120 bp, Artificial Sequence
  ENSG00000089225_7 (sequence is synthesized)
ccatgaaagagaactgtggctaaaattccacgaagtgggcacggaaatgatcataaccaaggctggaaggcggatgtttcccagttacaaagtgaaggtgacgggccttaatcccaaaac

SEQ ID NO: 94464 - DNA, 120 bp, Artificial Sequence
  ENSG00000089225_8 (sequence is synthesized)
gaagtacattcttctcatggacattgtacctgccgacgatcacagatacaaattcgcagataataaatggtctgtgacgggcaaagctgagcccgccatgcctggccgcctgtacgtgca

SEQ ID NO: 94465 - DNA, 120 bp, Artificial Sequence
  ENSG00000089225_9 (sequence is synthesized)
cccagactcccccgccaccggggcgcattggatgaggcagctcgtctccttccagaaactcaagctcaccaacaaccacctggacccatttgggcatattattctaaattccatgcacaa

SEQ ID NO: 94466 - DNA, 120 bp, Artificial Sequence
  ENSG00000089225_10 (sequence is synthesized)
ataccagcctagattacacatcgtgaaagcggatgaaaataatggatttggctcaaaaaatacagcgttctgcactcacgtctttcctgagactgcgtttatagcagtgacttcctacca

SEQ ID NO: 94467 - DNA, 120 bp, Artificial Sequence
  ENSG00000089225_11 (sequence is synthesized)
gaaccacaagatcacgcaattaaagattgagaataatccctttgccaaaggatttcggggcagtgatgacatggagctgcacagaatgtcaagaatgcaaagtaaagaatatcccgtggt

SEQ ID NO: 94468 - DNA, 120 bp, Artificial Sequence
  ENSG00000089225_12 (sequence is synthesized)
ccccaggagcaccgtgaggcaaaaagtggcctccaaccacagtcctttcagcagcgagtctcgagctctctccacctcatccaatttggggtcccaataccagtgtgagaatggtgtttc

SEQ ID NO: 94469 - DNA, 120 bp, Artificial Sequence
  ENSG00000089225_13 (sequence is synthesized)
cggcccctcccaggacctcctgcctccacccaacccatacccactgccccaggagcatagccaaatttaccattgtaccaagaggaaagaggaagaatgttccaccacagaccatcccta

SEQ ID NO: 94470 - DNA, 120 bp, Artificial Sequence
  ENSG00000089225_14 (sequence is synthesized)
taagaagccctacatggagacatcacccagtgaagaagattccttctaccgctctagctatccacagcagcagggcctgggtgcctcctacaggacagagtcggcacagcggcaagcttg

SEQ ID NO: 94471 - DNA, 120 bp, Artificial Sequence
  ENSG00000089225_15 (sequence is synthesized)
caccgtgcagcccatggacaggctaccctaccagcacttctccgctcacttcacctcggggcccctggtccctcggctggctggcatggccaaccatggctccccacagctgggagaggg

SEQ ID NO: 94472 - DNA, 120 bp, Artificial Sequence
  ENSG00000089225_16 (sequence is synthesized)
aatgttccagcaccagacctccgtggcccaccagcctgtggtcaggcagtgtgggcctcagactggcctgcagtcccctggcacccttcagccccctgagttcctctactctcatggcgt

SEQ ID NO: 94473 - DNA, 120 bp, Artificial Sequence
  ENSG00000089225_17 (sequence is synthesized)
gccaaggactctatcccctcatcagtaccactctgtgcacggagttggcatggtgccagagtggagcgacaatagctaaagtgaggcctgcttcacaacagacatttcctagagaaagag

SEQ ID NO: 94474 - DNA, 120 bp, Artificial Sequence
  ENSG00000089225_18 (sequence is synthesized)
agagagagaggagaaagagagagaaggagagagacagtagccaagagaaccccacggacaagatttttcatttcacccaatgttcacatctgcactcaaggtcgctggatgctgatctaa

SEQ ID NO: 94475 - DNA, 120 bp, Artificial Sequence
  ENSG00000089225_19 (sequence is synthesized)
tcagtagcttgaaaccacaattttaaaaatgtgactttcttgttttgtctcaaaacttaaaaaaacaaacacaaaaagatgagtcccaccccccactaccaccacacccatcaaccagcc

SEQ ID NO: 94476 - DNA, 120 bp, Artificial Sequence
  ENSG00000089225_20 (sequence is synthesized)
acattcacgctactccccagatctcttcccccattccttcttttgggctctagaaagtcttgcctcattgagtgtttttccctagtgcgtagttggagtctgtccctgtcttggtgttaa

SEQ ID NO: 94477 - DNA, 120 bp, Artificial Sequence
  ENSG00000089225_21 (sequence is synthesized)
tgttgacattgttatataataaatgataatatatttttttctttcaattttcttaatgggacccagtcccttatttggggggaggtctgaggcaagtatatttcaaaatatgtacttgcg

SEQ ID NO: 94478 - DNA, 120 bp, Artificial Sequence
  ENSG00000089225_22 (sequence is synthesized)
ggattcccttcaagtaaaccatccctgaaacctaaattcacgtttccccttgactaagaaaagcacctacctctgccatgtgatgtttctgaaaagcctctgtatgtccccatttgcttt

SEQ ID NO: 94479 - DNA, 120 bp, Artificial Sequence
  ENSG00000089225_23 (sequence is synthesized)
ggttttgtcctgccttctccaatatcacgtgctcagttttgcctctacttacccatggagtcaggataacactgacgctccctggcatcctatcttattcagccctaccatcttgccagc

SEQ ID NO: 94480 - DNA, 120 bp, Artificial Sequence
  ENSG00000089225_24 (sequence is synthesized)
tctgtctttccagctgtctgtcgctaaaacgtggcctatagcttcccttccggaaagcttgctttgaaaaacttaaaaagcccccgtttacatgtaggcaggactgtgataacagtgcaa

SEQ ID NO: 94481 - DNA, 120 bp, Artificial Sequence
  ENSG00000089225_25 (sequence is synthesized)
gctctgtgttgacaagagttgtggacaaaaagccaaaataaatattcttcctgattaaaaaaattttttttgaaaaaaacaaggccagccccaaccttccaaacctccatcaccaacaac

SEQ ID NO: 94482 - DNA, 120 bp, Artificial Sequence
  ENSG00000089225_26 (sequence is synthesized)
ccaaactggatgtcaagcaaaatgcacaattcctacagaagaggcaagacacagtcaccaatgatatctcgccaaagaaaccacgcccacaccaatgccaacacaaaactgtgtttactg

SEQ ID NO: 94483 - DNA, 120 bp, Artificial Sequence
  ENSG00000089225_27 (sequence is synthesized)
aaagccgaaaacagtattaaaaaaagtgtgtaagtaaagtgttatggtagggttcttcagatgtaatattttactggtactatttatttataaataggaattctaattaagtaataacat

SEQ ID NO: 94484 - DNA, 120 bp, Artificial Sequence
  ENSG00000089225_28 (sequence is synthesized)
tataaataggaattctaattaagtaataacatgaaatgaaacccagcataggagctggccaagagcttttaattttattgatactcaaaaccaagtttgtgtttttttgtttttttttgt

SEQ ID NO: 94485 - DNA, 120 bp, Artificial Sequence
  ENSG00000089225_29 (sequence is synthesized)
ttgattaaaaagaattttttttttccttttttataaacagaccctaataaagagaacagggtaagatgtgaggctgagtgtgtttaagtacgtgagagagtgtgagtgtgtttgtaagtg

SEQ ID NO: 94486 - DNA, 120 bp, Artificial Sequence
  ENSG00000089225_30 (sequence is synthesized)
agtgtccctatgcgattatgtctctttacgttgctaaggggggagggtgaggattaagtactcgtgccttatatttgtgtgccaattaatgcctaataaataccatgtgcttaaacaagt

SEQ ID NO: 94487 - DNA, 120 bp, Artificial Sequence
  ENSG00000089225_31 (sequence is synthesized)
ttcagagagagagagagagggagagagagtgagagagactgactcttacctcgaatccgggaactttaatcctgaaagctgcgctcagaaaggacttcgaccattcactgggcttccaac

SEQ ID NO: 94488 - DNA, 120 bp, Artificial Sequence
  ENSG00000089225_32 (sequence is synthesized)
tttccctccctgggggtgtaaaggaggagcggggcactgagattatatggttgccggtgctcttggaggctattttgtgttctttggcgcttgccaactgggaagtatttagggagagca

SEQ ID NO: 94489 - DNA, 120 bp, Artificial Sequence
  ENSG00000089225_33 (sequence is synthesized)
agcgcacagcagaggaggtgtgtgttggaggtgggcagtcgccgcggaggctccagcggtaggtgcgccctagtaggcagcagtagccgctattctgggtaagcagtaaaccccgcataa

SEQ ID NO: 94490 - DNA, 120 bp, Artificial Sequence
  ENSG00000089225_34 (sequence is synthesized)
accccggagccaccatgcctgctcccccgcctcaccgccggcttccctgctaggagcagcagaggatgtggtgaatgcaccggcttcaccgaacgagagcagaaccttgcgcgggcacag

SEQ ID NO: 94491 - DNA, 120 bp, Artificial Sequence
  ENSG00000089234_0 (sequence is synthesized)
gttgttgtggctccgagggctgttcgaggagctgctgctgctgaggcggcggcaactgcattgaggtggtggcggcgctgccggccccgggccgctcggcctctcggctcgccttccagc

SEQ ID NO: 94492 - DNA, 120 bp, Artificial Sequence
  ENSG00000089234_1 (sequence is synthesized)
ctcgcctgagcccgccggggcccgcgccggccagcgcctgccctatgagtgtgtcactggttgttatccgattggagctcgcggaacactcgcctgtccccgccggcttcggcttcagcg

SEQ ID NO: 94493 - DNA, 120 bp, Artificial Sequence
  ENSG00000089234_2 (sequence is synthesized)
ccgcggccggggaaatgtctgatgaggagataaaaaagacgacactagcctcagctgtagcctgtttagaaggcaagtcaccaggagagaaagtagcgattatccatcagcatctcggcc

SEQ ID NO: 94494 - DNA, 120 bp, Artificial Sequence
  ENSG00000089234_3 (sequence is synthesized)
gtcgagaaatgacagatgtgatcattgagaccatgaagtccaacccagatgaactaaaaactacagtggaagaaaggaagtcttcagaagcctcccccactgcgcaaagaagtaaagatc

SEQ ID NO: 94495 - DNA, 120 bp, Artificial Sequence
  ENSG00000089234_4 (sequence is synthesized)
acagtaaggaatgcataaacgctgccccagattctccgtccaaacagcttccagaccagatttcattcttcagtggaaatccatcagttgaaatagttcatggtattatgcacctatata

SEQ ID NO: 94496 - DNA, 120 bp, Artificial Sequence
  ENSG00000089234_5 (sequence is synthesized)
agacaaataagatgacctccttaaaagaagatgtgcggcgcagtgccatgctgtgtattctcacagtccctgctgcaatgaccagtcatgaccttatgaagtttgttgccccatttaacg

SEQ ID NO: 94497 - DNA, 120 bp, Artificial Sequence
  ENSG00000089234_6 (sequence is synthesized)
aagtaattgaacaaatgaaaattatcagagactctactcccaaccaatatatggtgctgataaagtttcgtgcacaggctgatgcggatagtttttatatgacatgcaatggccgccagt

SEQ ID NO: 94498 - DNA, 120 bp, Artificial Sequence
  ENSG00000089234_7 (sequence is synthesized)
tcaactcaatagaagatgacgtttgccagctagtgtatgtggaaagagctgaagtgctcaaatctgaagatggcgccagcctcccagtgatggacctgactgaactccccaagtgcacgg

SEQ ID NO: 94499 - DNA, 120 bp, Artificial Sequence
  ENSG00000089234_8 (sequence is synthesized)
tgtgtctggagcgcatggacgagtctgtgaatggcatcctcacaacgttatgtaaccacagcttccacagccagtgtctacagcgctgggacgataccacgtgtcctgtttgccggtact

SEQ ID NO: 94500 - DNA, 120 bp, Artificial Sequence
  ENSG00000089234_9 (sequence is synthesized)
gtcaaacgcccgagccagtagaagaaaataagtgttttgagtgtggtgttcaggaaaatctttggatttgtttaatatgcggccacataggatgtggacggtatgtcagtcgacatgctt

SEQ ID NO: 94501 - DNA, 120 bp, Artificial Sequence
  ENSG00000089234_10 (sequence is synthesized)
ataagcactttgaggaaacgcagcacacgtatgccatgcagcttaccaaccatcgagtctgggactatgctggagataactatgttcatcgactggttgcaagtaaaacagatggaaaaa

SEQ ID NO: 94502 - DNA, 120 bp, Artificial Sequence
  ENSG00000089234_11 (sequence is synthesized)
tagtacagtatgaatgtgagggggatacttgccaggaagagaaaatagatgccttacagttagagtattcatatttactaacaagccagctggaatctcagcgaatctactgggaaaaca

SEQ ID NO: 94503 - DNA, 120 bp, Artificial Sequence
  ENSG00000089234_12 (sequence is synthesized)
agatagttcggatagagaaggacacagcagaggaaattaacaacatgaagaccaagtttaaagaaacaattgagaagtgtgataatctagagcacaaactaaatgatctcctaaaagaaa

SEQ ID NO: 94504 - DNA, 120 bp, Artificial Sequence
  ENSG00000089234_13 (sequence is synthesized)
agcagtctgtggaaagaaagtgcactcagctaaacacaaaagtggccaaactcaccaacgagctcaaagaggagcaggaaatgaacaagtgtttgcgagccaaccaagtcctcctgcaga

SEQ ID NO: 94505 - DNA, 120 bp, Artificial Sequence
  ENSG00000089234_14 (sequence is synthesized)
acaagctaaaagaggaggagagggtgctgaaggagacctgtgaccaaaaagatctgcagatcaccgagatccaggagcagctgcgtgacgtcatgttctacctggagacacagcagaaga

SEQ ID NO: 94506 - DNA, 120 bp, Artificial Sequence
  ENSG00000089234_15 (sequence is synthesized)
tcaaccatctgcctgccgagacccggcaggaaatccaggagggacagatcaacatcgccatggcctcggcctcgagccctgcctcttcggggggcagtgggaagttgccctccaggaagg

SEQ ID NO: 94507 - DNA, 120 bp, Artificial Sequence
  ENSG00000089234_16 (sequence is synthesized)
agacatccctgagactgttctccctgacactgtgagagtgtgctgggaccttcagctaaatgtgagggtgggccctaataagtacaagtgaggatcaagccacagttgtttggctctttc

SEQ ID NO: 94508 - DNA, 120 bp, Artificial Sequence
  ENSG00000089234_17 (sequence is synthesized)
atttgctagtgtgtgatgtagtgaatgtaaagggtgctgactggagagctgatagaaaggcgctgcgttcgaaaaggtcttaagagttcactaacctcacattctaatgaccattttgcc

SEQ ID NO: 94509 - DNA, 120 bp, Artificial Sequence
  ENSG00000089234_18 (sequence is synthesized)
ttcctgcttggtagaagccccaactctgctgtgcatttttccattgtatttatggagttggcgtatttgacattcagttctggggtaggtttaagatgttaagttatttcttgtaacctc

SEQ ID NO: 94510 - DNA, 120 bp, Artificial Sequence
  ENSG00000089234_19 (sequence is synthesized)
aaaggtaaggttatctagcactaaagcaccaaacctctctgagggcataacagctgctttaaagagaggtttccattggctattaaggagttatgaaaactccctagcaatagtgtcata

SEQ ID NO: 94511 - DNA, 120 bp, Artificial Sequence
  ENSG00000089234_20 (sequence is synthesized)
tcattatcatctcccccttcctctggggagtggaagaattgcttgaatgttatctgaaaagaggcctggtagtaaaccaggccctggctctttaccagcagtcatctcttcttgctctgg

SEQ ID NO: 94512 - DNA, 120 bp, Artificial Sequence
  ENSG00000089234_21 (sequence is synthesized)
ggccagccaggaaaaacaaacaacccggggcacattgggtagactcagtgtaggaaaaatggtggcagctccactgtttatttttggtgacttcgtacatcattatgaaccgcaattaag

SEQ ID NO: 94513 - DNA, 120 bp, Artificial Sequence
  ENSG00000089234_22 (sequence is synthesized)
gaggaggcttaatggctgttcccaaactcaaatctcagagtgggtatcctagcatctagcaagactgagtggggagatttctcatccgtgtgaaaatgtagagtgaggcctctgactagc

SEQ ID NO: 94514 - DNA, 120 bp, Artificial Sequence
  ENSG00000089234_23 (sequence is synthesized)
taattgtgtattttgttgggtttagtattttctaaatgtttacaaaatattgggctgcatgttcaggttgcagctagagggagcttgggcagattttcaattacgctttcaagatataac

SEQ ID NO: 94515 - DNA, 120 bp, Artificial Sequence
  ENSG00000089234_24 (sequence is synthesized)
caaaagctgtttctaaatcctaaaattagaatttcaacagagccccctttagaacagtcatataacgcttgtgtgggccaacagaggggctgtgtactctctctggaaccataaatgtca

SEQ ID NO: 94516 - DNA, 120 bp, Artificial Sequence
  ENSG00000089234_25 (sequence is synthesized)
aataatttataacctgcagtaattgagcaaacttaaaataagacctgtgttggaatttagtttcttgaagaggtagagggataggttagtaagatgtattgttaaacaacaggttttagt

SEQ ID NO: 94517 - DNA, 120 bp, Artificial Sequence
  ENSG00000089234_26 (sequence is synthesized)
ttttgctttataattagccacaggttttcaaatgatcacatttcagaataggtttttagcctgtaattaggcctcatcccctttgacctaaatgtcttacatgttacttgttagcacatc

SEQ ID NO: 94518 - DNA, 120 bp, Artificial Sequence
  ENSG00000089234_27 (sequence is synthesized)
aactgtatcactaatcaccatctgtttttgtgggatgtgctgcagcatttcccaaaaaactttacgtgtaatgttgcaaaatgaatgtactcagacattcttaatttttacttagggcag

SEQ ID NO: 94519 - DNA, 120 bp, Artificial Sequence
  ENSG00000089234_28 (sequence is synthesized)
accaactctttgagtctctcttggacttatatatacagatatcttaagagtgggaatgtaaagcataacctaattctctttcctatagagattctattttatttaaaatctatttttaca

SEQ ID NO: 94520 - DNA, 120 bp, Artificial Sequence
  ENSG00000089234_29 (sequence is synthesized)
ctagttagaatcctgctgttttggccaagtacttgtcttgcatgtctgaccttgcagaagctggggtggatcatagcatactaatgaagagaattagaagtagtttacaaagctcgctca

SEQ ID NO: 94521 - DNA, 120 bp, Artificial Sequence
  ENSG00000089234_30 (sequence is synthesized)
ctcctcatttctctgtgatcccttctatccagtggccccaccaccacctgggaaaacagatttttcagtacaggtgggataaatgctctgaaaggctgtgcccagaggaatgagcaaata

SEQ ID NO: 94522 - DNA, 120 bp, Artificial Sequence
  ENSG00000089234_31 (sequence is synthesized)
ggcaagtgtttccaaactacttggaggtttacaaaaaatatgtcccagaaaaaaaaaaaatcttaccaagatacgtaaagaaaaaaaaatttttttttaaacagtcaaagagtcatgttt

SEQ ID NO: 94523 - DNA, 120 bp, Artificial Sequence
  ENSG00000089234_32 (sequence is synthesized)
gaatttcacaaaatcacatcagacagaagttgttttcttcaggagggaaatgaaccacttaatatacccatactaccttgaacaatgaaattgaattaaaatagccaaactttgaaatta

SEQ ID NO: 94524 - DNA, 120 bp, Artificial Sequence
  ENSG00000089234_33 (sequence is synthesized)
agcgccgcgggtgagtcccgcggcctcgccgcattccctgtagccgggtctgggcccggagggcttcccttcccaaagcactggcccgggaaaagcccgcggcgagggctgttgcccagg

SEQ ID NO: 94525 - DNA, 67 bp, Artificial Sequence
  ENSG00000089234_34 (sequence is synthesized)
gctgacatttccttaaagagttctttcataacaagcgtcagttattatttggttccaggctttgcag

SEQ ID NO: 94526 - DNA, 120 bp, Artificial Sequence
  ENSG00000089234_35 (sequence is synthesized)
ataacaagcgtcagttattatttggttccaggctttgcagaaatgagtgtttactttcagctgcacaagtgatgactagagggaaaaaaaactgctattaagggaaatgttgactgttgc

SEQ ID NO: 94527 - DNA, 120 bp, Artificial Sequence
  ENSG00000089234_36 (sequence is synthesized)
tggttgaatatgaaaattgtaccagctttcagcttgttgcacttcagtaccttctgccagttcaggtaaaaactctgttgtagcccaggaaatactgtaaacatggaatattgacttaca

SEQ ID NO: 94528 - DNA, 120 bp, Artificial Sequence
  ENSG00000089234_37 (sequence is synthesized)
gagtgtgattagcctaccaatcagcttcagtagatgtgacttttggtggttgctctctctcctaagtataaattttaaaagctgatgagaatgaataaagccatgcatattgaatataaa

SEQ ID NO: 94529 - DNA, 120 bp, Artificial Sequence
  ENSG00000089248_0 (sequence is synthesized)
actatcgcttacctacctccctctgcaggaacccggcgatatggctgccgctgtgccccgcgccgcatttctctccccgctgcttccccttctcctgggcttcctgctcctctccgctcc

SEQ ID NO: 94530 - DNA, 120 bp, Artificial Sequence
  ENSG00000089248_1 (sequence is synthesized)
gcatggcggcagcggcctgcacaccaagggcgcccttcccctggatacggtcactttctacaaggtcattcccaaaagcaagttcgtcttggtgaagttcgacacccagtacccctacgg

SEQ ID NO: 94531 - DNA, 120 bp, Artificial Sequence
  ENSG00000089248_2 (sequence is synthesized)
tgagaagcaggatgagttcaagcgtcttgctgaaaactcggcttccagcgatgatctcttggtggcagaggtggggatctcagattatggtgacaagctgaacatggagctgagtgagaa

SEQ ID NO: 94532 - DNA, 120 bp, Artificial Sequence
  ENSG00000089248_3 (sequence is synthesized)
atacaagctggacaaagagagctacccagtcttctacctcttccgggatggggactttgagaacccagtcccatacactggggcagttaaggttggagccatccagcgctggctgaaggg

SEQ ID NO: 94533 - DNA, 120 bp, Artificial Sequence
  ENSG00000089248_4 (sequence is synthesized)
gcaaggggtctacctaggtatgcctggttgcctgcctgtatacgacgccctggccggggagttcatcagggcctctggtgtggaggcccgccaggccctcttgaagcaggggcaagataa

SEQ ID NO: 94534 - DNA, 120 bp, Artificial Sequence
  ENSG00000089248_5 (sequence is synthesized)
cctctcaagtgtgaaggagactcagaagaagtgggccgagcaatacctgaagatcatggggaagatcttagaccaaggggaggacttcccagcatcagagatgacacggatcgccaggct

SEQ ID NO: 94535 - DNA, 120 bp, Artificial Sequence
  ENSG00000089248_6 (sequence is synthesized)
gactgccttccagaagaagggggccgagaaagaggagctgtaaaaaggctgtctgtgattttccagggtttggtgggggtagggaggggagagttaacctgctggctgtgagtcccttgt

SEQ ID NO: 94536 - DNA, 120 bp, Artificial Sequence
  ENSG00000089248_7 (sequence is synthesized)
ggaatataagggggtagtgggaaaagtggtactaacccacgattctgagccctgagtatgcctggacattgatgctaacatgaccatgcttgggatgtctctagctggtctggggatagc

SEQ ID NO: 94537 - DNA, 120 bp, Artificial Sequence
  ENSG00000089248_8 (sequence is synthesized)
tggagcacttactcaggtggctggtgaaatgacacctcagaaggaatgagtgctatagagaggagagaggagtgtactgcccaggtctttgacagatgtaattctcattcaattaaagtt

SEQ ID NO: 94538 - DNA, 120 bp, Artificial Sequence
  ENSG00000089248_9 (sequence is synthesized)
tcagtgttttggttaagtggacctgaagccattcttttttcttttcaaattatactttcgtctatgacctgctttcctctttgaatctaagctggtatagactccactttcccagggtaa

SEQ ID NO: 94539 - DNA, 120 bp, Artificial Sequence
  ENSG00000089248_10 (sequence is synthesized)
caaactatcctcataacactgtggaaactggcatacctttgttattttccagtgatattcagactgacatggattgactgtcaatggtaaagtttgtctattttccagtccttaaaactc

SEQ ID NO: 94540 - DNA, 120 bp, Artificial Sequence
  ENSG00000089248_11 (sequence is synthesized)
aatagcagtattgatgaatatattgaaccaacattgatggaccatggtgtaattattttccatgctttgtgaggtacacatagcaaattcttagttttactgatatattctgtgacttgg

SEQ ID NO: 94541 - DNA, 120 bp, Artificial Sequence
  ENSG00000089248_12 (sequence is synthesized)
atttacacagctaaatgatatagtccgatttcaaaattaaaaaatattttccatctaaatcactatcactaaataaatactaacttctagaaagcagaataaagagcacttgtgccaaca

SEQ ID NO: 94542 - DNA, 120 bp, Artificial Sequence
  ENSG00000089248_13 (sequence is synthesized)
tacagtgtaatatttatttggccataaaaagtaacagtgtgccaatacatggtacaacatggacaaaccttgaaaacatgctaagtgaaaaaagccagacacaaaagggcacatattgta

SEQ ID NO: 94543 - DNA, 120 bp, Artificial Sequence
  ENSG00000089248_14 (sequence is synthesized)
catttccatcagaatagacaaatctatagagacagaaaatagatgagtggttgctggggctgggaggaggaagactggggagtgactgcgtaatgagtatagggtttccttttgggatga

SEQ ID NO: 94544 - DNA, 120 bp, Artificial Sequence
  ENSG00000089248_15 (sequence is synthesized)
tgaaaatgttctggcactagatagtaacctctatggttgcacattcttaatgcactgaatcatgcagaatgtacacttttaaatggttacaatggcaaatattatgtgaattttactgca

SEQ ID NO: 94545 - DNA, 120 bp, Artificial Sequence
  ENSG00000089248_16 (sequence is synthesized)
attaaaagtcttggccctgacagtttaaaacccagagatctagccagagggaagtgtagtctagggagaagacattgtcccaagcctggcctctcactagcttatctgccctgaaattgc

SEQ ID NO: 94546 - DNA, 120 bp, Artificial Sequence
  ENSG00000089248_17 (sequence is synthesized)
ccctggaacacccacttgctcagctctatacgccctcaggtcattcccaaaagcaagttcgtcttggtgaagttcgacacccagtacccctacggtgagaagcaggatgagttcaagcgt

SEQ ID NO: 94547 - DNA, 120 bp, Artificial Sequence
  ENSG00000089248_18 (sequence is synthesized)
gcagtcccagtcccctcctcttgcacctgtcttcacccacgagcagcttttaacttcctctaggagatgggcaagcttagtgttgcgagagagccagtcatttcattttcaggttttgta

SEQ ID NO: 94548 - DNA, 120 bp, Artificial Sequence
  ENSG00000089248_19 (sequence is synthesized)
ttgaagtctcctattttcaagcgttccctgtcgtggatttggcacttgcagctcattcaaggcaaagtttcaagaatttaaaagtgtaggccgggcttagtggctcacgcctgtaatccc

SEQ ID NO: 94549 - DNA, 60 bp, Artificial Sequence
  ENSG00000089248_20 (sequence is synthesized)
tactccgtctcaaaaaaaaaaaaaaaagtgtgggctgggtgcggtggctcatgcttgtaa

SEQ ID NO: 94550 - DNA, 120 bp, Artificial Sequence
  ENSG00000089250_0 (sequence is synthesized)
acggctcagtccctacatatttatgccgcgtttccagccgctgggtgaggagctacttagcgccgcggctcctccgaggggcggccgggcagcgagcagcggccgagcggacgggctcat

SEQ ID NO: 94551 - DNA, 120 bp, Artificial Sequence
  ENSG00000089250_1 (sequence is synthesized)
gatgcctcagatctgatccgcatctaacaggctggcaatgaagatacccagagaatagttcacatctatcatgcgtcacttctagacacagccatcagacgcatctcctcccctttctgc

SEQ ID NO: 94552 - DNA, 120 bp, Artificial Sequence
  ENSG00000089250_2 (sequence is synthesized)
ctgaccttagggacacgtcccaccgcctctcttgacgtctgcctggtcaaccatcacttccttagagaataaggagagaggcggatgcaggaaatcatgccaccgacgggccaccagcca

SEQ ID NO: 94553 - DNA, 120 bp, Artificial Sequence
  ENSG00000089250_3 (sequence is synthesized)
tgagtgggtgacgctgagctgacgtcaaagacagagagggctgaagccttgtcagcacctgtcaccccggctcctgctctccgtgtagcctgaagcctggatcctcctggtgaaatcatc

SEQ ID NO: 94554 - DNA, 120 bp, Artificial Sequence
  ENSG00000089250_4 (sequence is synthesized)
ttggcctgatagcattgtgaggtcttcagacaggacccctcggaagctagttaccatggaggatcacatgttcggtgttcagcaaatccagcccaatgtcatttctgttcgtctcttcaa

SEQ ID NO: 94555 - DNA, 120 bp, Artificial Sequence
  ENSG00000089250_5 (sequence is synthesized)
gcgcaaagttgggggcctgggatttctggtgaaggagcgggtcagtaagccgcccgtgatcatctctgacctgattcgtgggggcgccgcagagcagagtggcctcatccaggccggaga

SEQ ID NO: 94556 - DNA, 120 bp, Artificial Sequence
  ENSG00000089250_6 (sequence is synthesized)
catcattcttgcggtcaacggccggcccttggtggacctgagctatgacagcgccctggaggtactcagaggcattgcctctgagacccacgtggtcctcattctgaggggccctgaagg

SEQ ID NO: 94557 - DNA, 120 bp, Artificial Sequence
  ENSG00000089250_7 (sequence is synthesized)
tttcaccacgcacctggagaccacctttacaggtgatgggacccccaagaccatccgggtgacacagcccctgggtccccccaccaaagccgtggatctgtcccaccagccaccggccgg

SEQ ID NO: 94558 - DNA, 120 bp, Artificial Sequence
  ENSG00000089250_8 (sequence is synthesized)
caaagaacagcccctggcagtggatggggcctcgggtcccgggaatgggcctcagcatgcctacgatgatgggcaggaggctggctcactcccccatgccaacggcctggcccccaggcc

SEQ ID NO: 94559 - DNA, 120 bp, Artificial Sequence
  ENSG00000089250_9 (sequence is synthesized)
cccaggccaggaccccgcgaagaaagcaaccagagtcagcctccaaggcagaggggagaacaatgaactgctcaaggagatagagcctgtgctgagccttctcaccagtgggagcagagg

SEQ ID NO: 94560 - DNA, 120 bp, Artificial Sequence
  ENSG00000089250_10 (sequence is synthesized)
ggtcaagggaggggcacctgccaaggcagagatgaaagatatgggaatccaggtggacagagatttggacggcaagtcacacaaacctctgcccctcggcgtggagaacgaccgagtctt

SEQ ID NO: 94561 - DNA, 120 bp, Artificial Sequence
  ENSG00000089250_11 (sequence is synthesized)
caatgacctatgggggaagggcaatgtgcctgtcgtcctcaacaacccatattcagagaaggagcagccccccacctcaggaaaacagtcccccacaaagaatggcagcccctccaagtg

SEQ ID NO: 94562 - DNA, 120 bp, Artificial Sequence
  ENSG00000089250_12 (sequence is synthesized)
tccacgcttcctcaaggtcaagaactgggagactgaggtggttctcactgacaccctccaccttaagagcacattggaaacgggatgcactgagtacatctgcatgggctccatcatgca

SEQ ID NO: 94563 - DNA, 120 bp, Artificial Sequence
  ENSG00000089250_13 (sequence is synthesized)
tccttctcagcatgcaaggaggcctgaagacgtccgcacaaaaggacagctcttccctctcgccaaagagtttattgatcaatactattcatcaattaaaagatttggctccaaagccca

SEQ ID NO: 94564 - DNA, 120 bp, Artificial Sequence
  ENSG00000089250_14 (sequence is synthesized)
catggaaaggctggaagaggtgaacaaagagatcgacaccactagcacttaccagctcaaggacacagagctcatctatggggccaagcacgcctggcggaatgcctcgcgctgtgtggg

SEQ ID NO: 94565 - DNA, 120 bp, Artificial Sequence
  ENSG00000089250_15 (sequence is synthesized)
caggatccagtggtccaagctgcaggtattcgatgcccgtgactgcaccacggcccacgggatgttcaactacatctgtaaccatgtcaagtatgccaccaacaaagggaacctcaggtc

SEQ ID NO: 94566 - DNA, 120 bp, Artificial Sequence
  ENSG00000089250_16 (sequence is synthesized)
tgccatcaccatattcccccagaggacagacggcaagcacgacttccgagtctggaactcccagctcatccgctacgctggctacaagcagcctgacggctccaccctgggggacccagc

SEQ ID NO: 94567 - DNA, 120 bp, Artificial Sequence
  ENSG00000089250_17 (sequence is synthesized)
caatgtgcagttcacagagatatgcatacagcagggctggaaaccgcctagaggccgcttcgatgtcctgccgctcctgcttcaggccaacggcaatgaccctgagctcttccagattcc

SEQ ID NO: 94568 - DNA, 120 bp, Artificial Sequence
  ENSG00000089250_18 (sequence is synthesized)
tccagagctggtgttggaagttcccatcaggcaccccaagtttgagtggttcaaggacctggggctgaagtggtacggcctccccgccgtgtccaacatgctcctagagattggcggcct

SEQ ID NO: 94569 - DNA, 120 bp, Artificial Sequence
  ENSG00000089250_19 (sequence is synthesized)
ggagttcagcgcctgtcccttcagtggctggtacatgggcacagagattggtgtccgcgactactgtgacaactcccgctacaatatcctggaggaagtggccaagaagatgaacttaga

SEQ ID NO: 94570 - DNA, 120 bp, Artificial Sequence
  ENSG00000089250_20 (sequence is synthesized)
catgaggaagacgtcctccctgtggaaggaccaggcgctggtggagatcaatatcgcggttctctatagcttccagagtgacaaagtgaccattgttgaccatcactccgccaccgagtc

SEQ ID NO: 94571 - DNA, 120 bp, Artificial Sequence
  ENSG00000089250_21 (sequence is synthesized)
cttcattaagcacatggagaatgagtaccgctgccgggggggctgccctgccgactgggtgtggatcgtgccccccatgtccggaagcatcacccctgtgttccaccaggagatgctcaa

SEQ ID NO: 94572 - DNA, 120 bp, Artificial Sequence
  ENSG00000089250_22 (sequence is synthesized)
ctaccggctcaccccctccttcgaataccagcctgatccctggaacacgcatgtctggaaaggcaccaacgggacccccacaaagcggcgagccattggcttcaagaagctagcagaagc

SEQ ID NO: 94573 - DNA, 120 bp, Artificial Sequence
  ENSG00000089250_23 (sequence is synthesized)
tgtcaagttctcggccaagctgatggggcaggctatggccaagagggtgaaagcgaccatcctctatgccacagagacaggcaaatcgcaagcttatgccaagaccttgtgtgagatctt

SEQ ID NO: 94574 - DNA, 120 bp, Artificial Sequence
  ENSG00000089250_24 (sequence is synthesized)
caaacacgcctttgatgccaaggtgatgtccatggaagaatatgacattgtgcacctggaacatgaaactctggtccttgtggtcaccagcacctttggcaatggagatccccctgagaa

SEQ ID NO: 94575 - DNA, 120 bp, Artificial Sequence
  ENSG00000089250_25 (sequence is synthesized)
tggggagaaattcggctgtgctttgatggaaatgaggcaccccaactctgtgcaggaagaaaggaagagctacaaggtccgattcaacagcgtctcctcctactctgactcccaaaaatc

SEQ ID NO: 94576 - DNA, 120 bp, Artificial Sequence
  ENSG00000089250_26 (sequence is synthesized)
atcaggcgatgggcccgacctcagagacaactttgagagtgctggacccctggccaatgtgaggttctcagtttttggcctcggctcacgagcataccctcacttttgcgccttcggaca

SEQ ID NO: 94577 - DNA, 120 bp, Artificial Sequence
  ENSG00000089250_27 (sequence is synthesized)
cgctgtggacaccctcctggaagaactgggaggggagaggatcctgaagatgagggaaggggatgagctctgtgggcaggaagaggctttcaggacctgggccaagaaggtcttcaaggc

SEQ ID NO: 94578 - DNA, 120 bp, Artificial Sequence
  ENSG00000089250_28 (sequence is synthesized)
agcctgtgatgtcttctgtgtgggagatgatgtcaacattgaaaaggccaacaattccctcatcagcaatgatcgcagctggaagagaaacaagttccgcctcacctttgtggccgaagc

SEQ ID NO: 94579 - DNA, 120 bp, Artificial Sequence
  ENSG00000089250_29 (sequence is synthesized)
tccagaactcacacaaggtctatccaatgtccacaaaaagcgagtctcagctgcccggctccttagccgtcaaaacctccagagccctaaatccagtcggtcaactatcttcgtgcgtct

SEQ ID NO: 94580 - DNA, 120 bp, Artificial Sequence
  ENSG00000089250_30 (sequence is synthesized)
ccacaccaacgggagccaggagctgcagtaccagcctggggaccacctgggtgtcttccctggcaaccacgaggacctcgtgaatgccctgatcgagcggctggaggacgcgccgcctgt

SEQ ID NO: 94581 - DNA, 120 bp, Artificial Sequence
  ENSG00000089250_31 (sequence is synthesized)
caaccagatggtgaaagtggaactgctggaggagcggaacacggctttaggtgtcatcagtaactggacagacgagctccgcctcccgccctgcaccatcttccaggccttcaagtacta

SEQ ID NO: 94582 - DNA, 120 bp, Artificial Sequence
  ENSG00000089250_32 (sequence is synthesized)
cctggacatcaccacgccaccaacgcctctgcagctgcagcagtttgcctccctagctaccagcgagaaggagaagcagcgtctgctggtcctcagcaagggtttgcaggagtacgagga

SEQ ID NO: 94583 - DNA, 120 bp, Artificial Sequence
  ENSG00000089250_33 (sequence is synthesized)
atggaaatggggcaagaaccccaccatcgtggaggtgctggaggagttcccatctatccagatgccggccaccctgctcctgacccagctgtccctgctgcagccccgctactattccat

SEQ ID NO: 94584 - DNA, 120 bp, Artificial Sequence
  ENSG00000089250_34 (sequence is synthesized)
cagctcctccccagacatgtaccctgatgaagtgcacctcactgtggccatcgtttcctaccgcactcgagatggagaaggaccaattcaccacggcgtatgctcctcctggctcaaccg

SEQ ID NO: 94585 - DNA, 120 bp, Artificial Sequence
  ENSG00000089250_35 (sequence is synthesized)
gatacaggctgacgaactggtcccctgtttcgtgagaggagcacccagcttccacctgccccggaacccccaagtcccctgcatcctcgttggaccaggcaccggcattgcccctttccg

SEQ ID NO: 94586 - DNA, 120 bp, Artificial Sequence
  ENSG00000089250_36 (sequence is synthesized)
aagcttctggcaacagcggcaatttgatatccaacacaaaggaatgaacccctgccccatggtcctggtcttcgggtgccggcaatccaagatagatcatatctacagggaagagaccct

SEQ ID NO: 94587 - DNA, 120 bp, Artificial Sequence
  ENSG00000089250_37 (sequence is synthesized)
gcaggccaagaacaagggggtcttcagagagctgtacacggcttactcccgggagccagacaaaccaaagaagtacgtgcaggacatcctgcaggagcagctggcggagtctgtgtaccg

SEQ ID NO: 94588 - DNA, 120 bp, Artificial Sequence
  ENSG00000089250_38 (sequence is synthesized)
agccctgaaggagcaagggggccacatatacgtctgtggggacgtcaccatggctgctgatgtcctcaaagccatccagcgcatcatgacccagcaggggaagctctcggcagaggacgc

SEQ ID NO: 94589 - DNA, 120 bp, Artificial Sequence
  ENSG00000089250_39 (sequence is synthesized)
cggcgtattcatcagccggatgagggatgacaaccgataccatgaggatatttttggagtcaccctgcgaacgtacgaagtgaccaaccgccttagatctgagtccattgccttcattga

SEQ ID NO: 94590 - DNA, 120 bp, Artificial Sequence
  ENSG00000089250_40 (sequence is synthesized)
agagagcaaaaaagacaccgatgaggttttcagctcctaactggaccctcttgcccagccggctgcaagttttgtaagcgcggacagacactgctgaacctttcctctgggaccccctgt

SEQ ID NO: 94591 - DNA, 120 bp, Artificial Sequence
  ENSG00000089250_41 (sequence is synthesized)
ggccctcgctctgcctcctgtccttgtcgctgtgccctggtttccctcctcgggcttctcgcccctcagtggtttcctcggccctcctgggtttactccttgagttttcctgctgcgatg

SEQ ID NO: 94592 - DNA, 120 bp, Artificial Sequence
  ENSG00000089250_42 (sequence is synthesized)
caatgcttttctaatctgcagtggctcttacaaaactctgttcccactccctctcttgccgacaagggcaactcacgggtgcatgaaaccactggaacatggccgtcgctgtgggggttt

SEQ ID NO: 94593 - DNA, 120 bp, Artificial Sequence
  ENSG00000089250_43 (sequence is synthesized)
ttttctctggggttcccctggaaaggctgcaggaactaggcacaagctctctgagccagtccctcagccactgaagtccccctttctccttttttatgatgacattttggttgtgcgtgc

SEQ ID NO: 94594 - DNA, 120 bp, Artificial Sequence
  ENSG00000089250_44 (sequence is synthesized)
gtgtgtgtgtgtgtgtgtgtgtgatgggccaggtctctgtccgtcctcttccctgcacaagtgtgtcgatcttagattgccactgctttcattgaagaccctcaatgccaagaaacgtgt

SEQ ID NO: 94595 - DNA, 120 bp, Artificial Sequence
  ENSG00000089250_45 (sequence is synthesized)
caagaaacgtgtccctggcccatattaatccctcgtgtgtccataattagggtccacgcccatgtacctgaaacatttggaagccccataattgttctagttagaaagggttcagggcat

SEQ ID NO: 94596 - DNA, 120 bp, Artificial Sequence
  ENSG00000089250_46 (sequence is synthesized)
ggggagaggagtgggaaattgattaaaggggctgtctcccaatgaaagaggcattcccagaatttgctgcatttagattttgataccagtgagcagagccctcatgtgacatgaacccat

SEQ ID NO: 94597 - DNA, 120 bp, Artificial Sequence
  ENSG00000089250_47 (sequence is synthesized)
ccaatggattgtgcaaatcccctccccaaacccacccataccagctagaatcacttgactttgccacatccattgactgaccccctcctccagcaatagcatccaaggggcctggaagtt

SEQ ID NO: 94598 - DNA, 120 bp, Artificial Sequence
  ENSG00000089250_48 (sequence is synthesized)
atgttgttcaaagaagcctggtggcaataaggatcttcccactttgccactggatgactttggatgggtcacttgtcctcagtttttcctagtcataatgtcatacgaacctaaagaata

SEQ ID NO: 94599 - DNA, 120 bp, Artificial Sequence
  ENSG00000089250_49 (sequence is synthesized)
tgaatggattaaatgttaaagctttggtgcctggaaacaatatcaagtaacaatatgattattatttttttattcccccaaagcgggcttgctgcttcacccttggggatgaaataatgg

SEQ ID NO: 94600 - DNA, 120 bp, Artificial Sequence
  ENSG00000089250_50 (sequence is synthesized)
ttaaagtggatgaggttggaaagagttgccataatgaggtcccacgtggcttcttcgataggagccacaacttggggtgggaagaacttgtccctcaggcttgttgccctctgcagttga

SEQ ID NO: 94601 - DNA, 120 bp, Artificial Sequence
  ENSG00000089250_51 (sequence is synthesized)
tctccaaagttttaaacctgttaaattaattttgacaaataagttaccctcaactcagatcaaaaatgggcagccaagtcttcggtaggaattggagccggtgtaattcctccctaagag

SEQ ID NO: 94602 - DNA, 120 bp, Artificial Sequence
  ENSG00000089250_52 (sequence is synthesized)
gcaacctgttgaatttactctctcagagtaaatggtgggaagggatccctttgtatacttttttaaatactacaaattagtgtcaggcagttcccagaaagagacaagaaatcctagtgg

SEQ ID NO: 94603 - DNA, 120 bp, Artificial Sequence
  ENSG00000089250_53 (sequence is synthesized)
cctcccagactgcagggtccccaaggatggaaagggaatgttctgctggttctaccctgtttgttgtgtcttgctatacagaaaaaccacatttcttttatatactgtacgtgggcatat

SEQ ID NO: 94604 - DNA, 120 bp, Artificial Sequence
  ENSG00000089250_54 (sequence is synthesized)
cttgttgttcagtttgggtgtctgctaaagaggaagtgcactggccctctttgaaagggctttacagtgggggcaccaagaccccaaagggcccaggccaggagactgttaaagtgaaaa

SEQ ID NO: 94605 - DNA, 120 bp, Artificial Sequence
  ENSG00000089250_55 (sequence is synthesized)
ggcaatctatgactcaccttgctctgccatccctggcagcccccaccggtgtcctgttcctgccacatggagcttgacttcatgccagctataatctcccctgccttcctttaatcccaa

SEQ ID NO: 94606 - DNA, 120 bp, Artificial Sequence
  ENSG00000089250_56 (sequence is synthesized)
tttcccctgctcactcttccacagatataaagaacaaacacttagcatcccacactcaccccttctaatcctgaagggaagcccattctaaactcctttcctgcaaacccatttccagct

SEQ ID NO: 94607 - DNA, 120 bp, Artificial Sequence
  ENSG00000089250_57 (sequence is synthesized)
cctagtagctttcctcccaaaggctttctttccaatcctttatagctttggagacgcctccccaattccccagggaaggaaactgttgtgtccaatccccattaaagacaaattgatcag

SEQ ID NO: 94608 - DNA, 120 bp, Artificial Sequence
  ENSG00000089250_58 (sequence is synthesized)
tgcttcccactccaagtcaagctttatgcaggaatgcttttccatcagggaataaatacttagaagcgcttacaaggtgccaggcacctcctttctgcatgtgcctgcctttctagtagc

SEQ ID NO: 94609 - DNA, 120 bp, Artificial Sequence
  ENSG00000089250_59 (sequence is synthesized)
agacagatggaaacattgtctcattttgtcaaggagtccaaagaaatgattataaaaccaggattcatccttcttctccagaaagatttttttttaagtaaacacctttcaatccccaac

SEQ ID NO: 94610 - DNA, 120 bp, Artificial Sequence
  ENSG00000089250_60 (sequence is synthesized)
acaagctgcttcacaactccaggctagaaggcaggagagcgatctgatgtgtttctttcatttgccagaattcctgataccaaaagcctctctctctgttgagtaacctctcaaggacca

SEQ ID NO: 94611 - DNA, 120 bp, Artificial Sequence
  ENSG00000089250_61 (sequence is synthesized)
gagtggagtccagattgttaggctcagatcaagggtggggaaatactgccctctcgtggtggcttttcatccaggcctcgtagccaaccgtttaagtgcaaaatagaattaagcaatggg

SEQ ID NO: 94612 - DNA, 120 bp, Artificial Sequence
  ENSG00000089250_62 (sequence is synthesized)
taagcaaaatagggttgacaagatatttgggggttattcgggttatggcccatttatttccctcttccccctgaattgaccagtagcagctccagccccatttcacaaaagtgagtttgg

SEQ ID NO: 94613 - DNA, 120 bp, Artificial Sequence
  ENSG00000089250_63 (sequence is synthesized)
ccaggaggaatgagacgtctcctgaaataggaacaccggaacatcatgctcacctgccatcactatgcatccagttcccacagcttgtgtcgtgaaagagcagagagatgatgttaaact

SEQ ID NO: 94614 - DNA, 120 bp, Artificial Sequence
  ENSG00000089250_64 (sequence is synthesized)
ccttgggaggagagagggcttcttttggtttccctggagtgagacagccaggtgtctttcttttgcggggggacacttcagacccatcaatatggaattttgggagccgacctgagtgca

SEQ ID NO: 94615 - DNA, 120 bp, Artificial Sequence
  ENSG00000089250_65 (sequence is synthesized)
aatcctaattctgcccctgttggtgcagatggctgtgggcggctcacttgaccttttagagtctgcatacccacctgtataacaaggtggattgaatgagacaatgcccacgaaatgccc

SEQ ID NO: 94616 - DNA, 120 bp, Artificial Sequence
  ENSG00000089250_66 (sequence is synthesized)
agttacagtacctggttcaaaacttactgcattttaatttttcacttaacttataacatgtcttgcttctccagtgtgtggaaggcaccgggcagtttgcagagataagcaaaacacagt

SEQ ID NO: 94617 - DNA, 78 bp, Artificial Sequence
  ENSG00000089250_67 (sequence is synthesized)
gaaggcaccgggcagtttgcagagataagcaaaacacagttcctctcgtgcagaaggttagaatctcgtacagtggta

SEQ ID NO: 94618 - DNA, 79 bp, Artificial Sequence
  ENSG00000089250_68 (sequence is synthesized)
ggttataatctgatggagagagacacccgtcttggaactgacataaatttctggggtttgagaaatgggcgggatttca

SEQ ID NO: 94619 - DNA, 120 bp, Artificial Sequence
  ENSG00000089250_69 (sequence is synthesized)
gacataaatttctggggtttgagaaatgggcgggatttcactggtagcttctggaaggtaagagttgtccaggaattgggaagagtgagaggaaaggcacggacagggagcatgtaagat

SEQ ID NO: 94620 - DNA, 120 bp, Artificial Sequence
  ENSG00000089250_70 (sequence is synthesized)
aaattgaggctggctttggaaggctgaggagggtgagaaaaggtgggctgggaccagaccgtggggagaggtgagtggcattacaagaaatttaggctttattcagaaggcaacagggag

SEQ ID NO: 94621 - DNA, 120 bp, Artificial Sequence
  ENSG00000089250_71 (sequence is synthesized)
tccctaagaatgtttttcaaaaagggacattaaggcgattggagttatacttggaaaagaaagttctggccacagtacagagcatggcccgttgagctgttgggggggttattgctgcaa

SEQ ID NO: 94622 - DNA, 120 bp, Artificial Sequence
  ENSG00000089250_72 (sequence is synthesized)
ccaaggcttgagtgagggaagaggcggatgtagtgataaagagactccaggaactgaatcagcgtacctggcaccccatccattgtagagggtgagaataaaggagaaattaaagcatct

SEQ ID NO: 94623 - DNA, 85 bp, Artificial Sequence
  ENSG00000089250_73 (sequence is synthesized)
gttgaggtcaggagttggagaccagtcagccagttagtagaaaccctgactctactaagaaaatacaaaaattagctgggcatgg

SEQ ID NO: 94624 - DNA, 75 bp, Artificial Sequence
  ENSG00000089250_74 (sequence is synthesized)
ttagtagaaaccctgactctactaatcagctacctgggaggctgaggaaggaggatcgcttgagcccaggaggtg

SEQ ID NO: 94625 - DNA, 83 bp, Artificial Sequence
  ENSG00000089250_75 (sequence is synthesized)
cttacatcttgcccctagctgagagagaggtctctgaagagcaggctcagggaaaagatgagttttcagagctgatgtgatag

SEQ ID NO: 94626 - DNA, 120 bp, Artificial Sequence
  ENSG00000089250_76 (sequence is synthesized)
ggctcagggaaaagatgagttttcagagctgatgtgatagtcagcttctctggagtcaacagggtgaatccttcccaagtccagccatgcccagatgcccggagggaaaactgaccccca

SEQ ID NO: 94627 - DNA, 120 bp, Artificial Sequence
  ENSG00000089250_77 (sequence is synthesized)
gccagtagacattggctaagaacacagaatcttctgaccaaacacgctttcagcagctgcctgctctggactttgaaagaggtcaggtcttgccctaagctcaaaacaagtgagaggtgt

SEQ ID NO: 94628 - DNA, 120 bp, Artificial Sequence
  ENSG00000089250_78 (sequence is synthesized)
cctgacctagctcatagggcaaatggtcctaataggatgggcaatccagatgcctgagccccttcactccgacagcaccagcgcctaatgcagccttttcattcttgccattaggaaatc

SEQ ID NO: 94629 - DNA, 120 bp, Artificial Sequence
  ENSG00000089250_79 (sequence is synthesized)
tgtggacttctagcctgtgttttaaaccagccatgtttccttgtatatttccctacccgctgccccacatacccagcatgccgctgtggccaccatgtcctcaaagccttctgtctgtat

SEQ ID NO: 94630 - DNA, 120 bp, Artificial Sequence
  ENSG00000089250_80 (sequence is synthesized)
caggaatgtagtctgagactgccaggaagcaacaaggagagagaaacactaactagtcttcctttataacccattcatactctctggctgtccccaaccttcatagtctcctgcatccaa

SEQ ID NO: 94631 - DNA, 120 bp, Artificial Sequence
  ENSG00000089250_81 (sequence is synthesized)
tggctgtccccaaccttcatagtctcctgcatccaaatgtcctctttggctcaaaaagtaggccaggcatggtggttcatgcctgtaatagcactttgggagactgaggtgggaggatca

SEQ ID NO: 94632 - DNA, 71 bp, Artificial Sequence
  ENSG00000089250_82 (sequence is synthesized)
aattagctgggcatgatggcatgtcccaggagtttgaggcgacagtgagctaggatcgcaccactgcactc

SEQ ID NO: 94633 - DNA, 80 bp, Artificial Sequence
  ENSG00000089250_83 (sequence is synthesized)
ttaaaatgaaagaccaggtgctgggattaaggaaacacaggtctgagggtctgagggaaggggcctgcctcccagggagt

SEQ ID NO: 94634 - DNA, 120 bp, Artificial Sequence
  ENSG00000089250_84 (sequence is synthesized)
gtctgagggtctgagggaaggggcctgcctcccagggagtcaacatagatgttccccatgaacagggatttgactttggaggccaacctggcctggcctctgccctttatctcacactcc

SEQ ID NO: 94635 - DNA, 120 bp, Artificial Sequence
  ENSG00000089250_85 (sequence is synthesized)
ctatccttggcccactgccagtccctgccttgtggcaaaggggccccaaaagaaaagctgcccttccccaaatgtaaggacccaggtacactttcacccgtggaaagcagtgtctgtcga

SEQ ID NO: 94636 - DNA, 120 bp, Artificial Sequence
  ENSG00000089250_86 (sequence is synthesized)
gagtctgtttcctattaatacttatcaaagccatgtgcgagggaggtggtcagctgtcaatatgccttagtatgtttatatgagtttgttttgttctaaaatacccaaacagttctggtc

SEQ ID NO: 94637 - DNA, 120 bp, Artificial Sequence
  ENSG00000089250_87 (sequence is synthesized)
aagcggggctatgcccgtctggcccaaaacacagtccgttattaacgagatggccctggcaggcgggaacaaatctgcctccatgcactgcttcctgtagtcttttagaaagtaactcca

SEQ ID NO: 94638 - DNA, 120 bp, Artificial Sequence
  ENSG00000089250_88 (sequence is synthesized)
ggacatcgaagtgcccagatttgactcctaagttctaggagactgtagcgcagggtctgtcaaccttagcactattggcatttggggctgggtaattctttcttgtgggggccgtcttgg

SEQ ID NO: 94639 - DNA, 120 bp, Artificial Sequence
  ENSG00000089250_89 (sequence is synthesized)
gtactgtaggaagctgagcagcattcctggcctccatccacaagatacctgtagcagtgtcctgccaacggtaacaatcaagtatgtcatcagacattgcccaatgtccccagggggcaa

SEQ ID NO: 94640 - DNA, 120 bp, Artificial Sequence
  ENSG00000089250_90 (sequence is synthesized)
cacccctctcttggacttcagggtcaagagaatctctgctggctaccccaggacttctcattatagatttcctggagcacgcagcagaaactttgcctagcccagtggttgtttccatta

SEQ ID NO: 94641 - DNA, 120 bp, Artificial Sequence
  ENSG00000089250_91 (sequence is synthesized)
gtggttgtttccattatctgctgccaaagtgggatttgagggtgtccgggggagggggcatggggagggcagtatgctttcaaaaacccctcccaggccaggcgtggtggctcatgcctg

SEQ ID NO: 94642 - DNA, 120 bp, Artificial Sequence
  ENSG00000089250_92 (sequence is synthesized)
gccaggcgtggtggctcatgcctgtaatcacaggactttgggaggccgaggctggcagatcacttgaggctgggagttagagaccaacctggctaacatggcaaaacctcgtctctacta

SEQ ID NO: 94643 - DNA, 63 bp, Artificial Sequence
  ENSG00000089250_93 (sequence is synthesized)
ttgacagaatgagaccctgtggaaaaaaaaaaaaaagccctcccatgccagaacagaggatgg

SEQ ID NO: 94644 - DNA, 120 bp, Artificial Sequence
  ENSG00000089250_94 (sequence is synthesized)
aaaaaaaaaaaaagccctcccatgccagaacagaggatggcagtctgtttcaataagacactgtgtccttggtgttggttctgattaagactcactgagatccagtgctcttgagctggg

SEQ ID NO: 94645 - DNA, 120 bp, Artificial Sequence
  ENSG00000089250_95 (sequence is synthesized)
tctcagtcccctcccatgtcctgtgctctgccgccactgttttcattgttgtgttctcgttgtgattgttaagactcacactcctggctcagcagtggttttccagaaggcccaaagagc

SEQ ID NO: 94646 - DNA, 120 bp, Artificial Sequence
  ENSG00000089250_96 (sequence is synthesized)
ttccagaaggcccaaagagcggtgccgggcaccccacgtcgcagtgtccgttccgggcttgggaagctggggaggtgggcagacctggtcgcatctcaccacacacacacacacacacac

SEQ ID NO: 94647 - DNA, 120 bp, Artificial Sequence
  ENSG00000089250_97 (sequence is synthesized)
actcggccgtcccccctacctctgagctctcaatgctgctaatctctgccaagtgtccctgtgctccagcaccttccttgaaggactgacgcccaccccacgctctttgcgaggttgtcc

SEQ ID NO: 94648 - DNA, 120 bp, Artificial Sequence
  ENSG00000089250_98 (sequence is synthesized)
aggctgtgtttgtcgcatgctcttcttctgtatagttctcatcttccaattttatgggattcaacaaaagcctattatgcttgtttgcattatggttacaatattaaaaagtggattcaa

SEQ ID NO: 94649 - DNA, 120 bp, Artificial Sequence
  ENSG00000089250_99 (sequence is synthesized)
ggaacccttgcgtttctttccccgtaaagggcctcccctccccaatggtgacacagaagtccacggtctggctgcagcccgtgacagccagcacaggagctacaaggtccgattcaacag

SEQ ID NO: 94650 - DNA, 120 bp, Artificial Sequence
  ENSG00000089250_100 (sequence is synthesized)
ataaaagatgtatgctttggagcccagagcggctcttttaatgagggttgcgacgtctccctccccacacccataaaccagtcgggttggacgtcactgctaattcgtttcagtgatgat

SEQ ID NO: 94651 - DNA, 120 bp, Artificial Sequence
  ENSG00000089250_101 (sequence is synthesized)
ctcacggctcagtccctacatatttatgccgcgtttccagccgctgggtgaggagctacttagcgccgcggctcctccgaggggcggccgggcagcgagcagcggccgagcggacgggat

SEQ ID NO: 94652 - DNA, 120 bp, Artificial Sequence
  ENSG00000089250_102 (sequence is synthesized)
cccttccttccaacctctgcgacatcagcttatagactgttgaaggtgacaccgttctcttctgtgatttttatttcaggggttatttgcagagctctgttcagtaaagctgactcaggt

SEQ ID NO: 94653 - DNA, 120 bp, Artificial Sequence
  ENSG00000089250_103 (sequence is synthesized)
ggggatgtgtcccgcagtgtcgaggtagggtgtcctccaggggcttcccaggtgtgctggtgcaacacgagataaagaccaagccagttcaggtaacccccaggtagagtcactaaaaaa

SEQ ID NO: 94654 - DNA, 120 bp, Artificial Sequence
  ENSG00000089250_104 (sequence is synthesized)
ctagggacaaatgcagaaattcgtccgtgaattcgtcgtgtgaatgcagaaatatacacggatgtgcacacaactacagctctccacactgagcatgtgatctgtgcccagattaatccc

SEQ ID NO: 94655 - DNA, 120 bp, Artificial Sequence
  ENSG00000089250_105 (sequence is synthesized)
cacaaccacacaattccattttatagatgtgaaggctgggtgcagagggatgaagtaactggcccaccccaagttcagaacccaaaactcatagccctcttggggccacacacagcatga

SEQ ID NO: 94656 - DNA, 120 bp, Artificial Sequence
  ENSG00000089250_106 (sequence is synthesized)
ttttatgaaacaagatctcacctgacctggaaaaccagtgaggctgggactattcaactcattcgacagcagaataactgaagatggagaaacaggctatccggcaaatctgactggaac

SEQ ID NO: 94657 - DNA, 120 bp, Artificial Sequence
  ENSG00000089250_107 (sequence is synthesized)
tcccaggcccctcccttgaggagctgctgctgagagatggaagaactggcctcatctgtcctgctcatgatgcctcagatctgatccgcatctaacaggctggcaatgaagatacccaga

SEQ ID NO: 94658 - DNA, 120 bp, Artificial Sequence
  ENSG00000089280_0 (sequence is synthesized)
acttaagcttcgacgcaggaggcggggctgctcagtcctccaggcgtcggtactcagcggtgttggaacttcgttgcttgcttgcctgtgcgcgcgtgcgcggacatggcctcaaacgat

SEQ ID NO: 94659 - DNA, 120 bp, Artificial Sequence
  ENSG00000089280_1 (sequence is synthesized)
tatacccaacaagcaacccaaagctatggggcctaccccacccagcccgggcagggctattcccagcagagcagtcagccctacggacagcagagttacagtggttatagccagtccacg

SEQ ID NO: 94660 - DNA, 120 bp, Artificial Sequence
  ENSG00000089280_2 (sequence is synthesized)
gacacttcaggctatggccagagcagctattcttcttatggccagagccagaacacaggctatggaactcagtcaactccccagggatatggctcgactggcggctatggcagtagccag

SEQ ID NO: 94661 - DNA, 120 bp, Artificial Sequence
  ENSG00000089280_3 (sequence is synthesized)
agctcccaatcgtcttacgggcagcagtcctcctaccctggctatggccagcagccagctcccagcagcacctcgggaagttacggtagcagttctcagagcagcagctatgggcagccc

SEQ ID NO: 94662 - DNA, 120 bp, Artificial Sequence
  ENSG00000089280_4 (sequence is synthesized)
cagagtgggagctacagccagcagcctagctatggtggacagcagcaaagctatggacagcagcaaagctataatccccctcagggctatggacagcagaaccagtacaacagcagcagt

SEQ ID NO: 94663 - DNA, 120 bp, Artificial Sequence
  ENSG00000089280_5 (sequence is synthesized)
ggtggtggaggtggaggtggaggtggaggtaactatggccaagatcaatcctccatgagtagtggtggtggcagtggtggcggttatggcaatcaagaccagagtggtggaggtggcagc

SEQ ID NO: 94664 - DNA, 120 bp, Artificial Sequence
  ENSG00000089280_6 (sequence is synthesized)
ggtggctatggacagcaggaccgtggaggccgcggcaggggtggcagtggtggcggcggcggcggcggcggtggtggttacaaccgcagcagtggtggctatgaacccagaggtcgtgga

SEQ ID NO: 94665 - DNA, 120 bp, Artificial Sequence
  ENSG00000089280_7 (sequence is synthesized)
ggtggccgtggaggcagaggtggcatgggcggaagtgaccgtggtggcttcaataaatttggtggccctcgggaccaaggatcacgtcatgactccgaacaggataattcagacaacaac

SEQ ID NO: 94666 - DNA, 120 bp, Artificial Sequence
  ENSG00000089280_8 (sequence is synthesized)
accatctttgtgcaaggcctgggtgagaatgttacaattgagtctgtggctgattacttcaagcagattggtattattaagacaaacaagaaaacgggacagcccatgattaatttgtac

SEQ ID NO: 94667 - DNA, 120 bp, Artificial Sequence
  ENSG00000089280_9 (sequence is synthesized)
acagacagggaaactggcaagctgaagggagaggcaacggtctcttttgatgacccaccttcagctaaagcagctattgactggtttgatggtaaagaattctccggaaatcctatcaag

SEQ ID NO: 94668 - DNA, 120 bp, Artificial Sequence
  ENSG00000089280_10 (sequence is synthesized)
gtctcatttgctactcgccgggcagactttaatcggggtggtggcaatggtcgtggaggccgagggcgaggaggacccatgggccgtggaggctatggaggtggtggcagtggtggtggt

SEQ ID NO: 94669 - DNA, 120 bp, Artificial Sequence
  ENSG00000089280_11 (sequence is synthesized)
ggccgaggaggatttcccagtggaggtggtggcggtggaggacagcagcgagctggtgactggaagtgtcctaatcccacctgtgagaatatgaacttctcttggaggaatgaatgcaac

SEQ ID NO: 94670 - DNA, 120 bp, Artificial Sequence
  ENSG00000089280_12 (sequence is synthesized)
cagtgtaaggcccctaaaccagatggcccaggagggggaccaggtggctctcacatggggggtaactacggggatgatcgtcgtggtggcagaggaggctatgatcgaggcggctaccgg

SEQ ID NO: 94671 - DNA, 120 bp, Artificial Sequence
  ENSG00000089280_13 (sequence is synthesized)
ggccgcggcggggaccgtggaggcttccgagggggccggggtggtggggacagaggtggctttggccctggcaagatggattccaggggtgagcacagacaggatcgcagggagaggccg

SEQ ID NO: 94672 - DNA, 120 bp, Artificial Sequence
  ENSG00000089280_14 (sequence is synthesized)
tattaattagcctggctccccaggttctggaacagctttttgtcctgtacccagtgttaccctcgttattttgtaaccttccaattcctgatcacccaagggtttttttgtgtcggacta

SEQ ID NO: 94673 - DNA, 120 bp, Artificial Sequence
  ENSG00000089280_15 (sequence is synthesized)
tgtaattgtaactatacctctggttcccattaaaagtgaccattttagttaaattttgttcctcttcccccttttcactttcctggaagatcgatgtcccgatcaggaaggtagagagtt

SEQ ID NO: 94674 - DNA, 120 bp, Artificial Sequence
  ENSG00000089280_16 (sequence is synthesized)
ttcctgttcagattaccctgcccagcaggaactggaatacagtgttcggggagaaggccaaatgatatccttgagagcagagattaaacttttctgtcatggggaaagttggtgtataaa

SEQ ID NO: 94675 - DNA, 120 bp, Artificial Sequence
  ENSG00000089280_17 (sequence is synthesized)
tgagaaatgaagaacatgggatgtcatgagtgttggcctaaatttgcccagctatggggaatttttcctttaccacatttatttgcatactggtcttagtttatttgcagcagtttatcc

SEQ ID NO: 94676 - DNA, 120 bp, Artificial Sequence
  ENSG00000089280_18 (sequence is synthesized)
ctttttaagaactctttgatcttttggcccttttaatggtgaggctcaaacaaactacatttaaatggggcagtattcagatttgaccatggtggagagcgcttagccactctgggtctt

SEQ ID NO: 94677 - DNA, 120 bp, Artificial Sequence
  ENSG00000089280_19 (sequence is synthesized)
tcacaggaaggagagtaactgagtgctgcaggagtttgtggagtggagtcaggatctaggaggtgagtgactcccttcctagctgccctggtgaacagcgcttgggtagatacctgctat

SEQ ID NO: 94678 - DNA, 120 bp, Artificial Sequence
  ENSG00000089280_20 (sequence is synthesized)
aaggagactggtctggctgggttactttcacatcctgcctgtactcagagggcttgaggtcattgacattatgagattttaggcttgatccctttttgattggagggtggaaggccctcc

SEQ ID NO: 94679 - DNA, 120 bp, Artificial Sequence
  ENSG00000089280_21 (sequence is synthesized)
ttaccatgtggttgtaaacttgcacgtacctgccaaccagttatttagcatgctttttattttagttacacagagcgtaacattaacccaagagcagaaaggttttatttacagggtttt

SEQ ID NO: 94680 - DNA, 120 bp, Artificial Sequence
  ENSG00000089280_22 (sequence is synthesized)
cgaacttggtttgtaagacagctgccatcacaagcatagcttacaaatgtgctggggacccctaattgggaagtgctttcctctcaaatttttattttttatttttagagacagagtctt

SEQ ID NO: 94681 - DNA, 120 bp, Artificial Sequence
  ENSG00000089280_23 (sequence is synthesized)
gcgtgatctcggctcactgtagcctctgcctcctgagtttaagcgattctcctgcctcaggagaatcccagcttctgagtagctgagactacaggcgtgggccaccatgcccacctagtt

SEQ ID NO: 94682 - DNA, 120 bp, Artificial Sequence
  ENSG00000089280_24 (sequence is synthesized)
gagaatcccagcttctgagtagctgagactacaggcgtgggccaccatgcccacctagtttttgcatttttagtggaggtgtggtttcactgtgttggccaggctggtctcttaactcct

SEQ ID NO: 94683 - DNA, 120 bp, Artificial Sequence
  ENSG00000089280_25 (sequence is synthesized)
aaagtgctggaattacaggcatgagccgctgcatctggccatcctctcaaattttcaagtgttccacaagtatgttctctactgaagagttgctgcatccttgaatcttgggtgatttga

SEQ ID NO: 94684 - DNA, 69 bp, Artificial Sequence
  ENSG00000089280_26 (sequence is synthesized)
ttttcggcttaccgcaactgccgcctcctgggttcaagcgatagctgggattacaggcatgcgccacca

SEQ ID NO: 94685 - DNA, 120 bp, Artificial Sequence
  ENSG00000089280_27 (sequence is synthesized)
tcagcctcccaataaaccatgacttttaagaggaatagcaggtttacttcccctgccagcattggggtgctctctaagcaacagtaggcggagagtggtctggcgtattaaaaacaaagg

SEQ ID NO: 94686 - DNA, 120 bp, Artificial Sequence
  ENSG00000089280_28 (sequence is synthesized)
atcgtcaagtgggccttcccaggcattgctttgacttagtacatgtagaggatgtggcagttctctccgtccctgccactgctggtttctttgttaaatgtttagttgaaatggcctgat

SEQ ID NO: 94687 - DNA, 120 bp, Artificial Sequence
  ENSG00000089280_29 (sequence is synthesized)
acgatatttgagtagttcactgttggtgctttgcctagcaggattctaatcttgctttggttgtggtcccctgatgccctcctgttaggagtggaggaggtcgaagctccttgtaagata

SEQ ID NO: 94688 - DNA, 120 bp, Artificial Sequence
  ENSG00000089280_30 (sequence is synthesized)
tgattactgggaccattagtgtcaagttcctgtgtccttcaaatggcatatgtgattggccttgaccttaaaaggaaatagggtcccaggtgactgtttagtgggtaggtccagtttggg

SEQ ID NO: 94689 - DNA, 120 bp, Artificial Sequence
  ENSG00000089280_31 (sequence is synthesized)
actgtttagtgggtaggtccagtttggggggatcttccaggagaatggatagagacacctagcagcagagagaacattggtgcctctcaagccaacctcccacctcagcctcccaagtag

SEQ ID NO: 94690 - DNA, 120 bp, Artificial Sequence
  ENSG00000089280_32 (sequence is synthesized)
tcgctaccacacctgggtaattttttttttaattacttttttttttttaagaaacagggtttcactgggttgcccaggctggtcttgaactggcctcaagtgacctgcctgcctcagcct

SEQ ID NO: 94691 - DNA, 120 bp, Artificial Sequence
  ENSG00000089280_33 (sequence is synthesized)
gctgggatcacaggtgtgacccactgcgtttggccagaatactctattcttactgaatgattgaaatctgtcttgaagcattaggtgtcccatttttgtgagttggaattgggacaggct

SEQ ID NO: 94692 - DNA, 120 bp, Artificial Sequence
  ENSG00000089280_34 (sequence is synthesized)
aagtaggaagtgaggagggtggggagagctgtgctgtaggtctgtttgtcccttccttgatgtagccttcagttagccctttcagcttttttccccatcttgtgccgggccttcctgggt

SEQ ID NO: 94693 - DNA, 120 bp, Artificial Sequence
  ENSG00000089280_35 (sequence is synthesized)
ttcagtacttggatgtagggctgcagttatgtcagtggtgggtagattgaccaggaattaaggtctagggtccagcccatgtgagacttgactcactgatctacctttaggcatgtcttc

SEQ ID NO: 94694 - DNA, 90 bp, Artificial Sequence
  ENSG00000089280_36 (sequence is synthesized)
agacggtctcactctcaaccaactgcaacctctgcctcccacccgcaagctatctgcccacctcagcctctggagtagctgggacgggac

SEQ ID NO: 94695 - DNA, 120 bp, Artificial Sequence
  ENSG00000089280_37 (sequence is synthesized)
tatctgcccacctcagcctctggagtagctgggacgggactacaggcacctgccaccatgactggctaatttttttttgtattttttgtggagatggggtcttgccatgttgctcaggct

SEQ ID NO: 94696 - DNA, 120 bp, Artificial Sequence
  ENSG00000089280_38 (sequence is synthesized)
ggtctggtctcaaaactgctctgggctcaagtgattgtcccactttggcctcccagagtgctgggattaaggtgtgagatactgtgtccggctatgaaaattttatttttaattaacttg

SEQ ID NO: 94697 - DNA, 120 bp, Artificial Sequence
  ENSG00000089280_39 (sequence is synthesized)
tatatatttatggggtacaatgtcctatttctgtacatgtacacattgtggaatcaaatcaggctaatatatccatcacttcatatcattagcatgaatgagaacatacaaagccactct

SEQ ID NO: 94698 - DNA, 120 bp, Artificial Sequence
  ENSG00000089280_40 (sequence is synthesized)
tagaaaattttgaaatttatgttatttcagcccttttatgctggaggttgcaaatgttttgtgaataatcagaccaaaaataaaaacaaaaaatgattgacttcagtcattcagtaagaa

SEQ ID NO: 94699 - DNA, 120 bp, Artificial Sequence
  ENSG00000089280_41 (sequence is synthesized)
gggcaggcgacccaggaaagggtttggagtgaggctgtgagcacttacttgatattttacaagtttggatttggtgttaatttttttccttgtccgttttttcctgttgactaacggctc

SEQ ID NO: 94700 - DNA, 120 bp, Artificial Sequence
  ENSG00000089280_42 (sequence is synthesized)
ttcttcttatggccagagccagaacagtgagtctttctcagcgggtcacctcttcctactctttctgaatattgcttttctttttcttgttttttggagacggagtctggtcctgttgcc

SEQ ID NO: 94701 - DNA, 89 bp, Artificial Sequence
  ENSG00000089280_43 (sequence is synthesized)
tagtagagatggggtttcaccgtgttggacaggctggtctggaactcctgacctcctgcctgccttgacctgaatgccctgaatgttgc

SEQ ID NO: 94702 - DNA, 120 bp, Artificial Sequence
  ENSG00000089280_44 (sequence is synthesized)
cagccacaatgccctgaatgttgcttttcttaaacctgagcagcactgagatgttgaaactgttccatatttcttttccgtgaaacagtgtataagtcttaaaactttttgggatctgag

SEQ ID NO: 94703 - DNA, 120 bp, Artificial Sequence
  ENSG00000089280_45 (sequence is synthesized)
tagtcccagctactgaggaggctgaggcgggaggatcccttgaattcaggagtttggggctgcagtgagctatgatggtgcctgtgaacagccactgcattccagcctgggcagtgtgtt

SEQ ID NO: 94704 - DNA, 86 bp, Artificial Sequence
  ENSG00000089280_46 (sequence is synthesized)
tttggggctgcagtgagctatgatggtgcctgtgaacagccactgcattccagcctgggcagtgtgttgaggccccatctgtttat

SEQ ID NO: 94705 - DNA, 120 bp, Artificial Sequence
  ENSG00000089280_47 (sequence is synthesized)
aaggaagggagttaggtgtgtccttagttagcagtgagaagtatttgttacgaagtatttctcagaaatacctggcttgtgggttccacccccagtgatttaggtctgagaggaccctga

SEQ ID NO: 94706 - DNA, 120 bp, Artificial Sequence
  ENSG00000089280_48 (sequence is synthesized)
aaatctacctttctaacaagtccccagtgatgctgatgcgtctggaccacactcagatggtttacagcagtggttctttcaaaatgtggatcatgtccaagttggtgaacaaaactagtg

SEQ ID NO: 94707 - DNA, 120 bp, Artificial Sequence
  ENSG00000089280_49 (sequence is synthesized)
aaagacctgaccacatgaagtaaagcattgaactcctgtttaggttgtattgatgtttgtgtactagatttgaatgtaaaatgggtttcttatttaattcggggaccttcaactgaaagt

SEQ ID NO: 94708 - DNA, 120 bp, Artificial Sequence
  ENSG00000089280_50 (sequence is synthesized)
gtatactgggtgttaacatgtttcaaaggataattgtcaaactgaatctgaaatttatcagcatggctggcatatagggactcaaaagggatgtggatttctttttagttgtcttccata

SEQ ID NO: 94709 - DNA, 120 bp, Artificial Sequence
  ENSG00000089280_51 (sequence is synthesized)
aaccaaatgataccagttgcttgatggatactaggtgctttaggttttttcctgtgttttttattttaccttttcacatttgcattttctctgttcaacaagcagaacaggataattcag

SEQ ID NO: 94710 - DNA, 120 bp, Artificial Sequence
  ENSG00000089280_52 (sequence is synthesized)
atgagccagggagtatctttggtggggagtgtggaggattgcatgaatctccctgaagccagtccctagtgcatggtttagtattcttgttgtctagggatctgtgagggctttgatttg

SEQ ID NO: 94711 - DNA, 120 bp, Artificial Sequence
  ENSG00000089280_53 (sequence is synthesized)
ggggcagtgactttctttttacatccccattttatttttgtgagaacttgggagcctgaactcccatccataccactgaatagagattttgagtaatgatacttgtttccaaaaaaaaag

SEQ ID NO: 94712 - DNA, 120 bp, Artificial Sequence
  ENSG00000089280_54 (sequence is synthesized)
aaaccatacatagatacgtatggattggagtcattaatatcctaggcaagaaacatggaagtgaagacttctttctctgcaagggaaaccgatgatcccactcctgggaaatagtaggga

SEQ ID NO: 94713 - DNA, 120 bp, Artificial Sequence
  ENSG00000089280_55 (sequence is synthesized)
aacttggtatgtgtattcccatgtgtcctctagggagttggtaatggttaacctgacttcagcttccaggaattggctactcttcccgttttctatagtcatttgaatccacgagcttga

SEQ ID NO: 94714 - DNA, 120 bp, Artificial Sequence
  ENSG00000089280_56 (sequence is synthesized)
tttgcactaatttgaccgacattgattttgtgtgtgacttggtttatggggccagctgactgaagtaagcagaccttttgggcaaaaatatgctttgacagtggtctcccacctatttgt

SEQ ID NO: 94715 - DNA, 120 bp, Artificial Sequence
  ENSG00000089280_57 (sequence is synthesized)
tccactgtctgccttcccctggttacttaaaattcatcagcttgtccaactggaccttctttccttcctgctgaagttgatttgaagtaaaaccttagatttgatgttaaaacagttgtc

SEQ ID NO: 94716 - DNA, 120 bp, Artificial Sequence
  ENSG00000089280_58 (sequence is synthesized)
aaatctgttggtaaataagatttgaaggaccctactctgtctcccttgaaaaaggggaggaatgtcagtgttactgtttttggaaaaagtagatttttaaaccgagtttggaaatggtaa

SEQ ID NO: 94717 - DNA, 120 bp, Artificial Sequence
  ENSG00000089280_59 (sequence is synthesized)
gtatgcagaggtgggtgggggcaatctcaaaaacgtgcaaaaatgaggaaaacaaaaatgaggaaatgtgtgcgtgtgtttaatgcaaaactttaaaaagaaaaacaactgttatgtgac

SEQ ID NO: 94718 - DNA, 120 bp, Artificial Sequence
  ENSG00000089280_60 (sequence is synthesized)
tgttaacttgctctgcattttatgtgccacaggtatgaaaggtgacattgcaaaatactccgctcttctcgcagtgtagaaggggtgaccccgggggttgggggagatcaaaaacagctc

SEQ ID NO: 94719 - DNA, 120 bp, Artificial Sequence
  ENSG00000089280_61 (sequence is synthesized)
agtagttaggacagagcttagctaagtttgtcttgctttaaggggaagttgcctttggttttgactttttatggaatggggttgggtctgcttgctgctttcaaagcaaaaaccacaaaa

SEQ ID NO: 94720 - DNA, 120 bp, Artificial Sequence
  ENSG00000089280_62 (sequence is synthesized)
atgtgttcaaggctaccccagcctggtgtgaaatgtcttctgggtaaattggggtagggtttttaaaccaactacttggttgtcaaccacttgcgacaagaggaaaaaaaaacatctgct

SEQ ID NO: 94721 - DNA, 120 bp, Artificial Sequence
  ENSG00000089280_63 (sequence is synthesized)
ccatcggaagaacgaccaaggaaaatgggttattttttttccagaggaaatagataacgtaaccttttaaagcaaaatctttataaactgtgtctgagaaattgcacacgtgtgtgtgac

SEQ ID NO: 94722 - DNA, 120 bp, Artificial Sequence
  ENSG00000089280_64 (sequence is synthesized)
atgctcaaaggtcagacaaggggtggtcaggaagggatgtattttagtagccacttgtatctttttccaaaaacacctacccatgtttggggaatgttaaacaaaatcaaaaaacaacct

SEQ ID NO: 94723 - DNA, 120 bp, Artificial Sequence
  ENSG00000089280_65 (sequence is synthesized)
tttgtagccgttggaagcttcatgtcctttcttctaacttgtcttctccagcggaagtgaccgtggtggcttcaataaatttggtggtaagtgaacagagtttccaaaattcccaactcc

SEQ ID NO: 94724 - DNA, 120 bp, Artificial Sequence
  ENSG00000089280_66 (sequence is synthesized)
cagcaatgctttgtctgattgttcatttgcagatgtcttagcgtgttaatttaaatgtcaaaggttttgaggtgtccagaaccacctccagaaaggggtagggtagaatgccacctgttg

SEQ ID NO: 94725 - DNA, 120 bp, Artificial Sequence
  ENSG00000089280_67 (sequence is synthesized)
cctggtgtgtgctaacctggagcaggtaggggtaagactcaatagtcatcttttaccaaatgggtttgccccaggttaataagaggggtctagtaggccttggactgggccgttgccaca

SEQ ID NO: 94726 - DNA, 120 bp, Artificial Sequence
  ENSG00000089280_68 (sequence is synthesized)
cctggcacttagtgaccatcatcatgagaaactggagagtgcgtgctggaacacgtggtgccatcttggctttaggatccttttgatcgttgtgtccaaggcttgtgtgtgtgtgagtgt

SEQ ID NO: 94727 - DNA, 120 bp, Artificial Sequence
  ENSG00000089280_69 (sequence is synthesized)
gtgggagacaactccgaatgtttaattctggaagagggatgtaacattgccctgaggatggtgaagttggtatacatttataaagtacggaatggtgtcaatgaatgcaattctatgtat

SEQ ID NO: 94728 - DNA, 120 bp, Artificial Sequence
  ENSG00000089280_70 (sequence is synthesized)
atggacttaactgagatgggcaaatagaaactagctctgggaaggaacatgtgcactacttcaagaaagattggaagcatgtgtggctcatgggaaataaccaggtcttaaacagcacaa

SEQ ID NO: 94729 - DNA, 120 bp, Artificial Sequence
  ENSG00000089280_71 (sequence is synthesized)
actgaattcgtggaccaggaaggtcttaaacagcacaaactgaattcatggaaaaatgacaaatttgagaagtctcccagtaagctggaacttttctggtttggttaacaaaaggtttct

SEQ ID NO: 94730 - DNA, 120 bp, Artificial Sequence
  ENSG00000089280_72 (sequence is synthesized)
tgatttgtttcaagatttaaagccaaaggtgtgggttcatgacttaggtgtcattgcgtgtgggtacaatatttatatatggcgaattcagataaacattggtcaaagatggtctctgga

SEQ ID NO: 94731 - DNA, 120 bp, Artificial Sequence
  ENSG00000089280_73 (sequence is synthesized)
aaaacaaaatagaggctgcattacggaaataagatttctggtctgttccctgggacatgcttaaaaaatacaatagctattatgtatggtttttattttcatgtggtttcggggaaacaa

SEQ ID NO: 94732 - DNA, 120 bp, Artificial Sequence
  ENSG00000089280_74 (sequence is synthesized)
cacggttttaaggatggtttctaaagatgaaattaaaaattgttccacaagggttaagtgtctggtggtaaagttgggagaaactggatggatgcacatcgcatggctggtggcgagccc

SEQ ID NO: 94733 - DNA, 120 bp, Artificial Sequence
  ENSG00000089280_75 (sequence is synthesized)
atctctcttctctcgggtgagagaaccgggccaagctgagttggtttgttcactttaatgggtctccgtttcccctgccacctgtgctgaggacatttcccagcctgagctgggggaggc

SEQ ID NO: 94734 - DNA, 120 bp, Artificial Sequence
  ENSG00000089280_76 (sequence is synthesized)
gctggtgactggaagtgtcctaatccgtgagtgaaacttaatttttttcttagttctcttgcatgcgtgctctttgatatattggtactgaggtatgtgcgtgttttccaaagaagtaaa

SEQ ID NO: 94735 - DNA, 120 bp, Artificial Sequence
  ENSG00000089280_77 (sequence is synthesized)
tgtcaaggccacactgttggggtcagatttagccaaaagcttacctaggtaaggttgatgtaatgggaaaggtaatggattgggttcagtaatactgatttttgttcctgactctgagaa

SEQ ID NO: 94736 - DNA, 120 bp, Artificial Sequence
  ENSG00000089280_78 (sequence is synthesized)
gcaagccgttttgtctttctgaagcttcagtttcctcactgtatctctaaagtcaccgtagtttcttcctagttctaggtcttgcctattccccatcgctccagactgattgtcttcctt

SEQ ID NO: 94737 - DNA, 120 bp, Artificial Sequence
  ENSG00000089280_79 (sequence is synthesized)
gcacgcacagctgcatattacagtgctgttaacagggatccttgggcctgggtttagagggtggtgctggagatggtgttgggattggcggggtgaaattggaactgtactaaagagttg

SEQ ID NO: 94738 - DNA, 120 bp, Artificial Sequence
  ENSG00000089280_80 (sequence is synthesized)
gtagaagttgaagcattaaatttaggctttgaaaggagggtaactatctttgcctatgagttgcaacatcactaacagcttctgagaggctggctttatgagtataggtattatgttttc

SEQ ID NO: 94739 - DNA, 120 bp, Artificial Sequence
  ENSG00000089289_0 (sequence is synthesized)
acttcgcgctcaagcgaccggatcttcaaaccgtgggagtggtgcggcggctagagtccctggactcctcaacctagggagctactcgcgaggtaaggggcgcgccagactggctcctaa

SEQ ID NO: 94740 - DNA, 120 bp, Artificial Sequence
  ENSG00000089289_1 (sequence is synthesized)
aacgcactcgctcgtccgcactcctcgcgctccgaattcagcctcgcctcacccgggcttcagagcccacagaacttctcagccccgtgtcggcgacgaggagctcatggtaaaacagcg

SEQ ID NO: 94741 - DNA, 120 bp, Artificial Sequence
  ENSG00000089289_2 (sequence is synthesized)
cctagggttttgcttgtttgtttgcttttaacagatgcctacgacttgtaacgggctgcctggtaaaatgagtctatggaaacggttgccagggccggctaacagcggctcccggaagtc

SEQ ID NO: 94742 - DNA, 120 bp, Artificial Sequence
  ENSG00000089289_3 (sequence is synthesized)
ctttgatgctttgttaacagtgaagctactggaccaatgaggtgcttcttccggttttgtccgcgctcgcctaattcttctttatcaaggttgcctttgaccccggaaaagagatcttcc

SEQ ID NO: 94743 - DNA, 120 bp, Artificial Sequence
  ENSG00000089289_4 (sequence is synthesized)
gggttcctctctccccaagatggctgctgaggacgagttacagctgccgcggctccccgagctgttcgaaactggtagacagttactggacgaagtagaagtggcgactgaacccgccgg

SEQ ID NO: 94744 - DNA, 120 bp, Artificial Sequence
  ENSG00000089289_5 (sequence is synthesized)
ttcccggatagtccaggagaaggtgttcaagggcttggacctccttgagaaggctgccgaaatgttatcgcagctcgacttgttcagccgaaatgaagatttggaagagattgcttccac

SEQ ID NO: 94745 - DNA, 120 bp, Artificial Sequence
  ENSG00000089289_6 (sequence is synthesized)
cgacctgaagtaccttttggtgccagcgtttcaaggagccctcaccatgaaacaagtcaaccccagcaagcgtctagatcatttgcagcgggctcgagaacactttataaactacttaac

SEQ ID NO: 94746 - DNA, 120 bp, Artificial Sequence
  ENSG00000089289_7 (sequence is synthesized)
aaaatcacactgccaattcctccatggcttatcctagtctcgttgctatggcatctcaaagacaggctaaaatacagagatacaagcagaagaaggagttggagcataggttgtctgcaa

SEQ ID NO: 94747 - DNA, 120 bp, Artificial Sequence
  ENSG00000089289_8 (sequence is synthesized)
tgaaatctgctgtggaaagtggtcaagcagatgatgagcgtgttcgtgaatattatcttcttcaccttcagaggtggattgatatcagcttagaagagattgagagcattgaccaggaaa

SEQ ID NO: 94748 - DNA, 120 bp, Artificial Sequence
  ENSG00000089289_9 (sequence is synthesized)
taaagatcctgagagaaagagactcttcaagagaggcatcaacttctaactcatctcgccaggagaggcctccagtgaaacccttcattctcactcggaacatggctcaagccaaagtat

SEQ ID NO: 94749 - DNA, 120 bp, Artificial Sequence
  ENSG00000089289_10 (sequence is synthesized)
ttggagctggttatccaagtctgccaactatgacggtgagtgactggtatgagcaacatcggaaatatggagcattaccggatcagggaatagccaaggcagcaccagaggaattcagaa

SEQ ID NO: 94750 - DNA, 120 bp, Artificial Sequence
  ENSG00000089289_11 (sequence is synthesized)
aagcagctcagcaacaggaagaacaagaagaaaaggaggaagaggatgatgaacaaacactccacagagcccgggagtgggatgactggaaggacacccatcctaggggctatgggaacc

SEQ ID NO: 94751 - DNA, 120 bp, Artificial Sequence
  ENSG00000089289_12 (sequence is synthesized)
gacagaacatgggctgatcttcccacaacaccacaggactgcagggtgcacaactcccctgccaaggaaaaccatgcagtcctcccctccctggtctcctgcttcagctctgtacaacga

SEQ ID NO: 94752 - DNA, 120 bp, Artificial Sequence
  ENSG00000089289_13 (sequence is synthesized)
gggcaaagatgctaaatcttgctttgcattcagtaaagtgtcaagtgattaagtgtgtatttgtaccctagatgatatgaaccagcagtcttgttttggcatcatcctcatcatgttgta

SEQ ID NO: 94753 - DNA, 120 bp, Artificial Sequence
  ENSG00000089289_14 (sequence is synthesized)
ttccagcttcttaagtggaaggaaaagagtgctgagaaatggctctgtataatctatggctatccgaattctctgaaaaaataataaaagtcccctctattatatgagcctgtacagaaa

SEQ ID NO: 94754 - DNA, 120 bp, Artificial Sequence
  ENSG00000089289_15 (sequence is synthesized)
gcacttcgcgctcaagcgaccggatcttcaaaccgtgggagtggtgcggcggctagagtccctggactcctcaacctagggagctactcgcgagatgcctacgacttgtaacgggctgcc

SEQ ID NO: 94755 - DNA, 120 bp, Artificial Sequence
  ENSG00000089327_0 (sequence is synthesized)
tccacgaggctgccggcttaggacccccagctccgacgtaagtccctctcgtgcgccacctccatccgctgcccctctgcccacgggccgggctcaggtgggtaggggtttgaccccttc

SEQ ID NO: 94756 - DNA, 120 bp, Artificial Sequence
  ENSG00000089327_1 (sequence is synthesized)
cgctcctctccgccccccatccacgcccacatctctctgcctcctctcctgggctacagtgggccgctctgcctcgctcccgcccgcctgcctcagtctccccagctctctgccaccccc

SEQ ID NO: 94757 - DNA, 120 bp, Artificial Sequence
  ENSG00000089327_2 (sequence is synthesized)
ctcggaccagtgcctcttaggtctctccagcgcgccatccctgcaaggcggcccctgacaccaactcactttttcctctgagcgcgggaggcgttactcactcttcctccttcccctcct

SEQ ID NO: 94758 - DNA, 120 bp, Artificial Sequence
  ENSG00000089327_3 (sequence is synthesized)
cgccgactcccgggctctgggcccctgggggagggaagaggcctcctatctactcctctgccccagtcccctccttgcgtcagtcccagtgagggataagcgcctggcggaaggcgcagg

SEQ ID NO: 94759 - DNA, 120 bp, Artificial Sequence
  ENSG00000089327_4 (sequence is synthesized)
gaggtgtttctctgcttcaggagtgcccgccggcccttgcagctgctggaagacccatttatctcatgcttcttgttttctttggggacctgcaggggaaggaagcagggtgacggtttg

SEQ ID NO: 94760 - DNA, 120 bp, Artificial Sequence
  ENSG00000089327_5 (sequence is synthesized)
gtatccccacctaagaccctcccctttcccctgaggccagccgtcagcccctggcagggggtcttggaagccagaggtttttgctcagggcagggaaagggctgcaggatccccgggggc

SEQ ID NO: 94761 - DNA, 120 bp, Artificial Sequence
  ENSG00000089327_6 (sequence is synthesized)
gacatcatggctgaccccagcatcgcctggtcccacagatgtcgccctctggtcgcctgtgtcttctcaccatcgttggcctgattctccccaccagaggacagacgttgaaagatacca

SEQ ID NO: 94762 - DNA, 120 bp, Artificial Sequence
  ENSG00000089327_7 (sequence is synthesized)
cgtccagttcttcagcagactcaactatcatggacattcaggtcccgacacgagccccagatgcagtctacacagaactccagcccacctctccaaccccaacctggcctgctgatgaaa

SEQ ID NO: 94763 - DNA, 120 bp, Artificial Sequence
  ENSG00000089327_8 (sequence is synthesized)
caccacaaccccagacccagacccagcaactggaaggaacggatgggcctctagtgacagatccagagacacacaagagcaccaaagcagctcatcccactgatgacaccacgacgctct

SEQ ID NO: 94764 - DNA, 120 bp, Artificial Sequence
  ENSG00000089327_9 (sequence is synthesized)
ctgagagaccatccccaagcacagacgtccagacagacccccagaccctcaagccatctggttttcatgaggatgaccccttcttctatgatgaacacaccctccggaaacgggggctgt

SEQ ID NO: 94765 - DNA, 120 bp, Artificial Sequence
  ENSG00000089327_10 (sequence is synthesized)
tggtcgcagctgtgctgttcatcacaggcatcatcatcctcaccagtggcaagtgcaggcagctgtcccggttatgccggaatcgttgcaggtgagtccatcagaaacaggagctgacaa

SEQ ID NO: 94766 - DNA, 120 bp, Artificial Sequence
  ENSG00000089327_11 (sequence is synthesized)
cctgctgggcacccgaagaccaagccccctgccagctcaccgtgcccagcctcctgcatcccctcgaagagcctggccagagagggaagacacagatgatgaagctggagccagggctgc

SEQ ID NO: 94767 - DNA, 120 bp, Artificial Sequence
  ENSG00000089327_12 (sequence is synthesized)
cggtccgagtctcctacctcccccaaccctgcccgcccctgaaggctacctggcgccttgggggctgtccctcaagttatctcctctgctaagacaaaaagtaaagcactgtggtctttg

SEQ ID NO: 94768 - DNA, 120 bp, Artificial Sequence
  ENSG00000089327_13 (sequence is synthesized)
tgggctacagtgggccgctctgcctcgctcccgcccgcctgcctcagtctccccagctctctgccacccccctcggaccagtgcctcttagatgtcgccctctggtcgcctgtgtcttct

SEQ ID NO: 94769 - DNA, 120 bp, Artificial Sequence
  ENSG00000089327_14 (sequence is synthesized)
gccaccgccgcgtccctctctccacgaggctgccggcttaggacccccagctccgacgtaagtccctctcgtgcgccacctccatccgctgcccctctgcccacgggccgggctcagatg

SEQ ID NO: 94770 - DNA, 120 bp, Artificial Sequence
  ENSG00000089327_15 (sequence is synthesized)
tgcacaccagctgtgtagatgtgggagaggggtttcttccagatgcagactctcagtaatatcccttgtttctgcctccatggctcactcctgccctccactgatctggccactctctca

SEQ ID NO: 94771 - DNA, 120 bp, Artificial Sequence
  ENSG00000089327_16 (sequence is synthesized)
ggtcgcagctgtgctgttcatcacaggcatcatcatcctcaccagtgagaactggggttgggtgggaaggacaccaagaccaggagggggacttatgacggagggctgggttctcaaagg

SEQ ID NO: 94772 - DNA, 120 bp, Artificial Sequence
  ENSG00000089327_17 (sequence is synthesized)
tccctgggcaattttgttttaaatgaggtatctattagctgcatatacatacaaaccaccacagaattcagtggtttaaaataatgaccatttattgagctctcaataccacagtttgga

SEQ ID NO: 94773 - DNA, 120 bp, Artificial Sequence
  ENSG00000089327_18 (sequence is synthesized)
aacataggctgggctcagctgggtgattcttctggtctcaactggatttactcttgcatctgagttcagttgtgggtcagcaggaaactttgtttctggggtgccttggctctttgccac

SEQ ID NO: 94774 - DNA, 120 bp, Artificial Sequence
  ENSG00000089327_19 (sequence is synthesized)
atcatcttatccttcactaagctagcctgggcttgttcgcatggtggtggcagggatctaagatagagtgaatgcatgcaggctcagaactggccattatcacttctgcctcattccata

SEQ ID NO: 94775 - DNA, 120 bp, Artificial Sequence
  ENSG00000089327_20 (sequence is synthesized)
cctctctccacgaggctgccggcttaggacccccagctccgacatgtcgccctctggtcgcctgtgtcttctcaccatcgttggcctgattctccccaccagaggttggaacagactgtg

SEQ ID NO: 94776 - DNA, 120 bp, Artificial Sequence
  ENSG00000089327_21 (sequence is synthesized)
ggggcggagacaggagcagggagcccaagaaggaggctgctgggatgtccaggctggagggtacagaggcaggaccaggatgggggcagtggagttatccagcactgaccacatggacag

SEQ ID NO: 94777 - DNA, 120 bp, Artificial Sequence
  ENSG00000089327_22 (sequence is synthesized)
acttggaatatgtactgactatgtgctggtcatggttctaaatattttgcgtatgttaactcattcaaccttcacgcaaaccctaagaggcagaaattaccattgtccccattttacaga

SEQ ID NO: 94778 - DNA, 120 bp, Artificial Sequence
  ENSG00000089327_23 (sequence is synthesized)
caaggaaacagaggctgtgagtaactggttcaaggtctcacaacaagtcagggacgcagctggaatcgaagtccaggaatctggcaccagagcctgtgcttttatccaagacaatacagg

SEQ ID NO: 94779 - DNA, 90 bp, Artificial Sequence
  ENSG00000089327_24 (sequence is synthesized)
ctggcaccagagcctgtgcttttatccaagacaatacagggcaaaggacatgcatgcttaatgttttaaaatttgccctcctgccgccca

SEQ ID NO: 94780 - DNA, 120 bp, Artificial Sequence
  ENSG00000089327_25 (sequence is synthesized)
ttgcaaataacaacagcaacaaaaatcccaaacttggaccaaacaagggaatttatggatttatgtaacgaaaaagtccagatgcagtctacacagaactccagcccacctctccaaccc

SEQ ID NO: 94781 - DNA, 120 bp, Artificial Sequence
  ENSG00000089335_0 (sequence is synthesized)
gatagcttcaggcctggcggcggcttccaagctaaggaacggtttggggcagtgtcgttcccggaggtcggccgccgttacccgctcaccagctacgcggcgcgtcaggtccgcggaggc

SEQ ID NO: 94782 - DNA, 120 bp, Artificial Sequence
  ENSG00000089335_1 (sequence is synthesized)
gcgggctcggggcgcctgcgggacggtgaggccctgctgaggactccggacactgcccatctctaagataagaacctggaaaggggactctgttggccattggaaattgcagaataatgt

SEQ ID NO: 94783 - DNA, 120 bp, Artificial Sequence
  ENSG00000089335_2 (sequence is synthesized)
ctcaggtgacatttagtgatgtggctatagacttctctcatgaagagtgggcatgcctagattctgctcagagggacttatacaaggatgtgatggtccagaattatgagaacctggtct

SEQ ID NO: 94784 - DNA, 120 bp, Artificial Sequence
  ENSG00000089335_3 (sequence is synthesized)
ctgtaggtctttccgtaactaagccatatgtgatcatgttattggaggatggaaaagagccctggatgatggagaaaaaactgtcaaaagattgggaatcaagatgggaaaacaaggaat

SEQ ID NO: 94785 - DNA, 120 bp, Artificial Sequence
  ENSG00000089335_4 (sequence is synthesized)
tatcaacaaagaaggatatttatgatgaagattcaccccaaccagtaacaatggaaaaagttgtaaaacaaagttatgaattttcaaattctaataagaatttggaatatacagaatgcg

SEQ ID NO: 94786 - DNA, 120 bp, Artificial Sequence
  ENSG00000089335_5 (sequence is synthesized)
acacatttagaagcacctttcattcaaagtctactctttctgaaccacaaaacaattctgctgaagggaattcacacaaatatgatatattaaagaagaatttatcaaaaaagtcagtta

SEQ ID NO: 94787 - DNA, 120 bp, Artificial Sequence
  ENSG00000089335_6 (sequence is synthesized)
taaaaagtgagagaataaatggtggaaagaaacttttaaattctaataaaagtggggcagccttcaaccagagcaaatctcttacccttccccagacttgtaatagagagaaaatctata

SEQ ID NO: 94788 - DNA, 120 bp, Artificial Sequence
  ENSG00000089335_7 (sequence is synthesized)
catgcagtgaatgtgggaaagcctttggcaaacagtcaatcctcagtcgccactggagaattcatacaggagagaagccctatgaatgtcgtgaatgtgggaagacttttagccatggtt

SEQ ID NO: 94789 - DNA, 120 bp, Artificial Sequence
  ENSG00000089335_8 (sequence is synthesized)
catcccttacacgacatcagataagccatagtggagagaaaccttacaaatgcattgaatgtgggaaggcctttagccatggctcatcacttactaaccatcagagcactcacacgggag

SEQ ID NO: 94790 - DNA, 120 bp, Artificial Sequence
  ENSG00000089335_9 (sequence is synthesized)
agaaaccgtatgaatgtatgaactgtggaaagtcttttagtcgtgtgtcccttctcattcagcatctaagaattcatacgcaagaaaaacgctatgagtgtcgtatatgtggaaaggcct

SEQ ID NO: 94791 - DNA, 120 bp, Artificial Sequence
  ENSG00000089335_10 (sequence is synthesized)
atgtgggaaagctttctgctgtagctcacaccttactcaacatcaaagaattcacagtatgaagaaaaaatatgaatgcaacaaatgtctcaaggtctttagtagcttctcatttcttgt

SEQ ID NO: 94792 - DNA, 120 bp, Artificial Sequence
  ENSG00000089335_11 (sequence is synthesized)
tcaacatcagagtattcatactgaagaaaaaccgtttgaagtttagaaatgcaggaaatccttcaaccagcttgaatcactgaatatgcatttgagaaatcacattagattgaaacccta

SEQ ID NO: 94793 - DNA, 120 bp, Artificial Sequence
  ENSG00000089335_12 (sequence is synthesized)
cgaatgcagtatatgtgggaaagcctttagtcataggtcgtccctgcttcaacatcacagtattcatactggagagaaaccttacgaatgtattaaatgtgggaagaccttcagctgtag

SEQ ID NO: 94794 - DNA, 120 bp, Artificial Sequence
  ENSG00000089335_13 (sequence is synthesized)
ttcaaaccttactgtacatcagagaattcatactggagaaaagccatataaatgtagtgagtgtgggaaagcttttagcaaaggctcgaatcttactgcccatcaaagagtacataatgg

SEQ ID NO: 94795 - DNA, 120 bp, Artificial Sequence
  ENSG00000089335_14 (sequence is synthesized)
agagaaacccaatagtgtggtaagtgtggaaaagcctttagatcatatgaatccctatacatgtgagaaatcttacagaagagaagcagtgtttatcacggtaaacttcattcatagatc

SEQ ID NO: 94796 - DNA, 120 bp, Artificial Sequence
  ENSG00000089335_15 (sequence is synthesized)
ctcccttatttaacatcagaaaaatgtatactggggaaaagttgtatgaaggtggtgaacatgggagacttttagcaatgatgcagatttttttattagagtttatactgtagagaaatc

SEQ ID NO: 94797 - DNA, 120 bp, Artificial Sequence
  ENSG00000089335_16 (sequence is synthesized)
atatgaagtcaataaatgtgggaaagcctttgtcagtattaatcccttaattgacctaagtatactcacactaggaaaaatctgtgtacatgtagcaaatgtgggaaagactataggcaa

SEQ ID NO: 94798 - DNA, 120 bp, Artificial Sequence
  ENSG00000089335_17 (sequence is synthesized)
taggaatctcctgcaaactcctacaggagaaaagttgtatgaatgtggaaactttagaaattgaaggaatttttcagttccaagtgcatcccttattctataggaaataaactggagaca

SEQ ID NO: 94799 - DNA, 120 bp, Artificial Sequence
  ENSG00000089335_18 (sequence is synthesized)
aatctcatttaagagatgcagcaaagtgttcactaagagtgtttatcttgccagacataagaagatgaatggtagagcaacctgaaggatttagaaattacatataaatctttgcagtta

SEQ ID NO: 94800 - DNA, 120 bp, Artificial Sequence
  ENSG00000089335_19 (sequence is synthesized)
tgctatttgtaaacaggattatataggagagcaaataaacataagtatgcatttcttagagcagtagcttgcagtttcagttgagttctacttagaaattctttttagctagtgggcatg

SEQ ID NO: 94801 - DNA, 120 bp, Artificial Sequence
  ENSG00000089335_20 (sequence is synthesized)
tgaagatatttagtcacccagaggagccagtaaatgttataatgttaaaaattaaagctgcaaaagaaataaaatggtgttaataaaaatttggcatctaataaaatcattttgtatatc

SEQ ID NO: 94802 - DNA, 120 bp, Artificial Sequence
  ENSG00000089335_21 (sequence is synthesized)
ggccggggccttgggcatttcctggccttcctgttgagccgtgtaaacgcggggtgatgacggcgccgacctcttggcactgttgtgagagcgaagtgggcgcgagagcagacgccagct

SEQ ID NO: 94803 - DNA, 120 bp, Artificial Sequence
  ENSG00000089335_22 (sequence is synthesized)
gatggagaaaaaactgtcaaaagcttacccatttcctttatcacactctgttcctgcttctgtgaactttggattctctgctctatttgagcattgttcagaagtcactgaaatatttga

SEQ ID NO: 94804 - DNA, 120 bp, Artificial Sequence
  ENSG00000089335_23 (sequence is synthesized)
gaagtcactgaaatatttgagttgtcagaactatgtgttttctgggtgcttcatttcttatccaattctcctaattccactgtagaagcttttttcaagaaaaaaaaaaaaaaaaaaaaa

SEQ ID NO: 94805 - DNA, 120 bp, Artificial Sequence
  ENSG00000089335_24 (sequence is synthesized)
aaaaaaaaaaaaaaaaaaaaaaaggcagtgctttgctttcttgatatatttcagattgggaatcaagatgggaaaacaaggaattatcaacaaagaaggatatttatgatgaagattcac

SEQ ID NO: 94806 - DNA, 120 bp, Artificial Sequence
  ENSG00000089335_25 (sequence is synthesized)
gtcagtcccgcgatagcttcaggcctggcggcggcttccaagctaaggaacggtttggggcagtgtcgttcccggaggacactgcccatctctaagataagaacctggaaaggggactct

SEQ ID NO: 94807 - DNA, 120 bp, Artificial Sequence
  ENSG00000089335_26 (sequence is synthesized)
tattattgaatatttaaacttctaaagttttactattttaaataatactgtgaaatgagtactattgagaagaatttctaagcacatctgtgagcatttccttagaatattttctttgaa

SEQ ID NO: 94808 - DNA, 120 bp, Artificial Sequence
  ENSG00000089335_27 (sequence is synthesized)
atctactcttatttttttccccttccaggtcctatttaaggactgtctatggcaggagtcctcaacctttttgacaccagggatcagtttcgtggaagacaatttttccacggaagtggg

SEQ ID NO: 94809 - DNA, 120 bp, Artificial Sequence
  ENSG00000089335_28 (sequence is synthesized)
aggtggtggaggtgatggtttggggatgaaaccgttctacctcagatcatcaggcattagattgacataaggagtgtgcaacttcgatcccttgcatgtgcagttcacagtagggattgc

SEQ ID NO: 94810 - DNA, 120 bp, Artificial Sequence
  ENSG00000089335_29 (sequence is synthesized)
gctcctgtaagaatctatgctatagctgatctgacagcaggtggagctcgggtgataatgctctttcctgccactcacctcctgctgtgttgcccggttcctaaaggccacagaccagta

SEQ ID NO: 94811 - DNA, 120 bp, Artificial Sequence
  ENSG00000089335_30 (sequence is synthesized)
ccagtccgtggcccaggtgttagacccctgatctatgacatgaaaccatccttcagtcttttcacccaggagtctcatattttaattattaaatgtttgtcagcacgaagtttaagtata

SEQ ID NO: 94812 - DNA, 120 bp, Artificial Sequence
  ENSG00000089335_31 (sequence is synthesized)
caccacaaatatatttttcttttttgtttatgaatcagttatgtgtatgttttagtccatttgtgctgctgtaacaaataccccagactgagtagtttataaataatgaaaattgacttc

SEQ ID NO: 94813 - DNA, 120 bp, Artificial Sequence
  ENSG00000089335_32 (sequence is synthesized)
tcatggttttggtgcctgggaagtccaagatcaagaggcaggcatctggcaagggccttcttgctgtgtccttttgtggtggatgggcaaagagacgagagagaggcaaaggggggccag

SEQ ID NO: 94814 - DNA, 120 bp, Artificial Sequence
  ENSG00000089335_33 (sequence is synthesized)
aactcatttttttaaataaggaaccctcttccctgatgatgacattaatccattcatgagggcagagtcctcaaggcccaatagtctcctaaagatctaacctctcaatactattagaat

SEQ ID NO: 94815 - DNA, 120 bp, Artificial Sequence
  ENSG00000089335_34 (sequence is synthesized)
ggtgattaagttcaatacatgcttttttggggaacataatcaaaccatatgtctatcagtctttaatattaagatgtcttttttttctgaacccattttttgtgagatttagtgaatctt

SEQ ID NO: 94816 - DNA, 120 bp, Artificial Sequence
  ENSG00000089335_35 (sequence is synthesized)
tctgagtatcatatttgagagacaattgctttagccttatttttaattacttagctagcatgtaagctataaaagatataactaaatacttgactctgtgctgtcaaatgtcaaatgttg

SEQ ID NO: 94817 - DNA, 120 bp, Artificial Sequence
  ENSG00000089335_36 (sequence is synthesized)
atttttaaaaattcatataattctaaacttttaacaaaattactgaagcaaagctctcatatttgtctctcattcttattgtataaaaattctaagcacataactgtcccctttattgta

SEQ ID NO: 94818 - DNA, 120 bp, Artificial Sequence
  ENSG00000089335_37 (sequence is synthesized)
taattccaactacataactgtcctattattacttacctgacatcacattcccagtcattgtcacagctcctgaatcttgttccatttcttccacaagcaggctaattttaccccttcttc

SEQ ID NO: 94819 - DNA, 120 bp, Artificial Sequence
  ENSG00000089335_38 (sequence is synthesized)
gacacctttcttttgccaccctgaattgctggagattctcctaagtaaatggctgaatttctgtaccatgctcccgaggaaatgtgcagctctgttgtgccctgcctaaagcttatcttt

SEQ ID NO: 94820 - DNA, 80 bp, Artificial Sequence
  ENSG00000089351_0 (sequence is synthesized)
ctccggcggctccggccttttgtgcgggcggttgggtcgggtgggggcggcggccgcggaaggccaggccggtgccctgc

SEQ ID NO: 94821 - DNA, 120 bp, Artificial Sequence
  ENSG00000089351_1 (sequence is synthesized)
ccgcgcagcccagccctgccctgccctgccctgccctgcgcccggggcgcgcccaccgcgccgcatccatgttcgacaccacaccccactctggccggagcacgccaagcagctccccat

SEQ ID NO: 94822 - DNA, 120 bp, Artificial Sequence
  ENSG00000089351_2 (sequence is synthesized)
ccatcgctccggaaacggctgcagctcctgcccccaagccggcccccacctgagccagaaccaggcaccatggtggagaagggatcagatagctcctcagagaagggtggggtgcctggg

SEQ ID NO: 94823 - DNA, 120 bp, Artificial Sequence
  ENSG00000089351_3 (sequence is synthesized)
acccccagcacccagagcctaggcagccggaacttcatccgcaacagcaagaagatgcagagctggtacagtatgctgagccccacttataagcagcgtaatgaggacttccggaaactg

SEQ ID NO: 94824 - DNA, 120 bp, Artificial Sequence
  ENSG00000089351_4 (sequence is synthesized)
ttcagcaaactccccgaagcagaacgcctcattgtggattactcctgcgccctgcagcgtgagatcctgctccagggccgcctctacctctctgagaactggatctgcttctacagcaac

SEQ ID NO: 94825 - DNA, 120 bp, Artificial Sequence
  ENSG00000089351_5 (sequence is synthesized)
atcttccgctgggagaccacgatctccatccagctgaaggaagtgacatgtctgaagaaggaaaagacggccaagctgatccccaacgccatccagatctgcacggagagcgagaagcat

SEQ ID NO: 94826 - DNA, 120 bp, Artificial Sequence
  ENSG00000089351_6 (sequence is synthesized)
ttcttcacttcctttggggcccgtgaccgctgcttcctcctcatcttccgcctctggcagaatgcactgcttgaaaagacgctgagtccccgcgagctctggcacctggtgcatcagtgc

SEQ ID NO: 94827 - DNA, 120 bp, Artificial Sequence
  ENSG00000089351_7 (sequence is synthesized)
tacggctcagagctgggcctcaccagtgaggatgaggactatgtctcccccttgcagctgaacggtctggggacccccaaggaagtgggagatgtgatcgccctgagcgacatcacctcc

SEQ ID NO: 94828 - DNA, 120 bp, Artificial Sequence
  ENSG00000089351_8 (sequence is synthesized)
tcgggggcagctgaccgcagccaggagccaagcccagtgggttcgcgccgtggccatgtcacgcccaacctttcccgagccagcagcgacgcagaccatggggcagaggaggacaaggag

SEQ ID NO: 94829 - DNA, 120 bp, Artificial Sequence
  ENSG00000089351_9 (sequence is synthesized)
gagcaggtagacagccagccagacgcctcctccagccagacagtgaccccggtggctgaacccccgagcacagagcccacccagcctgacgggcccaccaccctgggccccttggatctg

SEQ ID NO: 94830 - DNA, 120 bp, Artificial Sequence
  ENSG00000089351_10 (sequence is synthesized)
ctgcccagtgaggagctattgacagacacaagtaactcctcttcatccactggggaggaagcggacttggctgccctgcttcccgacctctccggccgcctcctcatcaactctgtcttc

SEQ ID NO: 94831 - DNA, 120 bp, Artificial Sequence
  ENSG00000089351_11 (sequence is synthesized)
agggcttcctacagcagtgcaagttcacagacgtgacgctgagcccctggagtggggacagcaagtgccaccagcgccgggtgctgacgtacaccatccccatcagcaacccactgggcc

SEQ ID NO: 94832 - DNA, 120 bp, Artificial Sequence
  ENSG00000089351_12 (sequence is synthesized)
ccaagagcgcctccgtggtggagacacagacgctgttccggcgcggcccccaggccggcgggtgtgtggtggactccgaggtgctgacgcagggcatcccctaccaggactacttctaca

SEQ ID NO: 94833 - DNA, 120 bp, Artificial Sequence
  ENSG00000089351_13 (sequence is synthesized)
ctgcccaccgctactgcatcctgggtctggcccggaacaaggcgcggctccgagtgtcttctgagatccgctaccgaaagcagccgtggagcctggtgaagtcgctcattgagaagaact

SEQ ID NO: 94834 - DNA, 120 bp, Artificial Sequence
  ENSG00000089351_14 (sequence is synthesized)
cgtggagcggcattgaagactatttccaccatctggagcgagagctcgccaaggctgagaagctgtctctggaggaaggcgggaaggatgcccggggcttgctatccggcctgcggcggc

SEQ ID NO: 94835 - DNA, 120 bp, Artificial Sequence
  ENSG00000089351_15 (sequence is synthesized)
ggaagcggcccctgagctggcgggctcacggggacgggccccagcacccagatcctgacccctgtgcccgggccggcattcacacctcgggctccctcagctcccgcttctccgaaccat

SEQ ID NO: 94836 - DNA, 120 bp, Artificial Sequence
  ENSG00000089351_16 (sequence is synthesized)
ctgtggaccagggccccggggcaggcatccccagtgccctggttctcatcagcattgtgatctgtgtgagccttatcatcctcatcgccctcaacgtcctgctcttctaccgcctctggt

SEQ ID NO: 94837 - DNA, 120 bp, Artificial Sequence
  ENSG00000089351_17 (sequence is synthesized)
ccctggaaaggacagcccacacctttgagtcctggcacagcctggccctggccaagggcaagttcccccagacggccacagagtgggccgagatcctggcgctgcagaagcaattccaca

SEQ ID NO: 94838 - DNA, 120 bp, Artificial Sequence
  ENSG00000089351_18 (sequence is synthesized)
gcgtggaggtgcacaagtggaggcagatcctgcgggcctccgtggagctcctggatgagatgaagttctcgctggagaagctgcaccaaggcatcacagtctcagaccctccctttgaca

SEQ ID NO: 94839 - DNA, 120 bp, Artificial Sequence
  ENSG00000089351_19 (sequence is synthesized)
cccagccccggcccgatgacagcttttcctgaggaccccggccacgcagctgttcccccacatggacagatggacacacagagcctcggcggccactgctggcacggtgtgagcgccagg

SEQ ID NO: 94840 - DNA, 120 bp, Artificial Sequence
  ENSG00000089351_20 (sequence is synthesized)
catctcccacccgcccctcccgacggcccaaccaggggctgtgcagacgtggggaccacggaaccgagatgcactttagaccagggagctggcccggcctctggcaggccccccactaac

SEQ ID NO: 94841 - DNA, 120 bp, Artificial Sequence
  ENSG00000089351_21 (sequence is synthesized)
ttattttgcccggctgaggttgtggggggcgcctcctggggtgcacgattccctcagctctgggtttaatgtattatatttatttggggccgacagtgccccaataaagggtcagaagtg

SEQ ID NO: 94842 - DNA, 120 bp, Artificial Sequence
  ENSG00000089351_22 (sequence is synthesized)
aagtctgaatgctgtgtggacagaggaggaggacccaataagagaccacaccgctgttccagaccctctccatggatgatgtcctgcccctgatgccttgggagaccctgttggcacagg

SEQ ID NO: 94843 - DNA, 120 bp, Artificial Sequence
  ENSG00000089351_23 (sequence is synthesized)
gcagtccccagggctcgcctgacctcccagcagggcagcggaagcagcagccacagggtgacagggcccagggcctggcctctgagtcctggaagctcctggaggtgcccatcattcaca

SEQ ID NO: 94844 - DNA, 120 bp, Artificial Sequence
  ENSG00000089351_24 (sequence is synthesized)
taacgccatccagtgatggggagtcccccgcctgcaccccaaccccccgacgccggcagcagcagaggatgccagacccgcagagtctgtcccaggacagcaccacaccccactctggcc

SEQ ID NO: 94845 - DNA, 120 bp, Artificial Sequence
  ENSG00000089351_25 (sequence is synthesized)
aaaaaagatataaaaaaaatgggaacattctctggccagagtattgtggggacttgggaagcaggaagtttgagtcctgggcgcaggccctggaggggctgtagcaggggattccccgct

SEQ ID NO: 94846 - DNA, 120 bp, Artificial Sequence
  ENSG00000089351_26 (sequence is synthesized)
tgctgaggccaggtctggtgcgggagatcgtggctgcctccttgtggaagccaggggaactgcggaggccgagggctggtggggaatctggcgggccgggctctggctggggtgagatgg

SEQ ID NO: 94847 - DNA, 120 bp, Artificial Sequence
  ENSG00000089351_27 (sequence is synthesized)
ggttgaagggttcgggggagaacaggacggtcggcgtgcagagttcctggagtgctggggggcctgagatggttgtatgacgtctggaggattcaggagggtgtatggggtctcaaggac

SEQ ID NO: 94848 - DNA, 120 bp, Artificial Sequence
  ENSG00000089351_28 (sequence is synthesized)
gggaccacgcggtcccccgctcagcaggccgcctcccccaaacatgcaaagccccatttgttctgcaccctgagttctctccgagctgtccccttctctctgttctcccggcccaggcgc

SEQ ID NO: 94849 - DNA, 120 bp, Artificial Sequence
  ENSG00000089351_29 (sequence is synthesized)
ccatcacccctgacctgatccccgcaccagcctctcctctctttccctgcaacctgttacctcacacagctgctcaggaacagcagaaatagtaaaactcttccatgtatgtggcacctc

SEQ ID NO: 94850 - DNA, 90 bp, Artificial Sequence
  ENSG00000089351_30 (sequence is synthesized)
gcagcccagccccgcgcagcccagccctgccctgccctgccctgccctgcgcccggggcgcgcccaccgcgccgcatccatgttcgactg

SEQ ID NO: 94851 - DNA, 120 bp, Artificial Sequence
  ENSG00000089351_31 (sequence is synthesized)
agggtcctgtgttgaaaccccaccgtgcggcaggcacttcccctctccggatctcagtgtcctcctctgtaaaatgaggaagccgctcagagtccccaccccacagcattgcaggggaaa

SEQ ID NO: 94852 - DNA, 120 bp, Artificial Sequence
  ENSG00000089351_32 (sequence is synthesized)
gcatggaagcatggatggaagacagaactgattggctcacgtcctggagaaaagtccagaggcgtctcacattaggcacggccgggtttggtcactcaatggcagtaagagtcagtctct

SEQ ID NO: 94853 - DNA, 120 bp, Artificial Sequence
  ENSG00000089351_33 (sequence is synthesized)
gtgagctatgattgcaccactgcacttcggcctgagcaacagagcgagaccctgtctctaaaacgaacaaagggagagaattaagtgatttcatacatttaaagcacttgggccagttag

SEQ ID NO: 94854 - DNA, 120 bp, Artificial Sequence
  ENSG00000089351_34 (sequence is synthesized)
atttaaagcacttgggccagttagtaagcattgactattagtatttctattatcattattgtattcattttctctctccactaattttcagctagcctctattcttgtctcttatggggc

SEQ ID NO: 94855 - DNA, 120 bp, Artificial Sequence
  ENSG00000089351_35 (sequence is synthesized)
agagatggcctcagccctgccccagaccagcccaatgagagagagcagcctatttttcctagtgtctacagcggacaccctagggttggctctgattgggccaacttgagagtgtgcctg

SEQ ID NO: 94856 - DNA, 120 bp, Artificial Sequence
  ENSG00000089351_36 (sequence is synthesized)
cccctgaaccaatcactgtggttgatcggatagacctgggccacccactcacccctgaaccaattgctgtgcccctaggttgatgctcccaggaggcgtgctatctggtaatgaatccct

SEQ ID NO: 94857 - DNA, 120 bp, Artificial Sequence
  ENSG00000089351_37 (sequence is synthesized)
gtgatttaaatctcagggcctaggtgtgttctccacccagaaccaagcacagtggctgtctgtctgggcctggagcacgtgcccaccctcaacccatccctgagtcacaggagggctctg

SEQ ID NO: 94858 - DNA, 120 bp, Artificial Sequence
  ENSG00000089351_38 (sequence is synthesized)
tgtcagtgtccagctgtgctccaggaggtggggtccgcccatgcacactacaaggcctgggagtggggaggcgtggcccgcagagggagggaggagtggaggcagtcatcatcctcggct

SEQ ID NO: 94859 - DNA, 120 bp, Artificial Sequence
  ENSG00000089351_39 (sequence is synthesized)
attgacagacacaagtaactcctcttcatccactggggaggaaggtgaggcaggcgggcccaattcattcgcctccggtacttgcaagcctcgctcagtcttaagcaagaggggatggat

SEQ ID NO: 94860 - DNA, 120 bp, Artificial Sequence
  ENSG00000089351_40 (sequence is synthesized)
tagaaatctctgtctttactctgttttgaaggcagcatggcagggtgaacacaagcacagactgaaggcagcttgccgcggttcacatcctggtcacaccacttcctgaccatgtcacgt

SEQ ID NO: 94861 - DNA, 120 bp, Artificial Sequence
  ENSG00000089351_41 (sequence is synthesized)
gggcaaattatgtaacttctctgagcttgctttcctcctctgaaaatggggttaacaatgataatacccacttcataggattgttgttaagagactataaatgaggctgggtgtgatggc

SEQ ID NO: 94862 - DNA, 79 bp, Artificial Sequence
  ENSG00000089351_42 (sequence is synthesized)
aggattgctagaggccaagagttggagaacagcctgggcagcaaagcaagaccccgttttgtacaaaaaagaaaaaaaa

SEQ ID NO: 94863 - DNA, 120 bp, Artificial Sequence
  ENSG00000089351_43 (sequence is synthesized)
acattgaatgagtcagtgatgctggtgggtgcttggtacggggcccggcttacataagaaatctgtaaatggcagctgtcattgtggctactggtgtgttgtgtgcgttggaatctgtca

SEQ ID NO: 94864 - DNA, 120 bp, Artificial Sequence
  ENSG00000089351_44 (sequence is synthesized)
gggacttaagagactgagggggttccaggagctttgtggggcagcattgggagtgtgaacccccatccaggttctcacctctcaaacttcctcagatgctgagccccacttataagcagc

SEQ ID NO: 94865 - DNA, 120 bp, Artificial Sequence
  ENSG00000089351_45 (sequence is synthesized)
gtgtacgtgtgtctggggctgctagcctgcagcagctttgggcctctgatagagttcctgcgtgtaacttaaccactaattctgaccgcggctctgtgtgtcactcaccacaccccactc

SEQ ID NO: 94866 - DNA, 120 bp, Artificial Sequence
  ENSG00000089356_0 (sequence is synthesized)
tctaaggaaaagaagtgaggtcggaacaccaacgcatcatctcactgcatggccctggaggctctgccgtttaaagaccccagaaccttccccattcaaggtttgcttagggcgtggcag

SEQ ID NO: 94867 - DNA, 120 bp, Artificial Sequence
  ENSG00000089356_1 (sequence is synthesized)
cttcggataaacgcaggactccgcctggcagcccgatttctcccggaacctctgctcagcctggtgaaccacacaggcccgagtttcacccagtccccactccacggtgcagctgcggct

SEQ ID NO: 94868 - DNA, 120 bp, Artificial Sequence
  ENSG00000089356_2 (sequence is synthesized)
tatctctcagcccagcgagatgccagccttcctgtcccgggccagcgctctgacatgcagaaggtgaccctgggcctgcttgtgttcctggcaggctttcctgtcctggacgccaatgac

SEQ ID NO: 94869 - DNA, 120 bp, Artificial Sequence
  ENSG00000089356_3 (sequence is synthesized)
cagcctccaggttggcgggctcatctgcgctggggttctgtgcgccatgggcatcatcatcgtcatgagtgcaaaatgcaaatgcaagtttggccagaagtccggtcaccatccagggga

SEQ ID NO: 94870 - DNA, 120 bp, Artificial Sequence
  ENSG00000089356_4 (sequence is synthesized)
gactccacctctcatcaccccaggctcagcccaaagctgatgaggacagaccagctgaaattgggtggaggaccgttctctgtccccaggtcctgtctctgcacagaaacttgaactcca

SEQ ID NO: 94871 - DNA, 120 bp, Artificial Sequence
  ENSG00000089356_5 (sequence is synthesized)
ggatggaattcttcctcctctgctgggactcctttgcatggcagggcctcatctcacctctcgcaagagggtctctttgttcaattttttttaatctaaaatgattgtgcctctgcccaa

SEQ ID NO: 94872 - DNA, 120 bp, Artificial Sequence
  ENSG00000089356_6 (sequence is synthesized)
cctggaggctgacacagaggctggcactgagcctgcttgttgggaaaagcccacaggcctgttcccttgtggcttgggacatggcacaggcccgccctctgcctcctcagccatgggaac

SEQ ID NO: 94873 - DNA, 120 bp, Artificial Sequence
  ENSG00000089356_7 (sequence is synthesized)
ctcatatgcaatttgggatttactagtagccaaaaggaatgaaagagagctctaaccagatggaacactggaacattccagtggaccctggaccattccaggaaaactgggacataggat

SEQ ID NO: 94874 - DNA, 120 bp, Artificial Sequence
  ENSG00000089356_8 (sequence is synthesized)
cgtcccgctatgatggaagtgttcagacagtttataatagtaagcccctgtgaccctctcacttaccccgagacctcactttattacaagatctttccaaatacccaaatgtccctgcaa

SEQ ID NO: 94875 - DNA, 120 bp, Artificial Sequence
  ENSG00000089356_9 (sequence is synthesized)
gcccgttaaataattccctatgctacccttaataacatacaatgaccacatagtgtgagaacttccaacaagcctcaaagtcccttgagactccccaatacctaataaggcatgcgaaat

SEQ ID NO: 94876 - DNA, 120 bp, Artificial Sequence
  ENSG00000089356_10 (sequence is synthesized)
gttctcatgaactaccccacaacacgcctaaaactcaaaacacccaaaaatatctcctccaatgtcctgaaacatgaacccaaaaagagacccacaataaactcgtgacttgtcccctca

SEQ ID NO: 94877 - DNA, 120 bp, Artificial Sequence
  ENSG00000089356_11 (sequence is synthesized)
ctgcgctggggttctgtgcgccatgggcatcatcatcgtcatgagtgagtggaggagctcgggggagcaggcgggccggggctggggctcccctcccctgaccactcagctctccccaac

SEQ ID NO: 94878 - DNA, 120 bp, Artificial Sequence
  ENSG00000089356_12 (sequence is synthesized)
agcccgtgccccctttcccctccccacaaccccacatactgcttggtgccaagggttcccatacagggttggggcctgacgtgagcatcacaggacaaagatacgaagggactaggatgg

SEQ ID NO: 94879 - DNA, 120 bp, Artificial Sequence
  ENSG00000089356_13 (sequence is synthesized)
gccattggttggttcagatcaactgctgggagaagtgttgacttgagaaaacttcctggaggtggtgagctattggatcaaaaccctcatctggcctccaggttccaatgacctgctccc

SEQ ID NO: 94880 - DNA, 120 bp, Artificial Sequence
  ENSG00000089356_14 (sequence is synthesized)
tactccccgctctgccctcacctctccacgctcctcattccttctgctccaagcctctcagacacagcagacatactgccagcctcagacctctgcacctgctggttcctctgcctggaa

SEQ ID NO: 94881 - DNA, 120 bp, Artificial Sequence
  ENSG00000089356_15 (sequence is synthesized)
cacttccttccacagaaccacatggctccctcccttccctctgctcaaatgcagccccctgagaggccttccctgacaactccctctaaaagagctgccatctgactttttttttgtttt

SEQ ID NO: 94882 - DNA, 120 bp, Artificial Sequence
  ENSG00000089356_16 (sequence is synthesized)
cggggctctgccctttagagttcctgccgctaagatttccaggtttattgtttctagctggtaatccccagggggccccaaatcctgaaatgctttggcccctgggattgcacaaccccc

SEQ ID NO: 94883 - DNA, 120 bp, Artificial Sequence
  ENSG00000089356_17 (sequence is synthesized)
caaatggaaaggcagccaggaagacatgtctgggcaggctaagaaccctctatccggagggagagggcaaatgggggcggacaccaatctcaccacttttgtctccttagtcaccatcca

SEQ ID NO: 94884 - DNA, 120 bp, Artificial Sequence
  ENSG00000089356_18 (sequence is synthesized)
aggtttgcttagggcgtggcagcttcggataaacgcaggactccgcctggcagcccgatttctcccggaacctctgctcagcctggtgaaccacacagaggctggggcgaggaggatacc

SEQ ID NO: 94885 - DNA, 120 bp, Artificial Sequence
  ENSG00000089356_19 (sequence is synthesized)
atctgtcagtcttggctggatgacatcatgggaagggggtatagtggggccttgcaggccagaggtggcttggaggagcccctggaaagaggcttaagaggcccgagtttcacccagtcc

SEQ ID NO: 94886 - DNA, 120 bp, Artificial Sequence
  ENSG00000089356_20 (sequence is synthesized)
gatttctcccggaacctctgctcagcctggtgaaccacacaggccagcgctctgacatgcagaaggtgaccctgggcctgcttgtgttcctggcaggtgagtacccatcccccgtctgcc

SEQ ID NO: 94887 - DNA, 120 bp, Artificial Sequence
  ENSG00000089356_21 (sequence is synthesized)
ttttcctctggatcccctggatgcggggatccaacctctgtctctctcctgtgcttttctacctccccgggaaggtggtaaatgttagaacagcatctccctgagggtaagaaaagtcag

SEQ ID NO: 94888 - DNA, 88 bp, Artificial Sequence
  ENSG00000089356_22 (sequence is synthesized)
ttttgaaagggagtctcacagttcactacagccttgaactcctggggtcaagcgatcctactctcttagcctcctacacagctagaat

SEQ ID NO: 94889 - DNA, 120 bp, Artificial Sequence
  ENSG00000089356_23 (sequence is synthesized)
caagcgatcctactctcttagcctcctacacagctagaatgccaggcacacgccaccatgcccagtgcatttttgattttttgcagagacgaggtctcactgtgttgcccaagctggtct

SEQ ID NO: 94890 - DNA, 77 bp, Artificial Sequence
  ENSG00000089356_24 (sequence is synthesized)
ataagggaggccggggcccgagtttcacccagtccccactccacggtgcagctgcggcttatctctcagcccagcga

SEQ ID NO: 94891 - DNA, 120 bp, Artificial Sequence
  ENSG00000089472_0 (sequence is synthesized)
ggccctgtaaccaagatactgactgaacatggctggcggactcaggctggggtctgcagtgcagcattaatgggccgctgacatgaatatggagtagttttctctagcaaagagtaatgt

SEQ ID NO: 94892 - DNA, 120 bp, Artificial Sequence
  ENSG00000089472_1 (sequence is synthesized)
gggccatggagtcaggccacctcctctgggctctgctgttcatgcagtccttgtggcctcaactgactgatggagccactcgagtctactacctgggcatccgggatgtgcagtggaact

SEQ ID NO: 94893 - DNA, 120 bp, Artificial Sequence
  ENSG00000089472_2 (sequence is synthesized)
atgctcccaagggaagaaatgtcatcacgaaccagcctctggacagtgacatagtggcttccagcttcttaaagtctgacaagaaccggatagggggaacctacaagaagaccatctata

SEQ ID NO: 94894 - DNA, 120 bp, Artificial Sequence
  ENSG00000089472_3 (sequence is synthesized)
aagaatacaaggatgactcatacacagatgaagtggcccagcctgcctggttgggcttcctggggccagtgttgcaggctgaagtgggggatgtcattcttattcacctgaagaattttg

SEQ ID NO: 94895 - DNA, 120 bp, Artificial Sequence
  ENSG00000089472_4 (sequence is synthesized)
ccactcgtccctataccatccaccctcatggtgtcttctacgagaaggactctgaaggttccctatacccagatggctcctctgggccactgaaagctgatgactctgttcccccggggg

SEQ ID NO: 94896 - DNA, 120 bp, Artificial Sequence
  ENSG00000089472_5 (sequence is synthesized)
gcagccatatctacaactggaccattccagaaggccatgcacccaccgatgctgacccagcgtgcctcacctggatctaccattctcatgtagatgctccacgagacattgcaactggcc

SEQ ID NO: 94897 - DNA, 120 bp, Artificial Sequence
  ENSG00000089472_6 (sequence is synthesized)
taattgggcctctcatcacctgtaaaagaggagccctggatgggaactcccctcctcaacgccaggatgtagaccatgatttcttcctcctcttcagtgtggtagatgagaacctcagct

SEQ ID NO: 94898 - DNA, 120 bp, Artificial Sequence
  ENSG00000089472_7 (sequence is synthesized)
ggcatctcaatgagaacattgccacttactgctcagatcctgcttcagtggacaaagaagatgagacatttcaggagagcaataggatgcatgcaatcaatggctttgtttttgggaatt

SEQ ID NO: 94899 - DNA, 120 bp, Artificial Sequence
  ENSG00000089472_8 (sequence is synthesized)
tacctgagctgaacatgtgtgcacagaaacgtgtggcctggcacttgtttggcatgggcaatgaaattgatgtccacacagcatttttccatggacagatgctgactacccgtggacacc

SEQ ID NO: 94900 - DNA, 120 bp, Artificial Sequence
  ENSG00000089472_9 (sequence is synthesized)
acactgatgtggctaacatctttccagccacctttgtgactgctgagatggtgccctgggaacctggtacctggttaattagctgccaagtgaacagtcactttcgagatggcatgcagg

SEQ ID NO: 94901 - DNA, 120 bp, Artificial Sequence
  ENSG00000089472_10 (sequence is synthesized)
cactctacaaggtcaagtcttgctccatggcccctcctgtggacctgctcacaggcaaagttcgacagtacttcattgaggcccatgagattcaatgggactatggcccgatggggcatg

SEQ ID NO: 94902 - DNA, 120 bp, Artificial Sequence
  ENSG00000089472_11 (sequence is synthesized)
atgggagtactgggaagaatttgagagagccaggcagtatctcagataagtttttccagaagagctccagccgaattgggggcacttactggaaagtgcgatatgaagcctttcaagatg

SEQ ID NO: 94903 - DNA, 120 bp, Artificial Sequence
  ENSG00000089472_12 (sequence is synthesized)
agacattccaagagaagatgcatttggaggaagataggcatcttggaatcctggggccagtgatccgggctgaggtgggtgacaccattcaggtggtcttctacaaccgtgcctcccagc

SEQ ID NO: 94904 - DNA, 120 bp, Artificial Sequence
  ENSG00000089472_13 (sequence is synthesized)
cattcagcatgcagccccatggggtcttttatgagaaagactatgaaggcactgtgtacaatgatggctcatcttaccctggcttggttgccaagccctttgagaaagtaacataccgct

SEQ ID NO: 94905 - DNA, 120 bp, Artificial Sequence
  ENSG00000089472_14 (sequence is synthesized)
ggacagtcccccctcatgccggtcccactgctcaggatcctgcttgtctcacttggatgtacttctctgctgcagatcccataagagacacaaattctggcctggtgggcccgctgctgg

SEQ ID NO: 94906 - DNA, 120 bp, Artificial Sequence
  ENSG00000089472_15 (sequence is synthesized)
tgtgcagggctggtgccttgggtgcagatggcaagcagaaaggggtggataaagaattctttcttctcttcactgtgttggatgagaacaagagctggtacagcaatgccaatcaagcag

SEQ ID NO: 94907 - DNA, 120 bp, Artificial Sequence
  ENSG00000089472_16 (sequence is synthesized)
ctgctatgttggatttccgactgctttcagaggatattgagggcttccaagactccaatcggatgcatgccattaatgggtttctgttctctaacctgcccaggctggacatgtgcaagg

SEQ ID NO: 94908 - DNA, 120 bp, Artificial Sequence
  ENSG00000089472_17 (sequence is synthesized)
atgctctttcctcatacctttgtcatggccatcatgcagcctgacaaccttgggacatttgagatttattgccaggcaggcagccatcgagaagcagggatgagggcaatctataatgtc

SEQ ID NO: 94909 - DNA, 120 bp, Artificial Sequence
  ENSG00000089472_18 (sequence is synthesized)
tcccagtgtcctggccaccaagccacccctcgccaacgctaccaagctgcaagaatctactatatcatggcagaagaagtagagtgggactattgccctgaccggagctgggaacgggaa

SEQ ID NO: 94910 - DNA, 120 bp, Artificial Sequence
  ENSG00000089472_19 (sequence is synthesized)
tggcacaaccagtctgagaaggacagttatggttacattttcctgagcaacaaggatgggctcctgggttccagatacaagaaagctgtattcagggaatacactgatggtacattcagg

SEQ ID NO: 94911 - DNA, 120 bp, Artificial Sequence
  ENSG00000089472_20 (sequence is synthesized)
atccctcggccaaggactggaccagaagaacacttgggaatcttgggtccacttatcaaaggtgaagttggtgatatcctgactgtggtattcaagaataatgccagccgcccctactct

SEQ ID NO: 94912 - DNA, 120 bp, Artificial Sequence
  ENSG00000089472_21 (sequence is synthesized)
gtgcatgctcatggagtgctagaatctactactgtctggccactggctgctgagcctggtgaggtggtcacttatcagtggaacatcccagagaggtctggccctgggcccaatgactct

SEQ ID NO: 94913 - DNA, 120 bp, Artificial Sequence
  ENSG00000089472_22 (sequence is synthesized)
gcttgtgtttcctggatctattattctgcagtggatcccatcaaggacatgtatagtggcctggtggggcccttggctatctgccaaaagggcatcctggagccccatggaggacggagt

SEQ ID NO: 94914 - DNA, 120 bp, Artificial Sequence
  ENSG00000089472_23 (sequence is synthesized)
gacatggatcgggaatttgcattgttgttcttgatttttgatgaaaataagtcttggtatttggaggaaaatgtggcaacccatgggtcccaggatccaggcagtattaacctacaggat

SEQ ID NO: 94915 - DNA, 120 bp, Artificial Sequence
  ENSG00000089472_24 (sequence is synthesized)
gaaactttcttggagagcaataaaatgcatgcaatcaatgggaaactctatgccaaccttaggggtcttaccatgtaccaaggagaacgagtggcctggtacatgctggccatgggccaa

SEQ ID NO: 94916 - DNA, 120 bp, Artificial Sequence
  ENSG00000089472_25 (sequence is synthesized)
gatgtggatctacacaccatccactttcatgcagagagcttcctctatcggaatggcgagaactaccgggcagatgtggtggatctgttcccagggacttttgaggttgtggagatggtg

SEQ ID NO: 94917 - DNA, 120 bp, Artificial Sequence
  ENSG00000089472_26 (sequence is synthesized)
gccagcaaccctgggacatggctgatgcactgccatgtgactgaccatgtccatgctggcatggagaccctcttcactgttttttctcgaacagaacacttaagccctctcaccgtcatc

SEQ ID NO: 94918 - DNA, 120 bp, Artificial Sequence
  ENSG00000089472_27 (sequence is synthesized)
accaaagagactgaaaaagtgccccccagagacattgaagaaggcaatgtgaagatgctgggcatgcagatccccataaagaatgttgagatgctggcctctgttttggttgccattagt

SEQ ID NO: 94919 - DNA, 120 bp, Artificial Sequence
  ENSG00000089472_28 (sequence is synthesized)
gtcacccttctgctcgttgttctggctcttggtggagtggtttggtaccaacatcgacagagaaagctacgacgcaataggaggtccatcctggatgacagcttcaagcttctgtctttc

SEQ ID NO: 94920 - DNA, 120 bp, Artificial Sequence
  ENSG00000089472_29 (sequence is synthesized)
aaacagtaacatctggagcctggagatatcctcaggaagcacatctgtagtgcactcccagcaggccatggactagtcactaaccccacactcaaaggggcatgggtggtggagaagcag

SEQ ID NO: 94921 - DNA, 120 bp, Artificial Sequence
  ENSG00000089472_30 (sequence is synthesized)
aaggagcaatcaagcttatctggatatttctttctttatttattttacatggaaataatatgatttcactttttctttagtttctttgctctacgtgggcacctggcactaagggagtac

SEQ ID NO: 94922 - DNA, 120 bp, Artificial Sequence
  ENSG00000089472_31 (sequence is synthesized)
cttattatcctacatcgcaaatttcaacagctacattatatttccttctgacacttggaaggtattgaaatttctagaaatgtatccttctcacaaagtagagaccaagagaaaaactca

SEQ ID NO: 94923 - DNA, 120 bp, Artificial Sequence
  ENSG00000089472_32 (sequence is synthesized)
ttgattgggtttctacttctttcaaggactcaggaaatttcactttgaactgaggccaagtgagctgttaagataacccacacttaaactaaaggctaagaatataggcttgatgggaaa

SEQ ID NO: 94924 - DNA, 120 bp, Artificial Sequence
  ENSG00000089472_33 (sequence is synthesized)
ttgaaggtaggctgagtattgggaatccaaattgaattttgattctccttggcagtgaactactttgaagaagtggtcaatgggttgttgctgccatgagcatgtacaacctctggagct

SEQ ID NO: 94925 - DNA, 120 bp, Artificial Sequence
  ENSG00000089472_34 (sequence is synthesized)
agaagctcctcaggaaagccagttctccaagttcttaacctgtggcactgaaaggaatgttgagttacctcttcatgttttagacagcaaaccctatccattaaagtacttgttagaaca

SEQ ID NO: 94926 - DNA, 120 bp, Artificial Sequence
  ENSG00000089472_35 (sequence is synthesized)
tttgtgtctatttttttaaacattacatttgtcataatcattcatattgttgtgtgtagttgtagtttgttcattattattgctataaagaatttcattttatgaataaaatgcaatgta

SEQ ID NO: 94927 - DNA, 120 bp, Artificial Sequence
  ENSG00000089472_36 (sequence is synthesized)
ttcattcattatagtgttcacgaacattttgactgtttctattttgggtttatgaatattctagtaaatattttttagtaaattctcacttgttgttaagtacaatttatagaggatagg

SEQ ID NO: 94928 - DNA, 120 bp, Artificial Sequence
  ENSG00000089472_37 (sequence is synthesized)
aagtggcaacaacaatgagtgttccccttttgcctatgggaaaagagaggcaaagggagaattagtgttagtggcccaataaggcttctggtgcctgtttcctgattcttgggacagagc

SEQ ID NO: 94929 - DNA, 120 bp, Artificial Sequence
  ENSG00000089472_38 (sequence is synthesized)
acattcttcctgctacaccattgaaaaaactggatccagatctctcttctgaaggaactagtaatacatgattagcagcacgggtgactttttaactatgcccttcaaaatccaatcatt

SEQ ID NO: 94930 - DNA, 120 bp, Artificial Sequence
  ENSG00000089472_39 (sequence is synthesized)
gaaaacttattgaattaaaaggaatcaggtaagttaaagaaactgggctaaatgggttttgctttctcagtcactcaacctggctcttgcctcttcagttttctggacacgtagaaagcc

SEQ ID NO: 94931 - DNA, 120 bp, Artificial Sequence
  ENSG00000089472_40 (sequence is synthesized)
aattctaggggctgccatggcttggctaagcttcccttgaccactgagcatttctaagggagttgaggctggtggctcctccttccttcctactggtgcttccacctgccttggtctgag

SEQ ID NO: 94932 - DNA, 120 bp, Artificial Sequence
  ENSG00000089472_41 (sequence is synthesized)
ttgcagtccatggggcagcgcctaagtgtctgagcacacttaagaatctctagtggtttatgacccagactttgccctaccacctcagtcttctgaatgttctcttccctggaccctgct

SEQ ID NO: 94933 - DNA, 120 bp, Artificial Sequence
  ENSG00000089472_42 (sequence is synthesized)
tgtcactgtgattgaaacagaaaatacttagggggtgagtgagtatagtatgtatttgtctagcctttgtagaacctacaagtttttgttttagagatgaggaagctgttccagaggaag

SEQ ID NO: 94934 - DNA, 120 bp, Artificial Sequence
  ENSG00000089472_43 (sequence is synthesized)
catcaaagagtgctgggtaccaccctagaaaaggagctgtcgcataaatgacaaaaattttctgagtgtcaagaaaatttgccagagggaaatagaagtctgagacgagactcaaacctg

SEQ ID NO: 94935 - DNA, 120 bp, Artificial Sequence
  ENSG00000089472_44 (sequence is synthesized)
tccagtgggccaggggaagtaggaccatatcttatggggcctttttggcagtggtggtgtgaaaggtctagttgcaactttgggggcttccttataggatggagtcattctttctggtat

SEQ ID NO: 94936 - DNA, 120 bp, Artificial Sequence
  ENSG00000089472_45 (sequence is synthesized)
tttacagcaatattcctttgttacatgcaaatttgagccaaatattggttagagagcacagataagtgataaattttagattgggtaagatggcccaccccactgcaatatccataatat

SEQ ID NO: 94937 - DNA, 120 bp, Artificial Sequence
  ENSG00000089472_46 (sequence is synthesized)
tgtaccacatggcaagtggagaacagaagaggtatcaaggagagaaaagatgataactatgtactgttttacactttaaaaagcattttaattcttgattgcgtttggattacctcaggg

SEQ ID NO: 94938 - DNA, 120 bp, Artificial Sequence
  ENSG00000089472_47 (sequence is synthesized)
caagtcattttacatttgagtaatgttatccatttatacatttgagtgaacaaaagcttatggacattaagtaacttcatccaagatccctcaggtagaagttgagcagggattcatgta

SEQ ID NO: 94939 - DNA, 120 bp, Artificial Sequence
  ENSG00000089472_48 (sequence is synthesized)
ttcatctgtttgactccaaatacctatttcatcctcatatatcatggaaacatccactaatctccatccaccttacccatattgattccaacttttctgtctgtccagcaatctgtctgt

SEQ ID NO: 94940 - DNA, 120 bp, Artificial Sequence
  ENSG00000089472_49 (sequence is synthesized)
ctaggtagcaatctcttgaagataaaatgtagaaactcacagagctggtgttcagttacgatataagtttggaggagaaaacacaatccagaagctatgattcctcttgtttttccatgg

SEQ ID NO: 94941 - DNA, 120 bp, Artificial Sequence
  ENSG00000089472_50 (sequence is synthesized)
tcaatgggtttctggagagctttactgagaatctcagaaataaagtgtgggtggaagggggatttagatggctagttatccaagagttagtgtttaggccattgcagaatcaatgattta

SEQ ID NO: 94942 - DNA, 120 bp, Artificial Sequence
  ENSG00000089472_51 (sequence is synthesized)
acagcagcagaactgttttggcctgcagttaacatgaatgttaatgaagaccaagtacatgctaggaattccagtcaattaatggttataatttacatgcaactaggaggttcttagctt

SEQ ID NO: 94943 - DNA, 120 bp, Artificial Sequence
  ENSG00000089472_52 (sequence is synthesized)
ggtctcagttataactctaagagactaggagaggtagatgagatggaatgcatttcttcttattttgtaatcctgctccaggtcaaggaatagaaactcagagcccatgtatttaagaaa

SEQ ID NO: 94944 - DNA, 120 bp, Artificial Sequence
  ENSG00000089472_53 (sequence is synthesized)
gaaatgtatttttgtggtaagtttgctccaagtagggatacaagtatctatttttgacaatcaagtgacattgccatctattcagttgctcaagctggaaattatcagtgtcaacacatc

SEQ ID NO: 94945 - DNA, 120 bp, Artificial Sequence
  ENSG00000089472_54 (sequence is synthesized)
atagtacatagctgatgccatgctcctggccagtgctggagtagtctggtctcatctccccaccttgtcttgtgtttttgttttccagccattaatgggtttctgttctctaacctgccc

SEQ ID NO: 94946 - DNA, 120 bp, Artificial Sequence
  ENSG00000089472_55 (sequence is synthesized)
gaaccagcctctggacagtgacatatatgtgaaaatgtgaaaaaagaaagtaagccttagaatcaaggaattaatggtaataattctcacttatgtaatactctgtgacacagaccatac

SEQ ID NO: 94947 - DNA, 120 bp, Artificial Sequence
  ENSG00000089472_56 (sequence is synthesized)
tagaaatttacatactttgtctcaactctcacaaaaactctagaagagtggcttccagcttcttaaagtctgacaagaaccggatagggggaacctacaagaagaccatctataaagaat

SEQ ID NO: 94948 - DNA, 120 bp, Artificial Sequence
  ENSG00000089486_0 (sequence is synthesized)
gatgctaagtaagagcaaaagcttcccacctttctgagctgtgctcagagagtttggtgacagaaatgagggaaaagatttcacttgactcttcttccccctgacccccacctcaacaaa

SEQ ID NO: 94949 - DNA, 120 bp, Artificial Sequence
  ENSG00000089486_1 (sequence is synthesized)
caaaccagaagggcacaggccagagcacagcttgcctggcagtccagtcctcatgcatgggagctcaggcctggtgggaggggaggcagagggcccagccgtggcccttgggtgccagca

SEQ ID NO: 94950 - DNA, 120 bp, Artificial Sequence
  ENSG00000089486_2 (sequence is synthesized)
gtcctgggggagggaggaagcagacctgcgacgggaccgaggaatggaggggtggtcgggtgtgtggatggcagagtgacagctagggagaagccggatgtggaaggggaggaactgtgt

SEQ ID NO: 94951 - DNA, 120 bp, Artificial Sequence
  ENSG00000089486_3 (sequence is synthesized)
ggtatgcccaggcccctgggcccagccctggcttggcagcccttgctccctgctgagggccctgcctttccttcccctgaaacagctcccggagccctgcctgttccctgtccatccagg

SEQ ID NO: 94952 - DNA, 120 bp, Artificial Sequence
  ENSG00000089486_4 (sequence is synthesized)
ccagcagctgaaggagcctcacctgcctcccttctctgagtagcacggatttgaggagaagcagcgaagatgtccagcgagcctccccctccttatcctgggggccccacagccccactt

SEQ ID NO: 94953 - DNA, 120 bp, Artificial Sequence
  ENSG00000089486_5 (sequence is synthesized)
ctggaagagaaaagtggagccccgcccaccccaggccgttcctccccagctgtgatgcagccccctccaggcatgccactgccccctgcggacattggccccccaccctatgagccgccg

SEQ ID NO: 94954 - DNA, 120 bp, Artificial Sequence
  ENSG00000089486_6 (sequence is synthesized)
ggtcacccaatgccccagcctggcttcatcccaccacacatgagtgcagatggcacctacatgcctccgggtttctaccctcctccaggcccccacccacccatgggctactacccccca

SEQ ID NO: 94955 - DNA, 120 bp, Artificial Sequence
  ENSG00000089486_7 (sequence is synthesized)
gggccctacacgccagggccctaccctggccctgggggccacacagccacagtcctggtcccttcaggagctgccaccacggtgacagtgctgcagggagagatctttgagggagcgcct

SEQ ID NO: 94956 - DNA, 120 bp, Artificial Sequence
  ENSG00000089486_8 (sequence is synthesized)
gtgcagacggtgtgtccccactgccagcaggccatcaccaccaagatctcctacgagattggcttgatgaatttcgtgctgggtttcttctgttgcttcatgggatgtgatctgggctgc

SEQ ID NO: 94957 - DNA, 120 bp, Artificial Sequence
  ENSG00000089486_9 (sequence is synthesized)
tgcctgatcccctgcctcatcaatgacttcaaggatgtgacgcacacatgccccagctgcaaagcctacatctacacgtacaagcgcctgtgctaacggagctgggactcgggactcccc

SEQ ID NO: 94958 - DNA, 120 bp, Artificial Sequence
  ENSG00000089486_10 (sequence is synthesized)
cgcctgtcagtctggccccctgtgctttgctccctgtgctcagtggtcactttcccgctcccacttggggctgggagccgtgccaccatcccctagaagtcctgtcctcttcaccctgcc

SEQ ID NO: 94959 - DNA, 120 bp, Artificial Sequence
  ENSG00000089486_11 (sequence is synthesized)
ctacctgagccgctgactcttctggcaaaaattctgttgggatttaaggccaagggtcagtgggtggcagggggctgacaatgagcttgtgtgttgttggtctgcttggtgtgtgtgatc

SEQ ID NO: 94960 - DNA, 120 bp, Artificial Sequence
  ENSG00000089486_12 (sequence is synthesized)
agctgggaggggtctcctgctggggtcctgatgcctctgtttccaaacaaggtacaggttcagtccagactctttccccctgggaccaacagcagccagagcagttagccagttagtccc

SEQ ID NO: 94961 - DNA, 120 bp, Artificial Sequence
  ENSG00000089486_13 (sequence is synthesized)
caggcctgtggccacaggcgtttctgacctgctgggccgagaatgggtaagttgtctggagtcaggtgggcccacgtaggacagggtcacaaagcctgggtttgtttctgggtactttgc

SEQ ID NO: 94962 - DNA, 120 bp, Artificial Sequence
  ENSG00000089486_14 (sequence is synthesized)
gcctctggggtgctagaggtggggcatggtggctggaagtaaaactgccaactctggccctcagaactctcaggtatagaagcccaggatgtctaataccctgtcccagtgcccgagagc

SEQ ID NO: 94963 - DNA, 120 bp, Artificial Sequence
  ENSG00000089486_15 (sequence is synthesized)
tgcctggtgtcaggtagagaggacactgtacctgggtgaatgatcagaccctggtagctaagaaggaacttgtccctttgagtcagtgtgcagaccccctttcaggccatgcctctgtga

SEQ ID NO: 94964 - DNA, 120 bp, Artificial Sequence
  ENSG00000089486_16 (sequence is synthesized)
accctgtattgctggggccggaaggagcccctgagcctagccccttcccgtctgccctgtgtcctcactgcgtgtgggtatgacctctgcctggtggctggtgtatcccaactgggcaag

SEQ ID NO: 94965 - DNA, 120 bp, Artificial Sequence
  ENSG00000089486_17 (sequence is synthesized)
agatggcagagggtcccccttgtgggtgcgcttggatgtgcagagccttctccatggattttcttccctgtaagtgccgggcccctcaccccagctgacaggctgttgctgtgcctgctc

SEQ ID NO: 94966 - DNA, 120 bp, Artificial Sequence
  ENSG00000089486_18 (sequence is synthesized)
acacctgctcctgcaggcacactgggctagggacgaggaaggagcagccacaagtggtagaactgccttggtggacaccagcctcgccctgtctttatttcctgaatggtttgtgaactt

SEQ ID NO: 94967 - DNA, 120 bp, Artificial Sequence
  ENSG00000089486_19 (sequence is synthesized)
gctcacctggaccactgtatcctgccactgtccttcctggtctcgcactgccactgcatggcctcctgtcactgtgaatcgtggcccagtctcagtttgtagtttctcattaaattggcc

SEQ ID NO: 94968 - DNA, 120 bp, Artificial Sequence
  ENSG00000089486_20 (sequence is synthesized)
ctttcactcccccgccctgggcctctgctctcttgcctggcttccttcttttttgagggaaagagggtggggctgcaggcagtctactggcaggacgggaggctgagtcctcagggtctc

SEQ ID NO: 94969 - DNA, 120 bp, Artificial Sequence
  ENSG00000089486_21 (sequence is synthesized)
acaccctcagtgctgatgccatgccaactgcctgggacaacaccaacacgtaaggacctaattaaaccaaaccagagtcgggtgtagaccagccctgggatttccagctgtgactgggcc

SEQ ID NO: 94970 - DNA, 120 bp, Artificial Sequence
  ENSG00000089486_22 (sequence is synthesized)
agggcacacgttggtctcggcagtggctgtaaggtcaccttccttcctctgatgctggtttcaaccatctatatatggcatccacgcatgggatctgcaagctggagccctcctacccgc

SEQ ID NO: 94971 - DNA, 120 bp, Artificial Sequence
  ENSG00000089486_23 (sequence is synthesized)
aggcttgagcacagcatcatccagccctggggaggcgcacccttaagcaacacagactgggctgaggctgacaggcagaagactaacagagcgcagtctgcacacgcaggttctgggcga

SEQ ID NO: 94972 - DNA, 120 bp, Artificial Sequence
  ENSG00000089486_24 (sequence is synthesized)
cctctggccctggccatctctgcactaactcatctgaattatgaaggtggcagtcttggtcagtagtttaaagagtttccctactttttaaccctttttgaaataaaacttttacaggta

SEQ ID NO: 94973 - DNA, 120 bp, Artificial Sequence
  ENSG00000089486_25 (sequence is synthesized)
ctctgggcggtggggtgggcggtgggttggggggtttcgttgtgcgcgcaaagccgcgcggggctgagggtcttgttctgccggcgcctgtccggacccgggcccctctccgctttcggc

SEQ ID NO: 94974 - DNA, 120 bp, Artificial Sequence
  ENSG00000089486_26 (sequence is synthesized)
agcaaagcagaaagccctgttcctggctggatgcctgggacctgcctcctggggacagaggagcccctctgaggccagctggcgtcctgacgccatggctgccacgtggctcccggagcc

SEQ ID NO: 94975 - DNA, 120 bp, Artificial Sequence
  ENSG00000089486_27 (sequence is synthesized)
agaagtgcgactgccagctgccgaggcgttcggtcctgctgttgcggccgctgccccagggctgcggggacgtgtgatgtggaggagcacagcacagctctgtatgggtggtggtatctg

SEQ ID NO: 94976 - DNA, 120 bp, Artificial Sequence
  ENSG00000089486_28 (sequence is synthesized)
cgtagtaattcatggaaggcgtctccagcaatacagcctggacatctacatgtgggattttgttcagccttccaagaacctcattttgcacgtggggaaactgaggctcagagaggttga

SEQ ID NO: 94977 - DNA, 120 bp, Artificial Sequence
  ENSG00000089486_29 (sequence is synthesized)
tattctattgacagtcaagcaaagaagaccgctgtctttgtttccaagtgccacaatgcaacaaggctgaatggtgccggaggtctcctggggaagcctaaagcctgaggagaagggcct

SEQ ID NO: 94978 - DNA, 120 bp, Artificial Sequence
  ENSG00000089486_30 (sequence is synthesized)
gggacactgtccagctggccttgtcatccttgtcctggagatctgaggtatttgagctctggaacaaaccctgtggctgggtcgctgtgagggccccaggctgccatctggccaccctca

SEQ ID NO: 94979 - DNA, 120 bp, Artificial Sequence
  ENSG00000089486_31 (sequence is synthesized)
accgtgacgtcccgggcctcggccctggtccaaagtctacccgcctccttgtgacagaagtgcgactgccagctgccgaggcgttcggtcctgctgttgcggccgctgccccagggctgc

SEQ ID NO: 94980 - DNA, 120 bp, Artificial Sequence
  ENSG00000089486_32 (sequence is synthesized)
agggtcttgttctgccggcgcctgtccggacccgggcccctctccgctttcggccggcctcgggcaccgggcttctggagagatggcatgtcattattttgcccagctggtctctaactc

SEQ ID NO: 94981 - DNA, 120 bp, Artificial Sequence
  ENSG00000089486_33 (sequence is synthesized)
ccaaagtgctgggattacaggcaggagctaccgtgcccaagttcttacaaggatttaagagcagccagccgtggttctagaatcaccataagagcagaacattgactgtatgatgtaaag

SEQ ID NO: 94982 - DNA, 120 bp, Artificial Sequence
  ENSG00000089486_34 (sequence is synthesized)
taagagcagaacattgactgtatgatgtaaagtaatacttcagggaacaaaattgttttgagaaggagctaacggaatgcgtcccgaaggccagcttgccccagcagatcacgttggcaa

SEQ ID NO: 94983 - DNA, 120 bp, Artificial Sequence
  ENSG00000089505_0 (sequence is synthesized)
ggttcccaggggagagccagccgctgccgcggcactggttcagacggccaggccctagggacccaccatggatcctgaacacgccaaacctgagtcatccgaggcaccttcagggaactt

SEQ ID NO: 94984 - DNA, 120 bp, Artificial Sequence
  ENSG00000089505_1 (sequence is synthesized)
gaaacaaccggagactgccgcagccctggcaagtagcggcagcgtagtgagttctgtacccaaggcacagcgcaacatctcagcgaagaccgcaccccggaagcaccccgcagtctcaat

SEQ ID NO: 94985 - DNA, 120 bp, Artificial Sequence
  ENSG00000089505_2 (sequence is synthesized)
tcgcagtgcgcagtccgcagccgccgcacgtccccaaggcagtgagggcaccgcaccctcaaggaaagccaccacacgcccacccccaaagcccacactcccaccccccacgccctctgc

SEQ ID NO: 94986 - DNA, 120 bp, Artificial Sequence
  ENSG00000089505_3 (sequence is synthesized)
acacactgaatccaaactcttaaatgagatggcgatcaaagagcgcgtggagggccgagccaaagtcccgtacaaattcagggacagcctcaaacgtttctccttctcgcccactggaat

SEQ ID NO: 94987 - DNA, 120 bp, Artificial Sequence
  ENSG00000089505_4 (sequence is synthesized)
ttgtcgttttttttattctaatatatgtgctaacccttcaccacttgctgacctatttacattggcccttacttgatcttaccaacagtatcattacagctgtgttcctttcagtagttg

SEQ ID NO: 94988 - DNA, 120 bp, Artificial Sequence
  ENSG00000089505_5 (sequence is synthesized)
ccatcttggccatgcaagaaaagaaaagaaggcatttactctatgtcggggggtccctgtgtctcacagcggtaatcgtgtgttgcatcgatgcgtttgtggtcaccacgaagatgagga

SEQ ID NO: 94989 - DNA, 120 bp, Artificial Sequence
  ENSG00000089505_6 (sequence is synthesized)
ccaacttgaaaagattcctgggagtcgaagttgaaaggaagctttcccccgccaaggacgcctaccccgaaaccggccccgacgccccgcagaggcccgcctgaagccagcccggcgccc

SEQ ID NO: 94990 - DNA, 120 bp, Artificial Sequence
  ENSG00000089505_7 (sequence is synthesized)
tagcagatgcacgtgtctgtcgaatcgctgcctccgagcccacccccgagctcgcatgctgtcacccattccagcctaaatgtgaccataaaattagggctgctgcttttatcgagaaca

SEQ ID NO: 94991 - DNA, 120 bp, Artificial Sequence
  ENSG00000089505_8 (sequence is synthesized)
ttaattgaacatgtggaagacccttttagttatggagaggtttctcaggggaaactcaaatctctgtccgtggaaattttcaagaagggaaggatcttaccaacagtatcattacagctg

SEQ ID NO: 94992 - DNA, 120 bp, Artificial Sequence
  ENSG00000089505_9 (sequence is synthesized)
cctgctacatacccctgttccagcattaactaccaggcaccaaaacagtaggcattagtgcctttccaagaggcaagatcttaccaacagtatcattacagctgtgttcctttcagtagt

SEQ ID NO: 94993 - DNA, 120 bp, Artificial Sequence
  ENSG00000089558_0 (sequence is synthesized)
gaccgaaacggcgctgagccgagccgagagctacggggttcggagcagaggcagcggcagcggcagcggcagtaagagggaggggaggaggcaggagggcgcatggggcgccccggcccc

SEQ ID NO: 94994 - DNA, 120 bp, Artificial Sequence
  ENSG00000089558_1 (sequence is synthesized)
tccgacagcgcgccccctccggcccggccgcgctgaaagctccccagcgccgcgccttgaacccacgccccggggccatgccggtcatgaaggggttgctggccccgcaaaacaccttcc

SEQ ID NO: 94995 - DNA, 120 bp, Artificial Sequence
  ENSG00000089558_2 (sequence is synthesized)
tggacaccatcgccacccgttttgacggaacgcacagcaacttcctgctggccaacgcacagggcacacggggctttcccatcgtctactgctccgacggcttctgcgagctcacaggct

SEQ ID NO: 94996 - DNA, 120 bp, Artificial Sequence
  ENSG00000089558_3 (sequence is synthesized)
acggtcgcaccgaggtcatgcagaagacctgcagctgccgtttcctctacggcccagagaccagtgagccagccctgcagcgtctgcacaaagccctggagggccaccaggagcaccggg

SEQ ID NO: 94997 - DNA, 120 bp, Artificial Sequence
  ENSG00000089558_4 (sequence is synthesized)
ctgaaatctgcttctaccgcaaggatggctcagccttttggtgcctcctggacatgatgcccatcaagaatgagatgggggaggtcgtgctgttcctcttttccttcaaggatatcactc

SEQ ID NO: 94998 - DNA, 120 bp, Artificial Sequence
  ENSG00000089558_5 (sequence is synthesized)
agagtggaagcccaggacttggcccccaaggaggccgcggggacagtaatcacgaaaactcccttggtagaaggggagccacctggaaatttcggtctgccagaagacggagccgtactg

SEQ ID NO: 94999 - DNA, 120 bp, Artificial Sequence
  ENSG00000089558_6 (sequence is synthesized)
tcctacaccgactgaccggccactttggccgccggggccagggaggcatgaaggccaataataacgtgtttgagccaaagccatcagtgcccgagtacaaggtggcctccgtgggggggt

SEQ ID NO: 95000 - DNA, 120 bp, Artificial Sequence
  ENSG00000089558_7 (sequence is synthesized)
ctcgctgcctcctcctccactacagcgtctccaaggccatctgggacggccttatcctccttgccaccttctacgttgcggtcaccgtcccctacaatgtctgtttctcgggtgacgatg

SEQ ID NO: 95001 - DNA, 120 bp, Artificial Sequence
  ENSG00000089558_8 (sequence is synthesized)
acacccccatcacttcgcgacacacccttgtcagcgacatcgccgtggaaatgctcttcatcctagatatcatcctgaacttccgcaccacctatgtgtcccagtccggccaggtaatct

SEQ ID NO: 95002 - DNA, 120 bp, Artificial Sequence
  ENSG00000089558_9 (sequence is synthesized)
ctgctcctcgttccattggcctccactacctggccacctggttcttcatcgaccttattgctgctctgccctttgacctgctttacatcttcaacatcaccgtgacctcgctggtgcacc

SEQ ID NO: 95003 - DNA, 120 bp, Artificial Sequence
  ENSG00000089558_10 (sequence is synthesized)
tactgaagacagtgcggctgttgcggctgctgcggctgctgcagaagctggagcggtactctcagtgcagtgctgtggtgctcacgctgctcatgtcggtctttgcgctccttgcccact

SEQ ID NO: 95004 - DNA, 120 bp, Artificial Sequence
  ENSG00000089558_11 (sequence is synthesized)
ggatggcctgcatctggtatgtcatcgggcgccgggagatggaggccaatgacccgctgctctgggacattggctggttgcatgagttgggcaagcgtctggaggtgccctatgtcaatg

SEQ ID NO: 95005 - DNA, 120 bp, Artificial Sequence
  ENSG00000089558_12 (sequence is synthesized)
gctcggtgggcggcccatcacggcgcagcgcctacatcgcggcactgtacttcactctaagcagcctcaccagtgtgggctttggcaacgtgtgtgccaacaccgacgcggagaagatct

SEQ ID NO: 95006 - DNA, 120 bp, Artificial Sequence
  ENSG00000089558_13 (sequence is synthesized)
tctccatctgcacgatgctcataggcgccctgatgcacgctgtggtgttcgggaacgtgacagccatcatccagcgcatgtactcgcgccgctcgctctaccacagccgcatgaaggacc

SEQ ID NO: 95007 - DNA, 120 bp, Artificial Sequence
  ENSG00000089558_14 (sequence is synthesized)
tcaaggacttcatccgtgtgcaccgcctgccgcggccgctcaagcagcgcatgctcgaatacttccagaccacgtgggccgtcaacagcggcatcgacgccaacgagttactgcgtgact

SEQ ID NO: 95008 - DNA, 120 bp, Artificial Sequence
  ENSG00000089558_15 (sequence is synthesized)
ggggcagcgagcaggggctgcctgcgggccctatcgctgcacatcaagacctcgttctgcgctccgggcgagtacctgttgcgccgtggggatgccctgcaggcacattactatgtctgc

SEQ ID NO: 95009 - DNA, 120 bp, Artificial Sequence
  ENSG00000089558_16 (sequence is synthesized)
tccggctcgcttgaggtgctccgagacaacatggtgctggccatcctggggaagggggacctgattggagcagatatccctgagccggggcaggagcctgggttgggagcagacccaaac

SEQ ID NO: 95010 - DNA, 120 bp, Artificial Sequence
  ENSG00000089558_17 (sequence is synthesized)
ttcgtgctaaagaccagtgctgatgtgaaagctctgacctactgtggcctgcagcagctgagcagccgagggctggctgaggtcctgaggctctatcctgagtatggggctgccttccgg

SEQ ID NO: 95011 - DNA, 120 bp, Artificial Sequence
  ENSG00000089558_18 (sequence is synthesized)
gctggcctgccccgggacctcaccttcaacctgcgccagggctctgacaccagtggcctcagccgcttttcccgatcccctcgcctctcccagccccgctcagaaagcctcggctcctcc

SEQ ID NO: 95012 - DNA, 120 bp, Artificial Sequence
  ENSG00000089558_19 (sequence is synthesized)
tcagacaagacgctgccatccatcacagaggccgagagtggcgcggagcctgggggtggtcccaggccccgacggcccctcctgctgcccaacctcagcccagcacggcctcggggctcc

SEQ ID NO: 95013 - DNA, 120 bp, Artificial Sequence
  ENSG00000089558_20 (sequence is synthesized)
ctggtcagccttttgggcgaggagctgcccccattctcagcccttgtctcctctccttccttatccccatccctgtcccctgccctggctggccagggccacagtgcctcccctcacggc

SEQ ID NO: 95014 - DNA, 120 bp, Artificial Sequence
  ENSG00000089558_21 (sequence is synthesized)
ccccccaggtgctctgctgcctggaagccccctcagcttctcattcccccactgggaacctttggacctccggacctcagtccccggatagtggatggcattgaggactctggcagcaca

SEQ ID NO: 95015 - DNA, 120 bp, Artificial Sequence
  ENSG00000089558_22 (sequence is synthesized)
gctgaggccccttcattccgattcagcaggaggcctgaactgccaaggccccgctcccaggcgccccctacagggaccaggcccagcccagaattggccagtgaggctgaggaggtgaag

SEQ ID NO: 95016 - DNA, 120 bp, Artificial Sequence
  ENSG00000089558_23 (sequence is synthesized)
gaaaaggtttgccggctgaaccaggagatctctcgtctcaatcaggaggtgtctcagcttagccgggagctgcggcacatcatgggcctgctgcaggccaggctgggtcccccaggccac

SEQ ID NO: 95017 - DNA, 120 bp, Artificial Sequence
  ENSG00000089558_24 (sequence is synthesized)
ccagcaggctccgcttggaccccagaccctccttgtccacagctgaggccaccatgcctctctccttgtgcgtccagaccaccacccagcctccaggatactacgcttgctgaagttcac

SEQ ID NO: 95018 - DNA, 120 bp, Artificial Sequence
  ENSG00000089558_25 (sequence is synthesized)
tgcccagccagtgtggggaccatggagacagggactgcgctcctggacttgagaccttccatattgcccccctacccctcagagcctgaccctctgggaccctctccagtgccagaggcc

SEQ ID NO: 95019 - DNA, 120 bp, Artificial Sequence
  ENSG00000089558_26 (sequence is synthesized)
tcacccccaaccccaagcctcttgaggcacagtttccagtccaggtcagacacgttccactgaccctggcccagggcccaggcctgtctggggtgggcgctgccgctcaccactcaggga

SEQ ID NO: 95020 - DNA, 120 bp, Artificial Sequence
  ENSG00000089558_27 (sequence is synthesized)
ggacctgggccccttggcttcctgccttggggtcagcagccaccagctggcctggttggctctggatttctggactttttaatgaagcgtggttacctctgacgctattcccttttccaa

SEQ ID NO: 95021 - DNA, 120 bp, Artificial Sequence
  ENSG00000089558_28 (sequence is synthesized)
gccttccccaacctccccctctgtgaggggagccacctgagggctgtggaacccagcaggcatgagatgaaccgcagtgcccattgggctgggcagatgagatcctactttctccccagg

SEQ ID NO: 95022 - DNA, 120 bp, Artificial Sequence
  ENSG00000089558_29 (sequence is synthesized)
acctggaggcaggctgtctctcaaggtggtctcttctgctgctagcaactcaaaaatcccaacagcactccctatcctttccctgaccccagaccgctgccaagcctgttctcccccatt

SEQ ID NO: 95023 - DNA, 120 bp, Artificial Sequence
  ENSG00000089558_30 (sequence is synthesized)
acaacatggtctcactcagggcctggactgctccaaaactcgcccaggtctccagctctcctctaccacccaacaccctgggctcacttttggataggaaataaactctttatttttgta

SEQ ID NO: 95024 - DNA, 120 bp, Artificial Sequence
  ENSG00000089597_0 (sequence is synthesized)
aaactctgcacaagatggcggcggtagcggcagtggcggcgcgtaggaggcggtcttgggcgtctttggtactggcttttttaggggtctgcctggggattacccttgctgtggatagaa

SEQ ID NO: 95025 - DNA, 120 bp, Artificial Sequence
  ENSG00000089597_1 (sequence is synthesized)
gcaactttaagacctgtgaagagagttctttctgcaagcgacagagaagcatacggccaggcctctctccataccgagccttgctggactctctacagcttggtcctgattccctcacgg

SEQ ID NO: 95026 - DNA, 120 bp, Artificial Sequence
  ENSG00000089597_2 (sequence is synthesized)
tccatctgatccatgaggtcaccaaggtgttgctggtgctagagcttcaggggcttcaaaagaacatgactcggttcaggattgatgagctggagcctcggcgaccccgataccgtgtac

SEQ ID NO: 95027 - DNA, 120 bp, Artificial Sequence
  ENSG00000089597_3 (sequence is synthesized)
cagatgttttggtggctgatccaccaatagcccggctttctgtctctggtcgtgatgagaacagtgtggagttaaccatggctgagggaccctacaagatcatcttgacagcacggccat

SEQ ID NO: 95028 - DNA, 120 bp, Artificial Sequence
  ENSG00000089597_4 (sequence is synthesized)
tccgccttgacctactagaggaccgaagtcttttgcttagtgtcaatgcccgaggactcttggagtttgagcatcagagggcccctagggtctcgcaaggatcaaaagacccagctgagg

SEQ ID NO: 95029 - DNA, 120 bp, Artificial Sequence
  ENSG00000089597_5 (sequence is synthesized)
gcgatggggcccagcctgaggaaacacccagggatggcgacaagccagaggagactcaggggaaggcagagaaagatgagccaggagcctgggaggagacattcaaaactcactctgaca

SEQ ID NO: 95030 - DNA, 120 bp, Artificial Sequence
  ENSG00000089597_6 (sequence is synthesized)
gcaagccgtatggccccatgtctgtgggtttggacttctctctgccaggcatggagcatgtctatgggatccctgagcatgcagacaacctgaggctgaaggtcactgagggtggggagc

SEQ ID NO: 95031 - DNA, 120 bp, Artificial Sequence
  ENSG00000089597_7 (sequence is synthesized)
catatcgcctctacaatttggatgtgttccagtatgagctgtacaacccaatggccttgtatgggtctgtgcctgtgctcctggcacacaaccctcatcgcgacttgggcatcttctggc

SEQ ID NO: 95032 - DNA, 120 bp, Artificial Sequence
  ENSG00000089597_8 (sequence is synthesized)
tcaatgctgcagagacctgggttgatatatcttccaacactgccgggaagaccctgtttgggaagatgatggactacctgcagggctctggggagaccccacagacagatgttcgctgga

SEQ ID NO: 95033 - DNA, 120 bp, Artificial Sequence
  ENSG00000089597_9 (sequence is synthesized)
tgtcagagactggcatcattgacgtcttcctgctgctggggccctccatctctgatgttttccggcaatatgctagtctcacaggaacccaggcgttgcccccactcttctccctcggct

SEQ ID NO: 95034 - DNA, 120 bp, Artificial Sequence
  ENSG00000089597_10 (sequence is synthesized)
accaccagagccgttggaactaccgggacgaggctgatgtgctggaagtggatcagggctttgatgatcacaacctgccctgtgatgtcatctggctagacattgaacatgctgatggca

SEQ ID NO: 95035 - DNA, 120 bp, Artificial Sequence
  ENSG00000089597_11 (sequence is synthesized)
agcggtatttcacctgggaccccagtcgcttccctcagccccgcaccatgcttgagcgcttggcttctaagaggcggaagctggtggccatcgtagacccccacatcaaggtggactccg

SEQ ID NO: 95036 - DNA, 120 bp, Artificial Sequence
  ENSG00000089597_12 (sequence is synthesized)
gctaccgagttcacgaggagctgcggaacctggggctgtatgttaaaacccgggatggctctgactatgagggctggtgctggccaggctcagctggttaccctgacttcactaatccca

SEQ ID NO: 95037 - DNA, 120 bp, Artificial Sequence
  ENSG00000089597_13 (sequence is synthesized)
cgatgagggcctggtgggctaacatgttcagctatgacaattatgagggctcagctcccaacctctttgtctggaatgacatgaacgaaccatctgtgttcaatggtcctgaggtcacca

SEQ ID NO: 95038 - DNA, 120 bp, Artificial Sequence
  ENSG00000089597_14 (sequence is synthesized)
tgctcaaggatgcccagcattatgggggctgggagcaccgggatgtgcataacatctatggcctttatgtgcacatggcgactgctgatgggctgagacagcgctctgggggcatggaac

SEQ ID NO: 95039 - DNA, 120 bp, Artificial Sequence
  ENSG00000089597_15 (sequence is synthesized)
cagcttggggctggtgggactttccttctgtggggcggatgtgggtggcttcttcaaaaacccagagccagagctgcttgtgcgctggtaccagatgggtgcttaccagccattcttccg

SEQ ID NO: 95040 - DNA, 120 bp, Artificial Sequence
  ENSG00000089597_16 (sequence is synthesized)
ggcacatgcccacttggacactgggcgacgagagccatggctgttaccatctcagcacaatgatataatccgagatgccttgggccagcgatattctttgctgcccttctggtacaccct

SEQ ID NO: 95041 - DNA, 120 bp, Artificial Sequence
  ENSG00000089597_17 (sequence is synthesized)
cttatatcaggcccatcgggaaggcattcctgtcatgaggcccctgtgggtgcagtaccctcaggatgtgactaccttcaatatagatgatcagtacttgcttggggatgcgttgctggt

SEQ ID NO: 95042 - DNA, 120 bp, Artificial Sequence
  ENSG00000089597_18 (sequence is synthesized)
tcaccctgtatcagactctggagcccatggtgtccaggtctatctgcctggccaaggggaggtgtggtatgacattcaaagctaccagaagcatcatggtccccagaccctgtacctgcc

SEQ ID NO: 95043 - DNA, 120 bp, Artificial Sequence
  ENSG00000089597_19 (sequence is synthesized)
tgtaactctaagcagtatccctgtgttccagcgtggagggacaatcgtgcctcgatggatgcgagtgcggcggtcttcagaatgtatgaaggatgaccccatcactctctttgttgcact

SEQ ID NO: 95044 - DNA, 120 bp, Artificial Sequence
  ENSG00000089597_20 (sequence is synthesized)
tagccctcagggtacagctcaaggagagctctttctggatgatgggcacacgttcaactatcagactcgccaagagttcctgctgcgtcgattctcattctctggcaacacccttgtctc

SEQ ID NO: 95045 - DNA, 120 bp, Artificial Sequence
  ENSG00000089597_21 (sequence is synthesized)
cagctcagcagaccctgaaggacactttgagacaccaatctggattgagcgggtggtgataataggggctggaaagccagcagctgtggtactccagacaaaaggatctccagaaagccg

SEQ ID NO: 95046 - DNA, 120 bp, Artificial Sequence
  ENSG00000089597_22 (sequence is synthesized)
cctgtccttccagcatgaccctgagacctctgtgttggtcctgcgcaagcctggcatcaatgtggcatctgattggagtattcacctgcgataacccaagggatgttctgggttaggggg

SEQ ID NO: 95047 - DNA, 120 bp, Artificial Sequence
  ENSG00000089597_23 (sequence is synthesized)
agggaaggggagcattagtgctgagagatattctttcttctgccttggagttcggccctccccagacttcacttatgctagtctaagacccagattctgccaacatttgggcaggatgag

SEQ ID NO: 95048 - DNA, 120 bp, Artificial Sequence
  ENSG00000089597_24 (sequence is synthesized)
agggctgaccctgggctccaaattcctcttgtgatctcctcacctctcccactccattgataccaactctttcccttcattcccccaacatcctgttgctctaactggagcacattcact

SEQ ID NO: 95049 - DNA, 120 bp, Artificial Sequence
  ENSG00000089597_25 (sequence is synthesized)
tacgaacaccaggaaaccacagggcccttgtcgccccttctctttcccttatttaggagccctgaactcccccagagtctatccattcatgcctcttgtatgttgatgccacttcttgga

SEQ ID NO: 95050 - DNA, 120 bp, Artificial Sequence
  ENSG00000089597_26 (sequence is synthesized)
agaagatgagggcaatgagttagggctccttttccccttccctcccaccagattgctctcccacctttcatttcttcctccaggctttactcccctttttatgccccaccgatacactgg

SEQ ID NO: 95051 - DNA, 120 bp, Artificial Sequence
  ENSG00000089597_27 (sequence is synthesized)
gaccaccccttaccccggacaggatgaatggatcaaaggagtgaggttgctaaagaacatccttttccctctcattctacccttttcctctccccgattccttgtagagctgctgcaatt

SEQ ID NO: 95052 - DNA, 120 bp, Artificial Sequence
  ENSG00000089597_28 (sequence is synthesized)
cttagaggggcagttctacctcctctgtccctcggcagaaagacgtttccacacctcttaggggatgcgcattaaacttcttttgcccccttcttgtcccctttgaggggcacttaagat

SEQ ID NO: 95053 - DNA, 120 bp, Artificial Sequence
  ENSG00000089597_29 (sequence is synthesized)
ggagaaatcagttgtggtttcagtgaatcatggtcacctgtatttattgctaggagaagcctgagggtggggggagatgatcatgtgtgctcggggttggctggaagccctgggtggggg

SEQ ID NO: 95054 - DNA, 120 bp, Artificial Sequence
  ENSG00000089597_30 (sequence is synthesized)
gttgggggaggactaatggggagtcggggaatatttgtgggtattttttttacttcctcttggttcccagctgtgacacgttttgatcaaaggagaaacaataaagggataaaccataaa

SEQ ID NO: 95055 - DNA, 120 bp, Artificial Sequence
  ENSG00000089597_31 (sequence is synthesized)
gggttgggactgcagggaacctagtgtgaaagagcataggggtgttgtgaggtctggcacggggaggagacggtggtgggacagccaggtagggcctgggggctgggagaagctctctgt

SEQ ID NO: 95056 - DNA, 120 bp, Artificial Sequence
  ENSG00000089597_32 (sequence is synthesized)
cagggagggtaggaaccagacccgggtgcggttttttccatttcctgtacagaccaggaggcagtcacttttgtccctgagctgtaccctgggcatctctgggaggcctgcctgggtctg

SEQ ID NO: 95057 - DNA, 120 bp, Artificial Sequence
  ENSG00000089597_33 (sequence is synthesized)
tagtatgacccacatgcctttgcaaagccattgtgtcaggccaggaggctgaggcccagggagagcacttggggccagaatctctcagtagaggcaacagagccaggattggcattcata

SEQ ID NO: 95058 - DNA, 120 bp, Artificial Sequence
  ENSG00000089597_34 (sequence is synthesized)
acccaggcccctgaatcattctgcctttctcttctgggatgttgacagaggctggtgttcaggcctgtgcctcctggtggcacttattcctcattttcctttctcatttctctccccatc

SEQ ID NO: 95059 - DNA, 120 bp, Artificial Sequence
  ENSG00000089597_35 (sequence is synthesized)
ctttgcaaacttatctgctcattgtgggttccctctccaagctttaacatttagtcccttcctccaatgccttcgttcctttggacccttggctctctattccccaacccctccttccac

SEQ ID NO: 95060 - DNA, 120 bp, Artificial Sequence
  ENSG00000089597_36 (sequence is synthesized)
ggttcaccctgtatcagactctggagcccatggtgtccaggtctatctgcctggccaaggggaggtgagttaaggaagggcatggtggggaaagatggtggaagccaaaggaggcaaaca

SEQ ID NO: 95061 - DNA, 120 bp, Artificial Sequence
  ENSG00000089597_37 (sequence is synthesized)
caggagtgagccaccacgcccagcctactctgcctttcaaagggaaggtgtcttgggcgtctttggtactggcttttttaggggtctgcctggggattacccttgctgtggatagaagca

SEQ ID NO: 95062 - DNA, 120 bp, Artificial Sequence
  ENSG00000089639_0 (sequence is synthesized)
gacgcggaaccgaggcggcggcggcggctgcggcggcaggaaatcggggctcggccccgccggcgcgcgaccccatccccatcccggtccctgcagagcgatccccgggcccagatatgg

SEQ ID NO: 95063 - DNA, 120 bp, Artificial Sequence
  ENSG00000089639_1 (sequence is synthesized)
gcccagatatggacgcagcagagccgggactccccccaggtcctgagggcaggaagaggtacagtgacatcttccggagcctggacaacctcgaaatctcactggggaacgtgacccttg

SEQ ID NO: 95064 - DNA, 120 bp, Artificial Sequence
  ENSG00000089639_2 (sequence is synthesized)
agatgctggctggagaccctctactctcagaagacccagaacctgacaagacccctacagccactgttaccaacgaagccagctgttggagcggcccctccccagagggtcctgtacccc

SEQ ID NO: 95065 - DNA, 120 bp, Artificial Sequence
  ENSG00000089639_3 (sequence is synthesized)
tcacaggggaggaactggacttgcggctcattcggacaaaggggggtgtggacgcagccctggaatatgccaagacctggagccgctatgccaaggaactgcttgcctggactgaaaaga

SEQ ID NO: 95066 - DNA, 120 bp, Artificial Sequence
  ENSG00000089639_4 (sequence is synthesized)
gagccagctatgagctggagtttgctaagagcaccatgaagatcgctgaagctggcaaggtgtccattcaacagcagagccacatgcctctgcagtacatctacaccctgtttctggagc

SEQ ID NO: 95067 - DNA, 120 bp, Artificial Sequence
  ENSG00000089639_5 (sequence is synthesized)
acgatctcagcctgggaaccctggccatggagacagtggcccagcagaaaagagactactaccagcccctcgccgccaaacggactgagattgagaagtggcggaaggagttcaaggagc

SEQ ID NO: 95068 - DNA, 120 bp, Artificial Sequence
  ENSG00000089639_6 (sequence is synthesized)
agtggatgaaggagcagaagcggatgaatgaggcggtgcaggcactgcggcgcgcccagctgcagtatgtgcaacgcagcgaggacctgcgggcacgctcccaggggtcccctgaggact

SEQ ID NO: 95069 - DNA, 120 bp, Artificial Sequence
  ENSG00000089639_7 (sequence is synthesized)
cggccccccaggcctcgccgggacctagcaagcagcaggagcggcggcggcgctcgcgagaggaggcccaggccaaggcgcaggaggccgaggcgctgtaccaggcctgtgtccgcgagg

SEQ ID NO: 95070 - DNA, 120 bp, Artificial Sequence
  ENSG00000089639_8 (sequence is synthesized)
ccaacgcgcggcagcaggacctggagatcgccaagcagcgaatcgtgtcgcacgtgcgcaagctggtgtttcagggggatgaagtgctgaggcgggtgacgctgagtctcttcgggctgc

SEQ ID NO: 95071 - DNA, 120 bp, Artificial Sequence
  ENSG00000089639_9 (sequence is synthesized)
ctgcggggggcgcaggcagagcgtggcccccgcgccttcgccgccctggccgagtgctgtgcgccctttgagccgggccagcgctaccaggagtttgtacgggcgctgcggcccgaggcc

SEQ ID NO: 95072 - DNA, 120 bp, Artificial Sequence
  ENSG00000089639_10 (sequence is synthesized)
cgcccccgccgcccgccttctccttccaggagttccttccctccttgaacagctcccctctggacatcagaaagaagctctctgggcctcttcctccaaggctggatgagaattcagctg

SEQ ID NO: 95073 - DNA, 120 bp, Artificial Sequence
  ENSG00000089639_11 (sequence is synthesized)
agccaggcccttgggaggatccgggcacaggctggcgctggcaagggactccaggccccactccgggcagcgatgtggacagcgtgggtggcggcagcgagtctcggtccctggactcac

SEQ ID NO: 95074 - DNA, 120 bp, Artificial Sequence
  ENSG00000089639_12 (sequence is synthesized)
ccacttccagcccaggcgctggcacgaggcagctggtgaaggcttcgtccacaggcactgagtcctcagatgactttgaggagcgagaccctgacctgggagacgggctggagaatgggc

SEQ ID NO: 95075 - DNA, 120 bp, Artificial Sequence
  ENSG00000089639_13 (sequence is synthesized)
tgggcagccccttcgggaagtggacactgtccagcgcggctcagacccaccagctgcggcgactgcggggcccagccaagtgccgcgagtgcgaagccttcatggtcagcgggacggagt

SEQ ID NO: 95076 - DNA, 120 bp, Artificial Sequence
  ENSG00000089639_14 (sequence is synthesized)
tgatcctctgtggacacaggcggctcccagcccggacacccctttttggggttgacttcctgcagctacccagggacttcccggaggaggtaccctttgtggtcacgaagtgcacggctg

SEQ ID NO: 95077 - DNA, 120 bp, Artificial Sequence
  ENSG00000089639_15 (sequence is synthesized)
agatagaacaccgtgccctggatgtgcagggcatttaccgggtcagcgggtcccgggtccgtgtggagcggctgtgccaggctttcgagaatggccgagcgttggtggagctgtcgggga

SEQ ID NO: 95078 - DNA, 120 bp, Artificial Sequence
  ENSG00000089639_16 (sequence is synthesized)
actcgcctcatgacgtctcgagtgtcctcaagcgatttcttcaggagctcaccgagcccgtgatccccttccacctctacgacgccttcatctctctggctaagaccttgcatgcagacc

SEQ ID NO: 95079 - DNA, 120 bp, Artificial Sequence
  ENSG00000089639_17 (sequence is synthesized)
ctggggacgaccctgggacccccagccccagccctgaggttatccgctcgctgaagaccctcttggtacagctgcctgactctaactacaacaccctgcggcacctggtggcccatctgt

SEQ ID NO: 95080 - DNA, 120 bp, Artificial Sequence
  ENSG00000089639_18 (sequence is synthesized)
tcagggtggctgcacgatttatggaaaacaagatgtctgccaacaacctgggcattgtgtttgggccgacactgctgcggccgccggacggcccgcgggcagccagcgccatccctgtca

SEQ ID NO: 95081 - DNA, 120 bp, Artificial Sequence
  ENSG00000089639_19 (sequence is synthesized)
cctgcctgctggactctgggcatcaggcccagcttgtggagttcctcatcgtgcactacgagcagatctttgggatggatgagctcccccaggccactgagcccccgccccaagactcca

SEQ ID NO: 95082 - DNA, 120 bp, Artificial Sequence
  ENSG00000089639_20 (sequence is synthesized)
gcccagcccctgggcccctcacaaccagctcccaaccgccacccccgcaccttgacccagactcccagcccccagtcctagcctcagaccccggcccagacccccagcaccacagtaccc

SEQ ID NO: 95083 - DNA, 120 bp, Artificial Sequence
  ENSG00000089639_21 (sequence is synthesized)
tggagcagcatcccacggccacacctaccgagattccaactccacagagtgaccagagagaggacgtggctgaagacaccaaagatgggggaggggaagtgtccagccaaggcccagagg

SEQ ID NO: 95084 - DNA, 120 bp, Artificial Sequence
  ENSG00000089639_22 (sequence is synthesized)
actcactcctggggacacagtctcgtggccacttcagccgccagccagtgaagtatccccggggcggtgtgaggcctgtaacccaccagctgtccagtctggccctggtggcttccaagc

SEQ ID NO: 95085 - DNA, 120 bp, Artificial Sequence
  ENSG00000089639_23 (sequence is synthesized)
tgtgcgaggagacccccatcacatcagtgcccagagggagtttgcgggggcgggggcccagccctgcagctgcctcccctgagggcagccccctgcgccgcaccccgctgcccaagcatt

SEQ ID NO: 95086 - DNA, 120 bp, Artificial Sequence
  ENSG00000089639_24 (sequence is synthesized)
ttgagattacccaggagacagcccggctactctcgaaattggacagcgaggctgtgcccagggccacctgctgcccggacgtccagcctgaggaagccgaggaccatctctgaccaccct

SEQ ID NO: 95087 - DNA, 120 bp, Artificial Sequence
  ENSG00000089639_25 (sequence is synthesized)
ggcaccttaaataaggaagaggcccagattgtgaagacggacccatatatccctacctcccaccacctagtggccaaacaccccgccaggagttcaatgctgggagaggtccagagggtt

SEQ ID NO: 95088 - DNA, 120 bp, Artificial Sequence
  ENSG00000089639_26 (sequence is synthesized)
cctataaggaaaaactatttaatacatgacctaggggaggcctaaaacccttttggggataatgtcccagagtccccccactagacacaggtcactgccaagcatcagggccactcgggc

SEQ ID NO: 95089 - DNA, 120 bp, Artificial Sequence
  ENSG00000089639_27 (sequence is synthesized)
tcagaggtcactcagggtcaatactcagggtcagtgcaggttatgagatccttggggtccaccctagtctctgacacctgggacaggggtgcttttgctactttggttgtggtcactccc

SEQ ID NO: 95090 - DNA, 120 bp, Artificial Sequence
  ENSG00000089639_28 (sequence is synthesized)
ccacacctgcctgcctccttcacggactcgaagtgaccttcctggaggaggtgggcagctcagactccacatgctggtggtgcctgaggtctgatggcctctaataaactgtgtcctata

SEQ ID NO: 95091 - DNA, 120 bp, Artificial Sequence
  ENSG00000089639_29 (sequence is synthesized)
ggctcggccccgccggcgcgcgaccccatccccatcccggtccctgcagagcgatccccgggcccagatatggacgcagcagagccggggtgccacgactgctgagggagagggcaacgc

SEQ ID NO: 95092 - DNA, 120 bp, Artificial Sequence
  ENSG00000089639_30 (sequence is synthesized)
ggtaggatccccacagggcccctctgtagccctggggagtcggcagtgctggtctaggccccttaggagagggggcaggggggcagcagtagaaatgactccccccaggtcctgagggca

SEQ ID NO: 95093 - DNA, 120 bp, Artificial Sequence
  ENSG00000089639_31 (sequence is synthesized)
tcatgacgtctcgagtgtcctcaagcgatttcttcaggagggtggctgcacgatttatggaaaacaagatgtctgccaacaacctgggcattgtgtttgggccgacactgctgcggccgc

SEQ ID NO: 95094 - DNA, 120 bp, Artificial Sequence
  ENSG00000089682_0 (sequence is synthesized)
acccaagttggaggtaggggcctgtggaaacatgaagagggtaaacagctgtgtgaagagtgatgagcatgtcctggaggagctggaaacagaaggggagaggcagctgaaaagcctcct

SEQ ID NO: 95095 - DNA, 120 bp, Artificial Sequence
  ENSG00000089682_1 (sequence is synthesized)
tcagcatcaacttgatacttctgtctccattgaggaatgtatgtctaagaaagagagctttgctcctggtactatgtacaagccctttgggaaggaagcagctgggactatgactttgtc

SEQ ID NO: 95096 - DNA, 120 bp, Artificial Sequence
  ENSG00000089682_2 (sequence is synthesized)
ccaattccagacactgcatgagaaggaccaggaaactgcttctctcagggaattagggcttaatgaaacagaaatcttgatctggaagagccatgtttctggtgaaaagaagacaaaact

SEQ ID NO: 95097 - DNA, 120 bp, Artificial Sequence
  ENSG00000089682_3 (sequence is synthesized)
gagggcaactcctgaagcaatacagaaccgtcttcaagatattgaagaaaggatctcggagcgtcagcgcattctttgcctgccacagagatttgcaaagagcaaacagctgacccggcg

SEQ ID NO: 95098 - DNA, 120 bp, Artificial Sequence
  ENSG00000089682_4 (sequence is synthesized)
agaaatggaaatagaaaagtctttatttcagggagctgatcgtcactccttccttaaggctctttattaccaagatgaaccccaaaagaagaacaaaggtgatcccatgaacaacctgga

SEQ ID NO: 95099 - DNA, 120 bp, Artificial Sequence
  ENSG00000089682_5 (sequence is synthesized)
aagtttttaccaagagatgataatgaaaaaacgtcttgaagagtttcaacttatgagaggtgaaccctttgcttcccactcactggtctcagctacatcagtgggtgatagtggcacagc

SEQ ID NO: 95100 - DNA, 120 bp, Artificial Sequence
  ENSG00000089682_6 (sequence is synthesized)
ttggactgggcctaagaagctgacgcagccaatagaatttgtcccagaagatgaaatccagagaaatcgtttgtcagaggaagagatccgaaaaattcctatgttttcttcatataatcc

SEQ ID NO: 95101 - DNA, 120 bp, Artificial Sequence
  ENSG00000089682_7 (sequence is synthesized)
aggggaaccaaacaaggtattatacctgaagaaccttagccctcgggtgactgaaagagatcttgtgtcattgttcgctcggttccaggagaaaaaaggacctccaattcaattccgaat

SEQ ID NO: 95102 - DNA, 120 bp, Artificial Sequence
  ENSG00000089682_8 (sequence is synthesized)
gatgactggacgaatgaggggccaggcttttatcacctttcccaataaggagatagcatggcaagcattgcatctagtaaatggatacaaactacatgggaaaatattggtgatagagtt

SEQ ID NO: 95103 - DNA, 120 bp, Artificial Sequence
  ENSG00000089682_9 (sequence is synthesized)
tggaaagaacaaaaagcaacggtcaaatctccaagcgacttctctcatatcatgtgctacaggtagcactacagaaattagtggtagctagaatatatataaattgtgggtcctggatgg

SEQ ID NO: 95104 - DNA, 120 bp, Artificial Sequence
  ENSG00000089682_10 (sequence is synthesized)
tctttcttgaattggaatcttggatctaggatttatgtatagacaccagtttgtttggagttgaagaggaaaaactaactgagggaggggaaaaaagtaatttcagcttttggagagaac

SEQ ID NO: 95105 - DNA, 120 bp, Artificial Sequence
  ENSG00000089682_11 (sequence is synthesized)
tggtagaaaacattttctattatataattgaagactatataggacagatgatatgctgagtatgaagggtaaagtgcaaagagtattattttctcaggatgaattacaacggattattcc

SEQ ID NO: 95106 - DNA, 120 bp, Artificial Sequence
  ENSG00000089682_12 (sequence is synthesized)
taaggatttttaaaaatctttataatttttctggggtcctcaatatttgtctctagagataacattctttcttagactgcttcgtatacacagaaataaaaaactaattaaatgttgaaa

SEQ ID NO: 95107 - DNA, 120 bp, Artificial Sequence
  ENSG00000089682_13 (sequence is synthesized)
agaggaagataaaattaggcacaaaaggtattatacctgaagaaccttagccctcgggtgactgaaagagatcttgtgtcattgttcgctcggttccaggagaaaaaaggacctccaatt

SEQ ID NO: 95108 - DNA, 120 bp, Artificial Sequence
  ENSG00000089682_14 (sequence is synthesized)
agggtaaacagctgtgtgaagagtgatgagcatgtcctggaggagctggaaacagaaggggagaggcagctgaaaagcctccttcagcatcaacttgatacttctgtctccattgaggat

SEQ ID NO: 95109 - DNA, 120 bp, Artificial Sequence
  ENSG00000089682_15 (sequence is synthesized)
ttattattcctggatgacggcactctcgatggagttccattttgttgcagtggtgcttcagcttagaaataagatgtaagagaaaatttgctgatgtatgtctaagaaagagagctttgc

SEQ ID NO: 95110 - DNA, 120 bp, Artificial Sequence
  ENSG00000089682_16 (sequence is synthesized)
agtacatgacctcaatgaagaggaagataaaattaggcacaaaagatgaaccccaaaagaagaacaaaggtgatcccatgaacaacctggaaagtttttaccaagagatgataatgaaaa

SEQ ID NO: 95111 - DNA, 120 bp, Artificial Sequence
  ENSG00000089682_17 (sequence is synthesized)
aacgtcttgaagagtttcaacttatgagaggacttaccagttttcccagagaagacttccaaaatctttcttacgagggtactaccagcgttctaggagccaaatggcagaaaaggactg

SEQ ID NO: 95112 - DNA, 120 bp, Artificial Sequence
  ENSG00000089682_18 (sequence is synthesized)
ggaggacctcaacatttagtattctcttagtttccttgctttcagaaacagtgttcacatcttcagccatgtatggcattccccatcttctgacaatgagcctcaagttttctaccagga

SEQ ID NO: 95113 - DNA, 120 bp, Artificial Sequence
  ENSG00000089682_19 (sequence is synthesized)
ttggcaagttatcttttaccccatagcatattgtgagggagggtatttaaaaatcatattggcttttagacagccttcaactgatttgccttattttaaccccatcccttcacatttatt

SEQ ID NO: 95114 - DNA, 120 bp, Artificial Sequence
  ENSG00000089682_20 (sequence is synthesized)
tctgaaggtaagtgaaattatcagttcctgaactatttaaggattcttaagtggtgacaggtgtgttcttggctctctccactaccagtttaaaattcagctttcttcagtgtgctgagt

SEQ ID NO: 95115 - DNA, 120 bp, Artificial Sequence
  ENSG00000089682_21 (sequence is synthesized)
cttcagtgtgctgagttggttcctgctcatccaattatttttcatcttccagattattattgctgttgtctccttttcttgttcctcctgaccttgttgatttgtgtttttttttttttt

SEQ ID NO: 95116 - DNA, 120 bp, Artificial Sequence
  ENSG00000089682_22 (sequence is synthesized)
gttttagagagttttctggatggaatgaaattaaatgaatgtgttcaatccaccatttttatgtgaaactaattctaatcataatgaaagagttttcttacggctgagcatggtgtctca

SEQ ID NO: 95117 - DNA, 87 bp, Artificial Sequence
  ENSG00000089682_23 (sequence is synthesized)
gaaaaaaacaaagagtgccttacctcctttatatgatattttggttgatcctcaatttgttttaggtattatacctgaagaacctta

SEQ ID NO: 95118 - DNA, 120 bp, Artificial Sequence
  ENSG00000089682_24 (sequence is synthesized)
ggtagtttcataagtcagttgacttatttaatgaatgcttcctccacaagttatcagtcttcaaaaagctatatatttttctagtgaaatattttagatcaaaatgttggtgttctcaca

SEQ ID NO: 95119 - DNA, 120 bp, Artificial Sequence
  ENSG00000089682_25 (sequence is synthesized)
gccatttaagctagcaaccattgagtatcattgaattcatagcaataaacattgattaagtgtctaatatatgttaaatattaggcatatgaattttagaagaggaacatacaagcaaag

SEQ ID NO: 95120 - DNA, 120 bp, Artificial Sequence
  ENSG00000089682_26 (sequence is synthesized)
aatgccaaacggaaatggaaataaagcgttctctagaaaagaggatgccagtcacaaatcccccagttgtttgtttatggttgctggaaaataaaaaaacaatatacagagaggaagtag

SEQ ID NO: 95121 - DNA, 120 bp, Artificial Sequence
  ENSG00000089682_27 (sequence is synthesized)
tacaaactggagtcagacctgtacagccacacttaacattctatgaccttggcaagtcacttaatctgagcctcacatttttcatctataaagtgaggataataatgctacttacctcac

SEQ ID NO: 95122 - DNA, 120 bp, Artificial Sequence
  ENSG00000089682_28 (sequence is synthesized)
tgggttgtgaagatgaactgagatattatccaggctgaagaacagaaaggaaaacaatgaataaaattgaacaagagtatagaacctgtgtgacaccattaagcattcctacatatttct

SEQ ID NO: 95123 - DNA, 120 bp, Artificial Sequence
  ENSG00000089682_29 (sequence is synthesized)
aatgggagtacaggaaaaaaggaaaagaaatgaaggagcagaaaaatattctaagaaataatggctataaatacccccgatttgatgagagacattaacctatacatcccagaagaaaaa

SEQ ID NO: 95124 - DNA, 120 bp, Artificial Sequence
  ENSG00000089682_30 (sequence is synthesized)
tcgtcactccttccttaaggctctttattaccaaggtatgtgatccccactgactttgatatattctttcactgagagaaagattaaacagcagggcattaaatatgaagagttagtgaa

SEQ ID NO: 95125 - DNA, 120 bp, Artificial Sequence
  ENSG00000089682_31 (sequence is synthesized)
gggaataggggaaagacaaattgtcactacttttgagaaatgtataataccataagagagacaaatatgtgcacagttagttgcatgacaacatggaaactgctattatagagatttgaa

SEQ ID NO: 95126 - DNA, 120 bp, Artificial Sequence
  ENSG00000089682_32 (sequence is synthesized)
ctgaggtagtgcagaacacagagcatctaagtctagttgggggagtcagaagttgacatttatactaactcctgatggatcaatgggcatttgtcaggtaaataaaggggaatggagatt

SEQ ID NO: 95127 - DNA, 120 bp, Artificial Sequence
  ENSG00000089682_33 (sequence is synthesized)
aaaggtagtaaatagcaacaggattatgaaagaacctggtgtgtctaaggaacaatgagaagtttaacgtggcaggagtagaagaagtggcagggaatgacaggaggtgacactggaagg

SEQ ID NO: 95128 - DNA, 120 bp, Artificial Sequence
  ENSG00000089682_34 (sequence is synthesized)
aaggggaggcgaagctagattgtgaagggtctttaggctgaactacaaattagcacaaaatatatagataaatagtatgtgtcttaaccagaaggatttagtttgacagataagttttac

SEQ ID NO: 95129 - DNA, 120 bp, Artificial Sequence
  ENSG00000089682_35 (sequence is synthesized)
tagacgctgtggaaggtgcatggaagtttaagaaatggttcctcaccttgtgccaagtatagtctggttggagagataaacatgtaacatttagtgacaatactagatacatttgttaag

SEQ ID NO: 95130 - DNA, 120 bp, Artificial Sequence
  ENSG00000089682_36 (sequence is synthesized)
tgttgttggagttcagaggaggcaaaggccactgtgtattggtgtgattgaagaagccctctcagaggaggtaagatttaaatgttcttttaatactacctattctttagaaaagagagg

SEQ ID NO: 95131 - DNA, 120 bp, Artificial Sequence
  ENSG00000089682_37 (sequence is synthesized)
taatgacatttcagttgcaacagatggtgtgagcactagggagtgtgctaactatggaggagatgtgagacaaggttagaaaggtagctaaaaattttgaactgtatttggtaactagta

SEQ ID NO: 95132 - DNA, 120 bp, Artificial Sequence
  ENSG00000089682_38 (sequence is synthesized)
tagacttatacagagttagttatcagttagtttcaatatggttgaaggtttttgaaccagaagtgacatgataaaagccatatttgaaaattattaatctggtggtcaataaataggatt

SEQ ID NO: 95133 - DNA, 120 bp, Artificial Sequence
  ENSG00000089682_39 (sequence is synthesized)
agcaaaactgtcttgtactaaagaactgactccagatggtaagacaaatccacaggaacaaatggagagaacgtgaaataggaaataagtttaatataaaaaaactataaacatatactt

SEQ ID NO: 95134 - DNA, 120 bp, Artificial Sequence
  ENSG00000089682_40 (sequence is synthesized)
actcttctctcagcttcttttaaagatgtaaaattatattaagtaattataataatgtgtgttgggtttgtaatgtataggaataacatatataacaataataccacaaagcgggggatg

SEQ ID NO: 95135 - DNA, 120 bp, Artificial Sequence
  ENSG00000089682_41 (sequence is synthesized)
ggtttatataggaatagggttgttacattggaattaagttagtgtttatctgaagcctattctgtttagttaagatgtgtatggtaagccctagagcaaccactgaggaaataactttta

SEQ ID NO: 95136 - DNA, 120 bp, Artificial Sequence
  ENSG00000089682_42 (sequence is synthesized)
aaaaatcaaaaatattattaaatgtaaatatcacattatgaaataatgcaaaagaaggaatggagaagcaaaaagcttgaggcatatcaaaaacaataaaatggcagtcataagtcttcc

SEQ ID NO: 95137 - DNA, 120 bp, Artificial Sequence
  ENSG00000089682_43 (sequence is synthesized)
tatatcaaaataacaatgtgcatggattaagcaatactataaaaggcagagatgtcagaaacaagtctgattccacttcatgccatctatttgagacacactttagaagatagaaagaga

SEQ ID NO: 95138 - DNA, 120 bp, Artificial Sequence
  ENSG00000089682_44 (sequence is synthesized)
ttaaaggtaaaaggatggaaaacaaatatatcacacagacaacagccataagaaagctggagtggctattctaataccagacaaaatagacttaaaaaaatgttactggagataaagagt

SEQ ID NO: 95139 - DNA, 120 bp, Artificial Sequence
  ENSG00000089682_45 (sequence is synthesized)
aaaatgttacaatgataaaagggtcaatacatcaggaagatgtaacaactataaatatatatgcatctaacagtagagcccaaaatacatgaagcaaaaactgaaaggaaaggagaaaca

SEQ ID NO: 95140 - DNA, 120 bp, Artificial Sequence
  ENSG00000089682_46 (sequence is synthesized)
gataagtccataaaaagagttggaatattcaatacccctttttcaataatagagcacctagacagaagataaaccaggaaatagaagacttgaacaacattataaggcaaattgacctaa

SEQ ID NO: 95141 - DNA, 120 bp, Artificial Sequence
  ENSG00000089682_47 (sequence is synthesized)
aagacatctatagaactttccacccaacatcagaatacatattcttctcgagtgcatatgaaacatctccaaaataggtcataagttaaagcataaaacaagccttaataaatataagta

SEQ ID NO: 95142 - DNA, 120 bp, Artificial Sequence
  ENSG00000089682_48 (sequence is synthesized)
gactgaaatcatgcaaagcatgccctctgaccacatgggatgaagttagaaaacaatgaaaagttgggaaactcacaaatatgtggaaatcagacacacttgtaagtgactggctgggtg

SEQ ID NO: 95143 - DNA, 120 bp, Artificial Sequence
  ENSG00000089682_49 (sequence is synthesized)
agtgactggctgggtgcagtagctcacgcctgaaatctcagcactttggtaggccgaagtgggaggattccttggatcccttgagaccaggaattcaagaccagcctgggcaacacagca

SEQ ID NO: 95144 - DNA, 120 bp, Artificial Sequence
  ENSG00000089685_0 (sequence is synthesized)
gcggcgcgccattaaccgccagatttgaatcgcgggacccgttggcagaggtggcggcggcggcatgggtgccccgacgttgccccctgcctggcagccctttctcaaggaccaccgcat

SEQ ID NO: 95145 - DNA, 120 bp, Artificial Sequence
  ENSG00000089685_1 (sequence is synthesized)
ctctacattcaagaactggcccttcttggagggctgcgcctgcaccccggagcggatggccgaggctggcttcatccactgccccactgagaacgagccagacttggcccagtgtttctt

SEQ ID NO: 95146 - DNA, 120 bp, Artificial Sequence
  ENSG00000089685_2 (sequence is synthesized)
ctgcttcaaggagctggaaggctgggagccagatgacgaccccatagaggaacataaaaagcattcgtccggttgcgctttcctttctgtcaagaagcagtttgaagaattaacccttgg

SEQ ID NO: 95147 - DNA, 120 bp, Artificial Sequence
  ENSG00000089685_3 (sequence is synthesized)
tgaatttttgaaactggacagagaaagagccaagaacaaaattgcaaaggaaaccaacaataagaagaaagaatttgaggaaactgcggagaaagtgcgccgtgccatcgagcagctggc

SEQ ID NO: 95148 - DNA, 120 bp, Artificial Sequence
  ENSG00000089685_4 (sequence is synthesized)
tgccatggattgaggcctctggccggagctgcctggtcccagagtggctgcaccacttccagggtttattccctggtgccaccagccttcctgtgggccccttagcaatgtcttaggaaa

SEQ ID NO: 95149 - DNA, 120 bp, Artificial Sequence
  ENSG00000089685_5 (sequence is synthesized)
ggagatcaacattttcaaattagatgtttcaactgtgctcttgttttgtcttgaaagtggcaccagaggtgcttctgcctgtgcagcgggtgctgctggtaacagtggctgcttctctct

SEQ ID NO: 95150 - DNA, 120 bp, Artificial Sequence
  ENSG00000089685_6 (sequence is synthesized)
ctctctctcttttttgggggctcatttttgctgttttgattcccgggcttaccaggtgagaagtgagggaggaagaaggcagtgtcccttttgctagagctgacagctttgttcgcgtgg

SEQ ID NO: 95151 - DNA, 120 bp, Artificial Sequence
  ENSG00000089685_7 (sequence is synthesized)
gcagagccttccacagtgaatgtgtctggacctcatgttgttgaggctgtcacagtcctgagtgtggacttggcaggtgcctgttgaatctgagctgcaggttccttatctgtcacacct

SEQ ID NO: 95152 - DNA, 120 bp, Artificial Sequence
  ENSG00000089685_8 (sequence is synthesized)
tgttgtgtttttttgtttttttttttttggtagatgcatgacttgtgtgtgatgagagaatggagacagagtccctggctcctctactgtttaacaacatggctttcttattttgtttga

SEQ ID NO: 95153 - DNA, 120 bp, Artificial Sequence
  ENSG00000089685_9 (sequence is synthesized)
aacaacatggctttcttattttgtttgaattgttaattcacagaatagcacaaactacaattaaaactaagcacaaagccattctaagtcattggggaaacggggtgaacttcaggtgga

SEQ ID NO: 95154 - DNA, 120 bp, Artificial Sequence
  ENSG00000089685_10 (sequence is synthesized)
tgctgtgtgattagacaggcccagtgagccgcggggcacatgctggccgctcctccctcagaaaaaggcagtggcctaaatcctttttaaatgacttggctcgatgctgtgggggactgg

SEQ ID NO: 95155 - DNA, 120 bp, Artificial Sequence
  ENSG00000089685_11 (sequence is synthesized)
ctgggctgctgcaggccgtgtgtctgtcagcccaaccttcacatctgtcacgttctccacacgggggagagacgcagtccgcccaggtccccgctttctttggaggcagcagctcccgca

SEQ ID NO: 95156 - DNA, 120 bp, Artificial Sequence
  ENSG00000089685_12 (sequence is synthesized)
gggctgaagtctggcgtaagatgatggatttgattcgccctcctccctgtcatagagctgcagggtggattgttacagcttcgctggaaacctctggaggtcatctcggctgttcctgag

SEQ ID NO: 95157 - DNA, 120 bp, Artificial Sequence
  ENSG00000089685_13 (sequence is synthesized)
aaataaaaagcctgtcatttcaaacactgctgtggaccctactgggtttttaaaatattgtcagtttttcatcgtcgtccctagcctgccaacagccatctgcccagacagccgcagtga

SEQ ID NO: 95158 - DNA, 120 bp, Artificial Sequence
  ENSG00000089685_14 (sequence is synthesized)
ggatgagcgtcctggcagagacgcagttgtctctgggcgcttgccagagccacgaaccccagacctgtttgtatcatccgggctccttccgggcagaaacaactgaaaatgcacttcaga

SEQ ID NO: 95159 - DNA, 120 bp, Artificial Sequence
  ENSG00000089685_15 (sequence is synthesized)
cccacttatttctgccacatctgagtcggcctgagatagacttttccctctaaactgggagaatatcacagtggtttttgttagcagaaaatgcactccagcctctgtactcatctaagc

SEQ ID NO: 95160 - DNA, 120 bp, Artificial Sequence
  ENSG00000089685_16 (sequence is synthesized)
tgcttatttttgatatttgtgtcagtctgtaaatggatacttcactttaataactgttgcttagtaattggctttgtagagaagctggaaaaaaatggttttgtcttcaactcctttgca

SEQ ID NO: 95161 - DNA, 120 bp, Artificial Sequence
  ENSG00000089685_17 (sequence is synthesized)
tgccaggcggtgatgtggatctcggcttctgtgagcctgtgctgtgggcagggctgagctggagccgcccctctcagcccgcctgccacggcctttccttaaaggccatccttaaaacca

SEQ ID NO: 95162 - DNA, 120 bp, Artificial Sequence
  ENSG00000089685_18 (sequence is synthesized)
gaccctcatggctaccagcacctgaaagcttcctcgacatctgttaataaagccgtaggcccttgtctaagtgcaaccgcctagactttctttcagatacatgtccacatgtccattttt

SEQ ID NO: 95163 - DNA, 120 bp, Artificial Sequence
  ENSG00000089685_19 (sequence is synthesized)
caggttctctaagttggagtggagtctgggaagggttgtgaatgaggcttctgggctatgggtgaggttccaatggcaggttagagcccctcgggccaactgccatcctggaaagtagag

SEQ ID NO: 95164 - DNA, 120 bp, Artificial Sequence
  ENSG00000089685_20 (sequence is synthesized)
acagcagtgcccgctgcccagaagagaccagcaagccaaactggagcccccattgcaggctgtcgccatgtggaaagagtaactcacaattgccaataaagtctcatgtggttttatcta

SEQ ID NO: 95165 - DNA, 120 bp, Artificial Sequence
  ENSG00000089685_21 (sequence is synthesized)
gaatgttggagggatttgacatgtaattcctttggacatataccatgtaacacttttccaactaattgctaaggaagtccagataaaatagatacattagccacacagatgtggggggag

SEQ ID NO: 95166 - DNA, 120 bp, Artificial Sequence
  ENSG00000089685_22 (sequence is synthesized)
atgtccacagggagagagaaggtgctaagaggtgccatatgggaatgtggcttgggcaaagcactgatgccatcaacttcagacttgacgtcttactcctgaggcagagcagggtgtgcc

SEQ ID NO: 95167 - DNA, 120 bp, Artificial Sequence
  ENSG00000089685_23 (sequence is synthesized)
tgtggagggcgtggggaggtggcccgtggggagtggactgccgctttaatcccttcagctgcctttccgctgttgttttgatttttctagagaggaacataaaaagcattcgtccggttg

SEQ ID NO: 95168 - DNA, 120 bp, Artificial Sequence
  ENSG00000089685_24 (sequence is synthesized)
gaagccagattcagggagggactggaagcaaaagaatttctgttcgaggaagagcctgatgtttgccagggtctgtttaactggacatgaagaggaaggctctggactttcctccaggag

SEQ ID NO: 95169 - DNA, 89 bp, Artificial Sequence
  ENSG00000089685_25 (sequence is synthesized)
acgagccagacttggcccagtgtttcttctgcttcaaggagctggaaggctgggagccagatgacgaccccataccagcactttgggag

SEQ ID NO: 95170 - DNA, 120 bp, Artificial Sequence
  ENSG00000089685_26 (sequence is synthesized)
gacacttagtatgggagggttgctttccaccctcattgcttcttaaacagctgttgtgaacggatacctctctatatgctggtgccttggtgatgcttacaacctaattaaatctcattt

SEQ ID NO: 95171 - DNA, 120 bp, Artificial Sequence
  ENSG00000089685_27 (sequence is synthesized)
gaccaaaatgccttggggtggacgtaagatgcctgatgcctttcatgttcaacagaatacatcagcagaccctgttgttgtgaactcccaggaacgtccaagtgctttttttgagatttt

SEQ ID NO: 95172 - DNA, 120 bp, Artificial Sequence
  ENSG00000089692_0 (sequence is synthesized)
agagaccagcagaacggcatcccagccacgacggccactttgctctgtctgctctccgccacggccctgctctgttccctgggacacccccgcccccacctcctcaggctgcctgatctg

SEQ ID NO: 95173 - DNA, 120 bp, Artificial Sequence
  ENSG00000089692_1 (sequence is synthesized)
cccagctttccagctttcctctggattccggcctctggtcatccctccccaccctctctccaaggccctctcctggtctcccttcttctagaaccccttcctccacctccctctctgcag

SEQ ID NO: 95174 - DNA, 120 bp, Artificial Sequence
  ENSG00000089692_2 (sequence is synthesized)
aacttctcctttaccccccaccccccaccactgccccctttccttttctgacctccttttggagggctcagcgctgcccagaccataggagagatgtgggaggctcagttcctgggcttg

SEQ ID NO: 95175 - DNA, 120 bp, Artificial Sequence
  ENSG00000089692_3 (sequence is synthesized)
ctgtttctgcagccgctttgggtggctccagtgaagcctctccagccaggggctgaggtcccggtggtgtgggcccaggagggggctcctgcccagctcccctgcagccccacaatcccc

SEQ ID NO: 95176 - DNA, 120 bp, Artificial Sequence
  ENSG00000089692_4 (sequence is synthesized)
ctccaggatctcagccttctgcgaagagcaggggtcacttggcagcatcagccagacagtggcccgcccgctgccgcccccggccatcccctggcccccggccctcacccggcggcgccc

SEQ ID NO: 95177 - DNA, 120 bp, Artificial Sequence
  ENSG00000089692_5 (sequence is synthesized)
cccaggccccgccgctacacggtgctgagcgtgggtcccggaggcctgcgcagcgggaggctgcccctgcagccccgcgtccagctggatgagcgcggccggcagcgcggggacttctcg

SEQ ID NO: 95178 - DNA, 120 bp, Artificial Sequence
  ENSG00000089692_6 (sequence is synthesized)
ggggacttctcgctatggctgcgcccagcccggcgcgcggacgccggcgagtaccgcgccgcggtgcacctcagggaccgcgccctctcctgccgcctccgtctgcgcctgggccaggcc

SEQ ID NO: 95179 - DNA, 120 bp, Artificial Sequence
  ENSG00000089692_7 (sequence is synthesized)
tcgatgactgccagccccccaggatctctcagagcctccgactgggtcattttgaactgctccttcagccgccctgaccgcccagcctctgtgcattggttccggaaccggggccagggc

SEQ ID NO: 95180 - DNA, 120 bp, Artificial Sequence
  ENSG00000089692_8 (sequence is synthesized)
gccccaagtcagccccatggactctgggccctggggctgcatcctcacctacagagatggcttcaacgtctccatcatgtataacctcactgttctgggtctggagcccccaactccctt

SEQ ID NO: 95181 - DNA, 120 bp, Artificial Sequence
  ENSG00000089692_9 (sequence is synthesized)
gacagtgtacgctggagcaggttccagggtggggctgccctgccgcctgcctgctggtgtggggacccggtctttcctcactgccaagtggactcctcctgggggaggccctgacctcct

SEQ ID NO: 95182 - DNA, 120 bp, Artificial Sequence
  ENSG00000089692_10 (sequence is synthesized)
ggtgactggagacaatggcgactttacccttcgactagaggatgtgagccaggcccaggctgggacctacacctgccatatccatctgcaggaacagcagctcaatgccactgtcacatt

SEQ ID NO: 95183 - DNA, 120 bp, Artificial Sequence
  ENSG00000089692_11 (sequence is synthesized)
ggcaatcatcacagtgactcccaaatcctttgggtcacctggatccctggggaagctgctttgtgaggtgactccagtatctggacaagaacgctttgtgtggagctctctggacacccc

SEQ ID NO: 95184 - DNA, 120 bp, Artificial Sequence
  ENSG00000089692_12 (sequence is synthesized)
atcccagaggagtttctcaggaccttggctggaggcacaggaggcccagctcctttcccagccttggcaatgccagctgtaccagggggagaggcttcttggagcagcagtgtacttcac

SEQ ID NO: 95185 - DNA, 120 bp, Artificial Sequence
  ENSG00000089692_13 (sequence is synthesized)
agagctgtctagcccaggtgcccaacgctctgggagagccccaggtgccctcccagcaggccacctcctgctgtttctcatccttggtgtcctttctctgctccttttggtgactggagc

SEQ ID NO: 95186 - DNA, 120 bp, Artificial Sequence
  ENSG00000089692_14 (sequence is synthesized)
ctttggctttcacctttggagaagacagtggcgaccaagacgattttctgccttagagcaagggattcaccctccgcaggctcagagcaagatagaggagctggagcaagaaccggagcc

SEQ ID NO: 95187 - DNA, 120 bp, Artificial Sequence
  ENSG00000089692_15 (sequence is synthesized)
ggagccggagccggaaccggagcccgagcccgagcccgagccggagcagctctgacctggagctgaggcagccagcagatctcagcagcccagtccaaataaactccctgtcagcagcaa

SEQ ID NO: 95188 - DNA, 120 bp, Artificial Sequence
  ENSG00000089692_16 (sequence is synthesized)
gcagggcaaagactaggcaaacccaccctgtgatgccaggccactgggcacaagttccagagcctgcccatctcggcccccacttttctcacccccataataaagaaacgaaactgaaaa

SEQ ID NO: 95189 - DNA, 120 bp, Artificial Sequence
  ENSG00000089692_17 (sequence is synthesized)
gaggtccttagctctgtggattcttctaatcccttttttgggcagtccttccaccccgaaagcctctctgggcagagaagaaacagaaacccaagttcttcctgcaccctgtttctccct

SEQ ID NO: 95190 - DNA, 120 bp, Artificial Sequence
  ENSG00000089692_18 (sequence is synthesized)
cagagtgctgatggcaccccttcctcaggaaggtgaccaaatgggaccctgaacttgccctcagagccccccttcttcataagcctctcactccagggatggcttgtgcctgggtaggct

SEQ ID NO: 95191 - DNA, 120 bp, Artificial Sequence
  ENSG00000089692_19 (sequence is synthesized)
ggaaggggggttgggagaaagccaggaccagatggggagggcaggggcgctgagaaaaaatagagggactcagtgtccctcctcatccgcttcccttcatccttctcctccttccgccct

SEQ ID NO: 95192 - DNA, 120 bp, Artificial Sequence
  ENSG00000089692_20 (sequence is synthesized)
accagggggagaggcttcttggagcagcagtgtacttcacagagctgtctagcccaggtccgaggccccagaatgccaggacccaaacgccacagcaataatctttatcctccttccaga

SEQ ID NO: 95193 - DNA, 120 bp, Artificial Sequence
  ENSG00000089692_21 (sequence is synthesized)
acagcccctgccacccccatcccagcgcttttctttccagtcagggacctgatctctggcttttgcctagggttgacccgtttccgccactgatcagctgaatgaccctgggacaagtcc

SEQ ID NO: 95194 - DNA, 120 bp, Artificial Sequence
  ENSG00000089693_0 (sequence is synthesized)
aaagctccccccagggatccgccccgcctcgtcgcccacagagcgcccgcctctccccaaggggcatctgcccctcgtcctccagtttccccttgaggagggagagagaacgtgctgcac

SEQ ID NO: 95195 - DNA, 120 bp, Artificial Sequence
  ENSG00000089693_1 (sequence is synthesized)
tgcgcccccaggttcaacctccaacccggtccctcccgaagaatggattcctcttctccttctcctcccctgccttatgggagcctcttccagtccacagaacccaaatcgaggttacta

SEQ ID NO: 95196 - DNA, 120 bp, Artificial Sequence
  ENSG00000089693_2 (sequence is synthesized)
atgagctccccttcttcgtgcccaggggacccctctcggcctcaggctctgctcccctgagcttggcccatggccccggcgcccctgggactcggccccagccatctcaccacccgcgcc

SEQ ID NO: 95197 - DNA, 120 bp, Artificial Sequence
  ENSG00000089693_3 (sequence is synthesized)
cgccagggggcggggctcccacggcccggccccgggtgggcgggtctatcgtgacgtcacttccgcccgggcctggccgaggttcgggctccgttggccgagggggccgtacggaggtgg

SEQ ID NO: 95198 - DNA, 120 bp, Artificial Sequence
  ENSG00000089693_4 (sequence is synthesized)
tgtgggaggaggcggcgtggaaggccgaggagctcaagcccggaccaatccccacgttccgggccgcgaccctgaccctgcagcgtaccgggaagcgaaaccggccggatgggccgctga

SEQ ID NO: 95199 - DNA, 120 bp, Artificial Sequence
  ENSG00000089693_5 (sequence is synthesized)
gcccgaatcgggcactgtgtggagccccctggagctgagatcaggatgttccgcttcatgagggacgtggagcctgaggatcccatgttcctgatggatccctttgctattcaccgtcag

SEQ ID NO: 95200 - DNA, 120 bp, Artificial Sequence
  ENSG00000089693_6 (sequence is synthesized)
catatgagccgtatgttgtcaggtggctttggatatagccccttcctcagcatcacagatggcaacatgccagggaccaggcctgccagccgccggatgcagcaggctggagctgtctcc

SEQ ID NO: 95201 - DNA, 120 bp, Artificial Sequence
  ENSG00000089693_7 (sequence is synthesized)
ccctttgggatgctgggaatgtcgggtggtttcatggacatgtttgggatgatgaatgacatgattggaaacatggaacacatgacagctggaggcaattgccagaccttctcatcttcc

SEQ ID NO: 95202 - DNA, 120 bp, Artificial Sequence
  ENSG00000089693_8 (sequence is synthesized)
aagagacatcagagatgcgctcggcaccaggcgggatccgggagacacggaggactgttcgggattcagacagtggactggagcagatgtccattgggcatcacatccgggacagggctc

SEQ ID NO: 95203 - DNA, 120 bp, Artificial Sequence
  ENSG00000089693_9 (sequence is synthesized)
acatcctccagcgctcccgaaaccatcgcacgggggaccaggaggagcggcaggactatatcaacctggatgagagtgaggccgcagcgtttgatgacgagtggcggcgggagacctccc

SEQ ID NO: 95204 - DNA, 120 bp, Artificial Sequence
  ENSG00000089693_10 (sequence is synthesized)
gattccggcagcagcgtcccctggagtttcggcggcttgagtcctcaggggctgggggacgaagggcggaggggcctccccgcctggccatccagggacctgaggactccccttcccgac

SEQ ID NO: 95205 - DNA, 120 bp, Artificial Sequence
  ENSG00000089693_11 (sequence is synthesized)
agtcccgccgctatgactggtgagggccccgggccctcagcctctcttgtacaggctgagaggctgagaaatcatcccctgaataactttttcctctcgattcccatccccaatttaata

SEQ ID NO: 95206 - DNA, 120 bp, Artificial Sequence
  ENSG00000089693_12 (sequence is synthesized)
ttaaattaacaggcaagccggcccccacctctccctgggggtctcagggagaacctttcacggcaccctttccctaccttttccttctttaatctcctggtttaccattgatgacttcgc

SEQ ID NO: 95207 - DNA, 120 bp, Artificial Sequence
  ENSG00000089693_13 (sequence is synthesized)
ctctgcatctactgacttgatttttcattctgccactccatcttcaaaccccctcacctttcccatcctactcctgccatgcattgaagggtcaatgcattttggggtgagctctgggtt

SEQ ID NO: 95208 - DNA, 120 bp, Artificial Sequence
  ENSG00000089693_14 (sequence is synthesized)
taggggccccctccatccctcagctaccctggatctttgcccacctcttcctcagagcccccactgaggggccgtagccctatctagggctgtggaaggagcagactggttcctaactct

SEQ ID NO: 95209 - DNA, 120 bp, Artificial Sequence
  ENSG00000089693_15 (sequence is synthesized)
ctccctcctcctgcccacacacatcaaaagaatcttccctacacccttctctgcctttattttttgatttgtgcaacttgtaactaggtgtttatggaataaaggagaatggaaaaaaga

SEQ ID NO: 95210 - DNA, 120 bp, Artificial Sequence
  ENSG00000089693_16 (sequence is synthesized)
gcgaacggatggggccggggaagggagctgatgagggcgaggacagctcgacgcaatgccatgcaatgcccagcctcggctttttcgaaggctagtcctgccccgcttctaatttttagg

SEQ ID NO: 95211 - DNA, 120 bp, Artificial Sequence
  ENSG00000089693_17 (sequence is synthesized)
aattcgagattctttcagtgtgtatgcgggaaggggacgatgaagagaaaagaaagctgaaagccagctgaggggagggaacgagaaaacagaggcggccgccgtccggggagagaagcg

SEQ ID NO: 95212 - DNA, 120 bp, Artificial Sequence
  ENSG00000089693_18 (sequence is synthesized)
caatacgggtgatggtgcccccaaggtctaccaagagacatcagagatgcgctcggcaccaggcggggtgagttggggagccctcctgtcccagagaagatccgggagacacggaggact

SEQ ID NO: 95213 - DNA, 120 bp, Artificial Sequence
  ENSG00000089693_19 (sequence is synthesized)
gcaaaatttgttcttttgaggagggaagtgcattcacaggaggagaaatatgagtattctggttattttaacagaatgagaaagagaacttgctagatgtgaaggaagaagagaaaggaa

SEQ ID NO: 95214 - DNA, 120 bp, Artificial Sequence
  ENSG00000089693_20 (sequence is synthesized)
atgtgcagccatgtgggttgtgggttcctaaacaggatcaactctgaacactgactttgctttcctgactctgttttccatctctttcctccagtcgggtggtttcatggacatgtttgg

SEQ ID NO: 95215 - DNA, 120 bp, Artificial Sequence
  ENSG00000089693_21 (sequence is synthesized)
gccccatacccttccccggccttgctctcagtgatggctgacaacaccttgcatcctctaaggcaagagggaaacagtatgctagtgaagggtaaagtactggataaagtaattgaacca

SEQ ID NO: 95216 - DNA, 120 bp, Artificial Sequence
  ENSG00000089693_22 (sequence is synthesized)
gagagccttgggaccctgtacctgctgtcatgcctgcctgaagcagccggcagcagctctcttacgtagcatacaattaaggccctgtctcttcaggtccttcttgctcgtggttggact

SEQ ID NO: 95217 - DNA, 120 bp, Artificial Sequence
  ENSG00000089693_23 (sequence is synthesized)
cagaggaatttgggagggtaatgatgaggcctgatgttttttcagttcttgcattttgtgagaaagatacaggctagaacaggcagctgaagggtgaaatcccttcaccaggggtgatgc

SEQ ID NO: 95218 - DNA, 120 bp, Artificial Sequence
  ENSG00000089693_24 (sequence is synthesized)
catctagaacggtgtcgtcggcgggaggaggggagagtatgctaccggccagagctttgggaagaggatggctctgagtgggggagggaaaaaccgagagggttggaaaaattttccatg

SEQ ID NO: 95219 - DNA, 120 bp, Artificial Sequence
  ENSG00000089693_25 (sequence is synthesized)
gccctaattgagaaagaggtttgaagagcccttccctccctagagggttgtgtggaacacctggagtagggtctccctggagtttagggggtcagttacaggatttggaaaggacagtgc

SEQ ID NO: 95220 - DNA, 120 bp, Artificial Sequence
  ENSG00000089693_26 (sequence is synthesized)
atgggccgctgagcccgaatcgggcactgtgtggagccccctggagctgagatcaggatgttccgcttcatgagggacgtggagcctgaggatcccatgttcctgatgtgagtattccct

SEQ ID NO: 95221 - DNA, 120 bp, Artificial Sequence
  ENSG00000089693_27 (sequence is synthesized)
ccccctcaagctctcccactccaggtctctgagcagttcaggcagacatcggggttcccattgctaggaatggttggaactggctggatacctagctcctacctagcaggaagtaggcat

SEQ ID NO: 95222 - DNA, 120 bp, Artificial Sequence
  ENSG00000089723_0 (sequence is synthesized)
agggcgtgtgtcttgctgggacacagtggaggtctaacctttggtttgcggagcggtcgggtgtattctccgccgcccccacgccctcgaggtccccgccaccgaaccagcggcggagcc

SEQ ID NO: 95223 - DNA, 120 bp, Artificial Sequence
  ENSG00000089723_1 (sequence is synthesized)
cgcccgcgcctcccgcggcattcccgcaccggatcgctcctcgctggggcgggacctggcctggcggctctggtcactatgagtgaaacatctttcaacctaatatcagaaaaatgtgac

SEQ ID NO: 95224 - DNA, 120 bp, Artificial Sequence
  ENSG00000089723_2 (sequence is synthesized)
attctatccattcttcgggaccatcctgaaaacaggatttaccggaggaaaatcgaggaactcagcaaaaggttcaccgccatccgcaagaccaaaggggatgggaactgcttctacagg

SEQ ID NO: 95225 - DNA, 120 bp, Artificial Sequence
  ENSG00000089723_3 (sequence is synthesized)
gccttgggctattcctacctggagtccctgctggggaagagcagggagatcttcaagttcaaagaacgcgtactgcagaccccaaatgaccttctggctgctggctttgaggagcacaag

SEQ ID NO: 95226 - DNA, 120 bp, Artificial Sequence
  ENSG00000089723_4 (sequence is synthesized)
ttcagaaacttcttcaatgctttttacagtgtggtggaactggtagagaaggatggctcagtgtccagcctgctgaaggtgttcaacgaccagagtgcctcggaccacatcgtgcagttc

SEQ ID NO: 95227 - DNA, 120 bp, Artificial Sequence
  ENSG00000089723_5 (sequence is synthesized)
ctgcgcctgctcacgtcggccttcatcaggaaccgagcagacttcttccggcacttcattgatgaggagatggacatcaaagacttctgcactcacgaagtagagcccatggccacggag

SEQ ID NO: 95228 - DNA, 120 bp, Artificial Sequence
  ENSG00000089723_6 (sequence is synthesized)
tgtgaccacatccagatcacggcgttgtcgcaggccctgagcattgccctgcaagtggagtacgtggacgagatggataccgccctgaaccaccacgtgttccctgaggccgccacccct

SEQ ID NO: 95229 - DNA, 120 bp, Artificial Sequence
  ENSG00000089723_7 (sequence is synthesized)
tccgtttacctgctctataaaacatcccactacaacatcctttatgcagccgataaacattgattaattttaggccatgcagtggaacctgtcacctaatgggactgcattctgaatgga

SEQ ID NO: 95230 - DNA, 120 bp, Artificial Sequence
  ENSG00000089723_8 (sequence is synthesized)
acattccggctcttcaattttttaagcaatttagactgtagcaagaaaatgtgcagccttttgggcaaagcccctgggaacgaggcctatccactatggactatggtaacttggtaggat

SEQ ID NO: 95231 - DNA, 120 bp, Artificial Sequence
  ENSG00000089723_9 (sequence is synthesized)
ttttagtatttattttaatggagggacaaatgctttctaactgggcccccgactccgcaccccagttcgcagtgaggccctgggtgggtcacctgccctctctggacttgtttcttcaac

SEQ ID NO: 95232 - DNA, 120 bp, Artificial Sequence
  ENSG00000089723_10 (sequence is synthesized)
tggaggaggtccctgcctatgctgacattccattgtagaaaaatggggcctctggtgtctctttaccaggggcagtgcctctctgcgggggaggaaaagctcaaggttagctgtcttaac

SEQ ID NO: 95233 - DNA, 120 bp, Artificial Sequence
  ENSG00000089723_11 (sequence is synthesized)
ccaagtgacttaccaggcctacaaaagagtccagtccagtcacttgttggactgggctctgacagatggcctattgaggtcaacttgaatgtgagggctacggtgtggtttcaaacattc

SEQ ID NO: 95234 - DNA, 120 bp, Artificial Sequence
  ENSG00000089723_12 (sequence is synthesized)
atgatggatgtattttcctacccctaacttaaggagaaaaaaaaaaagacttcctttttttgccaaagtccagaaaggggcctttagcctttagtaggagctcaaattgttggggcccct

SEQ ID NO: 95235 - DNA, 120 bp, Artificial Sequence
  ENSG00000089723_13 (sequence is synthesized)
ctacctctctcagggctagaactgcctgactcttggtggacgagcccttcagggttctgctttcagccccacctggacagaggcttacaagactagggtctggaccagaatctgtgtatt

SEQ ID NO: 95236 - DNA, 120 bp, Artificial Sequence
  ENSG00000089723_14 (sequence is synthesized)
tctgtctgggaccaggaagccgcagctgtcccatcatccccagcaaatcctagaagtggagtctggatacttcaaggatagaagtgttggcacgcacagccatggacccagctgagcaga

SEQ ID NO: 95237 - DNA, 120 bp, Artificial Sequence
  ENSG00000089723_15 (sequence is synthesized)
gcagacgctttgcaggctgcccctggcttcttcctccctttcccgcttctgctctctttatggactggtcagagggtaggtgggaaagaacagacaagccatgggaagttggcagtgggg

SEQ ID NO: 95238 - DNA, 120 bp, Artificial Sequence
  ENSG00000089723_16 (sequence is synthesized)
cttaaataagcccctcaccttgctgcctcaggaccttcaagattccatctgtgggctggccggcaagatggcaccagtggggacccacaccctggctgggcagaggtgctgctagcaacc

SEQ ID NO: 95239 - DNA, 120 bp, Artificial Sequence
  ENSG00000089723_17 (sequence is synthesized)
tctcttcctctataagaggaaatggaaaatgcagggtgtggaattgccctttggggtccttccttaattgaaggccaccttctcacaggtttcattctgcagggatttactggaatctat

SEQ ID NO: 95240 - DNA, 120 bp, Artificial Sequence
  ENSG00000089723_18 (sequence is synthesized)
tggtgctgctgcatgagtctgctgacaacctgactgcacaaggactgggtagcagactcctcagagtcctcttgacacaaatgtcagatttgtgtcactcttctgccttcgtgaaaagcc

SEQ ID NO: 95241 - DNA, 120 bp, Artificial Sequence
  ENSG00000089723_19 (sequence is synthesized)
aatagcactctcagatatcaggggattttagttccaagcagggaccctggtttccatactgccctcagctggagtttggatccaaaggctctggctaagtcattatgtcactttttcaca

SEQ ID NO: 95242 - DNA, 120 bp, Artificial Sequence
  ENSG00000089723_20 (sequence is synthesized)
ggaatgtaaatttgactgtcacctctgaatttgttcagtgtcccaccatggtctatgagaagtacactggaagcgtggggggaacacatgacatgatttgtgaatatcatcatctttgcc

SEQ ID NO: 95243 - DNA, 120 bp, Artificial Sequence
  ENSG00000089723_21 (sequence is synthesized)
agacaagtctccaggggatccctgtttcccaactgaaaggtgtgaacggacacacacacagcctggatgacgccttggctgttctaaggggctgtaaggtgggctctgggccttccagct

SEQ ID NO: 95244 - DNA, 120 bp, Artificial Sequence
  ENSG00000089723_22 (sequence is synthesized)
aggctctcaagcacagcagaagcctcactgggctgctatgtctctgtatttgtggcttgtgtggtagcctcagaagcagagctgtttggcagactggctggagaaattccctctaggaga

SEQ ID NO: 95245 - DNA, 120 bp, Artificial Sequence
  ENSG00000089723_23 (sequence is synthesized)
cttgcctgtgctgtgcttccaggtcacagagccccccggaaactcacaggggccctcttcccagaaaagaatctattctatcacttcagaatcaggacactcaagctctggcagaggaag

SEQ ID NO: 95246 - DNA, 120 bp, Artificial Sequence
  ENSG00000089723_24 (sequence is synthesized)
gccaagttactttcatggtcttaccctctgcttttcccctttttgcaaaaaaccactggccaaatccgaaccattgcccttgtttcccccacgttctctctcagatctttgtctcgaagg

SEQ ID NO: 95247 - DNA, 120 bp, Artificial Sequence
  ENSG00000089723_25 (sequence is synthesized)
gaaaacatagtggatgaaaaggtgtggcaggctttggcaccttgttaaaatttctagtcatctgtggatgttaccttgcttgtccacagcagccagtcaccctggccagtcccacttcct

SEQ ID NO: 95248 - DNA, 120 bp, Artificial Sequence
  ENSG00000089723_26 (sequence is synthesized)
ggataattctctaccctcaccccacagagccatctctctccagaccaaaagctggaaggagagttgctttgagagcttgtttttacaactgcatgtttattatgatactttctctccaaa

SEQ ID NO: 95249 - DNA, 120 bp, Artificial Sequence
  ENSG00000089723_27 (sequence is synthesized)
ggaaacttttaaatcaatgggaacaattagcaacagaaagagcacagtccctgcttttgactgggttcctattttaagcacaaatgagagctctggagccagaatgccagggttctaact

SEQ ID NO: 95250 - DNA, 120 bp, Artificial Sequence
  ENSG00000089723_28 (sequence is synthesized)
tcagcattcacttactagctgtatgatcttggccaagtcacttcacctccctgagccccaattcccaagtttgtgaaatggcaacaatacctatgtgtcactggattattggttaaaaca

SEQ ID NO: 95251 - DNA, 120 bp, Artificial Sequence
  ENSG00000089723_29 (sequence is synthesized)
gaatgagattccttgtgtgaaaatagctattatacctgacacactcatcgtatgggctctgcaaagggatattccccaacctgtccttcctgacaggaagcatagggcactgcagatggg

SEQ ID NO: 95252 - DNA, 120 bp, Artificial Sequence
  ENSG00000089723_30 (sequence is synthesized)
gaagcatgtcaccttggcagtgactcggtggcttcccaagcaggagtgtcaggggaaccatgagagagagtctaggagcaaacacatcaccaccctgagcagatacaggagtggggaggg

SEQ ID NO: 95253 - DNA, 120 bp, Artificial Sequence
  ENSG00000089723_31 (sequence is synthesized)
ggctgtaactcagtgagtggcttccaggggccccaggccctgctggatgtgggccaagccctacagcttccctaggcagtaagtaaaaacattctcctagcattaaaatggtttccataa

SEQ ID NO: 95254 - DNA, 120 bp, Artificial Sequence
  ENSG00000089723_32 (sequence is synthesized)
cctgctggggaagagcagggagatcttcaagtgagtgccggggccccttggcctgtcagggctgtgttctctgtgctaggtcagcctcaagtctctcggaggttttcgttacactcaggc

SEQ ID NO: 95255 - DNA, 120 bp, Artificial Sequence
  ENSG00000089723_33 (sequence is synthesized)
tggttaacccagagaatgagctgaagagctgcctggcagaggcgtttgatgttgggggtgcccagctgcctgctgtggtgaagttgggggcagccaaggggtggaggatggaatctgtga

SEQ ID NO: 95256 - DNA, 120 bp, Artificial Sequence
  ENSG00000089723_34 (sequence is synthesized)
cctcccagatgctttccagcctctgcttccaccacaggcctgggtcagcccaggtgagtcgcagggagcaggtacttcgtgacccactctgaaaagaaaagaaaagacaaacaaaaagaa

SEQ ID NO: 95257 - DNA, 120 bp, Artificial Sequence
  ENSG00000089737_0 (sequence is synthesized)
agttgctgctgcagctgaggtacagcggcggtttctgaggttcttcactcgcgactgacggagctgcggtggcgtctccacacgcaaccatgaagttgaaggacacaaaatcaaggccaa

SEQ ID NO: 95258 - DNA, 120 bp, Artificial Sequence
  ENSG00000089737_1 (sequence is synthesized)
agcagtcaagctgtggcaaatttcagacaaagggaatcaaagttgtgggaaaatggaaggaagtgaagattgacccaaatatgtttgcagatggacagatggatgacttggtgtgctttg

SEQ ID NO: 95259 - DNA, 120 bp, Artificial Sequence
  ENSG00000089737_2 (sequence is synthesized)
aggaattgacagattaccagttggtctcccctgccaagaatccctccagtctcttctcaaaggaagcacccaagagaaaggcacaagctgtttcagaagaagaggaggaggaggagggaa

SEQ ID NO: 95260 - DNA, 120 bp, Artificial Sequence
  ENSG00000089737_3 (sequence is synthesized)
agtctagctcaccaaagaaaaagatcaagttgaagaaaagtaaaaatgtagcaactgaaggaaccagtacccagaaagaatttgaagtgaaagatcctgagctggaggcccagggagatg

SEQ ID NO: 95261 - DNA, 120 bp, Artificial Sequence
  ENSG00000089737_4 (sequence is synthesized)
acatggtttgtgatgatccggaggctggggagatgacatcagaaaacctggtccaaactgctccaaaaaagaagaaaaataaagggaaaaaagggttggagccttctcagagcactgctg

SEQ ID NO: 95262 - DNA, 120 bp, Artificial Sequence
  ENSG00000089737_5 (sequence is synthesized)
ccaaggtgcccaaaaaagcgaagacatggattcctgaagttcatgatcagaaagcagatgtgtcagcttggaaggacctgtttgttcccaggccggttctccgagcactcagctttctag

SEQ ID NO: 95263 - DNA, 120 bp, Artificial Sequence
  ENSG00000089737_6 (sequence is synthesized)
gcttctctgcacccacaccaatccaagccctgaccttggcacctgccatccgtgacaaactggacatccttggggctgctgagacaggaagtgggaaaactcttgcctttgccatcccaa

SEQ ID NO: 95264 - DNA, 120 bp, Artificial Sequence
  ENSG00000089737_7 (sequence is synthesized)
tgattcatgcggtgttgcagtggcagaagaggaatgctgcccctcctccaagtaacaccgaagcaccacctggagagaccagaactgaggccggagctgagactagatcaccaggcaagg

SEQ ID NO: 95265 - DNA, 120 bp, Artificial Sequence
  ENSG00000089737_8 (sequence is synthesized)
ctgaagctgagtctgatgcattgcctgacgatactgtaattgagagtgaagcactgcccagtgatattgcagccgaggccagagccaagactggaggcactgtctcagaccaggcgttgc

SEQ ID NO: 95266 - DNA, 120 bp, Artificial Sequence
  ENSG00000089737_9 (sequence is synthesized)
tctttggtgacgatgatgctggtgaagggccttcttccctgatcagggagaaacctgttcccaaacagaatgagaatgaggaggaaaatcttgataaagagcagactggaaatctaaaac

SEQ ID NO: 95267 - DNA, 120 bp, Artificial Sequence
  ENSG00000089737_10 (sequence is synthesized)
aggagttggatgacaaaagcgccacctgtaaggcatatccaaagcgtcctctgcttggactggttctgactcccactcgagagctggccgtccaggtcaaacagcacattgatgctgtgg

SEQ ID NO: 95268 - DNA, 120 bp, Artificial Sequence
  ENSG00000089737_11 (sequence is synthesized)
ccaggtttacaggaattaaaactgctattttggttggtggaatgtccacgcagaaacagcagaggatgctgaaccgtcgtcctgagattgtggttgctactccaggccggctgtgggaat

SEQ ID NO: 95269 - DNA, 120 bp, Artificial Sequence
  ENSG00000089737_12 (sequence is synthesized)
taattaaagaaaagcattatcatttgaggaaccttcggcagctcaggtgcctggtagtggatgaggctgaccggatggttgagaaaggccattttgctgagctctcacagctgctagaga

SEQ ID NO: 95270 - DNA, 120 bp, Artificial Sequence
  ENSG00000089737_13 (sequence is synthesized)
tgctcaatgactcccaatacaacccaaagagacaaacgcttgttttttctgccacactcaccctggtgcatcaggctcctgctcgaatccttcataagaagcacaccaagaaaatggata

SEQ ID NO: 95271 - DNA, 120 bp, Artificial Sequence
  ENSG00000089737_14 (sequence is synthesized)
aaacagccaaacttgacctccttatgcagaaaattggcatgaggggcaagcccaaggtcattgacctcacaaggaatgaggccacggtggagacgctaacagagaccaagatccattgtg

SEQ ID NO: 95272 - DNA, 120 bp, Artificial Sequence
  ENSG00000089737_15 (sequence is synthesized)
agactgatgagaaagacttctacttgtactacttcctgatgcagtatccaggccgcagcttagtgtttgccaacagtatctcctgcatcaaacgcctctctgggctcctcaaagtccttg

SEQ ID NO: 95273 - DNA, 120 bp, Artificial Sequence
  ENSG00000089737_16 (sequence is synthesized)
atatcatgcccttgaccctgcatgcctgtatgcaccagaagcagaggctcagaaacctggagcagtttgcccgtctggaagactgtgttctcttggcaacagatgtggcagctcggggtc

SEQ ID NO: 95274 - DNA, 120 bp, Artificial Sequence
  ENSG00000089737_17 (sequence is synthesized)
tggatattcctaaagtccagcatgtcatccattaccaggtcccacgtacctcggagatttatgtccaccgaagtggtcgaactgctcgagctaccaatgaaggcctcagtctgatgctca

SEQ ID NO: 95275 - DNA, 120 bp, Artificial Sequence
  ENSG00000089737_18 (sequence is synthesized)
ttgggcctgaggatgtgatcaactttaagaagatttacaaaacgctcaagaaagatgaggatatcccactgttccccgtgcagacaaaatacatggatgtggtcaaggagcgaatccgtt

SEQ ID NO: 95276 - DNA, 120 bp, Artificial Sequence
  ENSG00000089737_19 (sequence is synthesized)
tagctcgacagattgagaaatctgagtatcggaacttccaggcttgcctgcacaactcttggattgagcaggcagcagctgccctggagattgagctggaagaagacatgtataagggag

SEQ ID NO: 95277 - DNA, 120 bp, Artificial Sequence
  ENSG00000089737_20 (sequence is synthesized)
gaaaagctgaccagcaagaagaacgtcggagacaaaagcagatgaaggttctgaagaaggagctgcgccacctgctgtcccagccactgtttacggagagccagaaaaccaagtatccca

SEQ ID NO: 95278 - DNA, 120 bp, Artificial Sequence
  ENSG00000089737_21 (sequence is synthesized)
ctcagtctggcaagccgcccctgcttgtgtctgccccaagtaagagcgagtctgctttgagctgtctctccaagcagaagaagaagaagacaaagaagccgaaggagccacagccggaac

SEQ ID NO: 95279 - DNA, 120 bp, Artificial Sequence
  ENSG00000089737_22 (sequence is synthesized)
agccacagccaagtacaagtgcaaattaactggtcaagtgtgtcagtgactgcacattggtttctgttctctggctatttgcaaaacctctcccacccttgtgtttcactccaccaccaa

SEQ ID NO: 95280 - DNA, 120 bp, Artificial Sequence
  ENSG00000089737_23 (sequence is synthesized)
ctcatgcagatttgcattgttttggagtaagaattcaatgcagcagcttaatttttctgtattgcagtgtttataggcttcttgtgtgttaaacttgatttcataaattaaaaacaatgg

SEQ ID NO: 95281 - DNA, 120 bp, Artificial Sequence
  ENSG00000089737_24 (sequence is synthesized)
tcagagccattgtgtcatcctgattttttttttttttttttagatagaagatgggggtggtggtgtagtttgtttcattattaacttagtgattctcctgggccagcacagtgctaagcc

SEQ ID NO: 95282 - DNA, 120 bp, Artificial Sequence
  ENSG00000089737_25 (sequence is synthesized)
cttgaaaggacaggaatagtgtcaggcctctggctgcaggccaagattggacagtgtgaatggagcaagaggctggaatgttcaagaggtgcatgttcctgctttacccagagcagcacc

SEQ ID NO: 95283 - DNA, 120 bp, Artificial Sequence
  ENSG00000089737_26 (sequence is synthesized)
ctaatagctccttagctctctccactctcctgggtattgtctgagccaccgtgggaggtgggcagggatgaggttgctgtcttcaggcttccctcacatcacagagccaacagtaacagt

SEQ ID NO: 95284 - DNA, 120 bp, Artificial Sequence
  ENSG00000089737_27 (sequence is synthesized)
cgctaggtctggcgtgtgaagccctcaggatctagccccagccttgtctccactccctcctgtttgacagagcaggctcctgcccacggttccatgcaccccttctcttgtcctgagcct

SEQ ID NO: 95285 - DNA, 120 bp, Artificial Sequence
  ENSG00000089737_28 (sequence is synthesized)
ttgtgcagaataggcttttccctcggtctggattgccttttggccttctccatcctggagcactgccatgggtcctctagtcctgagcctctaaggggaagcagtgcttctcctggggct

SEQ ID NO: 95286 - DNA, 120 bp, Artificial Sequence
  ENSG00000089737_29 (sequence is synthesized)
cccttagtgtcccgtgcttaccctcttcatagcacttgccatgctgtgttcccttagctgagctccttgggagaagaggaactcaaggcttggtcagcctggtataaatatgtgctcagg

SEQ ID NO: 95287 - DNA, 120 bp, Artificial Sequence
  ENSG00000089737_30 (sequence is synthesized)
gaactagggacttcctgatgctgccccagctttgtctggatcagtgtaggtgagtatccacaactcccacaaccatgggagaagcatagatgatttctgcacagctgtctggcttccaaa

SEQ ID NO: 95288 - DNA, 120 bp, Artificial Sequence
  ENSG00000089737_31 (sequence is synthesized)
caggtattcgtcggggcacaatacaatacagctgtttagttcaaggggtgctagggaattgaagaggatacacaaagggaccaagataccccaagatctaagtagctagcctctctcagc

SEQ ID NO: 95289 - DNA, 120 bp, Artificial Sequence
  ENSG00000089737_32 (sequence is synthesized)
ctcatggttggcacttttatctaattagcatttagtcttgaaggtcctgagaaataattttcttttttttttgagacagggtcttgctccattgcccaggttggagtgcaatggcacaat

SEQ ID NO: 95290 - DNA, 66 bp, Artificial Sequence
  ENSG00000089737_33 (sequence is synthesized)
tgcccaggttggagtgcaatggcacaatcacagctcactgcaacctcacactcctgggcccaggca

SEQ ID NO: 95291 - DNA, 120 bp, Artificial Sequence
  ENSG00000089737_34 (sequence is synthesized)
gtctttattagtgttttttgtacttgagcatatagacacccagtgattgagacttgcccagggccacacagcagccaagtagcagaggtgggattagtatcttccttctgggcccaggac

SEQ ID NO: 95292 - DNA, 120 bp, Artificial Sequence
  ENSG00000089737_35 (sequence is synthesized)
aagttcagaaaactacttcagtctcagaagtgttgccaaggaatggcctcccatcccccagtgtcaccagtgaccggaataggaggggaaattgcccgtctgtgaggtcagctcctgact

SEQ ID NO: 95293 - DNA, 120 bp, Artificial Sequence
  ENSG00000089737_36 (sequence is synthesized)
gacagctatcagagaatggcagggagactctccattttccaaatgatgcagtggtggtcagtggggttagtaagcgggcttaatatcccctaatggcacctgagccgtgggagtgaagcc

SEQ ID NO: 95294 - DNA, 120 bp, Artificial Sequence
  ENSG00000089737_37 (sequence is synthesized)
acttgccataagccaaacatagatcccctgatgactgtccgtgtcctgccctagccatctaacagcaaattcttttccttggtggaggagctaatacgtagacaggctttaaaaggcagg

SEQ ID NO: 95295 - DNA, 120 bp, Artificial Sequence
  ENSG00000089737_38 (sequence is synthesized)
agcagccttccaagcagtgctactctcgcctggtaaggtgaagttggtgggcagagcttccggagtgtcctggatctgccattaaacaaggaatatccctccccagctaatctacttaat

SEQ ID NO: 95296 - DNA, 120 bp, Artificial Sequence
  ENSG00000089737_39 (sequence is synthesized)
acataagcaccacggaaaagcagagttcttggctgcatgccaggtacccagtattaagaagccaggacaaaagtagttatggaaaccattttaatgctaggagaatgtttttacttactg

SEQ ID NO: 95297 - DNA, 120 bp, Artificial Sequence
  ENSG00000089737_40 (sequence is synthesized)
cctagggaagctgtagggcttggcccacatccagcagggcctggggcccctggaagccactcactgagttacagccccctccccactcctgtatctgctcagggtggtgatgtgtttgct

SEQ ID NO: 95298 - DNA, 120 bp, Artificial Sequence
  ENSG00000089737_41 (sequence is synthesized)
cctagactctctctcatggttcccctgacactcctgcttgggaagccaccgagtcactgccaaggtgacatgcttccccatctgcagtgccctatgcttcctgtcaggaaggacaggttg

SEQ ID NO: 95299 - DNA, 120 bp, Artificial Sequence
  ENSG00000089737_42 (sequence is synthesized)
gggaatatccctttgcagagcccatacgatgagtgtgtcaggtataatagctattttcacacaaggaatctcattctgttttaaccaataatccagtgacacataggtattgttgccatt

SEQ ID NO: 95300 - DNA, 120 bp, Artificial Sequence
  ENSG00000089737_43 (sequence is synthesized)
tcacaaacttgggaattggggctcagggaggtgaagtgacttggccaagatcatacagctagtaagtgaatgctgaagttagaaccctggcattctggctccagagctctcatttgtgct

SEQ ID NO: 95301 - DNA, 120 bp, Artificial Sequence
  ENSG00000089737_44 (sequence is synthesized)
taaaataggaacccagtcaaaagcagggactgtgctctttctgttgctaattgttcccattgatttaaaagtttcctttggagagaaagtatcataataaacatgcagttgtaaaaacaa

SEQ ID NO: 95302 - DNA, 120 bp, Artificial Sequence
  ENSG00000089737_45 (sequence is synthesized)
tattcctaaagtccagcatgtcatccattaccaggtaggggcatctgaaaatttataggcatctgcctgcactgaatggggaatttttaaggcaaaggttgggggagggaggaggaattg

SEQ ID NO: 95303 - DNA, 120 bp, Artificial Sequence
  ENSG00000089737_46 (sequence is synthesized)
ttggttccaaggctcttgcatcagagaataccactggcatcgagtgcccactactcccacttttgcaacactgctgagatttggtctccagaaaaccttgctttgtctcatgtcaagtag

SEQ ID NO: 95304 - DNA, 120 bp, Artificial Sequence
  ENSG00000089737_47 (sequence is synthesized)
cccttctctccaagctacttgatattgtcaggttagagtcttagttttttctgtgaaatgggcataagttaagcatgtaattggttaccctgatgtagagaagtattaatagaagagtgt

SEQ ID NO: 95305 - DNA, 120 bp, Artificial Sequence
  ENSG00000089737_48 (sequence is synthesized)
ggtagtttagatctctctgggctcaaatcccagctgtgtaaccttgaacaagtcatgtaatctctctgtatctcagttttctcatgtattaaatggcagtgagtacctgcttcttagggt

SEQ ID NO: 95306 - DNA, 120 bp, Artificial Sequence
  ENSG00000089737_49 (sequence is synthesized)
tcttactgaggtaaaataagttactaagtataaagagcttaagaagccacctggcacattgcaagcacttactcatgttaactgccattgatagtagcagtaatattagtgtgtgcatct

SEQ ID NO: 95307 - DNA, 120 bp, Artificial Sequence
  ENSG00000089737_50 (sequence is synthesized)
agtgaatatcagcataaaattttggttaggagtatgggcaccggagccagactgccaggctttgaatccccagtctgctgcttcatagttggttagctttaggcaagttatttagtacct

SEQ ID NO: 95308 - DNA, 120 bp, Artificial Sequence
  ENSG00000089737_51 (sequence is synthesized)
gggttatcctgagaattaaattgagctgatgctgatgaagccggtagcacagtgtaagtactcaataaatggtagctggtatggcattatcatttttcctctttaattcctctttgtgct

SEQ ID NO: 95309 - DNA, 120 bp, Artificial Sequence
  ENSG00000089737_52 (sequence is synthesized)
tttaaaaatcttttaggctgctgtttcagagaaacaacaaactcacagtgctttttcccattctctcacttcacaacaacaatcaacatagaagacttctgtaaccaaatgtgtgggcgt

SEQ ID NO: 95310 - DNA, 120 bp, Artificial Sequence
  ENSG00000089737_53 (sequence is synthesized)
ttttcaccacatatcaagcagcagccaccagctgggtgtcctctaatttagtttcattttctgatgctgtcttcctggagatagcctcagatcccacaagatgtccctcctccccgcaac

SEQ ID NO: 95311 - DNA, 120 bp, Artificial Sequence
  ENSG00000089737_54 (sequence is synthesized)
cagtcgataagtcagggcctctggaacttctgaccaaccagcttcaagttggggttctcatgaccccccgctttgggttcaattaatttgctacagcagctctcagaactaaaagaaaca

SEQ ID NO: 95312 - DNA, 120 bp, Artificial Sequence
  ENSG00000089737_55 (sequence is synthesized)
catttaccagtttattatagaggatattacaaagaatatagatggggagatgtataggctgaggtacaggggaaggagcatggagttgccatgcccctcctgggtacaccaccctccagg

SEQ ID NO: 95313 - DNA, 120 bp, Artificial Sequence
  ENSG00000089737_56 (sequence is synthesized)
aatgtccacatattcagcttattcaaaagttctccaaactctgtcctttaggaatatttatggagacttcattgggtaagatgattaattaagccattggcctttaggaagtagtgctgc

SEQ ID NO: 95314 - DNA, 120 bp, Artificial Sequence
  ENSG00000089737_57 (sequence is synthesized)
aagtcccaaccttctaatcctgccttggcctttctggtgaccagcccccatcctgaaactacctggggggctatcagccatcagtcaatagtttgtcattagtatacaaaaagacattac

SEQ ID NO: 95315 - DNA, 120 bp, Artificial Sequence
  ENSG00000089737_58 (sequence is synthesized)
ttttgagattcctttgccaggaaacaggatgaagagcaaatacatatttcactgtatcacaggtgctaattttggtttagcaaatctctatagtcttcccttttttggggaaggagctgg

SEQ ID NO: 95316 - DNA, 120 bp, Artificial Sequence
  ENSG00000089737_59 (sequence is synthesized)
gtcaacctttgtggagtcaagatgaatcaaatacagtcccagcccctaagaagtattggatccagcagaggaggtgagatgaccacagccataatttaaggcagaaggtattagaaaatt

SEQ ID NO: 95317 - DNA, 120 bp, Artificial Sequence
  ENSG00000089737_60 (sequence is synthesized)
acaaaatacaatggaagagagaggtaacttctagtttgggaggttggaaagtactttctaaaaacatgcctggcatttaagggtgaagaggatttggacatatagaggcattaaaggaag

SEQ ID NO: 95318 - DNA, 120 bp, Artificial Sequence
  ENSG00000089737_61 (sequence is synthesized)
gagcaaagaaatgggcagtgttcaggggcacttggctcacagtgagaagagggtatgtgttgggaaaggaatagttgctgaggctggaggggtaagttgagggcaagtcactaaaggcgc

SEQ ID NO: 95319 - DNA, 120 bp, Artificial Sequence
  ENSG00000089737_62 (sequence is synthesized)
tgagtgtcaggttgaagagttgggcctttatcctgtaagtaaagaaaggcaaatctcatttctagaactcttatgaacagttcatagtggctacttaaagtactgtattgaaaaggatac

SEQ ID NO: 95320 - DNA, 120 bp, Artificial Sequence
  ENSG00000089737_63 (sequence is synthesized)
ctagatgttatctgggcccagtggagaagactgttgtgcttgattaatggtgtgtgccaggggctcagtgggtgtgttagcaaccatgccacattatctatggataaaatatatatagga

SEQ ID NO: 95321 - DNA, 120 bp, Artificial Sequence
  ENSG00000089737_64 (sequence is synthesized)
gtagagaccgtataacccagggattaacatggtctgtggagctgggctgcttaaatcctggataagaagtgactgctgtggtctggctgcatggtcctgaggacctgaaccagggtcagg

SEQ ID NO: 95322 - DNA, 120 bp, Artificial Sequence
  ENSG00000089737_65 (sequence is synthesized)
ggcatgggagggaagagcctacacagtgaatgggctaaacctgggaacattttgaatgtgggactaagagaggagggctagattgctctacaatgctgcagaagtttctacctgcctggc

SEQ ID NO: 95323 - DNA, 120 bp, Artificial Sequence
  ENSG00000089737_66 (sequence is synthesized)
tgggaggtaggagggtctggtttggggatgtggccctgaggagaggaccagtgtttggcagtggccatgtattgatctcccagttcttcctgtggcaggtcccacgtacctcggagattt

SEQ ID NO: 95324 - DNA, 120 bp, Artificial Sequence
  ENSG00000089737_67 (sequence is synthesized)
tgccactgctctccagcctgggcagcagagtgatacctgccttaaacacacaaacacaactcaagtgagactttgcttcccagaggcctgaactctatttcagatgaatattttctgtta

SEQ ID NO: 95325 - DNA, 120 bp, Artificial Sequence
  ENSG00000089775_0 (sequence is synthesized)
aagtttctgcgtcgagctccgaggaggctggcgcaacccgcaccgcgggggccgtcgcggcggcggcggcttgaccacccctcttgcccctctcaaggcttgacccatcttatcaccgtc

SEQ ID NO: 95326 - DNA, 120 bp, Artificial Sequence
  ENSG00000089775_1 (sequence is synthesized)
ttctctggcactcagtatttggagtaatcagttgttaccagttgcggaggcagcgcatagcacaacgtagtacctggaacctgacggcacctagcatgtttcaacagttagcgcccgcat

SEQ ID NO: 95327 - DNA, 120 bp, Artificial Sequence
  ENSG00000089775_2 (sequence is synthesized)
caccccaagggattaaatttggcattctttctcttgagactcaagtcctggcagagctgttgatcctctcacaagattctgtcatagaagacaccaggcctgaagagcgtgatgtagctg

SEQ ID NO: 95328 - DNA, 120 bp, Artificial Sequence
  ENSG00000089775_3 (sequence is synthesized)
gagctagctacacctcttgatagctaagactccaaggctccagacaccttggtgattgcactctccaccatgccaggaccgcagtgccagtttaccccactcacctgtagagaatgtatc

SEQ ID NO: 95329 - DNA, 120 bp, Artificial Sequence
  ENSG00000089775_4 (sequence is synthesized)
tatccggcggaggtcattatatatacttggcttgattcaggttatggagaagtcaggcatggccactgtgtgggtttgatggtatttctaggtgagatggagtttcactcttgttgccca

SEQ ID NO: 95330 - DNA, 65 bp, Artificial Sequence
  ENSG00000089775_5 (sequence is synthesized)
aaccacaatggacactgccagccatagccttgttcttctccagcagctgaacatgcagcgagaat

SEQ ID NO: 95331 - DNA, 120 bp, Artificial Sequence
  ENSG00000089775_6 (sequence is synthesized)
agccttgttcttctccagcagctgaacatgcagcgagaatttggttttctgtgtgattgcacagttgcaattggagatgtttacttcaaagcccacagagcagtgcttgctgctttttct

SEQ ID NO: 95332 - DNA, 120 bp, Artificial Sequence
  ENSG00000089775_7 (sequence is synthesized)
aactatttcaagatgatatttattcaccaaacaagtgaatgcataaaaatacaaccaactgacatccaacctgacatattcagctatttgttgcacattatgtacacggggaaagggcca

SEQ ID NO: 95333 - DNA, 120 bp, Artificial Sequence
  ENSG00000089775_8 (sequence is synthesized)
gactacctttctcacattgcaactgaaatgaatcaagtgttctcaccagagactgtgcagtcctcaaatttatatggcattcagatctcaacaacccaaaaaacagttgtcaaacaagga

SEQ ID NO: 95334 - DNA, 120 bp, Artificial Sequence
  ENSG00000089775_9 (sequence is synthesized)
ctggaggtcaaagaagctccttccagtaacagtggaaacagagctgctgtccagggtgaccacccccagttgcagttgtctcttgctattggtctggatgatggcactgcagaccagcag

SEQ ID NO: 95335 - DNA, 120 bp, Artificial Sequence
  ENSG00000089775_10 (sequence is synthesized)
agggcctgtcctgccacccaggccctggaggagcaccagaagcccccagtttccatcaagcaggagagatgtgacccagaatctgtgatctcccagagccacccctcaccctcatcagag

SEQ ID NO: 95336 - DNA, 120 bp, Artificial Sequence
  ENSG00000089775_11 (sequence is synthesized)
gtgacaggccccacttttactgaaaacagtgtcaaaatacacttatgccattactgtggggaacgttttgattcccgtagtaacctaaggcaacatctccatacacatgtgtctggatcc

SEQ ID NO: 95337 - DNA, 120 bp, Artificial Sequence
  ENSG00000089775_12 (sequence is synthesized)
ctgccattcggtgtccctgcttccattctggaaagtaatgaccttggtgaagtgcatccccttaatgaaaacagcgaggcccttgaatgccgcaggctcagctccttcattgttaaggag

SEQ ID NO: 95338 - DNA, 120 bp, Artificial Sequence
  ENSG00000089775_13 (sequence is synthesized)
aatgaacagcagccagaccacaccaaccggggtaccacagagcctttgcagatcagtcaagtatctttgatctccaaagacacagagccagtagaattaaactgtaatttttctttttca

SEQ ID NO: 95339 - DNA, 120 bp, Artificial Sequence
  ENSG00000089775_14 (sequence is synthesized)
aggaaaagaaaaatgagctgtaccatctgtggtcataaattccctcgaaagagccaattgttggaacacatgtatacacacaaaggtaaatcttacagatataaccgatgccaaaggttt

SEQ ID NO: 95340 - DNA, 120 bp, Artificial Sequence
  ENSG00000089775_15 (sequence is synthesized)
ggtaatgcattggcccagagatttcagccatactgtgacagctggtctgatgtctccctgaaaagttctcgcttgtcacaagaacacttagacttgccttgtgccttagagtcagagctc

SEQ ID NO: 95341 - DNA, 120 bp, Artificial Sequence
  ENSG00000089775_16 (sequence is synthesized)
acacaagaaaatgtggatactatcctagttgagtagcagcttctctttcagaatttttataccaattctgaaaaagaaaatttgcgtggcatttttaattcataaattattttcctcctc

SEQ ID NO: 95342 - DNA, 120 bp, Artificial Sequence
  ENSG00000089775_17 (sequence is synthesized)
ggcgcccctctttcccctgctaccagacacgcggtcacgtggggccatcgcgggctgccggcgcgggaagccgcgcgagaggcggccgaggggtgcgtgagccggcgccactgcttgcag

SEQ ID NO: 95343 - DNA, 120 bp, Artificial Sequence
  ENSG00000089775_18 (sequence is synthesized)
aatgtaacattcaattactactgtgaacttttcacaaacgaaataacaatttagaaatcagaaatcaatgtagaaatatggaaaccttaaatagttatttatagaattctaagtttttcc

SEQ ID NO: 95344 - DNA, 120 bp, Artificial Sequence
  ENSG00000089775_19 (sequence is synthesized)
agttatagaatcagtaaaatcaaattgaatataaagtaaatgaaatctgttttaaagcatattctaaactatcacttctgcctacatttcacatgaattcactcctaccaggattatttt

SEQ ID NO: 95345 - DNA, 120 bp, Artificial Sequence
  ENSG00000089775_20 (sequence is synthesized)
tttaatgcataactgtatgttatacatatgttataatgtataaaaatttattttaagatataccaaatcatgagtagttttattttttaactactagctccacaacatcttacctacatg

SEQ ID NO: 95346 - DNA, 120 bp, Artificial Sequence
  ENSG00000089775_21 (sequence is synthesized)
taccaaatcatgagtagttttattttttaactactagctccacaacatcttacctacatggcttctctttactttttaacattgagtatacctctttttttttttgagacagagtctctc

SEQ ID NO: 95347 - DNA, 120 bp, Artificial Sequence
  ENSG00000089775_22 (sequence is synthesized)
tttaataaaaaaaacagttaaagggagaagagtcagagagacattaaaaaatatttaagaaacagtaagatatacacacatagataaataagcatgcagagacagagactgagctagaac

SEQ ID NO: 95348 - DNA, 120 bp, Artificial Sequence
  ENSG00000089775_23 (sequence is synthesized)
tgcattgactaaaaaccccagggttgttaacttggtctagagtgttttcttagacaccttaaaaagtaatttgagattttatgaccagaggtttacatgagttgaaagagaatgatgata

SEQ ID NO: 95349 - DNA, 120 bp, Artificial Sequence
  ENSG00000089775_24 (sequence is synthesized)
aaatataaatcatgtttctaccctcagcgtcaggatttttggggcttcctgggttgattttaattttctaaaaatcactgaaaaagtaatttttcagtggcacagttttcacttttttcc

SEQ ID NO: 95350 - DNA, 120 bp, Artificial Sequence
  ENSG00000089775_25 (sequence is synthesized)
tgatccataaaaccagcaaagtggatacattcagtgttctataactacatttaagatccatgatgttagcttttcctctataaatcaacttaactctcttttataatggtgacacttaca

SEQ ID NO: 95351 - DNA, 120 bp, Artificial Sequence
  ENSG00000089775_26 (sequence is synthesized)
aagctaaaaccccaggaaaattaaagttgatgaaagaaataacagattccccggctctatatacctgggaaatagctggttaagcttcaccacaaaggatagatctaaattgtttctgaa

SEQ ID NO: 95352 - DNA, 120 bp, Artificial Sequence
  ENSG00000089775_27 (sequence is synthesized)
atgtttaaatttcaaaccccgcatagtcaaggataataaaacagactcatctttttttgccctcttgttaaattctaagcttcacgggcatttgaatacatctaaaaaatttggtttgtg

SEQ ID NO: 95353 - DNA, 120 bp, Artificial Sequence
  ENSG00000089775_28 (sequence is synthesized)
agccttagaatttaaccacttacaaaactcttgagctccctccacttctgaggacgtttcctgacacattcaacagcatcagcgtccaatcaggagggagctcaaagagtaatccagcta

SEQ ID NO: 95354 - DNA, 120 bp, Artificial Sequence
  ENSG00000089775_29 (sequence is synthesized)
attctaaggacacaaaggttttctctaggtaaacagtttaggtaaattacaaagtggtaagtttttcttgaggattgaatgaagaaagctactggatattgtgtaaggcagttgagtttc

SEQ ID NO: 95355 - DNA, 120 bp, Artificial Sequence
  ENSG00000089775_30 (sequence is synthesized)
tgccttaaacaagtgagtaaaggctcctatggttaagactgatgtgtgttgagagcacatctaacttgataagatcaattgtattgggagtaattaaaacaaatgtatgttctttggggt

SEQ ID NO: 95356 - DNA, 120 bp, Artificial Sequence
  ENSG00000089775_31 (sequence is synthesized)
cagaactttgtctaatcttaaacttttttctaccaattcacttaagcaactattgaaatttgtactgccctcaaaaatatcatctcattggaagaacacaagtattaacattgatttttt

SEQ ID NO: 95357 - DNA, 120 bp, Artificial Sequence
  ENSG00000089775_32 (sequence is synthesized)
gtattttaggctagttaagatatatttcctagccttcttcaattcaaattctattgttcttattaagataatttttctcctctatattcttccctgtttgcctactcattattattattt

SEQ ID NO: 95358 - DNA, 65 bp, Artificial Sequence
  ENSG00000089775_33 (sequence is synthesized)
catgcaccaccatacccagctaattttgtgtttttagccatgcaccagcctcggcctcccatagt

SEQ ID NO: 95359 - DNA, 120 bp, Artificial Sequence
  ENSG00000089775_34 (sequence is synthesized)
tacaggtgtgagccaccgtgccaggcccactcattattctttgacacaggaaatccttgtatatagctaaagggtggaggtagagttgtacatggttggttggataagacagcaagtgcc

SEQ ID NO: 95360 - DNA, 120 bp, Artificial Sequence
  ENSG00000089775_35 (sequence is synthesized)
gttgtacatggttggttggataagacagcaagtgcctcagggcagagtttggataaatggtaagagtttgctagcagctgattggccgtgatagacaacactcatttaaagcagaaatat

SEQ ID NO: 95361 - DNA, 120 bp, Artificial Sequence
  ENSG00000089775_36 (sequence is synthesized)
atctgttcgttgagagttaagaaaatagtggttaactgtatttctattcttatagttccttttaatattagaaattcaaagcaaatgctctttccttgttccttaaaacattcattctgt

SEQ ID NO: 95362 - DNA, 120 bp, Artificial Sequence
  ENSG00000089775_37 (sequence is synthesized)
ttaggaagtgggaaaatatcaacttcattttatagaaaaaaaatcccaaaagctgaattccagagatgcagtgaatagtggtgtgggactgacccccagtttttgttattgttgttttca

SEQ ID NO: 95363 - DNA, 78 bp, Artificial Sequence
  ENSG00000089775_38 (sequence is synthesized)
gtgtgggactgacccccagtttttgttattgttgttttcatttattctggtgctgtgtcgccaggctggagtgcagtg

SEQ ID NO: 95364 - DNA, 120 bp, Artificial Sequence
  ENSG00000089775_39 (sequence is synthesized)
tgatctgcctgcctcagattacaggcatgagccaccgcgcccgggtctgcaggcattttttaaagtaactgtcatatgcctaacactgtgccctgagtattattttttaaagacatgatt

SEQ ID NO: 95365 - DNA, 84 bp, Artificial Sequence
  ENSG00000089775_40 (sequence is synthesized)
taacactgtgccctgagtattattttttaaagacatgattgctcactgagaaaatttgctttgtattttaaaagttcttccagc

SEQ ID NO: 95366 - DNA, 120 bp, Artificial Sequence
  ENSG00000089775_41 (sequence is synthesized)
aatagtatagtgcagtttgcataatgattaccaagcttgaaactggaaatgtcatatgcactttcgtgtgtatcaggcagatactaaacattttccccttgagtcagcttaaaatttttc

SEQ ID NO: 95367 - DNA, 120 bp, Artificial Sequence
  ENSG00000089775_42 (sequence is synthesized)
cttcttttgaaatctcacgcagttgttttctggagaaaaatagagactgttttagtatttgttcttattagcgtatcatcagaactcagcacagtctgccttataagaaaacaaaaaatt

SEQ ID NO: 95368 - DNA, 120 bp, Artificial Sequence
  ENSG00000089775_43 (sequence is synthesized)
tttttatttataactcttgagattgttacttcttgctctttctgatttcccatccgtaaagtgggtgtaagcaatacttacctcacaggggtgttgtgaggatttatattaaacgtgtta

SEQ ID NO: 95369 - DNA, 120 bp, Artificial Sequence
  ENSG00000089775_44 (sequence is synthesized)
agttctctcagtattattgattaaaatcaaccatataaacgacatttattctgtagctagacctattaactttagtatttcagcctataaattctaaaatgttcttaaaagcagtaatgt

SEQ ID NO: 95370 - DNA, 120 bp, Artificial Sequence
  ENSG00000089775_45 (sequence is synthesized)
actatctaatattcaataactaattgacagaactcattgttattttttacaaataactagaaacaatactgttgctagaattcctgttctactgtaatttaatcatcactgtttcttttt

SEQ ID NO: 95371 - DNA, 120 bp, Artificial Sequence
  ENSG00000089775_46 (sequence is synthesized)
agccttcagtaaggaggatactagttctttggcattattgggaataaaactttgtcaatttcagctttattgaaagttctcccaaatatattgtttttgtttacacaaaggaaaaggaac

SEQ ID NO: 95372 - DNA, 120 bp, Artificial Sequence
  ENSG00000089775_47 (sequence is synthesized)
tcccaaagtgctgggattacaggtatgggccactgggcccagcctatttttatttctttgatgtaggtgatctaaatagtagatgaggacaggaaatggggtgaaggtaataatagtatt

SEQ ID NO: 95373 - DNA, 120 bp, Artificial Sequence
  ENSG00000089775_48 (sequence is synthesized)
gaggacaggaaatggggtgaaggtaataatagtattattagaaaagtcttcactgaaaattgaaggaaatacatattaatcgtggaaaaagatagtgtgaaaaatgtgtaatttcgttaa

SEQ ID NO: 95374 - DNA, 120 bp, Artificial Sequence
  ENSG00000089775_49 (sequence is synthesized)
catttatttgtacaggcacattcttgatgttgtgagtcagatacttgataaatgtccattttttgtagtaattgatgtaaaaatgggccatgtgaagaattttcataatgtaatttgtgt

SEQ ID NO: 95375 - DNA, 120 bp, Artificial Sequence
  ENSG00000089775_50 (sequence is synthesized)
ctttgtatattttgaactacatatagatttgtggcacttaaattattaatttttgatttcttaagagtgaagtctgtaaatgatttctctctgctgtacttctgtgtttgtatggttgga

SEQ ID NO: 95376 - DNA, 120 bp, Artificial Sequence
  ENSG00000089775_51 (sequence is synthesized)
cattttgaaaactggtgagattgcacagtcccaaacctggatgtcttaaatacaaggaattacaaactgtgatttttgtcttgaagacctggaagaattcattgtgcttcagtatgtatt

SEQ ID NO: 95377 - DNA, 120 bp, Artificial Sequence
  ENSG00000089775_52 (sequence is synthesized)
tgtactgcacttgattaattagttaagtattggtctggtgcaattgacattaactgtcatcaactcctctattttgtgctaaataaagtcatttagtcagaatggatcaaatataaactt

SEQ ID NO: 95378 - DNA, 120 bp, Artificial Sequence
  ENSG00000089775_53 (sequence is synthesized)
atactttaaaataaacttagattataaaaacttgttcaataaaaaagacccactgaaaaatcttcaaagtacatgtaacacatagctaatacaggagaccaaaatcaataatacattgtg

SEQ ID NO: 95379 - DNA, 120 bp, Artificial Sequence
  ENSG00000089775_54 (sequence is synthesized)
gaccaaaatcaataatacattgtgtggctaaactcatccacctaatgtactgtgaatttgcttcagaaacattcttttagaaagttgtgtatctgccgggcatggtgcctcatgcctgta

SEQ ID NO: 95380 - DNA, 66 bp, Artificial Sequence
  ENSG00000089775_55 (sequence is synthesized)
tggtgaaaccctgtctctagtaggggggcagaggcagaggaattgcttgaacccgggaggcggagg

SEQ ID NO: 95381 - DNA, 120 bp, Artificial Sequence
  ENSG00000089775_56 (sequence is synthesized)
cagcctggcgacagagcaagaaacaatgaatttcatatattttatcaagacaaattaatgtgacttaatcaaaaacaagtttattagcttagcttatagaatgtgttcttattttacatc

SEQ ID NO: 95382 - DNA, 120 bp, Artificial Sequence
  ENSG00000089775_57 (sequence is synthesized)
agtgtttgccaaatgttgtgttcctagtgttgaggcaagtagtctttgtactgggtaacattttggaggtgtgatgcaaaaatgcatttgtggacctaattcttaccgaccataatctgt

SEQ ID NO: 95383 - DNA, 120 bp, Artificial Sequence
  ENSG00000089775_58 (sequence is synthesized)
gttaatcgaaaattgacgtcctaatcaaatgctttccaactgctgtctctggaaagaaaggtagtatttcgtcatttcccagaagtttcttgctttgcttcttctttttttttttttttt

SEQ ID NO: 95384 - DNA, 120 bp, Artificial Sequence
  ENSG00000089775_59 (sequence is synthesized)
caggcgtgagccaccgcgcccagctgcttctttcttctctatttacagtctactgtatcgccttttgcccccagtaacatgatccacaatagtagttctcaactgaggtatattagtcag

SEQ ID NO: 95385 - DNA, 120 bp, Artificial Sequence
  ENSG00000089775_60 (sequence is synthesized)
tctcaactgaggtatattagtcaggattctccagaaaaagaaagaaacaacaggtagaactgagagagagaaagagattgattgattataaggaataggttcatgtaattatggaggctg

SEQ ID NO: 95386 - DNA, 120 bp, Artificial Sequence
  ENSG00000089775_61 (sequence is synthesized)
agaagtcccaagatctgcagttgggaggctgagaggctggggagtcagtgatgttccaatctgaatttgaagacctgagaaccaggagagcttatggcataagttccagtccaaaagctg

SEQ ID NO: 95387 - DNA, 120 bp, Artificial Sequence
  ENSG00000089775_62 (sequence is synthesized)
gcaggcttgaaactcaagaagagctgatgtttccatttgggtccaaagggaagaaaagaccgataattgcagctcaagcagtcaggccagagaaagtctctttttttattatattctggc

SEQ ID NO: 95388 - DNA, 120 bp, Artificial Sequence
  ENSG00000089775_63 (sequence is synthesized)
cttcaactgatggaatgagagccacccacatcagggagggtgatcttctttacgcagtctactgattcagattttgtctccctccagaacaccctcacggacacacccagaataatgttt

SEQ ID NO: 95389 - DNA, 120 bp, Artificial Sequence
  ENSG00000089775_64 (sequence is synthesized)
gactaactattggggcagcccatggcccagtcatttggacacataaaattaaacattacacagggctatccccccccatagagacatttgacgatgtggagatgtttttggttgtcacag

SEQ ID NO: 95390 - DNA, 120 bp, Artificial Sequence
  ENSG00000089775_65 (sequence is synthesized)
ttgggtgggcgatgagggaggctgctgctggcatctagtaggtggaggccagggatgctgctaaacatctcagtgcagaggacagcctcccgcaatacagaatatgtacctcaaaatgtc

SEQ ID NO: 95391 - DNA, 120 bp, Artificial Sequence
  ENSG00000089775_66 (sequence is synthesized)
attagagctgaggttgaccaacccttctgagaccttaaagtaagttttgtgatggctgtcaggaataaaagaatacaaagaaacccaatttgggggatttctattctagtcatgtttaga

SEQ ID NO: 95392 - DNA, 120 bp, Artificial Sequence
  ENSG00000089775_67 (sequence is synthesized)
gcaagtattggagtatgagatgtgttcagaattaaattctatttgtattatccttgatcccagcttttaaaagataaaaatgtgattattagaaataaaaggaaaaaatgtgattattaa

SEQ ID NO: 95393 - DNA, 120 bp, Artificial Sequence
  ENSG00000089775_68 (sequence is synthesized)
aaatcagagatgtattaatcagcaagacagttttgaatctattcatataatgtttgaactaaataattgtctccccaaagaggtctcttcatgaaattgagattgtaggttataatttct

SEQ ID NO: 95394 - DNA, 120 bp, Artificial Sequence
  ENSG00000089775_69 (sequence is synthesized)
gtgaatttttaatctggccaaaaggtggcaccagtgtacctttaaaaaaatgttcattatacttgaattcagcattactattaatagtaaatattatttagggcttagctacttttggat

SEQ ID NO: 95395 - DNA, 120 bp, Artificial Sequence
  ENSG00000089775_70 (sequence is synthesized)
catgctttatagagtcaagactaatgagaattttcttaaaatttcataaggtactgcaatatcttgacatccctctttaatcaagatgcttctgatttacatgtacatatctcagcagat

SEQ ID NO: 95396 - DNA, 120 bp, Artificial Sequence
  ENSG00000089775_71 (sequence is synthesized)
aactttttaaaatatcacattattgtgctacattgagcatttctgaagatttttccaagccattaactgtgaggccttggaatttgggctcttttaatcaggcatcacactcagtttttg

SEQ ID NO: 95397 - DNA, 120 bp, Artificial Sequence
  ENSG00000089775_72 (sequence is synthesized)
gtgttctgcctggtcaagacatagattgaaggacatttgagtaaatacgctcccttgctcctttcttgccttttgttcattttttgtacatccacaatctatgaggtatgttacctactg

SEQ ID NO: 95398 - DNA, 120 bp, Artificial Sequence
  ENSG00000089775_73 (sequence is synthesized)
aaatttactttcttttccaactgtggttcaacaactgactttcttctctcatactttccaacccattccattctgaataagttaagagttttcttaccttcagctcttctcaccttccaa

SEQ ID NO: 95399 - DNA, 120 bp, Artificial Sequence
  ENSG00000089775_74 (sequence is synthesized)
tactaagtgaatacagcctgcctcccccttcatttctgattacaatattattctcatcatcctaggactttgtacctaatcaccagttgcttctcctaagtttattttacagctgataag

SEQ ID NO: 95400 - DNA, 120 bp, Artificial Sequence
  ENSG00000089775_75 (sequence is synthesized)
ccaacttggaaaatgagcccactctccctcagatacattctcttccgctgtttgaaacgtttttcattgaaacaatttggtgatattgtatcaaaataataaagtattaagctactggaa

SEQ ID NO: 95401 - DNA, 120 bp, Artificial Sequence
  ENSG00000089775_76 (sequence is synthesized)
cggcctgagccagggctaaggcacccttgcccccttctgcccagtgagtgcacttcacggcatcaaaagccccatgttctctggaaaggcggctgatgaggtccagctcagactctgtat

SEQ ID NO: 95402 - DNA, 120 bp, Artificial Sequence
  ENSG00000089775_77 (sequence is synthesized)
ccgtcctataaaggaagcatttcatatcaaagcatggaaaatggctggagagacagaattgtcttctttttgccattaaacctcatgtgaattacccactgataaacgaacactaaccaa

SEQ ID NO: 95403 - DNA, 120 bp, Artificial Sequence
  ENSG00000089775_78 (sequence is synthesized)
aaagaaggtaactaatttgggaactagtctccgtaggggcttcgcctccgactcagggaggccgcacgcccgggacctgacgcgccggcaacaagcaggcggcctggcagccgcccgtca

SEQ ID NO: 95404 - DNA, 120 bp, Artificial Sequence
  ENSG00000089775_79 (sequence is synthesized)
cgtccgccgcgctccggctccccgcacggatcggcgcccctccggccccgcactccgccaggcccgcggcccgtcgccctccggcctgggccaaagttgcgcaaatagccccacaactgg

SEQ ID NO: 95405 - DNA, 120 bp, Artificial Sequence
  ENSG00000089775_80 (sequence is synthesized)
atagccccacaactggcaaatacttaccggccgcaacaggaaccagagctgcggagattttagggagtttaaggcaaatcagccgcgggaaaggcgggcgaaggcgaaggggccgcgagc

SEQ ID NO: 95406 - DNA, 120 bp, Artificial Sequence
  ENSG00000089775_81 (sequence is synthesized)
tgcagtggcggcggcgcgcggcgctcggcgctcgggctgggctgcgcggagaggctctggctctgccagggactgtgctgcaacaaaggacttccgctgccgcacagccgcgcctgccgc

SEQ ID NO: 95407 - DNA, 120 bp, Artificial Sequence
  ENSG00000089775_82 (sequence is synthesized)
accgcactgagccggccccgcttacgcggcgactccgggtctgcccaccagttcgctgcggcgtccgccagccttcccctccctctcgcccgcccacccactctgccgctggctgctagg

SEQ ID NO: 95408 - DNA, 120 bp, Artificial Sequence
  ENSG00000089775_83 (sequence is synthesized)
ggcacccgcggtcgcctgtttgttgcaacaagtttctgcgtcgagctccgaggaggctggcgcaacccgcaccgcgggggccgtcgcggcggcggcggcttgaccacccctcttgcccct

SEQ ID NO: 95409 - DNA, 120 bp, Artificial Sequence
  ENSG00000089775_84 (sequence is synthesized)
cgaataatcacagcacttatttcattgggacgttatgagactcagatggtaaatccatgtaaaatacttggaaaattcccagcactccagaaggaatcagtaaatactagcatttaagaa

SEQ ID NO: 95410 - DNA, 120 bp, Artificial Sequence
  ENSG00000089818_0 (sequence is synthesized)
gacagcggacccaagatggcgaccgagttggagtacgagtctgtgctgtgtgtgaagccagacgtcagcgtctaccggattccgccccgggcctccaaccgcggttacagggcctctgac

SEQ ID NO: 95411 - DNA, 120 bp, Artificial Sequence
  ENSG00000089818_1 (sequence is synthesized)
tggaaattagaccagcctgattggactggtcgcctccgaatcacttcaaaagggaagactgcctatatcaaactcgaggataaagtttcaggggagctctttgctcaggcaccagtagaa

SEQ ID NO: 95412 - DNA, 120 bp, Artificial Sequence
  ENSG00000089818_2 (sequence is synthesized)
caatatcctggtattgctgtggagacggtgacagattctagccgctactttgtaatccggatccaggatggtactgggcgcagtgctttcattggcattggcttcacagatcggggagat

SEQ ID NO: 95413 - DNA, 120 bp, Artificial Sequence
  ENSG00000089818_3 (sequence is synthesized)
gccttcgactttaatgtctccttgcaggatcacttcaagtgggtaaagcaggaatctgagatttccaaggaatctcaagaaatggatgctcgtcctaagttggatctgggcttcaaggaa

SEQ ID NO: 95414 - DNA, 120 bp, Artificial Sequence
  ENSG00000089818_4 (sequence is synthesized)
ggacaaaccatcaagttgtgtatcgggaacattacaaacaagaaaggaggtgcttctaagcccaggactgcaaggggtgggggtctgagcttactcccacccccgccaggaggcaaagtc

SEQ ID NO: 95415 - DNA, 120 bp, Artificial Sequence
  ENSG00000089818_5 (sequence is synthesized)
actattcccccaccatcctcctcagttgccatcagcaatcatgtcaccccaccacccattccgaaatctaaccatggaggcagtgatgcagatatccttttagatttggattctcctgct

SEQ ID NO: 95416 - DNA, 120 bp, Artificial Sequence
  ENSG00000089818_6 (sequence is synthesized)
cctgtcacgacaccagcaccaactccagtttctgtaagcaatgacttgtggggagacttcagcactgcctccagctctgttccaaaccaggcaccacagccatccaactgggtccagttc

SEQ ID NO: 95417 - DNA, 120 bp, Artificial Sequence
  ENSG00000089818_7 (sequence is synthesized)
tgaatggcattggcaggacattaaggacagacttgaggaataaaaatgaccttgagggcaccaatctgtgagggaagttaggaacccatttcctccccagaaccagaatgactggacaat

SEQ ID NO: 95418 - DNA, 120 bp, Artificial Sequence
  ENSG00000089818_8 (sequence is synthesized)
ctttttcatagcttctccatcacattcaagctggtttatgtcactcccctgtgttgttacttgtacagccaagaaagtatctgttatctcctgcgtagtaccaaggtaggggactagtgg

SEQ ID NO: 95419 - DNA, 120 bp, Artificial Sequence
  ENSG00000089818_9 (sequence is synthesized)
atcttatcatagttttggctgactatgcagggcttaaaaggccagcgtctgtttgagggggaatgacctctaacatctgtaaaatttgtctcatcttttaatttctttaacttatttcaa

SEQ ID NO: 95420 - DNA, 120 bp, Artificial Sequence
  ENSG00000089818_10 (sequence is synthesized)
tgacctcagtgtttacaaattcagaattttgataggggtagatatggagaaagacctatttcctgggtctctgctgtgtagtctccttcaggcttattgtgctcagtgaacatccagtgc

SEQ ID NO: 95421 - DNA, 120 bp, Artificial Sequence
  ENSG00000089818_11 (sequence is synthesized)
tgggtgcagctccatcaccctcttgtgtgtttacatgtctctttctatgataagagggttgtgttggtggcacctccactactcttttctgtttgttgagtttgaattgtgttaacatct

SEQ ID NO: 95422 - DNA, 120 bp, Artificial Sequence
  ENSG00000089818_12 (sequence is synthesized)
ttgatcagtgggtgtatctgtaatgaaggaggttcaagaggctgtgctttccaagtgatagtctataggagtgtttaatttcttgcagctccatctggttgctgcatttgaagcatggca

SEQ ID NO: 95423 - DNA, 120 bp, Artificial Sequence
  ENSG00000089818_13 (sequence is synthesized)
ttaatttgtatttgccctgttctttgacctaaagttgaagggtttagagtttttaacctgatctgtagagcagagaggttgaaagcacttaactcttgtttagtatcctcattgccttgc

SEQ ID NO: 95424 - DNA, 120 bp, Artificial Sequence
  ENSG00000089818_14 (sequence is synthesized)
tgcctgggtatctggcccctttccataaacatttcttttcagttcatgtagttctttaatagaaagctgctattatgtatattgtcatttgtgaaggaagttggagagtcacagctttac

SEQ ID NO: 95425 - DNA, 120 bp, Artificial Sequence
  ENSG00000089818_15 (sequence is synthesized)
tgtgacaggttttgcccaaggctttgatacctgtcacccagggtatcttaaaagcaagttgttctcccactactttcctttccctctgccctgccattcctattacaatgctgtgaaaaa

SEQ ID NO: 95426 - DNA, 120 bp, Artificial Sequence
  ENSG00000089818_16 (sequence is synthesized)
agttctgcttcttaggtgaatgggtactttctattttgtttctaaacgagcaattttgaggatgaaatgggaagatatcattgcttcctttttgcacctattgggtatgtacactctggc

SEQ ID NO: 95427 - DNA, 120 bp, Artificial Sequence
  ENSG00000089818_17 (sequence is synthesized)
cgaagggagtccttatgtttagtttcaaaatatattactttcctggattctcttcttcactttttctgactttgggtccattttcttttcattgcctccttttccaggcagctctattct

SEQ ID NO: 95428 - DNA, 120 bp, Artificial Sequence
  ENSG00000089818_18 (sequence is synthesized)
tgcagagccatagcaggacatgttaaaattccaatagaaaacactaaaaggaaagtctgtggaatcactagtgactaaatactgggaacctattttctcaatcttcctccatgttgtgtt

SEQ ID NO: 95429 - DNA, 120 bp, Artificial Sequence
  ENSG00000089818_19 (sequence is synthesized)
ctttgtattcttgagatgataatatattatgtatttgaattcctgaaaaatggaaaatgtttaagatatatgtatataaagtgtatgctgtattggtgcaataatggtaattaaaaatat

SEQ ID NO: 95430 - DNA, 120 bp, Artificial Sequence
  ENSG00000089818_20 (sequence is synthesized)
gaaaaaagtgtctcttttatcttttaatttgcttatttgattaccttttaaatttaattgaccaaatataagtggaccagtagttaataaaggatatttatatcactctttattaagaaa

SEQ ID NO: 95431 - DNA, 120 bp, Artificial Sequence
  ENSG00000089818_21 (sequence is synthesized)
agtgaaattcttgcgcatttttcctactgtatatttgcaggagttgctctacctaagtagggaattcaggggtaatgaggtatgagcatattccattttaccagatactgccgaagttcc

SEQ ID NO: 95432 - DNA, 120 bp, Artificial Sequence
  ENSG00000089818_22 (sequence is synthesized)
cattgccccacatccttaccggcactgggtattgacagatatttaaatttttgacaatctggggtgtaagaaatgtcctctaaggctcttcaatgaataagctcatcactctggaaatca

SEQ ID NO: 95433 - DNA, 120 bp, Artificial Sequence
  ENSG00000089818_23 (sequence is synthesized)
gctatttccttagtaagtcatctgcactctagtaaccatagcaggtagtagaaattctttctgctgggttttcgtttgatggtgtagtagggggatgatggagttgggggaaaaagcaga

SEQ ID NO: 95434 - DNA, 120 bp, Artificial Sequence
  ENSG00000089818_24 (sequence is synthesized)
tatctttagttttcgggcctggtccttctcctaattacacccagcacctgccagatgcctcacatcctcattaagcagcggagagtcacaaagggtacctcgtctgggactaccggctgg

SEQ ID NO: 95435 - DNA, 120 bp, Artificial Sequence
  ENSG00000089818_25 (sequence is synthesized)
aggttgcctcttttctgccaggagactacagttaggaagtgactcctgtaagaaaatccgtcacgattcaatatggtcctcgtcctcgtaggacactccaggcacctgcctagagtaaga

SEQ ID NO: 95436 - DNA, 120 bp, Artificial Sequence
  ENSG00000089818_26 (sequence is synthesized)
tggcgcttttcgtaagcacctctccaggacagagatttccataacgagagtcacgcacttgcaggccatctttgccattatccaagacggtgagccgtgcagcctcatcgtttccaggtt

SEQ ID NO: 95437 - DNA, 120 bp, Artificial Sequence
  ENSG00000089818_27 (sequence is synthesized)
tcaatatggctccccgcgtcaccgaaaaggttaatctcagaaactaacttgaactcgcgcggaagtgacgcaacagaagttgtcgcgctttgcatctccgcctcccgtgctccgcctccg

SEQ ID NO: 95438 - DNA, 120 bp, Artificial Sequence
  ENSG00000089818_28 (sequence is synthesized)
ggacaaaccatcaagttgtgtatcggggtgagtatggtttttaaaaattttgttttcctgtgcttccataagcctatgacatctttctcttgctcttctttttttcttttgtagaacatt

SEQ ID NO: 95439 - DNA, 120 bp, Artificial Sequence
  ENSG00000089818_29 (sequence is synthesized)
gcacagccatgaaaagtgtttccgattgcatttatctttctttggtttacttcattttttcttccctttctctaaagttgctctagttgctaaaggaaaagtattaacatgttatttgta

SEQ ID NO: 95440 - DNA, 120 bp, Artificial Sequence
  ENSG00000089818_30 (sequence is synthesized)
tgtaatagataagcacgagttcaagatgtggtaattcatatgtagacttaaataaatgaaaaacacatatctaacaaatgaattaacacatttggcactttaggaggccgaggtgggtgg

SEQ ID NO: 95441 - DNA, 79 bp, Artificial Sequence
  ENSG00000089818_31 (sequence is synthesized)
gaaaccctgtcgctactgaaaaggctactcgggtggctgagacaggagaatcacttgaattggggaagtggaggttgcc

SEQ ID NO: 95442 - DNA, 77 bp, Artificial Sequence
  ENSG00000089818_32 (sequence is synthesized)
tggtggcaggtgcctgtaatcccggctactcgggtggctgagacaggagaatcacttgaattggggaagtggaggtt

SEQ ID NO: 95443 - DNA, 120 bp, Artificial Sequence
  ENSG00000089818_33 (sequence is synthesized)
tgcccgtttattgttcgtggtagtttttggtgggactatcttgaatcatcttacgtgtggggcagtcattcttactcttttctccatggtctataacagaggttggcaaacagacaaata

SEQ ID NO: 95444 - DNA, 120 bp, Artificial Sequence
  ENSG00000089818_34 (sequence is synthesized)
ataaatgttttaggttttgcaggtcaggtggcctctgttgcaactactcagttttgctgttgtagtgtgaaatcactgtagaaaatatgtaaacacattgataccactatgttccatgaa

SEQ ID NO: 95445 - DNA, 120 bp, Artificial Sequence
  ENSG00000089818_35 (sequence is synthesized)
acttcttctacaaaaccaggctatggcaggataaagcccatgggctctatgtagtttatcgactcttggtctatgagaagatatttcacattcagactttgtctagttagggtgactgtt

SEQ ID NO: 95446 - DNA, 120 bp, Artificial Sequence
  ENSG00000089818_36 (sequence is synthesized)
atattttcattgggcaaaatttgccatagagcagcagtcctcaacctttttggcaccagggacccgttttgtggaagacagttttccacagaccggcattaggggatggtttcaggatga

SEQ ID NO: 95447 - DNA, 77 bp, Artificial Sequence
  ENSG00000089818_37 (sequence is synthesized)
ttattacattgtaatcgggagccttgggcttgttttcctgcaactagacgggggtgatgggagacagtgacagatca

SEQ ID NO: 95448 - DNA, 90 bp, Artificial Sequence
  ENSG00000089818_38 (sequence is synthesized)
tgggagacagtgacagatcatcaggcatcagattctcatagggagctcatgtagggttcacacccctctgagaatctaatgctgccactg

SEQ ID NO: 95449 - DNA, 120 bp, Artificial Sequence
  ENSG00000089818_39 (sequence is synthesized)
atctgacaggaggcggagctcaggtggtcatgcaagtgacggggagcggctgtaaatacaatgaagctttgctctctcgtgtgcaactcacctcctgctgcatggcctggtttctaacag

SEQ ID NO: 95450 - DNA, 120 bp, Artificial Sequence
  ENSG00000089818_40 (sequence is synthesized)
catggcctggtttctaacaggccacagactggtgccgggggttgggggctcctgccatagaggatacttcctagtcgagtcttcctacgttttccacagggcgcagtgctttcattggca

SEQ ID NO: 95451 - DNA, 120 bp, Artificial Sequence
  ENSG00000089818_41 (sequence is synthesized)
atgaatgggcagtatctcttttcctcctggtttctttgtttcttaaactatttcattgtgaatataaatctccccattcacttttgtttccttaggtcatctttgtatctattctgtttc

SEQ ID NO: 95452 - DNA, 120 bp, Artificial Sequence
  ENSG00000089818_42 (sequence is synthesized)
ctttccttatagcctgcaatatatttcagatcccttgtgcagtagtttgaaatgatgctctgtcgaatttgccccgtcttttaggtggtagagggaggcctatggtaacagcagggcttt

SEQ ID NO: 95453 - DNA, 120 bp, Artificial Sequence
  ENSG00000089818_43 (sequence is synthesized)
atgtggggagtcgtgtgccactcttgttaccttatgtagctgacatgttttgtgacttttgcaacatttctttagcccacttgattttggtgcagctgtggttgacagcactgtgcacac

SEQ ID NO: 95454 - DNA, 120 bp, Artificial Sequence
  ENSG00000089818_44 (sequence is synthesized)
tgtcagcttcctacctcaagagcaagcatatctctccttttctgccttaggactctctgaagttatagaaagctaagagcaagctttaacttggaaagactaagaaactaacaccccctc

SEQ ID NO: 95455 - DNA, 120 bp, Artificial Sequence
  ENSG00000089818_45 (sequence is synthesized)
gtccccagtggaattgaaccccagttgttttctttcttggcttttttcccttctgtttctcactcttttttatctctcactgtgttttctggaatctcatttcataaaagtaaatacacc

SEQ ID NO: 95456 - DNA, 120 bp, Artificial Sequence
  ENSG00000089818_46 (sequence is synthesized)
ggtgacagattctagccgctactttgtaatccggatccaggatggtactggatcacttcaagtgagtgaagcttgtccttagttacgaggctgaatgcttataggaatgctgcttctcac

SEQ ID NO: 95457 - DNA, 120 bp, Artificial Sequence
  ENSG00000089818_47 (sequence is synthesized)
ggacccaagatggcgaccgagttggagtacgagtctgtgctgtgtgtgaagccagacgtcagcgtctaccggattccgccccgggcctccaaccgcggttacaggtgggtaaagcaggaa

SEQ ID NO: 95458 - DNA, 120 bp, Artificial Sequence
  ENSG00000089818_48 (sequence is synthesized)
ttaattaagcaacacctgtttgtcaaggagagttaatgtttttgctatgaaatagctcatggtactgacaaggtgattctgtcagcttctagcaaggaatcaaagcttttctagtgaact

SEQ ID NO: 95459 - DNA, 120 bp, Artificial Sequence
  ENSG00000089818_49 (sequence is synthesized)
aagagtcatagtatctcataggttctttggcagaaaatatttgcttattaaaatgacaatttccttcatttttttcttggttagatgcttataagcttttgagtcagatggaccaagatt

SEQ ID NO: 95460 - DNA, 120 bp, Artificial Sequence
  ENSG00000089818_50 (sequence is synthesized)
ttggtcatggctctgctactttatatttgaatgtgcttggtaaacattacttaagttttttgagtttcaattgccttatctacaaactggagatgtaaaaccaccccagcggggaccttg

SEQ ID NO: 95461 - DNA, 90 bp, Artificial Sequence
  ENSG00000089818_51 (sequence is synthesized)
ggtggattgcttaagctatgaaatcccatctctacaaaaaaaatacaaacattagttggacgtggtggtgcacgcctgtagacccagcta

SEQ ID NO: 95462 - DNA, 80 bp, Artificial Sequence
  ENSG00000089818_52 (sequence is synthesized)
caacatgatgaaatcccatctctacaaaaaaaatacaaacattagttggacgtggtggtgcacgcctgtagatctgggag

SEQ ID NO: 95463 - DNA, 120 bp, Artificial Sequence
  ENSG00000089818_53 (sequence is synthesized)
ggtgacagagtgggaccttgtctcataaaaaaacaaagaaacaaacaaaaataaataaataaataaatagataaaataaaataattaccaccccaaggtcatgagggttaaatgattgac

SEQ ID NO: 95464 - DNA, 120 bp, Artificial Sequence
  ENSG00000089818_54 (sequence is synthesized)
cgaggataaagtttcaggtaatctttgcgggtgaccctctaacattaagaatattaatttggtgtgcttttataagtaccttcaatttggggactggaatggaaatactacttgttaatt

SEQ ID NO: 95465 - DNA, 120 bp, Artificial Sequence
  ENSG00000089818_55 (sequence is synthesized)
ctgtatggataactctcttgcttcacattctagctcacatttcaccttaatgagacctaccccaaccaccctcttgaatgctacaacttgttcattctcccactgtcttcttaatcttcc

SEQ ID NO: 95466 - DNA, 120 bp, Artificial Sequence
  ENSG00000089818_56 (sequence is synthesized)
taatttgcctctacattttctttttaccttagaactcaccactttctaagatactaattatgctgtttattatgtttcttttttattttctatcttctgttaggatgtaagcctcatgag

SEQ ID NO: 95467 - DNA, 120 bp, Artificial Sequence
  ENSG00000089818_57 (sequence is synthesized)
ggttggaatctttgttttggttgctgttgtatcctaagcatctggaacagtgatgcatctgtcctaataagtactgtataaatattgattgaattcagtgaaagatagtatatttactga

SEQ ID NO: 95468 - DNA, 120 bp, Artificial Sequence
  ENSG00000089818_58 (sequence is synthesized)
tttgggagggctcccattacctaggatatttaatgtagtagactttgttgttatctgattagtaaagcatggttatctagtataccatctatagtttgaaaatagcatcgttatgagaaa

SEQ ID NO: 95469 - DNA, 120 bp, Artificial Sequence
  ENSG00000089818_59 (sequence is synthesized)
tgaaaatagcatcgttatgagaaattttatttatttctttatttgagaccaagtctcgttctgtcgcccaggctggagagcggtggcgcagtctcggctcactgcagcctccacctccca

SEQ ID NO: 95470 - DNA, 120 bp, Artificial Sequence
  ENSG00000089818_60 (sequence is synthesized)
acctcccaggttcagttgattctgcctcagcctcccaagggatttcaggcgcacgccaccataaccagctaatttttgtatttttagaagacggggtttcaccgtgttggccagactggt

SEQ ID NO: 95471 - DNA, 120 bp, Artificial Sequence
  ENSG00000089818_61 (sequence is synthesized)
gctgggattacaggcttgagccaccatgctcggccagaattttattttttattgcttttattcgtgcttttccatctttttaatgatgcttattggactccaaagtcctcaagtagtagc

SEQ ID NO: 95472 - DNA, 120 bp, Artificial Sequence
  ENSG00000089818_62 (sequence is synthesized)
gtcctcaagtagtagcattgtcttttacttgctttggactgtatgtaacatgaggcatctaaatagatcatgaattattcttgttgattaataggtagaaagaataggcaatccaggata

SEQ ID NO: 95473 - DNA, 120 bp, Artificial Sequence
  ENSG00000089818_63 (sequence is synthesized)
cacacacacacacacacacacacctttccagttccccatgcacatttatgggtaatcgtgttgcttgccactctggattatctgatttattttttgtactgttgtcaatttcgtcaccaa

SEQ ID NO: 95474 - DNA, 120 bp, Artificial Sequence
  ENSG00000089818_64 (sequence is synthesized)
agcaatgacttgtggggagacttcagcactgcctccaggtaatgggcatagtgaaactagcatactctcaatcagggtgtaggagatatgtacagtcaattgaaatctttgatctggaga

SEQ ID NO: 95475 - DNA, 120 bp, Artificial Sequence
  ENSG00000089818_65 (sequence is synthesized)
atatgcaggtcacatagagtcttttggaagagttctagtgaaggaaatatagtagtgctgggaatggggggacaaaaaagctgtaggatgaggtttgagtgggatatttcaggcctttgt

SEQ ID NO: 95476 - DNA, 120 bp, Artificial Sequence
  ENSG00000089818_66 (sequence is synthesized)
aagtagaattgccatgaagtgtggttttggaaattctaggcagtgatttcttagaaactattaagtaaagaatggagttgttatcctaatattatgtctctggctttctctgttctcctg

SEQ ID NO: 95477 - DNA, 120 bp, Artificial Sequence
  ENSG00000089818_67 (sequence is synthesized)
tcttgcagctctgttccaaaccaggcaccacagccatccaactgggtccagttctgaatggcattggcaggacattaaggacagacttgaggaataaaaatgaccttgagggcaccaatc

SEQ ID NO: 95478 - DNA, 120 bp, Artificial Sequence
  ENSG00000089820_0 (sequence is synthesized)
cgtgggagcagtggggttcgacggcgcggccgcgaggccgccatggccgctcacgggaagctgcggcgggagcgggggctgcaggctgagtatgagacgcaagtcaaagagatgcgctgg

SEQ ID NO: 95479 - DNA, 120 bp, Artificial Sequence
  ENSG00000089820_1 (sequence is synthesized)
cagctgagcgagcagctgcgctgcctggagctgcagggcgagctgcggcgggagttgctgcaggagctggcagagttcatgcggcgccgcgctgaggtggagctggaatactcccggggc

SEQ ID NO: 95480 - DNA, 120 bp, Artificial Sequence
  ENSG00000089820_2 (sequence is synthesized)
ctggaaaagctggccgagcgcttctccagccgtggaggccgcctggggagcagccgggagcaccaaagcttccggaaggagccgtccctcctgtcgcccttgcactgctgggcggtgctg

SEQ ID NO: 95481 - DNA, 120 bp, Artificial Sequence
  ENSG00000089820_3 (sequence is synthesized)
ctgcagcacacgcggcagcagagccgggagagcgcggccctgagtgaggtgctggccgggcccctggcccagcgcctgagtcacattgcagaggacgtggggcgcctggtcaagaagagc

SEQ ID NO: 95482 - DNA, 120 bp, Artificial Sequence
  ENSG00000089820_4 (sequence is synthesized)
agggatctggagcagcagctgcaggatgagctcctggaggtggtctcagagctccagacggccaagaagacgtaccaggcatatcacatggagagcgtgaatgccgaggccaagctccgg

SEQ ID NO: 95483 - DNA, 120 bp, Artificial Sequence
  ENSG00000089820_5 (sequence is synthesized)
gaggccgagcggcaggaggagaagcgggcaggccggagtgtccccaccaccaccgctggtgccactgaggcagggcccctccgcaagagctccctcaagaagggagggaggctggtggag

SEQ ID NO: 95484 - DNA, 120 bp, Artificial Sequence
  ENSG00000089820_6 (sequence is synthesized)
aagcggcaggccaagttcatggagcacaaactcaagtgcacaaaggcgcgcaacgagtacctgcttagcctggctagtgtcaacgctgctgtcagtaactactacctgcatgacgtcttg

SEQ ID NO: 95485 - DNA, 120 bp, Artificial Sequence
  ENSG00000089820_7 (sequence is synthesized)
gacctcatggactgctgtgacacagggttccacctggccctggggcaggtgctccggagctacacggccgctgagagccgcacccaagcctcccaagtgcagggcctgggcagcctggaa

SEQ ID NO: 95486 - DNA, 120 bp, Artificial Sequence
  ENSG00000089820_8 (sequence is synthesized)
gaagctgtggaggccctggatcctccaggggacaaagccaaggttctcgaggtgcatgctaccgtcttctgtcccccgctgcgctttgactaccacccccatgatggggatgaggtggct

SEQ ID NO: 95487 - DNA, 120 bp, Artificial Sequence
  ENSG00000089820_9 (sequence is synthesized)
gagatctgcgttgaaatggagctgcgggacgagattctgcccagagcccagaacatccagagccgcctggaccgacagaccattgagacagaggaggtgaacaagactctgaaggcgaca

SEQ ID NO: 95488 - DNA, 120 bp, Artificial Sequence
  ENSG00000089820_10 (sequence is synthesized)
ctgcaggccctgctggaggtggtggcctcggatgacggggatgtgcttgattccttccagaccagcccctccaccgagtccctcaagtccaccagctcagacccaggcagccggcaggcg

SEQ ID NO: 95489 - DNA, 120 bp, Artificial Sequence
  ENSG00000089820_11 (sequence is synthesized)
ggccggaggcgcggccagcagcaggagaccgaaaccttctacctcacgaagctccaggagtatctgagtggacggagcatcctcgccaagctgcaggccaagcacgagaagctgcaggag

SEQ ID NO: 95490 - DNA, 120 bp, Artificial Sequence
  ENSG00000089820_12 (sequence is synthesized)
gcccttcagcgaggtgacaaggaggagcaggaggtgtcttggacccagtacacacagagaaaattccagaagagccgccagccccgccccagctcccagtataaccagagactctttggg

SEQ ID NO: 95491 - DNA, 120 bp, Artificial Sequence
  ENSG00000089820_13 (sequence is synthesized)
cgggtgcccagctccgggtctcagagatccgtgatgccttcgagagaggggaggacccactggtggagggctgcactgcccatgacctggactcggtggccggggtgctgaagctctact

SEQ ID NO: 95492 - DNA, 120 bp, Artificial Sequence
  ENSG00000089820_14 (sequence is synthesized)
tccggagcctggagcccccactcttccccccagacctgttcggcgagctgctggcttcttcggagctggaggccacagcggagagggtggagcacgtgagccgcctgctgtggcggctgc

SEQ ID NO: 95493 - DNA, 120 bp, Artificial Sequence
  ENSG00000089820_15 (sequence is synthesized)
ccgcgccggtgctggtggttctgcgctacctcttcaccttcctcaaccacctggcccagtacagcgatgagaacatgatggacccctacaacctggccgtgtgcttcgggcccacgctgc

SEQ ID NO: 95494 - DNA, 120 bp, Artificial Sequence
  ENSG00000089820_16 (sequence is synthesized)
taccggtgcccgctgggcaggacccggtggcgctgcagggccgggtgaaccagctggtgcagacgctcatagtgcagcccgatcgggtcttcccgcccctgacctcgctgcctggccccg

SEQ ID NO: 95495 - DNA, 120 bp, Artificial Sequence
  ENSG00000089820_17 (sequence is synthesized)
tctacgagaagtgcatggcaccgccttccgccagctgcctgggggacgcccagctggagagcctgggggcggacaatgagccggagctggaagccgagatgcccgcacaggaggatgacc

SEQ ID NO: 95496 - DNA, 120 bp, Artificial Sequence
  ENSG00000089820_18 (sequence is synthesized)
tggagggggtcgtggaggctgtggcctgctttgcctacacgggccgcacagcccaggagctgagcttccggcggggggacgtactgcggctgcacgagagggcctcgagcgactggtggc

SEQ ID NO: 95497 - DNA, 120 bp, Artificial Sequence
  ENSG00000089820_19 (sequence is synthesized)
ggggggagcacaacggcatgcggggcctcatcccccacaagtatatcacgctgcccgccgggacggagaagcaggtggtgggcgcagggctgcagactgcaggggagtctgggagcagtc

SEQ ID NO: 95498 - DNA, 120 bp, Artificial Sequence
  ENSG00000089820_20 (sequence is synthesized)
ccgagggcctcctggcatcggagctggtccaccggccagagccatgcacctcacctgaggccatgggaccctctggacacagacgacgctgcttggtcccagcctccccagagcaacacg

SEQ ID NO: 95499 - DNA, 120 bp, Artificial Sequence
  ENSG00000089820_21 (sequence is synthesized)
tggaggtggataaggctgtggcacagaacatggactctgtgtttaaggagctcttgggaaagacctctgtccgccagggccttgggccagcatctaccacctctcccagtcctgggcccc

SEQ ID NO: 95500 - DNA, 120 bp, Artificial Sequence
  ENSG00000089820_22 (sequence is synthesized)
gaagcccaaaggccccgcccagcagccgcctgggcaggaacaaaggcttctcccggggccctggggccccagcctcaccctcagcttcccacccccagggcctagacacgacccccaagc

SEQ ID NO: 95501 - DNA, 120 bp, Artificial Sequence
  ENSG00000089820_23 (sequence is synthesized)
cacactgaggtgccgctgctggagatgcgtgcccccggcggctacccgctggaccggccactctccccagcccccttgcttctctccagccctgtccagcaagtgcagggtgcctgcact

SEQ ID NO: 95502 - DNA, 120 bp, Artificial Sequence
  ENSG00000089820_24 (sequence is synthesized)
tcaccctgtgcagagaggtgggatggggccgtgcacacagggatgcccgctccacatcctgcctgcccctcagccctggcccaggccccttttggaggcagctgaggaaggatgctgggg

SEQ ID NO: 95503 - DNA, 120 bp, Artificial Sequence
  ENSG00000089820_25 (sequence is synthesized)
aaagccctcttctgcagctttgtggaaggctgatcagtggctgctgggtggcgggtacccttgctcagatgcctggcagggctgggtggcgattcataaagacctcgtgttgattccccg

SEQ ID NO: 95504 - DNA, 120 bp, Artificial Sequence
  ENSG00000089820_26 (sequence is synthesized)
agccccactggcaccccactgctccagctggcacccactctgcttcctgtctctatggatttgcctggctggacacttcacataagtggattcattccttctcgtggctgaatcctcttc

SEQ ID NO: 95505 - DNA, 120 bp, Artificial Sequence
  ENSG00000089820_27 (sequence is synthesized)
cattctgtgggtagaccgcgctgagtttagccatccgtcagttggatgagtggtgccgccacgaacctctgtggacaagtcttggtttggacacgtgtgttcactcctgccattcttcag

SEQ ID NO: 95506 - DNA, 120 bp, Artificial Sequence
  ENSG00000089820_28 (sequence is synthesized)
cagcagcaggagaccgaaaccttctacctcacggtggggagggctgggctggtgggcgggacccgtgggggcattgctggggcagagggaggggctcaagccagggctaacacttggggc

SEQ ID NO: 95507 - DNA, 120 bp, Artificial Sequence
  ENSG00000089820_29 (sequence is synthesized)
accttcctcaaccagtgagtgctgcggggcgagtgctggggtgggggccaggggtcgaggggacagggggactcggggtgcgggctctctgcttgtgatgtgcgtgtccccccagcctgg

SEQ ID NO: 95508 - DNA, 120 bp, Artificial Sequence
  ENSG00000089820_30 (sequence is synthesized)
gaaggtctgggctgggccagagaacagagcctctctgaccactcctggctggcgcggagctgctggccctggaccccgtgcagggaaggagcactcgaaacaggccggtccttcccaccg

SEQ ID NO: 95509 - DNA, 120 bp, Artificial Sequence
  ENSG00000089820_31 (sequence is synthesized)
gtcccagccccggccgtcccggcgtcgcttcggagcgcggcggcagctgactgcgccttcacgatccgctgggacccgcgagccccgccgccgttatgaacatccgcaatgcgaggccag

SEQ ID NO: 95510 - DNA, 120 bp, Artificial Sequence
  ENSG00000089820_32 (sequence is synthesized)
aggacctaatgaacatgcagcactgcaacctcctctgcctgcccgagaactaccagatgaaatactacttctaccatggcctttcctggccccagctctcttacattgctgaggacgaga

SEQ ID NO: 95511 - DNA, 120 bp, Artificial Sequence
  ENSG00000089820_33 (sequence is synthesized)
atgggaagattgtggggtatgtcctggccaaaatggaagaggacccagatgatgtgccccatggacatatcacctcattggctgtgaagcgttcccaccggcgcctcggtctggctcaga

SEQ ID NO: 95512 - DNA, 120 bp, Artificial Sequence
  ENSG00000089820_34 (sequence is synthesized)
aactgatggaccaggcctctcgagccatgatagagaacttcaatgccaaatatgtctccctgcatgtcaggaagagtaaccgggccgccctgcacctctattccaacaccctcaactttc

SEQ ID NO: 95513 - DNA, 120 bp, Artificial Sequence
  ENSG00000089820_35 (sequence is synthesized)
ggagggcaggagtggcaggacagtgccatcaggttccagggattccatacggaaggctcccagggcctgagagagtggggaaaacagttgcctggccctggacagccccatgcagcctct

SEQ ID NO: 95514 - DNA, 120 bp, Artificial Sequence
  ENSG00000089820_36 (sequence is synthesized)
tccgtgtgtttgcaagggaggctgccacctcccggagcctgggtaccggcgggaaaggaagtcgcaggggaaaccattcagaggctttccaggaacgagggagagacaggaagccaaact

SEQ ID NO: 95515 - DNA, 120 bp, Artificial Sequence
  ENSG00000089820_37 (sequence is synthesized)
tctcaaggctccctggggctccctgggcctctctgggggctgacttgggaagggaggaccccatcggatgtctgggggaaggaggcaacccagggggagtccagagcctggggcagcaat

SEQ ID NO: 95516 - DNA, 120 bp, Artificial Sequence
  ENSG00000089820_38 (sequence is synthesized)
tcctggcacccagcacccagttcccagcacctggcatgggaggccatcctggaggggctggggaagatgctcagtgcccaccagctccttgtcctcccacaggcctgcagcatgaaggca

SEQ ID NO: 95517 - DNA, 120 bp, Artificial Sequence
  ENSG00000089847_0 (sequence is synthesized)
ctaggggccaggactggtcaggaaggaggaagcggtccttttgaggagggcgaggcaacggaccctgccgcccaccaggactggtgtccctcaccttacccccacccttgccctcctcag

SEQ ID NO: 95518 - DNA, 120 bp, Artificial Sequence
  ENSG00000089847_1 (sequence is synthesized)
gtggcctgtggagaggagaaacacagggcaccaactatgaagactctcagggcgcgatttaagaagacagagctgcggctcagccccactgaccttggctcctgcccgccctgcggcccc

SEQ ID NO: 95519 - DNA, 120 bp, Artificial Sequence
  ENSG00000089847_2 (sequence is synthesized)
tgccccatcccgaagccggcagccagaggcaggcgccagagtcaagactggggcaagagtgacgagaggctgctacaagccgtggaaaacaacgatgcacctcgggtggccgccctcatc

SEQ ID NO: 95520 - DNA, 120 bp, Artificial Sequence
  ENSG00000089847_3 (sequence is synthesized)
gcccgcaaggggctggtgcccacgaagctagaccccgagggcaagtccgcgttccacctggcggccatgcggggtgcggccagctgtctggaggtgatgatagctcatggcagcaatgtc

SEQ ID NO: 95521 - DNA, 120 bp, Artificial Sequence
  ENSG00000089847_4 (sequence is synthesized)
atgagcgcggacggggcaggttacaatgccctccacctggccgccaaatacgggcacccacagtgcttgaagcaactactgcaggcttcctgcgtggtggacgtcgtggacagcagcggg

SEQ ID NO: 95522 - DNA, 120 bp, Artificial Sequence
  ENSG00000089847_5 (sequence is synthesized)
tggactgccctacaccatgcagcggctggtggctgtctctcctgctcagaggtgctctgctcctttaaggcacatctaaacccccaagatcggtcaggcgcaacacccctcattatagca

SEQ ID NO: 95523 - DNA, 120 bp, Artificial Sequence
  ENSG00000089847_6 (sequence is synthesized)
gctcagatgtgtcacacagacctgtgccgtctcctactgcagcaaggggctgccgcgaacgatcaggacctgcaaggcaggacggccctgatgctggcctgtgagggggccagccccgaa

SEQ ID NO: 95524 - DNA, 120 bp, Artificial Sequence
  ENSG00000089847_7 (sequence is synthesized)
acagtggaggtcctgctgcagggcggagcccagccgggcatcaccgatgcgctggggcaggacgcggctcactatggcgccctggcgggggacaaactcatcctgcaccttctgcaagag

SEQ ID NO: 95525 - DNA, 120 bp, Artificial Sequence
  ENSG00000089847_8 (sequence is synthesized)
gcggcccagcgcccctccccacccagcgccctcacagaggatgattcaggcgaggcgtcatctcagaactctatgtccagccatggaaagcagggggcccccaagaagcggaaggcgcct

SEQ ID NO: 95526 - DNA, 120 bp, Artificial Sequence
  ENSG00000089847_9 (sequence is synthesized)
ccacctcccgccagcattcccatgccggatgatcgagatgcctatgaggagatcgtgaggctgcggcaggagaggggccgcctcctgcagaagatccggggcctggaacagcacaaggaa

SEQ ID NO: 95527 - DNA, 120 bp, Artificial Sequence
  ENSG00000089847_10 (sequence is synthesized)
cggaggcagcaggagtccccggaggccagctccctgcacatcctggagagacaggtgcaagagctacagcagttgctggtggagagacaagaggagaaggagagcctgggacgggaggtg

SEQ ID NO: 95528 - DNA, 120 bp, Artificial Sequence
  ENSG00000089847_11 (sequence is synthesized)
gagagtttgcagagccggctgtccctgctggagaacgagcgggagaatactagctatgacgtaaccaccctgcaggatgaggagggtgagctgcctgaccttccaggggccgaggtgctg

SEQ ID NO: 95529 - DNA, 120 bp, Artificial Sequence
  ENSG00000089847_12 (sequence is synthesized)
ctgtccagacaactcagtccgtcggcccaggaacacctggcctcgctgcaggaacaggtggctgtgctcaccagacagaaccaggaactgatggagaaggtccagatcctggagaacttt

SEQ ID NO: 95530 - DNA, 120 bp, Artificial Sequence
  ENSG00000089847_13 (sequence is synthesized)
gagaaggacgagacacagatggaagtggaagctttggcagaggtcatccctcttgccctctatgactctctccgggccgagtttgaccagctacgcaggcagcacgctgaggccctgcag

SEQ ID NO: 95531 - DNA, 120 bp, Artificial Sequence
  ENSG00000089847_14 (sequence is synthesized)
gccctgaggcagcaggagacacgagaggtccccagagaagagggggcagcctgtggggagagtgaggttgctggagccacggccaccaaaaacgggccaacccacatggagctaaatggc

SEQ ID NO: 95532 - DNA, 120 bp, Artificial Sequence
  ENSG00000089847_15 (sequence is synthesized)
tcagtggctccagaaaccaaagttaacggagccgagaccatagatgaggaggctgcaggagatgaaaccatggaagccaggactatggaagctgaggccacgggagccgaggccacggga

SEQ ID NO: 95533 - DNA, 120 bp, Artificial Sequence
  ENSG00000089847_16 (sequence is synthesized)
accacagaagaagaagcaaacatggaaactaagcccacaggagctcaggccacagacacagagaccacgggagtggaggccatgggggtggaggccacaaaaacaaaagcagaggaagca

SEQ ID NO: 95534 - DNA, 120 bp, Artificial Sequence
  ENSG00000089847_17 (sequence is synthesized)
gaaatgcaggcctacggagtgggtgctgggcaagcagagcccccagtcacagggaccacaaacatggaggccacgggctctagggccacagggatggaatccacaggagtcagtgccaca

SEQ ID NO: 95535 - DNA, 120 bp, Artificial Sequence
  ENSG00000089847_18 (sequence is synthesized)
ggtgtggagaacccaggggtagaggccacggtcccggggatctctgctggccccatcctacatcctggtgccgcagaggcctcggaaaagcttcaagtagagctggagaccaggatccgt

SEQ ID NO: 95536 - DNA, 120 bp, Artificial Sequence
  ENSG00000089847_19 (sequence is synthesized)
ggcttggaggaggctctccggcagcgggagcgggaggcagctgcggagctggaggcggccctggggaagtgcgaggccgcggaggccgaggcaggccggctgcgagagcgtgtccgcgag

SEQ ID NO: 95537 - DNA, 120 bp, Artificial Sequence
  ENSG00000089847_20 (sequence is synthesized)
tgcgagagcgtgtccgcgaggccgagggcagcggggccagcgggggcggtggcggtgacaccacacagctgcgggcggccctggagcaggcccgggaggacctccgagaccgggactccc

SEQ ID NO: 95538 - DNA, 120 bp, Artificial Sequence
  ENSG00000089847_21 (sequence is synthesized)
ctgcctggatgaggctcgggccagccggctgctggcggaggaggaggcgcggggcctgcgggccgagctggcccagcgggaggaggcgcggctggagcagagccgggagctggaggttct

SEQ ID NO: 95539 - DNA, 120 bp, Artificial Sequence
  ENSG00000089847_22 (sequence is synthesized)
gaggttctgcgggagcagctggccacggccagggccacgggggagcagcagcgcacggcggccgcggaactgggccgggcacgggacgccgctgaggcccgagtggctgagctgcctgcg

SEQ ID NO: 95540 - DNA, 120 bp, Artificial Sequence
  ENSG00000089847_23 (sequence is synthesized)
gagtggctgagctgcctgcggcctgcgaggaggcgcggcagggcctggccgagctgcgggaggcctccgaggccctccgccagtccgtggtgccggcctctgagcaccgccggctgcagg

SEQ ID NO: 95541 - DNA, 120 bp, Artificial Sequence
  ENSG00000089847_24 (sequence is synthesized)
ggccgggcagccagtctggagcaggaggtggtggccacgggcaaggaggccgcccggctgcgcgcggagctggagcgggagcgtgtgtgcagcgtggcgctctcggagcacgaacgcatc

SEQ ID NO: 95542 - DNA, 120 bp, Artificial Sequence
  ENSG00000089847_25 (sequence is synthesized)
gtgggcaccctgcaggccaacgtggcccagctggaggggcagctggaggagctgggacggcggcatgagaagaccagcgcagaggtcttccaggtgcagcgtgaggccctgttcatgaag

SEQ ID NO: 95543 - DNA, 120 bp, Artificial Sequence
  ENSG00000089847_26 (sequence is synthesized)
agtgagcgacacgcagccgaggcacagctggccacagcagagcagcagctacgggggctacggaccgaggcggaaagggctcgccaggcccagagccgggcccaggaggctctggacaag

SEQ ID NO: 95544 - DNA, 120 bp, Artificial Sequence
  ENSG00000089847_27 (sequence is synthesized)
gccaaggagaaggacaagaagatcacagaactctccaaagaagtcttcaatcttaaggaagccttgaaggagcagccggccgccctcgccacccctgaggtggaggctctccgtgaccag

SEQ ID NO: 95545 - DNA, 120 bp, Artificial Sequence
  ENSG00000089847_28 (sequence is synthesized)
gtgaaggatttacagcagcagctgcaggaagctgccagggaccactccagcgtggtggctttgtacagaagccacctcctatatgccattcagggccagatggatgaagatgtgcagcgg

SEQ ID NO: 95546 - DNA, 120 bp, Artificial Sequence
  ENSG00000089847_29 (sequence is synthesized)
attctcagccagattctgcagatgcagagactccaggctcagggccgctgagaaaggccaggcccagtggctacactgaccacacccacgcagggacctcacccccctgcaggccccttg

SEQ ID NO: 95547 - DNA, 120 bp, Artificial Sequence
  ENSG00000089847_30 (sequence is synthesized)
cagaccggcttcacttggcttcacttggccctatccaggcccatgcacttggagaccagcctggttccctgcccgaccacccccagctggctccatcaccccacctggtctctgcacgca

SEQ ID NO: 95548 - DNA, 120 bp, Artificial Sequence
  ENSG00000089847_31 (sequence is synthesized)
cacactggtcagtctggacccgggccgtgactgcccctcccccaccaccggagactgtgattccctgtgtcctccacatccagacgccagcccaggaataaaggcattctgtgcacaggg

SEQ ID NO: 95549 - DNA, 120 bp, Artificial Sequence
  ENSG00000089847_32 (sequence is synthesized)
gtggcctggaggactcatttaagaatcatgtgttgagtacctactttgtactgggcacactggagagcaaaggtggtaccatctatgccctggtggctgcgggtggacacaaacatgtga

SEQ ID NO: 95550 - DNA, 120 bp, Artificial Sequence
  ENSG00000089847_33 (sequence is synthesized)
gagggagccgggcccccggcgccgcgtcctcctcatcctccaggcgacaaggtcaggaggggccggggcggcgccccttccctcagcccccagcccccagccccctacctgggtcttccc

SEQ ID NO: 95551 - DNA, 120 bp, Artificial Sequence
  ENSG00000089847_34 (sequence is synthesized)
cttccctcagcccccagcccccagccccctacctgggtcttcccattccatcccgtgggggagggggctggcgaggagggcaagggggagggggcggcaccagggagggcgggaccgggc

SEQ ID NO: 95552 - DNA, 120 bp, Artificial Sequence
  ENSG00000089847_35 (sequence is synthesized)
ccctccggccgctccccgcggtccctccagaccctctggccgccgcctcctcttggaaccccgtgcgccccccgcgccccgcgccccggacgccatgaagcagctgtgtctgtgcgcagc

SEQ ID NO: 95553 - DNA, 120 bp, Artificial Sequence
  ENSG00000089876_0 (sequence is synthesized)
gcagaatcattttctgaaccagccaggaaataccggaacccaccaaactttaaacaccagcctaaattattcctgttcttttaagcaggcagcagaaatgacagaaacccgttaacagaa

SEQ ID NO: 95554 - DNA, 120 bp, Artificial Sequence
  ENSG00000089876_1 (sequence is synthesized)
aaaaaaaaaataatgcttttcatttgaactcctgtgcattttctttttaacttatatgtgttcctaattttccttactctttttgtttgtttgtttcttagtgtggtttattgacaatca

SEQ ID NO: 95555 - DNA, 120 bp, Artificial Sequence
  ENSG00000089876_2 (sequence is synthesized)
tttacaatgccgaagagtgctgtagtgagccagcacagtgggtaacacagcaacggagaacagatgcaggtttgaggaatttaacttgctaaaaccttgaactgaagtcttagagattgg

SEQ ID NO: 95556 - DNA, 120 bp, Artificial Sequence
  ENSG00000089876_3 (sequence is synthesized)
aacatacgggtttgtataaataggcttttaagccctgtttgcaatgggttactgataggagaaacttgcttgtggaatgtcagctgcgtgagctcactgtcagacaagatggaagaagaa

SEQ ID NO: 95557 - DNA, 120 bp, Artificial Sequence
  ENSG00000089876_4 (sequence is synthesized)
gggctggagtgtccaaactcttcctctgaaaaacgctattttcctgaatccctggattccagcgatggggatgaggaagaggttttggcctgtgaggatttggaacttaacccctttgat

SEQ ID NO: 95558 - DNA, 120 bp, Artificial Sequence
  ENSG00000089876_5 (sequence is synthesized)
ggattgccatattcatcacgttattataaacttctgaaagaaagagaagatcttcctatatggaaagaaaaatactcctttatggagaacctgcttcaaaatcaaatcgtgattgtttca

SEQ ID NO: 95559 - DNA, 120 bp, Artificial Sequence
  ENSG00000089876_6 (sequence is synthesized)
ggagatgctaaatgtggtaagagcgctcaggttcctcagtggtgtgctgaatattgtctttccatccactaccagcacgggggcgtgatatgcacacaggtccacaagcagactgtggtc

SEQ ID NO: 95560 - DNA, 120 bp, Artificial Sequence
  ENSG00000089876_7 (sequence is synthesized)
cagctcgccctgcgggtggcggatgaaatggatgttaacattggtcatgaggttggctacgtgatccctttcgagaactgctgtaccaacgaaacaatcctgaggtattgtactgatgat

SEQ ID NO: 95561 - DNA, 120 bp, Artificial Sequence
  ENSG00000089876_8 (sequence is synthesized)
atgctgcaaagagaaatgatgtccaatccttttttgggtagctatggggtcatcatcttagatgatattcatgaaagaagcattgcaactgatgtgttacttggacttcttaaagatgtt

SEQ ID NO: 95562 - DNA, 120 bp, Artificial Sequence
  ENSG00000089876_9 (sequence is synthesized)
ttactagcaagaccagaactgaagctcataattaactcctcacctcacctgatcagcaaactcaattcttattatggaaacgtgcctgtcatagaagtgaaaaataaacaccctgtggag

SEQ ID NO: 95563 - DNA, 120 bp, Artificial Sequence
  ENSG00000089876_10 (sequence is synthesized)
gttgtgtaccttagtgaggctcaaaaggattcttttgagtctattttacgccttatctttgaaattcaccactcgggtgagaaaggtgacattgtagtctttctggcctgtgaacaagat

SEQ ID NO: 95564 - DNA, 120 bp, Artificial Sequence
  ENSG00000089876_11 (sequence is synthesized)
attgagaaagtctgtgaaactgtctatcaaggatctaacctaaacccagatcttggagaactggtggttgttcctttgtatccaaaagagaaatgttcattgttcaagccactcgatgaa

SEQ ID NO: 95565 - DNA, 120 bp, Artificial Sequence
  ENSG00000089876_12 (sequence is synthesized)
ctctggagagtttttgatctggagcaactcagtcagatttgttatcgatgtgggtgtggaaagaagaaaggtgtacaacccgagaataagagcaaactcgctcgtcatgcagcccatcag

SEQ ID NO: 95566 - DNA, 120 bp, Artificial Sequence
  ENSG00000089876_13 (sequence is synthesized)
ccagagccaggcagagatacgcaagcagattcttggctcatcttcttcaggaaaatttttctgcctgtacactgaagaatttgcctccaaagacatgacgccactgaagccagcagaaat

SEQ ID NO: 95567 - DNA, 120 bp, Artificial Sequence
  ENSG00000089876_14 (sequence is synthesized)
gcaggaagccaacctaacaagcatggtgctttttatgaagaggatagacattgcgggcctaggccactgtgacttcatgaacagaccagcaccagaaagtttgatgcaggcattggaaga

SEQ ID NO: 95568 - DNA, 120 bp, Artificial Sequence
  ENSG00000089876_15 (sequence is synthesized)
cttagattatctggcagcactggataatgatggaaatctttctgaatttggaatcatcatgtcagagtttcctcttgatccacaactctcgaagtctatcttagcgtcctgtgaatttga

SEQ ID NO: 95569 - DNA, 120 bp, Artificial Sequence
  ENSG00000089876_16 (sequence is synthesized)
ctgtgtagatgaagtgctaacaatcgcagccatggtaacagctccaaattgcttttcacatgtgccacatggagctgaagaggctgccttgacttgttggaagacatttttacatcccga

SEQ ID NO: 95570 - DNA, 120 bp, Artificial Sequence
  ENSG00000089876_17 (sequence is synthesized)
aggagatcactttaccctcatcagcatttacaaggcttaccaagacacaactctgaattctagcagtgagtactgtgtggaaaagtggtgtcgtgattacttcctcaactgttcagcact

SEQ ID NO: 95571 - DNA, 120 bp, Artificial Sequence
  ENSG00000089876_18 (sequence is synthesized)
cagaatggcagatgttattcgagctgaactcttagaaattatcaagcgaatcgagcttccctatgcagaacctgcttttggctccaaggaaaacactctaaacataaagaaagctcttct

SEQ ID NO: 95572 - DNA, 120 bp, Artificial Sequence
  ENSG00000089876_19 (sequence is synthesized)
gtccggttactttatgcagattgctcgggatgttgatggatcaggtaactacttaatgctgacacataagcaggttgctcagctgcatcccctgtctggttactcaatcaccaagaagat

SEQ ID NO: 95573 - DNA, 120 bp, Artificial Sequence
  ENSG00000089876_20 (sequence is synthesized)
gccagagtgggtcctcttccataaattcagcatttctgagaacaactacatcaggattacctcagaaatctctcctgaactatttatgcagctggtaccacaatactatttcagtaatct

SEQ ID NO: 95574 - DNA, 120 bp, Artificial Sequence
  ENSG00000089876_21 (sequence is synthesized)
gcctcctagtgaaagtaaggacattctacagcaagtagtggatcacctatcccctgtgtcaacaatgaataaggaacagcaaatgtgtgagacgtgccctgaaactgaacagagatgcac

SEQ ID NO: 95575 - DNA, 120 bp, Artificial Sequence
  ENSG00000089876_22 (sequence is synthesized)
tctccagtgactccccagcaaacacaaggtgcagcagggtcccaaaggtagctggatggctgaactgctggatatgggagatacatgacgcgaagacggatttcacatccacaggacggt

SEQ ID NO: 95576 - DNA, 120 bp, Artificial Sequence
  ENSG00000089876_23 (sequence is synthesized)
cttgaagaaaataacactgtgtatattattttaaaataaaaaatagaagtttttattgagttctttaaattactactccatgcttttcttcttcttggaaaagtttttaaatcaaccact

SEQ ID NO: 95577 - DNA, 120 bp, Artificial Sequence
  ENSG00000089876_24 (sequence is synthesized)
cataatttgaccaaaattttaaaaaactggtattttgtaaatgtgtcagagacacatgggacagaaccctactttttgtagaggaacttaatctgaataaagtctgagtttttcagtaaa

SEQ ID NO: 95578 - DNA, 120 bp, Artificial Sequence
  ENSG00000089876_25 (sequence is synthesized)
aggtcaccggctgaggacactgctcctgaagcccggtcaggcggtcgcgccctccctggcggcccccgcggccccgcaggacctgtgccccgacgtcgccgacccgcggtccccgctgtc

SEQ ID NO: 95579 - DNA, 120 bp, Artificial Sequence
  ENSG00000089876_26 (sequence is synthesized)
gttctcattattccaattggcaagttttcactcattaggatcaacagccatgctgtttgcttggtaaaaaatctgccccaagtaattcaattatatgtggaaaaaggaagtgcaagcaag

SEQ ID NO: 95580 - DNA, 120 bp, Artificial Sequence
  ENSG00000089876_27 (sequence is synthesized)
ggaccgtacctgtgtaccagctgatgtgggaccccctggagcggcctctgcccagcttcctgggagccacttagcagaccaggaaacgagcacagctcacctagttctcagtgacctgtg

SEQ ID NO: 95581 - DNA, 120 bp, Artificial Sequence
  ENSG00000089876_28 (sequence is synthesized)
ataccttgctatttttctagatggatctgtcttcctacaaaacccttgagttaattcaatcccattctacaaatggtatggaaaggaaagagacataagctagagacctagagaatggaa

SEQ ID NO: 95582 - DNA, 120 bp, Artificial Sequence
  ENSG00000089876_29 (sequence is synthesized)
ttgagctgtaaaaactatggcagttgtgggaagtcatcttttttacttagatttttagtgaaatctaacaaaattaaatgggaaaacaatataaattatatttaacttccccaaagacgt

SEQ ID NO: 95583 - DNA, 120 bp, Artificial Sequence
  ENSG00000089876_30 (sequence is synthesized)
tttctcatttaggtgcatctttacttatttaaagatacatgtaggcagcaacacagggatttctttccctgtatctgttacgtagtattgcctaaaattttttgtaattcagacattttt

SEQ ID NO: 95584 - DNA, 120 bp, Artificial Sequence
  ENSG00000089902_0 (sequence is synthesized)
ggtgccagtgaagtgagggcggcgatgagagcgaaagttgcgctcggctcgtcgctgggggcttgaagcggctccgcgctctgcccgtttgggcctcccccgactcggactcgcgcccgt

SEQ ID NO: 95585 - DNA, 120 bp, Artificial Sequence
  ENSG00000089902_1 (sequence is synthesized)
gccccctcccccgtctcggcgccccctcctcaggagccgcgggtccccgccactttcgcacggccccggcccccgccgatgccggccatggtggagaagggccccgaggtctcagggaag

SEQ ID NO: 95586 - DNA, 120 bp, Artificial Sequence
  ENSG00000089902_2 (sequence is synthesized)
cgatgccggccatggtggagaagggccccgaggtctcagggaagcggagagggaggaacaacgcggccgcctccgcctccgccgccgccgcctccgccgccgcctcggccgcctgcgcct

SEQ ID NO: 95587 - DNA, 120 bp, Artificial Sequence
  ENSG00000089902_3 (sequence is synthesized)
agccgccactgccgcctcgggcgccgccgcctcctcagcctcggccgccgccgcctcagccgccgccgcccccaataatggccagaataaaagtttggcggcggcggcgcccaatggcaa

SEQ ID NO: 95588 - DNA, 120 bp, Artificial Sequence
  ENSG00000089902_4 (sequence is synthesized)
cagcagcagcaactcctgggaggaaggcagctcgggctcgtccagcgacgaggagcacggtggcggtggcatgagggtcggaccccagtaccaggcggtggtgcccgacttcgaccccgc

SEQ ID NO: 95589 - DNA, 120 bp, Artificial Sequence
  ENSG00000089902_5 (sequence is synthesized)
caaactggcaagacgcagtcaagaacgggacaatcttggcatgttggtctggtcacccaatcaaaatctgtcagaagcaaagttggatgaatacattgccattgccaaagaaaagcatgg

SEQ ID NO: 95590 - DNA, 120 bp, Artificial Sequence
  ENSG00000089902_6 (sequence is synthesized)
gtacaacatggaacaggctcttgggatgctcttctggcataaacataatatcgaaaagtcattggctgatttgcccaactttacccctttcccagatgagtggactgtggaagataaagt

SEQ ID NO: 95591 - DNA, 120 bp, Artificial Sequence
  ENSG00000089902_7 (sequence is synthesized)
cttatttgagcaagcctttagttttcatgggaaaacttttcatagaatccaacaaatgcttccagataaatctatagcaagtctggtgaaattttactattcttggaagaagacgaggac

SEQ ID NO: 95592 - DNA, 120 bp, Artificial Sequence
  ENSG00000089902_8 (sequence is synthesized)
taaaactagtgtgatggatcgccatgcccggaaacaaaaacgggagcgggaggagagcgaggatgaactggaagaggcaaatggaaacaatcccattgacattgaggttgatcaaaacaa

SEQ ID NO: 95593 - DNA, 120 bp, Artificial Sequence
  ENSG00000089902_9 (sequence is synthesized)
ggaaagcaaaaaggaggttccccctactgagacagttcctcaggtcaaaaaagaaaaacatagcacacaagctaaaaatagagcaaaaaggaaacctccaaaaggaatgtttctttctca

SEQ ID NO: 95594 - DNA, 120 bp, Artificial Sequence
  ENSG00000089902_10 (sequence is synthesized)
agaagatgtggaggctgtttctgccaatgccactgctgctaccacggtgctgagacaactagacatggaattggtttcagtcaaacgacagatccagaatattaaacagacaaacagtgc

SEQ ID NO: 95595 - DNA, 120 bp, Artificial Sequence
  ENSG00000089902_11 (sequence is synthesized)
tctcaaagaaaaacttgatggtggaatagaaccatatcgacttccagaggtcattcagaaatgtaatgcacgttggactacagaagagcagcttctcgccgtacaagccatcaggaaata

SEQ ID NO: 95596 - DNA, 120 bp, Artificial Sequence
  ENSG00000089902_12 (sequence is synthesized)
tggccgagattttcaggcaatctcagacgtgattgggaacaaatcagtggtacaagtgaaaaacttttttgtaaattatcgacgccgcttcaacatagatgaagttttacaagaatggga

SEQ ID NO: 95597 - DNA, 120 bp, Artificial Sequence
  ENSG00000089902_13 (sequence is synthesized)
ggcagaacatggtaaagaagagaccaatgggcccagtaaccagaagcctgtgaagtccccagataattccattaagatgcccgaagaggaagacgaggctcctgttctggatgtcagata

SEQ ID NO: 95598 - DNA, 120 bp, Artificial Sequence
  ENSG00000089902_14 (sequence is synthesized)
tgcatctgcctcctgagaaactggtggctttgaacacttggtgtggactactgtgttatccgggatatcaggtattatgagacatcacctagccatctgcatcacatctctctggacaag

SEQ ID NO: 95599 - DNA, 120 bp, Artificial Sequence
  ENSG00000089902_15 (sequence is synthesized)
cagctattaccaaaaaaggcatatacttccagtcctgtgctccatctgccttaattctttgctcgttcctccatgttggcgccacttcccagagagctccactgcatctcacactctgcc

SEQ ID NO: 95600 - DNA, 120 bp, Artificial Sequence
  ENSG00000089902_16 (sequence is synthesized)
cacgtgctggggaagtctcacggcctgcacatctcttgtgactctgggaaccgcctctcccgccggagcccccgagccccaccaatggcagctcttcccagtcagcagcttcagagcagg

SEQ ID NO: 95601 - DNA, 120 bp, Artificial Sequence
  ENSG00000089902_17 (sequence is synthesized)
cagtctccttggaaggcccgactctgttcctgcatggcctgcagtttctactttgtgcatagagtcattttcagagtcaccgcgaccctgttggccttctagaaagtttcttttgttctt

SEQ ID NO: 95602 - DNA, 120 bp, Artificial Sequence
  ENSG00000089902_18 (sequence is synthesized)
ttctgagacaaccacctaagtgataatacgcttttttggaaactaatatatattgccagactgcatcataacctttatcatgccaagcatcctgatgcaactcacatttccctaaacatg

SEQ ID NO: 95603 - DNA, 120 bp, Artificial Sequence
  ENSG00000089902_19 (sequence is synthesized)
gggtacagttatgatttataaattgagttggcttaaatctccctcttctcccttcccaagtgttacaaagatcatttactgcaactgtcgttggacactgtagcttaaagggaacgtgga

SEQ ID NO: 95604 - DNA, 120 bp, Artificial Sequence
  ENSG00000089902_20 (sequence is synthesized)
cctcaatgctttctgccttcaacttttcagcattgtgaccccagggtggttgccaccccatcttttcctgaccccccccacccccccacctccaagaggttcggcccacatcactgtacc

SEQ ID NO: 95605 - DNA, 120 bp, Artificial Sequence
  ENSG00000089902_21 (sequence is synthesized)
tggtgcttgtaaatttggaattggtgccttctccttttggcaaccatggttatcaatcctttttctgttttagtgtcttatttcttctttcaagttatttgctagccaaagatgacatca

SEQ ID NO: 95606 - DNA, 120 bp, Artificial Sequence
  ENSG00000089902_22 (sequence is synthesized)
ctgagattaggagacaggggagagcttgctgcagattctgacagtgcagattttaaatgtcaggatattagaatagctggcgctggtttatgaaagctgcgcgttgttccgcgttctctc

SEQ ID NO: 95607 - DNA, 120 bp, Artificial Sequence
  ENSG00000089902_23 (sequence is synthesized)
agaagtgatcaatgtattggtctagtgagactgagatgaaaagaaataacctacagagtggtctgtaatgccttttggttggactgggaacaagtaaaaatttctaataaacattttgag

SEQ ID NO: 95608 - DNA, 120 bp, Artificial Sequence
  ENSG00000089902_24 (sequence is synthesized)
acttccagaatcacttttgttatcttatcagaccatgggcctgctgagggttgagcagacagcctgcattctaacataccctgttcccaccccacggccattcagactgcactcaatacg

SEQ ID NO: 95609 - DNA, 120 bp, Artificial Sequence
  ENSG00000089902_25 (sequence is synthesized)
ctgaagtcgcttttgttgttgttgttgttgtttgcatcatttggatttttttcctgctttcaataccaaaaaaatgcagatgctttaaggcctaaacagaattctgaagaatttaaaata

SEQ ID NO: 95610 - DNA, 120 bp, Artificial Sequence
  ENSG00000089902_26 (sequence is synthesized)
tgcaattaaagtttgatatgttttgtctcccaagcaccttgttttttgttgttgttgttgttgttgaagtcagctgattttctctttagaaagagggtcagctagaaacctaggtttttt

SEQ ID NO: 95611 - DNA, 120 bp, Artificial Sequence
  ENSG00000089902_27 (sequence is synthesized)
ggaattgtaaatttttttttagtatagtctggagagaaaggtcattcaaaaggaaagtacaatgggacttgctgcccttcatcatctcgttcccgtgccaggtgtgtgttggtcacgtaa

SEQ ID NO: 95612 - DNA, 120 bp, Artificial Sequence
  ENSG00000089902_28 (sequence is synthesized)
aagcctgggaagcatcagaggagtcccggattgctgctgctacctggagacagggttagcaaaataacactagtgatgagggagaggcttcttttcaccataagcctgctgtgtacaccg

SEQ ID NO: 95613 - DNA, 120 bp, Artificial Sequence
  ENSG00000089902_29 (sequence is synthesized)
agggcggcaggagaagcatgggaaggagtcagcctaagtttgcacattgcataaagggtacactaaggtatgagctgaagctttaggttctccgtgcttccctcaagacctccttcttgc

SEQ ID NO: 95614 - DNA, 120 bp, Artificial Sequence
  ENSG00000089902_30 (sequence is synthesized)
taacagaagcagtaggcaattgctgcagtgcgtttctcaccctgccaataggtctgtctgtatctctgttaaggaaaatagcctggtccctcctggcagtgcttggaagcttgatgctaa

SEQ ID NO: 95615 - DNA, 120 bp, Artificial Sequence
  ENSG00000089902_31 (sequence is synthesized)
tttttatatagcgtggcaaactgaccagcagtgccaggccttgatctgtattctgcactatccctttacttggttcctggcactgaatggtctccagccctgaagaatcacgtgtgatca

SEQ ID NO: 95616 - DNA, 120 bp, Artificial Sequence
  ENSG00000089902_32 (sequence is synthesized)
cagcagctgacctgggctttctccccgagaggaaggggcatgtcatttttatttgacagagggaaaatgggagctgtccttgactgcctttgttgtgctttcccgcgtaagatagcactg

SEQ ID NO: 95617 - DNA, 120 bp, Artificial Sequence
  ENSG00000089902_33 (sequence is synthesized)
tgttttaaactgttgcattacactgtctttgcaatgatgtaaatgtaagaaatcacttagctttaaaagcgcagtggtttgatcttatttatatgaagactttttaacatatcaagaatt

SEQ ID NO: 95618 - DNA, 120 bp, Artificial Sequence
  ENSG00000089902_34 (sequence is synthesized)
aggtgcattggcaggtagggtttggggtgtgataactgcttcagatggaatgttcacttaagctttgtcttcttaaaaattatcaatgtgaatgtcataattatatatatttttgtggaa

SEQ ID NO: 95619 - DNA, 120 bp, Artificial Sequence
  ENSG00000089902_35 (sequence is synthesized)
aattttctcctaagtataagttattgtgcaaaatatagtgtcattgatgcaaataatagtttaacttttagtttagaactcctaaaagatataaattgtattgcatatgcattaaaagtt

SEQ ID NO: 95620 - DNA, 120 bp, Artificial Sequence
  ENSG00000089902_36 (sequence is synthesized)
tgttttatttaattttatgtagatgtgtgaagtgttaggtaaaatttttttcacttatccatttaaacaccttgttacttgaatattgtgttgactggtctgcaacagtgatccattctg

SEQ ID NO: 95621 - DNA, 120 bp, Artificial Sequence
  ENSG00000089902_37 (sequence is synthesized)
taatatagctcttttaactgggaaggaaccacaccccagttgtgccgattacattagtgttggcacacagtcgggtgctagtgtaacacaaatgccgcgttgtctgggtgtacagtgttt

SEQ ID NO: 95622 - DNA, 120 bp, Artificial Sequence
  ENSG00000089902_38 (sequence is synthesized)
gtggagacgccacttcctcaaaatggtttttgattgtttttaacctataagacgttctgatgctcacaaacctctattcaacacacaaaacaaacatgaaaaggtagttagttgggttgt

SEQ ID NO: 95623 - DNA, 120 bp, Artificial Sequence
  ENSG00000089902_39 (sequence is synthesized)
aacagcttactggggtggactcataaaacagtggctttctgttcatctaaagtttcctcagataccacagaccactgttaagtgtgctcattgtcactttaaatttcaacgataccctat

SEQ ID NO: 95624 - DNA, 120 bp, Artificial Sequence
  ENSG00000089902_40 (sequence is synthesized)
ttttgtcattctaaatatcagatgtactattggtataattgcacaccaaaaataagccaaacagtgcattacgctaactggatccctgcttttatgtgagctaaggaaagatggagccaa

SEQ ID NO: 95625 - DNA, 120 bp, Artificial Sequence
  ENSG00000089902_41 (sequence is synthesized)
ctccaacgagggcctctttttctctcttgtctagcctgtttctaaaccgaatgatccaggattcaagcttctattgtcaagtgaaactttcctcagatggactccaggtagccaggtcac

SEQ ID NO: 95626 - DNA, 120 bp, Artificial Sequence
  ENSG00000089902_42 (sequence is synthesized)
ctaaacctagtggtcctgtgcgatgctctttctgccagtccctgaatctctgcagcttctcttacctgtcttacctgtagtaaagcacaattgcagtggcgtcgcattcagaagaaggga

SEQ ID NO: 95627 - DNA, 120 bp, Artificial Sequence
  ENSG00000089902_43 (sequence is synthesized)
aggtcagcagaggctatgcatgttgtgtgatgatgagtgtttacagccaccttctcctaaaacgaaatttataccggggtggatagtattccattaggtagacttatcgactttgctaag

SEQ ID NO: 95628 - DNA, 120 bp, Artificial Sequence
  ENSG00000089902_44 (sequence is synthesized)
tgctttttagacagcttaaaaaattttcaagattttaaaagatgtataaggttaagtttgcaaatataatggaaatgctgtatatcttttgaagtgatgaaatccacgttggaattttaa

SEQ ID NO: 95629 - DNA, 120 bp, Artificial Sequence
  ENSG00000089902_45 (sequence is synthesized)
agaaaatatgttgtaataatgctgttgtaagtaatattttaatgtctctttgcctgttttctatttcagcacattcattgtggtgaatgttcatagcattataactgcttagccattgaa

SEQ ID NO: 95630 - DNA, 120 bp, Artificial Sequence
  ENSG00000089902_46 (sequence is synthesized)
tgataacatttgttagtggaaattggaaaatttatttgtgaaattctgcagaattcatttttctatttccaatatttgctgaggttaaataaaaattttcaagccattgatgtaataaaa

SEQ ID NO: 95631 - DNA, 120 bp, Artificial Sequence
  ENSG00000089902_47 (sequence is synthesized)
gagttggtattctgtttgaattacaaagatgtttttatctcagcagcctgaaaacatactaattttatattaaatcagtttattatttatatttggtaaaattagtacaaaattttcagt

SEQ ID NO: 95632 - DNA, 120 bp, Artificial Sequence
  ENSG00000089902_48 (sequence is synthesized)
ttgtcttccagcgaggatgaactggaagaggcaaatggaaacaatcccattgacattgaggttgatcaaaacaaggaaagcaaaaaggaggttccccctactgagacagttcctcaggtc

SEQ ID NO: 95633 - DNA, 90 bp, Artificial Sequence
  ENSG00000089902_49 (sequence is synthesized)
ctcacacctgtaatcccaacattttggaaggttgacgcatttgcttgagcccaggagctcaaggctgcattgatacaacagagggagacc

SEQ ID NO: 95634 - DNA, 120 bp, Artificial Sequence
  ENSG00000089916_0 (sequence is synthesized)
agagagggaagccccggcggtgagagtcggcccaaaaagcggcggccgttggaggtggctgcggcagctgatgtggcctcatggatgagctggtacacgacttagcctcagccttggagc

SEQ ID NO: 95635 - DNA, 120 bp, Artificial Sequence
  ENSG00000089916_1 (sequence is synthesized)
agacatctgagcagaataagcttggtgaactgtgggaggagatggcgctgagcccccgacagcagaggcggcagcttcggaaacgccgaggtcggaagcgtcgttctgacttcactcacc

SEQ ID NO: 95636 - DNA, 120 bp, Artificial Sequence
  ENSG00000089916_2 (sequence is synthesized)
tggcagagcatacctgctgctacagcgaggcctctgagtcaagtctggatgaggccactaaggactgtcgagaagtggctccggtgaccaattttagtgactctgatgacacaatggtag

SEQ ID NO: 95637 - DNA, 120 bp, Artificial Sequence
  ENSG00000089916_3 (sequence is synthesized)
ccaaacgacacccagctctcaatgccattgtcaagagtaagcaacattcttggcatgaatctgactcctttactgaaaatgcaccttgtcgaccactcaggcgcaggcggaaggtgaagc

SEQ ID NO: 95638 - DNA, 120 bp, Artificial Sequence
  ENSG00000089916_4 (sequence is synthesized)
gagtgacatcagaggtggctgctagccttcagcagaagctgaaggtgtcagattggagctatgagagaggctgcaggttcaagtctgctaagaagcagcgtctgtcccgctggaaggaga

SEQ ID NO: 95639 - DNA, 120 bp, Artificial Sequence
  ENSG00000089916_5 (sequence is synthesized)
atactccctggacctcatcaggccacggattgtgtgaatcagcagaaaataggactttcctaagcaaaacaggaaggaaagaaaggatggagtgtgaaacagatgaacaaaaacagggct

SEQ ID NO: 95640 - DNA, 120 bp, Artificial Sequence
  ENSG00000089916_6 (sequence is synthesized)
ctgatgagaacatgtcagaatgtgaaaccagcagtgtgtgtagcagcagtgacactgggctctttaccaatgatgaagggcgacaaggtgatgacgaacagagtgattggttctatgaag

SEQ ID NO: 95641 - DNA, 120 bp, Artificial Sequence
  ENSG00000089916_7 (sequence is synthesized)
gagaatgtgtcccaggattcactgtccctaatcttctgcccaagtgggctcctgatcattgttctgaagtagaaagaatggattctggattggataaattttcagattccacattccttt

SEQ ID NO: 95642 - DNA, 120 bp, Artificial Sequence
  ENSG00000089916_8 (sequence is synthesized)
taccttctcggccagctcaaagagggtaccatactcgcttgaatcgtctacctggagctgcagctcgatgcctcagaaaggggcgaagaaggctggttgggaaggagaccagcataaaca

SEQ ID NO: 95643 - DNA, 120 bp, Artificial Sequence
  ENSG00000089916_9 (sequence is synthesized)
ctttggggactgagaggataagccatatcattagtgaccctcggcagaaagaaaagaataaagcgttggcttctgattttcctcacatttctgcttgtgcacatgagttcaatcccctgt

SEQ ID NO: 95644 - DNA, 120 bp, Artificial Sequence
  ENSG00000089916_10 (sequence is synthesized)
ctcccctttactccctggatgttcttgccgatgcttctcaccgaaggtgttcaccagcacactgctctgccagacaggcaaatgtacactggggaccaccatgttcacgtgacatcaaga

SEQ ID NO: 95645 - DNA, 120 bp, Artificial Sequence
  ENSG00000089916_11 (sequence is synthesized)
ggaagcggaaaccagtggccacagcatctttgtctagccccagtgcagttcacatggatgcagtggagccaaccacaccagcatcacaagcccccaaatcacccagctctgagtggttgg

SEQ ID NO: 95646 - DNA, 120 bp, Artificial Sequence
  ENSG00000089916_12 (sequence is synthesized)
tgaggacctctgcagcagagaaagccacagacgcaactactgctacattttttaaaatgccacaagaaaagagccctggatacagctagagagcaggacttcaccctccaggagctgact

SEQ ID NO: 95647 - DNA, 120 bp, Artificial Sequence
  ENSG00000089916_13 (sequence is synthesized)
gggtgttgctgaagcaaatgttggactttgtgttagatagtcttgcatatcttaatcgacattcccagtcctttcaccaccagaaccaactcctctttcaaacacagcagtggattcttt

SEQ ID NO: 95648 - DNA, 120 bp, Artificial Sequence
  ENSG00000089916_14 (sequence is synthesized)
ctctcagaagatcatgttgtgggaatcttttttttaaatagtgaaatattgaggcagcaattttttacaaaaaggtcatcctctgctctatttgttaccttgttattgctgtctcaacat

SEQ ID NO: 95649 - DNA, 120 bp, Artificial Sequence
  ENSG00000089916_15 (sequence is synthesized)
ttactacagctccatttacagaactgttgcttttttgcagttgtctttgttcttgaaaaaccagtaactgcttctgcataccttttgtgtagagcttttaatatcatttgaggaagttcc

SEQ ID NO: 95650 - DNA, 120 bp, Artificial Sequence
  ENSG00000089916_16 (sequence is synthesized)
aaatttgtagccagttccaaacaaatttaaatattgagttgagacctgtatggaattgtgttcgcaggagataaggcttgcctttgagcctactcttgattcatgcagagtgccaataag

SEQ ID NO: 95651 - DNA, 120 bp, Artificial Sequence
  ENSG00000089916_17 (sequence is synthesized)
ataaatcaaccaagttttggggcctcaaaagagacaccagcaactgggccttgagaacttccatttttttgcagattgtctgcagaaactcagacagctcatcagcagcagcagctgtat

SEQ ID NO: 95652 - DNA, 86 bp, Artificial Sequence
  ENSG00000089916_18 (sequence is synthesized)
tgcagaaactcagacagctcatcagcagcagcagctgtattgtattttacctcatcttcagagtttatgttctactgaaagaggac

SEQ ID NO: 95653 - DNA, 120 bp, Artificial Sequence
  ENSG00000089916_19 (sequence is synthesized)
atttaaaatagtcagtggattgtgtcttactacttcatgtcccagtgtaagcctttatgtcctaagcaggactttattgttagtattataggctaataacctgcagcagaaattcatact

SEQ ID NO: 95654 - DNA, 120 bp, Artificial Sequence
  ENSG00000089916_20 (sequence is synthesized)
ctattataataatggcttcttggggccatgctttggggaagtaaaatgtctttttgacatgcctttatacttggcgtgtttatgatggctcagctgcatgtggagttatatatacagtcg

SEQ ID NO: 95655 - DNA, 120 bp, Artificial Sequence
  ENSG00000089916_21 (sequence is synthesized)
tgcctgaagttggatgctactttgtcaaaatgagaaataagtgatggcctggagctgctggagagaagccacgctttctagaaaatattatcaggagtgtctgtcattcattcaggggcc

SEQ ID NO: 95656 - DNA, 120 bp, Artificial Sequence
  ENSG00000089916_22 (sequence is synthesized)
tagctgacagaagggctcttttttttataccaatgagtgcgtttactctgaaatacatagaagctcttggtgaagtgctccctgctctggtcacattgtagagggactcccactcatgca

SEQ ID NO: 95657 - DNA, 120 bp, Artificial Sequence
  ENSG00000089916_23 (sequence is synthesized)
tctgcttattttctgtcttaaataggtgctgaatggggcagcacctccttcccccaaagtgcgattgcccctgtttcccatacgaagtgtaatgacgggttgcttttaaaattatagtcc

SEQ ID NO: 95658 - DNA, 120 bp, Artificial Sequence
  ENSG00000089916_24 (sequence is synthesized)
ttatcaatggaaactccagatttctttatcaaagggaggtgggtgggcatgaatctagttggaaaaggggacttgaagctaagtttacatggcactttaagactgagaacatatcaattg

SEQ ID NO: 95659 - DNA, 120 bp, Artificial Sequence
  ENSG00000089916_25 (sequence is synthesized)
ttcataatcaggaatatggtagagggagagcaggtgtagatgatgggacgggaaagtgctgaaaccagcccagcagacctgtgagtcgcctctggttctcacgcagcagtgtgtgtgtgc

SEQ ID NO: 95660 - DNA, 120 bp, Artificial Sequence
  ENSG00000089916_26 (sequence is synthesized)
tcacagggatgttccacccctggttctcatgcagtagtgtgggagagtgctgaagccggcccagcatgcctcttagttgcctctggttctcatgcagcagtgtgtgtgcttacaggagtg

SEQ ID NO: 95661 - DNA, 120 bp, Artificial Sequence
  ENSG00000089916_27 (sequence is synthesized)
gagatgatgggatgggagagtgctgaagctggcccagcatgcctctgagtcacccctggctctcatgcagcagtgtgtgtgcttacagggacttcccaggctgcacttcccttccctgtg

SEQ ID NO: 95662 - DNA, 120 bp, Artificial Sequence
  ENSG00000089916_28 (sequence is synthesized)
ggctgcacccgtagaagtatagaaaatgtaatgtctgttgaatataaaatcgtaccactgaattgttctagtgatgaggttagattttgttgtcatgtgcattgtcaccatagtgacccg

SEQ ID NO: 95663 - DNA, 120 bp, Artificial Sequence
  ENSG00000089916_29 (sequence is synthesized)
tggcatatatttttaacatacttggttgggtttgagagaaatctgtggacgtaattttttgtttgtgtcaagctctatgactcatgcagtgattggtcccatgatcatggcctattagtg

SEQ ID NO: 95664 - DNA, 120 bp, Artificial Sequence
  ENSG00000089916_30 (sequence is synthesized)
aaaacctccaaaggtcaggtggccaaggtgttcccacattttttctatataacttgtttcctaatagtctgcctttctacctatgattaaaaataatttttatatacaacattatttaca

SEQ ID NO: 95665 - DNA, 120 bp, Artificial Sequence
  ENSG00000089916_31 (sequence is synthesized)
tttcaaacatctctacgaagtcatgccattttaaggagatgaaaacagccacagagttgagtgacttgctccaaatcacataactaagccaggactagaatcccagactttcagattttc

SEQ ID NO: 95666 - DNA, 120 bp, Artificial Sequence
  ENSG00000089916_32 (sequence is synthesized)
tctgccctgggttataatctcttgtttttcagtgatagacctgagtcagtctgagatgcttatttatgaaacagtataccatgaatatttattatctttcttgggcatgcttttctacac

SEQ ID NO: 95667 - DNA, 120 bp, Artificial Sequence
  ENSG00000089916_33 (sequence is synthesized)
attttgaatactttcaacagggattacccaagaatgcaacatctacctgtaataaatggggagaaaattagttgcctgagagaacagaatattaagcacacaaatactttccaacacagg

SEQ ID NO: 95668 - DNA, 120 bp, Artificial Sequence
  ENSG00000089916_34 (sequence is synthesized)
gttgtaaattgtgctcctcattttaaggtgctgtacgtgcatgtttaaggaattattaatcagtgtattctgcttgctttctgtattaaccagttccagaggatagccttagaaatgagt

SEQ ID NO: 95669 - DNA, 120 bp, Artificial Sequence
  ENSG00000089916_35 (sequence is synthesized)
gtattttgaatcttaaagtttctttatatgcggcacagtgtataatgtcgtaagttaagaaaaatctgttatctttcaaagaagttacgtagtttcaaaaatgaggttttgtaatcagtg

SEQ ID NO: 95670 - DNA, 120 bp, Artificial Sequence
  ENSG00000089916_36 (sequence is synthesized)
ttgaaaaaactctgaactatgacttactttgaggatgatccttgagctcatgtatttgatctgctcaaaagtaataactaaagctgagttaaacagttgttatttatttcagggttctga

SEQ ID NO: 95671 - DNA, 120 bp, Artificial Sequence
  ENSG00000089916_37 (sequence is synthesized)
tttttcccagctggctacacaaatggcctgtctgaatcctagtttagtgtgttttccacgatgggcagaagtcagaacattatctgcttctgtgaggatcataataaaaagttagtttta

SEQ ID NO: 95672 - DNA, 120 bp, Artificial Sequence
  ENSG00000089916_38 (sequence is synthesized)
attacgagtttaaaggaattttagatttttttcagatgcagtattttaaaggaacaaaactcctgtgttgccttttgttgttgttgttgttgttgttgtttcctagagacaggttcttga

SEQ ID NO: 95673 - DNA, 120 bp, Artificial Sequence
  ENSG00000089916_39 (sequence is synthesized)
gttgttgttgtttcctagagacaggttcttgatctgtcactcaggttagagtgcagtgatgtgttcatagctcactgtaaccttgaactcataagctcaagccatcctcctgcctcagcc

SEQ ID NO: 95674 - DNA, 120 bp, Artificial Sequence
  ENSG00000089916_40 (sequence is synthesized)
ccatgcctggctaattttttaagtttttggagagatggggtcttgctctgttgcctatgctggtcttgaactcctaacctcaagcaatcttcctgcctcagcctccccaggtgttgtaat

SEQ ID NO: 95675 - DNA, 120 bp, Artificial Sequence
  ENSG00000089916_41 (sequence is synthesized)
aataggtgcgagccaccatgcccagccttgtgttgcctcttggtaagaaataataaaaagaaattagtagcttgtttacctggtaccagatttggagggggctgagtataatttttactg

SEQ ID NO: 95676 - DNA, 120 bp, Artificial Sequence
  ENSG00000089916_42 (sequence is synthesized)
agtggtatgtggttggaaaataggccacatttagccttgaattgtttagaaatcaaatgcgattcagaattgaagaggacattgctgggctatgaaatagggtactaacaaggctatttt

SEQ ID NO: 95677 - DNA, 120 bp, Artificial Sequence
  ENSG00000089916_43 (sequence is synthesized)
tgtagcaaaatggccaaaagctgaaataaatcttcttagtctgtgatgcttgtagcatcctttgttaagtaaagcacaacaccctggacaagcgactagttatgacttccaaatagattg

SEQ ID NO: 95678 - DNA, 120 bp, Artificial Sequence
  ENSG00000089916_44 (sequence is synthesized)
ataatagccttgcatgttgtagttagagacactgtagctgtatctgtatacctgtaatatagcctgggaagttctgttgctgcagagttatcattaaagtcacttggaattgaaaaagat

SEQ ID NO: 95679 - DNA, 120 bp, Artificial Sequence
  ENSG00000089916_45 (sequence is synthesized)
acagagtgttgagacaaaggaactaggctggcacagtcattgctgatgcgatgggttctccactttggctccaggcgaaggctcctggtggtgatgcatgattgatttcaggtctttgtt

SEQ ID NO: 95680 - DNA, 120 bp, Artificial Sequence
  ENSG00000089916_46 (sequence is synthesized)
tcattttggcttcattactgtgattctgagccacacaggtttttccccctggggagaagactatgtaaaaatctcagcgttagaagctgtgttcagtgccctatatgtcttgtgaaccta

SEQ ID NO: 95681 - DNA, 120 bp, Artificial Sequence
  ENSG00000089916_47 (sequence is synthesized)
tctgagctgggctgagagcagagtggcttactgtagcagctgtggatgcagtctagttggaggcatggcttggaggacgtcatggttcatgcgatggttggagggatggtaaaagcagtt

SEQ ID NO: 95682 - DNA, 120 bp, Artificial Sequence
  ENSG00000089916_48 (sequence is synthesized)
agctcttgtcagctgcttccctctgctagtgcttgagctgccaattttatttgtcagtatttcctgatctcccactcctgttgtgaaaggtcacagagttactgtcactggcaacaattt

SEQ ID NO: 95683 - DNA, 120 bp, Artificial Sequence
  ENSG00000089916_49 (sequence is synthesized)
cgccccttagaagaaaactggtacagagggaaagggtgaggaaaatggtgagttccatcactcagaactaaatgcaagtggtagagagatgctttctcctgtgttaacgtctccaaaaga

SEQ ID NO: 95684 - DNA, 120 bp, Artificial Sequence
  ENSG00000089916_50 (sequence is synthesized)
tgaacatcaaatgcccggaaacagcaacatcaaaaagaaggaagatgagaagtattgttgaagagtatggacctacagggtttttaacaagtccagcaaaacaaactatggccaaaagaa

SEQ ID NO: 95685 - DNA, 120 bp, Artificial Sequence
  ENSG00000089916_51 (sequence is synthesized)
gaaatttttctgtcactgcgagtagacatcataaatgcttggtaaaattgccagatttagggaataaaaaatttttaaagtacagtgttgaagaatggggcatgtcatgaagacattcag

SEQ ID NO: 95686 - DNA, 120 bp, Artificial Sequence
  ENSG00000089916_52 (sequence is synthesized)
caaagaagcaatcttggcaaggtggagaagtgggaagcaatggggagagaaagggagatgcccagagcaggaattctcaatgtgtggtccctaggccaacagcatcagcacatcttgccc

SEQ ID NO: 95687 - DNA, 120 bp, Artificial Sequence
  ENSG00000089916_53 (sequence is synthesized)
tcaccagacctactgaatccgaaactcccagcgcaaggcccagcagtcttcaacaagccctccaggggtctttggtgcatgctcaagtttgagaaccataggctttgccacggttaaaaa

SEQ ID NO: 95688 - DNA, 120 bp, Artificial Sequence
  ENSG00000089916_54 (sequence is synthesized)
gatgttttaatggactggtctcctcctaagctctgaggtgctctcatattccctccataagtaaagagattttttttgtataattctttgcagaaactgttaatgtctttatttctcata

SEQ ID NO: 95689 - DNA, 120 bp, Artificial Sequence
  ENSG00000089916_55 (sequence is synthesized)
ttttttttttcccctacaagctcctgaaagatctttttgaagaattgacaaaggatgctatcaagggctatgtttaggtggatggaaataaccttttgaaaatggataaagcctgggtgt

SEQ ID NO: 95690 - DNA, 120 bp, Artificial Sequence
  ENSG00000089916_56 (sequence is synthesized)
ctgggtgtggtgactcacgcccataatcccaacactttgggaggccagggcgggaggattgctttattgcaggagttgaagaccagcctatgcaacacagtgagaccttgtctctacaaa

SEQ ID NO: 95691 - DNA, 72 bp, Artificial Sequence
  ENSG00000089916_57 (sequence is synthesized)
ccagctacttgggaggcagaggcaggaggatcactcaagcccaggaggttgagggtgcagtgagccatgatc

SEQ ID NO: 95692 - DNA, 120 bp, Artificial Sequence
  ENSG00000089916_58 (sequence is synthesized)
catttttcacaattggcagtaaaaataggatttgtgtaaggtatgagtttaccatatttgttcattagatcttagtttcaagggaaagtatcatgtattttccagcatgataatgatgaa

SEQ ID NO: 95693 - DNA, 120 bp, Artificial Sequence
  ENSG00000089916_59 (sequence is synthesized)
tcatttaaagtacggctcataaaaatgaaaaaaaaaattggaagaaaaaaacaccttgggtacatagatgtgtaataaatacctgttgagttattggtaatctcttgctaggactgaatc

SEQ ID NO: 95694 - DNA, 120 bp, Artificial Sequence
  ENSG00000089916_60 (sequence is synthesized)
tcagtacttcagagcatgtaaaaatcaattttctgtgatcccacttaatcacaccgtgttttctttttttagatttcagctagcaattttgcaggggttggagaccaatagcgatgtcat

SEQ ID NO: 95695 - DNA, 120 bp, Artificial Sequence
  ENSG00000089916_61 (sequence is synthesized)
gctttttggttgttgttattgtctgactcgtggattcagcatttcagaatatggtactctaatcttaaggctttgaaaagaaaccatggccattttttcttcatattttacctttattaa

SEQ ID NO: 95696 - DNA, 120 bp, Artificial Sequence
  ENSG00000089916_62 (sequence is synthesized)
ttgggctgggtcctaactggttgccagagcccagaaatccaagttctgtcttttcagggaatatgcatagctaaagagttcattgtgtttgcaaaggtgtactaggagttctcatttcct

SEQ ID NO: 95697 - DNA, 120 bp, Artificial Sequence
  ENSG00000089916_63 (sequence is synthesized)
cagatgctcatgtctgtaggctgttaagctctcatttcaatttttgcagtcttttaaaacaccacacttcttttccatcttgaagaccagttaaaactacctctggccaaaaatgttagt

SEQ ID NO: 95698 - DNA, 120 bp, Artificial Sequence
  ENSG00000089916_64 (sequence is synthesized)
gttactagatattatcaaggtgtgagactaaaaagttagaaggctttaagatgtaaattatataagttaatgttttctttccctaaaagttctgacccttgctgacccctcaatcaaatg

SEQ ID NO: 95699 - DNA, 120 bp, Artificial Sequence
  ENSG00000089916_65 (sequence is synthesized)
tttttaattgaaaggggaaagaaaatatcagagaacttaaagatggccttcgtgactttgactcaaaatcaatgcatttcattatgtatgggtcctacaccttgcttcctcaagtggcca

SEQ ID NO: 95700 - DNA, 120 bp, Artificial Sequence
  ENSG00000089916_66 (sequence is synthesized)
tgaaaaaaaatctcacgaccatgcaaactgatgccaccccaaagtcatggtaacgatttgaattgctctcagtattgatgtcaaactccctcctgttgtcagcagcttattgcaaactgg

SEQ ID NO: 95701 - DNA, 120 bp, Artificial Sequence
  ENSG00000089916_67 (sequence is synthesized)
ccattctaaacccttttacccccaccttctctcaatcttagcagttaatctcagccctcccccaccacataacagcctcgggcagaacttcccacttagacacccacacacacacacgct

SEQ ID NO: 95702 - DNA, 120 bp, Artificial Sequence
  ENSG00000089916_68 (sequence is synthesized)
tccttaccttcttgccagtgcctgtcctgcccaagacgaaccccttttcctgtgccctaggacctctcccttgataaatgacttgatctagctacagcctcacactcctggcacatacag

SEQ ID NO: 95703 - DNA, 120 bp, Artificial Sequence
  ENSG00000089916_69 (sequence is synthesized)
ctttgcatttaaacatgttcagatactccttccttcaaacaaaagacctttcctcaaccctttgaaagcctgagtaccactaaggtatactgcccttatctgcactctgtccattctgca

SEQ ID NO: 95704 - DNA, 120 bp, Artificial Sequence
  ENSG00000089916_70 (sequence is synthesized)
gtctaccgaggcagtggtttttaaccctggctgcatgttagggtcacctgggaagttttaaaaagtcctaattcctggactggaccacagaccagttaaatcagcatggggaggtgggga

SEQ ID NO: 95705 - DNA, 120 bp, Artificial Sequence
  ENSG00000089916_71 (sequence is synthesized)
tgggtttcagtctttaaaaagaaatgtagctgaggctgagaaccaccactctaaaacctggctgctacccttgctaccattaaaactgttcttgctggattcacccaccagtgacttcta

SEQ ID NO: 95706 - DNA, 120 bp, Artificial Sequence
  ENSG00000089916_72 (sequence is synthesized)
ctattaaaatttagcccataggttgatttttatgacactgatgctatataaccacttccttctttggaatgctccctttcctgaccctactttcctgatttttctgccacttctttgctc

SEQ ID NO: 95707 - DNA, 120 bp, Artificial Sequence
  ENSG00000089916_73 (sequence is synthesized)
tttctcagtttctgtggagttgtttggtaggtcagtctagcacagactggatgccggtctctgccgccacctccgttatttcagtgaacacctgtatgccagtgagttcctttgccatac

SEQ ID NO: 95708 - DNA, 120 bp, Artificial Sequence
  ENSG00000089916_74 (sequence is synthesized)
caccttaatgcaccaacttaaaagcacagattagagtggagcattcacatttattactgcaggcttctaggaaagcatattaaaggtctctggtccttctctcacctcccttgttcctcc

SEQ ID NO: 95709 - DNA, 120 bp, Artificial Sequence
  ENSG00000089916_75 (sequence is synthesized)
tccaagcccagtgaggtaggaggaattgctaattagattagtgagattctaaggtgggtcactcctgtttacttatgagttgctatttatgaaaagatggcctggactgtgttccctctt

SEQ ID NO: 95710 - DNA, 120 bp, Artificial Sequence
  ENSG00000089916_76 (sequence is synthesized)
ctgctttctcctcttccgggtcttggactggtaagggggcctgtgcccaaaaggggctcctccacctaatgctgtctttaatctgtggctttctgctgctggttaattttttaatttggc

SEQ ID NO: 95711 - DNA, 120 bp, Artificial Sequence
  ENSG00000089916_77 (sequence is synthesized)
ttcctcaagcctttttggccttgaacttcatgttgatttttatcaaagaactttttattggggcatcagcactagccctatgaatacagtgaaacttggggttccactttcatcagatgt

SEQ ID NO: 95712 - DNA, 120 bp, Artificial Sequence
  ENSG00000089916_78 (sequence is synthesized)
gaccctgtgtgttcctgatgtctttgaatcactagtttctgattcaaaatatggggtaggtggatctgattagtagtcatatgcctgtgtcctggctaggaagtcagaatgaggttatct

SEQ ID NO: 95713 - DNA, 120 bp, Artificial Sequence
  ENSG00000089916_79 (sequence is synthesized)
ggaaagttgagcttcctcacacatgggaaggtacttcagatgctggacagccaataagaataacaaaggtccaccagaaccattgccccagtcactgattgaacaaacatttactgaaca

SEQ ID NO: 95714 - DNA, 120 bp, Artificial Sequence
  ENSG00000089916_80 (sequence is synthesized)
ctgatgaagcgaagtcctcctcagggacctcttagggaagagggtaactgccctaaagcaggatactcctgggctccttagatatactatccttgaaactattaggcccctgtccagagt

SEQ ID NO: 95715 - DNA, 120 bp, Artificial Sequence
  ENSG00000089916_81 (sequence is synthesized)
acctaataataataatggcaaatatgtatttggtggtctgccatttggaagcaacatctcacttattcaacaactctaaaggtaggtacttttatctccattttaaaacaatgaaataca

SEQ ID NO: 95716 - DNA, 120 bp, Artificial Sequence
  ENSG00000089916_82 (sequence is synthesized)
cttacagttacagacaaacttgctcgagtcacatatctattaagtgtcagtcaagattcagattcaagtctgatgttaaagagtgtctgttcccaatcaatacctctgctgcctcttttt

SEQ ID NO: 95717 - DNA, 120 bp, Artificial Sequence
  ENSG00000089916_83 (sequence is synthesized)
acaaactgaactgttggagggcatgtacatatgcataagctgtgggccactgggccatgggccagtgtctgatgagacctctttattgacttgtttgtcctggtgggctgtttctctacc

SEQ ID NO: 95718 - DNA, 120 bp, Artificial Sequence
  ENSG00000089916_84 (sequence is synthesized)
aggcaactgtgaatgggctcatcccttctctgtgcgtacatgattgaaaggagatagccggtttctgtgacatcctcttataacaacctagttttgttcttgagagtgaccagagcaaga

SEQ ID NO: 95719 - DNA, 120 bp, Artificial Sequence
  ENSG00000089916_85 (sequence is synthesized)
gaaaagtcaatgaaattttgcagatcttgcaaacctgtggcaataagaaggtattatcctttctgtaccaaggcacaactgattcctaagtgagggggatatgtgttctgagatgttaat

SEQ ID NO: 95720 - DNA, 120 bp, Artificial Sequence
  ENSG00000089916_86 (sequence is synthesized)
gttagtgatagactgttttcaacaccttggtaaacatttcttttgactgttagcaaaagctgccttaacagtcttggcttttagaaatgccccttcattcattagatgtgtatggaacac

SEQ ID NO: 95721 - DNA, 120 bp, Artificial Sequence
  ENSG00000089916_87 (sequence is synthesized)
atcttatgccaagcactctgctaggagctgggtatacagagaagaaaggcattcctgctctcatgatgttcatggtcttctgcggaagagaccagaaaaaaagtattacaatgtagaatg

SEQ ID NO: 95722 - DNA, 120 bp, Artificial Sequence
  ENSG00000089916_88 (sequence is synthesized)
aaataagaatgacagggtattttggcagcaaggaggagggcactttaactcaaactgggcagtggaagaagtaaaaaaaaacattgaaagaaatcctgaaggataagcaggagttaagaa

SEQ ID NO: 95723 - DNA, 120 bp, Artificial Sequence
  ENSG00000089916_89 (sequence is synthesized)
gagtggatgaagccctccaagggtaaaagcatggtttattcagagcactgcaagtgttttagtatggcccacatgtaaagcttacagaggaacaaagagagaaaggcaagagccaggaag

SEQ ID NO: 95724 - DNA, 120 bp, Artificial Sequence
  ENSG00000089916_90 (sequence is synthesized)
tgaagggtcctgtgtatactggcttacttgttgagttggagaactattgccgtattcctctgctaagctcagggtgcattcgtggaaaccctactgcaactggcccattgtgcatacaaa

SEQ ID NO: 95725 - DNA, 120 bp, Artificial Sequence
  ENSG00000089916_91 (sequence is synthesized)
gctggaactgagatgtgaacagatttgcattgccttgatcaccttccgtgggaaatatagctaggcccacttattggtaggagctactgacatgttaaaactaggttaaactgaattgga

SEQ ID NO: 95726 - DNA, 120 bp, Artificial Sequence
  ENSG00000089916_92 (sequence is synthesized)
agtaatggtgtatttggaatcatggctgactgattccattacatgttctagcatgataccagtctgaggttattccccttgaaccaccgacttagtagagtttaatgcacaatgtgatgg

SEQ ID NO: 95727 - DNA, 120 bp, Artificial Sequence
  ENSG00000089916_93 (sequence is synthesized)
tcttagttccttgtactgttcttcagtgtcaaagttgttcaactaccagttaagttttttgggctttgtttctcagtagtgacaataaatttgtgttgatctatttacaccttttggact

SEQ ID NO: 95728 - DNA, 120 bp, Artificial Sequence
  ENSG00000089916_94 (sequence is synthesized)
gaacaccttagcaatcattgatattttaagcctacaggaagtgcccatgggataaaaccaatctgctggctcacactaagttctgatcccatgattttggtctcattaataccgtgctat

SEQ ID NO: 95729 - DNA, 120 bp, Artificial Sequence
  ENSG00000089916_95 (sequence is synthesized)
aaataaagttagctaaatcttttgaaactgcataaaagtgaaataattatgagttttgggccaacatttttcctgaacagcttctgactgaccagcattttaaattaggcgatgcagtct

SEQ ID NO: 95730 - DNA, 120 bp, Artificial Sequence
  ENSG00000089916_96 (sequence is synthesized)
agcttttgtacatagaaataagaaagtgacttatgttccattattaaaatagtatagggaggacaggtaaattactaatttttcattgctcatagtagagaattaaggtatattgactag

SEQ ID NO: 95731 - DNA, 120 bp, Artificial Sequence
  ENSG00000089916_97 (sequence is synthesized)
tgaaatagaggattatggggatcatatgaaaatatgattaaagagattatcactagaagaaaaattcagactgctaattatgagaaaaaacatgtatgcacaaccaaacaaatcacaaaa

SEQ ID NO: 95732 - DNA, 120 bp, Artificial Sequence
  ENSG00000089916_98 (sequence is synthesized)
atgaaagatgtctaaaaccatagaataggaacaaatgtacctgtcatattaataaaagtaaacttatctgtagataaaaggcaaaaatgtcagcaaacactaatttcatgttataagatt

SEQ ID NO: 95733 - DNA, 120 bp, Artificial Sequence
  ENSG00000089916_99 (sequence is synthesized)
cagaaaggttgagcaaaagtaaaccaagcaaacacaaacaagaaaatgagttgtagtctgcatatcaggcaaggttgaacttagggaaaaggaaccggaaaaaaaaaaaccaaaaaaaac

SEQ ID NO: 95734 - DNA, 120 bp, Artificial Sequence
  ENSG00000089916_100 (sequence is synthesized)
cacgacataatgctaaagggtgtgactcacgagataatgtttctagatatctgtgtaccaaataatggaaaaccatttatgtattggaaaccataggagacacaggaagaaacaaataca

SEQ ID NO: 95735 - DNA, 120 bp, Artificial Sequence
  ENSG00000089916_101 (sequence is synthesized)
atgttagttggatattttaattcaattctgtcaattcatgacagatcaagtggataaaaaactaggacatgggatgatttaaataagatacagaagatctagttgatgcatattagactt

SEQ ID NO: 95736 - DNA, 120 bp, Artificial Sequence
  ENSG00000089916_102 (sequence is synthesized)
taccctaaaagtggtaactacacttcaaagtatccatgaaacatttccccatttgactgtgtattagagcgtacagaaaacataagtttcagaacggaaaaaaggaacaacagatggcat

SEQ ID NO: 95737 - DNA, 120 bp, Artificial Sequence
  ENSG00000089916_103 (sequence is synthesized)
ttgctgataaaaatgcaataaacttagaatttgaggataggtggtcagaaaaaaaaatgcaataaattaaagccagaaaacactgctcatctgcaatccaaaatgtttttaagctcttca

SEQ ID NO: 95738 - DNA, 120 bp, Artificial Sequence
  ENSG00000089916_104 (sequence is synthesized)
actattcttgggttgattaggaaatgcaaagtattaaaaaaacatttcatatctaaaatataaacttgttcctctgagatacaaataaaacagtgctcagaggaaaattcattgccctaa

SEQ ID NO: 95739 - DNA, 120 bp, Artificial Sequence
  ENSG00000089916_105 (sequence is synthesized)
aatttatgtattaaaaaataagataaatgtcatataactcaaaatattaggaaaaggaatcttttaaaggcaggctaaaagaatcaagaaaaattaattagaaaaatgaggaaacaaagc

SEQ ID NO: 95740 - DNA, 120 bp, Artificial Sequence
  ENSG00000089916_106 (sequence is synthesized)
taatttttaaaatatgtagtaaaatatgtaacattttagctaacattacaagagaagacaaacacaaaataagaattaccaagtattgaataggtaagagtcataaaatattctttgctc

SEQ ID NO: 95741 - DNA, 120 bp, Artificial Sequence
  ENSG00000089916_107 (sequence is synthesized)
aactgtatgcaaacaatttaaaaacttggattaaatggataattttccaggaaggtatagtttgccaaaaaatgacatcaaaagaaatctaatataacaattgtcatagaagaaatgaag

SEQ ID NO: 95742 - DNA, 120 bp, Artificial Sequence
  ENSG00000089916_108 (sequence is synthesized)
taagtatttcaattagcatgacagactaaatacttttaaagacccaatgaaaacaaagaaatgcatttggagaattaacagaaactttttgtaacaccaattttttattttacattttaa

SEQ ID NO: 95743 - DNA, 120 bp, Artificial Sequence
  ENSG00000089916_109 (sequence is synthesized)
agcatggaatggaatttattgtaaagacgtgtattttatagaatccaagcaaaagctcaccagccagagataaagtgaggccagctcagggaatgtgagcagtggcgatttattccctct

SEQ ID NO: 95744 - DNA, 120 bp, Artificial Sequence
  ENSG00000089916_110 (sequence is synthesized)
ggtgttccatgttagcctgacacagagccccctcttcacattctcaggggctcttgatccaaaaccttttttaaaaaaaataattttagacttaacagaaaatctgcaaaaatagatttc

SEQ ID NO: 95745 - DNA, 120 bp, Artificial Sequence
  ENSG00000089916_111 (sequence is synthesized)
ctgtgtgcccttctctcagcttcttctaatgttaacttacataccaatggtacaattattgaaactaggaaattaacattggcacaatcctattaactacatactttatttgaattgtag

SEQ ID NO: 95746 - DNA, 120 bp, Artificial Sequence
  ENSG00000089916_112 (sequence is synthesized)
ctgttttcccagtaatgttgtttttctggttcggtattcaatccaggatccatatgtacttgggtctttctgggttttctgttccactggtctacttgtgcatggtaccacactgtttta

SEQ ID NO: 95747 - DNA, 120 bp, Artificial Sequence
  ENSG00000089916_113 (sequence is synthesized)
attatagagactttatagtatgttttaacaactggcaaggctagtcccccttataatttttcctattgtgcttctggctattcatacatgtttgtttttccatgtgaactttagtatcaa

SEQ ID NO: 95748 - DNA, 120 bp, Artificial Sequence
  ENSG00000089916_114 (sequence is synthesized)
cttgtctaaattcattttttaaggtacattggtattttattgatattatatgatattaactgatttagagagaactaacatctttaaaatgtggtgtcatcctatccaagaataggagat

SEQ ID NO: 95749 - DNA, 120 bp, Artificial Sequence
  ENSG00000089916_115 (sequence is synthesized)
gtatttccatttattcaagtctattttgtgccttttagcagtgttttaaaattatccttgtgtaggttttgtgcatttcttgctaagcttatccctaagtatttaatttatttgctagta

SEQ ID NO: 95750 - DNA, 120 bp, Artificial Sequence
  ENSG00000089916_116 (sequence is synthesized)
cccagtgcaggtggtagaaggacagcccccctgccctgagacaacactcggaggcctgtattccagcgagagtgccctgacaagacagctctggccacccttgcctggctcctccacctt

SEQ ID NO: 95751 - DNA, 120 bp, Artificial Sequence
  ENSG00000089916_117 (sequence is synthesized)
cccgtcagtttcgtgagttctccagccttttcccaggtgctcagaagttatttaggatctgagactcttgcttgggggtgatgagtagctcctgtatttgcagaatgaattctcggtggg

SEQ ID NO: 95752 - DNA, 120 bp, Artificial Sequence
  ENSG00000089916_118 (sequence is synthesized)
gtggcaaggaactgtcagcagtctctaagagctgagggtagactccagcaagaaactgaaaccctcagtctgacagccacaaggaaataaattctgccaacaacctgaagaagcttggag

SEQ ID NO: 95753 - DNA, 120 bp, Artificial Sequence
  ENSG00000089916_119 (sequence is synthesized)
cagatctttcctcagttgagcctctgatgagactgcagcccgagctgtcacctggatagcagctggtgaaacccttcaacagagaaaccagccaacctgtgtgtaaacttctgacctgca

SEQ ID NO: 95754 - DNA, 120 bp, Artificial Sequence
  ENSG00000089916_120 (sequence is synthesized)
aaacttctgacctgcagaaactgtagataaagagtgtgtgttatttagaactgctaagtttgtggtagttaagcagcatagaaaatgaatacagtaggccaggagtggtggctcacgcct

SEQ ID NO: 95755 - DNA, 120 bp, Artificial Sequence
  ENSG00000089916_121 (sequence is synthesized)
gtcagagagggaagccccggcggtgagagtcggcccaaaaagcggcggccgttggaggtggctgcggcagctgctacccgttccttcctgtgcgtgactcagcctcatctctgcccggat

SEQ ID NO: 95756 - DNA, 120 bp, Artificial Sequence
  ENSG00000089916_122 (sequence is synthesized)
agtagcttggatttctagtgtcaagatgatttctgtcccattaatgagataccaacgataaatgaagtatggacatatattctttattcaccttttatgataaaggcaaatatagcaaga

SEQ ID NO: 95757 - DNA, 120 bp, Artificial Sequence
  ENSG00000089916_123 (sequence is synthesized)
cggaaaccagtggccacagcatctttgtctagccccagtgcaggtgattacatgcagttatcatttattgagcatgtaccgtgtgccaggcactaaattatgtgttttgtataccttttc

SEQ ID NO: 95758 - DNA, 120 bp, Artificial Sequence
  ENSG00000089916_124 (sequence is synthesized)
atgtaatgtttgtgatagtgtaggtcattttattcccactttacatgggaaaactgagactacaagaaataattagcctagttcttgctgactctgaagtctgtgctttttcactgttac

SEQ ID NO: 95759 - DNA, 120 bp, Artificial Sequence
  ENSG00000089916_125 (sequence is synthesized)
gagcttttgttttagcagacaggaaattaggtccatgttaatgaaagtccaggtgaagtggcagttcagtcaggcagtcacacagggttatttactttcttattttgcatacagtacagt

SEQ ID NO: 95760 - DNA, 120 bp, Artificial Sequence
  ENSG00000089916_126 (sequence is synthesized)
acattcttactgcttttataagtagaatgctaatattttactggtcatgacattcctaattaaaaacaattttttaggctaaaacttttcagttttttttttttttttttttaacaaaac

SEQ ID NO: 95761 - DNA, 120 bp, Artificial Sequence
  ENSG00000089916_127 (sequence is synthesized)
taacactaattggtagaagccaaaatagtgcttctctttggtggggggcagtgaccaagagagggcacaaagaaaccctctgggctgttggcaatgctccatatgatgaacttggtgggg

SEQ ID NO: 95762 - DNA, 120 bp, Artificial Sequence
  ENSG00000089916_128 (sequence is synthesized)
tgggagttgtgtatcctattaacaatcagaggtgctacagaactccctgaagttaatggagccaactggaatgtgttgggagtttacaagagtgaacattatgtagaatgtgaatggata

SEQ ID NO: 95763 - DNA, 120 bp, Artificial Sequence
  ENSG00000089916_129 (sequence is synthesized)
tacaaataaaagatgaaacgtaattcatatagaagtactgacaaaaaaaaaaaacactgtcattacagtgtctattgcctgtaaacctacaagcctgagctgtgtcttctgtaacttttg

SEQ ID NO: 95764 - DNA, 120 bp, Artificial Sequence
  ENSG00000089916_130 (sequence is synthesized)
attaatgttatgttattattgtgtaagttaaaatactcttggcttctttatgactcctcttgaattcatgaatgcatctttgttctttcctaattttggtctttcatcctagaattcatt

SEQ ID NO: 95765 - DNA, 120 bp, Artificial Sequence
  ENSG00000089916_131 (sequence is synthesized)
tactgtataaggttctatacctggtagcttccaggtggtagttggtaccagaatgggcgcaaacttagtctcttctccattctgacttcaaacctgggtcactacaatttcttggatcac

SEQ ID NO: 95766 - DNA, 120 bp, Artificial Sequence
  ENSG00000089916_132 (sequence is synthesized)
gaaaactgcattcttccttaaatggtgtcactaagttgtctttctgtttctttctgccatggtcattgtcagcagtgaccccaggccaaagaacagtttttcattcattctcaatacctc

SEQ ID NO: 95767 - DNA, 120 bp, Artificial Sequence
  ENSG00000089916_133 (sequence is synthesized)
gatgagaccatgtgctactctgtgtttccacaactctagtgtgattttgaagttgtatgtttttctgttcctgtctagtgagacagtctctaatctttctggatctcatcattaggtaat

SEQ ID NO: 95768 - DNA, 120 bp, Artificial Sequence
  ENSG00000089916_134 (sequence is synthesized)
tcaatgacaagtttaattggggaaaagagagaaggatctagtcccccgaatttgttttgggtcctgtcccagttgtcttctggttagtaggtttttgtgcttaagaatatgttgacttca

SEQ ID NO: 95769 - DNA, 120 bp, Artificial Sequence
  ENSG00000089916_135 (sequence is synthesized)
ggcatttaacaagggacaaaacatctatttttagtgacttaaggaagtggtaggaacagaatctaagtgtagccagatgaaaggtgacttattttgtttagacaggcagaactgtggact

SEQ ID NO: 95770 - DNA, 120 bp, Artificial Sequence
  ENSG00000089916_136 (sequence is synthesized)
tgacttattttgtttagacaggcagaactgtggactaccatgatctgtttcatcaaattattccaaaacaacagatcctttttcaggctttctttttctttttcttttctttctttcttt

SEQ ID NO: 95771 - DNA, 120 bp, Artificial Sequence
  ENSG00000089916_137 (sequence is synthesized)
tggtactagggactcagctcatttaatccttccagcaacctacaagggcaagcaccttcagcagatgaggaaaacttaggttcgaagaagttaaggaatgtctgatgttacccagatagg

SEQ ID NO: 95772 - DNA, 120 bp, Artificial Sequence
  ENSG00000089916_138 (sequence is synthesized)
aatggtagaatagagatttgaacccaggtctacttttatctttttacatttttattgaattttattttttactctactttgagattgaggaataaattaagacagggctcatcctcagtc

SEQ ID NO: 95773 - DNA, 120 bp, Artificial Sequence
  ENSG00000089916_139 (sequence is synthesized)
agagaagatggtggtgggcaaagaataaggaagggagaggcattgagagcattaatttgtttgttcacttggtaagcatttagaatgcctgctaggtggcacaatatgtgccacagtctg

SEQ ID NO: 95774 - DNA, 120 bp, Artificial Sequence
  ENSG00000089916_140 (sequence is synthesized)
gcttcccttaaggggatactgttttatagtctgaccagggaacagttttctgaagttttaagcatgcaaaagaaatgagactgtttatttccagacgagcccaagattcttatttctttt

SEQ ID NO: 95775 - DNA, 86 bp, Artificial Sequence
  ENSG00000089916_141 (sequence is synthesized)
ctgtttatttccagacgagcccaagattcttatttctttttatctttaaattcaagttcaaatcgacctaggctggaatgcaatgg

SEQ ID NO: 95776 - DNA, 76 bp, Artificial Sequence
  ENSG00000089916_142 (sequence is synthesized)
agttcaaatcttgaattagaagacatttgattattggaaaactgatacctttcaaattactcattttacagacaaa

SEQ ID NO: 95777 - DNA, 120 bp, Artificial Sequence
  ENSG00000089916_143 (sequence is synthesized)
gaaaactgatacctttcaaattactcattttacagacaaaacgctgctttttctgttttgggagcttattgttaacagggatagctagcagaatagcagtacatggggtggaagaaggag

SEQ ID NO: 95778 - DNA, 120 bp, Artificial Sequence
  ENSG00000089916_144 (sequence is synthesized)
aggttttacttttattgtttaggcttgacagataatgttccccctgccacctgtgttactttctttcagctcttataaaataagagccatccacttccatggaaacaagtcactttatct

SEQ ID NO: 95779 - DNA, 120 bp, Artificial Sequence
  ENSG00000089916_145 (sequence is synthesized)
tgaaggtttccctttagcttgcctggaagggagtgagggcctgttggatgtgcctttaatgatttcaaatgaataggataatatttacttgtttaattcatcttcatcaccttaaaggga

SEQ ID NO: 95780 - DNA, 120 bp, Artificial Sequence
  ENSG00000089916_146 (sequence is synthesized)
tatttatcatttctagaagaggtcaccgctctgccccccttcttccccctcccccatctctcttctgcttttctaaattgtaatcataaataatgagtttcattcacagctccctgccag

SEQ ID NO: 95781 - DNA, 120 bp, Artificial Sequence
  ENSG00000089916_147 (sequence is synthesized)
tgagctgctaattacacaaagtactgcttgtaatttacacagtaataaactgtaaatttaaacattacggcactttaagttaataatttttctgctgtaacaaatagctcatttttcacc

SEQ ID NO: 95782 - DNA, 120 bp, Artificial Sequence
  ENSG00000089916_148 (sequence is synthesized)
catcttttcccttggcccccctaccatgtctgtctgtgaccaggaggcatagctataagaaatgcagaacatgaagaatatagtatatgaaaacttctcatttaactccactaccgcccg

SEQ ID NO: 95783 - DNA, 120 bp, Artificial Sequence
  ENSG00000089916_149 (sequence is synthesized)
cctcagagtaatttttctacagccagttctgctgaaatgtgtagcctgatgtttagcacggtccacacacatagatgaatatagacacaaatgtgtttgaagaacagccttgatgttctt

SEQ ID NO: 95784 - DNA, 120 bp, Artificial Sequence
  ENSG00000089916_150 (sequence is synthesized)
ggcattcacgcccgtgacttgtgttctctcaacacaacagttactcagatgtgtgttggtatgctttcccaggtgccatggtaggtaagcattgtgaatgtactcaagttaaatgaagag

SEQ ID NO: 95785 - DNA, 120 bp, Artificial Sequence
  ENSG00000089916_151 (sequence is synthesized)
tgaattgccgttttccaattttttggaaatggttcgtttctgaactctttgtggtgttatgggtaagcttttacactataatcttgagaaccctgaatttaggaatcaattttatacaaa

SEQ ID NO: 95786 - DNA, 120 bp, Artificial Sequence
  ENSG00000089916_152 (sequence is synthesized)
tttctatttttatttcatgagatgatgtttgagggacaaagtacagagtaacaatttttgcaagtcacaaaattctcttgatgtatttatatttagtcagcagatatttacattttacca

SEQ ID NO: 95787 - DNA, 120 bp, Artificial Sequence
  ENSG00000089916_153 (sequence is synthesized)
gtgaggatttggtaatgtcccaggatgaaggctgttggaactataatcaaatcacgtagctctctaggaagcttggtgtgttggcctgttaaaaattggctactgttgaattttctaaaa

SEQ ID NO: 95788 - DNA, 120 bp, Artificial Sequence
  ENSG00000089916_154 (sequence is synthesized)
aaggatttttactcctatatacttcagtagttacaggaggtatagtacttattaaaataccatatatggtgaacagtgtctatgatgtatttataaagacttttggatcactggagaata

SEQ ID NO: 95789 - DNA, 120 bp, Artificial Sequence
  ENSG00000089916_155 (sequence is synthesized)
ataaatgtagggtaacatgtaatacttttaagatggattccaataaaaagaagtatagttgctgttttattttaagattgacttttaacatgtgccttttgaggttgccttagctggcac

SEQ ID NO: 95790 - DNA, 120 bp, Artificial Sequence
  ENSG00000089916_156 (sequence is synthesized)
agttatgggaaagattgatattgtactttatatgtttgtttctgtggttggatgatactcttgtctgccttttctttttaggagaccagcataaacactttggggactgagaggataagc

SEQ ID NO: 95791 - DNA, 120 bp, Artificial Sequence
  ENSG00000089916_157 (sequence is synthesized)
catatcattagtgaccctcggcagaaagatttctggttaccatcagctgggaaaagagaacgaaatcaggtaagatcatttttctttgtcatctttattttatcatttggtttccttttc

SEQ ID NO: 95792 - DNA, 120 bp, Artificial Sequence
  ENSG00000089916_158 (sequence is synthesized)
tttagaaagaataaagcgttggcttctgattttcctcacatttctgcttgtgcacatgaggtaaggtttcctctttcttgttattttgattttcttggagaaccgttttctaagagtatc

SEQ ID NO: 95793 - DNA, 120 bp, Artificial Sequence
  ENSG00000089916_159 (sequence is synthesized)
caacacttactggtaaaaactgcagctaattcctctttgtaggttcaactgtgatcattagtttcttgtagcatatatttcataggaatcctgtttttattttagttttgaactttgcag

SEQ ID NO: 95794 - DNA, 120 bp, Artificial Sequence
  ENSG00000089916_160 (sequence is synthesized)
taagaaagcagaatgaatctgatttgcatatggtttagttcaacatcagaatcctgcgttgagaagtactatgttgaagcctaaacgtatggagcagaaggtagagctgctttgggtgaa

SEQ ID NO: 95795 - DNA, 120 bp, Artificial Sequence
  ENSG00000089916_161 (sequence is synthesized)
gtggggtcaaagccttagagcagtggtccccaaccttatgtcaccaggaaccatttttgtagaagacagtttttccatggacccgggttgggggcgtggtgaggggggtggttttgggat

SEQ ID NO: 95796 - DNA, 81 bp, Artificial Sequence
  ENSG00000089916_162 (sequence is synthesized)
acccgggttgggggcgtggtgaggggggtggttttgggatgattcaaatgcattacatttattgtgtactttatttctgtt

SEQ ID NO: 95797 - DNA, 120 bp, Artificial Sequence
  ENSG00000089916_163 (sequence is synthesized)
cacctgggggtgatgggaaacaatgacagatcatcaggcattaggctttcataaggtgtgcacaacctaggtccctctcatgctcggttcacagtagggtttgcactcctataagaatct

SEQ ID NO: 95798 - DNA, 120 bp, Artificial Sequence
  ENSG00000089916_164 (sequence is synthesized)
aatgtggctgttgatctgacaggaggtagagctcaggcggtaatgcccacgatggggagcagctgcttgctgacagctcacctcctgctgtgcggccccggggttggggacccctgcctt

SEQ ID NO: 95799 - DNA, 120 bp, Artificial Sequence
  ENSG00000089916_165 (sequence is synthesized)
agagcctctccttcttagtcttttccctggctaccccctgaggggccccttggcatatttaggcccatgtggagggctcacaatttaaaaattaactcacagtggttatcgatatgtttc

SEQ ID NO: 95800 - DNA, 120 bp, Artificial Sequence
  ENSG00000089916_166 (sequence is synthesized)
tttatgtgtgaagctttgtgatttttttggaggattgcattatcttggtgattagttgtaaaatagatgaacactgacaggtgaaaagttgtaggcttcctgtttgttgtgggttttttt

SEQ ID NO: 95801 - DNA, 120 bp, Artificial Sequence
  ENSG00000089916_167 (sequence is synthesized)
gttttttttttttaacaacttagtagcttactgagttgatatacacgatccacattttagacttggaatcttcattatgaatttgctgtttcaaaatgaactagagtggtagaagacata

SEQ ID NO: 95802 - DNA, 120 bp, Artificial Sequence
  ENSG00000089916_168 (sequence is synthesized)
actggtgtatatgtatgagatgattttagatggcatatagatgcccaatttttaagttatgtattatagtgtacattggaaaagatgtaattatggtatcaagcctgttatttcacggaa

SEQ ID NO: 95803 - DNA, 120 bp, Artificial Sequence
  ENSG00000089916_169 (sequence is synthesized)
atatagtaaggacaaagctgagcaaaaataattgatatgaggaaaaataataagtaaacagtagtacaggttgtaggcagataaggaaagtcatgaaggtggtatgtgagagactgcagt

SEQ ID NO: 95804 - DNA, 120 bp, Artificial Sequence
  ENSG00000089916_170 (sequence is synthesized)
ttggggaacactaagctagagcactaatcatgtttgcatcagaggatccaaaggcagaaggggacctgtggcagtcacctgatccagatccgttatttgcaaatgacgaactggagatct

SEQ ID NO: 95805 - DNA, 120 bp, Artificial Sequence
  ENSG00000089916_171 (sequence is synthesized)
gtaagattcaaactatttgcccaaagtgatacagctaatagaaccaagattggaacctctgtggcagatagaacagttgcttagtttgtattctcataaaacaagtttgaagttatcatt

SEQ ID NO: 95806 - DNA, 120 bp, Artificial Sequence
  ENSG00000089916_172 (sequence is synthesized)
ccgggttcttccagtctttgtatgtcagagggtattaagttctaaactttttagagaggactgttatgttgtgggaaaagtccaaagaaagctagcaaacataaagtgagggatctcctt

SEQ ID NO: 95807 - DNA, 120 bp, Artificial Sequence
  ENSG00000089916_173 (sequence is synthesized)
tgatcctcacagccaccttttgaagtcaaatagatgttttgcagatgagaaactgaaattatactctgaaagcaatatttcatttagccctcataataaccctgtaaaataggtagggca

SEQ ID NO: 95808 - DNA, 120 bp, Artificial Sequence
  ENSG00000089916_174 (sequence is synthesized)
aagccccggcggtgagagtcggcccaaaaagcggcggccgttggaggtggctgcggcagctgctacccgttccttcctgtgcgtgactcagcctcatctctgcccgggtgcgtgcctggc

SEQ ID NO: 95809 - DNA, 120 bp, Artificial Sequence
  ENSG00000089916_175 (sequence is synthesized)
cgccgggtcctctcgagagtgtgcatccgcgactggagatggggagttctagggttcttttgtcactactgttggaattacaggctttgaggcaggaaaggattctgcacaggcattcga

SEQ ID NO: 95810 - DNA, 120 bp, Artificial Sequence
  ENSG00000089916_176 (sequence is synthesized)
tatttgttcttttgtttttgttttttgtatttttgttgcctgagtttttaaagcagtaattctttattagggaagtagattttgacatgctgttcccacttgtttctttattttggtctt

SEQ ID NO: 95811 - DNA, 120 bp, Artificial Sequence
  ENSG00000089916_177 (sequence is synthesized)
tattttggtcttagggacagttgtctcccaaacctcaatcatggcattttaatccacttttttttttcccattttttccccttcttttcacaggtgttgataaaccacttcttaatgctt

SEQ ID NO: 95812 - DNA, 120 bp, Artificial Sequence
  ENSG00000089916_178 (sequence is synthesized)
attttatacaagaagaaaagaaggctgagagagtttaagtcacttgctaccacatgagtaggttgcggcagagctgggacaggctcatcatagcattgatttcattgtgtcatgaatgcc

SEQ ID NO: 95813 - DNA, 120 bp, Artificial Sequence
  ENSG00000089916_179 (sequence is synthesized)
tgttttcttttctctttccccaattcagctgttaactggttgatggcatacaccacaatttttgttgactttaaaaatattgtaaagtatagcacatatacattattaaaagaaaaactg

SEQ ID NO: 95814 - DNA, 120 bp, Artificial Sequence
  ENSG00000090006_0 (sequence is synthesized)
atgccgaggcctggcaccagcggccgccgccccctcctgctggtgctgttgctgccgctcttcgcagccgccacctccgccgccagccccagccccagccccagccaggtcgtcgaggtc

SEQ ID NO: 95815 - DNA, 120 bp, Artificial Sequence
  ENSG00000090006_1 (sequence is synthesized)
ccgggggtccccagccgcccggccagcgttgctgtttgtcgctgctgcccgggccagacgtctaggaggagccgctgcatccgagccttctgcagggtccgaagctgccagcccaaaaag

SEQ ID NO: 95816 - DNA, 120 bp, Artificial Sequence
  ENSG00000090006_2 (sequence is synthesized)
tgtgcaggcccccagcggtgcctgaacccagtgcctgcagtgcccagtcccagccccagcgtgaggaagagacaggtgtccctcaactggcagccactgacgctccaggaggccagagct

SEQ ID NO: 95817 - DNA, 120 bp, Artificial Sequence
  ENSG00000090006_3 (sequence is synthesized)
ctactgaagcggcggcggccccgggggccagggggccggggactactgagaaggaggcccccacagcgtgcccccgctggcaaggccccggtcctgtgtcccttgatctgtcacaatggc

SEQ ID NO: 95818 - DNA, 120 bp, Artificial Sequence
  ENSG00000090006_4 (sequence is synthesized)
ggtgtgtgcgtgaagcctgaccgctgcctctgtcccccggacttcgctggcaagttctgccagttgcactcctcgggcgcccggcccccggccccggctgtaccaggcctcacccgctcc

SEQ ID NO: 95819 - DNA, 120 bp, Artificial Sequence
  ENSG00000090006_5 (sequence is synthesized)
gtgtacactatgccactggccaaccaccgcgacgacgagcacggcgtggcatctatggtgagcgtccacgtggagcacccgcaggaggcgtcggtggtggtgcaccaggtggagcgtgtg

SEQ ID NO: 95820 - DNA, 120 bp, Artificial Sequence
  ENSG00000090006_6 (sequence is synthesized)
tctggcccttgggaggaggcggacgctgaggcggtggcgcgggcggaagcggcggcgcgggcggaggcggcagcgccctacacggtgttggcacagagcgcgccgcgggaggacggctac

SEQ ID NO: 95821 - DNA, 120 bp, Artificial Sequence
  ENSG00000090006_7 (sequence is synthesized)
tcagatgcctcgggcttcggttactgctttcgggagctgcgcggaggcgaatgcgcgtccccgctgcccgggctccggacgcaggaggtctgctgccgaggggccggcttggcctggggc

SEQ ID NO: 95822 - DNA, 120 bp, Artificial Sequence
  ENSG00000090006_8 (sequence is synthesized)
gttcacgactgtcagctgtgctccgagcgcctggggaactccgaaagagtgagcgccccagatggaccttgtccaaccggctttgaaagagttaatgggtcctgcgaagatgtggatgag

SEQ ID NO: 95823 - DNA, 120 bp, Artificial Sequence
  ENSG00000090006_9 (sequence is synthesized)
tgcgcgactggcgggcgctgccagcacggcgagtgtgcaaacacgcgcggcgggtacacgtgtgtgtgccccgacggctttctgctcgactcgtcccgcagcagctgcatctcccaacac

SEQ ID NO: 95824 - DNA, 120 bp, Artificial Sequence
  ENSG00000090006_10 (sequence is synthesized)
gtgatctcagaggccaaagggccctgcttccgcgtgctccgcgacggcggctgttcgctgcccattctgcggaacatcactaaacagatctgctgctgcagccgcgtaggcaaggcctgg

SEQ ID NO: 95825 - DNA, 120 bp, Artificial Sequence
  ENSG00000090006_11 (sequence is synthesized)
ggccggggctgccagctctgcccacccttcggctcagagggtttccgggagatctgcccggctggtcctggttaccactactcggcctccgacctccgctacaacaccagacccctgggc

SEQ ID NO: 95826 - DNA, 120 bp, Artificial Sequence
  ENSG00000090006_12 (sequence is synthesized)
caggagccaccccgagtgtcactcagccagcctcgtaccctgccagccacctctcggccatctgcaggctttctgcccacccatcgcctggagccccggcctgaaccccggcccgatccc

SEQ ID NO: 95827 - DNA, 120 bp, Artificial Sequence
  ENSG00000090006_13 (sequence is synthesized)
cggcccggccctgagcttcccttgcccagcatccctgcctggactggtcctgagattcctgaatcaggtccctcctccggcatgtgtcagcgcaacccccaggtctgcggcccaggacgc

SEQ ID NO: 95828 - DNA, 120 bp, Artificial Sequence
  ENSG00000090006_14 (sequence is synthesized)
tgcatttcccggcccagcggctacacctgcgcttgcgactctggcttccggctcagcccccagggcacccgatgcattgatgtggacgaatgtcgccgcgtgcccccgccctgtgctccc

SEQ ID NO: 95829 - DNA, 120 bp, Artificial Sequence
  ENSG00000090006_15 (sequence is synthesized)
gggcgctgcgagaactcaccaggcagcttccgctgcgtgtgcggcccgggcttccgagccggcccacgggctgcggaatgcctggatgtggacgagtgccaccgcgtgccgccgccgtgt

SEQ ID NO: 95830 - DNA, 120 bp, Artificial Sequence
  ENSG00000090006_16 (sequence is synthesized)
gacctcgggcgctgcgagaacacgccaggcagcttcctgtgcgtgtgccccgccgggtaccaggctgcaccgcacggagccagctgccaggatgtggatgaatgcacccagagcccaggc

SEQ ID NO: 95831 - DNA, 120 bp, Artificial Sequence
  ENSG00000090006_17 (sequence is synthesized)
ctgtgtggccgaggggcctgcaagaacctgcctggctctttccgctgtgtttgcccggctggcttccggggctcggcgtgtgaagaggatgtggatgagtgtgcccaggagccgccgccc

SEQ ID NO: 95832 - DNA, 120 bp, Artificial Sequence
  ENSG00000090006_18 (sequence is synthesized)
tgtgggcccggccgctgtgacaacacggcaggctcctttcactgtgcctgccctgctggcttccgctcccgagggcccggggccccctgccaagatgtggatgagtgtgcccgaagcccc

SEQ ID NO: 95833 - DNA, 120 bp, Artificial Sequence
  ENSG00000090006_19 (sequence is synthesized)
ccaccctgcacctacggccggtgtgagaacacagaaggcagcttccagtgtgtctgccccatgggcttccaacccaacactgctggctccgagtgcgaggatgtggatgagtgtgagaac

SEQ ID NO: 95834 - DNA, 120 bp, Artificial Sequence
  ENSG00000090006_20 (sequence is synthesized)
tgaactcgcccggctccttccagtgcaggacctgtccttctggccaccacctgcaccgtggcagatgcactgatgtggacgaatgcagttcgggtgcccctccctgtggtccccacggcc

SEQ ID NO: 95835 - DNA, 120 bp, Artificial Sequence
  ENSG00000090006_21 (sequence is synthesized)
actgcactaacaccgaaggctccttccgctgcagctgcgcgccaggctaccgggcgccgtcgggtcggcccgggccctgcgcagacgtgaacgagtgcctggagggcgatttctgcttcc

SEQ ID NO: 95836 - DNA, 120 bp, Artificial Sequence
  ENSG00000090006_22 (sequence is synthesized)
ctcacggcgagtgcctcaacactgacggctcctttgcctgtacttgtgcccctggctaccgacccggaccccgcggagcctcttgcctcgacgttgacgagtgcagcgaggaggaccttt

SEQ ID NO: 95837 - DNA, 120 bp, Artificial Sequence
  ENSG00000090006_23 (sequence is synthesized)
gccagagcggcatctgtaccaacaccgacggctccttcgagtgcatctgtcctccgggacaccgcgctggcccggacctcgcctcctgcctcgacgtggacgaatgtcgcgagcgaggcc

SEQ ID NO: 95838 - DNA, 120 bp, Artificial Sequence
  ENSG00000090006_24 (sequence is synthesized)
cagccctgtgcgggtcgcagcgctgtgagaactctcccggctcctaccgctgtgtccgggactgcgatcctgggtaccacgcgggccccgagggcacctgtgacgatgtggatgagtgcc

SEQ ID NO: 95839 - DNA, 120 bp, Artificial Sequence
  ENSG00000090006_25 (sequence is synthesized)
aagaatatggtcccgagatttgtggagcccagcgttgtgagaacacccctggctcctaccgctgcacaccagcctgtgaccctggctatcagcccacgccagggggcggatgccaggatg

SEQ ID NO: 95840 - DNA, 120 bp, Artificial Sequence
  ENSG00000090006_26 (sequence is synthesized)
tggacgaatgccggaaccggtccttctgcggtgcccacgccgtgtgccagaacctgcccggctccttccagtgcctctgtgaccagggttacgagggggcacgggatgggcgtcactgcg

SEQ ID NO: 95841 - DNA, 120 bp, Artificial Sequence
  ENSG00000090006_27 (sequence is synthesized)
tggatgtgaacgagtgtgaaacactacagggtgtatgtggagctgccctgtgtgaaaatgtcgaaggctccttcctctgtgtctgccccaacagcccggaagagtttgaccccatgactg

SEQ ID NO: 95842 - DNA, 120 bp, Artificial Sequence
  ENSG00000090006_28 (sequence is synthesized)
gacgctgtgttcccccacgaacttctgctggcacgttcccaggctcgcagccccaggcacctgctagccccgttctgcccgccaggccacctccgccacccctgccccgccgacccagca

SEQ ID NO: 95843 - DNA, 120 bp, Artificial Sequence
  ENSG00000090006_29 (sequence is synthesized)
cacctaggcagggccctgtggggagtgggcgccgggagtgctactttgacacagcggccccggatgcatgtgacaacatcctggctcggaatgtgacatggcaggagtgctgctgtactg

SEQ ID NO: 95844 - DNA, 120 bp, Artificial Sequence
  ENSG00000090006_30 (sequence is synthesized)
tgggtgagggctggggcagcggctgccgcatccagcagtgcccgggcaccgagacagctgagtaccagtcattgtgccctcacggccggggctacctggcgcccagtggagacctgagcc

SEQ ID NO: 95845 - DNA, 120 bp, Artificial Sequence
  ENSG00000090006_31 (sequence is synthesized)
tccggagagacgtggacgaatgtcagctcttccgagaccaggtgtgcaagagtggcgtgtgtgtgaacacggccccgggctactcatgctattgcagcaacggctactactaccacacac

SEQ ID NO: 95846 - DNA, 120 bp, Artificial Sequence
  ENSG00000090006_32 (sequence is synthesized)
agcggctggagtgcatcgacaatgacgagtgcgccgatgaggaaccggcctgtgagggcggccgctgtgtcaacactgtgggctcttatcactgtacctgcgagcccccactggtgctgg

SEQ ID NO: 95847 - DNA, 120 bp, Artificial Sequence
  ENSG00000090006_33 (sequence is synthesized)
atggctcgcagcgccgctgcgtctccaacgagagccagagcctcgatgacaatctgggagtgtgctggcaggaagtgggggctgacctcgtgtgcagccaccctcggctggaccgtcagg

SEQ ID NO: 95848 - DNA, 120 bp, Artificial Sequence
  ENSG00000090006_34 (sequence is synthesized)
ccacctacacagagtgctgctgcctgtatggagaggcctggggcatggactgcgccctctgccctgcgcaggactcagatgacttcgaggccctgtgcaatgtgctacgcccccccgcat

SEQ ID NO: 95849 - DNA, 120 bp, Artificial Sequence
  ENSG00000090006_35 (sequence is synthesized)
atagccccccgcgaccaggtggctttggactcccctacgagtacggcccagacttaggtccaccttaccagggcctcccatatgggcctgagttgtacccaccacctgcgctaccctacg

SEQ ID NO: 95850 - DNA, 120 bp, Artificial Sequence
  ENSG00000090006_36 (sequence is synthesized)
acccctacccaccgccacctgggcccttcgcccgccgggaggctccttatggggcaccccgcttcgacatgccagactttgaggacgatggtggcccctatggcgaatctgaggctcctg

SEQ ID NO: 95851 - DNA, 120 bp, Artificial Sequence
  ENSG00000090006_37 (sequence is synthesized)
cgccacctggcccgggcacccgctggccctatcggtcccgggacacccgccgctccttcccagagcccgaggagcctcctgaaggtggaagctatgctggttccctggctgagccctacg

SEQ ID NO: 95852 - DNA, 120 bp, Artificial Sequence
  ENSG00000090006_38 (sequence is synthesized)
aggagctggaggcggaggagtgcgggatcctggacggctgcaccaacggccgctgcgtgcgcgtccccgaaggcttcacctgccgttgcttcgacggctaccgcctggacatgacccgca

SEQ ID NO: 95853 - DNA, 120 bp, Artificial Sequence
  ENSG00000090006_39 (sequence is synthesized)
tggcctgcgttgacatcaacgagtgtgatgaggccgaggctgcctccccgctgtgcgtcaacgcgcgttgcctcaacacggatggctccttccgctgcatctgccgcccgggattcgcac

SEQ ID NO: 95854 - DNA, 80 bp, Artificial Sequence
  ENSG00000090006_40 (sequence is synthesized)
attcgcacccacgcaccagccgcaccactgtgcgcccgcacggccccgggcctgagccctggcacccgctggccgcccac

SEQ ID NO: 95855 - DNA, 120 bp, Artificial Sequence
  ENSG00000090006_41 (sequence is synthesized)
atgggagacgtaaaagcgttgctgtttgtcgctgctgcccgggccagacgtctaggaggagccgctgcatccgagtccctggctgtctccgaagccttctgcagggtccgaagctgccag

SEQ ID NO: 95856 - DNA, 120 bp, Artificial Sequence
  ENSG00000090006_42 (sequence is synthesized)
actgctcccgcctccaccagcgcctcccactgatgtcgtggtcccgggcctggcccaggggcccctttacatgccctctcccttttataaaattttccattaaaaaccacctattttcta

SEQ ID NO: 95857 - DNA, 120 bp, Artificial Sequence
  ENSG00000090006_43 (sequence is synthesized)
agcgcggcgctgcagccatggcgggcggcgtgcggctgctctgggtgtcgctattggtgctgctggcgcagctagggccgcagcctggactgggccggctcggagagcgtctccgcgtgc

SEQ ID NO: 95858 - DNA, 120 bp, Artificial Sequence
  ENSG00000090006_44 (sequence is synthesized)
gtgcgcttcaccccggtcgtgtgcggcctgcgctgcgtccatgggccgaccggctcccgctgtaccccgacctgcgcgccccgcaacgccaccagcgtggacagcggcgctcccggcggg

SEQ ID NO: 95859 - DNA, 120 bp, Artificial Sequence
  ENSG00000090006_45 (sequence is synthesized)
agaagagggcgaaaaggggaaaacgagtttttagccggggtattccagcaggatcagggggcagctggtgggagtctcgaggcagtgagggggggcggggcgtggagatgaaagggccga

SEQ ID NO: 95860 - DNA, 120 bp, Artificial Sequence
  ENSG00000090006_46 (sequence is synthesized)
gtctgggtatttggaccgtgattgtaaagaagctgttctaaacccgtcggggggcggtgtttgcagggagggaagtagcgtgaggcaggttggggaaggcgtgagaggcctaggagagcc

SEQ ID NO: 95861 - DNA, 120 bp, Artificial Sequence
  ENSG00000090006_47 (sequence is synthesized)
cctgagcttcccttgcccagcatccctgcctggactggtcctgagattcctgaatcaggtttgctagaaagaactgagggcattgggcctgcagcagtggctcacgcctgtaatcccagc

SEQ ID NO: 95862 - DNA, 120 bp, Artificial Sequence
  ENSG00000090006_48 (sequence is synthesized)
ctctttcccccgcctcctctcctagcctccccaactctcctctaccccaatcttctcctgccctctcctctgcttccccggcctcccccttctgactctcctctcccctctttgtatccc

SEQ ID NO: 95863 - DNA, 120 bp, Artificial Sequence
  ENSG00000090006_49 (sequence is synthesized)
caccagcgggaagtctttcctggagtctagactccatccatcacactgccaatgtgctgggaagagaaatgggaaagggtggggagagttgaaggggatgcctcttaatcatcctctccc

SEQ ID NO: 95864 - DNA, 120 bp, Artificial Sequence
  ENSG00000090006_50 (sequence is synthesized)
ggagatgtctgcaagaacggcacctttctcctggtcaggcgggaaactgaggcccaaagaccaagaaacgctggcttctggacacacatcgtggaaggcgttgctgtttgtcgctgctgc

SEQ ID NO: 95865 - DNA, 120 bp, Artificial Sequence
  ENSG00000090006_51 (sequence is synthesized)
acagaggccaggctctcgagcagacgtgtggcctgatggcagtagagagagacctgggatgcagaggccaagtgatgggaaacagaaaggctgagtcatgaaagatggagaagcagaatg

SEQ ID NO: 95866 - DNA, 120 bp, Artificial Sequence
  ENSG00000090006_52 (sequence is synthesized)
caatctcctgaccgcgaccccgattccaaccctgccacaccagagccctatccccaaactgctcctttcttctctagcccctaccccaccttcccttagcttggtccccaaagctctcct

SEQ ID NO: 95867 - DNA, 120 bp, Artificial Sequence
  ENSG00000090006_53 (sequence is synthesized)
ttctgcccttgcgctaccaaaccctgccctccacaattgcctctctcactgtgcccctctccggctgtcctggccgggtccccatcctggctctggcccaagcttggtcccgctcccgct

SEQ ID NO: 95868 - DNA, 120 bp, Artificial Sequence
  ENSG00000090006_54 (sequence is synthesized)
cctgactgtctggtggttgcagatgtggacgaatgccggaaccggtccttctgcggtgcccacgccgtgtgccagaacctgcccggctccttccagtgcctctgtgaccagggttacgag

SEQ ID NO: 95869 - DNA, 120 bp, Artificial Sequence
  ENSG00000090006_55 (sequence is synthesized)
cttttgctatcagcctgtctgtccgtttctatttcatcccttgcctgcctatctcaggctcttcccatctctgcattatttctgtctctttctgtttctttctagttacctgtctctttt

SEQ ID NO: 95870 - DNA, 120 bp, Artificial Sequence
  ENSG00000090006_56 (sequence is synthesized)
cctctctctctttctccctgtgtctcactgcctgcctctatgtctaagtctctctgccccttctctctttctctcccccaacccccatcatctctctttctctcagggtctttgtttctc

SEQ ID NO: 95871 - DNA, 120 bp, Artificial Sequence
  ENSG00000090006_57 (sequence is synthesized)
tcccactagaggcctggtccccataaataggtgttgtggggggagggttgggcagagccgctactgaaagacattttcctggcatggaggccctttggtggggaggtcagtttaacccgg

SEQ ID NO: 95872 - DNA, 120 bp, Artificial Sequence
  ENSG00000090006_58 (sequence is synthesized)
gtttctgacaaaaaggacctgaaaaatcactgattctagaataggggagtgtcaaggggagttcatacccatgaatctccaccggtaggaatatcttgcatgccaggatgtctggaatgc

SEQ ID NO: 95873 - DNA, 120 bp, Artificial Sequence
  ENSG00000090006_59 (sequence is synthesized)
tgagaattataggatacagaaaggaacctggattactaggaaatctagagaatgggagagatcctggactatccgcccttccagagcactggaaggtttgtttgcgttccaagaaatcca

SEQ ID NO: 95874 - DNA, 120 bp, Artificial Sequence
  ENSG00000090013_0 (sequence is synthesized)
agtgggttcccgcgcgtgccgagactctgaggccttgcacccccacgatcccgtacgatggccgtcaagaagatcgcgatcttcggcgccactggccagaccgggctcaccaccctggcg

SEQ ID NO: 95875 - DNA, 120 bp, Artificial Sequence
  ENSG00000090013_1 (sequence is synthesized)
caggcggtgcaagcaggttacgaagtgacagtgctggtgcgggactcctccaggctgccatcagaggggccccggccggcccacgtggtagtgggagatgttctgcaggcagccgatgtg

SEQ ID NO: 95876 - DNA, 120 bp, Artificial Sequence
  ENSG00000090013_2 (sequence is synthesized)
gacaagaccgtggctgggcaggacgctgtcatcgtgctgctgggcacccgcaatgacctcagtcccacgacagtgatgtccgagggcgcccggaacattgtggcagccatgaaggctcat

SEQ ID NO: 95877 - DNA, 120 bp, Artificial Sequence
  ENSG00000090013_3 (sequence is synthesized)
tgactgatgaccacatccggatgcacaaggtgctgcgggaatcaggcctgaagtacgtggctgtgatgccgccacacataggagaccagccactaactggggcgtacacagtgaccctgg

SEQ ID NO: 95878 - DNA, 120 bp, Artificial Sequence
  ENSG00000090013_4 (sequence is synthesized)
atggacgagggccctcaagggtcatctccaaacatgacctgggccatttcatgctgcgctgcctcaccaccgatgagtacgacggacacagcacctacccctcccaccagtaccagtagc

SEQ ID NO: 95879 - DNA, 120 bp, Artificial Sequence
  ENSG00000090013_5 (sequence is synthesized)
actctgtccccatctgggagggtggcattctgggacatgaggagcaaaggaagggggcaataaatgttgagccaagagcttcaaattactctagagaaaccgactgtgtgactcttcctc

SEQ ID NO: 95880 - DNA, 120 bp, Artificial Sequence
  ENSG00000090013_6 (sequence is synthesized)
gcccccagcgccacccccgcccccggccccgcccctgccacccctgccgccgccgccgcccaccagtgacagccactctctgtcccctctaaggtcccacgacagtgatgtccgagggcg

SEQ ID NO: 95881 - DNA, 120 bp, Artificial Sequence
  ENSG00000090013_7 (sequence is synthesized)
aggtcgtggcctgcacctcgggtgggtggtgggatcatggaggtggggctgaactggggggtactggggaggcagcccaggggcctctgaaaggtgacgctgaagccattccatgttact

SEQ ID NO: 95882 - DNA, 120 bp, Artificial Sequence
  ENSG00000090013_8 (sequence is synthesized)
gtgcatttactgaacaccagctgtgtgcctgaaccttactgggtgatgctggggacacagtggtgacctgtacagccctgggccctgctcacacaaggctcacagagagaggtggtaaac

SEQ ID NO: 95883 - DNA, 120 bp, Artificial Sequence
  ENSG00000090013_9 (sequence is synthesized)
aatgggagaaactacaggactatgggagcccagaggaggcgtccgacttaggctgagagaggtcagggtaggcctcccagaggaagtgatagagctgtggatagacactaggtctctgcc

SEQ ID NO: 95884 - DNA, 120 bp, Artificial Sequence
  ENSG00000090013_10 (sequence is synthesized)
ctcacagagctcccgattatggggacacagacattaagcaaatagttgccctgtataatcatttatttatttatttatttatttatagttattttgaggtttgtttgagatagagtcttg

SEQ ID NO: 95885 - DNA, 80 bp, Artificial Sequence
  ENSG00000090013_11 (sequence is synthesized)
cgtgatcttggctccctgcaacctccgcctcccggaggtggttctcctgcctcaagtctttcctgctctgggaccctacc

SEQ ID NO: 95886 - DNA, 120 bp, Artificial Sequence
  ENSG00000090020_0 (sequence is synthesized)
agtctgctgccgccggggccggggctagggttagttctggagctggaccaggaggagctgcagctgggccggggcggagcgccgcgtcgcgccagggccgcgaggaggggcgtgttgctg

SEQ ID NO: 95887 - DNA, 120 bp, Artificial Sequence
  ENSG00000090020_1 (sequence is synthesized)
ctggcccaccgcgagccgcccccagcccgcgccgaggcgccttcccgccaggccgcctgccttccgcctctttccatttccccggaatctcagcccggcgcgcctggacccctgcccctc

SEQ ID NO: 95888 - DNA, 120 bp, Artificial Sequence
  ENSG00000090020_2 (sequence is synthesized)
tctgggtggagaagctcccggccgcttcccggtttcactccttctcagcctgggctcccagccccctctctccttttcctggactggctctcacccccttcggtccccttcctttagctc

SEQ ID NO: 95889 - DNA, 120 bp, Artificial Sequence
  ENSG00000090020_3 (sequence is synthesized)
aggctccctaccccttcctttagcccacagcccagagtcccagctcctcagtcactttcctcagccaaaggtcccagccttccttcttcctttcctttgcactatccctatcctgcccct

SEQ ID NO: 95890 - DNA, 120 bp, Artificial Sequence
  ENSG00000090020_4 (sequence is synthesized)
tcctctatccctagggctcagtttcccacatccgtcctcccccttcccaggcccggagttccagaccttttggtctcctttcgtggtcgttcctgggtccttgccccctttccccacttt

SEQ ID NO: 95891 - DNA, 120 bp, Artificial Sequence
  ENSG00000090020_5 (sequence is synthesized)
ggagttccagattgcaaacccagcctccctccacccccagaaaattgcttccatggaaatgcctctctaaaacatgaacttttcctagagactacgccagtctctcttcccacttgctga

SEQ ID NO: 95892 - DNA, 120 bp, Artificial Sequence
  ENSG00000090020_6 (sequence is synthesized)
ccctttgctacctatgtgcccggttttactctcatttgggtaaggtcgaggctggctctggaagcagcaccatggttctgcggtctggcatctgtggcctctctccacatcggatcttcc

SEQ ID NO: 95893 - DNA, 120 bp, Artificial Sequence
  ENSG00000090020_7 (sequence is synthesized)
cttccttactcgtggtggttgctttggtggggctgctgcctgttctcaggagccatggcctccagctcagcccaactgccagcaccattcgaagctcagagccaccacgagaacgctcga

SEQ ID NO: 95894 - DNA, 120 bp, Artificial Sequence
  ENSG00000090020_8 (sequence is synthesized)
ttggggatgtcaccaccgctccaccggaggtcaccccagagagccgccctgttaatcattccgtcactgatcatggcatgaagccgcgcaaggcctttccagtcctgggcatcgactaca

SEQ ID NO: 95895 - DNA, 120 bp, Artificial Sequence
  ENSG00000090020_9 (sequence is synthesized)
cacacgtgcgcacccccttcgagatctccctctggatccttctggcctgcctcatgaagataggtttccatgtgatccccactatctcaagcatcgtcccggagagctgcctgctgatcg

SEQ ID NO: 95896 - DNA, 120 bp, Artificial Sequence
  ENSG00000090020_10 (sequence is synthesized)
tggtggggctgctggtggggggcctgatcaagggtgtaggcgagacaccccccttcctgcagtccgacgtcttcttcctcttcctgctgccgcccatcatcctggatgcgggctacttcc

SEQ ID NO: 95897 - DNA, 120 bp, Artificial Sequence
  ENSG00000090020_11 (sequence is synthesized)
tgccactgcggcagttcacagaaaacctgggcaccatcctgatctttgccgtggtgggcacgctgtggaacgccttcttcctgggcggcctcatgtacgccgtgtgcctggtgggcggtg

SEQ ID NO: 95898 - DNA, 120 bp, Artificial Sequence
  ENSG00000090020_12 (sequence is synthesized)
agcagatcaacaacatcggcctcctggacaacctgctcttcggcagcatcatctcggccgtggaccccgtggcggttctggctgtctttgaggaaattcacatcaatgagctgctgcaca

SEQ ID NO: 95899 - DNA, 120 bp, Artificial Sequence
  ENSG00000090020_13 (sequence is synthesized)
tccttgtttttggggagtccttgctcaatgacgccgtcactgtggtcctgtatcacctctttgaggagtttgccaactacgaacacgtgggcatcgtggacatcttcctcggcttcctga

SEQ ID NO: 95900 - DNA, 120 bp, Artificial Sequence
  ENSG00000090020_14 (sequence is synthesized)
gcttcttcgtggtggccctgggcggggtgcttgtgggcgtggtctacggggtcatcgcagccttcacctcccgatttacctcccacatccgggtcatcgagccgctcttcgtcttcctct

SEQ ID NO: 95901 - DNA, 120 bp, Artificial Sequence
  ENSG00000090020_15 (sequence is synthesized)
acagctacatggcctacttgtcagccgagctcttccacctgtcaggcatcatggcgctcatagcctcaggagtggtgatgcgcccctatgtggaggccaacatctcccacaagtcccaca

SEQ ID NO: 95902 - DNA, 120 bp, Artificial Sequence
  ENSG00000090020_16 (sequence is synthesized)
ccaccatcaaatacttcctgaagatgtggagcagcgtcagcgagaccctcatcttcatcttcctcggcgtctccacggtggccggctcccaccactggaactggaccttcgtcatcagca

SEQ ID NO: 95903 - DNA, 120 bp, Artificial Sequence
  ENSG00000090020_17 (sequence is synthesized)
ccctgctcttctgcctcatcgcccgcgtgctgggggtgctgggcctgacctggttcatcaacaagttccgtatcgtgaagctgacccccaaggaccagttcatcatcgcctatgggggcc

SEQ ID NO: 95904 - DNA, 120 bp, Artificial Sequence
  ENSG00000090020_18 (sequence is synthesized)
tgcgaggggccatcgccttctctctgggctacctcctggacaagaagcacttccccatgtgtgacctgttcctcactgccatcatcactgtcatcttcttcaccgtctttgtgcagggca

SEQ ID NO: 95905 - DNA, 120 bp, Artificial Sequence
  ENSG00000090020_19 (sequence is synthesized)
gctccatcaacgaagagatccacacacagttcctggaccaccttctgacaggcatcgaagacatctgtggccactacggtcaccaccactggaaggacaagctcaaccggtttaataaga

SEQ ID NO: 95906 - DNA, 120 bp, Artificial Sequence
  ENSG00000090020_20 (sequence is synthesized)
aatatgtgaagaagtgtctgatagctggcgagcgctccaaggagccccagctcattgccttctaccacaagatggagatgaagcaggccatcgagctggtggagagcgggggcatgggca

SEQ ID NO: 95907 - DNA, 120 bp, Artificial Sequence
  ENSG00000090020_21 (sequence is synthesized)
agatcccctctgccgtctccaccgtctccatgcagaacatccaccccaagtccctgccttccgagcgcatcctgccagcactgtccaaggacaaggaggaggagatccgcaaaatcctga

SEQ ID NO: 95908 - DNA, 120 bp, Artificial Sequence
  ENSG00000090020_22 (sequence is synthesized)
ggaacaacttgcagaagaccaggcagcggctgcggtcctacaacagacacacgctggtggcagacccctacgaggaagcctggaaccagatgctgctccggaggcagaaggcccggcagc

SEQ ID NO: 95909 - DNA, 120 bp, Artificial Sequence
  ENSG00000090020_23 (sequence is synthesized)
tggagcagaagatcaacaactacctgacggtgccagcccacaagctggactcacccaccatgtctcgggcccgcatcggctcagacccactggcctatgagccgaaggaggacctgcctg

SEQ ID NO: 95910 - DNA, 120 bp, Artificial Sequence
  ENSG00000090020_24 (sequence is synthesized)
tcatcaccatcgacccggcttccccgcagtcacccgagtctgtggacctggtgaatgaagagctgaagggcaaagtcttagggttgagccgggatcctgcaaaggtggctgaggaggacg

SEQ ID NO: 95911 - DNA, 120 bp, Artificial Sequence
  ENSG00000090020_25 (sequence is synthesized)
aggacgacgatgggggcatcatgatgcggagcaaggagacttcgtccccaggaaccgacgatgtcttcacccccgcgcccagtgacagccccagctcccagaggatacagcgctgcctca

SEQ ID NO: 95912 - DNA, 120 bp, Artificial Sequence
  ENSG00000090020_26 (sequence is synthesized)
gtgacccaggcccacaccctgagcctggggagggagaaccgttcttccccaaggggcagtaacaccagggccagcaggcagcgcctgtcccctcacagactcttccaccagagcaggggc

SEQ ID NO: 95913 - DNA, 120 bp, Artificial Sequence
  ENSG00000090020_27 (sequence is synthesized)
tgctgggggctccccttgcccttcctgacccggattggccctgcccctccccctaccgcatggcagctgggcccacagcccccaccccagcacagctcctcccctgccgcctcccgggaa

SEQ ID NO: 95914 - DNA, 120 bp, Artificial Sequence
  ENSG00000090020_28 (sequence is synthesized)
gcatcctccccaccagagctgcctccccaatccatttggcagaactgctggggctggtgaggccggccctgcccctccctagatccaggcttctcccggacctggactagggcctcggag

SEQ ID NO: 95915 - DNA, 120 bp, Artificial Sequence
  ENSG00000090020_29 (sequence is synthesized)
gctcctccctctgcctcatcctcctcctcattcagaccaatcttagtttctaaccaaagagtctctggctcagctgtggtcccacccaggaagggagggagctgaggcctcccttgagta

SEQ ID NO: 95916 - DNA, 120 bp, Artificial Sequence
  ENSG00000090020_30 (sequence is synthesized)
ggccctgctttatcaggggacaaaccaggggtaccaggcacatggctgggggagggactgctgacccaccaaggtctcacactcctcctgccagctctgtcaccctggccaccacccaac

SEQ ID NO: 95917 - DNA, 120 bp, Artificial Sequence
  ENSG00000090020_31 (sequence is synthesized)
ctgtccttactcagagctgcgggctgagggcatctctgagtgtctctgcctggagcaggggtggtttctacggtgacagtgacgtgactcagagcttttcgaactgtgctcccacgggga

SEQ ID NO: 95918 - DNA, 120 bp, Artificial Sequence
  ENSG00000090020_32 (sequence is synthesized)
ccactgggcccctcaggggaagctgctaggggaaggactggccgtggctccagaatgtgctgcctttttaagttttgtttgttcacactcctatatatgattgtttgcacagagggcgct

SEQ ID NO: 95919 - DNA, 120 bp, Artificial Sequence
  ENSG00000090020_33 (sequence is synthesized)
cctgtttttaaaacattttgaaaacccctggctgaacagtgctctgcctctaactccctcctcacactccagaattacccttcctcatctgtgcctgtctgtccaacccctcccccacgt

SEQ ID NO: 95920 - DNA, 120 bp, Artificial Sequence
  ENSG00000090020_34 (sequence is synthesized)
ctctctgcctgctgggctcttaactgttgctcgaagactgtgacatcagaagtaactcccactcctaatcaagagtctctccagcctcacagatgctggcctcttggcacctgcctagct

SEQ ID NO: 95921 - DNA, 120 bp, Artificial Sequence
  ENSG00000090020_35 (sequence is synthesized)
cttgggcctgacctccagtcctgctggcctgctcttacttcccccaccctgggtttggcccctggaacctttcccttgtgtgtaccacaccctgcctgctgtggagcccattgtggaggc

SEQ ID NO: 95922 - DNA, 120 bp, Artificial Sequence
  ENSG00000090020_36 (sequence is synthesized)
ggtgggggggagaaggcctcccctgaggatcccctgtcccctggggctggtggattgggcagaatcctgggcccccagagacctttgcccacacacactccttccccttgtccctggggc

SEQ ID NO: 95923 - DNA, 120 bp, Artificial Sequence
  ENSG00000090020_37 (sequence is synthesized)
actcccccaggattgtgcaatagtcagagtgtccctttttgcaggggactgggccatgggtcctcggcccatctgtccatcctcctctccatgcaagtgctgtttgggcaggagtcacca

SEQ ID NO: 95924 - DNA, 120 bp, Artificial Sequence
  ENSG00000090020_38 (sequence is synthesized)
tgcaagggtgacatcgacaaccacgtaccaagccaccgcagctgctgccactctgctgcctgtacagaagaaactgaatctttttcatattctaataaatcaatgtgagtttttaataga

SEQ ID NO: 95925 - DNA, 120 bp, Artificial Sequence
  ENSG00000090020_39 (sequence is synthesized)
atctgacttaggcttttaaagggatccttctggctgctttgttgaaacaataatctgggtggggaaaatggcactgcttggaccagagtgggcaatggaggtggtcagaaatggatggat

SEQ ID NO: 95926 - DNA, 120 bp, Artificial Sequence
  ENSG00000090020_40 (sequence is synthesized)
tctggaaatattttgaagattgaattgacactatttgtggaggattgatatgacagaaaggagccaaggatgactcaagtttttggccagagattattcgaaagcccttatgagactgca

SEQ ID NO: 95927 - DNA, 120 bp, Artificial Sequence
  ENSG00000090020_41 (sequence is synthesized)
gtgtgatttgaaatgcgattctagtcccagctccaccactaacttgctgtgtgaccttgggcgagccactccccctttctgggcctcagtttcttcaatcgtaaagtgagaattgtgatg

SEQ ID NO: 95928 - DNA, 120 bp, Artificial Sequence
  ENSG00000090020_42 (sequence is synthesized)
agtcattgcagagtgactgatcagaatgtaaaggaaccagaatgctgcccaacttaatttggaactcatagagcattaagagaagtgggtactggccgggcacggtgactcaacgcctgt

SEQ ID NO: 95929 - DNA, 120 bp, Artificial Sequence
  ENSG00000090020_43 (sequence is synthesized)
ttttttaccttgattttgcagttgtatgtgctaatgattttccaagcccattttcattgaaggcaacattggggagggggcctccctccagagccagcctgcctgggtttaaatcatggc

SEQ ID NO: 95930 - DNA, 120 bp, Artificial Sequence
  ENSG00000090020_44 (sequence is synthesized)
tttactgcttctctgggatcttagaaagctgcttatcctctctgagcctcagtttctgcatctgttaaatagagacaatggaaggacctccctcttagtgttgcggatattggagagctg

SEQ ID NO: 95931 - DNA, 120 bp, Artificial Sequence
  ENSG00000090020_45 (sequence is synthesized)
attgatgctagaacacttccaagcacgtgtgttggtcacatggcaggtgtgcagttccatctgctgctgctgttattactcggtcctcctcacagtcctggtggggaggcagtgcagagg

SEQ ID NO: 95932 - DNA, 120 bp, Artificial Sequence
  ENSG00000090020_46 (sequence is synthesized)
tagttttccctgtgtgtggggcctgacttccatggggttgcagagcaagtctgtggtgcagtccacatctgaacccaggctgtctgctgcctggcccaggccagatgaccagtgtggggg

SEQ ID NO: 95933 - DNA, 120 bp, Artificial Sequence
  ENSG00000090020_47 (sequence is synthesized)
tcatttggcagtgaaacctctgaccgtgtctccaggaagaagcaggccttaaggacctgtctttagataagtgctgggaggtgggagagttctcacacccttgggtcctgggagagagca

SEQ ID NO: 95934 - DNA, 120 bp, Artificial Sequence
  ENSG00000090020_48 (sequence is synthesized)
gagcagagagggcatcctagccttgggggcctggggtgagggagggaggctctgtggcctccctgcctgggtagcagaactggagtgcctgacacctgcctgccccccagggcatgacca

SEQ ID NO: 95935 - DNA, 120 bp, Artificial Sequence
  ENSG00000090054_0 (sequence is synthesized)
gggacgcgcttgtgacccgccttccggaaggaagcggctaactatggcgaccgccacggagcagtgggttctggtggagatggtacaggcgctttacgaggctcctgcttaccatcttat

SEQ ID NO: 95936 - DNA, 120 bp, Artificial Sequence
  ENSG00000090054_1 (sequence is synthesized)
tttggaagggattctgatcctctggataatcagacttcttttctctaagacttacaaattacaagaacgatctgatcttacagtcaaggaaaaagaagaactgattgaagagtggcaacc

SEQ ID NO: 95937 - DNA, 120 bp, Artificial Sequence
  ENSG00000090054_2 (sequence is synthesized)
agaacctcttgttcctcctgtcccaaaagaccatcctgctctcaactacaacatcgtttcaggccctccaagccacaaaactgtggtgaatggaaaagaatgtataaacttcgcctcatt

SEQ ID NO: 95938 - DNA, 120 bp, Artificial Sequence
  ENSG00000090054_3 (sequence is synthesized)
taattttcttggattgttggataaccctagggttaaggcagcagctttagcatctctaaagaagtatggcgtggggacttgtggacccagaggattttatggcacatttgatgttcattt

SEQ ID NO: 95939 - DNA, 120 bp, Artificial Sequence
  ENSG00000090054_4 (sequence is synthesized)
ggatttggaagaccgcctggcaaaatttatgaagacagaagaagccattatatactcatatggatttgccaccatagccagtgctattcctgcttactctaaaagaggggacattgtttt

SEQ ID NO: 95940 - DNA, 120 bp, Artificial Sequence
  ENSG00000090054_5 (sequence is synthesized)
tgtagatagagctgcctgctttgctattcagaaaggattacaggcatcccgtagtgacattaagttatttaagcataatgacatggctgacctcgagcgactactaaaagaacaagagat

SEQ ID NO: 95941 - DNA, 120 bp, Artificial Sequence
  ENSG00000090054_6 (sequence is synthesized)
cgaagatcaaaagaatcctcgcaaggctcgtgtaactcggcgtttcattgtagtagaaggattgtatatgaatactggaactatttgtcctcttccagaattggttaagttaaaatacaa

SEQ ID NO: 95942 - DNA, 120 bp, Artificial Sequence
  ENSG00000090054_7 (sequence is synthesized)
atacaaagcaagaatcttcctggaggaaagcctttcatttggagtcctaggagagcatggccgaggagtcactgaacactatggaatcaatattgatgatattgatcttatcagtgccaa

SEQ ID NO: 95943 - DNA, 120 bp, Artificial Sequence
  ENSG00000090054_8 (sequence is synthesized)
catggagaatgcacttgcttctattggaggtttctgctgtggcaggtcttttgtaattgaccatcagcgactttccggccagggatactgcttttcagcttcgttacctcccctgttagc

SEQ ID NO: 95944 - DNA, 120 bp, Artificial Sequence
  ENSG00000090054_9 (sequence is synthesized)
tgctgcagcaattgaggccctcaacatcatggaagagaatccaggtatttttgcagtgttgaaggaaaagtgcggacaaattcataaagctttacaaggcatttctggattaaaagtggt

SEQ ID NO: 95945 - DNA, 120 bp, Artificial Sequence
  ENSG00000090054_10 (sequence is synthesized)
gggggagtccctttctccagcctttcacctacaactggaagagagcactgggtctcgcgagcaagatgtcagactgcttcaggaaattgtagatcaatgcatgaacagaagtattgcatt

SEQ ID NO: 95946 - DNA, 120 bp, Artificial Sequence
  ENSG00000090054_11 (sequence is synthesized)
aagaagagaagtgtctccctcctcccagcattcgggttgtggtcacggtggaacaaacagaggaagaactggagagagctgcgtccaccatcaaggaggtagcccaggccgtcctgctct

SEQ ID NO: 95947 - DNA, 120 bp, Artificial Sequence
  ENSG00000090054_12 (sequence is synthesized)
aggcagagtcccgggaccatggcctcctgccacacaacacgcagagaggactcaagactcccgctggccatggagtggcctgaaagagagcaagaacatgtggatctttgataggattgt

SEQ ID NO: 95948 - DNA, 120 bp, Artificial Sequence
  ENSG00000090054_13 (sequence is synthesized)
taccaaatggtgtcagtatggaccaattgtgtgaccatgagaaggatgcttattttttttaaaaagaaaacacatctaaaagcccaggaactgatttttttaagaggaaaactaatgaca

SEQ ID NO: 95949 - DNA, 120 bp, Artificial Sequence
  ENSG00000090054_14 (sequence is synthesized)
gtgtataactgatgtttaaattgtgcatttagtactatttaaatgttttcttatactagtattttatattcttttgttgtcgtttaaaactggagcttcagtgtctcttccctccctcta

SEQ ID NO: 95950 - DNA, 120 bp, Artificial Sequence
  ENSG00000090054_15 (sequence is synthesized)
atagtaatggttcagtaagcactccttaactccttagtatttcatagaaaaatgactgcaacattaaagctaagaggaacacttcaacatatgtggtacaaatttatattgaagatctaa

SEQ ID NO: 95951 - DNA, 120 bp, Artificial Sequence
  ENSG00000090054_16 (sequence is synthesized)
ataaaccacgtattttccagtcttcgttgtgtgaagctaaatggtggctaaaaggaacactttttgtgtgattattataaactttgcattgtatttgaatcttagaacttttgtacacac

SEQ ID NO: 95952 - DNA, 120 bp, Artificial Sequence
  ENSG00000090054_17 (sequence is synthesized)
taaatattgatgtcacaccatttctaatctgagcatccttagccagagaatattcattatacttcctaagtgagcaataatttaaatcagaagctattttattttaatgtaattaacctt

SEQ ID NO: 95953 - DNA, 120 bp, Artificial Sequence
  ENSG00000090054_18 (sequence is synthesized)
tctttacatttcttatgtgttcacctctaatctgttttaggaagagagttggttattatgttgatcccataatataaatcatatcctttatattttagaatatctcaaatgtattccttt

SEQ ID NO: 95954 - DNA, 120 bp, Artificial Sequence
  ENSG00000090054_19 (sequence is synthesized)
tttgtatggtgggtttgcctagggacgtgtaactacaggcttttactaagccaaggaaaaagagaatttttcttttcatcttacaaattccagatatctacaaaagatgtgaaagcacta

SEQ ID NO: 95955 - DNA, 120 bp, Artificial Sequence
  ENSG00000090054_20 (sequence is synthesized)
aaaataccatttttaagcagtactttacctgttttttctttagcaaaccaggttatgtggtgtaaaggtttgttatacgtgccacaatatagcatataaatattatgccatcattccttc

SEQ ID NO: 95956 - DNA, 120 bp, Artificial Sequence
  ENSG00000090054_21 (sequence is synthesized)
tcttgttaaaggtagaagaataaaattgtgatttttataacctgtgcttattactcaaatggtcttcaacatctttttaaacaacacatactttttgaatgttcagtttctattttgctt

SEQ ID NO: 95957 - DNA, 120 bp, Artificial Sequence
  ENSG00000090054_22 (sequence is synthesized)
gaggtattttgtacatatgtgccttgtgattgctgctgctttaaaggataaagtactctttgggggatgagtctggtttgttttgttttattttttaatgaaataaacctatattcctga

SEQ ID NO: 95958 - DNA, 72 bp, Artificial Sequence
  ENSG00000090054_23 (sequence is synthesized)
gttaagattcaagaggctgaggtgggaggattccttgagcccaggaatttgataccagcatgggcaatatag

SEQ ID NO: 95959 - DNA, 120 bp, Artificial Sequence
  ENSG00000090054_24 (sequence is synthesized)
aagcggctaactatggcgaccgccacggagcagtgggttctggtggagatggtacaggcgctttacgagctccggaaaggaacacgtgtaaggggacgcaggagacaggtctgcaaaaac

SEQ ID NO: 95960 - DNA, 120 bp, Artificial Sequence
  ENSG00000090054_25 (sequence is synthesized)
gaaattccttcacatccatcacttactcttgcctctcatacggataactactgtcttgaagttggtgattgtgttttctttgcctatatttataattttaccatatatgcctgttgccat

SEQ ID NO: 95961 - DNA, 120 bp, Artificial Sequence
  ENSG00000090054_26 (sequence is synthesized)
aaaaatacttggtttattttaaaatgtgatacaagatattttcctgagtagtattgttctgattctgatctgatcaaacaggagcttctattctttacttctgtagatctcttcagtctt

SEQ ID NO: 95962 - DNA, 120 bp, Artificial Sequence
  ENSG00000090054_27 (sequence is synthesized)
tcagttacccatatttacctgtcacaaaacctgctttgcaaggctgacatcagctaaaacccagtgtcttctgatagaaggaaaagactagtctttttgaacttttgggactatgctaga

SEQ ID NO: 95963 - DNA, 120 bp, Artificial Sequence
  ENSG00000090054_28 (sequence is synthesized)
cttgtgtatggataatccgggaacaggccaactaaatatttgatgaatgtatgatttcaaatacagtgaattccctgggagtcatcaaagaagaccggcattttatggttgtttttatta

SEQ ID NO: 95964 - DNA, 80 bp, Artificial Sequence
  ENSG00000090054_29 (sequence is synthesized)
gtcatcaaagaagaccggcattttatggttgtttttattaagtgtatattctttgctcctgaaaatgttattaaataatt

SEQ ID NO: 95965 - DNA, 120 bp, Artificial Sequence
  ENSG00000090054_30 (sequence is synthesized)
gcttgagtgatttggctgatgaagaccagcccattatcagactgtatggaagtagggagaccaaaccggggaattatgtctgttagaagaaggaaataactgcagtggccttttcagcct

SEQ ID NO: 95966 - DNA, 120 bp, Artificial Sequence
  ENSG00000090054_31 (sequence is synthesized)
tccctcctcccaggagctaaccaccgcatactcatggacgtgaagatgggaacaatacatactgactgtgggaaaggaaggaggcagggcaagggttgaaaaaccattgggtactatgct

SEQ ID NO: 95967 - DNA, 120 bp, Artificial Sequence
  ENSG00000090054_32 (sequence is synthesized)
cattgggtactatgctcaacaccttgatgatgagatcatttgtaccccaaacctcagcatcatgcagtatacccagggtctcactctgtttcctaggctggagtgcagtggtgcaatcac

SEQ ID NO: 95968 - DNA, 120 bp, Artificial Sequence
  ENSG00000090054_33 (sequence is synthesized)
agcctcctgagtagctcggactacaggtgtgggccacaatgcctggctaattttttaaatatttttgtagggacagagttttactctgttgcccaggctgatctcaaactgctgggctca

SEQ ID NO: 95969 - DNA, 120 bp, Artificial Sequence
  ENSG00000090054_34 (sequence is synthesized)
ttgcccaggctgatctcaaactgctgggctcaaacagtgtgcccacctcggtctcccaaaatgctaggattacatgcatgagccactgcacctggcccatgcactttatttctactccaa

SEQ ID NO: 95970 - DNA, 120 bp, Artificial Sequence
  ENSG00000090054_35 (sequence is synthesized)
aaatcaccaacaaaaagcacagaagtccaaaaaagtggcagtaaataggccatgaaaagggtagttgttcacaggatcagagctgaaacagtcgcctgttcaccctcacctgggaaaaca

SEQ ID NO: 95971 - DNA, 120 bp, Artificial Sequence
  ENSG00000090054_36 (sequence is synthesized)
ggctgtgatgtttggagctggcacagtcatcttgtctccttgaagcataacatcatcaacatgctgaggatggaagagcagagagctgaaaggagccggggccctgtttaattagcagat

SEQ ID NO: 95972 - DNA, 120 bp, Artificial Sequence
  ENSG00000090054_37 (sequence is synthesized)
cccaacggcagaacctaagacaccagaggaaaagttctccctcttctacagttccttgctgcccaagccatcttatttaataggcatacaaagaatcagaaataagaataccataagaca

SEQ ID NO: 95973 - DNA, 120 bp, Artificial Sequence
  ENSG00000090054_38 (sequence is synthesized)
tctcaacagcaatatggaaagttagaatatagcaaaatatatcttcaaagctcaaaaagactaccaatcaccagttgtggatgagggtttggattccagacatcccatctttgagaatga

SEQ ID NO: 95974 - DNA, 120 bp, Artificial Sequence
  ENSG00000090054_39 (sequence is synthesized)
acacaccactaatcttaggcaagctactcaaccttgttctccactgtggacaatcaagtgatataacccaactcacaggattgtttgggtcattaagtgaaataaagtgtgtcaactccc

SEQ ID NO: 95975 - DNA, 120 bp, Artificial Sequence
  ENSG00000090054_40 (sequence is synthesized)
tagctcggactacaggctgtgatgtttggagctggcacagtcatcttgtctccttgaagcataacatcatcaacatgctgaggatggaagagcagagagctgaaaggagccggggccctg

SEQ ID NO: 95976 - DNA, 120 bp, Artificial Sequence
  ENSG00000090054_41 (sequence is synthesized)
gtgagcatggtgaggtgccagttcagccttgggatagcttacttccagtcctcctactaaggaagcagtcaatgtacctatactattcttagacagatattatgttctgaagggagtcac

SEQ ID NO: 95977 - DNA, 120 bp, Artificial Sequence
  ENSG00000090054_42 (sequence is synthesized)
ccaaactatgccactttagcataaggattattttgagctgaagacaattgaaaagcagcagactcaagaaacgctcactacctttctctgtctgctgacaaaacaaggcatacatttcct

SEQ ID NO: 95978 - DNA, 120 bp, Artificial Sequence
  ENSG00000090054_43 (sequence is synthesized)
gttgtgaaggcatcccctgctctcatatcaggaagggaaagacaacctttattactggagtggggaaagcatggagatgagtctgcacaaacagacctattaaataacccttaccatcaa

SEQ ID NO: 95979 - DNA, 120 bp, Artificial Sequence
  ENSG00000090054_44 (sequence is synthesized)
tgctacctgaagtacttgtatttggcttcttgtagtaacctgcagtctatagtgctttatatgtagtagtcctttttttatctgaaacaaaacattttgaagttcccaggagtaacagct

SEQ ID NO: 95980 - DNA, 120 bp, Artificial Sequence
  ENSG00000090054_45 (sequence is synthesized)
tccaagaatgcacacatgttaatatttccaatggtcgaacacttaaaatgaaaagcaacagacttctgctttttacccatctggttattttctgattttaaatttgtcgcacgttaccct

SEQ ID NO: 95981 - DNA, 120 bp, Artificial Sequence
  ENSG00000090054_46 (sequence is synthesized)
cataattctagatactgtatagtatgcttaactaccatttgttgattcatcaactacagacaacacctgttgatccccacaatatgaattatggagcttccgctcacttatgcctctttc

SEQ ID NO: 95982 - DNA, 120 bp, Artificial Sequence
  ENSG00000090054_47 (sequence is synthesized)
ctccttgcttccagtgtctcatctattttttacttttcattctcttggctatctttgctatattgtatgtattttcattaattaagaaatacagtaagaatatagaaagttatcagatat

SEQ ID NO: 95983 - DNA, 120 bp, Artificial Sequence
  ENSG00000090060_0 (sequence is synthesized)
agcagttctagaacgttgctgtggtagcgctcgggcgccatgttaggacgaaggggaaggaggagaagcgcttaaagcggcgggagcggtgcgggagaggggttggacccagggctgagg

SEQ ID NO: 95984 - DNA, 120 bp, Artificial Sequence
  ENSG00000090060_1 (sequence is synthesized)
caggcccccccctccctcccgcctcagtggatcatgcccagggcggcagcggcggcggttgcgggggggaagtgactgggcggtgccggcgccggagacgatgccgtttccagttacaac

SEQ ID NO: 95985 - DNA, 120 bp, Artificial Sequence
  ENSG00000090060_2 (sequence is synthesized)
acagggatcacaacaaacacaaccgccacagaagcactatggcattacttctcctatcagcttagcagcccccaaggagactgactgcgtacttacacagaaactaattgagacattgaa

SEQ ID NO: 95986 - DNA, 120 bp, Artificial Sequence
  ENSG00000090060_3 (sequence is synthesized)
accctttggggtttttgaagaggaagaggaactgcagcgcaggattttaattttgggaaaactaaataacctggtaaaagagtggatacgagaaatcagtgaaagcaagaatcttccaca

SEQ ID NO: 95987 - DNA, 120 bp, Artificial Sequence
  ENSG00000090060_4 (sequence is synthesized)
atctgtaattgaaaatgttggaggaaaaatttttacatttggatcttacagattaggagtgcatacaaaaggtgctgatattgatgcgttgtgtgttgcaccaagacatgttgatcgaag

SEQ ID NO: 95988 - DNA, 120 bp, Artificial Sequence
  ENSG00000090060_5 (sequence is synthesized)
tgactttttcacctcattctatgataagttgaaattacaggaagaagtaaaagatttaagagctgttgaagaggcattcgtaccagttattaaactctgttttgatgggatagagattga

SEQ ID NO: 95989 - DNA, 120 bp, Artificial Sequence
  ENSG00000090060_6 (sequence is synthesized)
tattttgtttgcaagattagcactgcagacaattcctgaagatttggatctacgagatgacagtctgctaaaaaatttagatataagatgtataagaagtcttaacggttgcagggtaac

SEQ ID NO: 95990 - DNA, 120 bp, Artificial Sequence
  ENSG00000090060_7 (sequence is synthesized)
cgatgaaattttacatctagtaccaaacattgacaacttcaggttaactctgagagctatcaaactatgggccaaacgccacaacatctattccaatatattaggtttcctcggtggtgt

SEQ ID NO: 95991 - DNA, 120 bp, Artificial Sequence
  ENSG00000090060_8 (sequence is synthesized)
ttcctgggctatgctagtagcaagaacttgccagctttatccaaatgcaatagcatcaactcttgtacataaatttttcttggtattttctaaatgggaatggccaaatccagtgctatt

SEQ ID NO: 95992 - DNA, 120 bp, Artificial Sequence
  ENSG00000090060_9 (sequence is synthesized)
gaaacagcctgaagaatgcaatcttaatttgcctgtatgggacccaagggtaaaccccagtgataggtaccatcttatgcctataattacaccagcatacccacaacagaactccacgta

SEQ ID NO: 95993 - DNA, 120 bp, Artificial Sequence
  ENSG00000090060_10 (sequence is synthesized)
caatgtgtccgtttcaacacggatggtcatggttgaggagtttaaacaaggtcttgctatcacagatgaaattttgctgagtaaggcagagtggtccaaactttttgaagctccaaactt

SEQ ID NO: 95994 - DNA, 120 bp, Artificial Sequence
  ENSG00000090060_11 (sequence is synthesized)
ctttcaaaagtacaagcattatattgtacttctagcaagtgcaccaacagaaaaacaacgcctggaatgggtgggcttggtggaatcaaaaatccgaatcctggttggaagcttggagaa

SEQ ID NO: 95995 - DNA, 120 bp, Artificial Sequence
  ENSG00000090060_12 (sequence is synthesized)
gaatgaatttattacactggctcatgtgaatccccagtcatttccagcacccaaagaaaatcccgacaaggaagaatttcgcacgatgtgggtgattgggttagtgtttaaaaaaacaga

SEQ ID NO: 95996 - DNA, 120 bp, Artificial Sequence
  ENSG00000090060_13 (sequence is synthesized)
aaactctgaaaacctcagtgttgatctcacctatgatattcagtctttcacagatacagtttataggcaagcaataaacagcaagatgtttgaggtggatatgaaaattgctgcaatgca

SEQ ID NO: 95997 - DNA, 120 bp, Artificial Sequence
  ENSG00000090060_14 (sequence is synthesized)
tgtaaaaagaaagcaactccatcaactactacctaatcatgtgcttcagaaaaagaaaaagcattcaacagaaggtgtcaaattgacagctctcaatgacagcagcctcgacttgtctat

SEQ ID NO: 95998 - DNA, 120 bp, Artificial Sequence
  ENSG00000090060_15 (sequence is synthesized)
ggacagtgataacagcatgtctgtgccttcacctactagtgctacgaagaccagtccattgaacagttctggcagctctcagggcagaaacagtcctgctccagctgtaacagcagcatc

SEQ ID NO: 95999 - DNA, 120 bp, Artificial Sequence
  ENSG00000090060_16 (sequence is synthesized)
tgtgaccaacatacaggctactgaagtttctgtgccacaagtaaattccagtgaaagctcagggggtacatcgagtgaaagcattcctcaaactgccacacaaccagccatttctccacc

SEQ ID NO: 96000 - DNA, 120 bp, Artificial Sequence
  ENSG00000090060_17 (sequence is synthesized)
accaaagcctacggtctccagagttgtttcttcaacacgtctggtaaacccaccacctagatcttcaggaaatgcagcaacttcaggaaatgcagcaacaaaaatacctactcctatagt

SEQ ID NO: 96001 - DNA, 120 bp, Artificial Sequence
  ENSG00000090060_18 (sequence is synthesized)
gatgctaactgtcttgctttgagtggacatgataaaacagaagcaaaggaacaacttgatacagagacaagtacaactcaatcagaaactattcagacagcggcttctctgttggcctct

SEQ ID NO: 96002 - DNA, 120 bp, Artificial Sequence
  ENSG00000090060_19 (sequence is synthesized)
cagaaaacatccagtacagacctttctgatatccctgctctccctgcaaatcctattcctgttatcaagaattcaataaaactgagattgaatcggtaaaaacaacctcaggggtccata

SEQ ID NO: 96003 - DNA, 120 bp, Artificial Sequence
  ENSG00000090060_20 (sequence is synthesized)
aacaatatctgccaactcaacctgttgtcttcaaatgctaaaaaaggagaatggagggtacaagactagacatgactgaaatggatttgggttttttggtgacctcccttactgggctaa

SEQ ID NO: 96004 - DNA, 120 bp, Artificial Sequence
  ENSG00000090060_21 (sequence is synthesized)
tcagcacttgatcggaagtccaggttagtatgtgaagccaggagtactattattattgtgttagcaacagttgcattaactatttcaaaaattactgcctttaaaaaaaacaacctcaag

SEQ ID NO: 96005 - DNA, 120 bp, Artificial Sequence
  ENSG00000090060_22 (sequence is synthesized)
ctatatttgtattcataattgacatctggattgggtttatgtttgatgcattgtttggaaaatttgcaatacaaactggcataagaattacttattctgatgatgcacttttatgtattt

SEQ ID NO: 96006 - DNA, 120 bp, Artificial Sequence
  ENSG00000090060_23 (sequence is synthesized)
ttcattagaaagtagaactaattttagattttcagcttgatggattttcagtttttcctgaagaattttctttaccattagtcttcaaattggatactgttgtgcagtggtgtactgtta

SEQ ID NO: 96007 - DNA, 120 bp, Artificial Sequence
  ENSG00000090060_24 (sequence is synthesized)
tacttcagagaaagggtaagagtacatctagttcagttcctatgaggtagctgtaacccttaaaaatgaaacgtcaactctagggtacatttgacattgaaagaatagttaggaaataac

SEQ ID NO: 96008 - DNA, 120 bp, Artificial Sequence
  ENSG00000090060_25 (sequence is synthesized)
ttggttttgatagggtcatgattaagaaatgatatattggttttatttatggaattgttttatagtgcatacaaatcagcgatcagccagcaaatatttttctttgagcttgtgaaagct

SEQ ID NO: 96009 - DNA, 120 bp, Artificial Sequence
  ENSG00000090060_26 (sequence is synthesized)
ctgtgttcttttgccttcaatctgttgtcttcaaaacaaacaaacaaaaaaagcttcttgcgcctttccctcccctgttttcttcctttttctttttgcttgtatgcacaaggtaggact

SEQ ID NO: 96010 - DNA, 120 bp, Artificial Sequence
  ENSG00000090060_27 (sequence is synthesized)
tacttcgtaagaaacaaaatgccagtattttcttaagccatgatgtgaaaccaatgaccctgtgaccacatggcacagaacactaaattttggtcccatggctgaaacttgagggtgact

SEQ ID NO: 96011 - DNA, 120 bp, Artificial Sequence
  ENSG00000090060_28 (sequence is synthesized)
aaaagtaatgcctgtgaaacatgatatctatctgggatggccatttgatctctaaaaggaattttgtacactccacagaactcctatctatagtaaaattgattttcagttttaaatgtg

SEQ ID NO: 96012 - DNA, 120 bp, Artificial Sequence
  ENSG00000090060_29 (sequence is synthesized)
ggcaaaaaggcattttctccaagattttaaaactaattcttatttttaaatggtttaccaaaatttgtcagtacattttacgtgtagaagcattttaaaaatcatttctagcaagcactt

SEQ ID NO: 96013 - DNA, 120 bp, Artificial Sequence
  ENSG00000090060_30 (sequence is synthesized)
gacatctagtcagctctctactcctttattttgttttatcaaaagattaagagctcctttctttgaataaaataatttctcataattaagcagtagaagatctatcttcacaaagtatga

SEQ ID NO: 96014 - DNA, 120 bp, Artificial Sequence
  ENSG00000090060_31 (sequence is synthesized)
gggatgccagatgttgataaacttactctttctgaatctggacaaagtcgacttaacagatttttctgatgagcatgttttatgaatcctccattgtgctccattctatcacatgtgcat

SEQ ID NO: 96015 - DNA, 120 bp, Artificial Sequence
  ENSG00000090060_32 (sequence is synthesized)
ttttcatgttaaactgcaattacttaatctcttcccctatccttctaaattaattttctgaagttggagtgtagtcttttcccccttaggctatgcattaatcgaagctttcttttcacc

SEQ ID NO: 96016 - DNA, 120 bp, Artificial Sequence
  ENSG00000090060_33 (sequence is synthesized)
atgactttataatgtctagtaaacaatatttctacttcccacatctttgctttacacagtcaccttgcccttccttccaccaccgaagaaaaaagatggtcatactaacaggtgaaatgt

SEQ ID NO: 96017 - DNA, 120 bp, Artificial Sequence
  ENSG00000090060_34 (sequence is synthesized)
acaaggtgtctgtgtgttttgtgtagcttcagagttagattgaaattaccaggcacagatttagtcttgtcattttgtttacacattggggaaaacaattcagtttattaaacgtttcat

SEQ ID NO: 96018 - DNA, 120 bp, Artificial Sequence
  ENSG00000090060_35 (sequence is synthesized)
gtaactgcacccaagttttgccaagctggaaacttggaccttttctgtgtagtgactttttaattatagttttcataacctggagatcagactgttgctttcgcatgatgtatgtagtgt

SEQ ID NO: 96019 - DNA, 120 bp, Artificial Sequence
  ENSG00000090060_36 (sequence is synthesized)
ctcatgactggagtttgctttgttttatagtatctgtactccttgtatttttcaagagctattttgtaaacagatgatgtatttctccattgaaaacacaataaaaaaaaaacagcacaa

SEQ ID NO: 96020 - DNA, 120 bp, Artificial Sequence
  ENSG00000090060_37 (sequence is synthesized)
atgacatgtctctaaaggtaattgtatgtgcatccccatttctgttgttgaataaagaaaaactaaacatcaatagattcccaagcagaacttttttgttgttgttcagcaggcacactt

SEQ ID NO: 96021 - DNA, 120 bp, Artificial Sequence
  ENSG00000090060_38 (sequence is synthesized)
tctagtaaggttgccaaaatccaaattgaagcagatcattagtttagatgaaatctttgattctataaaaaattcctataaaaacaatgtctctctacatggtttttctttctcaactcc

SEQ ID NO: 96022 - DNA, 120 bp, Artificial Sequence
  ENSG00000090060_39 (sequence is synthesized)
actttctcaaacttttgccgaggggtggcgagaaggtagacttccaggtcccacccgatatagattaagggctggaaacacagtcaaggggaaattatgaccaagacaacctttgctaaa

SEQ ID NO: 96023 - DNA, 120 bp, Artificial Sequence
  ENSG00000090060_40 (sequence is synthesized)
gtcttatttctatgacatttctcagcttggtttcagattcaaattttagttcatgatgtagtcatgtaggcagccttggagatcacattgtgtataaaatggcaaactgaaactattttt

SEQ ID NO: 96024 - DNA, 120 bp, Artificial Sequence
  ENSG00000090060_41 (sequence is synthesized)
tttccctagtttggccaggatagtaaggcagattctatttgtacttccttgcataaacttaccctctgaataaactctgaattttagcagctaagatccaatttattgataggttgggaa

SEQ ID NO: 96025 - DNA, 120 bp, Artificial Sequence
  ENSG00000090060_42 (sequence is synthesized)
atcagttactatacttttggataaaacttgtacacactacctctttcactcttttaattctctatctataggccattagtttcttgtgattgttttttttttctttttgctttcagcatt

SEQ ID NO: 96026 - DNA, 120 bp, Artificial Sequence
  ENSG00000090060_43 (sequence is synthesized)
tatttggcctaatattaaagatacgaattttcataagaagcttttaaagaataaattaacattaagtgcttcgggacaaaaaaggaatttgagattagtcattaacccagatttttttaa

SEQ ID NO: 96027 - DNA, 120 bp, Artificial Sequence
  ENSG00000090060_44 (sequence is synthesized)
tgtcaactatgatttaagaaaaagtagaataaaagattactgccattttatattaattgccttggcccaaaaggtgagggttcttggtttttaatcaaattaagataaatcgtccattcc

SEQ ID NO: 96028 - DNA, 120 bp, Artificial Sequence
  ENSG00000090060_45 (sequence is synthesized)
tgttcttatgaactcctgctcctccctctgcaaaagagatgttcttttctagtaattttataaaaattagttatttgagacaatttagagctgtgttcaactggaggaaaaataaaaaaa

SEQ ID NO: 96029 - DNA, 120 bp, Artificial Sequence
  ENSG00000090060_46 (sequence is synthesized)
atttagaaccatgccacacttttcagtacacattctggctgttttgggatttagtagcacttataatcaggtgtgataagattaaagaatgtcagaatttcttttttttttttttttttt

SEQ ID NO: 96030 - DNA, 120 bp, Artificial Sequence
  ENSG00000090060_47 (sequence is synthesized)
tacaggcgtgagccaccgcgtccggctgtcagaatttcttttaatgctacacatatataagcaaataatgtttttaagaagctaaccttgatgttaagagtggcaggtgttctccagttt

SEQ ID NO: 96031 - DNA, 120 bp, Artificial Sequence
  ENSG00000090060_48 (sequence is synthesized)
tggcaggtgttctccagtttttacctctttcatatgggaccaaagtagctagtttatggaacacatatgaaaatgtggttatgccaccaagttttactactacacttgtcttaccacttt

SEQ ID NO: 96032 - DNA, 120 bp, Artificial Sequence
  ENSG00000090060_49 (sequence is synthesized)
taagtcatgaattctataattattcatacccctttgcctgtgatcagaagtaacttttaaaattatcacttgactttggatggaactagtataaaggcaggaattttgtctttcagtgga

SEQ ID NO: 96033 - DNA, 120 bp, Artificial Sequence
  ENSG00000090060_50 (sequence is synthesized)
gatttattctgttcaaggttgaagtggacacatcattatcttgggatggtacttctttatttaaatagtcctttaaagttctttgagtggcagagaacgtttttggtttcagtctgagaa

SEQ ID NO: 96034 - DNA, 120 bp, Artificial Sequence
  ENSG00000090060_51 (sequence is synthesized)
ggctaccaaatggtttaagttcatttcatagttaggagaaaaagattttgagtagtctaatgtcgtcagaaaggattaaaacgttgtatgtaccaagaaggcagaatgaagaaggatcac

SEQ ID NO: 96035 - DNA, 120 bp, Artificial Sequence
  ENSG00000090060_52 (sequence is synthesized)
aagaatgcaatcttaatttgcctgtatgggacccaagggttagtgtattattttttcccctaccaattcacactgtgcaataacaagtaaaaatcatctgcataaactccagggagactt

SEQ ID NO: 96036 - DNA, 120 bp, Artificial Sequence
  ENSG00000090060_53 (sequence is synthesized)
ccagccttttacttatgaatggtcatgtccgtattacactttcttttagataacctcaactataattgtcctcaactataattgatgtgagaagcataattatgtaccctgtaaaccaca

SEQ ID NO: 96037 - DNA, 120 bp, Artificial Sequence
  ENSG00000090060_54 (sequence is synthesized)
tttaattgtacatagtttttaatacagattttactaacattttaatttattctatatagaactaccttgtaagtcaaagttgtgtgggcatttgtgctttaaaaaaaataaaaggatact

SEQ ID NO: 96038 - DNA, 120 bp, Artificial Sequence
  ENSG00000090060_55 (sequence is synthesized)
ttgtgtacttcagtttttgtcagatattagttgtttttacacaagttttgtattgaagctttttatagctatattgttaacacagtagtgagttaaataaaatgaactttgcctaataaa

SEQ ID NO: 96039 - DNA, 120 bp, Artificial Sequence
  ENSG00000090060_56 (sequence is synthesized)
gcagtattgatggaaaaaggatccctacttagaatagtttctctggagtgagtataactgcctttattaaaatgtttctatttcttgtaacaatttcctaattgtatagtttataggcaa

SEQ ID NO: 96040 - DNA, 120 bp, Artificial Sequence
  ENSG00000090060_57 (sequence is synthesized)
taaggaaaaagagggaaatagaagtggaggggctgtttgctaaatcaatcagatacattctctttttgctattaaagtcatctatttagaatgttattttcattccatctactaattttt

SEQ ID NO: 96041 - DNA, 120 bp, Artificial Sequence
  ENSG00000090060_58 (sequence is synthesized)
ttttaaatagcaatttaattcccaggtttggggatagtactttttggttttgtcttgtcatacttaacattttatttttgagactgataatgtcttcagtcagatgtgaatgaatgttag

SEQ ID NO: 96042 - DNA, 120 bp, Artificial Sequence
  ENSG00000090060_59 (sequence is synthesized)
cacataacccctccaaattcatgtatttagatagctactgctacagtgcactgtatggtgtgctgatgagaacagacaaaaggaacaaaaccacctttctgtcccagagctgcttatacc

SEQ ID NO: 96043 - DNA, 120 bp, Artificial Sequence
  ENSG00000090060_60 (sequence is synthesized)
tttaatatccagcacaaagcgtgtaaataaaataaatagcatgttgtctttatcttcaaaggcattatattgtacttctagcaagtgcaccaacagaaaaacaacgcctggaatggtgag

SEQ ID NO: 96044 - DNA, 120 bp, Artificial Sequence
  ENSG00000090060_61 (sequence is synthesized)
tataagaatagactttacagaaaaagcaaacttcaaaatgaatcacatagccactgaacacagtaggagatgggaggaagtccttaaaacttctagtttggtttgatttgttcacaaatg

SEQ ID NO: 96045 - DNA, 120 bp, Artificial Sequence
  ENSG00000090060_62 (sequence is synthesized)
gagctttactgtgtgtagtggaagtacagaaatcaggagatccatatgcaacttatttttttgtttgctttatggagatccgtgcataatttcttaattgtatatttaaagtgcacttat

SEQ ID NO: 96046 - DNA, 120 bp, Artificial Sequence
  ENSG00000090060_63 (sequence is synthesized)
agcttgtttttcttaaaatttttgtgtggataacttttgtaaccttgctggtgtgaatggagtgtttcttggctcttttttccccgttgtttggcaattttgggtagaacataaggcttc

SEQ ID NO: 96047 - DNA, 120 bp, Artificial Sequence
  ENSG00000090060_64 (sequence is synthesized)
tggttttatctgtgggagttcagctagttgaaatgccctggtatgtgcattttatttatttatttttaagttaaccaaaactttttgttaatactaagtgacatttgttcagggtgggct

SEQ ID NO: 96048 - DNA, 120 bp, Artificial Sequence
  ENSG00000090060_65 (sequence is synthesized)
atttacagcagttaaaattttaaaaatttattattattttgagaaatggggtctggctgtgttgtttaggctggccttgagttcctggatttaagcgatcctcctacttcaaccttctga

SEQ ID NO: 96049 - DNA, 120 bp, Artificial Sequence
  ENSG00000090060_66 (sequence is synthesized)
atttaagcgatcctcctacttcaaccttctgagtagctgagactacaggcgcatgccactgccctgggtatgaagcagtgaaaaattttcagccaggtgcagtgactcacacctgtaatc

SEQ ID NO: 96050 - DNA, 90 bp, Artificial Sequence
  ENSG00000090060_67 (sequence is synthesized)
tcccatctctagaaaaaagtaaaagaattaggtgtggtggtatgcacctgtagtcgtggccactcaggaggctgaggtgggaggattgct

SEQ ID NO: 96051 - DNA, 84 bp, Artificial Sequence
  ENSG00000090060_68 (sequence is synthesized)
caaggttgagactacagtgagctgtgatcccactgctgtaccccagcctgggcaaccagagtgagaccctgtcttaaaaaaaaa

SEQ ID NO: 96052 - DNA, 120 bp, Artificial Sequence
  ENSG00000090060_69 (sequence is synthesized)
tatgtattttaaggcatgtcggacatgttgctctcttaagtaatggtttaatggtagcacattatgacatttcttcttgctggactaatgttattggaagaattttctttcctgtcacaa

SEQ ID NO: 96053 - DNA, 120 bp, Artificial Sequence
  ENSG00000090060_70 (sequence is synthesized)
ggacatactgttttagtgaactccttagttttttttggttgaggtaatgaatgtgaagcccctttgatttttctgcccgatctaactgaactcctgctacatttgtagcaacataagttc

SEQ ID NO: 96054 - DNA, 120 bp, Artificial Sequence
  ENSG00000090060_71 (sequence is synthesized)
tgtaggcatacatcagtcatgacaaaaacagtacatctgtatacagtggcaagtggatgcaccctgaaaaatctgtagttaataattctctgctaagaaacagtatttttatctaattct

SEQ ID NO: 96055 - DNA, 120 bp, Artificial Sequence
  ENSG00000090060_72 (sequence is synthesized)
ggaaactcattaattgctaggaatctttaaaacaaagacaaagctaataaaatgtcaatatatagccaattaaatgttttcaatagttacagcacattattggcctgccattttccccca

SEQ ID NO: 96056 - DNA, 120 bp, Artificial Sequence
  ENSG00000090060_73 (sequence is synthesized)
atgttatagccccttcaaatatttctacagctagctttcatgaatctaagtgggtgttaatcattttaattaatggtttaaatataatggtttaataccttagtacaggttaaaagcttc

SEQ ID NO: 96057 - DNA, 120 bp, Artificial Sequence
  ENSG00000090060_74 (sequence is synthesized)
attaattgtgttagttttgatgaaaaatgtaagttataatcttatttaaaaaacagacaaaccacagacttgcacttttatttgccctgggctgaaaatgtgccaaagtcccacttaaaa

SEQ ID NO: 96058 - DNA, 120 bp, Artificial Sequence
  ENSG00000090060_75 (sequence is synthesized)
ttttttttttaatgcttgaagcttttctgaccatttgatcttgtgttggattgtgttttgtaataatctaagcaagattgctttatgctcttccccaattaaaaacaagaatgatgacct

SEQ ID NO: 96059 - DNA, 120 bp, Artificial Sequence
  ENSG00000090060_76 (sequence is synthesized)
aagaactgtccttgggtttatgctctgttattgtctgggcaacatttcatgatgtgcctatgtgtgtttttaattattgtttgcttaaaatgtcccaagttggagctggttggaaagtca

SEQ ID NO: 96060 - DNA, 120 bp, Artificial Sequence
  ENSG00000090060_77 (sequence is synthesized)
tgagctagtttgacccatgccttataagatttaagtaggcaaatagaaatttattaatatctgaaatggtgaaataacctacaacatctactgactagatgtttttgtaatgtagtcaca

SEQ ID NO: 96061 - DNA, 120 bp, Artificial Sequence
  ENSG00000090060_78 (sequence is synthesized)
aggaattaaaagtacttttatacctactttcccccaacattctttgaagagggaaggtatacatttctgtgaaagaccttaggtatttcaaattcttcgcgagttagttcaagtgtgtaa

SEQ ID NO: 96062 - DNA, 76 bp, Artificial Sequence
  ENSG00000090060_79 (sequence is synthesized)
tcccagcactttgggaggcccaggcaggtaagaaacttcatctcaacaaaaaacacaagttagctgggcgtggtgg

SEQ ID NO: 96063 - DNA, 120 bp, Artificial Sequence
  ENSG00000090060_80 (sequence is synthesized)
agcccaggaggctgaggctgcagtgagccttgatcatgccactgcgttccagcctgggtgacagagcgagactcaaaaatccagttacaacacagggatcacaacaaacacaaccgccac

SEQ ID NO: 96064 - DNA, 120 bp, Artificial Sequence
  ENSG00000090060_81 (sequence is synthesized)
tttaagaaaactcatggatgccccccgctaatacctttatagacaaattataaaatatagctaagcaaaagcaaaccccaaaaatgtgtattcatagccaatgataatcagttaatagtt

SEQ ID NO: 96065 - DNA, 120 bp, Artificial Sequence
  ENSG00000090060_82 (sequence is synthesized)
tatacttgtagttatttcctctatgcaaataaatacacaataaaaatgttacctcggcaaagaacatttattgagcttcttttctttcactgagtactgagatcttcattatcttattta

SEQ ID NO: 96066 - DNA, 120 bp, Artificial Sequence
  ENSG00000090060_83 (sequence is synthesized)
gttcttccagtactgttattctcacataacaaacaggagcctgagactaaaagaggcaataaagcttgaacagtttttctcaaccttctagtggcagagtaggtacaactcaggcatccc

SEQ ID NO: 96067 - DNA, 120 bp, Artificial Sequence
  ENSG00000090060_84 (sequence is synthesized)
gaggctgtactgtctttgggtcttgctctgttgcacaggctggatgcagtggcacagtcttggcttactgcaccttccacctcctgggctcaattgattttcaggcctcagccacctgag

SEQ ID NO: 96068 - DNA, 88 bp, Artificial Sequence
  ENSG00000090060_85 (sequence is synthesized)
accatgcctggctaattttttaattttattttggtagagacagggttttcccgtgttgtccaacttgcctcggcctcccagagtgctg

SEQ ID NO: 96069 - DNA, 120 bp, Artificial Sequence
  ENSG00000090060_86 (sequence is synthesized)
ggcatgagccaccacgcccagctgaggctgtattctttaaccatgaactgtatctgccgagatagtgttgtctgttttctagtatcctttcctctctccatctcccatcactctgtccca

SEQ ID NO: 96070 - DNA, 120 bp, Artificial Sequence
  ENSG00000090060_87 (sequence is synthesized)
ttcctctctccatctcccatcactctgtcccattagtacattacttttgatatatcctgtgtgctgtacaccgttcttcctgttctaataaatagctttcagagtcatacctcagcatct

SEQ ID NO: 96071 - DNA, 120 bp, Artificial Sequence
  ENSG00000090060_88 (sequence is synthesized)
tgtcttttaggaaaatgactgttgacctgattccacattaatctctcccttttatgaccccaattgattttaattctcctttttaaaattctgcctatgtacttagtgctggcctcttat

SEQ ID NO: 96072 - DNA, 120 bp, Artificial Sequence
  ENSG00000090060_89 (sequence is synthesized)
caagcactgaattaatgacaaatattttaccattgtctacttctttggattcttctgcttgaagtttattttgtaggtcccatttaggggcctggtagagaacctataagcaccaaatac

SEQ ID NO: 96073 - DNA, 120 bp, Artificial Sequence
  ENSG00000090060_90 (sequence is synthesized)
agccatctttctttgggctcccagtttacttgggccactataaatagaggatgctgcaggatcaaaatataccacatcaattaaaatcatgtttgtcctccattgactggtaattttaag

SEQ ID NO: 96074 - DNA, 120 bp, Artificial Sequence
  ENSG00000090060_91 (sequence is synthesized)
taaggggtggaacatttttagaagctcaccagtatgttaaacagattctcaacatcaaatactaccatgataggatgcaaaataattttcttgtaatattaattagtggttgatgggctt

SEQ ID NO: 96075 - DNA, 120 bp, Artificial Sequence
  ENSG00000090060_92 (sequence is synthesized)
aattttttttaggtgctgatattgatgcgttgtgtgttgcaccaagacatgttgatcgaagtgactttttcacctcattctatgataagttgaaattacaggaagaagtaaaagatttaa

SEQ ID NO: 96076 - DNA, 120 bp, Artificial Sequence
  ENSG00000090060_93 (sequence is synthesized)
gagtgcgtaaatgttcggggtgaaatgggatgagttatgaacattcatttagtcagttgagtgaattttatgatatagccatcatttattgagttcttgcaatttgccaaacctttctaa

SEQ ID NO: 96077 - DNA, 120 bp, Artificial Sequence
  ENSG00000090060_94 (sequence is synthesized)
acacttggcatatgtgtttgtgttttattctttacagcaagcctaaaattataaactcatttacagattaggaaattgaggcaaacaaaataaatatgaaataatctggccacaatcata

SEQ ID NO: 96078 - DNA, 120 bp, Artificial Sequence
  ENSG00000090060_95 (sequence is synthesized)
catctgatgagtgggtgaagtaaaatatttgaaccttgatttctgatctgtctgatcgaacagcccagtcttaaagctagctatttttgtgtcaggtgttttgctaaagtactaaaacta

SEQ ID NO: 96079 - DNA, 120 bp, Artificial Sequence
  ENSG00000090060_96 (sequence is synthesized)
agattatattttagtgaacagctctttaattttataggcagagcactcaatcggtgtcattgagcaaaattattaatgcttatttatgcttcttgaattaagctgctttttggtaattat

SEQ ID NO: 96080 - DNA, 120 bp, Artificial Sequence
  ENSG00000090060_97 (sequence is synthesized)
tcataaagtcactgcctttttcagaagaattaaactcactagtagttagaaacatggaatttagcatatatgattttatgtgcatattgagattgtagtcccccttgctaaattgatgtg

SEQ ID NO: 96081 - DNA, 120 bp, Artificial Sequence
  ENSG00000090060_98 (sequence is synthesized)
ttttatacactgtatttcttctgtcattaatggtatactcaggacacttaaaaagaccatctgacttttgtactctgttgctagtgatttaggtttcatggcctaacccaaattaatttt

SEQ ID NO: 96082 - DNA, 120 bp, Artificial Sequence
  ENSG00000090060_99 (sequence is synthesized)
gatcctgttattctttagtaatgctttcagcattgctgagatcagaaggactactttggtacaattttatattagcatagcttgttactgtgctcttgaagagcagttcttggaaacttt

SEQ ID NO: 96083 - DNA, 120 bp, Artificial Sequence
  ENSG00000090060_100 (sequence is synthesized)
agtggattaagtcttccgcagtatatgtgggaagttttaattgtgaatctgaagttcaaattggggcaggttacagtttactttggtttctttggtcagtgcttacaataggagataaat

SEQ ID NO: 96084 - DNA, 120 bp, Artificial Sequence
  ENSG00000090060_101 (sequence is synthesized)
gctttagattttttccccctctttattgaattagctttactggttctaccaaataaaaatttatgtttacttttaacttcaatctcagaaaatttggaagcattaccattaaacttttga

SEQ ID NO: 96085 - DNA, 120 bp, Artificial Sequence
  ENSG00000090060_102 (sequence is synthesized)
ctaatgctctttttaattttattagctactgaagccaaatttaatctgataaaaacattttaaaagagggaccagttatctattttaaggctgtagttgatcttacaggtttaattattt

SEQ ID NO: 96086 - DNA, 120 bp, Artificial Sequence
  ENSG00000090060_103 (sequence is synthesized)
gcatgtagtatgattaagattatttaaaattctagattgtagactgaagtatgcaaacattttaatatgtttttaatttaggtcttgctatcacagatgaaattttgctgagtaaggcag

SEQ ID NO: 96087 - DNA, 120 bp, Artificial Sequence
  ENSG00000090061_0 (sequence is synthesized)
gacattccatatacaagatggccgcagtcggcaaggagagacgtcgctgaggggcttgcctgaagcgaggggattctaacattttcagagaaccttttggaaagaacaagcctacttcaa

SEQ ID NO: 96088 - DNA, 120 bp, Artificial Sequence
  ENSG00000090061_1 (sequence is synthesized)
taaatgaaggagaataaagaaaattcaagcccttcagtaacttcagcaaacctggaccacacaaagccatgttggtactgggataagaaagacttggctcatacaccctcacaacttgaa

SEQ ID NO: 96089 - DNA, 120 bp, Artificial Sequence
  ENSG00000090061_2 (sequence is synthesized)
ggacttgatccagccaccgaggcccggtaccgccgagagggcgctcggttcatctttgatgtgggcacacgtttggggctacactatgataccctggcaactggaataatttattttcat

SEQ ID NO: 96090 - DNA, 120 bp, Artificial Sequence
  ENSG00000090061_3 (sequence is synthesized)
cgcttctatatgtttcattccttcaagcaattcccaagatatgtgacaggagcctgttgcctctttctggctgggaaagtagaagaaacaccaaaaaaatgtaaagatatcatcaaaaca

SEQ ID NO: 96091 - DNA, 120 bp, Artificial Sequence
  ENSG00000090061_4 (sequence is synthesized)
gctcgtagtttattaaatgatgtacaatttggccagtttggagatgacccaaaggaggaagtaatggttctggagagaatcttactgcagaccatcaagtttgatttacaggtagaacat

SEQ ID NO: 96092 - DNA, 120 bp, Artificial Sequence
  ENSG00000090061_5 (sequence is synthesized)
ccataccagttcctactaaaatatgcaaagcaactcaaaggtgataaaaacaaaattcaaaagttggttcaaatggcatggacatttgtaaatgacagtctctgcaccaccttgtcactg

SEQ ID NO: 96093 - DNA, 120 bp, Artificial Sequence
  ENSG00000090061_6 (sequence is synthesized)
cagtgggaaccagagatcatagcagtagcagtgatgtatctcgcaggacgtttgtgcaaatttgaaatacaagaatggacctccaaacccatgtataggagatggtgggagcagtttgtt

SEQ ID NO: 96094 - DNA, 120 bp, Artificial Sequence
  ENSG00000090061_7 (sequence is synthesized)
caagatgtcccggtcgacgttttggaagacatctgccaccaaatcctggatctttactcacaaggaaaacaacagatgcctcatcacaccccccatcagctgcaacagcccccatctctt

SEQ ID NO: 96095 - DNA, 120 bp, Artificial Sequence
  ENSG00000090061_8 (sequence is synthesized)
cagcctacaccacaagtgccgcaagtacagcagtcacagccgtctcaaagctccgaaccatcccagccccagcagaaggacccccagcaaccagcccagcagcagcagccagcccaacag

SEQ ID NO: 96096 - DNA, 120 bp, Artificial Sequence
  ENSG00000090061_9 (sequence is synthesized)
cccaagaaaccctctccgcagcccagttctccccgacaggttaagcgagccgtggttgtttctcccaaagaagagaacaaagcagcagaaccaccaccacctaaaatccccaaaattgag

SEQ ID NO: 96097 - DNA, 120 bp, Artificial Sequence
  ENSG00000090061_10 (sequence is synthesized)
accactcatccaccgttgcctccagcccacccacctccagaccggaagcctcccctcgctgctgccttaggtgaggctgagccgccgggccctgtggatgccactgacctccccaaagtc

SEQ ID NO: 96098 - DNA, 120 bp, Artificial Sequence
  ENSG00000090061_11 (sequence is synthesized)
cagattccccctccggcccacccggcccctgtgcaccagccaccgccgctgccacaccggcccccgcccccacccccctccagctacatgaccgggatgtccaccaccagctcctacatg

SEQ ID NO: 96099 - DNA, 120 bp, Artificial Sequence
  ENSG00000090061_12 (sequence is synthesized)
tctggagagggctaccagagcctgcagtccatgatgaagaccgagggaccctcctacggtgccctgccccccgcctacggcccacctgcacacctgccctaccacccccatgtctacccg

SEQ ID NO: 96100 - DNA, 120 bp, Artificial Sequence
  ENSG00000090061_13 (sequence is synthesized)
cccaacccgcccccgccacctgtgcctcctcccccagcctccttccccccacctgccatcccaccccctactcctggctaccccccacccccacccacctacaaccccaacttcccaccc

SEQ ID NO: 96101 - DNA, 120 bp, Artificial Sequence
  ENSG00000090061_14 (sequence is synthesized)
tcctccagggttgggcctgccgccagccagctacccacctcctgccgtcccccctggaggacagcctcctgtgcccccgcccattcccccacccggcatgcctccagttggggggctggg

SEQ ID NO: 96102 - DNA, 120 bp, Artificial Sequence
  ENSG00000090061_15 (sequence is synthesized)
gcgggcagcctggatgagataacgtgagccttttttccctctttgtttttttaacaagattttctaatcgacttgcagagtagttgaagtgggtaagcagcagggtaccttgtataatgc

SEQ ID NO: 96103 - DNA, 120 bp, Artificial Sequence
  ENSG00000090061_16 (sequence is synthesized)
acgacagttgcagtatgggaagaatggaccgggcccctgggataaaatcagagtggtcctcacacctagaggacggggacaaccagctttcagagtagcctcatcagtgcccttgcagtc

SEQ ID NO: 96104 - DNA, 120 bp, Artificial Sequence
  ENSG00000090061_17 (sequence is synthesized)
tgactgtgtacacttggttcagctaatgtctgagagtcctgcactgggttactttatactagtgaggacgttaaccagccatattggctcaataaatagcttcggtaaggagttaatttc

SEQ ID NO: 96105 - DNA, 120 bp, Artificial Sequence
  ENSG00000090061_18 (sequence is synthesized)
cttctagaaatcagtgcctatttttcctggaaactcaattttaaatagtccaattccatctgaagccaagctgttgtcattttcattcggtgacattctctcccatgacacccagaaggg

SEQ ID NO: 96106 - DNA, 120 bp, Artificial Sequence
  ENSG00000090061_19 (sequence is synthesized)
gcagaagaaccacatttttcatttatagatgtttgcatcctttgtattaaaattattttgaaggggttgcctcattggatggctttttttttttcctccagggagaaggggagaaatgta

SEQ ID NO: 96107 - DNA, 120 bp, Artificial Sequence
  ENSG00000090061_20 (sequence is synthesized)
cttggaaattaatgtatgtttacatctctttgcaaattcctgtacatagagatatattttttaagtgtgaatgtaacaacatactgtgaattccatcttggttacaaatgagactccttc

SEQ ID NO: 96108 - DNA, 120 bp, Artificial Sequence
  ENSG00000090061_21 (sequence is synthesized)
agtcagttatccaaataaaagcagttctgaaactatccctttctttgttatgggtggaaggtggggctccaggccttcgcagtctgtggcttataaaatgtgcagaggccctccttccag

SEQ ID NO: 96109 - DNA, 120 bp, Artificial Sequence
  ENSG00000090061_22 (sequence is synthesized)
accctggggacgcgggagaggcctggctgcagctcacagcagccacagccaaccccactgcctcccaaggcactctgggtggatccgcacagctgcctgccaagccagcctgcccccatc

SEQ ID NO: 96110 - DNA, 120 bp, Artificial Sequence
  ENSG00000090061_23 (sequence is synthesized)
ctgtgcctgccttggtttcctttggaggacctggttgagttccaaaccagtttgaaactttgaagccttgctgcgtagaacgcacacaggaacccgggggcttggatttgaaaccctttc

SEQ ID NO: 96111 - DNA, 120 bp, Artificial Sequence
  ENSG00000090061_24 (sequence is synthesized)
cacttctggcctgtgatgagacagaggcagctggaggagcagcggcctcactgtccaccttgaggggccacggctctgtctgtggaaggggccccgactgagcccccatctgcggtgctt

SEQ ID NO: 96112 - DNA, 120 bp, Artificial Sequence
  ENSG00000090061_25 (sequence is synthesized)
gaggggccttggccctgtctctgcctgctgaccctgccacccacgacagaaacaagcactgagcacccagccaggaggctcacaaagaggcctttatttatctagctcaaagtagacact

SEQ ID NO: 96113 - DNA, 120 bp, Artificial Sequence
  ENSG00000090061_26 (sequence is synthesized)
atcacaatcttgtttgttactccttttactaaaatagttcaaatcaatgtttttaccacactatcaaaaagttctatttcttcttgtctccccacgtcagagtggttgaatagaaggtag

SEQ ID NO: 96114 - DNA, 120 bp, Artificial Sequence
  ENSG00000090061_27 (sequence is synthesized)
aaacaggccgggagtccacgggctcccagctctaaacggcgccagggcaggaaggggtggctccaggtctcactgtggcaccttctacagaaaatagacgtagctgccgggcccggggac

SEQ ID NO: 96115 - DNA, 120 bp, Artificial Sequence
  ENSG00000090061_28 (sequence is synthesized)
agaaaccagacgttccagtccatctccaaaaagcagcacaaatactttgccccacagtatgaaaaatatacacctctaccgctctgcagtcatgcatttagttttaagaaaaaaaaaaaa

SEQ ID NO: 96116 - DNA, 120 bp, Artificial Sequence
  ENSG00000090061_29 (sequence is synthesized)
aaccacaatggccccgccaggtctgcaatggaaggctggcgtctagggagccccactccacagacaggtgagaccccagcccctcctgccctcaccagccctgggaagccagcacggcct

SEQ ID NO: 96117 - DNA, 120 bp, Artificial Sequence
  ENSG00000090061_30 (sequence is synthesized)
gtggccaaagcccttcaccatagggcacctgacagcaaggcatgaaattacaaaagccagccttgccattcagagcttggctgtgcacttgcgcctgtatggtggtggggagtggggggc

SEQ ID NO: 96118 - DNA, 120 bp, Artificial Sequence
  ENSG00000090061_31 (sequence is synthesized)
ggggtgtggaggagagttcacaagaggccaaatgaggaacgtgcactctgctaatcccaccaggccctgggaaccttccccacagcccacaaaggggtgagacgtgaggatgacctcagt

SEQ ID NO: 96119 - DNA, 120 bp, Artificial Sequence
  ENSG00000090061_32 (sequence is synthesized)
ttcattctgaaatcaagtctttataatttgatgacactcaaattacgcttctcaaaagcggaaaacaaagtttgatgtgtgaaataccaagggcatggcttgctcagtcaattcagcatt

SEQ ID NO: 96120 - DNA, 120 bp, Artificial Sequence
  ENSG00000090061_33 (sequence is synthesized)
attccatatacaagatggccgcagtcggcaaggagagacgtcgctgaggggcttgcctgaagcgaggggtgagtgacccaccgactgagggcagcgccgcccacctcccgcgtatctgga

SEQ ID NO: 96121 - DNA, 120 bp, Artificial Sequence
  ENSG00000090061_34 (sequence is synthesized)
ggtcggagtaggttatggccaaccgccgctatccactggcggagtctctctttccggattctgcctccctccgctaacctccggattctaacattttcagagaaccttttggaaagaaca

SEQ ID NO: 96122 - DNA, 120 bp, Artificial Sequence
  ENSG00000090061_35 (sequence is synthesized)
cgtttggggctgtatcctgactctccttggaatctgttacagataggctccccactcaccaccaagaaataattagattctgtagacaaaatatatagtaatttctctgtaccagagcag

SEQ ID NO: 96123 - DNA, 120 bp, Artificial Sequence
  ENSG00000090061_36 (sequence is synthesized)
ttcttaaatatctgtttgaatgttgtttctggtgggggtttttctctttctgatttgtcattttaaaggtgtagacttagccactgaggaggtggccagccaggaggatatgaggcaccc

SEQ ID NO: 96124 - DNA, 120 bp, Artificial Sequence
  ENSG00000090061_37 (sequence is synthesized)
ggttgctccagaatgccttttcgccccgaggggcgggaccgacgggatgggccctgtggctggctcctccctctgcatcctactctctccgcccctccggtcgcttggtggcgtctcagg

SEQ ID NO: 96125 - DNA, 120 bp, Artificial Sequence
  ENSG00000090061_38 (sequence is synthesized)
gatggccgcagtcggcaaggagagacgtcgctgaggggcttgcctgaagcgagggcatggagcttttggagagtgtctttattctgagtgaaagaaaaggaagaggatgaaaaagcaaga

SEQ ID NO: 96126 - DNA, 120 bp, Artificial Sequence
  ENSG00000090061_39 (sequence is synthesized)
acagtttaaaggagctccttctctcatggaccacttccatccacccactccccaaatcacaagatgcacatttggtttacatcagtgaattcagtgatttgtgcagatgtgaattaaccc

SEQ ID NO: 96127 - DNA, 120 bp, Artificial Sequence
  ENSG00000090061_40 (sequence is synthesized)
aatcccatgacttgtctaagtgaaagtgcctacatggaataaactgaaaaggggtgctggatggaagagatggttagttttagaacataaatctttgtcaagattaagacaggcccaggt

SEQ ID NO: 96128 - DNA, 120 bp, Artificial Sequence
  ENSG00000090061_41 (sequence is synthesized)
gtcttactctctgtgggagatagagtagctttcagtccaggataagtggtatgacatgcacagaacacgtgatggaaagtgaggccatcagaagatactgataaaagagttgtggcattc

SEQ ID NO: 96129 - DNA, 120 bp, Artificial Sequence
  ENSG00000090061_42 (sequence is synthesized)
aaggaggagacaacttacatcttggagagagcagggaaagtgctaggaagaaggtgccagcattaaggtaagccttaaacgtacatagggcatagccatgccgtgatgggctaggtcagt

SEQ ID NO: 96130 - DNA, 120 bp, Artificial Sequence
  ENSG00000090061_43 (sequence is synthesized)
ggtccaacagaagctagcataagcagaggcagggggaaccatgtgacacattgtcagcccagccaggagcttgatttggcaggaaggaaatgatgagaccctgggtggataggtagactg

SEQ ID NO: 96131 - DNA, 120 bp, Artificial Sequence
  ENSG00000090061_44 (sequence is synthesized)
ggtcagaccacgataagcctcgaatgccagacttcagaaatttggcttcagtgggtgaacaatgcagtaattaaaaggtttcgtgaaaatgacagacttaacattaaagtcattgtgttg

SEQ ID NO: 96132 - DNA, 120 bp, Artificial Sequence
  ENSG00000090061_45 (sequence is synthesized)
atttgttagctaagattttagttagatttatatacatgccttcctcactggttgtgaagttcttgaagaaggagaccatgttggaatcagttttgtacccccggcagagtgtctgacatc

SEQ ID NO: 96133 - DNA, 120 bp, Artificial Sequence
  ENSG00000090061_46 (sequence is synthesized)
tagtgtgatcaggattatgtgaggagagtggcatgtaggaaggattggagtgggcaaagagaagctgaagacagagcagttcagaccccagtgatatagggactgagctaaggttgaggc

SEQ ID NO: 96134 - DNA, 120 bp, Artificial Sequence
  ENSG00000090061_47 (sequence is synthesized)
aactggagggacagtttcttcatccattcaggctgctataacaatatgccttagacccaataatttacacacaacagaaacttaactcttcacagttgtagagactgggaggtgtaagat

SEQ ID NO: 96135 - DNA, 120 bp, Artificial Sequence
  ENSG00000090061_48 (sequence is synthesized)
caaggtgctggcagattctgtgtctggtaagggtttgttcctcataaaagggctccttgccgcatcctcaaatggtggaagggaggaacaagccccttgggcctcttttataagggcagt

SEQ ID NO: 96136 - DNA, 120 bp, Artificial Sequence
  ENSG00000090061_49 (sequence is synthesized)
aatcccattcagaatcatttcccaaaggcctcacttcttcataccgccaccttgggaattaggtctcaagctatgaattaggacataaacattcagaccatagcagaaagaaaaggaagc

SEQ ID NO: 96137 - DNA, 120 bp, Artificial Sequence
  ENSG00000090061_50 (sequence is synthesized)
atgggcagtgctgagatggattccacaggactgtgctagaaggaaaaggaagcatgggcagtgctgctgagatggattccgcgggactgtgtttagttgtgctctttctttttccacggc

SEQ ID NO: 96138 - DNA, 120 bp, Artificial Sequence
  ENSG00000090061_51 (sequence is synthesized)
aaagcttgctgtttagggagttaatttcagattggaatatgagaagaaaatttatttatgtgactcttttcctttttggcattttctttgtttacatgactttttttttaagaaagttaa

SEQ ID NO: 96139 - DNA, 120 bp, Artificial Sequence
  ENSG00000090061_52 (sequence is synthesized)
attttaaataatttatgaagctagagtttgggggatttatatgtataaaatttccttcaagcttctagagtatcggagtatttgtgaatgataaaaagaaaggtaggggaatgaggaaga

SEQ ID NO: 96140 - DNA, 120 bp, Artificial Sequence
  ENSG00000090061_53 (sequence is synthesized)
ccagtttattacgaaggccaaaatttattgtatctatttctgtgtgacctttgataacaaaaatcaagaacttttgtttcccttttaggtgacaggagcctgttgcctctttctggctgg

SEQ ID NO: 96141 - DNA, 120 bp, Artificial Sequence
  ENSG00000090061_54 (sequence is synthesized)
gctaatgctgtttccttttatgtataaacaggctctgtcatccagttgccaagtgatgggagaggcaggaaaatgaggcagaattttttaaatggactaataaacttagccttggagcca

SEQ ID NO: 96142 - DNA, 120 bp, Artificial Sequence
  ENSG00000090061_55 (sequence is synthesized)
ggttttccatacatggtggttcagcgtaggtcatgaggaggaagaaggggtaggatgtggacccacatcattcatccttgtttcccacgcaaaagctctttgctgtgtatttgagtggtg

SEQ ID NO: 96143 - DNA, 120 bp, Artificial Sequence
  ENSG00000090061_56 (sequence is synthesized)
ctgaacacgtggtaggtttttaataaatacttgatgctgcctgtgaatttttctattgctattaatttacctttttgtccccatttctaggtgataaaaacaaaattcaaaagttggttc

SEQ ID NO: 96144 - DNA, 120 bp, Artificial Sequence
  ENSG00000090061_57 (sequence is synthesized)
aaatggcatggacatttgtaaatgacaggtatacatgttcaaatgttgattaattacagtattttaaaataggcagagactttatggaccatttcatctaaacccctcattttgtgtcag

SEQ ID NO: 96145 - DNA, 120 bp, Artificial Sequence
  ENSG00000090061_58 (sequence is synthesized)
aagaaactgacttgccctggcttgaggagccagttaatggcaaagctggggctgacgtccaggtcatctgcttcccggcagagggtttccttctgccctgccgtgtcatggtgttgtgag

SEQ ID NO: 96146 - DNA, 120 bp, Artificial Sequence
  ENSG00000090061_59 (sequence is synthesized)
gtgctgaaattttatcaccagtctgaaacataagtccaaaacaatacactggagaattttgaaaactaattacttagagcccatttggttttgcaaaaatatacttcctggtatagtttt

SEQ ID NO: 96147 - DNA, 120 bp, Artificial Sequence
  ENSG00000090061_60 (sequence is synthesized)
agagccttaacactcttttgagaggccagggatctaatgaggggccgtggtgggaaacagaatgcctgtgaatggagttgctgccagccccatcccactgcagtcagtgaagcttctctt

SEQ ID NO: 96148 - DNA, 120 bp, Artificial Sequence
  ENSG00000090061_61 (sequence is synthesized)
tgtgctagaattcttctgattctttaaggaatagagaaattactaactatggttaaagtaacttagtcgggtacctttagaagagtaaagacttgagtttatttatttatagtactttaa

SEQ ID NO: 96149 - DNA, 120 bp, Artificial Sequence
  ENSG00000090061_62 (sequence is synthesized)
ttaaatttaggggagaataagcaaattaatggttagttatggcatctccatgcactggtttaatcataaatattagatcatattatctaacctttttttttcttgttgaactagtctctg

SEQ ID NO: 96150 - DNA, 120 bp, Artificial Sequence
  ENSG00000090061_63 (sequence is synthesized)
caacacctgagcactgttcccatttctaagcgagcacagggaacaccggaagcagggggtgttcgccgaaactcgcagtccgactgcttgtcggtggggagcctgaaaacaaaggtgctc

SEQ ID NO: 96151 - DNA, 120 bp, Artificial Sequence
  ENSG00000090061_64 (sequence is synthesized)
caaggacaggctgcctctgagaaccaggagggggctctctgcccggctccagccctgctgcctgtttcatccctgccagggttctgaagcctgtcggtgtcgttgccgtgtcctagcagt

SEQ ID NO: 96152 - DNA, 120 bp, Artificial Sequence
  ENSG00000090061_65 (sequence is synthesized)
gtcgttgtgcatgctgcttctgtgcagctgcctgaccccaaacagtggaccgtttcctgcacccaagtggtcctgaaacttagtgtttactcagaactcaccattcaggaaagctagtca

SEQ ID NO: 96153 - DNA, 120 bp, Artificial Sequence
  ENSG00000090061_66 (sequence is synthesized)
ttctgtcttatttggtaaatggaaagaggaagggagcagaaatgatgatctggtaggtgccgtggtttgccctgaaagttcaggctagaaataatttttgtccgaggctgttcacagtga

SEQ ID NO: 96154 - DNA, 120 bp, Artificial Sequence
  ENSG00000090061_67 (sequence is synthesized)
ctgccgtcgctgattctggtggtacctggataatccatttttttctcatcatactcaggatcccagttaacaattgtgtattttcttttgtaacaggttgtttctcccaaagaagagaac

SEQ ID NO: 96155 - DNA, 120 bp, Artificial Sequence
  ENSG00000090097_0 (sequence is synthesized)
cctctggagtccctgtggcagaactcaaatggaaggaggagcagctgcacccaggggagcagggtgtcacctccgttggatagagccggccaggttgcagcgcggacacactcgcaggtc

SEQ ID NO: 96156 - DNA, 120 bp, Artificial Sequence
  ENSG00000090097_1 (sequence is synthesized)
gctgtggccccagcctcgcctgacagaatgagcggctcggacgggggactggaggaggagccagagctcagcatcaccctcacgctgcggatgctgatgcacgggaaggaagtgggcagc

SEQ ID NO: 96157 - DNA, 120 bp, Artificial Sequence
  ENSG00000090097_2 (sequence is synthesized)
atcatcgggaagaagggcgagactgtaaagcgaatccgggagcagagcagtgcccggatcaccatctccgagggctcctgccctgaacgcatcaccaccatcaccgggtctacagcagct

SEQ ID NO: 96158 - DNA, 120 bp, Artificial Sequence
  ENSG00000090097_3 (sequence is synthesized)
gtcttccatgcagtctccatgattgctttcaaactggatgaggacctttgtgctgctcctgcaaatggtggaaatgtctccaggcctccagtgaccctgcgccttgtcatccctgccagt

SEQ ID NO: 96159 - DNA, 120 bp, Artificial Sequence
  ENSG00000090097_4 (sequence is synthesized)
cagtgtggctcactgattgggaaggctggcaccaagatcaaggagatccgagagactacgggtgcccaggtacaggtggcaggggacctgctccccaactccacagagcgagctgttacg

SEQ ID NO: 96160 - DNA, 120 bp, Artificial Sequence
  ENSG00000090097_5 (sequence is synthesized)
gtatctggggtgcctgatgccatcatcctgtgtgtgcgccagatctgcgctgttatcctggagtccccacccaaaggagccactatcccctaccatccgagcctctccctaggtactgtt

SEQ ID NO: 96161 - DNA, 120 bp, Artificial Sequence
  ENSG00000090097_6 (sequence is synthesized)
cttctctctgccaaccagggcttctctgtccagggtcagtatggggctgtgaccccagctgaggtcaccaagctccagcagctctcaagccatgcggtcccctttgccacacccagcgtg

SEQ ID NO: 96162 - DNA, 120 bp, Artificial Sequence
  ENSG00000090097_7 (sequence is synthesized)
gtgccaggactggatcccggcacacagaccagctcacaggagttcttggttcccaacgatttgattggctgtgtgatcgggcgccagggcagcaagatcagcgagatccggcagatgtca

SEQ ID NO: 96163 - DNA, 120 bp, Artificial Sequence
  ENSG00000090097_8 (sequence is synthesized)
gcggcatgtcaccatcactggctctccggtctccatcgccctggcccagtacctcatcactgcctgtctagagacggccaagtctacctctggggggacgcccagctcggcccccgcaga

SEQ ID NO: 96164 - DNA, 120 bp, Artificial Sequence
  ENSG00000090097_9 (sequence is synthesized)
cctgcctgcccccttctcgccacccctgacggccctgcccacagctccccctggcctgctgggcacaccctatgccatctccctctccaacttcatcggcctcaagcccatgcccttctt

SEQ ID NO: 96165 - DNA, 120 bp, Artificial Sequence
  ENSG00000090097_10 (sequence is synthesized)
ggctttaccacctgcttccccagggccgccgccgggcttggcggcctacactgccaagatggcagcagctaatgggagcaagaaggctgagcggcagaaattctccccctactgaggcca

SEQ ID NO: 96166 - DNA, 120 bp, Artificial Sequence
  ENSG00000090097_11 (sequence is synthesized)
gctgaggtacaggcaggggcaggcaggaccaccagcagggggctgcctctgcaccctacccgcccaaggagactccaccctggggtcccaaacgccgctaacgcccagacgcatggatgc

SEQ ID NO: 96167 - DNA, 120 bp, Artificial Sequence
  ENSG00000090097_12 (sequence is synthesized)
accccctaccctgcctccatctatgggagttctttctctcagagtgggggcagtttctggcccaggggtctgagctgcggcagccccagggcagggggccctacctcctcagctctgtgc

SEQ ID NO: 96168 - DNA, 120 bp, Artificial Sequence
  ENSG00000090097_13 (sequence is synthesized)
ttggatacagggagcagccaggagactccctagtgcccccaccatggcgggtgtcactcacgcactccccatcccttagggcttcctggcctactgcatccttgtgggagtcagggagga

SEQ ID NO: 96169 - DNA, 120 bp, Artificial Sequence
  ENSG00000090097_14 (sequence is synthesized)
gggcccgttgggtagctggggccaggcttctctccccaccacctgcagatttcttgctgcttccactgatacccttttgactggaatgaactggctgggcttgtcagggggcaccccaaa

SEQ ID NO: 96170 - DNA, 120 bp, Artificial Sequence
  ENSG00000090097_15 (sequence is synthesized)
gagggggcactgccaggtagctgggggagtggcatggggcaggggcccagttctcagcagcagacactctgtacagttttttcaatccctgtttttgaataaatattctcagcgaccagg

SEQ ID NO: 96171 - DNA, 120 bp, Artificial Sequence
  ENSG00000090097_16 (sequence is synthesized)
gtcaaacccctcattgttcgcagctgatgtcactcgcagttgtgagcggccgcctctcccggggacaatgtgggactgagcggcccagccgccgtgccgccgccgccgccgccgcaggac

SEQ ID NO: 96172 - DNA, 120 bp, Artificial Sequence
  ENSG00000090097_17 (sequence is synthesized)
gccatttccagcacatagaagagagattggaaaccaacgtgcagaactgccagtcccctgacacgctgtgccccacccactgcagcccagtgctgaatgaaccctgcccagaggtgtctg

SEQ ID NO: 96173 - DNA, 120 bp, Artificial Sequence
  ENSG00000090097_18 (sequence is synthesized)
cctgccttcaaggcttcccatggctgctccagcttcctccccagctgctcttctgtgctccatccaccatctggctgctggacgaaagtgcctctcatatggaagccggccaggttgcag

SEQ ID NO: 96174 - DNA, 120 bp, Artificial Sequence
  ENSG00000090097_19 (sequence is synthesized)
atttcttttagtgtctcagggtaagggaaaggctaggtacctaccatgtatgtgcttattgttttaattctcatcactctttggagatgggaatttgtatccccttctacagatggagaa

SEQ ID NO: 96175 - DNA, 120 bp, Artificial Sequence
  ENSG00000090097_20 (sequence is synthesized)
gctgaggctcagagggttgaatgggctccccaggcttacacagctcgtgagacacacataagcaccctggtcagagtgatgtgtggcgctcaaggtccatgcagtctctttcctctggga

SEQ ID NO: 96176 - DNA, 120 bp, Artificial Sequence
  ENSG00000090097_21 (sequence is synthesized)
gtttgactagcccagctctggggtccccatgtaagggcaggggcagggtggactgggctcctctcgaacccctctttggctgcccctgccagagccggccaggttgcagcgcggacacac

SEQ ID NO: 96177 - DNA, 120 bp, Artificial Sequence
  ENSG00000090097_22 (sequence is synthesized)
tctctctgaaccactccttctgggctgaccagtgagtcccccagagggtggcagttttgagccttgcctcaggcctggtgagtggggcaggcagacaagttccggcaagggagcagggaa

SEQ ID NO: 96178 - DNA, 120 bp, Artificial Sequence
  ENSG00000090097_23 (sequence is synthesized)
ctcactgattgggaaggctggcaccaagatcaaggagatccgagaggtgaggggcgagatataccacccacagggaatccggggcaagggagcagttgtaagaggggtgttgggcttatg

SEQ ID NO: 96179 - DNA, 120 bp, Artificial Sequence
  ENSG00000090097_24 (sequence is synthesized)
gcgtcctccccacctagagagctctgagcctgggcagcccttttctgggttatgggagcagccagaagtggcccctgttctctgtttgcagactacgggtgcccaggtacaggtggcagg

SEQ ID NO: 96180 - DNA, 120 bp, Artificial Sequence
  ENSG00000090097_25 (sequence is synthesized)
ctgtgaccttgggcaggttactgatcctctccaggcatcaggttctcctgtgtagtgaattcatctgctcagctaaccagtatgttagctgagttccagctgagctcagtatgttctgag

SEQ ID NO: 96181 - DNA, 120 bp, Artificial Sequence
  ENSG00000090097_26 (sequence is synthesized)
caccttctctggcctggctctgaactgagccctggggacataaggagaaggcagcagccttggctcctgctccaaggggctcctgggcttggctgtccagagaagcagaaaccaagcacg

SEQ ID NO: 96182 - DNA, 120 bp, Artificial Sequence
  ENSG00000090097_27 (sequence is synthesized)
tcatcacaagtgctttgatgggggaagtgcaggcagctgggggaatgtctagcaagggcagccagcatgaggctggccaggatgctcggagagcacagtccctgcatccactgctcatct

SEQ ID NO: 96183 - DNA, 120 bp, Artificial Sequence
  ENSG00000090104_0 (sequence is synthesized)
gcatatttgctaagagcaccatgcgcgcagcagccatctccactccaaagttagacaaaatgccaggaatgttcttctctgctaacccaaaggaattgaaaggaaccactcattcacttc

SEQ ID NO: 96184 - DNA, 120 bp, Artificial Sequence
  ENSG00000090104_1 (sequence is synthesized)
tagacgacaaaatgcaaaaaaggaggccaaagacttttggaatggatatgaaagcatacctgagatctatgatcccacatctggaatctggaatgaaatcttccaagtccaaggatgtac

SEQ ID NO: 96185 - DNA, 120 bp, Artificial Sequence
  ENSG00000090104_2 (sequence is synthesized)
tttctgctgctgaagtaatgcaatggtctcaatctctggaaaaacttcttgccaaccaaactggtcaaaatgtctttggaagtttcctaaagtctgaattcagtgaggagaatattgagt

SEQ ID NO: 96186 - DNA, 120 bp, Artificial Sequence
  ENSG00000090104_3 (sequence is synthesized)
tctggctggcttgtgaagactataagaaaacagagtctgatcttttgccctgtaaagcagaagagatatataaagcatttgtgcattcagatgctgctaaacaaatcaatattgacttcc

SEQ ID NO: 96187 - DNA, 120 bp, Artificial Sequence
  ENSG00000090104_4 (sequence is synthesized)
gcactcgagaatctacagccaagaagattaaagcaccaacccccacgtgttttgatgaagcacaaaaagtcatatatactcttatggaaaaggactcttatcccaggttcctcaaatcag

SEQ ID NO: 96188 - DNA, 120 bp, Artificial Sequence
  ENSG00000090104_5 (sequence is synthesized)
gctaatagcctaaagtgactggtccctggctgaagggaattaacagatagtatcaagcgcagaaggaatgtgccagtatggctccctgggtgaacagcttggccttttttgggtgtcttg

SEQ ID NO: 96189 - DNA, 120 bp, Artificial Sequence
  ENSG00000090104_6 (sequence is synthesized)
acaggccaagaagaacaaatgactcagaatggattaacatgaaagttatccaggcgcagagttgaagaagcataagcaagacaaaaacagagagaccgcagaaggaggaagatactgtgg

SEQ ID NO: 96190 - DNA, 120 bp, Artificial Sequence
  ENSG00000090104_7 (sequence is synthesized)
tactgtcataaaaaacagtggagctctgtattagaaagcccctcagaactgggaaggccaggtaactctagttacacagaaactgtgactaaagtctatgaaactgattacaacagactg

SEQ ID NO: 96191 - DNA, 120 bp, Artificial Sequence
  ENSG00000090104_8 (sequence is synthesized)
taagaatcaaagtcaactgacatctatgctacatattattatatagtttgtactgagctattgaagtcccattaacttaaagtatatgttttcaaattgccattgctactattgcttgtc

SEQ ID NO: 96192 - DNA, 120 bp, Artificial Sequence
  ENSG00000090104_9 (sequence is synthesized)
ggtgttattttattttattgtttttgactttggaagagatgaactgtgtatttaacttaagctattgctcttaaaaccagggagtcagaatatatttgtaagttaaatcattggtgctaa

SEQ ID NO: 96193 - DNA, 120 bp, Artificial Sequence
  ENSG00000090104_10 (sequence is synthesized)
ggtgctaataataaatgtggattttgtattaaaatatatagaagcaatttctgtttacatgtccttgctacttttaaaaacttgcatttattcctcagattttaaaaataaataaataat

SEQ ID NO: 96194 - DNA, 120 bp, Artificial Sequence
  ENSG00000090104_11 (sequence is synthesized)
ttggggtatataattttacttctacatacttaggcatataaatatagttcagtgcaatgagaatctaattttctatattggtgagggtttcagcacagtagaataaagagactgatttta

SEQ ID NO: 96195 - DNA, 120 bp, Artificial Sequence
  ENSG00000090104_12 (sequence is synthesized)
caaaaccagctgccatgatgagggtgagggaagggttaagggtattgttactgaccagaactgcatgtcagggagtccttaatgagtgctcttgttttggataagaaaatgcagattagc

SEQ ID NO: 96196 - DNA, 120 bp, Artificial Sequence
  ENSG00000090104_13 (sequence is synthesized)
ataatgtatacaattgcagcagcaaaagtatttccaattaacagtattaccagataaatattcttggtccaagcagaaaatatcaacaaaaagagccttcttctcctgtaaatcttaaat

SEQ ID NO: 96197 - DNA, 120 bp, Artificial Sequence
  ENSG00000090104_14 (sequence is synthesized)
gcctacatcactctttatgatacatggatcatcttatgtggatacttaaatttttcatgtctgcttcttttgcctctcctaactatactatgaggaaatttggaacaaagacatttttgt

SEQ ID NO: 96198 - DNA, 120 bp, Artificial Sequence
  ENSG00000090104_15 (sequence is synthesized)
tagacgacaaaatgcaaaaaaggaggccaaagactttgtaagtttgttcagagtctcactttgtgaattttaacaagttatctttaatggcagaaggattgagaatgaatggaagagagt

SEQ ID NO: 96199 - DNA, 120 bp, Artificial Sequence
  ENSG00000090104_16 (sequence is synthesized)
gtgagtaataagtaatattcagctgcattaaaaaataaatcttgatatggcattaaattgggtaggagtttttctctacacaggctcataaaaatgggttctatagcaaaatgttgtatc

SEQ ID NO: 96200 - DNA, 120 bp, Artificial Sequence
  ENSG00000090104_17 (sequence is synthesized)
aaccatttttagtattgccttattccttagagaaatttattctatgtctttttacaaataaaatgaattctgaagaaatatgaatattcacttttatgtcttttgtagtggaatggatat

SEQ ID NO: 96201 - DNA, 120 bp, Artificial Sequence
  ENSG00000090104_18 (sequence is synthesized)
gagaagcctatgcattatctctatatcccagcaagggataaatactgcgcacagtagacttcatttcttttaagtaacatgccaaataaaattagactatcagtaccaatgtaaattgaa

SEQ ID NO: 96202 - DNA, 120 bp, Artificial Sequence
  ENSG00000090104_19 (sequence is synthesized)
tacaaatgtgtacacacacatattggactttatctatttggattttttcaaattttattggcaggttttttttttcataactatagtaactctaagggaagttttgcattttgtgaataa

SEQ ID NO: 96203 - DNA, 120 bp, Artificial Sequence
  ENSG00000090104_20 (sequence is synthesized)
attttaacatatttattagaactacagtttcagtttgtgaagttatcaaagtgtaacagccattcttatttcatttgtgcttacattttaaaaattgactaatgtatgtacattttgtcc

SEQ ID NO: 96204 - DNA, 120 bp, Artificial Sequence
  ENSG00000090104_21 (sequence is synthesized)
gtaggatagtatgcaaaaggttgtattctagtttgtctgtagttactgataacttcagcatagtatgcctcttaataatgctgacttagcactcaattctgccaactccttttagacaaa

SEQ ID NO: 96205 - DNA, 120 bp, Artificial Sequence
  ENSG00000090104_22 (sequence is synthesized)
tttgccaagacaattaggtattttcatagatcattatggagataaaattaaacattgtgctgggattctgatatgtaaaaattttaaaagtaagccaaatattttaatatgtacattgcc

SEQ ID NO: 96206 - DNA, 120 bp, Artificial Sequence
  ENSG00000090104_23 (sequence is synthesized)
attttgaaatctgcctaaagaatgtatttttctacacttggatgtaacaagtatgattcattcattcaattaattaaattatctttcatacattcatcattcatctcacccttatgtaga

SEQ ID NO: 96207 - DNA, 120 bp, Artificial Sequence
  ENSG00000090104_24 (sequence is synthesized)
tctgctgctgaagtaatgcaatggtctcaatctctggaaaaacttcttgccaaccaaagtaagtataactattgaatgtttctgggttcagctaaatactctaaaaaattgaatggcttc

SEQ ID NO: 96208 - DNA, 120 bp, Artificial Sequence
  ENSG00000090104_25 (sequence is synthesized)
gatagtttttatgacataaatatgatagaaggatttttaagcacatatagtcttgtggagattttctgatgagagaaggtaaagaatgaaatcagcttgccatccccttgtcttgggcat

SEQ ID NO: 96209 - DNA, 120 bp, Artificial Sequence
  ENSG00000090104_26 (sequence is synthesized)
tacaattctactgagattaggacctttttcagaggtgtagatgagcagtgtggtctctatctctaaagagtgagattattcttttctccccacagacaccctaaggagctttacttggga

SEQ ID NO: 96210 - DNA, 120 bp, Artificial Sequence
  ENSG00000090104_27 (sequence is synthesized)
atcacattgttcactctagctcagctgactttgtttataattcagctaaacaaataaatggtatagatatggaccataaatggtgccatataaaagtctcagtgaatgctagcaaacata

SEQ ID NO: 96211 - DNA, 120 bp, Artificial Sequence
  ENSG00000090104_28 (sequence is synthesized)
attagtacatcaggcctacagatcatatataggcctaacattttctggctaatataaattagatggggaaattatatttactaattattgtgatgttaatgccttttgtcagtgtttgct

SEQ ID NO: 96212 - DNA, 120 bp, Artificial Sequence
  ENSG00000090104_29 (sequence is synthesized)
ctctactctggctaagatttggcatatataaaagatggttttatattcagtggagcagaatttcaattcaaaccgcggatagaagcaaaacagtttggtagccaccatcaagtagcaatg

SEQ ID NO: 96213 - DNA, 120 bp, Artificial Sequence
  ENSG00000090104_30 (sequence is synthesized)
tgactatgaatgagtttgtctggccccagattcctcttctatgaatgaagaaatttcaaatgacttctcatctctacaatctataacacagctatttcagcagtagctgtctcttacctt

SEQ ID NO: 96214 - DNA, 120 bp, Artificial Sequence
  ENSG00000090104_31 (sequence is synthesized)
tgtatgaataggaagcaattgtatttttcttacaaatttcttcttcaaattattcatttgttggttcatttaatttaattatctccccacccacccctcgtttctttttagctggtcaaa

SEQ ID NO: 96215 - DNA, 80 bp, Artificial Sequence
  ENSG00000090238_0 (sequence is synthesized)
cgccgcagcggcggcagcagctgggctcggtgtaaacaagtccaggcgcctgcgaacccgggcccgggggggacggcgcc

SEQ ID NO: 96216 - DNA, 120 bp, Artificial Sequence
  ENSG00000090238_1 (sequence is synthesized)
ccgggccccgcgcgcccaggcgaggcactgggctccctctgctccccgtgggccgctccccgcgtggggccactgcccccggcccccgccatggtgcggatttcaaagcccaagacgttt

SEQ ID NO: 96217 - DNA, 120 bp, Artificial Sequence
  ENSG00000090238_2 (sequence is synthesized)
gtttcaggcctacttggatgattgtcaccggaggtatagctgtgcccactgccgcgctcacctggccaaccacgacgacctcatctccaagtccttccagggcagtcaggggcgtgccta

SEQ ID NO: 96218 - DNA, 120 bp, Artificial Sequence
  ENSG00000090238_3 (sequence is synthesized)
actgcaagaccactttgggctggaaatatgaacaggcctttgagagcagccagaagtacaaagaggggaagtacatcattgaactcaaccacatgatcaaagacaacggctgggactgac

SEQ ID NO: 96219 - DNA, 120 bp, Artificial Sequence
  ENSG00000090238_4 (sequence is synthesized)
ccccgctcccccgacgcatgtggctccagcccggcctggccgccagggagcgccactggcttcccgccacccgaagggagctctggaccctcagagcccctgcagaggacggatctagct

SEQ ID NO: 96220 - DNA, 120 bp, Artificial Sequence
  ENSG00000090238_5 (sequence is synthesized)
cctgtatatatattttattgcatgcactgtgaccttggggggagaacagaagggggacgacgcccccgcacctcctgcgatctggctggcttggatctcgtttttaacccgttcctgccc

SEQ ID NO: 96221 - DNA, 120 bp, Artificial Sequence
  ENSG00000090238_6 (sequence is synthesized)
cacctgccctatagttatggcctgtgttctgctctcctggtcccagtgcaccgtctgctctgtgaactcctcccaccaggcccttcttaccccacgcgtgtctgtccccctcgttctgta

SEQ ID NO: 96222 - DNA, 120 bp, Artificial Sequence
  ENSG00000090238_7 (sequence is synthesized)
agaatctgtttacagcttatgaccaggaaattgagtctttgaagaggaacttagctgtcccaacagaggcatccgagaggcctggaggaggtgatgctggacagtaggaattgcctggtc

SEQ ID NO: 96223 - DNA, 120 bp, Artificial Sequence
  ENSG00000090238_8 (sequence is synthesized)
cgccctggctgccaggggcgcgcatctttgggtcttccctgctagaaggtgaactgagtgtgtccctggcgctctggcaaaagccatggaatgggcccacagtgagaattccagcttcgc

SEQ ID NO: 96224 - DNA, 120 bp, Artificial Sequence
  ENSG00000090238_9 (sequence is synthesized)
ctgacctctgttgtgacctgtgacccctggcatcctgctgagactcccagagttccccggtgcaggcaggaaattggtgaacgtgggctgcgggccagccgaggagcgggtgctgctgac

SEQ ID NO: 96225 - DNA, 120 bp, Artificial Sequence
  ENSG00000090238_10 (sequence is synthesized)
caaaaccgagacgcctctggtccccggagaggctgctggctctggggaaaggagagagcagcccagtgtgacagagcgagtccccacggctctgggagtgcctcgcatgtgtgtggccca

SEQ ID NO: 96226 - DNA, 120 bp, Artificial Sequence
  ENSG00000090238_11 (sequence is synthesized)
gaaattgtgagcatcatttcttggatgctgaggacagacacagtgcttgagggggtgggccctgtgatggcaggaccctccctgggactaccccatgtccccacagggtgaacgtgggct

SEQ ID NO: 96227 - DNA, 120 bp, Artificial Sequence
  ENSG00000090238_12 (sequence is synthesized)
gctagcctttgacctgaccttccaacacctcctcctgacaagctgtcaccctatagcctttcagattgcataggccgagctcacacaagtcagcatccctgaccacattctctttatctt

SEQ ID NO: 96228 - DNA, 120 bp, Artificial Sequence
  ENSG00000090238_13 (sequence is synthesized)
ggatccccattagagagttaggatataatcagagtcaccatttatggaatgtttatgtgccttgcactgttgtgtgcctggcgtctattatctcattcaatcattgcagtgatcctctag

SEQ ID NO: 96229 - DNA, 120 bp, Artificial Sequence
  ENSG00000090238_14 (sequence is synthesized)
gtagaagctattattatctctacagaagaagacagggaggcccagagatgttaggtaacttgcccaagatcacccaactggtaagtaacagaatagggaccagaatctgagttggttggt

SEQ ID NO: 96230 - DNA, 120 bp, Artificial Sequence
  ENSG00000090238_15 (sequence is synthesized)
tggtttttttttttcactccaaacccttggtcaccagcttatattgtcatttagagtatcagaaaaattgccccagactctgcaacaacatggagcttgggttcaccagcctccctttcc

SEQ ID NO: 96231 - DNA, 120 bp, Artificial Sequence
  ENSG00000090238_16 (sequence is synthesized)
atagtcctcattgccactgctgctgtccagggtctgatttcactaccctgagtctcatttccttatctctcagtggaagataaagccactgcctagcacccaggattgttacagggatca

SEQ ID NO: 96232 - DNA, 120 bp, Artificial Sequence
  ENSG00000090238_17 (sequence is synthesized)
gattagatgctcaggaagatgctcttgggacactgcaagggacaggattcttcaggcgtcgcttggaactgtggtgcctctgtgaggtggatgtcccaggcagagccagccagccagccc

SEQ ID NO: 96233 - DNA, 120 bp, Artificial Sequence
  ENSG00000090238_18 (sequence is synthesized)
tgacctgagctcgctgctgaccctgccacagattggctgtgtgtctctggacaggtggcttggccactctggacctctaccaaataaagagctggccggccaggcacagtggctcacacc

SEQ ID NO: 96234 - DNA, 80 bp, Artificial Sequence
  ENSG00000090238_19 (sequence is synthesized)
gtaaacaagtccaggcgcctgcgaacccgggcccgggggggacggcgcccgccaggagcgccccccactcccaggccagc

SEQ ID NO: 96235 - DNA, 120 bp, Artificial Sequence
  ENSG00000090238_20 (sequence is synthesized)
ccctgcccagcccgcgaggactgccccctcccccggcgcccgcccccacccccgcgccccaggtgagccccggagtccaggtaaggctccgcgttgcaggtaagagcccctgagcgtaga

SEQ ID NO: 96236 - DNA, 120 bp, Artificial Sequence
  ENSG00000090238_21 (sequence is synthesized)
ggctccgcgttgcaggtaagagcccctgagcgtagaggaggccttggcgcccgcaggtgagagcccctcccctcctaggtgaccctcaaccttcacggcgaggcctcctacctcctccag

SEQ ID NO: 96237 - DNA, 120 bp, Artificial Sequence
  ENSG00000090238_22 (sequence is synthesized)
gtgggggaccctctccccgatgaaccccctaaaccaccagtgaaccccactgctctccagatgaggtcgcaaggaccaaccagtgcctacccgcccatgctcccccgaaactgggaactg

SEQ ID NO: 96238 - DNA, 120 bp, Artificial Sequence
  ENSG00000090238_23 (sequence is synthesized)
acagcccagcccctccaaagccccttcctccagcttcagctgccaggtcagcaagggtgaggccggaagcaggcgggtgactcaccctgggcacctccgagcctcagtttccccatggat

SEQ ID NO: 96239 - DNA, 120 bp, Artificial Sequence
  ENSG00000090238_24 (sequence is synthesized)
ggccagccgaggagcgggtgctgctgaccggcctccatgctgtcgccgacatccactgcgagaactgcaagaccactttgggctggaaatattgatcctctaggtagaagctattattat

SEQ ID NO: 96240 - DNA, 120 bp, Artificial Sequence
  ENSG00000090263_0 (sequence is synthesized)
cttccgggacgagggcgcgtgggtgaggaaggtcaggtctaggaactctaactccttgccactcaagaaatgtcctccctttcagaatatgccttccgcatgtctcgtctcagtgcccgg

SEQ ID NO: 96241 - DNA, 120 bp, Artificial Sequence
  ENSG00000090263_1 (sequence is synthesized)
ctatttggtgaagtcaccaggcctactaattccaagtctatgaaagtggtgaaactgtttagtgaactgcccttggccaagaagaaggagacttatgattggtatccaaatcaccacact

SEQ ID NO: 96242 - DNA, 120 bp, Artificial Sequence
  ENSG00000090263_2 (sequence is synthesized)
tacgctgaactcatgcagacgctccgatttcttggactctacagagatgagcatcaggattttatggatgagcaaaaacgactaaagaagcttcgtggaaaggagaaaccaaagaaagga

SEQ ID NO: 96243 - DNA, 120 bp, Artificial Sequence
  ENSG00000090263_3 (sequence is synthesized)
gaagggaaaagagcagcaaaaaggaaatagtgttggtccctcaagagggagactttcttcctcagtggcggagagaagaaagtgcatttattgtctttccacctattggaggaatgtcat

SEQ ID NO: 96244 - DNA, 120 bp, Artificial Sequence
  ENSG00000090263_4 (sequence is synthesized)
cttcctaaatgaagtttatttggaggaacacagtcatctccttggtgaaatctaatccggttacattgtggctggtttcttgaacacattctaactgtgcaaaattatcttggccttggc

SEQ ID NO: 96245 - DNA, 120 bp, Artificial Sequence
  ENSG00000090263_5 (sequence is synthesized)
cgtgtaatgtgaggtttacctgattctctaatgaaataaatacctaagttattgtttgatgatttgtttggggtgggatgggatgctgggggaatggaggggaaacctcattaagtgagc

SEQ ID NO: 96246 - DNA, 120 bp, Artificial Sequence
  ENSG00000090263_6 (sequence is synthesized)
atcctatagtgtcctcatttctcccttcttgcttactgactcacccagccctaaacttctttcatcttgggcctttcagccactgtctccaccaccaagctcacaaactttgtgtgtgtc

SEQ ID NO: 96247 - DNA, 120 bp, Artificial Sequence
  ENSG00000090263_7 (sequence is synthesized)
ttcacctactcctttgagaaatctattaagatgaatttgtagagtaagtatcttttaaaaggaagtattgaatacctgctctgtacaagatattggggccctggtaatacacgtggttag

SEQ ID NO: 96248 - DNA, 120 bp, Artificial Sequence
  ENSG00000090263_8 (sequence is synthesized)
caagagaaatactccctacctcatgtaagtttcagtcttgtgggagggactaatattacataattacatacaattgtattacatgctacaaaggaaaaagccagacttctataagagcat

SEQ ID NO: 96249 - DNA, 120 bp, Artificial Sequence
  ENSG00000090263_9 (sequence is synthesized)
ggatggatggatgaatgcagagagagatagccagaagcccaaatcacattagggagtttaaagaaagcttccctaaagaaatgatatttaagccaggcgctgttgctcacacctgtaatc

SEQ ID NO: 96250 - DNA, 90 bp, Artificial Sequence
  ENSG00000090263_10 (sequence is synthesized)
gatcacaaggtcaagagatcgagaccattttggccaacatggtgaaaccccaccgtggcatgcacctgtagtctcagctactcgggatgc

SEQ ID NO: 96251 - DNA, 120 bp, Artificial Sequence
  ENSG00000090263_11 (sequence is synthesized)
acatctcaaaaaaaaaatgatatttaagctgaaccttgaagaataaataagaggttgccaaaaggaaaatggtgagaaaggggtttgaggcagagagtactatttgcaaagccctaaggt

SEQ ID NO: 96252 - DNA, 120 bp, Artificial Sequence
  ENSG00000090263_12 (sequence is synthesized)
atgaagaaattgtctgttcaagaaacactgagtttgttcatggttggctgtaagaaaacagaggccagatcatgaagggctttggaaattctgtggaaaagcttgaacataactagaagt

SEQ ID NO: 96253 - DNA, 120 bp, Artificial Sequence
  ENSG00000090263_13 (sequence is synthesized)
aagttctatgagggatgactgttgtatagatttgagtagctcgctgctggttttattgtattccagcaatgagtttccaaagaaattgtgaaggcttggccgggcacagtggctcacgcc

SEQ ID NO: 96254 - DNA, 120 bp, Artificial Sequence
  ENSG00000090263_14 (sequence is synthesized)
aaaaaaaaattgtgaaggcttctctgatttttttttccaacagttgttctgaatctttagcatgtccagtaattttttaataactttttattattgtagtaaaaacataaaattaatgat

SEQ ID NO: 96255 - DNA, 120 bp, Artificial Sequence
  ENSG00000090263_15 (sequence is synthesized)
cttaaccatatttaagtgtacaatagtgtcaatattcaaacatattattcaaaaaataatcaaaatataaaagcattttagtgcgatagtatttattggagtatgtatagcagctactcc

SEQ ID NO: 96256 - DNA, 120 bp, Artificial Sequence
  ENSG00000090263_16 (sequence is synthesized)
agccacagttttctttctctgtaacactcaatgattcctgaagtagaaagattcccagtacatatgtttaaatgaatgctatttttaaagatacctaatccagatggtatggctagggcc

SEQ ID NO: 96257 - DNA, 120 bp, Artificial Sequence
  ENSG00000090263_17 (sequence is synthesized)
tattttatagcctgtttaaaaaaataaaataaaataaaattgggtggtttgtatgtggtagaagtgaattccagcaaaaggagaattcattcatttagacctttttttttgtttgagacg

SEQ ID NO: 96258 - DNA, 120 bp, Artificial Sequence
  ENSG00000090263_18 (sequence is synthesized)
ggcatgagccaccacacccagcccatttagaactttttactgagcacctgccatgtgctcgacacgtgatagttgtagaggatacagagacaaatagacttagtccctaagactgtgtga

SEQ ID NO: 96259 - DNA, 120 bp, Artificial Sequence
  ENSG00000090263_19 (sequence is synthesized)
ctgtgtgaatgagcatgtgtgtattacaaagtattggcaagatctcagaaacgtgcttagaaaagtgcagatgcactgttattcttggccaatgcagctgagccaggtgtaggtggatga

SEQ ID NO: 96260 - DNA, 120 bp, Artificial Sequence
  ENSG00000090263_20 (sequence is synthesized)
ctaccccaggatgttgagctgagaaacaggatctcagcctgaacccaatgtagctcagcagatgtttgaattatgtgatctccagcttttgggaaagatctgaatgtaagaggaacttaa

SEQ ID NO: 96261 - DNA, 120 bp, Artificial Sequence
  ENSG00000090263_21 (sequence is synthesized)
gagaattagcatgatattttaaagagaataactgcattacattctaacagcagacctgagtcggaaaacaagtaaagaatcgatgtattggtttgccgatggaagagcttcagtgagatc

SEQ ID NO: 96262 - DNA, 120 bp, Artificial Sequence
  ENSG00000090263_22 (sequence is synthesized)
tcagaccctgaccctgcagtgagccttggcaatgattgacagggaagtttgtagataacgcagaagtagattagtgtgccactgctccaggctgaaaatcagaaatgaaagctaaaatac

SEQ ID NO: 96263 - DNA, 120 bp, Artificial Sequence
  ENSG00000090263_23 (sequence is synthesized)
atttgtacataagctataccttcaattgatagagcaagctgtgtgactcaaaacagcctgtacagaagtacgatggaccagctggaaggtatcaatagaagataaggaaaagttaactct

SEQ ID NO: 96264 - DNA, 120 bp, Artificial Sequence
  ENSG00000090263_24 (sequence is synthesized)
tgacaccagggaagtcaacaaatttcaggacaacagtgaccaatggttaagatggtgactaagtgtaatcagaaaaaaatctttaactccaagtttagactagccagtttgtttaattgg

SEQ ID NO: 96265 - DNA, 120 bp, Artificial Sequence
  ENSG00000090263_25 (sequence is synthesized)
atttctctggtcaaaacctaaactattggtgctttctaacctgtggggatcagtgtgcatagaccattttgccctcgatttcagcataacatagtaaaaagactgggttttagattcaaa

SEQ ID NO: 96266 - DNA, 120 bp, Artificial Sequence
  ENSG00000090263_26 (sequence is synthesized)
agtcatgggtttgtgatacagtgtacttactgattatgtgacgtcagttacttctctgaacctctttccttctctataaaatcataatgcttcactggattaatgaaataagatatttgt

SEQ ID NO: 96267 - DNA, 120 bp, Artificial Sequence
  ENSG00000090263_27 (sequence is synthesized)
gaaaagaactctgtaaattataaaaagttaaaaacttttacatatagcacattatgtgactagtaagtactgctgtgtcttactagcgcaattttctgtggcagcattgacacgtatctc

SEQ ID NO: 96268 - DNA, 120 bp, Artificial Sequence
  ENSG00000090263_28 (sequence is synthesized)
ctaaaaatataaagttccccacgtttacaagcagcatgataggttcaggaagaggaggtagatgagaggtaacatcttattatttatgtaattatgggctccataagtttattttttaag

SEQ ID NO: 96269 - DNA, 120 bp, Artificial Sequence
  ENSG00000090263_29 (sequence is synthesized)
caccatatatgtgtgtgtttcaaaataaacataaggcatcatatatttaaacatatataaccataatgcttgtatttataaatcattttccaagaaagaataaatcaaaatttgaaattc

SEQ ID NO: 96270 - DNA, 120 bp, Artificial Sequence
  ENSG00000090263_30 (sequence is synthesized)
gcaattactctcttccatattggttaacagtagaaggctcagtttctctgctcatcacacggccttcggcactgtagctttgggtggtgggctgcagattaattttgtaaccaccttaag

SEQ ID NO: 96271 - DNA, 120 bp, Artificial Sequence
  ENSG00000090263_31 (sequence is synthesized)
attcccaccaaaacatactaccgaaccgtgcatgcccttccaggagagccagacctttctaactctccccagcccaccacctccccgggtcctccgcacaggcggcggcgctagccttac

SEQ ID NO: 96272 - DNA, 120 bp, Artificial Sequence
  ENSG00000090263_32 (sequence is synthesized)
ctttctatccttgtagttttgttcttataatagagcccaggtagttcaaaaggtacagttggcaggagaaagtcttctttcaaaatacccataatggagagaccaaaaaaaaaaaggaaa

SEQ ID NO: 96273 - DNA, 120 bp, Artificial Sequence
  ENSG00000090263_33 (sequence is synthesized)
agaaggctcagtttctctgctcatcacacggccttcggcactgtagctttgggtggtgggctgcagattaattttgtaaccaccttaagaaaaatacgagatgagcatcaggattttatg

SEQ ID NO: 96274 - DNA, 120 bp, Artificial Sequence
  ENSG00000090263_34 (sequence is synthesized)
gcctggcaacagagtgagactccatctcgagaaaaaaaaaaaaaaaacaatgcagagaaaaactggtccaagtactgaggaagaaagcctcagaaacaccaaggttgccagggcagtggg

SEQ ID NO: 96275 - DNA, 120 bp, Artificial Sequence
  ENSG00000090266_0 (sequence is synthesized)
gaggcggctggggaccgcggggcggacgggagcgagtatgtccgctctgactcggctggcgtctttcgctcgcgttggaggccgccttttcagaagcggctgcgcacggactgctggaga

SEQ ID NO: 96276 - DNA, 120 bp, Artificial Sequence
  ENSG00000090266_1 (sequence is synthesized)
actcatgtggttctggattctctggcgcttttggcatgactcagaagaggtgctgggtcactttccgtatcctgatccttcccagtggacagatgaagaattaggtatccctcctgatga

SEQ ID NO: 96277 - DNA, 120 bp, Artificial Sequence
  ENSG00000090266_2 (sequence is synthesized)
tgaagactgaaggtgtagactcagcctcactctgtacaagagccaggtgagaatttcaaggattatcgacttcatattgcacattaaagttacaaattaaagtggcttggtcaagaatga

SEQ ID NO: 96278 - DNA, 75 bp, Artificial Sequence
  ENSG00000090266_3 (sequence is synthesized)
tactttgtgcctatgatggacttgaaaaaactgcatattctaacagcatgaagttgagttaaccatgtcctgtat

SEQ ID NO: 96279 - DNA, 70 bp, Artificial Sequence
  ENSG00000090266_4 (sequence is synthesized)
gcccacctcatatctgatttctgccttaagttttcacatttgctttggtctcttcttccttttcattgta

SEQ ID NO: 96280 - DNA, 120 bp, Artificial Sequence
  ENSG00000090266_5 (sequence is synthesized)
tgatttctgccttaagttttcacatttgctttggtctcttcttccttttcattgtatgttttattttatttacattttttattttgtagagacagggtgtcactatgttgcccaggctgg

SEQ ID NO: 96281 - DNA, 120 bp, Artificial Sequence
  ENSG00000090266_6 (sequence is synthesized)
gctacaaatcatcacctgaggcagagatgctactaccctcttctggggctcaactaccgatgggcatcagtaatccatcccagtataacatttcaaggatgtgctggagacaatacatgg

SEQ ID NO: 96282 - DNA, 120 bp, Artificial Sequence
  ENSG00000090266_7 (sequence is synthesized)
actttctctttcaatggtgaggaatgaaacaagatacaagaaccacagcatggaatatgttttcttttacatccaatggccaggtcataaaggatgccttgagacctccaccctggcccc

SEQ ID NO: 96283 - DNA, 120 bp, Artificial Sequence
  ENSG00000090266_8 (sequence is synthesized)
cagcagtactctggaaactgataaaaccaaattcggtcctatatttcaatttccccttctaagttaatacatgattgctgcccatcatacagtacttcaaccctaaactacagcaatttc

SEQ ID NO: 96284 - DNA, 120 bp, Artificial Sequence
  ENSG00000090266_9 (sequence is synthesized)
tgtcaacatttctgttgtataaaagttccatgctttgaagagcctatgggagtagaaaaagtttctctagaaatgtcactgaactatatttgcaacctagttgctctatgtgataaatat

SEQ ID NO: 96285 - DNA, 120 bp, Artificial Sequence
  ENSG00000090266_10 (sequence is synthesized)
atctgactatactagggattatgtgctttaaaaaaataattttgttcactgaaaatttacctgtgtgttttctcattgttaaatgtgattttggctataaactctttagtgcatttacct

SEQ ID NO: 96286 - DNA, 120 bp, Artificial Sequence
  ENSG00000090266_11 (sequence is synthesized)
atgcagtctaaattgcactctaaaaattattaacacagctgagttaaaccagagtggctgctctcttcacaaatcactgatttctgctaaaatgttagcttttttattgcatcatgaagg

SEQ ID NO: 96287 - DNA, 120 bp, Artificial Sequence
  ENSG00000090266_12 (sequence is synthesized)
cacagtaagatcatttggcaaattgtcaaggtatttttctagagcctcacctacaccatttcaactcatgacctgtaagctatttgctgttcatactcacagtaaaccttccatctctgg

SEQ ID NO: 96288 - DNA, 120 bp, Artificial Sequence
  ENSG00000090266_13 (sequence is synthesized)
ctatggtgtttatagcctaatggttggaatctgctcgtctcaaggtgctggtattcctagcactaacaatgccaacttggacaaagaagagaatcttgcaaaaagagtaatcattctacc

SEQ ID NO: 96289 - DNA, 120 bp, Artificial Sequence
  ENSG00000090266_14 (sequence is synthesized)
ctcttagctgggtggtctttctatgaatgcctgtgcatgtgacaaagctgcagcaaactcattatgaggatgtactgtcatgccaagcctactgaaaattaaaattacatcactgttagt

SEQ ID NO: 96290 - DNA, 120 bp, Artificial Sequence
  ENSG00000090266_15 (sequence is synthesized)
tggagtgcagcgtgatcatggctcactgtaaccccaacctcctgagctcaagtgattctcccgcctcagccttctcagtagctgggactactactcttggctaatttttgtatattttgt

SEQ ID NO: 96291 - DNA, 88 bp, Artificial Sequence
  ENSG00000090266_16 (sequence is synthesized)
actcttggctaatttttgtatattttgtagagatgattcttggactcaagtgatccacctcttggcttcccaaagtgttgggattaca

SEQ ID NO: 96292 - DNA, 120 bp, Artificial Sequence
  ENSG00000090266_17 (sequence is synthesized)
atttgttttaatgactggactgtaaacccttgagagaggaagggtgattttgcttctcttgtctacaaggctgtcacatgatcagtgctcaataaatacttgaataattgaataaatgaa

SEQ ID NO: 96293 - DNA, 120 bp, Artificial Sequence
  ENSG00000090266_18 (sequence is synthesized)
gaggcctagggagggcgcggtccagggtcccggtgcctggctgcggaatttagggtagagtctgttcggcagcctttaatcggagacgtcacgtggccgctttttaatgctgaaaaatca

SEQ ID NO: 96294 - DNA, 120 bp, Artificial Sequence
  ENSG00000090266_19 (sequence is synthesized)
ctctggctgcagggagtggaggctgtcgcccagagagagcgccgtcggtgccggtggtggtgtgcacattgagccccggtatagacagttcccccagctgaccagatcccaggtgttcca

SEQ ID NO: 96295 - DNA, 120 bp, Artificial Sequence
  ENSG00000090266_20 (sequence is synthesized)
gcgactcgaggagagggaccccgctggccggagggagagggagagacttcgctgggcagatgggacaccgtgtgcagggccgtcatgtgccggtggtggtgtgcacattgagccccggta

SEQ ID NO: 96296 - DNA, 82 bp, Artificial Sequence
  ENSG00000090266_21 (sequence is synthesized)
aagattgttgcaaacaaacaaacaaagaaaacaaacagtcctagctaacatgtatcaagaaccactgccctgttactgttca

SEQ ID NO: 96297 - DNA, 120 bp, Artificial Sequence
  ENSG00000090266_22 (sequence is synthesized)
agctaacatgtatcaagaaccactgccctgttactgttcacgaatctgtgcattatgaagacaagatattttaatgcacttttcctacagtgccggtggtggtgtgcacattgagccccg

SEQ ID NO: 96298 - DNA, 120 bp, Artificial Sequence
  ENSG00000090266_23 (sequence is synthesized)
tctctctagtgtctttaagttgctgatgactcacaaggataaagttcctcattcctgtcttttagtgagcagtatggtttaggtggacagagattcctttggtgcagtttttttcaagga

SEQ ID NO: 96299 - DNA, 120 bp, Artificial Sequence
  ENSG00000090266_24 (sequence is synthesized)
gctagatcctgaatgaataatataattggtatatgaggacattacggaaacagtatgctacgtcattcaagttgtaaagtggcgatatttgtgccggtggtggtgtgcacattgagcccc

SEQ ID NO: 96300 - DNA, 120 bp, Artificial Sequence
  ENSG00000090266_25 (sequence is synthesized)
tgagtaagttagtgacctgctaacaagttcacagtcccttaactaaaacctttggggctagcaccccagaatcaacacattcaaatttctagtgcaaaataatgaatcttcactaattga

SEQ ID NO: 96301 - DNA, 120 bp, Artificial Sequence
  ENSG00000090266_26 (sequence is synthesized)
aaaccaaaattagcctcttgtcagttttggtcagtttttgctgctacacatgaagcaagcttagtaaaaagtgagtatttcaagggattgtgaacttctgtctatatttcagtggagatg

SEQ ID NO: 96302 - DNA, 120 bp, Artificial Sequence
  ENSG00000090266_27 (sequence is synthesized)
cacagctagatcctgaatgaataatataattggtatatgaggacattacggaaacagtatgctacgtcattcaagttgtaaagtggcgatatttggtaggaccttttaaacatgatactt

SEQ ID NO: 96303 - DNA, 120 bp, Artificial Sequence
  ENSG00000090266_28 (sequence is synthesized)
aaaaaagtacatatatacacacatctgcaaaaactaaaaatcaccttattcataattagttattaataccttaaatagagcattccaaataaaagtgttaaattttggatgactatttag

SEQ ID NO: 96304 - DNA, 120 bp, Artificial Sequence
  ENSG00000090266_29 (sequence is synthesized)
gtggagtccgtcagaactgaggcccaggaaatgaaaggagtgacttgcctgaagtcccacatggatgaagaatctggagctggggcaggtgtggggtgggcagaaggcaaagccctgtgt

SEQ ID NO: 96305 - DNA, 120 bp, Artificial Sequence
  ENSG00000090273_0 (sequence is synthesized)
gcggaaggcggacgactagagtcgttgggcccggcgcgacccgcaggagcgtagagagcgcgggactagagtgcagagctccgggacgtggatcggagccggcgcgatgggcggagagca

SEQ ID NO: 96306 - DNA, 120 bp, Artificial Sequence
  ENSG00000090273_1 (sequence is synthesized)
ggaggaggagcggttcgacggcatgttgctggccatggctcagcagcacgagggcggcgtgcaggagcttgtgaacaccttcttcagcttccttcgacgcaaaacagactttttcattgg

SEQ ID NO: 96307 - DNA, 120 bp, Artificial Sequence
  ENSG00000090273_2 (sequence is synthesized)
aggagaagaagggatggcagagaagcttatcacacagactttcagccaccacaatcagctggcacagaagacccggcgggagaagagagcccggcaggaggccgagcggcgggagaaggc

SEQ ID NO: 96308 - DNA, 120 bp, Artificial Sequence
  ENSG00000090273_3 (sequence is synthesized)
ggagcgggcggccagactggccaaggaagccaagtcagagacctcagggccccagatcaaggagctaactgatgaagaggcagagaggctgcagctagagattgaccagaaaaaggatgc

SEQ ID NO: 96309 - DNA, 120 bp, Artificial Sequence
  ENSG00000090273_4 (sequence is synthesized)
agagaatcatgaggcccagctcaagaacggcagccttgactccccagggaagcaggatactgaggaagatgaggaggaagatgagaaggacaaaggaaaactgaagcccaacctaggcaa

SEQ ID NO: 96310 - DNA, 120 bp, Artificial Sequence
  ENSG00000090273_5 (sequence is synthesized)
cggggcagacctgcccaattaccgctggacccagaccctgtcggagctggacctggcggtccctttctgtgtgaacttccggctgaaagggaaggacatggtggtggacatccagcggcg

SEQ ID NO: 96311 - DNA, 120 bp, Artificial Sequence
  ENSG00000090273_6 (sequence is synthesized)
gcacctccgggtggggctcaaggggcagccagcgatcattgatggggagctctacaatgaagtgaaggtggaggagagctcgtggctcattgaggacggcaaggtggtgactgtgcatct

SEQ ID NO: 96312 - DNA, 120 bp, Artificial Sequence
  ENSG00000090273_7 (sequence is synthesized)
actcgcagcatggtggaaaagatgatgtatgaccagcgacagaagtccatggggctgccaacttcagacgaacagaagaaacaggagattctgaagaagttcatggatcaacatccggag

SEQ ID NO: 96313 - DNA, 120 bp, Artificial Sequence
  ENSG00000090273_8 (sequence is synthesized)
atggatttttccaaggctaaattcaactagcccctgttttttcctccctgaactcttggggctgagctgcaaccacccaactttctttcccactcttctctgggacttgtgggcctcagg

SEQ ID NO: 96314 - DNA, 120 bp, Artificial Sequence
  ENSG00000090273_9 (sequence is synthesized)
gcttggggcaggcatgggactggcccaggcacacaggtcccggggcatcaggagaaaggctgggtcttgggaccttgtcctccccagttggcctactgttacacattaaaacgatttgcc

SEQ ID NO: 96315 - DNA, 120 bp, Artificial Sequence
  ENSG00000090273_10 (sequence is synthesized)
cagctccttctgtgtcctctcttgcctctggcctttctctggggcacaggcctcttacggctgctgctgggaactgggagtttggcttctagcccagattctgccatgtgacctagggca

SEQ ID NO: 96316 - DNA, 120 bp, Artificial Sequence
  ENSG00000090273_11 (sequence is synthesized)
gattctgccatgtgacctagggcacatccttgcccctctctgggcctcagtttctcattacttaaagattaaaacaaggcttggccgggtgtgatggttcatgtctgtaatcccagcact

SEQ ID NO: 96317 - DNA, 120 bp, Artificial Sequence
  ENSG00000090273_12 (sequence is synthesized)
gcaaattatcgcatccctgagcttaggatccccctttagtttcacatatgcccccacccccgtttccactttgatggcggcttccaaggagcatcccttagtaagaaccgtcgcaaatat

SEQ ID NO: 96318 - DNA, 120 bp, Artificial Sequence
  ENSG00000090273_13 (sequence is synthesized)
cgtgatttggatccaccaaggcttggggcgagccgtcgaatgtgtgtggtaggggagcgggctgatgttagcacgtggtcttgttaggccttgaatgggggaataggaggcctgtgttca

SEQ ID NO: 96319 - DNA, 120 bp, Artificial Sequence
  ENSG00000090273_14 (sequence is synthesized)
cgattagtttccaccacctaccaacttggaacctttacatctctccaagcctgagtttccttatctgtgagacagctgcgaataccggtttccagagagtagttaagaacccttgtgaac

SEQ ID NO: 96320 - DNA, 120 bp, Artificial Sequence
  ENSG00000090273_15 (sequence is synthesized)
taggaattagggcagagttaggagcggcctgcggaggggcccgctcaggccgatgccggtagtggaaacagaggaagccaccgccgcgctcttctcggaactggctaaaatagctccgta

SEQ ID NO: 96321 - DNA, 120 bp, Artificial Sequence
  ENSG00000090273_16 (sequence is synthesized)
aatgggccgagcgcaacacggaggggataccgctcactaccagcttcccgaactttggcttaccctcagcttgagccagcgcacatctcctccttaacagcctctcctgagaataggctg

SEQ ID NO: 96322 - DNA, 120 bp, Artificial Sequence
  ENSG00000090273_17 (sequence is synthesized)
gcttcaaggaatgggggaagtgaatgatctcaaactacagaaatggcagtgaacttgtctgtttcaattcgggagtgggctgcttcctgattggctgtgattgggctttcactgtgcttg

SEQ ID NO: 96323 - DNA, 120 bp, Artificial Sequence
  ENSG00000090273_18 (sequence is synthesized)
ctccctccaccctggatgaatatctccctttctgctttcttctttcccttatcacactgatttgtaactctttgcctctgtgtctcccctagctgcaggaagggcacagtcttgtacctc

SEQ ID NO: 96324 - DNA, 120 bp, Artificial Sequence
  ENSG00000090273_19 (sequence is synthesized)
tggatccagtgtaggcctgcaagggtctcaggtgcaggatgtggatgggagagagtttggttgtgaaagggttaaggggtgattcctggtgcacagagcaggccacctcccaccctctgg

SEQ ID NO: 96325 - DNA, 120 bp, Artificial Sequence
  ENSG00000090273_20 (sequence is synthesized)
cttcacagatcaataagatggagtggtggagccgcttggtgtccagtgaccctgagatcaacaccaagaagattaaccctgagaattccaaggtgagccctggctggttgggggagcttc

SEQ ID NO: 96326 - DNA, 120 bp, Artificial Sequence
  ENSG00000090316_0 (sequence is synthesized)
gctaatgttttggccgcttcaagatggcggtgcaggagtcggcggctcagttgtccatgaccctgaaggtccaggagtacccgaccctcaaggtgccctacgagacgctgaacaaacgct

SEQ ID NO: 96327 - DNA, 120 bp, Artificial Sequence
  ENSG00000090316_1 (sequence is synthesized)
ttcgcgccgctcagaagaacattgaccgggagaccagccacgtcaccatggtggtggccgagctggagaagacgttgagcggctgccccgccgtggactccgtggtcagcctgctggacg

SEQ ID NO: 96328 - DNA, 120 bp, Artificial Sequence
  ENSG00000090316_2 (sequence is synthesized)
gcgtggtggagaagctcagcgtcctcaagaggaaggcggtggaatccatccaggccgaggacgagagcgccaagctgtgcaagcgccggatcgagcacctcaaagagcatagcagcgacc

SEQ ID NO: 96329 - DNA, 120 bp, Artificial Sequence
  ENSG00000090316_3 (sequence is synthesized)
agcccgcggcggccagcgtgtggaagaggaagcgcatggatcgcatgatggtggagcacctgctgcgttgcggctactacaacacggctgtcaagctggcgcgccagagcggcatcgagg

SEQ ID NO: 96330 - DNA, 120 bp, Artificial Sequence
  ENSG00000090316_4 (sequence is synthesized)
acctagtgaatattgagatgttcctgacggccaaagaggtggaggagtccctggagaggcgtgagacggccacctgcctggcctggtgccatgacaacaagtcccggctccggaagatga

SEQ ID NO: 96331 - DNA, 120 bp, Artificial Sequence
  ENSG00000090316_5 (sequence is synthesized)
agagctgcctggagttcagcctcagaatccaggagttcattgaactcatccggcagaataagagactggacgctgtgagacatgcaagaaagcacttcagccaagcagaagggagccagc

SEQ ID NO: 96332 - DNA, 120 bp, Artificial Sequence
  ENSG00000090316_6 (sequence is synthesized)
tggacgaggtgcgccaggccatgggcatgctggccttcccgcccgacacgcacatctccccgtacaaggaccttctggaccctgcacggtggcggatgctgatccagcagttccggtacg

SEQ ID NO: 96333 - DNA, 120 bp, Artificial Sequence
  ENSG00000090316_7 (sequence is synthesized)
acaactaccgactacaccagctgggaaacaattctgtgttcaccctcaccctgcaggctggcctctcagccatcaagacaccacagtgctacaaggaggacggcagctccaagagccctg

SEQ ID NO: 96334 - DNA, 120 bp, Artificial Sequence
  ENSG00000090316_8 (sequence is synthesized)
actgccctgtgtgcagccgctccctgaacaagctggcgcagcccctgcccatggcccactgtgccaactcccgcctggtctgcaagatttctggcgacgtgatgaacgagaacaatccgc

SEQ ID NO: 96335 - DNA, 120 bp, Artificial Sequence
  ENSG00000090316_9 (sequence is synthesized)
cgtctacggctacaattctctgctttctatccgtcaagatgataaagtcgtgtgcccgagaaccaaagaagtcttccacttctcacaagccgagaaggtgtacatcatgtaggccccacg

SEQ ID NO: 96336 - DNA, 120 bp, Artificial Sequence
  ENSG00000090316_10 (sequence is synthesized)
tcgtgaagcgcacgcctcggggacgggctgcagtgggcggggaggccacgccttcctcctgtcccacgctccagcctgccgcggcgtttctgtttcttgcgaccaaagatccgtgagcaa

SEQ ID NO: 96337 - DNA, 120 bp, Artificial Sequence
  ENSG00000090316_11 (sequence is synthesized)
cgataaatactcttaggaagagagaaaataaggtttcataagtttgtacttgaaaacatttggattggtaggattttgtaacacgtcaaccatttgatgcttctgaaaagtactttcaac

SEQ ID NO: 96338 - DNA, 120 bp, Artificial Sequence
  ENSG00000090316_12 (sequence is synthesized)
ttgcgaaggaaactcttctttaaagactgacctaaacaccgagggaaacttaagaacgtttaaaatataggagtccgtgatttccctgtgttttcagtttctttccttctgtgaacgatg

SEQ ID NO: 96339 - DNA, 120 bp, Artificial Sequence
  ENSG00000090316_13 (sequence is synthesized)
agacttggagaacgggctggtccttcaccacttcctgttggccctggcctggccggggaaggtggcagcggcaccggactgacctgcagtgacccgcgatgccgcgccacgagggacact

SEQ ID NO: 96340 - DNA, 120 bp, Artificial Sequence
  ENSG00000090316_14 (sequence is synthesized)
tatggcttcattcgagagctgctgccaaaacgcctggcgccgccaccgtcgggggctggcttcgaggacgcccgcctgcctcgcgggtcgtgtccgcgggactgtgttcgtacgtgcata

SEQ ID NO: 96341 - DNA, 120 bp, Artificial Sequence
  ENSG00000090316_15 (sequence is synthesized)
gtttcgatatcacatcgcggggctgtgttcgtagctgcgtcgtttcgatatcacaccctctgtgtgccgccttacttcctgcttcgagaatgtataacgtggaaatccacgggaccaaat

SEQ ID NO: 96342 - DNA, 120 bp, Artificial Sequence
  ENSG00000090316_16 (sequence is synthesized)
ttctgcagaggccttgccggatggttccataactgtagagtctaattgctatccattacagaaattaatcgttcagttgaaagaagtactgatgacttttcaaaacaaatgaaccaccgt

SEQ ID NO: 96343 - DNA, 120 bp, Artificial Sequence
  ENSG00000090316_17 (sequence is synthesized)
agctgacagagaaccgtatcgtagaggtttgtagttagtgcttatttttgcatgttgatgttgactagctaataaactgtaaatgtaaaccatgcgaataaaatggttttctatttctca

SEQ ID NO: 96344 - DNA, 120 bp, Artificial Sequence
  ENSG00000090316_18 (sequence is synthesized)
cgagtcagcctccgtctccttgagggccccggccactgtcagccctggagtctgaaaacaaaacgtgtccatcccggagtccctccgtcacagatgtcttcatctaggtggcagctggtt

SEQ ID NO: 96345 - DNA, 120 bp, Artificial Sequence
  ENSG00000090316_19 (sequence is synthesized)
ccgcatagggtctgttgacctgttacccccactccgcatagggtctatttgcctgtgttaccctggctccgtgtagggtctgtttacctgtgttccccccgctccgcgtagggtctcttt

SEQ ID NO: 96346 - DNA, 120 bp, Artificial Sequence
  ENSG00000090316_20 (sequence is synthesized)
gcctgtgttccccccgctccgtgtagggtctctttgccttgttccccctgctctgggtagaatctgccctagagactcgcggggcctccacctcataatgtctgagccgagctcagagct

SEQ ID NO: 96347 - DNA, 120 bp, Artificial Sequence
  ENSG00000090316_21 (sequence is synthesized)
gtgccctctgcggcctcgtctgttgcaggggagcaggcaggtcccaggaagtgcgtgtccttcctcccgcaagcagacacgtgctgcctcgaagcctcagcagccagccgggcaggcatg

SEQ ID NO: 96348 - DNA, 120 bp, Artificial Sequence
  ENSG00000090316_22 (sequence is synthesized)
gcaaacaacaccccagtgtctcgggggcaggcgcagtgtgagctacatcctctgctggggccgtcttgggagtggttctccaggtgccagggcctggtcagggaagtccggcctcagctc

SEQ ID NO: 96349 - DNA, 120 bp, Artificial Sequence
  ENSG00000090316_23 (sequence is synthesized)
agcgtggccctggagccacccacaaggcacacgggagctgggctggggtggcaggtggggcatcggcaggacgtttgtggggtgagggagtgcgggtgtttggctgggagcccagagggt

SEQ ID NO: 96350 - DNA, 120 bp, Artificial Sequence
  ENSG00000090316_24 (sequence is synthesized)
gttgtgtatcactcactgaggctggacaagagggaaggcggagaagcctggccacatgtctcctgagggctccaggcagggccctctcacctgctgccagggtcccagcccgcaggagct

SEQ ID NO: 96351 - DNA, 120 bp, Artificial Sequence
  ENSG00000090316_25 (sequence is synthesized)
tcccgtccacctctgaactcacggtccacatggcgctggagcgtcgggcaccatctacagggcttgaggccagcagcctagcctctgggtccactggggcaggcaagacatgcaagaaag

SEQ ID NO: 96352 - DNA, 120 bp, Artificial Sequence
  ENSG00000090316_26 (sequence is synthesized)
agtgggcgtctcacgatgaggtgctgagggtggtccccaagacgcacggcagaaccgcggcaagtccctgcccttgcgtggaccctggagaggcccggggtcctgctccggctcctgatg

SEQ ID NO: 96353 - DNA, 120 bp, Artificial Sequence
  ENSG00000090316_27 (sequence is synthesized)
ctgacctgggcgcatggtggcaggtcaggcctcgtcttcacgcacgagggagccaggcctgcaacgaggtcccttctgtgcctgagagggctaaagcggggatctcgggacccgggccag

SEQ ID NO: 96354 - DNA, 120 bp, Artificial Sequence
  ENSG00000090316_28 (sequence is synthesized)
tggagagtggcgtgtgagcattgcggggacacggccaggggccccctgtcaagaggaggggctcccgctctgctctggcctccgtgtggcctcggtgcctgtgtcgctggcctctgtccg

SEQ ID NO: 96355 - DNA, 120 bp, Artificial Sequence
  ENSG00000090316_29 (sequence is synthesized)
ttgcactgggagcaaagggttcctgtctgcagcacaccagctgcccggagctctgccctgtgcctgagcagcgtcagcaccgcggtgaggcggacggcccggcaggggttggaaagtcca

SEQ ID NO: 96356 - DNA, 120 bp, Artificial Sequence
  ENSG00000090316_30 (sequence is synthesized)
gatgtggggaggagctgctgtctgggtcagcagctgccctgctggagggagagggggtgctgcgctcatcccctgaactcagattggatagccccgggccagcgctggaggaggagcaga

SEQ ID NO: 96357 - DNA, 120 bp, Artificial Sequence
  ENSG00000090316_31 (sequence is synthesized)
ccttgtaaaccagaatcgctttggagagccctcgggggcaggtgccatttgcagttctggtgttttccgtgggttgtctgtgtggcttgggtgccctggtcccctggaggaaggagtgtc

SEQ ID NO: 96358 - DNA, 120 bp, Artificial Sequence
  ENSG00000090316_32 (sequence is synthesized)
tggtagctgctcctccagcctctggtgagccgcacctcccgccatcccagccccacccagcaggtcggcttggagtgaggcgattactttgtacctagactctgacataaaagctgttag

SEQ ID NO: 96359 - DNA, 79 bp, Artificial Sequence
  ENSG00000090316_33 (sequence is synthesized)
cgattactttgtacctagactctgacataaaagctgttagctcagatttttcaacttaaaaatgcaggccgggtgggca

SEQ ID NO: 96360 - DNA, 120 bp, Artificial Sequence
  ENSG00000090316_34 (sequence is synthesized)
caacacagcgagaatctgtctctaacaagatgttttttacattagctaggtgtggtgctgcacatctgcggtctcagcttctcgggaagatcgcctgagcctgagagttcgaggctacag

SEQ ID NO: 96361 - DNA, 120 bp, Artificial Sequence
  ENSG00000090316_35 (sequence is synthesized)
gggtgacagagtgaaaccctgtctctaaaagttaaaattaaaacgcaaacttaaatgtgccaaaatgttgttttttagacatgcaagaaagcacttcagccaagcagaagggagccagct

SEQ ID NO: 96362 - DNA, 120 bp, Artificial Sequence
  ENSG00000090316_36 (sequence is synthesized)
ggtggctgcagctccgccctgcctggggcatttgtgggtttttgcgaaatgcaaaagtatgagctgctagtgattaacttttaacgcctttaatttttagtaaatgagtaagtgaatccc

SEQ ID NO: 96363 - DNA, 120 bp, Artificial Sequence
  ENSG00000090316_37 (sequence is synthesized)
tgaccccaggcggctgggacctggcctgtacttcatgggctttgtgtgagcagctccgtgccgtctgtcgcacacccacacctcagcctggccaggcacagtttaggaattttgtcttct

SEQ ID NO: 96364 - DNA, 120 bp, Artificial Sequence
  ENSG00000090316_38 (sequence is synthesized)
gtttaggaattttgtcttctgggtgtttctctctctctctctttccgtgtgtgtgtgtgtgtgttttgaggttgagttttgctctgttgcctggcacaatctcagctcaccgcaacctcc

SEQ ID NO: 96365 - DNA, 87 bp, Artificial Sequence
  ENSG00000090316_39 (sequence is synthesized)
tgtgtttatatttttaaagaaaaatggaagtttttgtgtttcttatgttagctgcatttagtttgttaaaagtcacggttttgtttc

SEQ ID NO: 96366 - DNA, 120 bp, Artificial Sequence
  ENSG00000090316_40 (sequence is synthesized)
ttagctgcatttagtttgttaaaagtcacggttttgtttcccctgtgtcctgtggatgcataccgtgctgttctccccggacctgctctgagggccccacatctcggctgcagttctctg

SEQ ID NO: 96367 - DNA, 120 bp, Artificial Sequence
  ENSG00000090316_41 (sequence is synthesized)
tgtgttggggctgaatgctggcatcaaacgatctgaaaagagtcagccgccactgttaggttttctgtttctgtcttggggtcaggatttgtggatcagggacctggggtgcgaggtgag

SEQ ID NO: 96368 - DNA, 120 bp, Artificial Sequence
  ENSG00000090316_42 (sequence is synthesized)
gcagcttgttaggcggatgatgtctgtctggggtttgattgatggtgagataagacgcgtaaaccaggtcatgcaaatgagatcttgtagatgtcaaccacggagattaaatttcctctc

SEQ ID NO: 96369 - DNA, 120 bp, Artificial Sequence
  ENSG00000090316_43 (sequence is synthesized)
ttcagcagctctgggaggaggtgagatgcccgttggccgtgttctgtgcacgtcttggcgtgtgacgaagggtgacttgtctccagagatggaatgagggggttgggtggggctcctcct

SEQ ID NO: 96370 - DNA, 120 bp, Artificial Sequence
  ENSG00000090316_44 (sequence is synthesized)
ggactcagacccacgcccacccacacgctccaaggagggggatgcatgggcactggaatctcggatggccgtccccagcccctgcacacgcaccctgcggggtcagccgtgtggactcac

SEQ ID NO: 96371 - DNA, 120 bp, Artificial Sequence
  ENSG00000090316_45 (sequence is synthesized)
ccccgactcccagtccctgtatgcaccctgcggggtcggccgtgtggattcacccccgactcccaggccctgcacaggccctggggcgtcagccatgtggactccccaggctgggtccca

SEQ ID NO: 96372 - DNA, 120 bp, Artificial Sequence
  ENSG00000090316_46 (sequence is synthesized)
agcgtggacgccccccactccctgctgccccgggctctcctggtggtgcttccaacacgtggtccccgtgctatccatcaaggggctgctgggccacctcctacactaactccagtctct

SEQ ID NO: 96373 - DNA, 120 bp, Artificial Sequence
  ENSG00000090316_47 (sequence is synthesized)
gcgagacactgcatcttctccaaggccaccgtgagcgcctggcacctcctcagccctgtgttccttggtacatgccttgttctggacagcacagggctgactcacacatgggacttgagg

SEQ ID NO: 96374 - DNA, 120 bp, Artificial Sequence
  ENSG00000090316_48 (sequence is synthesized)
cccctggttctgtgcattggggtcgctttggcagaggggccctgagggctgagaacgtggggtgcacaggggcccgtgtgagggtcaggacatgggggtgcaggccctcaggacagccag

SEQ ID NO: 96375 - DNA, 120 bp, Artificial Sequence
  ENSG00000090316_49 (sequence is synthesized)
agggacagtgaccctgtgtgtgggggggggcatgagaatgggggccctgggggtgagcaggtgcccgctggtcagcttgaaagggatctgttatgttctgctttggtttcttggttgccc

SEQ ID NO: 96376 - DNA, 120 bp, Artificial Sequence
  ENSG00000090316_50 (sequence is synthesized)
agccttagactggagtggggttctggcctggagtaggcctgtgtgcatcccgcagagttggctcaggaaagatcgtggctgcatgtggtgtgtggcacgctcagggctgagagggctggg

SEQ ID NO: 96377 - DNA, 120 bp, Artificial Sequence
  ENSG00000090316_51 (sequence is synthesized)
caggctggcacgcatcgccatcgggacagggctgtgtgggacgggcagggcggggggccaggctggcacgcgtcgccatcgggacagggctgtgtggggcgggcagggcagcggggccag

SEQ ID NO: 96378 - DNA, 120 bp, Artificial Sequence
  ENSG00000090316_52 (sequence is synthesized)
ccaggctggcacacgtcgccattgggacagggctgtcctctcgccccaccctgccttagcttcgttcgaaatggatgaaggggtgggaaggacaggcgaggtggccccgggatttctttg

SEQ ID NO: 96379 - DNA, 120 bp, Artificial Sequence
  ENSG00000090316_53 (sequence is synthesized)
gcaggtgtgccttcgggaaggaactttgcctgagaggatgagtcattccctggtggttcattgtggggattttccatggaaatccgtgtgtacgttgtagtcgcttgccttaatgcattc

SEQ ID NO: 96380 - DNA, 120 bp, Artificial Sequence
  ENSG00000090316_54 (sequence is synthesized)
gctaatgttttggccgcttcaagatggcggtgcaggagtcggcggctcagttgtccatgaccctgaaggtccaggagtacccgaccctcaagaacattccagcatggaaaccccgctgtg

SEQ ID NO: 96381 - DNA, 120 bp, Artificial Sequence
  ENSG00000090316_55 (sequence is synthesized)
caaggcccctgcactggccacagaagccgcacctatctgctgaggaacccggttgctgcctggagtgggtgtcgagtactgcctggcagcatagccatgcttcttgaggcattttagcac

SEQ ID NO: 96382 - DNA, 120 bp, Artificial Sequence
  ENSG00000090316_56 (sequence is synthesized)
cagcatagccatgcttcttgaggcattttagcaccctgtaccccaggagtttcctgacctggggatgaaggccagggtcgttacagtggctcccaggccctttgccctgtagggtgctgg

SEQ ID NO: 96383 - DNA, 120 bp, Artificial Sequence
  ENSG00000090316_57 (sequence is synthesized)
gcccagtggcctttctgccgccattcagccaggccagcatgccgagcccagggttttactgccaccttcctctgtctggagcgctccttccacagatgtccatggtcccatgtcctcacc

SEQ ID NO: 96384 - DNA, 120 bp, Artificial Sequence
  ENSG00000090316_58 (sequence is synthesized)
ctttgccaacgtccgtggtcccatgtcctcacctccttcaatcttcgctgagctgtcagcttgtgaagcttctctgactccactgttgaaactgcagccccagcatctcccacttctgcc

SEQ ID NO: 96385 - DNA, 120 bp, Artificial Sequence
  ENSG00000090316_59 (sequence is synthesized)
cttttccctcgtgagtcgtgaccgctgtctcacataacggtattttgcttgtttctgaccactgggattataagctcttttgaaggatagagaagaaataaattctccaattaacaaatg

SEQ ID NO: 96386 - DNA, 120 bp, Artificial Sequence
  ENSG00000090316_60 (sequence is synthesized)
ggcatctttggtcatattttaacacgctgaccctgcaccttgccactcttgtcctcccaccacagacagccccgagctcccgtgtgctgcacttgcgtggtgtctggatggtcggggtgg

SEQ ID NO: 96387 - DNA, 120 bp, Artificial Sequence
  ENSG00000090316_61 (sequence is synthesized)
ggccgtgttgaggggcctcggatgcgtcgtgcagccttcactctgggaagtggcgcgcttcctctctcatcatctcagaggccgccatgggcattgatctaaaagcccgattttgatgtg

SEQ ID NO: 96388 - DNA, 120 bp, Artificial Sequence
  ENSG00000090316_62 (sequence is synthesized)
ttctggcagccggcagattaccattcagaatagttttcccgtgtgattaccaagaaccttgcctgtgactgactctgtcccgcctgtgactgactctgtcccacctgtgaccgactctgt

SEQ ID NO: 96389 - DNA, 120 bp, Artificial Sequence
  ENSG00000090316_63 (sequence is synthesized)
ctgcctgtgactctgtccctgcctgtgactgactccatcctgcctgtgactctgtcccacctgcgactcactgagttcctgcctgtgactcactcggctcccgcctgcaacggacttggt

SEQ ID NO: 96390 - DNA, 120 bp, Artificial Sequence
  ENSG00000090316_64 (sequence is synthesized)
ccctgcctgcgactcactgtggccctgcctgtgactgagtctgtcccgtttgtgactgattccttcctgtgactgactctgtcccacctgcaactgacttcttcctgcctgtgacagact

SEQ ID NO: 96391 - DNA, 120 bp, Artificial Sequence
  ENSG00000090316_65 (sequence is synthesized)
ctgcccctgcctgcgactgagtctgtcccttcctgcaactgagtccatcccgcctgtgactctgtcctcgcctgtgactgactctgcccctgccctgtgactgtctcacctgtgactgac

SEQ ID NO: 96392 - DNA, 120 bp, Artificial Sequence
  ENSG00000090316_66 (sequence is synthesized)
tccgtcctgcctgtgactcagcctcttactgactctacccctgcctgtgactgactctgccctctcctgtgactgactctgtccccacctgtgactgactctgtccccacctgtgactga

SEQ ID NO: 96393 - DNA, 120 bp, Artificial Sequence
  ENSG00000090316_67 (sequence is synthesized)
ctgtcctcctgcaactgactctgtccccgcctatgaatgtctttcatgtgacctgcctcaggcccagagggcagtgagtgtttcgcgattgctgctggtacctggctgtgccggggtatg

SEQ ID NO: 96394 - DNA, 120 bp, Artificial Sequence
  ENSG00000090316_68 (sequence is synthesized)
aatgagactcaggccccctcccttgtcccctctttgtggaactctgggcgagagggctggcgtgcttgcccactgcctgttcctaggtgccagcagaacgtccctgctgggtggctcttg

SEQ ID NO: 96395 - DNA, 120 bp, Artificial Sequence
  ENSG00000090316_69 (sequence is synthesized)
tgcgtggccggggagagggcggcgggcgacggagccactctgtgcctgtggtcctggtgctggaggccggggtgagaaggcgcaggcttcttgtctccaccgaggcctcagtggggctgt

SEQ ID NO: 96396 - DNA, 120 bp, Artificial Sequence
  ENSG00000090316_70 (sequence is synthesized)
ttagctgtcgagtgcagcacttcctgtgcctcgaaagacagccccgtgtagtcagcatggcgcccacatagccagaagggcacgcagcccagggcagagtggccacagggggctgggctc

SEQ ID NO: 96397 - DNA, 120 bp, Artificial Sequence
  ENSG00000090316_71 (sequence is synthesized)
gtcctaagacaggcaagctgcaatgatgggaacgcgggaggtgcggttgggggcccccttccctgctgtctgccttctggggccactgtcggctgagcaggccagcttcctgttcctgta

SEQ ID NO: 96398 - DNA, 120 bp, Artificial Sequence
  ENSG00000090316_72 (sequence is synthesized)
gcaggccagcttcctgttcctgtagggaccgtgttgtcttgctccaggagtgtccagagtccaggccacagggagaccaggatgtatagcaggttgattgattttttttttttttttttt

SEQ ID NO: 96399 - DNA, 120 bp, Artificial Sequence
  ENSG00000090339_0 (sequence is synthesized)
gagctcctctgctactcagagttgcaacctcagcctcgctatggctcccagcagcccccggcccgcgctgcccgcactcctggtcctgctcggggctctgttcccaggacctggcaatgc

SEQ ID NO: 96400 - DNA, 120 bp, Artificial Sequence
  ENSG00000090339_1 (sequence is synthesized)
ccagacatctgtgtccccctcaaaagtcatcctgccccggggaggctccgtgctggtgacatgcagcacctcctgtgaccagcccaagttgttgggcatagagaccccgttgcctaaaaa

SEQ ID NO: 96401 - DNA, 120 bp, Artificial Sequence
  ENSG00000090339_2 (sequence is synthesized)
ggagttgctcctgcctgggaacaaccggaaggtgtatgaactgagcaatgtgcaagaagatagccaaccaatgtgctattcaaactgccctgatgggcagtcaacagctaaaaccttcct

SEQ ID NO: 96402 - DNA, 120 bp, Artificial Sequence
  ENSG00000090339_3 (sequence is synthesized)
caccgtgtactggactccagaacgggtggaactggcacccctcccctcttggcagccagtgggcaagaaccttaccctacgctgccaggtggagggtggggcaccccgggccaacctcac

SEQ ID NO: 96403 - DNA, 120 bp, Artificial Sequence
  ENSG00000090339_4 (sequence is synthesized)
cgtggtgctgctccgtggggagaaggagctgaaacgggagccagctgtgggggagcccgctgaggtcacgaccacggtgctggtgaggagagatcaccatggagccaatttctcgtgccg

SEQ ID NO: 96404 - DNA, 120 bp, Artificial Sequence
  ENSG00000090339_5 (sequence is synthesized)
cactgaactggacctgcggccccaagggctggagctgtttgagaacacctcggccccctaccagctccagacctttgtcctgccagcgactcccccacaacttgtcagcccccgggtcct

SEQ ID NO: 96405 - DNA, 120 bp, Artificial Sequence
  ENSG00000090339_6 (sequence is synthesized)
agaggtggacacgcaggggaccgtggtctgttccctggacgggctgttcccagtctcggaggcccaggtccacctggcactgggggaccagaggttgaaccccacagtcacctatggcaa

SEQ ID NO: 96406 - DNA, 120 bp, Artificial Sequence
  ENSG00000090339_7 (sequence is synthesized)
cgactccttctcggccaaggcctcagtcagtgtgaccgcagaggacgagggcacccagcggctgacgtgtgcagtaatactggggaaccagagccaggagacactgcagacagtgaccat

SEQ ID NO: 96407 - DNA, 120 bp, Artificial Sequence
  ENSG00000090339_8 (sequence is synthesized)
ctacagctttccggcgcccaacgtgattctgacgaagccagaggtctcagaagggaccgaggtgacagtgaagtgtgaggcccaccctagagccaaggtgacgctgaatggggttccagc

SEQ ID NO: 96408 - DNA, 120 bp, Artificial Sequence
  ENSG00000090339_9 (sequence is synthesized)
ccagccactgggcccgagggcccagctcctgctgaaggccaccccagaggacaacgggcgcagcttctcctgctctgcaaccctggaggtggccggccagcttatacacaagaaccagac

SEQ ID NO: 96409 - DNA, 120 bp, Artificial Sequence
  ENSG00000090339_10 (sequence is synthesized)
ccgggagcttcgtgtcctgtatggcccccgactggacgagagggattgtccgggaaactggacgtggccagaaaattcccagcagactccaatgtgccaggcttgggggaacccattgcc

SEQ ID NO: 96410 - DNA, 120 bp, Artificial Sequence
  ENSG00000090339_11 (sequence is synthesized)
cgagctcaagtgtctaaaggatggcactttcccactgcccatcggggaatcagtgactgtcactcgagatcttgagggcacctacctctgtcgggccaggagcactcaaggggaggtcac

SEQ ID NO: 96411 - DNA, 120 bp, Artificial Sequence
  ENSG00000090339_12 (sequence is synthesized)
aggcctcagcacgtacctctataaccgccagcggaagatcaagaaatacagactacaacaggcccaaaaagggacccccatgaaaccgaacacacaagccacgcctccctgaacctatcc

SEQ ID NO: 96412 - DNA, 120 bp, Artificial Sequence
  ENSG00000090339_13 (sequence is synthesized)
cgggacagggcctcttcctcggccttcccatattggtggcagtggtgccacactgaacagagtggaagacatatgccatgcagctacacctaccggccctgggacgccggaggacagggc

SEQ ID NO: 96413 - DNA, 120 bp, Artificial Sequence
  ENSG00000090339_14 (sequence is synthesized)
attgtcctcagtcagatacaacagcatttggggccatggtacctgcacacctaaaacactaggccacgcatctgatctgtagtcacatgactaagccaagaggaaggagcaagactcaag

SEQ ID NO: 96414 - DNA, 120 bp, Artificial Sequence
  ENSG00000090339_15 (sequence is synthesized)
acatgattgatggatgttaaagtctagcctgatgagaggggaagtggtgggggagacatagccccaccatgaggacatacaactgggaaatactgaaacttgctgcctattgggtatgct

SEQ ID NO: 96415 - DNA, 120 bp, Artificial Sequence
  ENSG00000090339_16 (sequence is synthesized)
gaggccccacagacttacagaagaagtggccctccatagacatgtgtagcatcaaaacacaaaggcccacacttcctgacggatgccagcttgggcactgctgtctactgaccccaaccc

SEQ ID NO: 96416 - DNA, 120 bp, Artificial Sequence
  ENSG00000090339_17 (sequence is synthesized)
ttgatgatatgtatttattcatttgttattttaccagctatttattgagtgtcttttatgtaggctaaatgaacataggtctctggcctcacggagctcccagtcctaatcacattcaag

SEQ ID NO: 96417 - DNA, 120 bp, Artificial Sequence
  ENSG00000090339_18 (sequence is synthesized)
gtcaccaggtacagttgtacaggttgtacactgcaggagagtgcctggcaaaaagatcaaatggggctgggacttctcattggccaacctgcctttccccagaaggagtgatttttctat

SEQ ID NO: 96418 - DNA, 120 bp, Artificial Sequence
  ENSG00000090339_19 (sequence is synthesized)
cggcacaaaagcactatatggactggtaatggttacaggttcagagattacccagtgaggccttattcctcccttccccccaaaactgacacctttgttagccacctccccacccacata

SEQ ID NO: 96419 - DNA, 120 bp, Artificial Sequence
  ENSG00000090339_20 (sequence is synthesized)
catttctgccagtgttcacaatgacactcagcggtcatgtctggacatgagtgcccagggaatatgcccaagctatgccttgtcctcttgtcctgtttgcatttcactgggagcttgcac

SEQ ID NO: 96420 - DNA, 120 bp, Artificial Sequence
  ENSG00000090339_21 (sequence is synthesized)
tatgcagctccagtttcctgcagtgatcagggtcctgcaagcagtggggaagggggccaaggtattggaggactccctcccagctttggaagcctcatccgcgtgtgtgtgtgtgtgtat

SEQ ID NO: 96421 - DNA, 65 bp, Artificial Sequence
  ENSG00000090339_22 (sequence is synthesized)
cagctttggaagcctcatccgcgtgtgtgtgtgtgtgtatgtgtagacaagccttgaccttttgg

SEQ ID NO: 96422 - DNA, 120 bp, Artificial Sequence
  ENSG00000090339_23 (sequence is synthesized)
gaccataggctcacaacaccacacctggcaaatttgattttttttttttttccagagacggggtctcgcaacattgcccagacttcctttgtgttagttaataaagctttctcaactgcc

SEQ ID NO: 96423 - DNA, 120 bp, Artificial Sequence
  ENSG00000090339_24 (sequence is synthesized)
tgagccaagatcgagccactgtttgcccagtctagtgcactgggctgctgaatttatttgaccagacacctagcaatagactttgaagttcttttccacttttcactctaagatgctgct

SEQ ID NO: 96424 - DNA, 120 bp, Artificial Sequence
  ENSG00000090339_25 (sequence is synthesized)
cctatctgcttaggtgtctgggcgtgtttgggggagatactgaagaggtagggctcccaggcaggtgcagttcgtctgttaggcaggcagcaaggtccacttcaccagacacccccacct

SEQ ID NO: 96425 - DNA, 120 bp, Artificial Sequence
  ENSG00000090339_26 (sequence is synthesized)
aaaggatcacgcgccccagtcgacgctgagctcctctgctactcagagttgcaacctcagcctcgctatggctcccagcagcccccggcccgcgctgcccgcactcctggtcctgctcgg

SEQ ID NO: 96426 - DNA, 80 bp, Artificial Sequence
  ENSG00000090372_0 (sequence is synthesized)
aggccggccccggggcctccatgatggaggagcgagcggccgccgcggtcgccgccgccgcctcctcctgccgtccgctc

SEQ ID NO: 96427 - DNA, 120 bp, Artificial Sequence
  ENSG00000090372_1 (sequence is synthesized)
ccgggcccggcaggtaagggaggcggcggcggaggcagccccgggcccacggcgggcccggagcccctgagcctgccggggatcctgcactttatccagcacgagtgggcgcgcttcgaa

SEQ ID NO: 96428 - DNA, 120 bp, Artificial Sequence
  ENSG00000090372_2 (sequence is synthesized)
acgagtgggcgcgcttcgaagccgagaaagcccgctgggaggccgagcgcgccgagttacaggctcaggtggccttccttcagggagagaggaaagggcaggagaatctaaagacggacc

SEQ ID NO: 96429 - DNA, 120 bp, Artificial Sequence
  ENSG00000090372_3 (sequence is synthesized)
tggtgcggcggatcaagatgctagagtatgcgctgaagcaggaaagggccaaatatcataaactgaagtttgggacagacctgaaccagggggagaagaaagcagatgtgtcagaacaag

SEQ ID NO: 96430 - DNA, 120 bp, Artificial Sequence
  ENSG00000090372_4 (sequence is synthesized)
tctccaatggccccgtggaatcggtcaccctggagaacagcccgttggtgtggaaggaggggcggcagcttctccgacagtacctggaagaggtgggctacacagacaccatcctcgaca

SEQ ID NO: 96431 - DNA, 120 bp, Artificial Sequence
  ENSG00000090372_5 (sequence is synthesized)
tgcggtccaagcgcgtccgttccctgctgggccgctcgctggagctcaacggggcagtggagccgagtgaaggggcccccagggctccaccaggccctgcagggctcagtggtggggagt

SEQ ID NO: 96432 - DNA, 120 bp, Artificial Sequence
  ENSG00000090372_6 (sequence is synthesized)
cgctgctggtgaaacagatcgaggagcagataaagaggaacgcggcaggcaaagatggcaaagagcgcttgggcggctcagtgctggggcagatccccttcctgcagaactgcgaggacg

SEQ ID NO: 96433 - DNA, 120 bp, Artificial Sequence
  ENSG00000090372_7 (sequence is synthesized)
aagacagcgacgaggacgatgagctggacagcgtgcagcacaagaagcagcgtgtgaagctcccatccaaggctctggtgcccgaaatggaagacgaggatgaggaagacgactctgagg

SEQ ID NO: 96434 - DNA, 120 bp, Artificial Sequence
  ENSG00000090372_8 (sequence is synthesized)
atgctatcaatgagtttgatttcctgggctcaggagaggatggggaaggggctccagaccctcggcggtgcactgtggatgggagcccccatgagctggaaagccgtcgggtcaaactcc

SEQ ID NO: 96435 - DNA, 120 bp, Artificial Sequence
  ENSG00000090372_9 (sequence is synthesized)
aaggcattctggctgacctgcgggatgtggatgggctgcccccaaaagtgactggcccgcctcctggcacaccccagccccggccacatgaagacgtcttcatcatggacactatcgggg

SEQ ID NO: 96436 - DNA, 120 bp, Artificial Sequence
  ENSG00000090372_10 (sequence is synthesized)
gcggggaggtgagcctgggggacttggcagatctcaccgtcaccaacgacaacgacctcagctgcgatctgtctgacagcaaagatgcttttaagaagacgtggaaccccaagttcaccc

SEQ ID NO: 96437 - DNA, 120 bp, Artificial Sequence
  ENSG00000090372_11 (sequence is synthesized)
tgcgctcgcactacgacggcattcgttccctggccttccaccacagccagtcggctctgctcaccgcctccgaggacggcacgctcaagctctggaacctgcagaaggcggtcacggcca

SEQ ID NO: 96438 - DNA, 120 bp, Artificial Sequence
  ENSG00000090372_12 (sequence is synthesized)
agaagaatgcggcgctagatgtggaacctatacatgctttccgggctcacaggggcccagtgttggctgtggctatgggcagcaacagtgaatactgctacagtggcggggcagatgcct

SEQ ID NO: 96439 - DNA, 120 bp, Artificial Sequence
  ENSG00000090372_13 (sequence is synthesized)
ccaagcgtgctgagccacgtcctggagggccacggggacgccgtgtggggcctggccttcagtcccacctcccagcgcctggcctcctgttctgctgatggcaccgtccgcatctgggac

SEQ ID NO: 96440 - DNA, 120 bp, Artificial Sequence
  ENSG00000090372_14 (sequence is synthesized)
cccagcagcagcagcccggcctgcctctgcaccttccccacagccagcgagcacggggtccccacctcagtggccttcaccagcaccgagcctgcccacatcgtggcctccttccgctct

SEQ ID NO: 96441 - DNA, 120 bp, Artificial Sequence
  ENSG00000090372_15 (sequence is synthesized)
ggcgacaccgtcttgtatgacatggaggttggcagtgccctcctcacgctggagtcccggggcagcagcggtccaacccagatcaaccaagtggtgagtcatccaaaccagcctctcacc

SEQ ID NO: 96442 - DNA, 120 bp, Artificial Sequence
  ENSG00000090372_16 (sequence is synthesized)
atcaccgcccacgacgacaggggcatccgcttcctggacaatcggacaggtaagccggtgcactccatggttgcacacctggacgcagtcacctgcctagccgtggaccccaacggcgca

SEQ ID NO: 96443 - DNA, 120 bp, Artificial Sequence
  ENSG00000090372_17 (sequence is synthesized)
ttcctgatgtcaggaagccatgactgctccctgcgtctctggagcctggacaacaaaacgtgcgtgcaggagatcacggcccaccgcaagaagcacgaggaggccatccacgctgttgcc

SEQ ID NO: 96444 - DNA, 120 bp, Artificial Sequence
  ENSG00000090372_18 (sequence is synthesized)
tgccaccccagcaaggccctcattgccagtgctggcgctgatgccctggccaaggtcttcgtatgatgcccacctggccctgccctggccgccacgctggctggggtgtagggccgggca

SEQ ID NO: 96445 - DNA, 120 bp, Artificial Sequence
  ENSG00000090372_19 (sequence is synthesized)
ggtggggctgaggggactcccagcctcgctggaggtgcagaggcctggcctctgtctgtttgccatggagcctggtggtgctaacggccctttccccaggaatccctccccaacggctgc

SEQ ID NO: 96446 - DNA, 120 bp, Artificial Sequence
  ENSG00000090372_20 (sequence is synthesized)
cttccccaagcatccagcctggggatgggcccctttcaggaatcacccccgaggatggcctcggggtttccccctgtgccctgacagccgctcctggtatcagagctgctttccagaggg

SEQ ID NO: 96447 - DNA, 120 bp, Artificial Sequence
  ENSG00000090372_21 (sequence is synthesized)
cagcacagccagggccgggtgtctttagggatcagtttttccaagactccagaaggtgccaggttctccccttgagctcctgctcccccatcccccatcctcccagacctgggcaggagc

SEQ ID NO: 96448 - DNA, 120 bp, Artificial Sequence
  ENSG00000090372_22 (sequence is synthesized)
tgtgctgggagaaagggtggcagccgggagcctcagagctgagccccggcctggctgcccctcccctccggccctctccactgctttccagacactaaccaaggcttccaggccagggat

SEQ ID NO: 96449 - DNA, 120 bp, Artificial Sequence
  ENSG00000090372_23 (sequence is synthesized)
tgcccaacactcctagggcagccctcccagcgccccatggggtcgcccatgggtagagacggctttcttgtgcccctccctggggcatggagggtggagtgggcctcgggtccccctgaa

SEQ ID NO: 96450 - DNA, 120 bp, Artificial Sequence
  ENSG00000090372_24 (sequence is synthesized)
ctccctgtatatctgtataaataacgggattttcatggcgccgccccacccgcattatcactgtgtgatggtctcagtcagtctcctccctgtctccactctttccctctatttatttca

SEQ ID NO: 96451 - DNA, 120 bp, Artificial Sequence
  ENSG00000090372_25 (sequence is synthesized)
ctctcttgtttggttctaccctgcaccctcggtccccttccaggttcctgtttataagccccaacccctctgtccccatcttgtatgtgaaaacttgtctcaataaaccctttggagtaa

SEQ ID NO: 96452 - DNA, 120 bp, Artificial Sequence
  ENSG00000090372_26 (sequence is synthesized)
agggttaccatgacaaccaacctggccggcaatcagagaggatggggccactgctggtcgccctttctctcagagtaaaagtaattgtccaggagagtggtgtttgggtgtggaaggggt

SEQ ID NO: 96453 - DNA, 120 bp, Artificial Sequence
  ENSG00000090372_27 (sequence is synthesized)
aaggctctttctctggggcgaagtgggaggaggggggcagaaagcggccccttcctcagtctcactccagcgagggggaccgtcgcgcggggcctgggtctccctcgccctcctcggggc

SEQ ID NO: 96454 - DNA, 120 bp, Artificial Sequence
  ENSG00000090372_28 (sequence is synthesized)
tccctcgccctcctcggggcgcgatctcccacccgccggcccccgcgcgggcacgctacccttcggtgtagacccgggtgggcgaggctcgcgctcgccgccggccccccttcctactgt

SEQ ID NO: 96455 - DNA, 120 bp, Artificial Sequence
  ENSG00000090372_29 (sequence is synthesized)
agtcggggagaggcaggtgggagggccgcatcttcctccctgtcctgtgactcctagctaggagggctctcaggatacgtgggatgggtggctggggcctgaggcctaggcaaggcagtg

SEQ ID NO: 96456 - DNA, 120 bp, Artificial Sequence
  ENSG00000090372_30 (sequence is synthesized)
acctgcccactgccccacggaggggcccaatcaacctcctctcctctgcccattccccccctcccccagggccagagcttcacagccccacagagtggcagggggccctcagtgtgggga

SEQ ID NO: 96457 - DNA, 120 bp, Artificial Sequence
  ENSG00000090372_31 (sequence is synthesized)
ataaccacaaaggtggaagcgaggggaaggctgctccccaccacctcgcccccaccgctggggaagggttaccatgacaaccaacctggccggcaatcagagaggatggggccactgctg

SEQ ID NO: 96458 - DNA, 67 bp, Artificial Sequence
  ENSG00000090372_32 (sequence is synthesized)
ccaacctggccggcaatcagagaggatggggccactgctggtcgccctttctctcagagtaaaaacg

SEQ ID NO: 96459 - DNA, 90 bp, Artificial Sequence
  ENSG00000090372_33 (sequence is synthesized)
gtgaatcatcacagtaactcaccatgtttggaccagcaaattcttaatgttattattatttattattattttttgagacagtttctgctc

SEQ ID NO: 96460 - DNA, 76 bp, Artificial Sequence
  ENSG00000090372_34 (sequence is synthesized)
ctggaagaggtgggctacacagacaccatcctcgacatgcggtccaagcgcgtccgttccctgctgggccgctcgc

SEQ ID NO: 96461 - DNA, 120 bp, Artificial Sequence
  ENSG00000090372_35 (sequence is synthesized)
agcacgctggccgcggggctcctgagagaggcgactcgagccctggaggggaggctaagagaactcgggaaagggagccgagccgagccacccactcttgtccctaagctccagaagtag

SEQ ID NO: 96462 - DNA, 120 bp, Artificial Sequence
  ENSG00000090372_36 (sequence is synthesized)
cagaaaccccgcattctgagtctctgcacgcccatgcctagtactgccaggtgtgctgagccccgcagtccagtcaggggcgtcctgtgagaatcactgggggagccctgggcatgcagg

SEQ ID NO: 96463 - DNA, 120 bp, Artificial Sequence
  ENSG00000090372_37 (sequence is synthesized)
gtgcttggcaggaacccggggtcgtgtctgtggcacatttctctcacaccctgggcggaatgcagtgggacggctggtccccacagcgggcttggcttgtaaagcttttctattggagca

SEQ ID NO: 96464 - DNA, 120 bp, Artificial Sequence
  ENSG00000090372_38 (sequence is synthesized)
agcaccctcacacatagcattgtgtgtgtgtacaagggcttccactggaaatagccttgacggggaactgctggagcgagggtgtgcttatgtcagattttggtgtatgctcttaagtgg

SEQ ID NO: 96465 - DNA, 120 bp, Artificial Sequence
  ENSG00000090372_39 (sequence is synthesized)
ccccttaagaggttgtctcggtttgcattggcccctgtggtacatgaagaagcccaggggatgtctgacccacgtggctctgcacccctgcaggtacctggaagaggtgggctacacaga

SEQ ID NO: 96466 - DNA, 120 bp, Artificial Sequence
  ENSG00000090372_40 (sequence is synthesized)
agtcctggctcttcctgaagtggggccgccagccctccagggcgggcgtccagctctggctggcctcaaggagggaacaggatgaggacccagtcggggagaggcagaaagccgtcgggt

SEQ ID NO: 96467 - DNA, 120 bp, Artificial Sequence
  ENSG00000090372_41 (sequence is synthesized)
aacctggccggcaatcagagaggatggggccactgctggtcgccctttctctcagagtaaaagtaattgtccaggagagtggtgtttgggtgtggaagggacgaagtctggctctgtcgc

SEQ ID NO: 96468 - DNA, 120 bp, Artificial Sequence
  ENSG00000090372_42 (sequence is synthesized)
gtcgccctttctctcagagtaaaagtaattgtccaggagagtggtgtttgggtgtggaaggggctcaggtggccttccttcagggagagaggaaagggcaggagaatctaaagacggacc

SEQ ID NO: 96469 - DNA, 120 bp, Artificial Sequence
  ENSG00000090372_43 (sequence is synthesized)
tttgatccccagtttacagatgtgggccctgatgcccagacgctttgtaacttggccattgaagctctgtaacatcagtccaggtctacctgggggtacccgtgggacttctgtgctccc

SEQ ID NO: 96470 - DNA, 120 bp, Artificial Sequence
  ENSG00000090372_44 (sequence is synthesized)
accctgttgtctctggataagggcattgaggccagcaacgtggctgtgcttagaagggatggagtgtgacgtgggtgggtggagaaggagactggaggtcgctgtgggggtgaagggtga

SEQ ID NO: 96471 - DNA, 120 bp, Artificial Sequence
  ENSG00000090372_45 (sequence is synthesized)
ggcctgcagtgagtgcagcagtgagtgtgtgtgcacagaggcgcaggccgtggtgttggaggctgtggctgggctctgcctccgggcctgtgctggcagcctctggtgggtgaggggctg

SEQ ID NO: 96472 - DNA, 120 bp, Artificial Sequence
  ENSG00000090372_46 (sequence is synthesized)
gtcagtgagctccagcccagtgcccagacagggctctattctgggggccactagacagtggagggagctgagcctttgccctgcctgatcctcttgaccctaaattaaacttctcctcgc

SEQ ID NO: 96473 - DNA, 120 bp, Artificial Sequence
  ENSG00000090372_47 (sequence is synthesized)
cagggccctgcccagcctgccgtcctctcccctcttctccccaagtccctgctaaggctcttgtggccacccccacctcctgcctcaggacctttcccgcctgtccttctgcctggaagg

SEQ ID NO: 96474 - DNA, 120 bp, Artificial Sequence
  ENSG00000090372_48 (sequence is synthesized)
ctccctgcattcctcctggggccattctgtcctcacactgaccggctgggttgctttcttctttctcttcctgttgcccagctgcagcgtcagtgctgcggggcagggagagttgcctgt

SEQ ID NO: 96475 - DNA, 120 bp, Artificial Sequence
  ENSG00000090372_49 (sequence is synthesized)
tttgttcactgcccctgccgccctggggctcagtgtgcagtagctgctcaagaaatgctgggggatgagatggactgtggacaggaggggaccagggttctcctttgggcgggccacagg

SEQ ID NO: 96476 - DNA, 120 bp, Artificial Sequence
  ENSG00000090372_50 (sequence is synthesized)
aggtgatgagcagagggtgagagaggagagttgagccccacttcccctgaggcctttggacaaggccaggtgaggggttccagggctgcgtctgagcgaggagcccagtgaccacccctt

SEQ ID NO: 96477 - DNA, 120 bp, Artificial Sequence
  ENSG00000090372_51 (sequence is synthesized)
cccagcagcagcagcccggcctgcctctgcaccttccccacagccagcggtgagtgggggccccggtgcctcaccctggagctgtgcgggatctggaggctatcagagtggttcctgctg

SEQ ID NO: 96478 - DNA, 120 bp, Artificial Sequence
  ENSG00000090372_52 (sequence is synthesized)
aggccccaggcctcccacccactgtcccccaccctggggcagggctgggtctgagggtccattcagcagccttctcttccctgtgccctcagagcacggggtccccacctcagtggcctt

SEQ ID NO: 96479 - DNA, 120 bp, Artificial Sequence
  ENSG00000090372_53 (sequence is synthesized)
cacaccccagccccggccacatgaagctgtgattcttcatcttgtcctctccccgtctctctctcttgctctttatctctttctctgcctctctctgtcattctctctctccctggccct

SEQ ID NO: 96480 - DNA, 120 bp, Artificial Sequence
  ENSG00000090372_54 (sequence is synthesized)
ttctctgaggctttttcttaggatgaaatgcgcattcctccggggctcaccacccagcacctgtctcatcccctgccactctccttgcctcctgcagcctgtaccactgacctctcaggc

SEQ ID NO: 96481 - DNA, 120 bp, Artificial Sequence
  ENSG00000090372_55 (sequence is synthesized)
ctgggctcgcccttgctgcctcagggcctctgcacgggccctttccctctccagggccctctccttatcttgtgaagtcctgctggctcgtgcttcctcaggaaagcctcagtggccccc

SEQ ID NO: 96482 - DNA, 120 bp, Artificial Sequence
  ENSG00000090372_56 (sequence is synthesized)
agggaggagggcaggctgcctgatgtctctctgtgcatctttaattcattgccctgctcatggctgatgatcctgcacacttgtgggatggtccagttgtgtcccccattccccttcctc

SEQ ID NO: 96483 - DNA, 120 bp, Artificial Sequence
  ENSG00000090372_57 (sequence is synthesized)
tcaactgcaagaccccaaggggtcaggctcacctttgtctctccagaacccagcgcagtgtggggacttgttgggcgagcatggagactctgcccagcagaggaaggggagagttcccgg

SEQ ID NO: 96484 - DNA, 120 bp, Artificial Sequence
  ENSG00000090372_58 (sequence is synthesized)
ctggagcccaggctctgagggcattcctgccagggtcatgtgggtggaagacaggggccctcaagccctgggtgtcggtgtctgcatgactgctgggatggatgcgaagacactgaggca

SEQ ID NO: 96485 - DNA, 120 bp, Artificial Sequence
  ENSG00000090372_59 (sequence is synthesized)
aggtgaggcctagccccttgtgctcgtagtgggtggggagggccagaggcaggcagcagagatgcttgcgtccctgtgggaggctctgggagtctctcgtccagtcctttcactctctca

SEQ ID NO: 96486 - DNA, 120 bp, Artificial Sequence
  ENSG00000090372_60 (sequence is synthesized)
agaggctggagggaggaacaggaggaggaagctgagaaagaggctgagcctgtgcggcgtgtcagtgtcgttgtgggaggaaggccggtgagaatggagtcctgtgtcccgctgcaagtg

SEQ ID NO: 96487 - DNA, 120 bp, Artificial Sequence
  ENSG00000090372_61 (sequence is synthesized)
cagcgagtgttctgaggatggagtggagctctggtgatggcagccgtgaggcgagagggtacatctgcagtgacctctgcacccgttggtaactggcagttgacaagacctccagggcat

SEQ ID NO: 96488 - DNA, 120 bp, Artificial Sequence
  ENSG00000090376_0 (sequence is synthesized)
aggatttccgcggttgtgtaacggcctgtcgcaggcgtgcagggacctggactccgcctcgtccccggggctcgggcagccgagccatggcggggaactgtggggcccgcggcgcgctgt

SEQ ID NO: 96489 - DNA, 120 bp, Artificial Sequence
  ENSG00000090376_1 (sequence is synthesized)
cggcgcacacgctgctgttcgacctgccgcccgcgctgctcggagagctctgcgctgttctggacagctgcgacggcgcgctgggctggcgcggcctggcagagagactttcaagcagct

SEQ ID NO: 96490 - DNA, 120 bp, Artificial Sequence
  ENSG00000090376_2 (sequence is synthesized)
ggctggatgttcgtcatattgaaaagtatgtagaccaaggtaaaagtggaacaagagaattactttggtcctgggcacagaaaaacaagaccatcggtgaccttttacaggtcctccagg

SEQ ID NO: 96491 - DNA, 120 bp, Artificial Sequence
  ENSG00000090376_3 (sequence is synthesized)
agatgggacatcgtcgagctattcatttaattacaaactatggagcagtgttgagtccttcagagaagagttatcaggaaggtggatttccaaatatattattcaaggaaacagccaatg

SEQ ID NO: 96492 - DNA, 120 bp, Artificial Sequence
  ENSG00000090376_4 (sequence is synthesized)
tcaccgtggataatgttcttattcctgaacataatgaaaaaggaatactgcttaaatcttccatcagctttcaaaatatcatagaaggaactagaaatttccacaaagacttcctaattg

SEQ ID NO: 96493 - DNA, 120 bp, Artificial Sequence
  ENSG00000090376_5 (sequence is synthesized)
gagaaggagagatttttgaggtatacagagtggagattcaaaacctaacatatgctgtcaaattatttaaacaggagaaaaaaatgcagtgtaagaagcattggaagaggtttttatctg

SEQ ID NO: 96494 - DNA, 120 bp, Artificial Sequence
  ENSG00000090376_6 (sequence is synthesized)
agcttgaagttttactactgtttcatcacccaaacatactagagttggctgcatattttacagagactgagaagttctgtctgatttatccatacatgagaaatggaacactttttgaca

SEQ ID NO: 96495 - DNA, 120 bp, Artificial Sequence
  ENSG00000090376_7 (sequence is synthesized)
gattgcagtgtgtaggtgacacggccccactcccttggcacattcgaatcggtatattaataggaatatccaaagccattcactacctgcacaacgttcaaccatgctcggtcatctgtg

SEQ ID NO: 96496 - DNA, 120 bp, Artificial Sequence
  ENSG00000090376_8 (sequence is synthesized)
gcagtatatcaagtgcaaacatccttttggatgatcagtttcaacccaaactaactgattttgccatggcacacttccggtcccacctagaacatcagagttgtaccataaatatgacca

SEQ ID NO: 96497 - DNA, 120 bp, Artificial Sequence
  ENSG00000090376_9 (sequence is synthesized)
gcagcagcagtaaacatctgtggtacatgccagaagagtacatcagacaggggaaactttccattaaaacagatgtctacagctttggaattgtaataatggaagttctaacaggatgta

SEQ ID NO: 96498 - DNA, 120 bp, Artificial Sequence
  ENSG00000090376_10 (sequence is synthesized)
gagtagtgttagatgatccaaaacatatccagctgcgggatctccttagagaattgatggagaagagaggcctggattcatgtctctcatttctagataagaaagtgcctccctgccctc

SEQ ID NO: 96499 - DNA, 120 bp, Artificial Sequence
  ENSG00000090376_11 (sequence is synthesized)
ggaatttctctgccaagctcttctgtttggcaggccggtgtgctgcaacgcgggcaaagttaagaccatcaatggatgaagttttaaatactcttgaaagtactcaagccagcttgtatt

SEQ ID NO: 96500 - DNA, 120 bp, Artificial Sequence
  ENSG00000090376_12 (sequence is synthesized)
ttgctgaagatcctcccacatcactaaagtccttcaggtgtccttctcctctattcctggagaatgtaccaagtattccagtggaagatgatgaaagccagaataacaatttactacctt

SEQ ID NO: 96501 - DNA, 120 bp, Artificial Sequence
  ENSG00000090376_13 (sequence is synthesized)
ctgatgaaggcctgaggatagacagaatgactcagaaaactccttttgaatgcagccagtctgaggttatgtttctgagcttggacaaaaagccagagagcaagagaaatgaggaagctt

SEQ ID NO: 96502 - DNA, 120 bp, Artificial Sequence
  ENSG00000090376_14 (sequence is synthesized)
gcaacatgcccagttcttcttgtgaagaaagttggttcccaaagtatatagttccatcccaggacttaaggccctataaggtaaatatagatccttcttcagaagctccagggcattctt

SEQ ID NO: 96503 - DNA, 120 bp, Artificial Sequence
  ENSG00000090376_15 (sequence is synthesized)
gcaggagcaggccagtggagagcagctgttcctccaaattttcctgggatgaatatgaacagtacaaaaaagaataaattctaccagaagataaagaaaaaagcaagtattgcataggca

SEQ ID NO: 96504 - DNA, 120 bp, Artificial Sequence
  ENSG00000090376_16 (sequence is synthesized)
cctgagcataggtatgaccttgggaagacattggctccataagcaatgccaagagaatgatcaatagtgagtttgggtgatgcagataaacaatctggataattccatttcttttttccc

SEQ ID NO: 96505 - DNA, 120 bp, Artificial Sequence
  ENSG00000090376_17 (sequence is synthesized)
aaaccctcaaacagagtgccttaaaaaattgttttatcaggataattgtctcatgaccaaatccacgctcaattagagccattcaaaattccttaagatcatgggttctgacttcagcca

SEQ ID NO: 96506 - DNA, 120 bp, Artificial Sequence
  ENSG00000090376_18 (sequence is synthesized)
aacaaaacaatcaaaacctaccaaaaagggactggattgtaatgtcctctccatcatcctcagtgtgagtcctcagagcctccatctgccaagaacattcagttggattccatcgtttgg

SEQ ID NO: 96507 - DNA, 120 bp, Artificial Sequence
  ENSG00000090376_19 (sequence is synthesized)
tttagcttgcttgcacgggttgtaggaaatgtctaatttgtaaatgttaatagatacctttggaaagaatcaccttgttattctgattgacccctcttgttttttggttaatccctgact

SEQ ID NO: 96508 - DNA, 120 bp, Artificial Sequence
  ENSG00000090376_20 (sequence is synthesized)
agcctgcttgtctgaaaatgagccaggttcacccttagctacggcatgctctgggttgaaaggggatttcttcccaagatctatcctaaactcttaggacagtttatcctgtattgacta

SEQ ID NO: 96509 - DNA, 120 bp, Artificial Sequence
  ENSG00000090376_21 (sequence is synthesized)
ttattacagctttttaaaaacagacttagtgacctattatatcttaaggagactatgtgaaatgtccatcaagtaatttttattcctgagaaaatggctggtcaagggcctaggtcagct

SEQ ID NO: 96510 - DNA, 120 bp, Artificial Sequence
  ENSG00000090376_22 (sequence is synthesized)
ttttgtttaatctacacctttcaactctgggccttcattcctgctgtttcttggatctccctcttttgaaatcctaccaatcatcagagctctacaaaacagccacctcctggaagcttc

SEQ ID NO: 96511 - DNA, 120 bp, Artificial Sequence
  ENSG00000090376_23 (sequence is synthesized)
cctaatctctacaaccagaagtactccctttatcagtatttccacagcaatttctttgtatttctattttatatttatcactttctgaattatatcaaagctgcttgtcttatctctttt

SEQ ID NO: 96512 - DNA, 120 bp, Artificial Sequence
  ENSG00000090376_24 (sequence is synthesized)
caggcgtgagccaccgcgcccagccttcatctcttttactaggttgtaaactccctatattagttttctattgtttttgtaacacattatcacaaatttagtgacttaaagtaacataaa

SEQ ID NO: 96513 - DNA, 120 bp, Artificial Sequence
  ENSG00000090376_25 (sequence is synthesized)
tttagtgacttaaagtaacataaattaattattttgcagttctggaggtcagaattccttagcattctttctggaggctgttggggagaactcactgccttgccttttccagcttctaga

SEQ ID NO: 96514 - DNA, 120 bp, Artificial Sequence
  ENSG00000090376_26 (sequence is synthesized)
ggccacctgccttctttggctcatggcctcttcctccgtcttcaaagccagcaacgtgacatttcagatctccctctctctgtctgtctcaccgcatctcttcactaccctcttcctctc

SEQ ID NO: 96515 - DNA, 120 bp, Artificial Sequence
  ENSG00000090376_27 (sequence is synthesized)
attctggcccttctgcatgtcttttataaagacctttgtgatttcactgggcccactcatataagccaggaaaatctctgtgtctcagatccttaatttaattacacctgcaaagtccgt

SEQ ID NO: 96516 - DNA, 120 bp, Artificial Sequence
  ENSG00000090376_28 (sequence is synthesized)
tttctcgtgtaaagtaacatattcacaggtttctggaattgggacgtggacatcttcgggggaccattactctgtctgtcatactccctgagtgtgtaagggccatctcttcagagccta

SEQ ID NO: 96517 - DNA, 120 bp, Artificial Sequence
  ENSG00000090376_29 (sequence is synthesized)
atgtgtcatcctacacagagcaggtgtttccttataaattaagttgaattaaattacccctatgaagccacataatcaataattcagctataataaacattgccgaataaattaacaaag

SEQ ID NO: 96518 - DNA, 120 bp, Artificial Sequence
  ENSG00000090376_30 (sequence is synthesized)
ggaggataatgactccttatgatgatggatagaaacactgaagaaaaccattttcagaggatttactgaattttcctctccaaggagcttgtaatagaagggtaaacctctagtttcttg

SEQ ID NO: 96519 - DNA, 120 bp, Artificial Sequence
  ENSG00000090376_31 (sequence is synthesized)
tccagcagaggaataggctcatgtcttttgttttattttatttttttggtgagtcagtatggttgggttaatcatattcacattagattccatgttgaagaacaactaatcaaagaagaa

SEQ ID NO: 96520 - DNA, 120 bp, Artificial Sequence
  ENSG00000090376_32 (sequence is synthesized)
gagttacaattttccaaaaaagcacgaagtgagattaaaaccacagtaagtcttagtctgactgacaggctttatacaggccctcggtaagcagttgggagaacccatgcccaccactgc

SEQ ID NO: 96521 - DNA, 120 bp, Artificial Sequence
  ENSG00000090376_33 (sequence is synthesized)
tctgtacggtatctggctgctcagagctctctgattcacaaaagagatcatcaagaattgactctgtgttaaactgtttttcacttagaatatggacccccaccaatacattcaatgaag

SEQ ID NO: 96522 - DNA, 120 bp, Artificial Sequence
  ENSG00000090376_34 (sequence is synthesized)
ggtcattaaggaagctctgattaacaccaggcccatgcagttactccgcacatataatctgtgggtattatgttgatttgaacttgcttagctgacttaaagcagggtttctcaaactgt

SEQ ID NO: 96523 - DNA, 120 bp, Artificial Sequence
  ENSG00000090376_35 (sequence is synthesized)
agtatgcatcagaatgacttggaaagctggttaaaaacgcagattgctgggtccacccagcttctgatgcaataggtctggggttagaaattttgctttctaatgagttcccaggtgatg

SEQ ID NO: 96524 - DNA, 120 bp, Artificial Sequence
  ENSG00000090376_36 (sequence is synthesized)
ctgatgccaatgatgtgaagcccgctcttcacatccgtgaaaatcgctgccttaaggtgctcttaaattgttatagattggtagatcctacctttccatcactggtatgttttttgagaa

SEQ ID NO: 96525 - DNA, 120 bp, Artificial Sequence
  ENSG00000090376_37 (sequence is synthesized)
aaggatcctttcttttcattctgttatattcatcctattacataggatgttggttagcacagagtgggagctctagaaagattgttgaccaatcatcttattgactagaccatctttcta

SEQ ID NO: 96526 - DNA, 120 bp, Artificial Sequence
  ENSG00000090376_38 (sequence is synthesized)
gagtataactattttggacacctcaaagatgaagtcagataagctggcagtgacctgattaacgttgtggtaagcagatgccactgtggctgggaagtaccaaatcttctgttgagtgat

SEQ ID NO: 96527 - DNA, 120 bp, Artificial Sequence
  ENSG00000090376_39 (sequence is synthesized)
tcagtcttcctgactagatttgccttctagtgggtgtattaataagcgttagttgatatgaattaaatgttgcaactttctatgggtaataagaggatacctttatagtttcatgatgtg

SEQ ID NO: 96528 - DNA, 120 bp, Artificial Sequence
  ENSG00000090376_40 (sequence is synthesized)
gagaccaagatacataagaaagcaagaatgagtctccgggtgttccctctgatcagcaaacatgaattcataatttcatttactctcatttttgtaatgcactctgagcaatcctccagg

SEQ ID NO: 96529 - DNA, 120 bp, Artificial Sequence
  ENSG00000090376_41 (sequence is synthesized)
cagatcctatttactaagcttcaggcttttgtcccattttataatgcccaaacacatggagaaaacattttgttgtttttaaaaacaggtatgggatttctgatataatcaattttattg

SEQ ID NO: 96530 - DNA, 120 bp, Artificial Sequence
  ENSG00000090376_42 (sequence is synthesized)
acttcttgggagttgtaatgatctgtgactcactgcataatattgtagttttatagggtggcacatcaccctgtgtaaaacaactttaatgacctgaggactgatgagtacaggaagtga

SEQ ID NO: 96531 - DNA, 120 bp, Artificial Sequence
  ENSG00000090376_43 (sequence is synthesized)
ggtttatcatgagtagcatttattaagcatctgctagaatcaaagcactgcattagctactaaggtacaaagtaagacacagtttaataaggaagacagggcatctacccaagtcaacag

SEQ ID NO: 96532 - DNA, 120 bp, Artificial Sequence
  ENSG00000090376_44 (sequence is synthesized)
ttcagtgacatctgttatttgaaccacacaccaatgcaaccgaagtaaatgctgaaagggtgagaagaaggaatagattactatgcatttttgagaggatgaagaaggcttcttggagaa

SEQ ID NO: 96533 - DNA, 120 bp, Artificial Sequence
  ENSG00000090376_45 (sequence is synthesized)
ggtttctgaaaagagatacggaattaagagaaatagaaaagagcactgacgaagcactcaggatggctattcaaggaattggggatccacagcagctgtgcacaaccatccctaatgcca

SEQ ID NO: 96534 - DNA, 120 bp, Artificial Sequence
  ENSG00000090376_46 (sequence is synthesized)
gaaaaatggggtaagggtgaagggaactgggtctagagctttgcatgtttttttctggttaacccttagagtcaccctgaaggtgtggatcccatcttataataaggtgaggacactgag

SEQ ID NO: 96535 - DNA, 120 bp, Artificial Sequence
  ENSG00000090376_47 (sequence is synthesized)
tcaggaaactaacttgctaaaatcaagtcctcccagtcctcccatcaggtccttccagatctggaggagccaggatttgaactcacatttgtctgacttcaaaatccatgctttttcttg

SEQ ID NO: 96536 - DNA, 120 bp, Artificial Sequence
  ENSG00000090376_48 (sequence is synthesized)
tgttccaaattgcacaatggagtcactgccagttcaagctcctatgaaaagggatggatgtgaaaagtcatttgttgattccacagatttttagtaggtaccatgtctcctgcctttatc

SEQ ID NO: 96537 - DNA, 120 bp, Artificial Sequence
  ENSG00000090376_49 (sequence is synthesized)
actatcctactcctctgctacaacttctctgctacaggcacccactgcagttacttgatatgagttaaatgaatccatccatccaaacttccattcattgaataaatacttagcaatggc

SEQ ID NO: 96538 - DNA, 120 bp, Artificial Sequence
  ENSG00000090376_50 (sequence is synthesized)
ttcctttgtatcaggcactattctaggagctggggctacagtgcagatggaaaccagcaaagctcactgccctcatggagcttatatgtaagtgaataaatctcagggtggttctcctgt

SEQ ID NO: 96539 - DNA, 120 bp, Artificial Sequence
  ENSG00000090376_51 (sequence is synthesized)
cataggtcctggctcctctgccagctcttccaaatgggttcagagaggttttctccttgtcctgttgtgtaactgataatcccatggtggacctcactttgctattcatatgcactaagt

SEQ ID NO: 96540 - DNA, 120 bp, Artificial Sequence
  ENSG00000090376_52 (sequence is synthesized)
agtttatggtgtgctttgtggctggcaattgtgacagattctattcttctattggtatgtggtttctttggggcatttgtttggatactgatggcatcttccgggggtctgaggcaccta

SEQ ID NO: 96541 - DNA, 120 bp, Artificial Sequence
  ENSG00000090376_53 (sequence is synthesized)
cacaaacctcaggtcactatcacgtgatactggagttgcctgttaaattatatttcttcttccacaaaactgcaggttccctgagggaaaggtctatgtcctgctcatttttggatccct

SEQ ID NO: 96542 - DNA, 120 bp, Artificial Sequence
  ENSG00000090376_54 (sequence is synthesized)
aatggctggcacagtacctggtgcataatatggttcaacaaatatttgtaaaatgaatgaatcaaatagtccttcaaagcatcttcagaatcaagattgtcatctagattgcacccgaag

SEQ ID NO: 96543 - DNA, 120 bp, Artificial Sequence
  ENSG00000090376_55 (sequence is synthesized)
tttatctttctagtattcagaatataatcaatcattgcttaaattattccatttcatcattcttgaataaaagctactaattttaaatactaatatctgagatatcttcgaaaagaagat

SEQ ID NO: 96544 - DNA, 120 bp, Artificial Sequence
  ENSG00000090376_56 (sequence is synthesized)
tagtcgttgtatgtgttgcttataaattttctctatggtggaaaatattcccaaaccatgtctaagcaatgaaaaaccagtgttctggcaggaaataaactgatgtttgttgtgttttgt

SEQ ID NO: 96545 - DNA, 120 bp, Artificial Sequence
  ENSG00000090376_57 (sequence is synthesized)
atctgtcttcccgttccaaatcatttatatatacttgatggtctgtgggcttgacttgcaagtattttcctgggagacatttttattcaaaagacctgtattgcctgccaaaccttcatt

SEQ ID NO: 96546 - DNA, 120 bp, Artificial Sequence
  ENSG00000090376_58 (sequence is synthesized)
taagagactcattatggatgtcatctgcatcattgcaaacttttctggtcgtctctataaatagcaagataatatttacagagttttacattggctcttgaattttaaaatattcttata

SEQ ID NO: 96547 - DNA, 120 bp, Artificial Sequence
  ENSG00000090376_59 (sequence is synthesized)
gacaaacattaattggaatggggggtaaggaggtaggaatggcttacttgcggaaatgcaggctcattgttgtgtctagtaggtgctaggtgcattcacacatctcttaagctttaaaca

SEQ ID NO: 96548 - DNA, 120 bp, Artificial Sequence
  ENSG00000090376_60 (sequence is synthesized)
acctattgagccggtttccatttccttgatctattagatttaaaaaaatgaagcataaaggagttggctcttgccctaagtcatactactgatggaatgagaatacaaaccaaaaacact

SEQ ID NO: 96549 - DNA, 120 bp, Artificial Sequence
  ENSG00000090376_61 (sequence is synthesized)
ttattcaagtccaggaaatatctgccttgaaaaagaataacttaaaaattaaaagtgtcctctatttgaacatgaaaacagctaataaagatgtgttattttattttattattattaatt

SEQ ID NO: 96550 - DNA, 120 bp, Artificial Sequence
  ENSG00000090376_62 (sequence is synthesized)
ttgtcctcccatattggcaaagataaagcaattgacaaaaatggaattcttgttcaatactggcaggagtgaaaattggtagaacctttctagaaggcaatttggcaacatgtatgaaaa

SEQ ID NO: 96551 - DNA, 120 bp, Artificial Sequence
  ENSG00000090376_63 (sequence is synthesized)
cctaaatgttgatacacctttacccagcagtttgtttaggaatttatcctaatgaataaaagttgtccaagtcttcaaacatgagcccaaaggtatatttcatgatgtttatgatattaa

SEQ ID NO: 96552 - DNA, 120 bp, Artificial Sequence
  ENSG00000090376_64 (sequence is synthesized)
aacattggaaacaactgaaacatccttcagtaaaagatggattaaataaattccatgcagttgtcatttaaaaatatttagatatatgtttattgctatggatatatgttcccaaaatat

SEQ ID NO: 96553 - DNA, 120 bp, Artificial Sequence
  ENSG00000090376_65 (sequence is synthesized)
tattgaatcaaaaagtagactacaggatatatgttgaatatgagctcatttataacattgaatattttaagataatgtatgtttcatagagagatcttcaccaaatgttaaggatttttt

SEQ ID NO: 96554 - DNA, 120 bp, Artificial Sequence
  ENSG00000090376_66 (sequence is synthesized)
tttctgggctgtggtatttgggtgatctttacattcttcagactcatgtgtgtttgaaactttttataatgaacatatatcatttttattagaaaagaataaagtttttgaaaaaaaaaa

SEQ ID NO: 96555 - DNA, 120 bp, Artificial Sequence
  ENSG00000090376_67 (sequence is synthesized)
tctaaaaacaagctttgtgagaatggagtcttaattttgcaggggttttggcatgtggttgtatgcaaatacaaagattccaaatacggatgtgttgcattatttgaaaaaaccccttca

SEQ ID NO: 96556 - DNA, 120 bp, Artificial Sequence
  ENSG00000090376_68 (sequence is synthesized)
gagacatatttgcatatggagacgtgatttctgcaactgaaaacagtcagtcctgcactctcaaaacagccttcaaggacttttgagcatctgatttctgaacttcttaggttgactttt

SEQ ID NO: 96557 - DNA, 120 bp, Artificial Sequence
  ENSG00000090376_69 (sequence is synthesized)
tggcttatgtgactccaatacgactttcaacaaagatttgtgttccaaaaaatggttttaaacaatgcttaactaacagcatgtttttcttaatttgtattttcagtttagaatgctttt

SEQ ID NO: 96558 - DNA, 120 bp, Artificial Sequence
  ENSG00000090376_70 (sequence is synthesized)
aactttatcaacataattagtcattgagaacttttctctgtatttttatttgatatgtactgcgagtaaacaaagtcctatattctgaaaggggacacgtaagggagagttgaagaaaat

SEQ ID NO: 96559 - DNA, 120 bp, Artificial Sequence
  ENSG00000090376_71 (sequence is synthesized)
aattaacatgttgagagtttgcattcctgttgtatcagattggagctattttatagaattggatctaaatgaagtatacattttatggatgctaaaaatactctttagcaatgtttctat

SEQ ID NO: 96560 - DNA, 120 bp, Artificial Sequence
  ENSG00000090376_72 (sequence is synthesized)
tcagaatgcatcatcattagagaaaagctattaaggttgcagtgtgaatcaccagttggaaaaagagaaaacatatttcatttccagtccggaagcaatccatgcatgcaggcagtattc

SEQ ID NO: 96561 - DNA, 120 bp, Artificial Sequence
  ENSG00000090376_73 (sequence is synthesized)
attttaacagtctggatcagttttttaccatgaacttctgctattagaaaaaatgcctttgtctaatctagctttccttagatgtgatgcaaactcagaactatatgccccggtcaatgt

SEQ ID NO: 96562 - DNA, 120 bp, Artificial Sequence
  ENSG00000090376_74 (sequence is synthesized)
tagagaccctaaaaccccagctcatttggcatctgttcattcatattccagctgaatctcagaaatgtgcttaagggaaagcatctgatattagcagtttctcagccaagtcacaggacg

SEQ ID NO: 96563 - DNA, 120 bp, Artificial Sequence
  ENSG00000090376_75 (sequence is synthesized)
ggacatcccagagtcatggcctgctgcacttttaaaagggaaattcaggaatcaaaaaaaaaacaaacagagaatggaatttatggaaagtatggaatgaaaagctgacattccctggga

SEQ ID NO: 96564 - DNA, 120 bp, Artificial Sequence
  ENSG00000090376_76 (sequence is synthesized)
cttgaaatgttaactctggatttccttaatagctataaactgtgcctttcctactgtggcaattgttgtgagctagaacatgtttatacctttttatgtataaatattttatctgagact

SEQ ID NO: 96565 - DNA, 120 bp, Artificial Sequence
  ENSG00000090376_77 (sequence is synthesized)
cctgctactattgccacccgatgcatcttccaaaaggtaaagcttccatctttgcatcaccttctcagaaatctgaattggtcccattgctttcagaatgaagttaagttcatatgctaa

SEQ ID NO: 96566 - DNA, 120 bp, Artificial Sequence
  ENSG00000090382_0 (sequence is synthesized)
gttaaaagatgttaaatactggggccagctcaccctggtcagcctagcactctgacctagcagtcaacatgaaggctctcattgttctggggcttgtcctcctttctgttacggtccagg

SEQ ID NO: 96567 - DNA, 120 bp, Artificial Sequence
  ENSG00000090382_1 (sequence is synthesized)
gcaaggtctttgaaaggtgtgagttggccagaactctgaaaagattgggaatggatggctacaggggaatcagcctagcaaactggatgtgtttggccaaatgggagagtggttacaaca

SEQ ID NO: 96568 - DNA, 120 bp, Artificial Sequence
  ENSG00000090382_2 (sequence is synthesized)
cacgagctacaaactacaatgctggagacagaagcactgattatgggatatttcagatcaatagccgctactggtgtaatgatggcaaaaccccaggagcagttaatgcctgtcatttat

SEQ ID NO: 96569 - DNA, 120 bp, Artificial Sequence
  ENSG00000090382_3 (sequence is synthesized)
cctgcagtgctttgctgcaagataacatcgctgatgctgtagcttgtgcaaagagggttgtccgtgatccacaaggcattagagcatgggtggcatggagaaatcgttgtcaaaacagag

SEQ ID NO: 96570 - DNA, 120 bp, Artificial Sequence
  ENSG00000090382_4 (sequence is synthesized)
atgtccgtcagtatgttcaaggttgtggagtgtaactccagaattttccttcttcagctcattttgtctctctcacattaagggagtaggaattaagtgaaaggtcacactaccattatt

SEQ ID NO: 96571 - DNA, 120 bp, Artificial Sequence
  ENSG00000090382_5 (sequence is synthesized)
tccccttcaaacaaataatatttttacagaagcaggagcaaaatatggcctttcttctaagagatataatgttcactaatgtggttattttacattaagcctacaacatttttcagtttg

SEQ ID NO: 96572 - DNA, 120 bp, Artificial Sequence
  ENSG00000090382_6 (sequence is synthesized)
cgtgagccactgcgcccggccacattcagttcttatcaaagaaataacccagacttaatcttgaatgatacgattatgcccaatattaagtaaaaaatataagaaaaggttatcttaaat

SEQ ID NO: 96573 - DNA, 120 bp, Artificial Sequence
  ENSG00000090382_7 (sequence is synthesized)
gttatcttaaatagatcttaggcaaaataccagctgatgaaggcatctgatgccttcatctgttcagtcatctccaaaaacagtaaaaataaccactttttgttgggcaatatgaaattt

SEQ ID NO: 96574 - DNA, 120 bp, Artificial Sequence
  ENSG00000090382_8 (sequence is synthesized)
ttaaaggagtagaataccaaatgatagaaacagactgcctgaattgagaattttgatttcttaaagtgtgtttctttctaaattgctgttccttaatttgattaatttaattcatgtatt

SEQ ID NO: 96575 - DNA, 120 bp, Artificial Sequence
  ENSG00000090382_9 (sequence is synthesized)
atgattaaatctgaggcagatgagcttacaagtattgaaataattactaattaatcacaaatgtgaagttatgcatgatgtaaaaaatacaaacattctaattaaaggctttgcaacaca

SEQ ID NO: 96576 - DNA, 120 bp, Artificial Sequence
  ENSG00000090382_10 (sequence is synthesized)
gcagtggtaagacaagctaatatttgaccaatctggttatacttacaagaattgagactcaatacaaatgaaaaagccttgaaaggttcatgagggacctagaaaaactacatctcaact

SEQ ID NO: 96577 - DNA, 120 bp, Artificial Sequence
  ENSG00000090382_11 (sequence is synthesized)
tccagaaagtcattattattttcctcataattccctgagtaagaaattaaagaagtggtatcataaaaggttgatgttttttaatatacagaagtttctggaatgacctattaatttact

SEQ ID NO: 96578 - DNA, 120 bp, Artificial Sequence
  ENSG00000090402_0 (sequence is synthesized)
attattttggcagccttatccaagtctggtacaacatagcaaagagaacaggctatgaaataagatggcaagaaagaaatttagtggattggaaatctctctgattgtcctttttgtcat

SEQ ID NO: 96579 - DNA, 120 bp, Artificial Sequence
  ENSG00000090402_1 (sequence is synthesized)
agttactataatagctattgccttaattgttgttttagcaactaagacacctgctgttgatgaaattagtgattctacttcaactccagctactactcgtgtgactacaaatccttctga

SEQ ID NO: 96580 - DNA, 120 bp, Artificial Sequence
  ENSG00000090402_2 (sequence is synthesized)
ttcaggaaaatgtccaaatgtgttaaatgatcctgtcaatgtgagaataaactgcattccagaacaattcccaacagagggaatttgtgcacagagaggctgctgctggaggccgtggaa

SEQ ID NO: 96581 - DNA, 120 bp, Artificial Sequence
  ENSG00000090402_3 (sequence is synthesized)
tgactctcttattccttggtgcttcttcgttgataatcatggttataacgttcaagacatgacaacaacaagtattggagttgaagccaaattaaacaggataccttcacctacactatt

SEQ ID NO: 96582 - DNA, 120 bp, Artificial Sequence
  ENSG00000090402_4 (sequence is synthesized)
tggaaatgacatcaacagtgttctcttcacaactcaaaatcagacacccaatcgtttccggttcaagattactgatccaaataatagaagatatgaagttcctcatcagtatgtaaaaga

SEQ ID NO: 96583 - DNA, 120 bp, Artificial Sequence
  ENSG00000090402_5 (sequence is synthesized)
gtttactggacccacagtttctgatacgttgtatgatgtgaaggttgcccaaaacccatttagcatccaagttattaggaaaagcaacggtaaaactttgtttgacaccagcattggtcc

SEQ ID NO: 96584 - DNA, 120 bp, Artificial Sequence
  ENSG00000090402_6 (sequence is synthesized)
cttagtgtactctgaccagtacttacagatctcaacccgtcttccaagtgattatatttatggtattggagaacaagttcataagagatttcgtcatgatttatcctggaaaacatggcc

SEQ ID NO: 96585 - DNA, 120 bp, Artificial Sequence
  ENSG00000090402_7 (sequence is synthesized)
aatttttactcgagaccaacttcctggtgataataataataatttatacggccatcaaacattctttatgtgtattgaagatacatctggaaagtcattcggtgtttttttaatgaatag

SEQ ID NO: 96586 - DNA, 120 bp, Artificial Sequence
  ENSG00000090402_8 (sequence is synthesized)
caatgcaatggagatttttatccagcctactccaatagtaacatatagagttaccggtggcattctggatttttacatccttctaggagatacaccagaacaagtagttcaacagtatca

SEQ ID NO: 96587 - DNA, 120 bp, Artificial Sequence
  ENSG00000090402_9 (sequence is synthesized)
acagcttgttggactaccagcaatgccagcatattggaatcttggattccaactaagtcgctggaattataagtcactagatgtagtgaaagaagtggtaaggagaaaccgggaagctgg

SEQ ID NO: 96588 - DNA, 120 bp, Artificial Sequence
  ENSG00000090402_10 (sequence is synthesized)
cataccatttgatacacaggtcactgatattgactacatggaagacaagaaagactttacttatgatcaagttgcgtttaacggactccctcaatttgtgcaagatttgcatgaccatgg

SEQ ID NO: 96589 - DNA, 120 bp, Artificial Sequence
  ENSG00000090402_11 (sequence is synthesized)
acagaaatatgtcatcatcttggaccctgcaatttccataggtcgacgtgccaatggaacaacatatgcaacctatgagaggggaaacacacaacatgtgtggataaatgagtcagatgg

SEQ ID NO: 96590 - DNA, 120 bp, Artificial Sequence
  ENSG00000090402_12 (sequence is synthesized)
aagtacaccaattattggagaggtatggccaggattaacagtataccctgatttcactaacccaaactgcattgattggtgggcaaatgaatgcagtattttccatcaagaagtgcaata

SEQ ID NO: 96591 - DNA, 120 bp, Artificial Sequence
  ENSG00000090402_13 (sequence is synthesized)
tgatggactttggattgacatgaatgaagtttccagctttattcaaggttcaacaaaaggatgtaatgtaaacaaattgaattatccaccgtttactcctgatattcttgacaaactcat

SEQ ID NO: 96592 - DNA, 120 bp, Artificial Sequence
  ENSG00000090402_14 (sequence is synthesized)
gtattccaaaacaatttgcatggatgctgtgcagaactggggtaaacagtatgatgttcatagcctctatggatacagcatggctatagccacagagcaagctgtacaaaaagtttttcc

SEQ ID NO: 96593 - DNA, 120 bp, Artificial Sequence
  ENSG00000090402_15 (sequence is synthesized)
taataagagaagcttcattcttacccgctcaacatttgctggatctggaagacatgctgcgcattggttaggagacaatactgcttcatgggaacaaatggaatggtctataactggaat

SEQ ID NO: 96594 - DNA, 120 bp, Artificial Sequence
  ENSG00000090402_16 (sequence is synthesized)
gctggagttcagtttgtttggaatacctttggttggagcagacatctgtggatttgtggctgaaaccacagaagaactttgcagaagatggatgcaacttggggcattttatccattttc

SEQ ID NO: 96595 - DNA, 120 bp, Artificial Sequence
  ENSG00000090402_17 (sequence is synthesized)
cagaaaccataattctgacggatatgaacatcaggatcctgcattttttgggcagaattcacttttggttaaatcatcaaggcagtatttaactattcgctacaccttattacccttcct

SEQ ID NO: 96596 - DNA, 120 bp, Artificial Sequence
  ENSG00000090402_18 (sequence is synthesized)
ctacactctgttttataaagcccatgtgtttggagaaacagtagcaagaccagttcttcatgagttttatgaggatacgaacagctggattgaggacactgagtttttgtggggccctgc

SEQ ID NO: 96597 - DNA, 120 bp, Artificial Sequence
  ENSG00000090402_19 (sequence is synthesized)
attacttattactcctgttctaaaacagggagcagatactgtgagtgcctacatccctgatgctatttggtatgattatgaatctggtgcaaaaaggccatggaggaaacaacgggttga

SEQ ID NO: 96598 - DNA, 120 bp, Artificial Sequence
  ENSG00000090402_20 (sequence is synthesized)
tatgtatcttccagcagacaaaataggattacatcttagaggaggttatatcatccccattcaagaaccagatgtaacaacaacagcaagccgtaagaatcctctaggacttatagtcgc

SEQ ID NO: 96599 - DNA, 120 bp, Artificial Sequence
  ENSG00000090402_21 (sequence is synthesized)
attaggtgaaaacaacacagccaaaggagactttttctgggatgatggagaaactaaagatacaatacaaaatggcaactacatattatatacattttcagtttctaataacacattaga

SEQ ID NO: 96600 - DNA, 120 bp, Artificial Sequence
  ENSG00000090402_22 (sequence is synthesized)
tattgtgtgcacacattcatcatatcaggaaggaactaccttagcatttcagactgtaaaaatccttgggttgacagacagtgttacagaagttagagtggcggaaaataatcaaccaat

SEQ ID NO: 96601 - DNA, 120 bp, Artificial Sequence
  ENSG00000090402_23 (sequence is synthesized)
gaacgctcattccaatttcacttatgatgcttctaaccaggttctcctaattgcagatctcaaacttaatcttggaagaaactttagtgttcaatggaatcaaattttctcagaaaatga

SEQ ID NO: 96602 - DNA, 120 bp, Artificial Sequence
  ENSG00000090402_24 (sequence is synthesized)
aagatttaattgttatccagatgcagatttggcaactgaacaaaagtgcacacaacgtggctgtgtatggagaacgggttcttctctatccaaagcacctgagtgttactttcccagaca

SEQ ID NO: 96603 - DNA, 120 bp, Artificial Sequence
  ENSG00000090402_25 (sequence is synthesized)
ttcagtcaactcagctcgctattcatccatgggtataacagctgacctccaactaaatactgcaaatgccagaataaagttaccttctgaccccatctcaactcttcgtgtggaggtgaa

SEQ ID NO: 96604 - DNA, 120 bp, Artificial Sequence
  ENSG00000090402_26 (sequence is synthesized)
atatcacaaaaatgatatgttgcagtttaagatttatgatccccaaaagaagagatatgaagtaccagtaccgttaaacattccaaccaccccaataagtacttatgaagacagacttta

SEQ ID NO: 96605 - DNA, 120 bp, Artificial Sequence
  ENSG00000090402_27 (sequence is synthesized)
tgatgtggaaatcaaggaaaatccttttggcatccagattcgacggagaagcagtggaagagtcatttgggattcttggctgcctggatttgcttttaatgaccagttcattcaaatatc

SEQ ID NO: 96606 - DNA, 120 bp, Artificial Sequence
  ENSG00000090402_28 (sequence is synthesized)
gactcgcctgccatcagaatatatatatggttttggggaagtggaacatacagcatttaagcgagatctgaactggaatacttggggaatgttcacaagagaccaaccccctggttacaa

SEQ ID NO: 96607 - DNA, 120 bp, Artificial Sequence
  ENSG00000090402_29 (sequence is synthesized)
acttaattcctatggatttcatccctattacatggctctggaagaggagggcaatgctcatggtgttttcttactcaacagcaatgcaatggatgttacattccagccaactcctgctct

SEQ ID NO: 96608 - DNA, 120 bp, Artificial Sequence
  ENSG00000090402_30 (sequence is synthesized)
aacttaccgtacagttggagggatcttggatttttatatgtttttgggcccaactccagaagttgcaacaaagcaataccatgaagtaattggccatccagtcatgccagcttattgggc

SEQ ID NO: 96609 - DNA, 120 bp, Artificial Sequence
  ENSG00000090402_31 (sequence is synthesized)
tttgggattccaattatgtcgttatggatatgcaaatacttcagaggttcgggaattatatgacgctatggtggctgctaacatcccctatgatgttcagtacacagacattgactacat

SEQ ID NO: 96610 - DNA, 120 bp, Artificial Sequence
  ENSG00000090402_32 (sequence is synthesized)
ggaaaggcagctagactttacaattggtgaagcattccaggaccttcctcagtttgttgacaaaataagaggagaaggaatgagatacattattatcctggatccagcaatttcaggaaa

SEQ ID NO: 96611 - DNA, 120 bp, Artificial Sequence
  ENSG00000090402_33 (sequence is synthesized)
tgaaacaaagacttaccctgcatttgaaagaggacagcagaatgatgtctttgtcaaatggccaaacaccaatgacatttgttgggcaaaggtttggccagatttgcccaacataacaat

SEQ ID NO: 96612 - DNA, 120 bp, Artificial Sequence
  ENSG00000090402_34 (sequence is synthesized)
agataaaactctaacggaagatgaagctgttaatgcttccagagctcatgtagctttcccagatttcttcaggacttccacagcagagtggtgggccagagaaattgtggacttttacaa

SEQ ID NO: 96613 - DNA, 120 bp, Artificial Sequence
  ENSG00000090402_35 (sequence is synthesized)
tgaaaagatgaagtttgatggtttgtggattgatatgaatgagccatcaagttttgtaaatggaacaactactaatcaatgcagaaatgacgaactaaattatccaccttatttcccaga

SEQ ID NO: 96614 - DNA, 120 bp, Artificial Sequence
  ENSG00000090402_36 (sequence is synthesized)
actcacaaaaagaactgatggattacatttcagaacaatttgcatggaagctgagcagattcttagtgatggaacatcagttttgcattacgatgttcacaatctctatggatggtcaca

SEQ ID NO: 96615 - DNA, 120 bp, Artificial Sequence
  ENSG00000090402_37 (sequence is synthesized)
gatgaaacctactcatgatgcattgcagaagacaactggaaaaagagggattgtaatttctcgttccacgtatcctactagtggacgatggggaggacactggcttggagacaactatgc

SEQ ID NO: 96616 - DNA, 120 bp, Artificial Sequence
  ENSG00000090402_38 (sequence is synthesized)
acgatgggacaacatggacaaatcaatcattggtatgatggaatttagtctgtttggaatgtcatatactggagcagacatctgtggttttttcaacaactcagaatatcatctctgtac

SEQ ID NO: 96617 - DNA, 120 bp, Artificial Sequence
  ENSG00000090402_39 (sequence is synthesized)
ccgctggatgcaacttggagcattttatccatactcaaggaatcacaacattgcaaatactagaagacaagatcccgcttcctggaatgaaacttttgctgaaatgtcaaggaatattct

SEQ ID NO: 96618 - DNA, 120 bp, Artificial Sequence
  ENSG00000090402_40 (sequence is synthesized)
aaatattagatacaccttattgccctatttttacacacaaatgcatgaaattcatgctaatggtggcactgttatccgaccccttttgcatgagttctttgatgaaaaaccaacctggga

SEQ ID NO: 96619 - DNA, 120 bp, Artificial Sequence
  ENSG00000090402_41 (sequence is synthesized)
tatattcaagcagttcttatggggtccagcatttatggttaccccagtactggaaccttatgttcaaactgtaaatgcctacgtccccaatgctcggtggtttgactaccatacaggcaa

SEQ ID NO: 96620 - DNA, 120 bp, Artificial Sequence
  ENSG00000090402_42 (sequence is synthesized)
agatattggcgtcagaggacaatttcaaacatttaatgcttcttatgacacaataaacctacatgtccgtggtggtcacatcctaccatgtcaagagccagctcaaaacacattttacag

SEQ ID NO: 96621 - DNA, 120 bp, Artificial Sequence
  ENSG00000090402_43 (sequence is synthesized)
tcgacaaaaacacatgaagctcattgttgctgcagatgataatcagatggcacagggttctctgttttgggatgatggagagagtatagacacctatgaaagagacctatatttatctgt

SEQ ID NO: 96622 - DNA, 120 bp, Artificial Sequence
  ENSG00000090402_44 (sequence is synthesized)
acaatttaatttaaaccagaccaccttaacaagcactatattgaagagaggttacataaataaaagtgaaacgaggcttggatcccttcatgtatgggggaaaggaactactcctgtcaa

SEQ ID NO: 96623 - DNA, 120 bp, Artificial Sequence
  ENSG00000090402_45 (sequence is synthesized)
tgcagttactctaacgtataacggaaataaaaattcgcttccttttaatgaagacactaccaacatgatattacgtattgatctgaccacacacaatgttactctagaagaaccaataga

SEQ ID NO: 96624 - DNA, 120 bp, Artificial Sequence
  ENSG00000090402_46 (sequence is synthesized)
aatcaactggtcatgaagatcaccatcaattttagttgtcaatgggaaaaaacaccaggatttaagtttcacagcacttacaattttccctcttcacttggttcttgtactctacaaaat

SEQ ID NO: 96625 - DNA, 120 bp, Artificial Sequence
  ENSG00000090402_47 (sequence is synthesized)
atagctttcataacatcgaaaagttattttgtagcgtacatcaatgataatgctaattttattatagtaatgtgacttggattcaattttaaggcatatttaacaaaatttgaatagccc

SEQ ID NO: 96626 - DNA, 120 bp, Artificial Sequence
  ENSG00000090402_48 (sequence is synthesized)
tttgaatagccctatttatccttgttaagtatcagctacaattgtaaactagttactaaacatgtatgtaaatagctaagatataatttaaacgtgatttttaaattaaataaaattttt

SEQ ID NO: 96627 - DNA, 120 bp, Artificial Sequence
  ENSG00000090402_49 (sequence is synthesized)
aattcccaacagaggtctgcagcaaaagtctttaatatttttaatgaatatatacattattatattaagataattgctgaatattggatcgatcttatttaataaagatctagacataaa

SEQ ID NO: 96628 - DNA, 120 bp, Artificial Sequence
  ENSG00000090432_0 (sequence is synthesized)
gactgatttcgagtttccggtcaggttaggccgggggggtgcggtcctggtcggaaggaggtggagagtcgggggtcaccaggcctatccttggcgccacagtcggccaccggggctcgc

SEQ ID NO: 96629 - DNA, 120 bp, Artificial Sequence
  ENSG00000090432_1 (sequence is synthesized)
cgccgtcatggagagcggagggcggccctcgctgtgccagttcatcctcctgggcaccacctctgtggtcaccgccgccctgtactccgtgtaccggcagaaggcccgggtctcccaaga

SEQ ID NO: 96630 - DNA, 120 bp, Artificial Sequence
  ENSG00000090432_2 (sequence is synthesized)
gctcaagggagctaaaaaagttcatttgggtgaagatttaaagagtattctttcagaagctccaggaaaatgcgtgccttatgctgttatagaaggagctgtgcggtctgttaaagaaac

SEQ ID NO: 96631 - DNA, 120 bp, Artificial Sequence
  ENSG00000090432_3 (sequence is synthesized)
gcttaacagccagtttgtggaaaactgcaagggggtaattcagcggctgacacttcaggagcacaagatggtgtggaatcgaaccacccacctttggaatgattgctcaaagatcattca

SEQ ID NO: 96632 - DNA, 120 bp, Artificial Sequence
  ENSG00000090432_4 (sequence is synthesized)
tcagaggaccaacacagtgccctttgacctggtgccccacgaggatggcgtggatgtggctgtgcgagtgctgaagcccctggactcagtggatctgggtctagagactgtgtatgagaa

SEQ ID NO: 96633 - DNA, 120 bp, Artificial Sequence
  ENSG00000090432_5 (sequence is synthesized)
gttccacccctcgattcagtccttcaccgatgtcatcggccactacatcagcggtgagcggcccaaaggcatccaagagaccgaggagatgctgaaggtgggggccaccctcacaggggt

SEQ ID NO: 96634 - DNA, 120 bp, Artificial Sequence
  ENSG00000090432_6 (sequence is synthesized)
tggcgaactggtcctggacaacaactctgtccgcctgcagccgcccaaacaaggcatgcagtactatctaagcagccaggacttcgacagcctgctgcagaggcaggagtcgagcgtcag

SEQ ID NO: 96635 - DNA, 120 bp, Artificial Sequence
  ENSG00000090432_7 (sequence is synthesized)
gctctggaaggtgctggcgctggtttttggctttgccacatgtgccaccctcttcttcattctccggaagcagtatctgcagcggcaggagcgcctgcgcctcaagcagatgcaggagga

SEQ ID NO: 96636 - DNA, 120 bp, Artificial Sequence
  ENSG00000090432_8 (sequence is synthesized)
gttccaggagcatgaggcccagctgctgagccgagccaagcctgaggacagggagagtctgaagagcgcctgtgtagtgtgtctgagcagcttcaagtcctgcgtctttctggagtgtgg

SEQ ID NO: 96637 - DNA, 120 bp, Artificial Sequence
  ENSG00000090432_9 (sequence is synthesized)
gcacgtttgttcctgcaccgagtgctaccgcgccttgccagagcccaagaagtgccctatctgcagacaggcgatcacccgggtgatacccctgtacaacagctaatagtttggaagccg

SEQ ID NO: 96638 - DNA, 120 bp, Artificial Sequence
  ENSG00000090432_10 (sequence is synthesized)
cccttttcagggatttttatctcgaggcctttggaggagcagtggtgggggtagctgtcacctccaggtatgattgagggaggaattgggtagaaactctccagacccatgcctccaatg

SEQ ID NO: 96639 - DNA, 120 bp, Artificial Sequence
  ENSG00000090432_11 (sequence is synthesized)
gcaggatgctgcctttcccacctgagaggggaccctgtccatgtgcagcctcatcagagcctcaccctgggaggatgccgtggcgtctcctcccaggagccagatcagtgcgagtgtgac

SEQ ID NO: 96640 - DNA, 120 bp, Artificial Sequence
  ENSG00000090432_12 (sequence is synthesized)
tgaaaatgcctcatcacttaagcaccaaagccagtgatcagcagctcttctgttcctgtgtcttctgtttttttctggtgaatcgttgcttgctgtggacttggtggaggactcagaggg

SEQ ID NO: 96641 - DNA, 120 bp, Artificial Sequence
  ENSG00000090432_13 (sequence is synthesized)
gaggaaaggctgggccccgagtacaacggatgccttgggtgctgcctccgaagagactctgccgcagcttttcttctttttcctcatgccccgggaaacagtctttcttcagaattgtca

SEQ ID NO: 96642 - DNA, 120 bp, Artificial Sequence
  ENSG00000090432_14 (sequence is synthesized)
ggctgggcaggtcaacttgtgttcctttcccctcacctgcttgcctccttaacgcctgcacgtgtgtgtagaggacaaaagaaagtgaagtcagcacatccgcttctgcccagatggtcg

SEQ ID NO: 96643 - DNA, 120 bp, Artificial Sequence
  ENSG00000090432_15 (sequence is synthesized)
gggccccgggcaacagattgaagagagatcatgtgaagggcagttggtcaggcaggcctcctggtttcgccactggccctgatttgaactcctgccacttgggagagctcggggtggtcc

SEQ ID NO: 96644 - DNA, 120 bp, Artificial Sequence
  ENSG00000090432_16 (sequence is synthesized)
ctggttttccctcctggagaatgaggcgcagaggcctcgcctcctgaaggacgcagtgtggatgccactggcctagtgtcctggcctcacagcttccttgcaaggctgtcacaaggaaaa

SEQ ID NO: 96645 - DNA, 120 bp, Artificial Sequence
  ENSG00000090432_17 (sequence is synthesized)
gcagccggctggcaccctgagcatatgccctcttggggctccctcatccagcccgtcgcagctttgacatcttggtgtactcatgtcgcttctccttgtgttaccccctcccagtattac

SEQ ID NO: 96646 - DNA, 120 bp, Artificial Sequence
  ENSG00000090432_18 (sequence is synthesized)
catttgcccctcacctgcccttggtgagccttttagtgcaagacagatggggctgttttcccccacctctgagtagttggaggtcacatacacagctctttttttattgcccttttctgc

SEQ ID NO: 96647 - DNA, 120 bp, Artificial Sequence
  ENSG00000090432_19 (sequence is synthesized)
ctctgaatgttcatctctcgtcctcctttgtgcaggcgaggaaggggtgccctcaggggccgacactagtatgatgcagtgtccagtgtgaacagcagaaattaaacatgttgcaaccaa

SEQ ID NO: 96648 - DNA, 83 bp, Artificial Sequence
  ENSG00000090447_0 (sequence is synthesized)
cccggggaggcaggccggagagacctccctcccgcccctcccgcccgcctccctcccctcgccgccgccgccgccgccagcat

SEQ ID NO: 96649 - DNA, 120 bp, Artificial Sequence
  ENSG00000090447_1 (sequence is synthesized)
cccgcctccctcccctcgccgccgccgccgccgccagcatctgggaccggccgattctgcacctccgtccggcgctgccctttgattcggatttccatcttgcattctccggctgatcgc

SEQ ID NO: 96650 - DNA, 120 bp, Artificial Sequence
  ENSG00000090447_2 (sequence is synthesized)
gggacctggctcgtgcagaggaggggggccgatcgctatggagtatttcatggtgcccactcagaaggtgccctctttgcaacatttcaggaaaacagagaaagaagtgataggagggct

SEQ ID NO: 96651 - DNA, 120 bp, Artificial Sequence
  ENSG00000090447_3 (sequence is synthesized)
ctgtagccttgccaacattccactaacccccgagactcagcgggaccaggagcggcggattcggcgggagatcgccaacagcaacgagcggagacgcatgcagagcatcaacgcgggatt

SEQ ID NO: 96652 - DNA, 120 bp, Artificial Sequence
  ENSG00000090447_4 (sequence is synthesized)
ccagtccctcaagaccctcatcccccacacagacggagagaagctcagcaaggcagccattctccagcagacagccgagtacatcttctccctggagcaggagaagaccaggctcttgca

SEQ ID NO: 96653 - DNA, 120 bp, Artificial Sequence
  ENSG00000090447_5 (sequence is synthesized)
gcagaacacacagctcaagcgcttcatccaggagctgagcggctcgtcccccaagcgacggcgggcagaggacaaggacgaaggcataggctccccggacatctgggaggacgagaaggc

SEQ ID NO: 96654 - DNA, 120 bp, Artificial Sequence
  ENSG00000090447_6 (sequence is synthesized)
ggaggacctgcggcgggagatgattgagctgcggcagcagctggacaaggagcgctcggtgcgcatgatgctggaggagcaggtgcgctcgctggaggcccacatgtacccggaaaagct

SEQ ID NO: 96655 - DNA, 120 bp, Artificial Sequence
  ENSG00000090447_7 (sequence is synthesized)
caaggtgattgcgcagcaggtgcagctgcagcagcagcaggaacaggtgaggctgctgcaccaggagaagctggagcgggaacagcagcagctgcggacccagcttctgccccctccggc

SEQ ID NO: 96656 - DNA, 120 bp, Artificial Sequence
  ENSG00000090447_8 (sequence is synthesized)
ccccacccaccaccccacggtgatcgtgccagcaccgcctcctcctccctcccaccacatcaatgtcgtcaccatgggcccctcctcggtcatcaactctgtttccacatcccggcaaaa

SEQ ID NO: 96657 - DNA, 120 bp, Artificial Sequence
  ENSG00000090447_9 (sequence is synthesized)
ggacaccatcgtgcaggcaatccagcacatcgagggcacccaggaaaagcaggagctggaggaggagcagcggcgagctgtcatcgtgaagcctgtccgcagctgcccggaggcccccac

SEQ ID NO: 96658 - DNA, 120 bp, Artificial Sequence
  ENSG00000090447_10 (sequence is synthesized)
ctctgacaccgcctccgactccgaggcctcagacagtgacgccatggaccagagccgggaggagccgtcgggggacggggagcttccctgactacccccccagccctcctctcccttctg

SEQ ID NO: 96659 - DNA, 120 bp, Artificial Sequence
  ENSG00000090447_11 (sequence is synthesized)
ggggctggagggagccggggcagccacagggagagacatgggcgaatgagtgagaaatttttacaaaattacgatgtcatttgggtctcttttatgacctctttttcaatactgtaaatc

SEQ ID NO: 96660 - DNA, 120 bp, Artificial Sequence
  ENSG00000090447_12 (sequence is synthesized)
gacctttgaacgaagccactcaacccgaggtcccggggctggggtgtcgcagagcgtgtgggagcatcggcaccccagggcggggcctcggccccgggggctggaggaagctgacacgga

SEQ ID NO: 96661 - DNA, 120 bp, Artificial Sequence
  ENSG00000090447_13 (sequence is synthesized)
gatgcctggcctctctctgccaaaaagcattttttcctttaaatatgttttttaagaacagggaaaattaaacaaaaccccaggttatttcttccctgcccagagccagcctgggattgt

SEQ ID NO: 96662 - DNA, 120 bp, Artificial Sequence
  ENSG00000090447_14 (sequence is synthesized)
cagccttcaatcccctttccttcctctttttgggttttcttctttctcctttaagcacttacatggttgggggtaagactaggctggggcattctgggggcccggaggtctccgttgctt

SEQ ID NO: 96663 - DNA, 120 bp, Artificial Sequence
  ENSG00000090447_15 (sequence is synthesized)
cttggttggggtttgctgctgctgtgcccccctcccccttccccatctcggcactagaattcgccactctcccaccccccagcccccacctctgcctccaggtctcatcttccaccccaa

SEQ ID NO: 96664 - DNA, 120 bp, Artificial Sequence
  ENSG00000090447_16 (sequence is synthesized)
cctctgcctccaggtctcatcttccaccccaaaaatgtctgtctctctctttttgttttgtttgttgttggttttttatttctttttggtttgctttctgtttttgttttgtttttcttt

SEQ ID NO: 96665 - DNA, 120 bp, Artificial Sequence
  ENSG00000090447_17 (sequence is synthesized)
ttgaggtcttcgtgttcaaggagaagctattatattttgttaagaaagtggggagaaaaaaaccaagaggccaccgtgcctttgtaaagaaacaaaataaagtttgtactttgtttttta

SEQ ID NO: 96666 - DNA, 89 bp, Artificial Sequence
  ENSG00000090447_18 (sequence is synthesized)
cccccctccgccccccataattagccaggcttggtggatcacgcctgtaatcccagttatttgggaggctgaggcatgaaaatcgcttg

SEQ ID NO: 96667 - DNA, 120 bp, Artificial Sequence
  ENSG00000090447_19 (sequence is synthesized)
cctgggcaatagagcgagactcagtcaaaagaaaaaagagaacctcggtgttggtggacttgggtcacctttgattttcacctggaggagtctgaagtggccagagagaggatagtggac

SEQ ID NO: 96668 - DNA, 120 bp, Artificial Sequence
  ENSG00000090447_20 (sequence is synthesized)
cctggaggagtctgaagtggccagagagaggatagtggacctttactgtgtgtgtaggacgtttacagaccttaaccgtaaatgcaaaaccccagaaagagctatcagaaactttcaggc

SEQ ID NO: 96669 - DNA, 120 bp, Artificial Sequence
  ENSG00000090447_21 (sequence is synthesized)
atttgcagaaaaatccactttattcagtgcagtatcacctggaaatttcaatcaaccatccttcatcaacaggaacccctggttggtcagccatcagaagccctggttggtcagcattcc

SEQ ID NO: 96670 - DNA, 120 bp, Artificial Sequence
  ENSG00000090447_22 (sequence is synthesized)
accaataagaattcctggttagcggcactccaccaatcacaacccctggttagctcctattccaccaatcagaagccttggttagaatgcattctattaaaggactctgtcggcgggtac

SEQ ID NO: 96671 - DNA, 120 bp, Artificial Sequence
  ENSG00000090447_23 (sequence is synthesized)
ttccagggcaatttaggtgagttatatttgagggtcttggtggcagattcaggtcccacgaggaactgtaccttttggggggaaatttgctttcttggatttaagaaagtgcttaaccta

SEQ ID NO: 96672 - DNA, 120 bp, Artificial Sequence
  ENSG00000090447_24 (sequence is synthesized)
agttaagcactaggttagccagcagctggtttctgagccaggagactgggctgatggctttggagaggaaggaggcaggatggagcattggagaagctgggccggcagattctgatgcag

SEQ ID NO: 96673 - DNA, 120 bp, Artificial Sequence
  ENSG00000090447_25 (sequence is synthesized)
aggaggaggcgacacaggcccctgatcccagccccagctcctcttccttgtgagaacttccggctggggttttcgggactggggtctggtggtctcctttggtctcccagttagtgggct

SEQ ID NO: 96674 - DNA, 120 bp, Artificial Sequence
  ENSG00000090447_26 (sequence is synthesized)
gccttgcggggaagggacggaagaggctgagggtcagctcccaagagcagaggagttggtgggacttgggccgggaggtgcagaagggtgcatctggctgcaccctgccctgcccagctg

SEQ ID NO: 96675 - DNA, 120 bp, Artificial Sequence
  ENSG00000090447_27 (sequence is synthesized)
ctgggtgtgaccttgggcaagtcacctcacttgtgggcttgtgttcagaggggcaggggtgatggctgagcttgcagtcacacacccgcttctgataagtggcgggctgtgtgaactagc

SEQ ID NO: 96676 - DNA, 120 bp, Artificial Sequence
  ENSG00000090447_28 (sequence is synthesized)
agtcagtagaggcgcttcagtgggttggcatctgcaggttgctgttgtgccaggtctggctacttgaccttgggatcatcaccttccttcccacgaccctgcattgcttgctcactgtaa

SEQ ID NO: 96677 - DNA, 120 bp, Artificial Sequence
  ENSG00000090447_29 (sequence is synthesized)
tctcggccaccccactgggttttgtgagaatcaggcagggaaaaatgtcaacgaggtctgtgaataataaaaagagttacacgattacagcgatttccgaatgcctggtccttttttttt

SEQ ID NO: 96678 - DNA, 82 bp, Artificial Sequence
  ENSG00000090447_30 (sequence is synthesized)
cccaggctggagtacagtgatattacatcctcccaccttagcctcctcagttgctggaacaatagggacactccaccatgcc

SEQ ID NO: 96679 - DNA, 120 bp, Artificial Sequence
  ENSG00000090447_31 (sequence is synthesized)
ctcctgggcttattacatcctcccaccttagcctcctcagttgctggaacaatagggacactccaccatgcctggctgattaattttttctagtgatggggtctcactatgttgcccagg

SEQ ID NO: 96680 - DNA, 120 bp, Artificial Sequence
  ENSG00000090447_32 (sequence is synthesized)
ttataggtgtgagccactgtgcccggcctagtcttctcttttacagggataactgtcacctgccagttggggcatctggctctgtgggccggtcagagctcattctgccctatggcctga

SEQ ID NO: 96681 - DNA, 120 bp, Artificial Sequence
  ENSG00000090447_33 (sequence is synthesized)
tcagagctcattctgccctatggcctgacacctgctctggggtcagggttcacgcccagcgcttgctgcagctggaccctacccaaacctctgtgcccccctctttacatgggagtcttc

SEQ ID NO: 96682 - DNA, 120 bp, Artificial Sequence
  ENSG00000090447_34 (sequence is synthesized)
aggccacctgactcaggaacattgtgacaattcagtgagaaaattctcgccaaaaacttaaaaaaaaaaatgtatccctctgttgtggaccctccaggagggccagctctcaggtggccc

SEQ ID NO: 96683 - DNA, 120 bp, Artificial Sequence
  ENSG00000090447_35 (sequence is synthesized)
aaggctggacttggtgctcccttttcaccccctagtcagctctggcttttgggcattgccaggagggacccaggggctgggtgggcaggggtctctccccacatctctcctgagggggat

SEQ ID NO: 96684 - DNA, 120 bp, Artificial Sequence
  ENSG00000090447_36 (sequence is synthesized)
ggtgatgcctcaagattgcacttaccttgtgttgtggcttcctatggacatctcttcccacctcttacctccaaagagccccagctttaagccacccactgcagagcagtcctggtcccc

SEQ ID NO: 96685 - DNA, 120 bp, Artificial Sequence
  ENSG00000090447_37 (sequence is synthesized)
ttggcctgctggcctctcagacatggtatggtctgagtttgtgccaggcctgggagcctggactccgccctaaggctgggccacacacagccgtgcagcaggcctgctccagtcccccta

SEQ ID NO: 96686 - DNA, 120 bp, Artificial Sequence
  ENSG00000090447_38 (sequence is synthesized)
tcacctccacttcagggcaggggaaccgggagaagtgagagcactgacatccagctgaccgaccctaaaaccatcccctctctgccctgcaccctaaagtctcatggaaagtggggggcc

SEQ ID NO: 96687 - DNA, 120 bp, Artificial Sequence
  ENSG00000090447_39 (sequence is synthesized)
cgggccccttttgcagtgcggacatttcaagaccctgtaagagacttgtaccctgggtgcaggccctgggcctttgggtcctgatggaggagggggcttggcttgatgaggacggaagga

SEQ ID NO: 96688 - DNA, 120 bp, Artificial Sequence
  ENSG00000090447_40 (sequence is synthesized)
ggctgatttgcatccagacttccggcgttggacacctctctattgggagaggaagccgaggccggggaaggggcagcgatgcgtccagggtcccacagggagccaaggctggacagatgg

SEQ ID NO: 96689 - DNA, 120 bp, Artificial Sequence
  ENSG00000090447_41 (sequence is synthesized)
gcaggctgggtggggccaggaaggccacggctgtttccagctgttgcagatgtgctgcctccggggtccgtgcaaactcctttccgcctgcaggctggcgaaggggccagggcacacagc

SEQ ID NO: 96690 - DNA, 120 bp, Artificial Sequence
  ENSG00000090447_42 (sequence is synthesized)
aggggagttagacttggcagccccttgaccccagactgccttcatcaatggagcaggagctgcccagaacccttttcctgttctcccacattcaggggcatgagcccccttggcccagtc

SEQ ID NO: 96691 - DNA, 120 bp, Artificial Sequence
  ENSG00000090447_43 (sequence is synthesized)
ctggaacagggcaccccgggagggcccctcaggaagaggccggggctgcggcttcgggtggggccggcagcctctgctgagagcccagcatctggaagccatcaggccaggggcgggggg

SEQ ID NO: 96692 - DNA, 120 bp, Artificial Sequence
  ENSG00000090447_44 (sequence is synthesized)
aggtccagggagggggacatgcctcctccaggccacacacaagcccaaccctcgggagcgtggccttgggcccacaaccgctgcctctgcaccctggcccgcagccccgccccctggcgc

SEQ ID NO: 96693 - DNA, 120 bp, Artificial Sequence
  ENSG00000090447_45 (sequence is synthesized)
acacgccccgccctcgtccgaagccacgcccccagccagcagccacgccctcttcccccaggctgccttctcaccgcactggccactgctcctgcaagggtcagcagcgctccccacagc

SEQ ID NO: 96694 - DNA, 120 bp, Artificial Sequence
  ENSG00000090447_46 (sequence is synthesized)
atggtgggagcctcgcttctccggcgcagggtgggtctatctcttggagtgggtgggctgtggggagccgtgtccccaggggttgttggcttggtgtctttttggggagtgagtggtact

SEQ ID NO: 96695 - DNA, 120 bp, Artificial Sequence
  ENSG00000090447_47 (sequence is synthesized)
tgtcttctgtgaagtcttagcctagcggggctggggcttgtggtgggaggcgtggccgtgagggtaggaagggagtggggacgtcttcctcagtcctggggtggcaaagcctgagacgct

SEQ ID NO: 96696 - DNA, 120 bp, Artificial Sequence
  ENSG00000090447_48 (sequence is synthesized)
gaagaggcgctccaggtgcctagcaaatcactcagaagtgttccaggagcggggacagcgtccctgaatgtcgtctgcatcccgcgtgcatcagaatcacaccacgcacgtttctgggcc

SEQ ID NO: 96697 - DNA, 120 bp, Artificial Sequence
  ENSG00000090447_49 (sequence is synthesized)
ccaccgggcctgctagtcagacgctggggccagcacccgtcgtctgcatagtttctaagctcttggatgttttgatgctcagacacactgggaattctgttccggaggagagactgctcc

SEQ ID NO: 96698 - DNA, 120 bp, Artificial Sequence
  ENSG00000090447_50 (sequence is synthesized)
gaggagagactgctccctgtgaggaaagccagggaggggatgggtttttgttgttgttgttgagacaaggtcttgctctgttgcccagactgaagtgcagtggcgtgatcatagctcact

SEQ ID NO: 96699 - DNA, 80 bp, Artificial Sequence
  ENSG00000090447_51 (sequence is synthesized)
ttttttgtagagacagggtctcactacgttgcctaggctgatctcaaactcttaggctcaatgatccttggccttgacct

SEQ ID NO: 96700 - DNA, 120 bp, Artificial Sequence
  ENSG00000090447_52 (sequence is synthesized)
atctcaaactcttaggctcaatgatccttggccttgacctcccaaagaactgggattactgtgcctggcccggggtgggttctgagcggactatcttacccgcagccagctgattcagtc

SEQ ID NO: 96701 - DNA, 120 bp, Artificial Sequence
  ENSG00000090447_53 (sequence is synthesized)
cgccccggtgtcccagagagcacccctccatcactctctgggggtggcctggcatcttttgcagcaggggagggatgcagtttccactggggccctctggagatgaatgatgaagagggc

SEQ ID NO: 96702 - DNA, 120 bp, Artificial Sequence
  ENSG00000090447_54 (sequence is synthesized)
ctgcggacccaggtgagcaggaggcgcccgggagtgggctctggggaccgggaaggggacaggtgatcttgaatggcggaagcctctccctaggccacgtcctctctgcttcttaatata

SEQ ID NO: 96703 - DNA, 120 bp, Artificial Sequence
  ENSG00000090447_55 (sequence is synthesized)
gccttggacccagccatgggcctgggactcaggtgtggctgcaggccccttcttgcccactgacaagtacttccaggcactttttttcctgccccggcctcagtttccccatcggtcaag

SEQ ID NO: 96704 - DNA, 120 bp, Artificial Sequence
  ENSG00000090447_56 (sequence is synthesized)
tgcggtggagtgggctctggaaggagccaggtgactgttatgtaaagcagcccattctcctggcatttggctggtttgttggacttgcagaaggggctccctaatgaagattcacctgtg

SEQ ID NO: 96705 - DNA, 120 bp, Artificial Sequence
  ENSG00000090447_57 (sequence is synthesized)
taatttctaagcagcactgggactgtcatcttcccagaatggatttttcaacttaacagaggggttttgaaagtttgttcctgggtcaggcgtggtggcttatgcctgtaatcccgggac

SEQ ID NO: 96706 - DNA, 120 bp, Artificial Sequence
  ENSG00000090447_58 (sequence is synthesized)
ttttggaggttgaggcaggaagattgcctgaggtcaggagttcgagatcagcttgggcaacatagcaagaaccccctcgtctctaccaaaaatacagaagttagctggggatggtggcgc

SEQ ID NO: 96707 - DNA, 120 bp, Artificial Sequence
  ENSG00000090447_59 (sequence is synthesized)
tacagaagttagctggggatggtggcgcacccctgtggttccagctactagggagggagcagtaggaggatcgctggagcccaggagtctgactgcagtaagctatgatcatgccactgc

SEQ ID NO: 96708 - DNA, 120 bp, Artificial Sequence
  ENSG00000090447_60 (sequence is synthesized)
ttgtctccaaaaaaaaagtaaaaggagtttgtttttcctgtactctagcgggcctcccctgctgctttgccaggcttttttctgggctatgtgttttgggggtgacagtggctggctgag

SEQ ID NO: 96709 - DNA, 120 bp, Artificial Sequence
  ENSG00000090470_0 (sequence is synthesized)
acttctcaaagcatctccgtcgtgaacatggccctgccaccattcttcggccagggtcgcccaggcccaccgcccccgcagccgccgcctcctgctcctttcggctgtccgccaccgccg

SEQ ID NO: 96710 - DNA, 120 bp, Artificial Sequence
  ENSG00000090470_1 (sequence is synthesized)
cctttcggctgtccgccaccgccgctgccctccccggctttcccgccgcctctcccccagcggcccggcccttttccgggggcctccgcccccttccttcagcctccgctggctctgcag

SEQ ID NO: 96711 - DNA, 80 bp, Artificial Sequence
  ENSG00000090470_2 (sequence is synthesized)
cgcggcggaggcggcgctggcgccttctacccggtgccaccaccgccgctgcctcctccgccgccccagtgtcggccctt

SEQ ID NO: 96712 - DNA, 80 bp, Artificial Sequence
  ENSG00000090470_3 (sequence is synthesized)
cgccgccgccgccggccgacgtgctcggggatgcggccctccaacgcctgcgcgaccggcagtggctggaggcggtgttc

SEQ ID NO: 96713 - DNA, 120 bp, Artificial Sequence
  ENSG00000090470_4 (sequence is synthesized)
gctggaggcggtgttcgggaccccgcggcgggcaggctgtccggtgccccagcgcacgcatgccgggcccagccttggcgaagtgcgcgcgcgattgctccgggctctgcgcctggtgcg

SEQ ID NO: 96714 - DNA, 120 bp, Artificial Sequence
  ENSG00000090470_5 (sequence is synthesized)
agccaggccctgcgcgaggccgaagccgacggcgcggcctgggtcctgctgtactcccagaccgcgccgctgcgcgcggaactggccgagcggctacagccgttgacccaggctgcctat

SEQ ID NO: 96715 - DNA, 120 bp, Artificial Sequence
  ENSG00000090470_6 (sequence is synthesized)
ctatgtgggcgaggcgcggaggaggctggagagggtccggcgccgccggctgcggcttcgcgagagggcccgggaacgcgaggccgagcgggaggcagaggccgcgcgggcagtggaacg

SEQ ID NO: 96716 - DNA, 120 bp, Artificial Sequence
  ENSG00000090470_7 (sequence is synthesized)
caggagattgaccgctggagggtgaagtgtgtgcaggaggtggaggagaagaagcgggagcaggaactcaaagcagccgctgatggcgtactatctgaagtgaggaaaaaacaagcagat

SEQ ID NO: 96717 - DNA, 120 bp, Artificial Sequence
  ENSG00000090470_8 (sequence is synthesized)
accaaaagaatggtggacattctacgggctttggagaaattgaggaaactgaggaaagaggctgcagcgaggaaaggggtctgtcctccagcctcagcagatgagacttttacgcatcat

SEQ ID NO: 96718 - DNA, 120 bp, Artificial Sequence
  ENSG00000090470_9 (sequence is synthesized)
cttcagcgactgagaaaactcattaaaaagcgctctgaactgtatgaagctgaagagagagccctcagagttatgctagaaggagaacaagaggaagagaggaaaagagaattagaaaag

SEQ ID NO: 96719 - DNA, 120 bp, Artificial Sequence
  ENSG00000090470_10 (sequence is synthesized)
aaacaaagaaaagaaaaagagaaaattttacttcagaaacgtgaaattgagtccaagttgtttggggatccagatgagttcccacttgctcacctcttggagcctttccgacagtattat

SEQ ID NO: 96720 - DNA, 120 bp, Artificial Sequence
  ENSG00000090470_11 (sequence is synthesized)
gtgccatccgatcatcccaaaggcaacttcgttccccaaggatgggtccttcccccgctccccagcaacgacatctgggcaactgctgttaagctgcattagtaaagatgctccaggagt

SEQ ID NO: 96721 - DNA, 120 bp, Artificial Sequence
  ENSG00000090470_12 (sequence is synthesized)
gtggtccagccagcgctctttccagctgtaaatattagcgatggtgccatcttttgctgtagactaaactgcaacttctaaattccatgtggcattcccctaccctgaagttatgctttc

SEQ ID NO: 96722 - DNA, 120 bp, Artificial Sequence
  ENSG00000090470_13 (sequence is synthesized)
cttctgtgctctgtgctggccagaggtgcctcttgaatcagattaatgtggtttttcaggaaaggacttaggtgaactgaggtttttaccacaggcagtgaatgaccttggttcaccaaa

SEQ ID NO: 96723 - DNA, 120 bp, Artificial Sequence
  ENSG00000090470_14 (sequence is synthesized)
tttgcctctgttttgaggggcttggtccagagtgacttgttaatttactctaacttccttgtgtgttgatgggtaagtacactcaaacactgaatacaggtgtgtgatgggtagatttca

SEQ ID NO: 96724 - DNA, 120 bp, Artificial Sequence
  ENSG00000090470_15 (sequence is synthesized)
cagcccttctactaatagtgagtgtgaaggcaagcttgatgcaaaacctcctgacctttcctacctgaagagccctttgacttctaggaagaaaggtcaaaaatgttatcttcagttgtg

SEQ ID NO: 96725 - DNA, 120 bp, Artificial Sequence
  ENSG00000090470_16 (sequence is synthesized)
ttaatcccagttttagtgcagcttaggaggctgctagttaggaagatggcagtggctgtaggctgggttgccagaaaagatggtggcctagtcttattattcagatggagaacttagaaa

SEQ ID NO: 96726 - DNA, 120 bp, Artificial Sequence
  ENSG00000090470_17 (sequence is synthesized)
acctgaagagtacccaaattggattgtattttaatggacaatggctgtattttttccatgttagaaggatcctaatgaaagcacctgttatttttaagtttctaagggtctagttgttca

SEQ ID NO: 96727 - DNA, 120 bp, Artificial Sequence
  ENSG00000090470_18 (sequence is synthesized)
gaatccccaaggatatttccctaacctcactcagtcacattgtaggagccagtgtagctatggaattatcttaggaactcaagcttctaaaactatccatgtagtcaaatctaggggaaa

SEQ ID NO: 96728 - DNA, 61 bp, Artificial Sequence
  ENSG00000090470_19 (sequence is synthesized)
aagcttctaaaactatccatgtagtcaaatctaggggaaaaagcaaataaaaatagtaaaa

SEQ ID NO: 96729 - DNA, 63 bp, Artificial Sequence
  ENSG00000090470_20 (sequence is synthesized)
tgtctctactaaaaatacaaaaaaatattagctgggcgtaaaacccaggaggcagagcttgca

SEQ ID NO: 96730 - DNA, 68 bp, Artificial Sequence
  ENSG00000090470_21 (sequence is synthesized)
ccacgaaaatttattttttatattcattaataaatgctgttgtgcttggagatgatcactcatataac

SEQ ID NO: 96731 - DNA, 120 bp, Artificial Sequence
  ENSG00000090470_22 (sequence is synthesized)
tgtgcttggagatgatcactcatataacatgtcatttttttggttctgttttggtttggtttttgccaattattttgttatatttccaaaaaactaaataaaaatcatttttatttttta

SEQ ID NO: 96732 - DNA, 120 bp, Artificial Sequence
  ENSG00000090470_23 (sequence is synthesized)
ccctgccagcgctcatccagatcaggtcagaggggctggctctccatgttgtctttctcttaggtagcaggaagcacttgaagaagtgcttacattgtttaggtctattactgtcttttt

SEQ ID NO: 96733 - DNA, 120 bp, Artificial Sequence
  ENSG00000090470_24 (sequence is synthesized)
cttgtttagtcctcattagtccttgagaagttgatgtccctatttttataggtgaagaaaaaaactcaggttgtgacttgccctgtgttagtaggcacatatgcaaatacagaatctgta

SEQ ID NO: 96734 - DNA, 120 bp, Artificial Sequence
  ENSG00000090470_25 (sequence is synthesized)
aataatgaggattgactttatttgttatttggttatccataaggtttaagttcttcagagtttttcctctttttatatgtacatttaagaaatatagtcattttcttgattcctagaaat

SEQ ID NO: 96735 - DNA, 80 bp, Artificial Sequence
  ENSG00000090487_0 (sequence is synthesized)
ggcggcccaagctcgctcggccacgcgccccgccccctcagaggccggcctcccgcacgcaccgcgcagcctgctgtgcc

SEQ ID NO: 96736 - DNA, 120 bp, Artificial Sequence
  ENSG00000090487_1 (sequence is synthesized)
tgcccgtgggtcccgagtgctccgccgcccgccccgacccgggcccagccgcctccacggcccgcgctcgtactggagcgaagagcggcctcctgaaggaggggaagggacgtgggggcg

SEQ ID NO: 96737 - DNA, 120 bp, Artificial Sequence
  ENSG00000090487_2 (sequence is synthesized)
gccacggcaggattaacctccatttcagctaatcatgggagagattaaagtctctcctgattataactggtttagaggtacagttccccttaaaaagattattgtggatgatgatgacag

SEQ ID NO: 96738 - DNA, 120 bp, Artificial Sequence
  ENSG00000090487_3 (sequence is synthesized)
taagatatggtcgctctatgacgcgggcccccgaagtatcaggtgtcctctcatattcctgccccctgtcagtggaactgcagatgtctttttccggcagattttggctctgactggatg

SEQ ID NO: 96739 - DNA, 120 bp, Artificial Sequence
  ENSG00000090487_4 (sequence is synthesized)
gggttaccgggttatcgctttgcagtatccagtttattgggaccatctcgagttctgtgatggattcagaaaacttttagaccatttacaattggataaagttcatctttttggcgcttc

SEQ ID NO: 96740 - DNA, 120 bp, Artificial Sequence
  ENSG00000090487_5 (sequence is synthesized)
tttgggaggctttttggcccagaaatttgctgaatacactcacaaatctcctagagtccattccctaatcctctgcaattccttcagtgacacctctatcttcaaccaaacttggactgc

SEQ ID NO: 96741 - DNA, 120 bp, Artificial Sequence
  ENSG00000090487_6 (sequence is synthesized)
aaacagcttttggctgatgcctgcatttatgctcaaaaaaatagttcttggaaatttttcatctggcccggtggaccctatgatggctgatgccattgatttcatggtagacaggctaga

SEQ ID NO: 96742 - DNA, 120 bp, Artificial Sequence
  ENSG00000090487_7 (sequence is synthesized)
cgctttcaactgaagctaaagaagaaatgtacaagctgtatcctaatgcccgaagagctcatctgaaaacaggaggcaatttcccatacctgtgcagaagtgcagaggtcaatctttatg

SEQ ID NO: 96743 - DNA, 120 bp, Artificial Sequence
  ENSG00000090487_8 (sequence is synthesized)
tacagatacatttgctgcaattccatggaaccaaatacgcggccattgacccatcaatggtcagtgccgaggagcttgaggtgcagaaaggcagccttggcatcagccaggaggagcagt

SEQ ID NO: 96744 - DNA, 120 bp, Artificial Sequence
  ENSG00000090487_9 (sequence is synthesized)
agtgtgtctctcgctgtcaatgatgagttgacccggtgtgttcttgtatagtcagtggcatcagcacccgtcagccagccttttccttcaggttcgtcaggctcaccggttctcactgtg

SEQ ID NO: 96745 - DNA, 120 bp, Artificial Sequence
  ENSG00000090487_10 (sequence is synthesized)
tctgggaagtaggactgatggtcatcttcatgacaggcggcatctccactaagcctgtgtaactgttccctctttggttttcttagcttttgaatttgaagaagtacttttgaagactcc

SEQ ID NO: 96746 - DNA, 120 bp, Artificial Sequence
  ENSG00000090487_11 (sequence is synthesized)
cattttaagaaccgtgcaaattttgctaccaaaagtcttcaccactgtgttcttaagtgaatgttaatttctgaggtttgggactttgtggtggtttttttcttcttttcttttccattc

SEQ ID NO: 96747 - DNA, 120 bp, Artificial Sequence
  ENSG00000090487_12 (sequence is synthesized)
ttctttctttctttttatgttgtttgctgtaaatgctgcacatccagattgcatatcaggacattggttattttatgctttcttggatataaccatgatcagagtgccatggccactacc

SEQ ID NO: 96748 - DNA, 120 bp, Artificial Sequence
  ENSG00000090487_13 (sequence is synthesized)
ccactgtttgctctcctgcaaatcaactgcttttaatttacacttaaacaaattgttttgagtgttagctactgcctttctagatattagtcatttggaataaaaattcaatttaactga

SEQ ID NO: 96749 - DNA, 89 bp, Artificial Sequence
  ENSG00000090487_14 (sequence is synthesized)
ctggggccgaatctgggctgtggggtggtcggtgtgcttgtgaccctgcctttgtgtggctgtcaccggtgggactggcggggagctgt

SEQ ID NO: 96750 - DNA, 85 bp, Artificial Sequence
  ENSG00000090487_15 (sequence is synthesized)
tcgcggctggccactgaggagtaacttaatagctgtgtccaaattccaaaagcttttttcccaagagcatgagaagagatgtcac

SEQ ID NO: 96751 - DNA, 120 bp, Artificial Sequence
  ENSG00000090487_16 (sequence is synthesized)
gcctcctgaaggaggggaagggacgtgggggcggccacggcagcaaacttttaagaactgtgagcagaggccagtaattttggagacaggacctcggcctgaaagtgatagatgtctttg

SEQ ID NO: 96752 - DNA, 120 bp, Artificial Sequence
  ENSG00000090487_17 (sequence is synthesized)
gatttggaaaagtatacccctttggtggatgaaagagagctaggagaacaaactttcctattcataccactcacagctgttttccctttgcagcagtgatctttttttcacttagacgtc

SEQ ID NO: 96753 - DNA, 120 bp, Artificial Sequence
  ENSG00000090487_18 (sequence is synthesized)
agttggtcagatgcaacatttggtatccattttacctttcatgtactgccaaactagcacaagtgttaaaattacttgtctctacaaaaatttagtcacagcggagtggaatctctccat

SEQ ID NO: 96754 - DNA, 120 bp, Artificial Sequence
  ENSG00000090487_19 (sequence is synthesized)
acgtgatcacgtgcccttcaaacttttaagaactgtgagcagaggccagtaattttggagacaggacctcggcctgaaagtgatagatgtctttgttgttactgagtgtgggccaggtgt

SEQ ID NO: 96755 - DNA, 120 bp, Artificial Sequence
  ENSG00000090487_20 (sequence is synthesized)
aaggtttgtaaacgggggatgaggaacagagcgggaccggagtgtctcatttttcctcttctcgttttcctggggagttataagttagacatttatgctgcttcctttgtctccacctac

SEQ ID NO: 96756 - DNA, 65 bp, Artificial Sequence
  ENSG00000090487_21 (sequence is synthesized)
cccaggctggagtgcagtggcgccatcccagctcactgcaagctctgtcttcccgccaccacgcc

SEQ ID NO: 96757 - DNA, 89 bp, Artificial Sequence
  ENSG00000090487_22 (sequence is synthesized)
actggtttagaggtacagttccccttaaaaaggttcaagagattctcctgcctcaacctgccaagtagctaggattacaggcatgcgct

SEQ ID NO: 96758 - DNA, 120 bp, Artificial Sequence
  ENSG00000090487_23 (sequence is synthesized)
aagcagcagccctttggaagattataaagtagttctaagtagttctgtggaatacgttagccctgaggaaagaaaaggagatcagaggagtttgtcatgcatgctaatctggtgtgagct

SEQ ID NO: 96759 - DNA, 120 bp, Artificial Sequence
  ENSG00000090487_24 (sequence is synthesized)
ccaggttaccttgtaacaaacaaggcagtagtagtaaaattgtcagtgaaatgacagtgtaaaataacataaaaagcaaatttataaggttttccacttttttcttttaaccttccctcc

SEQ ID NO: 96760 - DNA, 120 bp, Artificial Sequence
  ENSG00000090487_25 (sequence is synthesized)
aaaggaagcggaggctttgagtggaggactacggagagcgtctacggttgtgccaaaggaaaaaaaatgttcctaagaaaagagtatacaaagttgtgttcatcaaagtctggaacccaa

SEQ ID NO: 96761 - DNA, 120 bp, Artificial Sequence
  ENSG00000090512_0 (sequence is synthesized)
acaagccagccagtccctgcagctccacaaactgacccatcctgggccttgttctccacagaatgggtctgctccttcccctggcactctgcatcctagtcctgtgctgcggagcaatgt

SEQ ID NO: 96762 - DNA, 120 bp, Artificial Sequence
  ENSG00000090512_1 (sequence is synthesized)
ctccaccccagctggccctcaacccctcggctctgctctcccggggctgcaatgactcagatgtgctggcagttgcaggctttgccctgcgggatattaacaaagacagaaaggatggct

SEQ ID NO: 96763 - DNA, 120 bp, Artificial Sequence
  ENSG00000090512_2 (sequence is synthesized)
atgtgctgagactcaaccgagtgaacgacgcccaggaatacagacggggtggcctgggatctctgttctatcttacactggatgtgctagagactgactgccatgtgctcagaaagaagg

SEQ ID NO: 96764 - DNA, 120 bp, Artificial Sequence
  ENSG00000090512_3 (sequence is synthesized)
catggcaagactgtggaatgaggatattttttgaatcagtttatggtcaatgcaaagcaatattttatatgaacaacccaagtagagttctctatttagctgcttataactgtactcttc

SEQ ID NO: 96765 - DNA, 120 bp, Artificial Sequence
  ENSG00000090512_4 (sequence is synthesized)
gcccagtttcaaaaaaaaagatttacatgacgtgccctgactgcccaagctccatacccactgactcttccaatcaccaagtgctggaggctgccaccgagtctcttgcgaaatacaaca

SEQ ID NO: 96766 - DNA, 120 bp, Artificial Sequence
  ENSG00000090512_5 (sequence is synthesized)
atgagaacacatccaagcagtattctctcttcaaagtcaccagggcttctagccagtgggtggtcggcccttcttactttgtggaatacttaattaaagaatcaccatgtactaaatccc

SEQ ID NO: 96767 - DNA, 120 bp, Artificial Sequence
  ENSG00000090512_6 (sequence is synthesized)
aggccagcagctgttcacttcagtcctccgactctgtgcctgttggtctttgcaaaggttctctgactcgaacacactgggaaaagtttgtctctgtgacttgtgacttctttgaatcac

SEQ ID NO: 96768 - DNA, 120 bp, Artificial Sequence
  ENSG00000090512_7 (sequence is synthesized)
aaacctacaaaccttcccaaggtggaagaatcccagcagaaaaacacccccccaacagactccccctccaaagctgggccaagaggatctgtccaatatcttcctgacttggatgataaa

SEQ ID NO: 96769 - DNA, 120 bp, Artificial Sequence
  ENSG00000090512_8 (sequence is synthesized)
aattcccaggaaaagggccctcaggaggcctttcctgtgcatctggacctaaccacgaatccccagggagaaaccctggatatttccttcctcttcctggagcctatggaggagaagctg

SEQ ID NO: 96770 - DNA, 120 bp, Artificial Sequence
  ENSG00000090512_9 (sequence is synthesized)
gtggtcctgcctttccccaaagaaaaagcacgcactgctgagtgcccagggccagcccagaatgccagccctcttgtccttccgccatgagaatcacacagagtcttctgtaggggtatg

SEQ ID NO: 96771 - DNA, 120 bp, Artificial Sequence
  ENSG00000090512_10 (sequence is synthesized)
gtgcgccgcatgacatgggaggcgatggggacgatggacagagacagagcgtgcacacgtagagtggctagtgaaggacgcctttttgactcttcttggtctcagcatgttgactgggat

SEQ ID NO: 96772 - DNA, 120 bp, Artificial Sequence
  ENSG00000090512_11 (sequence is synthesized)
tggaaataatgagactgagccctcggcttgggctgcactctaccctgtacactgccttgtaccctgagctgcatcacctcctaaactgagcagtctcataccatggagagatgcctctct

SEQ ID NO: 96773 - DNA, 120 bp, Artificial Sequence
  ENSG00000090512_12 (sequence is synthesized)
tatgtcttcagccactcacttataaagatacttatcttttcagcagtatatatgtgctgaaatctcagcatgaaagcattgcatgagtaaagatactttccctaacaccgggaggcgtga

SEQ ID NO: 96774 - DNA, 120 bp, Artificial Sequence
  ENSG00000090512_13 (sequence is synthesized)
gcaactaatgcccagcacagtttcagtccctaaattccctttaattccaggacaggtattagctgcgtagggcccataccatttccaaccctctacctcttttcatctgtctggaagtct

SEQ ID NO: 96775 - DNA, 120 bp, Artificial Sequence
  ENSG00000090512_14 (sequence is synthesized)
gtcagcatttgtccagccctgctggagagccactaggagaggcatcagtctccagtacaaattaacaaaccggctgctggcttatgtatcagttgcctatgcatagggtcagtatactca

SEQ ID NO: 96776 - DNA, 120 bp, Artificial Sequence
  ENSG00000090512_15 (sequence is synthesized)
cccccaggcctgaacaactctgggtcctcaggaaccctgaaggtgtgactggcaaagctgaggccctggctcgggagctgcttccctgagaggactgcgcctacagcatccttgacatct

SEQ ID NO: 96777 - DNA, 120 bp, Artificial Sequence
  ENSG00000090520_0 (sequence is synthesized)
ttggctctcgcctaccgggggcttctctcaccgggactcgggactcccgggaagtggaccggcagaagagggggctagctagctgtctctgcggaccaaggagacccccgcgcccccccg

SEQ ID NO: 96778 - DNA, 120 bp, Artificial Sequence
  ENSG00000090520_1 (sequence is synthesized)
gtgtgaggcggcctcacagggccgggtgggctggcgagccgacgcggcggcggaggaggctgtgaggagtgtgtggaacaggacccgggacagaggaaccatggctccgcagaacctgag

SEQ ID NO: 96779 - DNA, 120 bp, Artificial Sequence
  ENSG00000090520_2 (sequence is synthesized)
caccttttgcctgttgctgctatacctcatcggggcggtgattgccggacgagatttctataagatcttgggggtgcctcgaagtgcctctataaaggatattaaaaaggcctataggaa

SEQ ID NO: 96780 - DNA, 120 bp, Artificial Sequence
  ENSG00000090520_3 (sequence is synthesized)
actagccctgcagcttcatcccgaccggaaccctgatgatccacaagcccaggagaaattccaggatctgggtgctgcttatgaggttctgtcagatagtgagaaacggaaacagtacga

SEQ ID NO: 96781 - DNA, 120 bp, Artificial Sequence
  ENSG00000090520_4 (sequence is synthesized)
tacttatggtgaagaaggattaaaagatggtcatcagagctcccatggagacattttttcacacttctttggggattttggtttcatgtttggaggaacccctcgtcagcaagacagaaa

SEQ ID NO: 96782 - DNA, 120 bp, Artificial Sequence
  ENSG00000090520_5 (sequence is synthesized)
tattccaagaggaagtgatattattgtagatctagaagtcactttggaagaagtatatgcaggaaattttgtggaagtagttagaaacaaacctgtggcaaggcaggctcctggcaaacg

SEQ ID NO: 96783 - DNA, 120 bp, Artificial Sequence
  ENSG00000090520_6 (sequence is synthesized)
gaagtgcaattgtcggcaagagatgcggaccacccagctgggccctgggcgcttccaaatgacccaggaggtggtctgcgacgaatgccctaatgtcaaactagtgaatgaagaacgaac

SEQ ID NO: 96784 - DNA, 120 bp, Artificial Sequence
  ENSG00000090520_7 (sequence is synthesized)
tagaaatagagcctggggtgagagacggcatggagtacccctttattggagaaggtgagcctcacgtggatggggagcctggagatttacggttccgaatcaaagttgtcaagcacccaa

SEQ ID NO: 96785 - DNA, 120 bp, Artificial Sequence
  ENSG00000090520_8 (sequence is synthesized)
tatttgaaaggagaggagatgatttgtacacaaatgtgacaatctcattagttgagtcactggttggctttgagatggatattactcacttggatggtcacaaggtacatatttcccggg

SEQ ID NO: 96786 - DNA, 120 bp, Artificial Sequence
  ENSG00000090520_9 (sequence is synthesized)
ataagatcaccaggccaggagcgaagctatggaagaaaggggaagggctccccaactttgacaacaacaatatcaagggctctttgataatcacttttgatgtggattttccaaaagaac

SEQ ID NO: 96787 - DNA, 120 bp, Artificial Sequence
  ENSG00000090520_10 (sequence is synthesized)
agttaacagaggaagcgagagaaggtatcaaacagctactgaaacaagggtcagtgcagaaggtatacaatggactgcaaggatattgagagtgaataaaattggactttgtttaaaata

SEQ ID NO: 96788 - DNA, 120 bp, Artificial Sequence
  ENSG00000090520_11 (sequence is synthesized)
agtgaataagcgatatttattatctgcaaggtttttttgtgtgtgtttttgtttttattttcaatatgcaagttaggcttaatttttttatctaatgatcatcatgaaatgaataagagg

SEQ ID NO: 96789 - DNA, 120 bp, Artificial Sequence
  ENSG00000090520_12 (sequence is synthesized)
gcttaagaatttgtccatttgcattcggaaaagaatgaccagcaaaaggtttactaatacctctccctttggggatttaatgtctggtgctgccgcctgagtttcaagaattaaagctgc

SEQ ID NO: 96790 - DNA, 120 bp, Artificial Sequence
  ENSG00000090520_13 (sequence is synthesized)
aagaggactccaggagcaaaagaaacacaatatagagggttggagttgttagcaatttcattcaaaatgccaactggagaagtctgtttttaaatacattttgttgttatttttttcatg

SEQ ID NO: 96791 - DNA, 120 bp, Artificial Sequence
  ENSG00000090520_14 (sequence is synthesized)
gagacctggcggaccccgttgctagagcggcagattgcggctcaagcgtctgagaaaatctaggctggggtcgagagtccgcaacagtggcacctggagccagacccaccgctttctggt

SEQ ID NO: 96792 - DNA, 120 bp, Artificial Sequence
  ENSG00000090520_15 (sequence is synthesized)
gtcgcgcctttcaacccgggggggtaggaagctttctgttgctccgcataactgtggtcagctaatagctgctgcctttccgagacagttgtcttatggagttgcttggagaacgtaaaa

SEQ ID NO: 96793 - DNA, 120 bp, Artificial Sequence
  ENSG00000090520_16 (sequence is synthesized)
taagaggcctaagcaatgcgtctgatgtacacctgtcgtggaataactgttcccgctcattcggccgctgtacctctgctccctcattcggagcgtagctgggtatgaatgaaattccgg

SEQ ID NO: 96794 - DNA, 120 bp, Artificial Sequence
  ENSG00000090520_17 (sequence is synthesized)
gcttgtagcacagagaaaacttctctcccacaattggttggtgctggggaggaagctcctgattggtggaaagtccgaggaagtgggcaagccggagggatttcgtgtacctcaggtgcc

SEQ ID NO: 96795 - DNA, 120 bp, Artificial Sequence
  ENSG00000090520_18 (sequence is synthesized)
ctcactctgaccggccccctatcattacgtaattttctacgactcgcggtagctcaggcagagcgggttcctgcagcggcgcgaccctctgacgtctccgcttctaattggtcaagagct

SEQ ID NO: 96796 - DNA, 120 bp, Artificial Sequence
  ENSG00000090520_19 (sequence is synthesized)
tttgtttcttccagttttattcaattccaaacagcgcttttatgaacattttaatccatatttccaggttcagatgaacaagaatatctcttgggtggatatgcttgagagtagaattgc

SEQ ID NO: 96797 - DNA, 120 bp, Artificial Sequence
  ENSG00000090520_20 (sequence is synthesized)
tgggtaatatgaaccaatgttcatttttacaagttaatactgtattgcttttgaaattgattgtactgatgcttctacatgcaatttatgagatcctatagattcactgcctcactaata

SEQ ID NO: 96798 - DNA, 120 bp, Artificial Sequence
  ENSG00000090520_21 (sequence is synthesized)
cttggaattattagacttcttaatttttgctcatcaaatgggtataaaatatctcattatggtcttgttttacattttttaaattaccaattaggatcagcatctcttcctgtgtttatt

SEQ ID NO: 96799 - DNA, 120 bp, Artificial Sequence
  ENSG00000090520_22 (sequence is synthesized)
ggccatatttgtttcctctcttgtgaaatgcctgttctttcttttgcctcttgcttattgatttctaagagtacttcactcttgctgctaattctttgttggctgtatgtaatgcagata

SEQ ID NO: 96800 - DNA, 120 bp, Artificial Sequence
  ENSG00000090520_23 (sequence is synthesized)
taggctatctgtttgtaacttgtcttttcattatgtttaagatttatttcaattttcagcaaacagaactaattaatgtaattaaatctatcagtctttaatggttagtttttgtgtctt

SEQ ID NO: 96801 - DNA, 120 bp, Artificial Sequence
  ENSG00000090520_24 (sequence is synthesized)
tatcagtctttaatggttagtttttgtgtctttttaaagaaattcgtttttgttctaaaataagaaagcagccatgtgcagtggagcacacttgtaatctcagctactcaggaggctgag

SEQ ID NO: 96802 - DNA, 120 bp, Artificial Sequence
  ENSG00000090520_25 (sequence is synthesized)
gctatcatgtcctgtgattgcatctgtgaatagccactgcactctagcctggacaacataactgaaactcatctctggaaaaaaattttaaaataaaataagaaagctgttcacctatat

SEQ ID NO: 96803 - DNA, 120 bp, Artificial Sequence
  ENSG00000090520_26 (sequence is synthesized)
tttctgctaaaactctgggatcttttaatatgaggttattcatcttttttaaattctggaaaatatgtctcattattttttacaattctatcactcctacttctgtctgctcttaacttt

SEQ ID NO: 96804 - DNA, 120 bp, Artificial Sequence
  ENSG00000090520_27 (sequence is synthesized)
cttttaaatacaaaaaataaattttctttatccttcactgcttccttctgggaggtacctcattttgatctcccagcttactacttcagtcttcagctatatccattctaataataaccc

SEQ ID NO: 96805 - DNA, 120 bp, Artificial Sequence
  ENSG00000090520_28 (sequence is synthesized)
atctgctgtgttttaatttcaactcatatttttatgcataatatttctacttgattcttgcattatttcttactctatatcattttactaatgccttccctccttaagtattatcatgct

SEQ ID NO: 96806 - DNA, 120 bp, Artificial Sequence
  ENSG00000090520_29 (sequence is synthesized)
tgttttaagttcctggtctgtctaatctttttttaagcaaagtacagttgcttaaaatatatgtgttattcagtttgttgtcttttgtggggcagatgatagaccttctcaggtatctag

SEQ ID NO: 96807 - DNA, 120 bp, Artificial Sequence
  ENSG00000090520_30 (sequence is synthesized)
ctgtcttggcctttgagctgatattcccttacaggtaccagcaactacctttccctgcagagcatcatgggctgagccctggcccactggttttaactgtgttttgtttggtgtcttggg

SEQ ID NO: 96808 - DNA, 120 bp, Artificial Sequence
  ENSG00000090520_31 (sequence is synthesized)
gtgttttttgttttgtttgctgtctggagtcttttgttttctgcagtcatgggaaacagttcaaaacagccctctatctgtgggattttctcatatattctgtgctgtagttactgtttc

SEQ ID NO: 96809 - DNA, 120 bp, Artificial Sequence
  ENSG00000090520_32 (sequence is synthesized)
ctggaatccatgttttcttgtagtttttccaggatactggaggagacagccggtagcctgtgcatatgtgccatcttgacaagaagcgtattcttcttagttgtagctgcttctctgaat

SEQ ID NO: 96810 - DNA, 120 bp, Artificial Sequence
  ENSG00000090520_33 (sequence is synthesized)
aattgaaagaagagatatagacaatcacagaagatgcaactgacttgtaatactgttgaggctgcaggagaaaagggcattaaaaatattcataaaccagtgaggttgtttagatgggag

SEQ ID NO: 96811 - DNA, 120 bp, Artificial Sequence
  ENSG00000090520_34 (sequence is synthesized)
gaaagaggtgagcctaattagcgcccatgttcccttccaagcctgttctgcagttgtcactaatacacagtagacatcactttttgctgttagtgtgttcccgaacaaactcttttttaa

SEQ ID NO: 96812 - DNA, 120 bp, Artificial Sequence
  ENSG00000090520_35 (sequence is synthesized)
aaataccttgagaaataggatagcacaatggttaaggagcatggactttgcagctagactgcctagtttagaatcctggctctgccatgtattagtcatgtggccttggtcatgttactt

SEQ ID NO: 96813 - DNA, 120 bp, Artificial Sequence
  ENSG00000090520_36 (sequence is synthesized)
aacctttctatacttctgttacctcacctgtaaaatggggataataacagtacctgtctcatagagttgtgagggttaaatgaatatgtaaaagtgtttggcacatggcttggcatgtag

SEQ ID NO: 96814 - DNA, 120 bp, Artificial Sequence
  ENSG00000090520_37 (sequence is synthesized)
taagtgctataaaatgtttgctctgattactgttattgttgctataatttactctgttgacctgggcctttcatatgttggtaggctttaaaggatttttctccaagcattcgtcattct

SEQ ID NO: 96815 - DNA, 120 bp, Artificial Sequence
  ENSG00000090520_38 (sequence is synthesized)
gctgcgtgagcacataccttgtgattagatgtttgactatttaaacaggcaaaactaggaatacatttctgcatatatatcaattttacattcttagagggatcagaatgtttgattgca

SEQ ID NO: 96816 - DNA, 120 bp, Artificial Sequence
  ENSG00000090520_39 (sequence is synthesized)
gtcaactacaaagagatggtcattgtttctcttcctacatgttaaagtatctgaatggagatagctccagaaaatagtcctggattgcatttcctgaaataaggagacattttcagtagg

SEQ ID NO: 96817 - DNA, 120 bp, Artificial Sequence
  ENSG00000090520_40 (sequence is synthesized)
ttaaccagaggattggatagtagccacataccaggttttgaaggtagtgattgttcctcaggggttatgctttacacagctcggatttcctaaaagataatcattacatgaagtacttta

SEQ ID NO: 96818 - DNA, 120 bp, Artificial Sequence
  ENSG00000090520_41 (sequence is synthesized)
actcagtagcatttagttgtggcttagaaatgctgatatcatacactttatttttcggttctcttgtttcttactcccgtctctacttctccagctttagaatttgagtcatttaagtat

SEQ ID NO: 96819 - DNA, 120 bp, Artificial Sequence
  ENSG00000090520_42 (sequence is synthesized)
gtgtttgcttcattcctgtttgggggctgatttgtactcttcaaagagttttgtcagctttagatctctgagggatagattgccagagaaggggaagtttcagtccaggcatatgtgcag

SEQ ID NO: 96820 - DNA, 120 bp, Artificial Sequence
  ENSG00000090520_43 (sequence is synthesized)
tgttcatattgactcccagaacttgcacttttgactaaaaataagaggtttatatgtaccttctctgtctttttgagggtaagagagagtgatcaaatgcacaaaattgaattaattata

SEQ ID NO: 96821 - DNA, 120 bp, Artificial Sequence
  ENSG00000090520_44 (sequence is synthesized)
atgcttggttcatgatacactgatgtcattgttttatcacccagcttaagaactaagtaaaacattaccatgacttaatctacctacatgctacttccctgttccattaccctgcctccc

SEQ ID NO: 96822 - DNA, 120 bp, Artificial Sequence
  ENSG00000090530_0 (sequence is synthesized)
gcctctcagtacgcggagcgccggcggtcacctggggctcgcggagcggccagatcgcggcggagtcggcgcgcttccccgagggaaggtgggagaggggacccggacgcgaggtgcccc

SEQ ID NO: 96823 - DNA, 120 bp, Artificial Sequence
  ENSG00000090530_1 (sequence is synthesized)
gaagccctctcgagcgtaaccgtcccgcgcctctctgaggcggaggatgcgggagcgcatctgggcgccgccgctgctgctgctgctgccgctgctactgccgccgccactgtggggcgg

SEQ ID NO: 96824 - DNA, 120 bp, Artificial Sequence
  ENSG00000090530_2 (sequence is synthesized)
ccccccggacagcccacgccgggagctggagctggagcccgggcctctgcagcccttcgacctgctctacgccagcggcgcggccgcctactacagcggagactacgagcgagcggtgcg

SEQ ID NO: 96825 - DNA, 120 bp, Artificial Sequence
  ENSG00000090530_3 (sequence is synthesized)
cggagactacgagcgagcggtgcgcgacttggaagcggcgctgcgcagccaccggcgcctgcgggaaatccgcacgcgctgtgcccgccactgcgcggcgcgccacccgctcccgccccc

SEQ ID NO: 96826 - DNA, 120 bp, Artificial Sequence
  ENSG00000090530_4 (sequence is synthesized)
tgagctgccccttttccgctccttgttggggcgggcgcgctgttatcgcagctgtgagacccagcgcctcgggggccccgcatcccgccaccgcgtcagcgaggatgtgcgcagcgactt

SEQ ID NO: 96827 - DNA, 120 bp, Artificial Sequence
  ENSG00000090530_5 (sequence is synthesized)
ccagcgcagagtgccctacaactacctgcagcgggcctacatcaagcttaaccagctcgaaaaagcagtggaagcagctcacacatttttcgtggctaaccctgagcacatggaaatgca

SEQ ID NO: 96828 - DNA, 120 bp, Artificial Sequence
  ENSG00000090530_6 (sequence is synthesized)
gcagaacattgagaattacagggcgacagctggtgttgaagcattgcagttggtagacagagaagccaagccacacatggagagttacaatgcaggagttaaacattatgaggctgatga

SEQ ID NO: 96829 - DNA, 120 bp, Artificial Sequence
  ENSG00000090530_7 (sequence is synthesized)
ctttgagatggctatcaggcacttcgaacaagccttaagagaatatttcgttgaagatacagaatgccggaccctatgtgaggggcctcagagatttgaagaatatgagtatttagggta

SEQ ID NO: 96830 - DNA, 120 bp, Artificial Sequence
  ENSG00000090530_8 (sequence is synthesized)
taaggctggtctgtatgaagctattgcagatcactacatgcaggtgcttgtttgtcagcatgaatgtgtgagggaacttgccacccgccctggccgcctctctcccatcgagaattttct

SEQ ID NO: 96831 - DNA, 120 bp, Artificial Sequence
  ENSG00000090530_9 (sequence is synthesized)
tcctctgcactatgattacctacagtttgcctactatcgagttggtgagtatgtgaaagccctggagtgtgccaaagcctatcttctatgccatccagatgatgaggatgtcctagacaa

SEQ ID NO: 96832 - DNA, 120 bp, Artificial Sequence
  ENSG00000090530_10 (sequence is synthesized)
tgtggattactatgagagtctgctggatgatagcattgacccggcatccattgaggccagagaggatttaacaatgtttgtgaaacgtcataagctggagtctgagctgataaaatcagc

SEQ ID NO: 96833 - DNA, 120 bp, Artificial Sequence
  ENSG00000090530_11 (sequence is synthesized)
tgcagaaggtctggggttttcatacactgaaccgaattattggatcagatatggaggacgacaggatgagaatcgggtcccttcaggagtgaacgtagagggagcagaagttcatggatt

SEQ ID NO: 96834 - DNA, 120 bp, Artificial Sequence
  ENSG00000090530_12 (sequence is synthesized)
ctcaatgggaaaaaagctatcacccaagatagatcgagacctaagagaaggtggtcctctactctatgagaacatcacattcgtctacaactcggagcagctgaacgggactcagcgggt

SEQ ID NO: 96835 - DNA, 120 bp, Artificial Sequence
  ENSG00000090530_13 (sequence is synthesized)
tctcctggataacgtcctgtcggaagaacagtgccgggagctccacagcgtggccagtggaatcatgcttgttggtgatggatacagaggaaaaacttcaccccatacacccaatgaaaa

SEQ ID NO: 96836 - DNA, 120 bp, Artificial Sequence
  ENSG00000090530_14 (sequence is synthesized)
ttattttatgctgaactcaactctgtatttttcctatacacacatggtctgccgaacagccctgtctggtcagcaggatagaagaaatgacctcagtcatcccatccatgctgacaactg

SEQ ID NO: 96837 - DNA, 120 bp, Artificial Sequence
  ENSG00000090530_15 (sequence is synthesized)
tttgttggatccagaggccaacgaatgctggaaggagcctcctgcttacacatttcgagactatagtgctctcctatatatgaatgatgactttgaaggaggagaattcatattcacaga

SEQ ID NO: 96838 - DNA, 120 bp, Artificial Sequence
  ENSG00000090530_16 (sequence is synthesized)
gatggatgctaagactgtgactgcctctataaaaccaaaatgtgggcgcatgatcagcttctcatctggaggagagaaccctcatggggtgaaggcagtcaccaagggaaagaggtgtgc

SEQ ID NO: 96839 - DNA, 120 bp, Artificial Sequence
  ENSG00000090530_17 (sequence is synthesized)
tgtggctctgtggttcaccttggacccactttatagagaattggagcgaatacaggctgatgaagtgattgcaattctggatcaagaacagcaagggaagcatgaactgaatatcaaccc

SEQ ID NO: 96840 - DNA, 120 bp, Artificial Sequence
  ENSG00000090530_18 (sequence is synthesized)
taaagatgagctataaaaatgagaaagaatgttctatcaaatatttatttaaattgttaatcttatgagaacctttttatttttgtacagagccatggtataaattaacaggttaatgtc

SEQ ID NO: 96841 - DNA, 120 bp, Artificial Sequence
  ENSG00000090530_19 (sequence is synthesized)
ttaacaggttaatgtcagtcatcagatcttccttctcttcctaaggatgcttgtgttgcctcaatctatcaatctatctttcttgttttgggttgttttctctctctctctctctctctc

SEQ ID NO: 96842 - DNA, 120 bp, Artificial Sequence
  ENSG00000090530_20 (sequence is synthesized)
gtctaaccatgttgtctaggatatagggcagtggctattcacagatgtgatgatagcacactggagcctcaaactcttaggctcaggcgatccttcaagcctcccggggagctgggacca

SEQ ID NO: 96843 - DNA, 120 bp, Artificial Sequence
  ENSG00000090530_21 (sequence is synthesized)
gagctgggaccacaggcacgtgccaccacacccagctctctttcttggtttttcatcatttcatgtatctatcaaagcccagttcacctcctcccccaaacacacacacacacacacaca

SEQ ID NO: 96844 - DNA, 120 bp, Artificial Sequence
  ENSG00000090530_22 (sequence is synthesized)
cacacaattaagttgctgcaaattcaaaagcttagagagaataagcttcttggtggtgaaactacaactctcacgtgtgctccagttctaaaattaacctgtgcctggtctctgaagccc

SEQ ID NO: 96845 - DNA, 120 bp, Artificial Sequence
  ENSG00000090530_23 (sequence is synthesized)
tttcttgctctgtgcctttcagccacatccttaggtgctaacggccatgagctccgactctccaaagtgagctccactttgggtctgaggagcccctggcagagtccacgctgcctcagg

SEQ ID NO: 96846 - DNA, 120 bp, Artificial Sequence
  ENSG00000090530_24 (sequence is synthesized)
tatcatgggcgtaatgatcacccaggctccgggagatctcatggatgattactgtatgagacagaggggacttcagtctttccagggccttggtggaatttttggctctggtgttttcgc

SEQ ID NO: 96847 - DNA, 120 bp, Artificial Sequence
  ENSG00000090530_25 (sequence is synthesized)
cagacaataaacttacactggaagctttgattcaccctccacagtactccagaaaggactgtcctataagttgtacactttaaaaggtcatgtagaggttgtagtagaatggcttttcac

SEQ ID NO: 96848 - DNA, 120 bp, Artificial Sequence
  ENSG00000090530_26 (sequence is synthesized)
cctggtgactttggaagaaactcttgaatactgcctgcatccgggcaccatggccaggttgcctaggagtggggtccactgatgaaaagaggtgttttgtacttacataagaaaaataaa

SEQ ID NO: 96849 - DNA, 120 bp, Artificial Sequence
  ENSG00000090530_27 (sequence is synthesized)
tttctgattgattttaaccgtcatctgcttatattttgggggcccctcctcattgctgctatccagcacacagatttgtgcttgtgtctgatttgtttaataaagggaggcttattttaa

SEQ ID NO: 96850 - DNA, 120 bp, Artificial Sequence
  ENSG00000090530_28 (sequence is synthesized)
tagaatgaagattaaataaagatatctcttttaattaaaagaatagttataccagcatcctggaataaaatggggatggttcttagcattgactagagttctcagctttctggcagccaa

SEQ ID NO: 96851 - DNA, 120 bp, Artificial Sequence
  ENSG00000090530_29 (sequence is synthesized)
agcagaaaaagacctgatgaattcatagttatcattgatgacgtatcttcttgtatttgcttccagggaatcatgcttgttggtgatggatacagaggaaaaacttcaccccatacaccc

SEQ ID NO: 96852 - DNA, 120 bp, Artificial Sequence
  ENSG00000090530_30 (sequence is synthesized)
cacatttcgagactataggtatagctagaacctgcttcaaaacaaagcttttacctaacagttttcaagcagtgaaaactggaaaggtgctctgttttgcttgacgtcgtgttcatatct

SEQ ID NO: 96853 - DNA, 120 bp, Artificial Sequence
  ENSG00000090530_31 (sequence is synthesized)
ccaaggcagaaattctcaaataatcttctgaagtagctgccataaccaataagtggcattatcatctcacttttatcttaaaaattgtgcacagtttgcatcccatttcacaaaatgtcc

SEQ ID NO: 96854 - DNA, 120 bp, Artificial Sequence
  ENSG00000090530_32 (sequence is synthesized)
attttgttttaatatgaaaagtaaattttatgttcttttaaaaaaattcctgttctccctggaacatattccttgtggtatatgtatttcagtcagaatacaagggcatggagtcttggc

SEQ ID NO: 96855 - DNA, 120 bp, Artificial Sequence
  ENSG00000090530_33 (sequence is synthesized)
ctttatagagaattggtgagtttctcacccgcccagaaagccaattaggcttgcttcatgaactgctttatctgagaagtcctttaaattgcttcgtctgaggaaaagaagagggtaaag

SEQ ID NO: 96856 - DNA, 120 bp, Artificial Sequence
  ENSG00000090530_34 (sequence is synthesized)
gatgtttgtagaaatagctgtgtcaatgatatttgatagtcactaatctgtcttgagcttattaacaaattgtaaggctgggcgtggtggctcactcctataaccccagaactttgggag

SEQ ID NO: 96857 - DNA, 62 bp, Artificial Sequence
  ENSG00000090530_35 (sequence is synthesized)
ggagttcgagaccagcctgatgcgcctgtagttccagttactcgggaagctgaggcaggaga

SEQ ID NO: 96858 - DNA, 70 bp, Artificial Sequence
  ENSG00000090530_36 (sequence is synthesized)
tacaaaattagctggatgtggtggcatgcgcctgtagtttaaattgcagtaagccgagatcgcaccactg

SEQ ID NO: 96859 - DNA, 120 bp, Artificial Sequence
  ENSG00000090530_37 (sequence is synthesized)
tgttccaggccccattggacactctgagcattataaagatgctcatgataatttttttcctacttgagattagagtctaatctgaagagagttatgttatgcatacaattaattgtaata

SEQ ID NO: 96860 - DNA, 120 bp, Artificial Sequence
  ENSG00000090530_38 (sequence is synthesized)
aaggttgctaagaagatttagaggagtgaaataaggcaaactcaccgaggaaatagagaacttactagaggcagtgacatttaatttgactttaaaagacaggtgaacttgtttacaata

SEQ ID NO: 96861 - DNA, 120 bp, Artificial Sequence
  ENSG00000090530_39 (sequence is synthesized)
agaagaccacagaaatgcctccaggaggcaggctgggatccagggtccaaccaatattcttgtgagagtgtgaagccaaggaacacgaaagaggggaacaccttggctaagaatgtattc

SEQ ID NO: 96862 - DNA, 120 bp, Artificial Sequence
  ENSG00000090530_40 (sequence is synthesized)
gtgacagaggagaaggggaggaacaggaagcctccagctagtcgtttggaatctggcaaccatttctgtcagctttctcattcctagattgatgcagattgcttaattccttgagcttaa

SEQ ID NO: 96863 - DNA, 120 bp, Artificial Sequence
  ENSG00000090530_41 (sequence is synthesized)
gcacaatgtcctaaccgaaatccacaaatatgtagtagccttccccattagtcaatacagacatgacaatcctatattggctcaatgcaagctagtgcctgtttttcttacgacctccaa

SEQ ID NO: 96864 - DNA, 120 bp, Artificial Sequence
  ENSG00000090530_42 (sequence is synthesized)
tgaacccatttgtttctcatgttttgtttttttttttcagtctggttatgaaggtcgagtcccactgaagagcgctcgtctgttttatgacatcagcgaaaaggctcgaaggattgtaga

SEQ ID NO: 96865 - DNA, 120 bp, Artificial Sequence
  ENSG00000090530_43 (sequence is synthesized)
taatgctgacctttgtagacacgttgatggcctccctttaaaatcctttggacagacctaggctgactctaatgctgcaactcctttgtctttcagttggtgagtatgtgaaagccctgg

SEQ ID NO: 96866 - DNA, 120 bp, Artificial Sequence
  ENSG00000090530_44 (sequence is synthesized)
agctcctcctgcctccaaaggttctctgggccctgtaaaaccacgggctgcacaggaaaggcaggctatatattgttcttcccctggcccagcgccctgatccaatgcccggacacacat

SEQ ID NO: 96867 - DNA, 120 bp, Artificial Sequence
  ENSG00000090534_0 (sequence is synthesized)
agaagtggcccaggcaggcgtatgacctgctgctgtggaggggctgtgccccaccgccacatgtcttcctacccatctgctccccagagggctgcctgctgtgcacttgggtcctggagc

SEQ ID NO: 96868 - DNA, 120 bp, Artificial Sequence
  ENSG00000090534_1 (sequence is synthesized)
ccttctccacccggatagattcttcacccttggcccgcctttgccccaccctactctgcccagaagtgcaagagcctaagccgcctccatggccccaggaaggattcaggggagaggccc

SEQ ID NO: 96869 - DNA, 120 bp, Artificial Sequence
  ENSG00000090534_2 (sequence is synthesized)
caaacagggagccacgccagccagacaccccggccagaatggagctgactgaattgctcctcgtggtcatgcttctcctaactgcaaggctaacgctgtccagcccggctcctcctgctt

SEQ ID NO: 96870 - DNA, 120 bp, Artificial Sequence
  ENSG00000090534_3 (sequence is synthesized)
gtgacctccgagtcctcagtaaactgcttcgtgactcccatgtccttcacagcagactgagccagtgcccagaggttcaccctttgcctacacctgtcctgctgcctgctgtggacttta

SEQ ID NO: 96871 - DNA, 120 bp, Artificial Sequence
  ENSG00000090534_4 (sequence is synthesized)
gcttgggagaatggaaaacccagatggaggagaccaaggcacaggacattctgggagcagtgacccttctgctggagggagtgatggcagcacggggacaactgggacccacttgcctct

SEQ ID NO: 96872 - DNA, 120 bp, Artificial Sequence
  ENSG00000090534_5 (sequence is synthesized)
catccctcctggggcagctttctggacaggtccgtctcctccttggggccctgcagagcctccttggaacccagcttcctccacagggcaggaccacagctcacaaggatcccaatgcca

SEQ ID NO: 96873 - DNA, 120 bp, Artificial Sequence
  ENSG00000090534_6 (sequence is synthesized)
tcttcctgagcttccaacacctgctccgaggaaaggtgcgtttcctgatgcttgtaggagggtccaccctctgcgtcaggcgggccccacccaccacagctgtccccagcagaacctctc

SEQ ID NO: 96874 - DNA, 120 bp, Artificial Sequence
  ENSG00000090534_7 (sequence is synthesized)
caagattcctggtctgctgaaccaaacctccaggtccctggaccaaatccccggatacctgaacaggatacacgaactcttgaatggaactcgtggactctttcctggaccctcacgcag

SEQ ID NO: 96875 - DNA, 120 bp, Artificial Sequence
  ENSG00000090534_8 (sequence is synthesized)
gaccctaggagccccggacatttcctcaggaacatcagacacaggctccctgccacccaacctccagcctggatattctccttccccaacccatcctcctactggacagtatacgctctt

SEQ ID NO: 96876 - DNA, 120 bp, Artificial Sequence
  ENSG00000090534_9 (sequence is synthesized)
ccctcttccacccaccttgcccacccctgtggtccagctccaccccctgcttcctgacccttctgctccaacgcccacccctaccagccctcttctaaacacatcctacacccactccca

SEQ ID NO: 96877 - DNA, 120 bp, Artificial Sequence
  ENSG00000090534_10 (sequence is synthesized)
gaatctgtctcaggaagggtaaggttctcagacactgccgacatcagcattgtctcgtgtacagctcccttccctgcagggcgcccctgggagacaactggacaagatttcctactttct

SEQ ID NO: 96878 - DNA, 120 bp, Artificial Sequence
  ENSG00000090534_11 (sequence is synthesized)
cctgaaacccaaagccctggtaaaagggatacacaggactgaaaagggaatcatttttcactgtacattataaaccttcagaagctatttttttaagctatcagcaatactcatcagagc

SEQ ID NO: 96879 - DNA, 120 bp, Artificial Sequence
  ENSG00000090534_12 (sequence is synthesized)
agctagctctttggtctattttctgcagaaatttgcaactcactgattctctacatgctctttttctgtgataactctgcaaaggcctgggctggcctggcagttgaacagagggagaga

SEQ ID NO: 96880 - DNA, 120 bp, Artificial Sequence
  ENSG00000090534_13 (sequence is synthesized)
ctaaccttgagtcagaaaacagagaaagggtaatttcctttgcttcaaattcaaggccttccaacgcccccatcccctttactatcattctcagtgggactctgatcccatattcttaac

SEQ ID NO: 96881 - DNA, 120 bp, Artificial Sequence
  ENSG00000090534_14 (sequence is synthesized)
agatctttactcttgagaaatgaataagctttctctcagaaatgctgtccctatacactagacaaaactgagcctgtataaggaataaatgggagcgccgaaaagctccctaaaaagcaa

SEQ ID NO: 96882 - DNA, 120 bp, Artificial Sequence
  ENSG00000090534_15 (sequence is synthesized)
gagtctgagaagcggatcctggtagggcggtccagcctgggaatgagaggagatagagaagcggaggctagagcgcagcagcgagactcgggctcgtgccaccgcctgcgacctcggccc

SEQ ID NO: 96883 - DNA, 120 bp, Artificial Sequence
  ENSG00000090534_16 (sequence is synthesized)
tgtcagcagcgccacgaagtctgggacgggaggaagatggcctgagcactgtcaaacgccgctttggtggcccagcctcaaccacaaccccgctgttcgccagccccctacccgtgtggc

SEQ ID NO: 96884 - DNA, 120 bp, Artificial Sequence
  ENSG00000090534_17 (sequence is synthesized)
cgtcaccacgggcccgctcctcagcgcctggctccccgcggtcgctataactgcgatgctccgggtcccgcggatactcgaaggacaggccgctcggctgccgctccgaactgctgcgct

SEQ ID NO: 96885 - DNA, 120 bp, Artificial Sequence
  ENSG00000090534_18 (sequence is synthesized)
ctgcgggcgggggggtcccaggttgcccatgtccaggaaaagatggatccccctatccaaatcttctccgtggtgtgtgtgggtggaggagtggaccctggtccaggcaggggctccagg

SEQ ID NO: 96886 - DNA, 120 bp, Artificial Sequence
  ENSG00000090534_19 (sequence is synthesized)
tgcagagcctccttggaacccagacaagggaggcctgagatctggccctggtgtttggcctcaggaccatcctctgccctcagcttcctccacagggcaggaccacagctcacaaggatc

SEQ ID NO: 96887 - DNA, 120 bp, Artificial Sequence
  ENSG00000090534_20 (sequence is synthesized)
acaatgatttcctcctcatctttcaacctcacctctcctcatctaagaattgctcctcgtggtcatgcttctcctaactgcaaggctaacgctgtccagcccggctcctcctgcttgtga

SEQ ID NO: 96888 - DNA, 80 bp, Artificial Sequence
  ENSG00000090539_0 (sequence is synthesized)
ctccgccctccgcactcccgcctccctccctccgcccgctcccgcgccctcctccctccctcctccccagctgtcccgtt

SEQ ID NO: 96889 - DNA, 120 bp, Artificial Sequence
  ENSG00000090539_1 (sequence is synthesized)
ctgctgctcctcgggctgctgctgctcggctcccggccggcccgcggcgccggcccagagccccccgtgctgcccatccgttctgagaaggagccgctgcccgttcggggagcggcaggc

SEQ ID NO: 96890 - DNA, 120 bp, Artificial Sequence
  ENSG00000090539_2 (sequence is synthesized)
gagaaggagccgctgcccgttcggggagcggcaggctgcaccttcggcgggaaggtctatgccttggacgagacgtggcacccggacctaggggagccattcggggtgatgcgctgcgtg

SEQ ID NO: 96891 - DNA, 120 bp, Artificial Sequence
  ENSG00000090539_3 (sequence is synthesized)
ctgtgcgcctgcgaggcgcctcagtggggtcgccgtaccaggggccctggcagggtcagctgcaagaacatcaaaccagagtgcccaaccccggcctgtgggcagccgcgccagctgccg

SEQ ID NO: 96892 - DNA, 120 bp, Artificial Sequence
  ENSG00000090539_4 (sequence is synthesized)
ggacactgctgccagacctgcccccaggagcgcagcagttcggagcggcagccgagcggcctgtccttcgagtatccgcgggacccggagcatcgcagttatagcgaccgcggggagcca

SEQ ID NO: 96893 - DNA, 120 bp, Artificial Sequence
  ENSG00000090539_5 (sequence is synthesized)
ggcgctgaggagcgggcccgtggtgacggccacacggacttcgtggcgctgctgacagggccgaggtcgcaggcggtggcacgagcccgagtctcgctgctgcgctctagcctccgcttc

SEQ ID NO: 96894 - DNA, 120 bp, Artificial Sequence
  ENSG00000090539_6 (sequence is synthesized)
tctatctcctacaggcggctggaccgccctaccaggatccgcttctcagactccaatggcagtgtcctgtttgagcaccctgcagcccccacccaagatggcctggtctgtggggtgtgg

SEQ ID NO: 96895 - DNA, 120 bp, Artificial Sequence
  ENSG00000090539_7 (sequence is synthesized)
cgggcagtgcctcggttgtctctgcggctccttagggcagaacagctgcatgtggcacttgtgacactcactcacccttcaggggaggtctgggggcctctcatccggcaccgggccctg

SEQ ID NO: 96896 - DNA, 120 bp, Artificial Sequence
  ENSG00000090539_8 (sequence is synthesized)
gctgcagagaccttcagtgccatcctgactctagaaggccccccacagcagggcgtagggggcatcaccctgctcactctcagtgacacagaggactccttgcattttttgctgctcttc

SEQ ID NO: 96897 - DNA, 120 bp, Artificial Sequence
  ENSG00000090539_9 (sequence is synthesized)
cgagggctgctggaacccaggagtgggggactaacccaggttcccttgaggctccagattctacaccaggggcagctactgcgagaacttcaggccaatgtctcagcccaggaaccaggc

SEQ ID NO: 96898 - DNA, 120 bp, Artificial Sequence
  ENSG00000090539_10 (sequence is synthesized)
tttgctgaggtgctgcccaacctgacagtccaggagatggactggctggtgctgggggagctgcagatggccctggagtgggcaggcaggccagggctgcgcatcagtggacacattgct

SEQ ID NO: 96899 - DNA, 120 bp, Artificial Sequence
  ENSG00000090539_11 (sequence is synthesized)
gccaggaagagctgcgacgtcctgcaaagtgtcctttgtggggctgatgccctgatcccagtccagacgggtgctgccggctcagccagcctcacgctgctaggaaatggctccctgatc

SEQ ID NO: 96900 - DNA, 120 bp, Artificial Sequence
  ENSG00000090539_12 (sequence is synthesized)
tatcaggtgcaagtggtagggacaagcagtgaggtggtggccatgacactggagaccaagcctcagcggagggatcagcgcactgtcctgtgccacatggctggactccagccaggagga

SEQ ID NO: 96901 - DNA, 120 bp, Artificial Sequence
  ENSG00000090539_13 (sequence is synthesized)
ggctcatatgctgctgcagaatgagctcttcctgaacgtgggcaccaaggacttcccagacggagagcttcgggggcacgtggctgccctgccctactgtgggcatagcgcccgccatga

SEQ ID NO: 96902 - DNA, 120 bp, Artificial Sequence
  ENSG00000090539_14 (sequence is synthesized)
cacgctgcccgtgcccctagcaggagccctggtgctaccccctgtgaagagccaagcagcagggcacgcctggctttccttggatacccactgtcacctgcactatgaagtgctgctggc

SEQ ID NO: 96903 - DNA, 120 bp, Artificial Sequence
  ENSG00000090539_15 (sequence is synthesized)
tgggcttggtggctcagaacaaggcactgtcactgcccacctccttgggcctcctggaacgccagggcctcggcggctgctgaagggattctatggctcagaggcccagggtgtggtgaa

SEQ ID NO: 96904 - DNA, 120 bp, Artificial Sequence
  ENSG00000090539_16 (sequence is synthesized)
ggacctggagccggaactgctgcggcacctggcaaaaggcatggcctccctgatgatcaccaccaagggtagccccagaggggagctccgagggcaggtgcacatagccaaccaatgtga

SEQ ID NO: 96905 - DNA, 120 bp, Artificial Sequence
  ENSG00000090539_17 (sequence is synthesized)
gtgaggttggcggactgcgcctggaggcggccggggccgagggggtgcgggcgctgggggctccggatacagcctctgctgcgccgcctgtggtgcctggtctcccggccctagcgcccg

SEQ ID NO: 96906 - DNA, 120 bp, Artificial Sequence
  ENSG00000090539_18 (sequence is synthesized)
acctggtggtcctgggcggccccgagaccccaacacatgcttcttcgaggggcagcagcgcccccacggggctcgctgggcgcccaactacgacccgctctgctcactctgcacctgcca

SEQ ID NO: 96907 - DNA, 120 bp, Artificial Sequence
  ENSG00000090539_19 (sequence is synthesized)
gagacgaacggtgatctgtgacccggtggtgtgcccaccgcccagctgcccacacccggtgcaggctcccgaccagtgctgccctgtttgccctgagaaacaagatgtcagagacttgcc

SEQ ID NO: 96908 - DNA, 120 bp, Artificial Sequence
  ENSG00000090539_20 (sequence is synthesized)
agggctgccaaggagccgggacccaggagagggctgctattttgatggtgaccggagctggcgggcagcgggtacgcggtggcaccccgttgtgcccccctttggcttaattaagtgtgc

SEQ ID NO: 96909 - DNA, 120 bp, Artificial Sequence
  ENSG00000090539_21 (sequence is synthesized)
tgtctgcacctgcaaggggggcactggagaggtgcactgtgagaaggtgcagtgtccccggctggcctgtgcccagcctgtgcgtgtcaaccccaccgactgctgcaaacagtgtccagt

SEQ ID NO: 96910 - DNA, 120 bp, Artificial Sequence
  ENSG00000090539_22 (sequence is synthesized)
ggggtcgggggcccacccccagctgggggaccccatgcaggctgatgggccccggggctgccgttttgctgggcagtggttcccagagagtcagagctggcacccctcagtgcccccttt

SEQ ID NO: 96911 - DNA, 120 bp, Artificial Sequence
  ENSG00000090539_23 (sequence is synthesized)
tggagagatgagctgtatcacctgcagatgtggggcaggggtgcctcactgtgagcgggatgactgttcactgccactgtcctgtggctcggggaaggagagtcgatgctgttcccgctg

SEQ ID NO: 96912 - DNA, 120 bp, Artificial Sequence
  ENSG00000090539_24 (sequence is synthesized)
cacggcccaccggcggccagccccagagaccagaactgatccagagctggagaaagaagccgaaggctcttagggagcagccagagggccaagtgaccaagaggatggggcctgagctgg

SEQ ID NO: 96913 - DNA, 120 bp, Artificial Sequence
  ENSG00000090539_25 (sequence is synthesized)
ggaaggggtggcatcgaggaccttcttgcattctcctgtgggaagcccagtgcctttgctcctctgtcctgcctctactcccacccccactacctctgggaaccacagctccacaagggg

SEQ ID NO: 96914 - DNA, 120 bp, Artificial Sequence
  ENSG00000090539_26 (sequence is synthesized)
gagaggcagctgggccagaccgaggtcacagccactccaagtcctgccctgccaccctcggcctctgtcctggaagccccacccctttcctcctgtacataatgtcactggcttgttggg

SEQ ID NO: 96915 - DNA, 120 bp, Artificial Sequence
  ENSG00000090539_27 (sequence is synthesized)
atttttaatttatcttcactcagcaccaagggcccccgacactccactcctgctgcccctgagctgagcagagtcattattggagagttttgtatttattaaaacatttctttttcagtc

SEQ ID NO: 96916 - DNA, 120 bp, Artificial Sequence
  ENSG00000090539_28 (sequence is synthesized)
atctaactctcatggcagccttgctagatagagagtattattatccccattttccagacagggaccttgaggcccagagagatgaagtagcttgtctagggtcacgcagcttcctcagtg

SEQ ID NO: 96917 - DNA, 120 bp, Artificial Sequence
  ENSG00000090539_29 (sequence is synthesized)
gctggaacccaggagtgggggtaagtgggatgggggcaaaacacgtgagaaggttagggagagcacctgtctcagaaaggcccacatgtgcggccttgcaggactaacccaggttccctt

SEQ ID NO: 96918 - DNA, 120 bp, Artificial Sequence
  ENSG00000090539_30 (sequence is synthesized)
gaggctccagattctacaccaggggcagctactgcgagaacttcaggccaatgtctcagcccaggtgagtggggatctggctctcgctgccacctgtcttggcctcttgctattgcccat

SEQ ID NO: 96919 - DNA, 120 bp, Artificial Sequence
  ENSG00000090539_31 (sequence is synthesized)
gtaggaggtgagagagaggagctctgacacttggggagctgaaagagacctggagaggcagaggatagcgtggcagttggctggcatgcctgggttccgcagaggggctggggatggttc

SEQ ID NO: 96920 - DNA, 120 bp, Artificial Sequence
  ENSG00000090539_32 (sequence is synthesized)
ttgagatggtctagagactcaagaatttagggaagtagaagcaggattttgactcaagtttagtttcccacatcgctggcctgtttgctgacttcatgtttgaagttgctccagagagag

SEQ ID NO: 96921 - DNA, 120 bp, Artificial Sequence
  ENSG00000090539_33 (sequence is synthesized)
ctgtttgctgacttcatgtttgaagttgctccagagagagaatcaaaggtgtcaccagcccctctctccctccttcccttcccttccctttctttccctcccctcccctcccctcccctc

SEQ ID NO: 96922 - DNA, 73 bp, Artificial Sequence
  ENSG00000090539_34 (sequence is synthesized)
ccctcccctcccctccccttcccttcactctcccttccctctcccttcccttcccttctccttcgttcacagc

SEQ ID NO: 96923 - DNA, 120 bp, Artificial Sequence
  ENSG00000090539_35 (sequence is synthesized)
ggcatgagccaccacacccagcccagcctctaccttctttgtctaaagtgaggcaaacacttttctgtttttttcctggaaactcgtgttctggaccagttctggggcaaactggggtca

SEQ ID NO: 96924 - DNA, 120 bp, Artificial Sequence
  ENSG00000090539_36 (sequence is synthesized)
gtcagagtggattggaatcagctctgatccagcttttggctgtgcttaccttgagaccaaatcatgtagagaataagacaagaccctcctgccctgttaccctcttctctctcccctccc

SEQ ID NO: 96925 - DNA, 120 bp, Artificial Sequence
  ENSG00000090539_37 (sequence is synthesized)
tcattcctaccatcaagacccaggcattttgacaagctctaggaaatgagggtatcagaacagaaatctaacaaatgtatgtagctgcagatccatctttcatataaacaatgtggagtc

SEQ ID NO: 96926 - DNA, 120 bp, Artificial Sequence
  ENSG00000090539_38 (sequence is synthesized)
attttacagaagggggaactgaggctcagtaggataatgtgatttgttcaaggtcacacagctagtaagtggtgcagccaggattggaacccaagcatctggctccagcgttctttctta

SEQ ID NO: 96927 - DNA, 120 bp, Artificial Sequence
  ENSG00000090539_39 (sequence is synthesized)
agcttcctagggcaccctggaggttcctttccatgttcctttttcataagccctgcctgggcatcctaattggcctagcctgcacagtgtctgagcgtagggccttcttgtctctctgct

SEQ ID NO: 96928 - DNA, 120 bp, Artificial Sequence
  ENSG00000090539_40 (sequence is synthesized)
cctaagctccggttgccatctgaaggtggggacatatagggtggccctgctggcggactcttcctgttgctgaggttcaagggtctaaaacttgctgctctccaggccctggacctatgg

SEQ ID NO: 96929 - DNA, 120 bp, Artificial Sequence
  ENSG00000090539_41 (sequence is synthesized)
cactgtgtgccattgcactagtcacttgctgtctctgagtcctgggggtggtcgtatcacagcgcccccccggctggtggggaggatgagctacatgaggaggctggcagcccggcaccc

SEQ ID NO: 96930 - DNA, 120 bp, Artificial Sequence
  ENSG00000090539_42 (sequence is synthesized)
tatccctggcagctgagatgattgtggagcgaatggcatcctcctgggccactgcagcgctcagggggccgaggtgtctcctgctggctggccagctgccgctggtaaagacgcgagggg

SEQ ID NO: 96931 - DNA, 120 bp, Artificial Sequence
  ENSG00000090539_43 (sequence is synthesized)
gggctggcgaacagcggggttgtggttgaggctgggccaccaaagcggcgtttgacagtgctcaggccatcttcctcccgtcccagacttcgtggcgctgctgacagggccgaggtcgca

SEQ ID NO: 96932 - DNA, 120 bp, Artificial Sequence
  ENSG00000090554_0 (sequence is synthesized)
ggggcatgagggtccgagacttgttcttctgtcccttccaagacccggcgacaggaggcatgaggggcccccggccgaaatgacagtgctggcgccagcctggagcccaacaacctatct

SEQ ID NO: 96933 - DNA, 120 bp, Artificial Sequence
  ENSG00000090554_1 (sequence is synthesized)
cctcctgctgctgctgctgagctcgggactcagtgggacccaggactgctccttccaacacagccccatctcctccgacttcgctgtcaaaatccgtgagctgtctgactacctgcttca

SEQ ID NO: 96934 - DNA, 120 bp, Artificial Sequence
  ENSG00000090554_2 (sequence is synthesized)
agattacccagtcaccgtggcctccaacctgcaggacgaggagctctgcgggggcctctggcggctggtcctggcacagcgctggatggagcggctcaagactgtcgctgggtccaagat

SEQ ID NO: 96935 - DNA, 120 bp, Artificial Sequence
  ENSG00000090554_3 (sequence is synthesized)
gcaaggcttgctggagcgcgtgaacacggagatacactttgtcaccaaatgtgcctttcagcccccccccagctgtcttcgcttcgtccagaccaacatctcccgcctcctgcaggagac

SEQ ID NO: 96936 - DNA, 120 bp, Artificial Sequence
  ENSG00000090554_4 (sequence is synthesized)
ccctggaggccacagccccgacagccccgcagccccctctgctcctcctactgctgctgcccgtgggcctcctgctgctggccgctgcctggtgcctgcactggcagaggacgcggcgga

SEQ ID NO: 96937 - DNA, 120 bp, Artificial Sequence
  ENSG00000090554_5 (sequence is synthesized)
ggacaccccgccctggggagcaggtgccccccgtccccagtccccaggacctgctgcttgtggagcactgacctggccaaggcctcatcctgcggagccttaaacaacgcagtgagacag

SEQ ID NO: 96938 - DNA, 120 bp, Artificial Sequence
  ENSG00000090554_6 (sequence is synthesized)
acatctatcatcccattttacaggggaggatactgaggcacacagaggggagtcaccagccagaggatgcatagcctggacacagaggaagttggctagaggccggtcccttccttgggc

SEQ ID NO: 96939 - DNA, 120 bp, Artificial Sequence
  ENSG00000090554_7 (sequence is synthesized)
ccctctcattccctccccagaatggaggcaacgccagaatccagcaccggccccatttacccaactctgtacaaagcccttgtccccatgaaattgtatataaatcatccttttctacca

SEQ ID NO: 96940 - DNA, 120 bp, Artificial Sequence
  ENSG00000090554_8 (sequence is synthesized)
ctgtcacccggcttggccccttccacacccaactggggcaagcctgacccggcgacaggaggcatgaggggcccccggccgaaatgacagtgctggcgccagcctggagcccaacacacc

SEQ ID NO: 96941 - DNA, 120 bp, Artificial Sequence
  ENSG00000090554_9 (sequence is synthesized)
tcctacgaattagaagtaaagctccactaggccttattggcgatttggaccatagccacccaacgaaggtagagcgagaagcgccaccctgcagagccctgttcctacagaacaacacgt

SEQ ID NO: 96942 - DNA, 120 bp, Artificial Sequence
  ENSG00000090554_10 (sequence is synthesized)
gtgtcagcccggtgccccccgtccccagtccccaggacctgctgcttgtggagcactgacctggccaaggcctcatcctggtgagtccttcctgggctatggggcctggactttgtgtct

SEQ ID NO: 96943 - DNA, 120 bp, Artificial Sequence
  ENSG00000090554_11 (sequence is synthesized)
ttgtgtctgcaggttgggagggtcactaggaggccatggaagggtggtgagcagtggaggggcaggggcagctctaggtgcagaaagacccctctggggccaggcgcggtggctcacgcc

SEQ ID NO: 96944 - DNA, 79 bp, Artificial Sequence
  ENSG00000090554_12 (sequence is synthesized)
ccctctggggccacggagacagactggagaccaagccggaggctgtgggaaggcccagggtgaggaccatgactgagcc

SEQ ID NO: 96945 - DNA, 120 bp, Artificial Sequence
  ENSG00000090554_13 (sequence is synthesized)
aggctgtgggaaggcccagggtgaggaccatgactgagccagggctgggaccatgggatggagtggagtggatgggcagagagtcaggggtcagagatcaggagggaccggcctggggcc

SEQ ID NO: 96946 - DNA, 120 bp, Artificial Sequence
  ENSG00000090554_14 (sequence is synthesized)
tgacaggcttgagttggcacagatagccctggtccagtgatggggtggacaggggggaacctgggggaggagtcagattagggaaagacatggagctcactggggacctgaaggagcaag

SEQ ID NO: 96947 - DNA, 120 bp, Artificial Sequence
  ENSG00000090554_15 (sequence is synthesized)
gggccctggggagatctgtggatgtgggagtttgcaagcctcctgggacaggaaggaaatggcattccagaaagagggaactgcctttggaagccctttggtatgagaaagctcagggtg

SEQ ID NO: 96948 - DNA, 120 bp, Artificial Sequence
  ENSG00000090554_16 (sequence is synthesized)
ttccagtaacttgggccagcgtggggcagcaaggagccatgggaggtgtgagagggaggaaaggagctgggaacaggtgtggagggtgcaggcaggtaggcaggtgggccaggagggaag

SEQ ID NO: 96949 - DNA, 87 bp, Artificial Sequence
  ENSG00000090554_17 (sequence is synthesized)
tcctggcccatgctgggctttccacaaatgaactcacttccttgagaagttcgtgccattatgatcccaaggcatagagaggtaaat

SEQ ID NO: 96950 - DNA, 120 bp, Artificial Sequence
  ENSG00000090554_18 (sequence is synthesized)
agttcgtgccattatgatcccaaggcatagagaggtaaataatttgccaaaagtcacacagctcaagggtgacaaccaagatttgacttcaggttgtcttttttttttttttgagatgga

SEQ ID NO: 96951 - DNA, 120 bp, Artificial Sequence
  ENSG00000090565_0 (sequence is synthesized)
agcctccttagtctcctcatcctgcttcacaggctccgcggcctccggcctcctcggcccccgtcccccggcctcctcggcccccgtcccccgccatccgccgcccggatcctcgccgcc

SEQ ID NO: 96952 - DNA, 80 bp, Artificial Sequence
  ENSG00000090565_1 (sequence is synthesized)
cgccgccgggccgagggcagctgaggcgcggtgcgaagatgggcgaggacagagcagggcccgagcgccagccccagcag

SEQ ID NO: 96953 - DNA, 80 bp, Artificial Sequence
  ENSG00000090565_2 (sequence is synthesized)
atgcccgcgcccgccgccgcgccctgagcgcctttgtctgccgcccgcgcccttccgcaccactagcctctcgggagcat

SEQ ID NO: 96954 - DNA, 80 bp, Artificial Sequence
  ENSG00000090565_3 (sequence is synthesized)
cactagcctctcgggagcatggcgtcggccccgccggcctcgcccccgggctcggagccgccggggcccgacccggagcc

SEQ ID NO: 96955 - DNA, 80 bp, Artificial Sequence
  ENSG00000090565_4 (sequence is synthesized)
gcctcggagcgcccgtcggcggccccgacccgcagtccccgggcctggatgagcctgcgcccggggccgctgcagatggc

SEQ ID NO: 96956 - DNA, 120 bp, Artificial Sequence
  ENSG00000090565_5 (sequence is synthesized)
cccgccgccgcgctccggcccgcgggggcagcttgcgagccccgacgccccgggcccagggccgcgctccgaagcgccgcttccagaactcgacccgttgttctcctggactgaggagcc

SEQ ID NO: 96957 - DNA, 120 bp, Artificial Sequence
  ENSG00000090565_6 (sequence is synthesized)
gttgttctcctggactgaggagcccgaggagtgtggccccgcgagctgcccggagagcgcgcctttccgcttgcaggggtccagcagcagccaccgagcgcggggcgaggtcgacgtctt

SEQ ID NO: 96958 - DNA, 120 bp, Artificial Sequence
  ENSG00000090565_7 (sequence is synthesized)
ctctcccttccccgcgcccacggcgggcgagctggcgctggagcaaggtcccgggtccccgccgcagccctcggacctcagccagacccacccccttccgagcgagcccgtggggagtca

SEQ ID NO: 96959 - DNA, 120 bp, Artificial Sequence
  ENSG00000090565_8 (sequence is synthesized)
ggaggacggcccccgcctccgagccgtgttcgatgccctggacggggatggggacggtttcgtccgcatcgaggacttcatccagtttgctacggtctacggggcagagcaggtgaagga

SEQ ID NO: 96960 - DNA, 120 bp, Artificial Sequence
  ENSG00000090565_9 (sequence is synthesized)
cttaactaagtacttggatcccagtgggctcggcgtgatcagctttgaagacttctaccaagggatcacagccatcagaaacggagatcctgatggccagtgctacggtggtgtcgcttc

SEQ ID NO: 96961 - DNA, 120 bp, Artificial Sequence
  ENSG00000090565_10 (sequence is synthesized)
tgcccaagatgaggagcccctggcctgcccggacgagttcgatgacttcgtcacctatgaggccaacgaggtgacggacagcgcgtacatgggctccgagagcacctacagtgagtgtga

SEQ ID NO: 96962 - DNA, 120 bp, Artificial Sequence
  ENSG00000090565_11 (sequence is synthesized)
gaccttcacggacgaggacaccagcaccctggtgcaccctgagctgcaacctgaaggggacgcagacagtgccggcggctcggccgtgccctctgagtgcctggacgccatggaggagcc

SEQ ID NO: 96963 - DNA, 120 bp, Artificial Sequence
  ENSG00000090565_12 (sequence is synthesized)
cgaccatggtgccctgctgctgctcccaggcaggcctcacccccatggccagtctgtcatcacggtgatcgggggcgaggagcactttgaggactacggtgaaggcagtgaggcggagct

SEQ ID NO: 96964 - DNA, 120 bp, Artificial Sequence
  ENSG00000090565_13 (sequence is synthesized)
gtccccagagaccctatgcaacgggcagctgggctgcagtgaccccgctttcctcacgcccagtccgacaaagcggctctccagcaagaaggtggcaaggtacctgcaccagtcaggggc

SEQ ID NO: 96965 - DNA, 120 bp, Artificial Sequence
  ENSG00000090565_14 (sequence is synthesized)
cctgaccatggaggccctggaggacccttcccccgagctcatggagggcccagaggaggacattgctgacaaggttgtcttcctggaaaggcgtgtgctggagctggaaaaggacacggc

SEQ ID NO: 96966 - DNA, 120 bp, Artificial Sequence
  ENSG00000090565_15 (sequence is synthesized)
agccaccggtgagcaacacagccgcctgaggcaggagaacctgcagctggtgcacagagcaaacgccctggaggagcagctgaaggagcaggagctgagagcctgcgagatggtcctgga

SEQ ID NO: 96967 - DNA, 120 bp, Artificial Sequence
  ENSG00000090565_16 (sequence is synthesized)
agagacccggcgtcagaaggagctcctgtgcaagatggagagggagaagagcattgagatcgagaacctgcagaccaggctacagcaactggacgaggagaacagtgaactccggtcctg

SEQ ID NO: 96968 - DNA, 120 bp, Artificial Sequence
  ENSG00000090565_17 (sequence is synthesized)
cacgccctgtctgaaggccaacattgagcgtctggaggaggagaagcagaagctgttggatgagatagagtcgctgacgctgcggctcagtgaagagcaggagaacaagaggagaatggg

SEQ ID NO: 96969 - DNA, 120 bp, Artificial Sequence
  ENSG00000090565_18 (sequence is synthesized)
ggacaggctgagtcacgagaggcaccagttccagagggacaaggaggccacccaggagctgatcgaggacctccgaaagcagctggagcacctgcagctcctcaagctggaggccgagca

SEQ ID NO: 96970 - DNA, 120 bp, Artificial Sequence
  ENSG00000090565_19 (sequence is synthesized)
gcggcggggccgcagcagcagcatgggcctgcaggagtaccacagccgcgcccgggagagcgagctggagcaggaggtccgcaggctgaagcaggacaaccgcaacctgaaggagcagaa

SEQ ID NO: 96971 - DNA, 120 bp, Artificial Sequence
  ENSG00000090565_20 (sequence is synthesized)
gaggagctgaacgggcagatcattaccctcagcatccagggcgccaagagcctcttctccacagccttctctgagtccctggctgcagagatcagctccgtctcccgagatgagctcatg

SEQ ID NO: 96972 - DNA, 120 bp, Artificial Sequence
  ENSG00000090565_21 (sequence is synthesized)
gaggcgattcagaagcaggaggagatcaacttccgcctgcaggactacatcgacaggatcatcgtggccatcatggagaccaacccgtccatcctggaggtcaagtagaggcaggaaggt

SEQ ID NO: 96973 - DNA, 120 bp, Artificial Sequence
  ENSG00000090565_22 (sequence is synthesized)
ccagcctgagctggattcgggactccaacaccctggagtggttccgtcagaccatgaggagccaagaccagcaggtcccacagccgacagtgcccagagcatgcagggaaccctcgtgca

SEQ ID NO: 96974 - DNA, 120 bp, Artificial Sequence
  ENSG00000090565_23 (sequence is synthesized)
gctgagctggggccgccaaagaccggggctgccaaaggggcagagggtggtggagaggagagggagaaagggaagtcccagggcccggggtccacagaggatgagggttgtggcagggcc

SEQ ID NO: 96975 - DNA, 120 bp, Artificial Sequence
  ENSG00000090565_24 (sequence is synthesized)
gtccatcagcgctgaccttccgggggcccagagcttcccagccctgagtcaagctggccatgaacgcgtacacttcagttcagcaggatgggctggagagcctctctgtgcagcggtgtg

SEQ ID NO: 96976 - DNA, 120 bp, Artificial Sequence
  ENSG00000090565_25 (sequence is synthesized)
gggtgagccctgctgtggcctccttgtggtggtccctcttcccacgtgcagccctgttgggaagaaaggaagaaaacaggtccctccaggggtgctgctgcctaagccacccacataagt

SEQ ID NO: 96977 - DNA, 120 bp, Artificial Sequence
  ENSG00000090565_26 (sequence is synthesized)
acgctggtgccgtgtcacccatgttgagccgctcctgatggctgacgggctcccagaccctcacctcggacatggtggtgggggaaggacgggtgggcaaggctggtgcgttccccagct

SEQ ID NO: 96978 - DNA, 120 bp, Artificial Sequence
  ENSG00000090565_27 (sequence is synthesized)
ctccctacgctgctcgggccattgcccagccagatgtggtcacctcagtccagctctggggcctccaggccatgtggctgttcccacggcccagtcctcgctgcagtaacccctgggggc

SEQ ID NO: 96979 - DNA, 120 bp, Artificial Sequence
  ENSG00000090565_28 (sequence is synthesized)
tctgaccacctatgggggccgggcaggagcctctggggcctccactccgacatcaggacctgagatgaccgctgtgtggcgctctctccctgggcagggtggatgccacaggcccctctg

SEQ ID NO: 96980 - DNA, 120 bp, Artificial Sequence
  ENSG00000090565_29 (sequence is synthesized)
gctcccaggtgctgcttctccacaggtgcggcctggcccggcctcctaaaggccacaccctccccacgcacttcccaggccagaatccaaacatcgggaaccctgttttcttctgggtgt

SEQ ID NO: 96981 - DNA, 120 bp, Artificial Sequence
  ENSG00000090565_30 (sequence is synthesized)
gtctcacttagaaatcgtggttcttccccgagggtgcatgttgcaggagggagagggcagggaagactcacagcagagcaggagggggcctgtgcttctcggggtctgcaccccaggcac

SEQ ID NO: 96982 - DNA, 120 bp, Artificial Sequence
  ENSG00000090565_31 (sequence is synthesized)
agcggtgtcaccccgcaggaccgcgggcctgccccaacccccagcattcccgggtgggcccagaccccatcaccaagactggccacccgctgcgtgtgtgtgcgcgcgcgtgtacgtgtg

SEQ ID NO: 96983 - DNA, 120 bp, Artificial Sequence
  ENSG00000090565_32 (sequence is synthesized)
gccccacatccgccgccttccacgctaggatgtaagaggtcgcctcctattgtacatttggggaaagccttgggtgtaaatcagtgtaaacttggaggagagatttttctatcatgtaga

SEQ ID NO: 96984 - DNA, 120 bp, Artificial Sequence
  ENSG00000090565_33 (sequence is synthesized)
tggaggagagatttttctatcatgtagagtaggtattttttatagattgaaggttgatcaattttttaatactttcaagagaaaactgtgtatacacatgaaatatatatatatatatat

SEQ ID NO: 96985 - DNA, 120 bp, Artificial Sequence
  ENSG00000090565_34 (sequence is synthesized)
ggcaccctgcctctctgtgcccaggcccagccctggtgacatggcaccactcagcagtgctgtcactgtaagcatggactcccaggagacagtgtgggaaacgctcctgctttaattccc

SEQ ID NO: 96986 - DNA, 120 bp, Artificial Sequence
  ENSG00000090565_35 (sequence is synthesized)
cgagaaacggctcttcctgcctggatgcaggagggcaggggccaccacagattaaagctgttactgcacacgcagaggccggcttcttcctccaggggggccacagggtggggtgggagt

SEQ ID NO: 96987 - DNA, 120 bp, Artificial Sequence
  ENSG00000090565_36 (sequence is synthesized)
cttctgggcctggcccagcttccctcaaggcgtccgaggccatcagttgtctgagctcagaacccagcagacctgcctggctctgcagcttggtcagactaagacccttccaaggccgta

SEQ ID NO: 96988 - DNA, 120 bp, Artificial Sequence
  ENSG00000090565_37 (sequence is synthesized)
ggattgcacctccaggcccagtggagcctggcagctttccagccaggttctggatcctgacgagctgctgagacagcatcaaggtggggcaggtggggcggggcaaattgggcagcacag

SEQ ID NO: 96989 - DNA, 120 bp, Artificial Sequence
  ENSG00000090565_38 (sequence is synthesized)
ggctgtgtgggcatcagggctctgggtcacacgcctctggggacgtacgtcccatgtcgggagagccgtcaaaacgtccccgggattaagagaagagtggggggcagggcgcagaggctc

SEQ ID NO: 96990 - DNA, 120 bp, Artificial Sequence
  ENSG00000090565_39 (sequence is synthesized)
gcagaaaccccagcatgacaagcaagtaggaaggtgacattgttgtttgagaaaagccagtgacccggttgggacggagacacgatggggagccggtctccaacagcatgcccttcctga

SEQ ID NO: 96991 - DNA, 120 bp, Artificial Sequence
  ENSG00000090565_40 (sequence is synthesized)
ccgctttcctcacgcccaggtaatgacgccttgttccagcacaccctcctccctcttcttcccgtggttagtagtgggaagtttccctttttggttcgtgcattggtgagagaacttgct

SEQ ID NO: 96992 - DNA, 120 bp, Artificial Sequence
  ENSG00000090565_41 (sequence is synthesized)
tgtagccagtgccacaaacaaatcaaccgccttgaggatctttctgcccgcctgagtgatcttgaaatgaatagtccgacaaagcggctctccagcaagaaggtggcaaggtaggtgggt

SEQ ID NO: 96993 - DNA, 120 bp, Artificial Sequence
  ENSG00000090565_42 (sequence is synthesized)
ttttaaaaaacattttaaaatgttcttttccaaggtattttttaaactcttgcaagttactttacatggtttggggctgaaggtatcctgaaggagtgttgggaaaggggtttccagggc

SEQ ID NO: 96994 - DNA, 120 bp, Artificial Sequence
  ENSG00000090565_43 (sequence is synthesized)
tgtgaatttggacctggatttgtgaccagggagggtacgtgtcagagcttttggtgctgggcctcttgtgtgttcactaaggtctggaaggggccgccatccccagatgtctgctctatg

SEQ ID NO: 96995 - DNA, 120 bp, Artificial Sequence
  ENSG00000090565_44 (sequence is synthesized)
ggcaacatacacttttatcttcctcccctgccagttcttaccgaaataaacatgcagggttaaggcccttcccagggagccactcagtgtggctgccgggtggcctctgctgccgtcaga

SEQ ID NO: 96996 - DNA, 120 bp, Artificial Sequence
  ENSG00000090565_45 (sequence is synthesized)
caggttctctggaggtcctgaggcagcttctgggcatgggtggagccactgcacaccctgcctggagacagctcagctcctccctttgcctttcaagagcaaacgccctggaggagcagc

SEQ ID NO: 96997 - DNA, 120 bp, Artificial Sequence
  ENSG00000090565_46 (sequence is synthesized)
agagcgccaggaagactctgagaccacagagcacggcctgctttctcccagcccctggtaaagatgtccagcctgggacctccccctgtatatagtgctttaagtgggagaagaccacca

SEQ ID NO: 96998 - DNA, 120 bp, Artificial Sequence
  ENSG00000090565_47 (sequence is synthesized)
cccagatcaggggaggacctgtcccctgcaatgctgctgcctgcttttcagattgacttgggagtgcttgtgctgacggagcatgtcctgtggtttttccctttcttccctctgttgttg

SEQ ID NO: 96999 - DNA, 120 bp, Artificial Sequence
  ENSG00000090565_48 (sequence is synthesized)
ccctgtctgaaggccaacattgagcgtctggaggaggtgagctgccaacagcctggagctgtggccagtggggccagcccatgccctgcctgtggggcagctgaggtagccctgagctct

SEQ ID NO: 97000 - DNA, 120 bp, Artificial Sequence
  ENSG00000090581_0 (sequence is synthesized)
ggccgctgcggcgcgatggcggcggggctggcgcggctcctgttgctcctcgggctctcggccggcgggcccgcgccggcaggtgcagcgaagatgaaggtggtggaggagcccaacgcg

SEQ ID NO: 97001 - DNA, 120 bp, Artificial Sequence
  ENSG00000090581_1 (sequence is synthesized)
tggtggaggagcccaacgcgtttggggtgaacaacccgttcttgcctcaggccagtcgcctccaggccaagagggatccttcacccgtgtctggacccgtgcatctcttccgactctcgg

SEQ ID NO: 97002 - DNA, 120 bp, Artificial Sequence
  ENSG00000090581_2 (sequence is synthesized)
gcaagtgcttcagcctggtggagtccacgtacaagtatgagttctgcccgttccacaacgtgacccagcacgagcagaccttccgctggaacgcctacagtgggatcctcggcatctggc

SEQ ID NO: 97003 - DNA, 120 bp, Artificial Sequence
  ENSG00000090581_3 (sequence is synthesized)
acgagtgggagatcgccaacaacaccttcacgggcatgtggatgagggacggtgacgcctgccgttcccggagccggcagagcaaggtggagctggcgtgtggaaaaagcaaccggctgg

SEQ ID NO: 97004 - DNA, 120 bp, Artificial Sequence
  ENSG00000090581_4 (sequence is synthesized)
cccatgtgtccgagccgagcacctgcgtctacgcgctgacgttcgagacccccctcgtctgccacccccacgccttgctagtgtacccaaccctgccagaggccctgcagcggcagtggg

SEQ ID NO: 97005 - DNA, 120 bp, Artificial Sequence
  ENSG00000090581_5 (sequence is synthesized)
accaggtagagcaggacctggccgatgagctgatcaccccccagggccatgagaagttgctgaggacactttttgaggatgctggctacttaaagaccccagaagaaaatgaacccaccc

SEQ ID NO: 97006 - DNA, 120 bp, Artificial Sequence
  ENSG00000090581_6 (sequence is synthesized)
agctggagggaggtcctgacagcttggggtttgagaccctggaaaactgcaggaaggctcataaagaactctcaaaggagatcaaaaggctgaaaggtttgctcacccagcacggcatcc

SEQ ID NO: 97007 - DNA, 120 bp, Artificial Sequence
  ENSG00000090581_7 (sequence is synthesized)
cctacacgaggcccacagaaacttccaacttggagcacttgggccacgagacgcccagagccaagtctccagagcagctgcggggtgacccaggactgcgtgggagtttgtgaccttgtg

SEQ ID NO: 97008 - DNA, 120 bp, Artificial Sequence
  ENSG00000090581_8 (sequence is synthesized)
gacccgcagggaccagctgaccaggcttgtgctcagagaagcagacaaaacaaagattcaaggttttaattaattcccatactgataaaaataactccatgaattctgtaaaccattgca

SEQ ID NO: 97009 - DNA, 120 bp, Artificial Sequence
  ENSG00000090581_9 (sequence is synthesized)
taaatgctatagtgtaaaaaaatttaaacaagtgttaactttaaacagttcgctacaagtaaatgattataaatactaccttctgggttaagaaaattccattcaaataacattctcatg

SEQ ID NO: 97010 - DNA, 120 bp, Artificial Sequence
  ENSG00000090581_10 (sequence is synthesized)
taaatactcaaacatacagattgaggcttccagaaattaatccacttgaggcgtccacgcggaacaaggtctgctgaccacagttacacacgtcgtgacaccactgtatcacggcgaatg

SEQ ID NO: 97011 - DNA, 120 bp, Artificial Sequence
  ENSG00000090581_11 (sequence is synthesized)
tcgaacactagagttacagacgacaggcaacaagaacatgcagagccggccgccagccagctcctacgccccgtgcccgccatggccacaggggggagctgctgggcgcgcctccacctc

SEQ ID NO: 97012 - DNA, 120 bp, Artificial Sequence
  ENSG00000090581_12 (sequence is synthesized)
agcctccacggggcaccttccagccactgctgtgcctcagccacctaggagccatccctgaggccatggccaccaagacaggtgagggaggccccagggcacacagccccaggatcttgc

SEQ ID NO: 97013 - DNA, 120 bp, Artificial Sequence
  ENSG00000090581_13 (sequence is synthesized)
ccccatttccaaccctggcagcgctgccagccattctttggtcttcccactgctcacctgtcctcagagccagtactgatctaggggagcaggtgccacctccatctcccagctgtcccc

SEQ ID NO: 97014 - DNA, 120 bp, Artificial Sequence
  ENSG00000090581_14 (sequence is synthesized)
ccacccctggggctccccagctctaccaccccggaagctgagccctggagacaccctgaggggcgggcgccacctccttcccagaaagagcagagcagctggcagactagagctcagctg

SEQ ID NO: 97015 - DNA, 120 bp, Artificial Sequence
  ENSG00000090581_15 (sequence is synthesized)
ctcctgaccactgacaaccgggagatgtctcggcagacaccacttatcccagaaaagaccagaggctccaaatgggaaccaagtgcataaatacaaataaaaacagagtttacacatcga

SEQ ID NO: 97016 - DNA, 120 bp, Artificial Sequence
  ENSG00000090581_16 (sequence is synthesized)
gcggtgagtggcccggccgtccgcgtccccaggccccgcgcgcgctctgcaccccggcctccccgctcacggtctcgctccccgtagggcccgcgccggcaggtgcagcgaagatgaagg

SEQ ID NO: 97017 - DNA, 120 bp, Artificial Sequence
  ENSG00000090581_17 (sequence is synthesized)
aaaagaaaaaaaagaatctaatgcctgatgagctgaggtggaacagtttcatccccaaaccacccatccccacccccggctggtagaaaaactgccttccatgaaaccagtccctggtgc

SEQ ID NO: 97018 - DNA, 120 bp, Artificial Sequence
  ENSG00000090581_18 (sequence is synthesized)
caaaaagattggggaccactggtttaagtcctgtagctttacagaccatagctagaaaggcaactggtattaattcaccctgcacgaggacctccgtctgcctccgctgagctgctgtct

SEQ ID NO: 97019 - DNA, 120 bp, Artificial Sequence
  ENSG00000090581_19 (sequence is synthesized)
gctcacttccccgggtggcacaccggcctgcatgtaaccaactcctgaagcttttatctgggaatgtcctcttttttggggggtggggaagacagggtcttgctctgtcacgcaggctgg

SEQ ID NO: 97020 - DNA, 120 bp, Artificial Sequence
  ENSG00000090581_20 (sequence is synthesized)
tacactcagctcattttttctgtgtgctttttgtgtagacacggggttctcacagtgttgcccaggctggtgtcatactcctggcctcaagcaatcttcccgccttggcctcccaaagtg

SEQ ID NO: 97021 - DNA, 120 bp, Artificial Sequence
  ENSG00000090581_21 (sequence is synthesized)
gagccacgatagcaagccttaactctaatttttgaagggctatttttagaattctcggttttgtcagtttcttccattgaatggtacctgttttcctgtttctttgaacgtcttgtgctt

SEQ ID NO: 97022 - DNA, 60 bp, Artificial Sequence
  ENSG00000090581_22 (sequence is synthesized)
atggtacctgttttcctgtttctttgaacgtcttgtgctttttgttgaaaactggtcctt

SEQ ID NO: 97023 - DNA, 85 bp, Artificial Sequence
  ENSG00000090581_23 (sequence is synthesized)
ctggtcctttgaaaacagactctgccagtctttgcagacaggttctgtgcttggaccctggggatcagtgtgaggtctcttccag

SEQ ID NO: 97024 - DNA, 120 bp, Artificial Sequence
  ENSG00000090581_24 (sequence is synthesized)
tgtgcttggaccctggggatcagtgtgaggtctcttccaggacccgtgcatctcttccgactctcgggcaagtgcttcagcctggtggagtccacgtgagtgcagggtgggtgcgagggt

SEQ ID NO: 97025 - DNA, 120 bp, Artificial Sequence
  ENSG00000090581_25 (sequence is synthesized)
gttgagcccagtggggtcagccgcgcacgcagccctgctggaggccctgtagtgctgggggccagggttgggacatggggtgcagctgagcctggcttctcttgggtcctcagtgtaccc

SEQ ID NO: 97026 - DNA, 120 bp, Artificial Sequence
  ENSG00000090581_26 (sequence is synthesized)
ccctgagagttacggcccggagtctaaagcattggtttgtcagccttctaaaattaatgtggaagtacgagagaatataccagaacgttcttgtagcgaattaaattatctccagactta

SEQ ID NO: 97027 - DNA, 120 bp, Artificial Sequence
  ENSG00000090581_27 (sequence is synthesized)
gcctcgactttattattaatacggcgctggtgacactgccctgcaaccgtcagcaccatcatctccacaacttgctctgtccccttcaaaccctgactcccagctgccccgctcccccag

SEQ ID NO: 97028 - DNA, 120 bp, Artificial Sequence
  ENSG00000090581_28 (sequence is synthesized)
ccccggcacccaccattctgctgtctctgaacttggctattcatagacgtcacataggtgactcataactgtgtgcgaccttttgtgtctgaccaactcctcttggcacagtgtccccaa

SEQ ID NO: 97029 - DNA, 120 bp, Artificial Sequence
  ENSG00000090612_0 (sequence is synthesized)
atgacgcaattcctgtgcgacatacgtagcggccgccattgttccgcgccgatggcgagatccttgttcctcagatagcgttcatcgcccgtcgtggtcaacgggccagccgagtctgga

SEQ ID NO: 97030 - DNA, 120 bp, Artificial Sequence
  ENSG00000090612_1 (sequence is synthesized)
gtggttgcgaacccttctggctgcagatctggagcatccctcgcgtcctgtcacttccagcgaggcacacaaaactgaccgtagggatggccaccagggtccggacagcttctatttggg

SEQ ID NO: 97031 - DNA, 120 bp, Artificial Sequence
  ENSG00000090612_2 (sequence is synthesized)
tcccacctctccaagaacgaaacagttcatgggataggatcagaaagctccaaggtcaggaatccatcttgggccaagggactcctggtctgcaacctctccctggaacacccaggcaga

SEQ ID NO: 97032 - DNA, 120 bp, Artificial Sequence
  ENSG00000090612_3 (sequence is synthesized)
agcagaagagtcgcagaatagagaaagtcctagagtggctgtttatttcccaagagcagccaaaaatcaccaagtcctggggacctttgtcattcatggatgtgtttgtggattttacct

SEQ ID NO: 97033 - DNA, 120 bp, Artificial Sequence
  ENSG00000090612_4 (sequence is synthesized)
gggaggagtggcagctgctagacccagcacagaagtgcctgtacaggagtgtgatgttggagaactatagcaacctggtgtccctagggtaccaacacaccaaacctgatatcatcttca

SEQ ID NO: 97034 - DNA, 120 bp, Artificial Sequence
  ENSG00000090612_5 (sequence is synthesized)
agttggaacaaggagaagagctgtgtatggtgcaggcccaagttccaaatcagacctgtccaaacacagtctggaaaattgatgatcttatggattggcatcaggaaaataaagacaagc

SEQ ID NO: 97035 - DNA, 120 bp, Artificial Sequence
  ENSG00000090612_6 (sequence is synthesized)
tgggaagtacggcaaaaagctttgaatgcactacatttggaaaactatgtcttcttagtacaaagtatctttcaagacaaaaacctcataaatgtggcacgcatggaaagagtttgaaat

SEQ ID NO: 97036 - DNA, 120 bp, Artificial Sequence
  ENSG00000090612_7 (sequence is synthesized)
atatagatttcactagtgattatgctagaaataatcctaatgggtttcaggtacatggaaaatcattcttccattctaaacatgagcaaactgttattggaataaaatactgtgaaagta

SEQ ID NO: 97037 - DNA, 120 bp, Artificial Sequence
  ENSG00000090612_8 (sequence is synthesized)
ttgaatctggaaaaaccgtcaataagaaatcgcaacttatgtgccaacaaatgtatatgggcgaaaaaccctttggatgcagctgttgtgagaaagccttcagcagcaagtcataccttc

SEQ ID NO: 97038 - DNA, 120 bp, Artificial Sequence
  ENSG00000090612_9 (sequence is synthesized)
tagtgcatcagcaaactcatgccgaagagaaaccctatggttgtaatgaatgtgggaaagacttcagtagtaaatcatacctcattgtacatcagagaattcatacaggagagaaactac

SEQ ID NO: 97039 - DNA, 120 bp, Artificial Sequence
  ENSG00000090612_10 (sequence is synthesized)
atgaatgcagtgaatgcaggaaaacattcagtttccattcacagcttgttatacatcagagaattcacacaggtgagaatccctatgagtgctgtgaatgtgggaaagtcttcagtagga

SEQ ID NO: 97040 - DNA, 120 bp, Artificial Sequence
  ENSG00000090612_11 (sequence is synthesized)
aagaccagcttgtttcacaccagaaaactcattcaggacagaaaccatatgtgtgtaatgaatgtgggaaagcttttggtttaaaatcacagctcattatacatgaaagaattcatacag

SEQ ID NO: 97041 - DNA, 120 bp, Artificial Sequence
  ENSG00000090612_12 (sequence is synthesized)
gagagaaaccatatgaatgcaatgaatgtcagaaagcctttaatacaaagtcaaaccttatggtacatcagagaacccatacaggggagaaaccttatgtttgtagtgattgtggaaaag

SEQ ID NO: 97042 - DNA, 120 bp, Artificial Sequence
  ENSG00000090612_13 (sequence is synthesized)
cctttacattcaagtcacagctcattgtacatcaggggattcacacaggagtaaagccctatgggtgtattcagtgtggtaaaggattcagtttgaaatcacagctcattgtacatcaga

SEQ ID NO: 97043 - DNA, 120 bp, Artificial Sequence
  ENSG00000090612_14 (sequence is synthesized)
cataccttattatacatacaaggactcatacaggagaaaaactccatgaatgcaacaattgtgggaaagccttcagttttaaatcacagctcattatacatcagaggattcatacaggag

SEQ ID NO: 97044 - DNA, 120 bp, Artificial Sequence
  ENSG00000090612_15 (sequence is synthesized)
agaacccctatgaatgccatgaatgtgggaaagccttcagtcggaaataccagcttatttcacaccagagaactcatgcaggagagaagccttatgaatgcaccgactgtggaaaggctt

SEQ ID NO: 97045 - DNA, 120 bp, Artificial Sequence
  ENSG00000090612_16 (sequence is synthesized)
ttggtttaaagtcacagcttattatacaccagagaactcatacaggggagaaaccatttgaatgtagtgagtgtcagaaagcctttaatacaaagtcaaacctgattgtacatcagagaa

SEQ ID NO: 97046 - DNA, 120 bp, Artificial Sequence
  ENSG00000090612_17 (sequence is synthesized)
ctcatacaggagagaaaccctatagttgtaatgaatgtggaaaagcctttacgttcaaatcacagctcattgtacataaaggagtgcacactggagtaaaaccctatggatgcagtcaat

SEQ ID NO: 97047 - DNA, 120 bp, Artificial Sequence
  ENSG00000090612_18 (sequence is synthesized)
gtgcaaaaacctttagtttgaagtcccagctcattgtacatcagagaagtcacacaggagtaaaaccatatggatgcagtgagtgtgggaaagccttcaggagcaagtcataccttatta

SEQ ID NO: 97048 - DNA, 120 bp, Artificial Sequence
  ENSG00000090612_19 (sequence is synthesized)
tacatatgagaactcatacaggagagaaaccacatgagtgcagggaatgcgggaaatcctttagtttcaattcacaactcattgtgcatcagagaattcacacaggagaaaatccctatg

SEQ ID NO: 97049 - DNA, 120 bp, Artificial Sequence
  ENSG00000090612_20 (sequence is synthesized)
aatgcagtgaatgtgggaaagcctttaataggaaagaccagctcatttcacatcagcgaactcatgcaggggaaaagccttatgggtgcagtgaatgtgggaaagcttttagcagcaagt

SEQ ID NO: 97050 - DNA, 120 bp, Artificial Sequence
  ENSG00000090612_21 (sequence is synthesized)
catacctaattatacacatgagaactcattcaggtgaaaaaccatatgaatgtaatgaatgtgggaaagccttcatttggaaatcactactcattgtacatgagcgaactcatgcagggg

SEQ ID NO: 97051 - DNA, 120 bp, Artificial Sequence
  ENSG00000090612_22 (sequence is synthesized)
tcaacccttataaatgcagtcaatgtgagaaatccttcagtgggaaattacgccttcttgtacaccagagaatgcacacaagagagaaaccatatgaatgcagtgagtgtggaaaagcct

SEQ ID NO: 97052 - DNA, 120 bp, Artificial Sequence
  ENSG00000090612_23 (sequence is synthesized)
tcattaggaattctcaactcattgtacatcaaagaactcattcaggagagaaaccctatgggtgcaatgaatgtgggaaaaccttctctcaaaaatcaattctcagtgcacatcagagaa

SEQ ID NO: 97053 - DNA, 120 bp, Artificial Sequence
  ENSG00000090612_24 (sequence is synthesized)
cacatacaggagagaagccttgtaagtgcactgaatgtgggaaagccttttgttggaagtcacagctcattatgcatcagagaactcatgtagatgacaaacattgataattttacgaaa

SEQ ID NO: 97054 - DNA, 120 bp, Artificial Sequence
  ENSG00000090612_25 (sequence is synthesized)
ctctgaaaagtggattcacaagagatagaaacaatcatatataaagagaaactctgtaagtggaatcatcttgtcatcttccagaaaactcatactgaatagaaactttatgaatgcaca

SEQ ID NO: 97055 - DNA, 120 bp, Artificial Sequence
  ENSG00000090612_26 (sequence is synthesized)
gcatatggaaaggcatccacagaaagctgttctttacatgcaaaaagatagtagacaatacacaggaaaactgaatttagtaaccactctgaaaatttttagcagcaagtcatacctttt

SEQ ID NO: 97056 - DNA, 120 bp, Artificial Sequence
  ENSG00000090612_27 (sequence is synthesized)
tttaaaaagttcatacaggtgaggaaccatgttaaacgttgtaaagtcattttactaaaataagattcacaaagaggaaacttcatgaaccagatgaatatagaatagacttctttgaaa

SEQ ID NO: 97057 - DNA, 120 bp, Artificial Sequence
  ENSG00000090612_28 (sequence is synthesized)
ttcatagtttacagaattttaatgagagaaattattgagctaatgaatggcagaattaacaaaattacaaacattttatgtatcggaagcatataccttggagggaccatgctataaggg

SEQ ID NO: 97058 - DNA, 120 bp, Artificial Sequence
  ENSG00000090612_29 (sequence is synthesized)
gaaacccctagggaaaaaatatatataggagtgaacatcttatgaatgtaccaaataaaccacagctggactgttaacctcaccttagaagcttcattctaaaaaaaaaaaaaaaaaaaa

SEQ ID NO: 97059 - DNA, 120 bp, Artificial Sequence
  ENSG00000090612_30 (sequence is synthesized)
attaattttgaagaattatttcttttaggaatcattttaagaaattttattccaggtgttccaaaatttcaggaaaaggtttgagaaaattctcaattataaataataagatacagatta

SEQ ID NO: 97060 - DNA, 120 bp, Artificial Sequence
  ENSG00000090612_31 (sequence is synthesized)
tttcattgtacaagtgaatctagtaaggaggttaagaataagaaataacatcccagagcctacagggatatttagatatcttcctatgtgtactacataatatgaattttgcagtttggc

SEQ ID NO: 97061 - DNA, 120 bp, Artificial Sequence
  ENSG00000090612_32 (sequence is synthesized)
attttacttgcgaatgccatatgtgagacaaaaatcatcttccagagatttcagtatctctgatactgacaatatctctgatatgacaatatcatcttccagagatttctactctgcata

SEQ ID NO: 97062 - DNA, 120 bp, Artificial Sequence
  ENSG00000090612_33 (sequence is synthesized)
ccaacattgtttctttgtgtcttaccaaatgcaacttgttactagaatatgacttactaaaaatgcatttccacactgcaaacattttttagggctatcttctgccctttggaagcagtc

SEQ ID NO: 97063 - DNA, 120 bp, Artificial Sequence
  ENSG00000090612_34 (sequence is synthesized)
ttggcagcaacctctttagtaatcaatataaggcacacttcatgtgtttgtgtagcctggaatctattctaccttcacaggttagaacatcttgatttcctcttaacgaaacattcccta

SEQ ID NO: 97064 - DNA, 120 bp, Artificial Sequence
  ENSG00000090612_35 (sequence is synthesized)
acggtgtatgtagtcatgagggaaccaccattcaagatgccctgctcaggacttggcatgagcactatggtcagctgaggctcagaactgtacattgttaatgggtttttcaagttcaga

SEQ ID NO: 97065 - DNA, 120 bp, Artificial Sequence
  ENSG00000090612_36 (sequence is synthesized)
aaagcaacatgagcttttgttctgtggtagcatgttgatgtaataagtagctatttcaatagaggttcccagaacagcttttgttactgtcattttcttaactttgttcacttgtctttt

SEQ ID NO: 97066 - DNA, 120 bp, Artificial Sequence
  ENSG00000090612_37 (sequence is synthesized)
attttgagctattgggtgtgcttttaatacattccttgtttgattgcattagccattgtgtatcttttgcatacagcttactaaatcagatggcttcagaaatgggtggtagaggagtag

SEQ ID NO: 97067 - DNA, 120 bp, Artificial Sequence
  ENSG00000090612_38 (sequence is synthesized)
gcagaaacttgcaaggatatgtggatatttggaaatggttgtttcccaagacaggatggaagtcttttaagcaagaaacttggcccatgctatgaagtcatgaaatgaattgttggcatc

SEQ ID NO: 97068 - DNA, 120 bp, Artificial Sequence
  ENSG00000090612_39 (sequence is synthesized)
atgtgctcactgaggctttggggaaatggataagttgtcattgaaaaattttaaacagaattctggagtggtcaagaggggaatgcttttgatacccatgtataacatggagaataatga

SEQ ID NO: 97069 - DNA, 120 bp, Artificial Sequence
  ENSG00000090612_40 (sequence is synthesized)
tcttaaaacttcaatttaagattatgtgtcagtgatactacttagttacatgtagctatagagtcacagtggtgaaaaactctgccagttgcttactcacaaagttagttttcttcacta

SEQ ID NO: 97070 - DNA, 120 bp, Artificial Sequence
  ENSG00000090612_41 (sequence is synthesized)
cctcatcaggtttgttatgtgagtgggcattaatctgggaagagtgggaccctgccagttagattagggctatcttggaggaatatgcggattcaatactgcaaatatttctgaaacacc

SEQ ID NO: 97071 - DNA, 120 bp, Artificial Sequence
  ENSG00000090612_42 (sequence is synthesized)
ttctgctttgtactctattagatacccaaagaaattttcatccttgaagcggaggaatttaatgatacctgaatgcctaactgttgtattctgcttatacagaatccaatctcaagatac

SEQ ID NO: 97072 - DNA, 120 bp, Artificial Sequence
  ENSG00000090612_43 (sequence is synthesized)
ttggggtgaagaatgatgattcacagaagggaagggacatcttacataaacaaataatcgcagatacttgctaaagtgtatcccccaatctgggaaatactgtaaaggtgtatattatta

SEQ ID NO: 97073 - DNA, 120 bp, Artificial Sequence
  ENSG00000090612_44 (sequence is synthesized)
ttgatgtaccaaagaagacagaataaattcataagagaaagtttatattcagtttactactacctagggttagattttagtttgttgttttttcagatgcaaatctacatgcagccttgc

SEQ ID NO: 97074 - DNA, 120 bp, Artificial Sequence
  ENSG00000090612_45 (sequence is synthesized)
ctggtagaagccagaagtgttgacagtattgaggacagcactcacatactgtgggaaagaataatacttgattaggacttattatttaatgaaatgaaaattttacaaaacagaaattga

SEQ ID NO: 97075 - DNA, 120 bp, Artificial Sequence
  ENSG00000090612_46 (sequence is synthesized)
gttactggtttgtaaatctatctagtccttctaccccagccccagaaaagaaagacattccagagacttttcaggaatagttattataaggaaaatccaaggaaaaataaccccaatatt

SEQ ID NO: 97076 - DNA, 120 bp, Artificial Sequence
  ENSG00000090612_47 (sequence is synthesized)
ttacaacttccccatcaaatagaaatttaggagaaaaaatgacttgcaaaccatatttgtgaacataggtttaaaaatccatatttgtgaacataggtttaaaaatccatatttgtgaac

SEQ ID NO: 97077 - DNA, 120 bp, Artificial Sequence
  ENSG00000090612_48 (sequence is synthesized)
ataggtttaaaaattctaaatggaattatagcaaaccaatgtatagctaacaagaaagtcatgatattaggtttaacagactattagtggatccagcatcctttgttcattaccagcaga

SEQ ID NO: 97078 - DNA, 89 bp, Artificial Sequence
  ENSG00000090612_49 (sequence is synthesized)
ctattagtggatccagcatcctttgttcattaccagcagaatcactattatttataatggcagtatgcccacttaaaaagagatatatg

SEQ ID NO: 97079 - DNA, 88 bp, Artificial Sequence
  ENSG00000090612_50 (sequence is synthesized)
cccctctctactaaaaatacaaaaaaatagcagggcatggtaactggacgggagaatcacttgaatctaggaggcggaagttgcagtg

SEQ ID NO: 97080 - DNA, 120 bp, Artificial Sequence
  ENSG00000090612_51 (sequence is synthesized)
ggcggaagttgcagtgagctgagatcgtaccactgtactccaccctgggtgacagaactagaccctgtctcaaaaaacagaagagtatgtttggaagatttaatattagaaaatatttta

SEQ ID NO: 97081 - DNA, 120 bp, Artificial Sequence
  ENSG00000090612_52 (sequence is synthesized)
taatattagaaaatattttaattaactaccagataaaactcataaggattatctcagtatatgctgataaatcacttgatggaatttaacacccatagatgacactaaaatactattaag

SEQ ID NO: 97082 - DNA, 120 bp, Artificial Sequence
  ENSG00000090612_53 (sequence is synthesized)
ttgggaattaaaattaactcctgtaacttggtagggaatatatgttctgaaaacacaaatgtcatacttaatgataaaatagtagaaagattcctttaaagtaaaattagccaggtgcag

SEQ ID NO: 97083 - DNA, 120 bp, Artificial Sequence
  ENSG00000090612_54 (sequence is synthesized)
tgaggctggaggattgctggaacccaggagttcgagacaagcctgaccaatatagggagaccctgtctgtacaaaaactttttaaaaagattagccaggtgtggtcaggcgccgtggctc

SEQ ID NO: 97084 - DNA, 120 bp, Artificial Sequence
  ENSG00000090612_55 (sequence is synthesized)
ggcgacagaacaagcctccatctcaaaaaaaagatcagccaggtgtagtggcaagtgccggtagtcccacctactgaggaggctgaggcaggaggttagcttgagtccagtagttcaagg

SEQ ID NO: 97085 - DNA, 120 bp, Artificial Sequence
  ENSG00000090612_56 (sequence is synthesized)
ctacagtgagctatgatcatgcccctgcactccatcctgggcaacaaagtgagaccctgtctgtaaaaaacaaagcaaaattacaagaatgcgcatcacttttatgaaatgagtaacatc

SEQ ID NO: 97086 - DNA, 120 bp, Artificial Sequence
  ENSG00000090612_57 (sequence is synthesized)
tagccaaggtgtgaaaacaaggaatgtgaggaattagggatgggtgcagaaacaactgccatgaattggagatgtgatcgtgtaattaggaaacccaaaataaaccacaaacaaatgttt

SEQ ID NO: 97087 - DNA, 120 bp, Artificial Sequence
  ENSG00000090612_58 (sequence is synthesized)
ggaactgccagtagagtagcaagtatgcagttgtcagtattcatggaggacccccccgcaaccacagatactccctgtggatgctcaagctccttatatggcatagtatttgcatttttt

SEQ ID NO: 97088 - DNA, 83 bp, Artificial Sequence
  ENSG00000090612_59 (sequence is synthesized)
atgctcaagctccttatatggcatagtatttgattgccaggctggagtgcagtggtgtgttcttggctcactgcaacctctgc

SEQ ID NO: 97089 - DNA, 120 bp, Artificial Sequence
  ENSG00000090612_60 (sequence is synthesized)
gctgggattacaggtgtgagccactggtctgtattgatttttcttaattctttgctaaagggccaggtagagttatttatttcttgtagagatggggttttaccatgttttccagtctgg

SEQ ID NO: 97090 - DNA, 66 bp, Artificial Sequence
  ENSG00000090612_61 (sequence is synthesized)
agagttatttatttcttgtagagatggggttttaccatgttttccagtctggtttcaaactcctgg

SEQ ID NO: 97091 - DNA, 120 bp, Artificial Sequence
  ENSG00000090612_62 (sequence is synthesized)
tggtataaatgatatatttaaatttaaatgaagttgcaagttttaacatgtctactctttaattttcaacattgtttcaactacttgttagaaacacaggccattaaaacattaataaaa

SEQ ID NO: 97092 - DNA, 82 bp, Artificial Sequence
  ENSG00000090612_63 (sequence is synthesized)
tctctactaaaaatacaaaaattggccagctgtggtggcatgcatctataatccaagctactcaggagaattgcttgaactg

SEQ ID NO: 97093 - DNA, 120 bp, Artificial Sequence
  ENSG00000090612_64 (sequence is synthesized)
agcagagtgagactccttcaaaaaaaattaataaaagcaagcacatagggtgcacatttgcccttccctcttgggatccagggtgatcccacaggtgctgttcatccccaactttgacct

SEQ ID NO: 97094 - DNA, 120 bp, Artificial Sequence
  ENSG00000090612_65 (sequence is synthesized)
ggactgttgcagtgttttgtcgcagtgtttctccctttttttgtactgggatttctccccagaaacaaacccatatgtataaaaagtagttgggcttgctataaagatgactagtggaaa

SEQ ID NO: 97095 - DNA, 120 bp, Artificial Sequence
  ENSG00000090612_66 (sequence is synthesized)
cctcaatagaggtacgatttcctaaaataaatcttgttcagatattacagggcaaagtgaaacagcaaagctccctcctcagcactcagggtgcaggcctcacttttcctcatcttttcc

SEQ ID NO: 97096 - DNA, 120 bp, Artificial Sequence
  ENSG00000090612_67 (sequence is synthesized)
tcctgtggcctccatgtatcccaaaggtgagatgacatcgccccagattggtccggaaagtgcactggtcgtcactgtgggtgtaccctacaggagtcttcagatatggaagctctggat

SEQ ID NO: 97097 - DNA, 120 bp, Artificial Sequence
  ENSG00000090612_68 (sequence is synthesized)
ctcactgtgatgtatccccctagggggtccccaggttgtgaggaaaaggaagctttagtcctcactgtggttgcatcccccaccacgggtcagtcctgaggaggatactctggtcatcac

SEQ ID NO: 97098 - DNA, 120 bp, Artificial Sequence
  ENSG00000090612_69 (sequence is synthesized)
tgtgatctacctcccaggggtccccaggttggtcctgaggagaaggaagctcagaacctcactgtggatttgccccactagggtccctaggtcagtcctgaagagaaacaagctccagtc

SEQ ID NO: 97099 - DNA, 120 bp, Artificial Sequence
  ENSG00000090612_70 (sequence is synthesized)
ttcactgtggttgtgccccacagtggtcctcaggttggccagtggagaaggaagctctggttctcagtgtgatgcatcccccaggttggtcctgagatgaggtaaattctggtcatcact

SEQ ID NO: 97100 - DNA, 120 bp, Artificial Sequence
  ENSG00000090612_71 (sequence is synthesized)
gtgaagtgccctcgggggtctccgggtcctgagtagaagcaaggtctgtttgtcactgtggattcccccctgccaagggtccccaggtcagtcctgaggagaaggcagctcagtctttac

SEQ ID NO: 97101 - DNA, 120 bp, Artificial Sequence
  ENSG00000090612_72 (sequence is synthesized)
tgtgatgcagcctctagtgatccccaggtcctgagtagaaggaaggcctggtcctctgtggattcaacccagaggtctgtgagcagaatgcaggtactgcaagcaggctagacaaggtgt

SEQ ID NO: 97102 - DNA, 120 bp, Artificial Sequence
  ENSG00000090612_73 (sequence is synthesized)
gtgcttgcaccccttccttactacctaggcacagtgttggatggtcagtgcttcctgttttgtgatggccatgtgccccctcttgcagtcccagtgaacccctgaaattcaatcttacga

SEQ ID NO: 97103 - DNA, 120 bp, Artificial Sequence
  ENSG00000090612_74 (sequence is synthesized)
ttttccatgccataattttggaaaacgaaactgaaatagagtccatcattccatgccttaattggaatggatagagataataaaaggcaaagtagatggccatagacaaaagtcaagtga

SEQ ID NO: 97104 - DNA, 120 bp, Artificial Sequence
  ENSG00000090612_75 (sequence is synthesized)
gtgatttcctatatatttgaaataatgtatagcaataattggaatttgtaatgaataaaatcattcaaaaaaatctgaaaaagtgtttgtatgcaaaatataaaaaaaaaaccctaaaat

SEQ ID NO: 97105 - DNA, 120 bp, Artificial Sequence
  ENSG00000090612_76 (sequence is synthesized)
aatataaaaaaaaaaccctaaaattgaacaagaagacaacccaattaaaaatggggacagatccaaatacatactttccaaagatatacagatggtggccaggcacggtggctcacgcct

SEQ ID NO: 97106 - DNA, 60 bp, Artificial Sequence
  ENSG00000090612_77 (sequence is synthesized)
tactctgccaccaagtggtagctactccggaggcggaggcaggagaatggcttgaacccg

SEQ ID NO: 97107 - DNA, 120 bp, Artificial Sequence
  ENSG00000090612_78 (sequence is synthesized)
aaaaaaaaagaagatatacagatggcaaataagcataccaaataatgctcagtgacacttgtcatgagggaaaagcaaattaaaacaacgagatagcaccgcacatctattaaagtgact

SEQ ID NO: 97108 - DNA, 120 bp, Artificial Sequence
  ENSG00000090612_79 (sequence is synthesized)
ataatctaaaaataagtaaatttgcaattgcaacaggaactctcattcattgctggtgcaatgcataatagtatagccactttggaagatagtttgacttttccccaaagctaaacaaag

SEQ ID NO: 97109 - DNA, 120 bp, Artificial Sequence
  ENSG00000090612_80 (sequence is synthesized)
cttcacaatatgagccaacaatcacactcctaggtatttagataactgctttgaaaacataggagtttgatctaaacaaaacccagcatgtactcacgtacagcagctcttttcataaca

SEQ ID NO: 97110 - DNA, 120 bp, Artificial Sequence
  ENSG00000090612_81 (sequence is synthesized)
gacaaatactttaaggaatcaggataaccttcaataggtgaatgactaactaggctggggtacatccatgcaatggagtcctgttcagcaagagcaagctctgaggccatgcaggacatg

SEQ ID NO: 97111 - DNA, 120 bp, Artificial Sequence
  ENSG00000090612_82 (sequence is synthesized)
gatgaatctgataggcatattgctaagtgaaagagaccagtgtgaaaaggctgtatgatcctatttctatgatgttatggaaaagcagaaactacaggggtagcaaacatatctgtgatt

SEQ ID NO: 97112 - DNA, 120 bp, Artificial Sequence
  ENSG00000090612_83 (sequence is synthesized)
gatgacggtttgtagagggcagggagtgagttaaataggaggatataatgatagaaacaggcacaaatgggcctttggagagtgtactccctctgcttggtgaaattatgctgggtgtgt

SEQ ID NO: 97113 - DNA, 120 bp, Artificial Sequence
  ENSG00000090612_84 (sequence is synthesized)
gtggaagagcctgggatgtataatgccagcatgaacaaaaaggccacttatcactccaggagagcagggtgttctttcatcacacatgaaattatttcaggatcagttccaagggagact

SEQ ID NO: 97114 - DNA, 120 bp, Artificial Sequence
  ENSG00000090612_85 (sequence is synthesized)
cacatatatatacacatatatataataagaacatttaccattttaactatttttaagtgtacacttcagtggcatgaagtacattatttccattattgtgcaactatcattttacattcc

SEQ ID NO: 97115 - DNA, 120 bp, Artificial Sequence
  ENSG00000090612_86 (sequence is synthesized)
accagcagtgcacaaggcttccaatttctccacatacttgccaatattaattagtttgtttctctctcatttcataggcatgatcataactcactgcagccccaacctcctgggctcaag

SEQ ID NO: 97116 - DNA, 120 bp, Artificial Sequence
  ENSG00000090612_87 (sequence is synthesized)
acctcctgggctcaagggatccttccacctcagcctcctgggtagctggaactacaggtgccactacacccaaatagttttttggtttttttgaaatggagtttcactctgtcacccagg

SEQ ID NO: 97117 - DNA, 65 bp, Artificial Sequence
  ENSG00000090612_88 (sequence is synthesized)
ctcaaactcctgtcctcaagacttggcctccatattttttataatagccactctaacatgtatga

SEQ ID NO: 97118 - DNA, 120 bp, Artificial Sequence
  ENSG00000090612_89 (sequence is synthesized)
aatggtatctcattgtggttttgattttcctttacctaatggctagtgatgttgaaaatcttttcatgtacttcttggcactggatttggcaatgatttattggatatgacaccagaagc

SEQ ID NO: 97119 - DNA, 120 bp, Artificial Sequence
  ENSG00000090612_90 (sequence is synthesized)
ctggatttggcaatgatttattggatatgacaccagaagcatgggaaacaaaagaaaaaataggtaaattggacttcaccaaaattgaaaactttcggcatcagtggacactatcaagaa

SEQ ID NO: 97120 - DNA, 85 bp, Artificial Sequence
  ENSG00000090612_91 (sequence is synthesized)
aaaaaaaaagagaaaaaaaaaaactcaggaagctgaggcaggaggatcgcttgaagctgtgaggtggaggttgcagtgagccgag

SEQ ID NO: 97121 - DNA, 67 bp, Artificial Sequence
  ENSG00000090612_92 (sequence is synthesized)
caaaaaattagccaggctggtagtggtggaaccagtgagcccagatctcaccactgcactccagcct

SEQ ID NO: 97122 - DNA, 120 bp, Artificial Sequence
  ENSG00000090612_93 (sequence is synthesized)
aaaaaaaaaggtgaatataggagaaaagacactgtaaaataatatacctgataagggtctagtatccagaacatataaagaactcttacaacccaacaacaaaaagacaacccaatatca

SEQ ID NO: 97123 - DNA, 120 bp, Artificial Sequence
  ENSG00000090612_94 (sequence is synthesized)
aaatgggcagaggacttgaagagacttttctgtaaagaagatatgcaaatagcatatgaaacgatactcaacatcactagccatcatggaaatataaatcaaaaatacaatgagataaca

SEQ ID NO: 97124 - DNA, 120 bp, Artificial Sequence
  ENSG00000090612_95 (sequence is synthesized)
ctccatacccatcagaatgtcttattattttaaaaacaaaccagaaacaagtattgacaaagaagtggagaaatgtgaacaccgctgtaaaatggtaaagctgctatgactgacccttgc

SEQ ID NO: 97125 - DNA, 120 bp, Artificial Sequence
  ENSG00000090612_96 (sequence is synthesized)
accgctgtaaaatggtaaagctgctatgactgacccttgctacaacgtggaggaacctcagaaacattgtgctgagaacccagcacaaggccacacacctgtaatcccagctactcggga

SEQ ID NO: 97126 - DNA, 120 bp, Artificial Sequence
  ENSG00000090612_97 (sequence is synthesized)
ccagtctgggcagcatagcaagactccatgtctacaaagataaaaataaaagcaatgtgcagaaagaggctggccacaaaaaggtcacatactgtatgataccacttatatgaaataccc

SEQ ID NO: 97127 - DNA, 120 bp, Artificial Sequence
  ENSG00000090612_98 (sequence is synthesized)
agaatgggtaaatccaaagagagcatattggtggttgtcaagggtcggagggaggatgaaatgtgtgacagctgcttaatggatggaggatttcctttggggtgatgaaactattttgga

SEQ ID NO: 97128 - DNA, 120 bp, Artificial Sequence
  ENSG00000090612_99 (sequence is synthesized)
actaagaggtggtggctgcacaatgttgtgcatggactaaatgtcacagaaatgtacatttttaaaagttaattttatattgtgtaaattttacctcaataaaaaaatctagtccacagc

SEQ ID NO: 97129 - DNA, 120 bp, Artificial Sequence
  ENSG00000090612_100 (sequence is synthesized)
attttaaggccagattttcttagttccctattggcagcagagtatgccagttgaatggtctttactttgccaaattgcaaaaaggcagcttcatcatgctacctccaaaccaaatctttc

SEQ ID NO: 97130 - DNA, 120 bp, Artificial Sequence
  ENSG00000090612_101 (sequence is synthesized)
tggcaggtttggtgtctggtgagggcctgctctgtgcttccaagatgacgccttgttgctgcatcctctggagacacagtctggaaaattgatgatcttatggattggcatcaggaaaat

SEQ ID NO: 97131 - DNA, 120 bp, Artificial Sequence
  ENSG00000090612_102 (sequence is synthesized)
agggatggccaccagggtccggacagcttctatttgggctggagtgcagtggctatctctgctcaccacaacgtctgcttcccgagttcaagtggttctcttgcctcagcctcctgagta

SEQ ID NO: 97132 - DNA, 80 bp, Artificial Sequence
  ENSG00000090615_0 (sequence is synthesized)
ctctcacggccacgtctccgccggagcatccgggccgggcggcctccggggctgccagagcagcagggtgaggggctcgg

SEQ ID NO: 97133 - DNA, 80 bp, Artificial Sequence
  ENSG00000090615_1 (sequence is synthesized)
gcggcggggcctgggcgcgtccctgcagcgtggcgggacggccccgttccagtcacccccgcctcgctgcggtggcctcg

SEQ ID NO: 97134 - DNA, 120 bp, Artificial Sequence
  ENSG00000090615_2 (sequence is synthesized)
ggcctgggcgcccgccttcagctgcggcggagctggctctgtaaatgccggtgcccgcgagccctcctgaatgcttgtctgcgcccgacgagcgcggcctgtcccgaagctgtccactgc

SEQ ID NO: 97135 - DNA, 120 bp, Artificial Sequence
  ENSG00000090615_3 (sequence is synthesized)
caccactcgggcagtgcttgctttagcctggccctttgcagctgaaaggcgtgacatggtgtcgggtggttcgtgggaagtcggggtttcaggagtccgtgtacttccttgtttgtcttt

SEQ ID NO: 97136 - DNA, 120 bp, Artificial Sequence
  ENSG00000090615_4 (sequence is synthesized)
gtcgctggccgacttgtcttcattccaggtggccagagcgagtggggccgggcgttgtcacgggtatcatgatattagctggtttgacatcaagtcatttgtgagtcatcagatcttctc

SEQ ID NO: 97137 - DNA, 120 bp, Artificial Sequence
  ENSG00000090615_5 (sequence is synthesized)
ctgaaaatgggagacacagtagggcccctcccaggagctcttggctgttgctgatggcagaagccaagcttgtccaaggttcacttgtagcccctcagcgtcagctcagctggtgtcgtc

SEQ ID NO: 97138 - DNA, 120 bp, Artificial Sequence
  ENSG00000090615_6 (sequence is synthesized)
ctgaccatggacggcgcgtcggccgagcaagatggcctccaggaggacagatcccacagtggcccctcgtctctccccgaggccccactgaagcccccgggcccactggtgccacctgac

SEQ ID NO: 97139 - DNA, 120 bp, Artificial Sequence
  ENSG00000090615_7 (sequence is synthesized)
cagcaggacaaagtccagtgtgccgaggtaaacagagcatccacggaaggggaaagcccggatggacctggccagggaggcctctgtcagaacgggccaacgccacccttcccagaccct

SEQ ID NO: 97140 - DNA, 120 bp, Artificial Sequence
  ENSG00000090615_8 (sequence is synthesized)
ccgtcgtctctcgatcccaccacaagcccagtgggccctgatgcctctccaggtgtggctggtttccatgacaacctaaggaagtctcagggaactagtgctgagggcagtgttagaaaa

SEQ ID NO: 97141 - DNA, 120 bp, Artificial Sequence
  ENSG00000090615_9 (sequence is synthesized)
gaagctttgcagtctctcagactcagtcttcctatgcaagaaacgcaactgtgctctacagattctcccctgcccctggagaaggaggagcaggtccgacttcaggctcggaagtggctg

SEQ ID NO: 97142 - DNA, 120 bp, Artificial Sequence
  ENSG00000090615_10 (sequence is synthesized)
gaagagcagctcaaacagtacagggtgaagcgccagcaggagaggtccagtcaacctgcaaccaaaacgagactttttagcacgcttgatcctgagctcatgttaaacccagaaaactta

SEQ ID NO: 97143 - DNA, 120 bp, Artificial Sequence
  ENSG00000090615_11 (sequence is synthesized)
ccaagggccagtaccctggctatgacaaaagaatattccttcctgcgcaccagtgtccctcgggggcctaaggtgggcagcctggggcttccggcacatcctagggagaaaaaaacttcc

SEQ ID NO: 97144 - DNA, 120 bp, Artificial Sequence
  ENSG00000090615_12 (sequence is synthesized)
aaatcaagcaaaatccggtctctggccgattacagaactgaagattcaaatgcggggaattctgggggaaatgtcccggctcccgattctaccaagggttccctgaagcagaacagaagc

SEQ ID NO: 97145 - DNA, 120 bp, Artificial Sequence
  ENSG00000090615_13 (sequence is synthesized)
agtgcggcgtccgttgtgtctgagatcagcctgtcccccgacactgacgaccgtctggagaacacctccctggctggagacagcgtgtctgaggtggatggaaatgacagcgacagctca

SEQ ID NO: 97146 - DNA, 120 bp, Artificial Sequence
  ENSG00000090615_14 (sequence is synthesized)
tcgtacagcagcgcctccacccgagggacctatggcattctgtcgaagacagtgggcacgcaggacaccccctatatggtcaacggccaggagattcctgcggataccctgggccagttc

SEQ ID NO: 97147 - DNA, 120 bp, Artificial Sequence
  ENSG00000090615_15 (sequence is synthesized)
ccctccattaaggacgtcctccaggccgcagccgctgagcaccaagaccaggggcaggaggtcaacggggaggtgcggagtcggagagacagcatctgcagcagcgtgtccttggagagc

SEQ ID NO: 97148 - DNA, 120 bp, Artificial Sequence
  ENSG00000090615_16 (sequence is synthesized)
tctgcagcagaaacacaggaggagatgctgcaggtgctcaaagagaaaatgcgactcgaaggacagctggaagccttgtcactggaggcgagtcaggcacttaaagagaaggctgagctg

SEQ ID NO: 97149 - DNA, 120 bp, Artificial Sequence
  ENSG00000090615_17 (sequence is synthesized)
caggcccagctggccgccctcagcacgaagctgcaggcgcaggtggagtgcagccacagcagccagcagcggcaggattcgctgagctcggaggtggacaccctgaagcagtcgtgctgg

SEQ ID NO: 97150 - DNA, 120 bp, Artificial Sequence
  ENSG00000090615_18 (sequence is synthesized)
gacctggagcgagccatgactgacctgcagaacatgctggaggcaaaaaatgccagcctggcgtcgtccaacaacgacttgcaggtggccgaggagcagtaccagaggcttatggccaag

SEQ ID NO: 97151 - DNA, 120 bp, Artificial Sequence
  ENSG00000090615_19 (sequence is synthesized)
gtagaggacatgcagaggagcatgctcagcaaggacaacacagtgcacgacctgcgacagcagatgacagccttgcagagccagcttcagcaggtgcagctggagcggacgacgctgacc

SEQ ID NO: 97152 - DNA, 120 bp, Artificial Sequence
  ENSG00000090615_20 (sequence is synthesized)
agcaagctgaaggcgtcgcaggcggagatctcgtccctgcagagtgtccggcagtggtaccagcagcagctcgccctggcacaggaggcccgcgtcaggctgcagggtgagatggcccac

SEQ ID NO: 97153 - DNA, 120 bp, Artificial Sequence
  ENSG00000090615_21 (sequence is synthesized)
atccaggttggacagatgacccaggcaggtctcctggagcacctgaaactcgagaatgtgtccctgtcccagcagctgacggaaactcagcacaggtccatgaaggagaaggggcgcatc

SEQ ID NO: 97154 - DNA, 120 bp, Artificial Sequence
  ENSG00000090615_22 (sequence is synthesized)
gcggcacagctgcagggcattgaggctgacatgttggatcaggaagcagccttcatgcagattcaggaggcaaagacgatggtggaggaggaccttcagaggaggctggaagagtttgaa

SEQ ID NO: 97155 - DNA, 120 bp, Artificial Sequence
  ENSG00000090615_23 (sequence is synthesized)
ggtgagagggagcggctgcagaggatggcggactcggcggcatccctggagcagcagctggagcaggtgaagttgactttactccagcgagaccagcagcttgaggctttgcagcaggag

SEQ ID NO: 97156 - DNA, 120 bp, Artificial Sequence
  ENSG00000090615_24 (sequence is synthesized)
cacctggacctgatgaaacagctcaccttgactcaggaggctctgcagagcagggagcagtccctcgatgccctgcagacacactacgatgagctgcaggccaggctgggggagctgcag

SEQ ID NO: 97157 - DNA, 120 bp, Artificial Sequence
  ENSG00000090615_25 (sequence is synthesized)
ggcgaggccgcctccagggaggacacgatctgcctcctgcagaacgagaagatcatcttggaggcggctttgcaggcggccaagagtggcaaggaggagcttgacagaggagcaagacgc

SEQ ID NO: 97158 - DNA, 120 bp, Artificial Sequence
  ENSG00000090615_26 (sequence is synthesized)
ttggaagaaggtaccgaggaaacgtcggaaactttagagaagttaagagaagaattagctatcaaatccggccaggtggaacacctgcagcaggagactgctgctctgaaaaagcaaatg

SEQ ID NO: 97159 - DNA, 120 bp, Artificial Sequence
  ENSG00000090615_27 (sequence is synthesized)
caaaaaataaaggaacagtttctccaacaaaaggtgatggtggaggcctaccggcgcgacgccacctccaaagaccagctcatcagtgagctgaaagccaccaggaagaggctggactcg

SEQ ID NO: 97160 - DNA, 120 bp, Artificial Sequence
  ENSG00000090615_28 (sequence is synthesized)
gagctgaaggagctgcggcaggagctgatgcaagtgcacggggagaagcggactgccgaggcggagctctcgcgcctgcacagagaggtggcccaggtccgtcagcacatggcggacctt

SEQ ID NO: 97161 - DNA, 120 bp, Artificial Sequence
  ENSG00000090615_29 (sequence is synthesized)
gaagggcatctccagtcggcgcagaaggagcgagacgagatggaaacacacttgcagtcgttgcagttcgataaggagcagatggtcgcggtcacagaggccaatgaggcgctgaagaaa

SEQ ID NO: 97162 - DNA, 120 bp, Artificial Sequence
  ENSG00000090615_30 (sequence is synthesized)
caaatcgaagagttgcagcaagaggcccggaaggccatcacggaacagaagcagaagatgaggcggctgggctcagacttgaccagcgcccagaaggagatgaagaccaaacataaggcc

SEQ ID NO: 97163 - DNA, 120 bp, Artificial Sequence
  ENSG00000090615_31 (sequence is synthesized)
tacgagaacgccgtgggcatcctcagccgccgcctgcaggaggccctcgcggccaaggaggctgcggacgcggagctgggccagctccgagcccagggtggcagcagtgacagcagcctg

SEQ ID NO: 97164 - DNA, 120 bp, Artificial Sequence
  ENSG00000090615_32 (sequence is synthesized)
gctctacatgaaaggatccaggccctggaggcggagctgcaggctgtcagtcatagcaagacgctgctggaaaaggaactgcaggaggtcatagcgctgaccagccaggagctggaggag

SEQ ID NO: 97165 - DNA, 120 bp, Artificial Sequence
  ENSG00000090615_33 (sequence is synthesized)
tcccgggagaaggtgctggagctggaggacgagcttcaagaatccagaggctttaggaagaagataaaacgccttgaggagtcaaacaagaagttggctcttgaattagagcacgagaaa

SEQ ID NO: 97166 - DNA, 120 bp, Artificial Sequence
  ENSG00000090615_34 (sequence is synthesized)
gggaagcttacgggcctcggtcagtccaacgcagctctgcgggaacacaacagcatcctagaaacagctttggccaagagggaggcagacctagtccagttgaaccttcaggtgcaggca

SEQ ID NO: 97167 - DNA, 120 bp, Artificial Sequence
  ENSG00000090615_35 (sequence is synthesized)
gttttgcagcgcaaagaagaggaggatcgccagatgaagcatcttgtccaggccctgcaggcctcactagagaaggagaaggagaaggtgaacagcctcaaggagcaggtggctgctgcc

SEQ ID NO: 97168 - DNA, 120 bp, Artificial Sequence
  ENSG00000090615_36 (sequence is synthesized)
aaggtggaagccgggcataaccgccgccacttcaaggcggcctccttggagctgagtgaggtgaagaaggagctgcaggccaaggaacacctggtgcagaagctgcaggccgaggccgac

SEQ ID NO: 97169 - DNA, 120 bp, Artificial Sequence
  ENSG00000090615_37 (sequence is synthesized)
gaccttcagattcgggaggggaaacattcccaggagatagcacagttccaagcagagctggccgaggcccgggcacagctccagctcctgcagaagcagctggacgagcagctcagcaaa

SEQ ID NO: 97170 - DNA, 120 bp, Artificial Sequence
  ENSG00000090615_38 (sequence is synthesized)
cagcccgtgggaaaccaagagatggaaaatctcaaatgggaggtggatcagaaagaaagagaaatccagtccttgaagcagcagctggacttgacggagcagcagggcaggaaggaactg

SEQ ID NO: 97171 - DNA, 120 bp, Artificial Sequence
  ENSG00000090615_39 (sequence is synthesized)
gaagacctgtccatgacccagaaggataaatttatgctccaggcaaaagtgtcggagctgaagaacaacatgaagaccctgctccagcagaaccagcagctcaagctggacctacgccgc

SEQ ID NO: 97172 - DNA, 120 bp, Artificial Sequence
  ENSG00000090615_40 (sequence is synthesized)
ggcgcggccaagacgagaaaggagccgaaaggcgaggccagctcttccaaccctgccacgcccatcaagatcccggactgcccagttcccgcctcgctgctggaggagctgctgagacca

SEQ ID NO: 97173 - DNA, 120 bp, Artificial Sequence
  ENSG00000090615_41 (sequence is synthesized)
ccgcccgccgtgagcaaggagcccctcaagaacctgaacagctgcctccagcagctcaagcaggagatggacagcctgcagcgccagatggaggagcacgccctgacggtgcacgagtct

SEQ ID NO: 97174 - DNA, 120 bp, Artificial Sequence
  ENSG00000090615_42 (sequence is synthesized)
ctgtcctcgtggacgccgctggagccagccactgccagccctgtgcccccggggggtcacgccggcccacgcggcgacccacagagacacagtcagagcagggcttccaaagaagggccg

SEQ ID NO: 97175 - DNA, 120 bp, Artificial Sequence
  ENSG00000090615_43 (sequence is synthesized)
ggagagtgactgctgtggactcgcctccgtgcgccgctgccccagaaggctcttatcaatgttatttatttgattgtgtggtcgatgtttttctaagacatgaaatttaagttttgtttt

SEQ ID NO: 97176 - DNA, 120 bp, Artificial Sequence
  ENSG00000090615_44 (sequence is synthesized)
gcctttaacaagaagtaaaatatatagcagaatgagagccaaggactagaaaaacattcgaagatcacaattagcttttcacatggaatgaccaactcttaaaagcctgataggctctcg

SEQ ID NO: 97177 - DNA, 120 bp, Artificial Sequence
  ENSG00000090615_45 (sequence is synthesized)
gcgaggagctttgaacgtgtctgaagggttacttgtaggtcgtggcttctgagcggccaccgatgctgctctctgcgggtgacagggagaggctgcgtaactgggagcagctgtgtgaca

SEQ ID NO: 97178 - DNA, 120 bp, Artificial Sequence
  ENSG00000090615_46 (sequence is synthesized)
gggtctgcggcaccgcgcctggccaggccggctgcagtttctcacttccctgttccattcagtaagagctttacttttccgcagaaatgaaattttatctgtacctttggctttttactt

SEQ ID NO: 97179 - DNA, 120 bp, Artificial Sequence
  ENSG00000090615_47 (sequence is synthesized)
gaaattttatctgtacctttggctttttacttgtttttttggatagccatcccaccataggatgtgtacatagatactgaatatcataatccaatctttgtttttttttttttttttttt

SEQ ID NO: 97180 - DNA, 120 bp, Artificial Sequence
  ENSG00000090615_48 (sequence is synthesized)
ctgcgcccggcctgtcacccagtctttaagaagcatatgctcatgttattgaagaagaacctacttattattgattgccttttgaaaatttgttgggaataatttacctgcaggatttag

SEQ ID NO: 97181 - DNA, 120 bp, Artificial Sequence
  ENSG00000090615_49 (sequence is synthesized)
ggatagtcagaaaattctaagaaatataattattttatttaccttctaaagccaaatattcttacacagaaaggtcctctgttgttctggttttactttgttgctgaggatctttccttc

SEQ ID NO: 97182 - DNA, 120 bp, Artificial Sequence
  ENSG00000090615_50 (sequence is synthesized)
ctgctggtctcttcctctcaggccactggccctgtgtgattccaccgtggctggccactgggaaggggcagcttggacccttggtcaggcctgacggccatcaggaggcacaaggacact

SEQ ID NO: 97183 - DNA, 120 bp, Artificial Sequence
  ENSG00000090615_51 (sequence is synthesized)
gaggccccatatctgatctgacctttgggggggcacagggagaggccggtggaggaggaggaggagagcagaccaggggctccctgcagcgactcccgcggtttcccctggagtcagcca

SEQ ID NO: 97184 - DNA, 120 bp, Artificial Sequence
  ENSG00000090615_52 (sequence is synthesized)
ggtgtaggtcgcaggcggtaacaaacctcacactcctgttccccaagtgaaaatctttaccattgtctgtgggagcgcctgtactcgtgtgtaggagcacctgtacttctgcagtcatcg

SEQ ID NO: 97185 - DNA, 120 bp, Artificial Sequence
  ENSG00000090615_53 (sequence is synthesized)
agaagtcctggatcttttgtggttacaccagcatcatgtggcaagcagaggcgacttccggaagagacaggcaggcaccgtgaggaaggtggctgtgctctcccaggtgtctcagagaca

SEQ ID NO: 97186 - DNA, 120 bp, Artificial Sequence
  ENSG00000090615_54 (sequence is synthesized)
gatgccttatttaaaatcagcacgacatgtgtgagatcttctgtttcctaccccaaatcctgaaaccctgcagacactggctgactgggagaggtggggtctgtaagttgtcccctagtt

SEQ ID NO: 97187 - DNA, 120 bp, Artificial Sequence
  ENSG00000090615_55 (sequence is synthesized)
tgctaagaaaatctaaaataatatttattatatgagttaggagagagagaatgggtccgcgtggcctcctctgcagatgtactggtctgaaatgaggttctgagtcactggccaggccag

SEQ ID NO: 97188 - DNA, 120 bp, Artificial Sequence
  ENSG00000090615_56 (sequence is synthesized)
atgtgctcatgtcggtgtctggtgtctgttttgtggagaaaacagtatggtgtgttttaagctatttgtgttctgttgtaatatacttttagaaggttaattggtaaggttaaggtagca

SEQ ID NO: 97189 - DNA, 120 bp, Artificial Sequence
  ENSG00000090615_57 (sequence is synthesized)
ttaaccacaaagatgtttggtatttaaaaaatattctctagcaaatattggaatttccaaaatatatcatttgtacagggttaattttgaaataatacttgaaaatttcattataaatat

SEQ ID NO: 97190 - DNA, 120 bp, Artificial Sequence
  ENSG00000090615_58 (sequence is synthesized)
atcctactttttatcttaagttgaagatgttatttactaaattgttcttgtaccattagaaaaaaaaatacggcaatttacgttcttatttattttggctgtactacccctttgttttaa

SEQ ID NO: 97191 - DNA, 85 bp, Artificial Sequence
  ENSG00000090615_59 (sequence is synthesized)
gattttaaaaaatctaaaatcgagaaatcacacattcagtggggagcgacttctccttgcttatgggaagtcctcaagtgagtga

SEQ ID NO: 97192 - DNA, 120 bp, Artificial Sequence
  ENSG00000090615_60 (sequence is synthesized)
gcgacttctccttgcttatgggaagtcctcaagtgagtgatgttcaccatgtatttttttttctcttaggacagactaattctgaaaataccgaaggaaaagtagctctatgttctcacc

SEQ ID NO: 97193 - DNA, 120 bp, Artificial Sequence
  ENSG00000090615_61 (sequence is synthesized)
ccggttttcctgcgtgtgtgcccttgggtgcgatgcctcccccagcgctctgtggtcgccggtgccagggccccctctggtttggcagggcctggctgcctttgctccctgcagtgagtc

SEQ ID NO: 97194 - DNA, 120 bp, Artificial Sequence
  ENSG00000090615_62 (sequence is synthesized)
ttttggtgttttcatgcacggcttgtgcttctggatctgaggcctctcgtgttcacgcggacacttccttccttaagaagacgcctaaaagaggaagttggaattttttttttttttttt

SEQ ID NO: 97195 - DNA, 77 bp, Artificial Sequence
  ENSG00000090615_63 (sequence is synthesized)
tcaagcgattctcctgcctcatcctaatttttgtatttttagaggggtggagttccaccatgttggccaggctggtc

SEQ ID NO: 97196 - DNA, 120 bp, Artificial Sequence
  ENSG00000090615_64 (sequence is synthesized)
caaagtgctggaattataggcgtgaaccaccgcccccggctgcagttggatttttaaattgcttttttttattgttgaggtttttttatctccaagggactctcccggcacttctacctt

SEQ ID NO: 97197 - DNA, 120 bp, Artificial Sequence
  ENSG00000090615_65 (sequence is synthesized)
ccagagttacttcagtgcataaagtttgaattattttgttcttgtgggcagaagtgggaatgatggaatatcctcacggaaaaggcagtgaagttgggagtactgcttacaaaacagggt

SEQ ID NO: 97198 - DNA, 120 bp, Artificial Sequence
  ENSG00000090615_66 (sequence is synthesized)
caccagtgcattatgtggcgtgttcatccccacgccgtgtgtcacgggctagggcggcgtgttcatccccacaccgtgtgtcacaacaggctagggcacttcacgatgtcactacttgtt

SEQ ID NO: 97199 - DNA, 120 bp, Artificial Sequence
  ENSG00000090615_67 (sequence is synthesized)
tttctgatgttccaaaaacaacgtaacttggttttcatgtgtttttccgtggtatatgtgagattgatgctacgggtcttacggactcacacccgttcccactctctgcaatatggatca

SEQ ID NO: 97200 - DNA, 120 bp, Artificial Sequence
  ENSG00000090615_68 (sequence is synthesized)
ggcagtgtttctgataggatgtgaaatggactctcctcgggtgggtccagcaggggccctgcccaccagaacacagtccgtgctgtgctgcgctaaggagctggccctcaactctccttg

SEQ ID NO: 97201 - DNA, 120 bp, Artificial Sequence
  ENSG00000090615_69 (sequence is synthesized)
gtgcagggttcccacaaccgagttctagttccctgaggtctttaaaaacaaaaacagaatgttgtacgtgaagattctaggaggggagggaccagcaaatctgagagaaccgtcctgggg

SEQ ID NO: 97202 - DNA, 120 bp, Artificial Sequence
  ENSG00000090615_70 (sequence is synthesized)
cctcccttcgaggagccctctgatgtgaggagggacttgagttgagtgacgctgtggtgtgaggtgttctgagctcactgaccggaaggtccaggtgaatctcgtcataagtgatctcag

SEQ ID NO: 97203 - DNA, 120 bp, Artificial Sequence
  ENSG00000090615_71 (sequence is synthesized)
gctctcacaggatccggagggaaatgtgttagagggtctggaaaattcagtgcttttgagttacttgtttttattaaaaatttcctcacaaaagagagtcctcaagttgtggctgttctt

SEQ ID NO: 97204 - DNA, 120 bp, Artificial Sequence
  ENSG00000090615_72 (sequence is synthesized)
gggaaaggggtcaccgtgtctgacaaagtgtaactttaaaaagcacgttgattttttacaaatgtaagtgtgcttgggaattccttaaattttgtgcaataaactattttttggtaaaga

SEQ ID NO: 97205 - DNA, 120 bp, Artificial Sequence
  ENSG00000090615_73 (sequence is synthesized)
tagatgctctcggacaggaggctggcagacgtgttagtcattcagacataaacggatttgttgagcccacactgagcagctgctgtgtagtcagtggtaatggggtgacagatgaaatca

SEQ ID NO: 97206 - DNA, 120 bp, Artificial Sequence
  ENSG00000090615_74 (sequence is synthesized)
tttcattctggtttcattcatccaacagtgttttcctcgttctgtgaattcaaataccactttgttgtaatgtgctttgtaaagcagatgagcggtggtctgtgactcggcagtccctgc

SEQ ID NO: 97207 - DNA, 120 bp, Artificial Sequence
  ENSG00000090615_75 (sequence is synthesized)
tgtgtgtgaagggctggggcccgggagctgtgcccaggcgcccggcggttttctgtgctcggtccacatccatgttttccaggaggcaggtgggagggcagcgctcggattgagaggccg

SEQ ID NO: 97208 - DNA, 120 bp, Artificial Sequence
  ENSG00000090615_76 (sequence is synthesized)
tttagcgtcgtgtgcttatctgtggaaaaagtttgaagtcccagaaaagggagcctaagctggaaaacttacttaatttcttacggaaattccacatcaaggtcttgagtatctgatggg

SEQ ID NO: 97209 - DNA, 120 bp, Artificial Sequence
  ENSG00000090615_77 (sequence is synthesized)
agaagcgtctgggagagctgtagtctgtggctcggccccgtcctgccgcagacccaggacttaggttgtctctgctttgctctggttttgtgccttaggaataaaggtgtttcctcagcc

SEQ ID NO: 97210 - DNA, 120 bp, Artificial Sequence
  ENSG00000090615_78 (sequence is synthesized)
acatgccgccacgcgtgagacccgaagaacaaaacttcaccgtgtgcccagcgttgctacttttggtgttgccaccttctgaccgtcggcctctggctctgtggtggggcaggccctgat

SEQ ID NO: 97211 - DNA, 120 bp, Artificial Sequence
  ENSG00000090615_79 (sequence is synthesized)
tccagccctctggggaggatcactgtacagcctctttggtggaatggttacagaattcatagtggaacccttctcagttcaaatgctttggttgcaaataagaaacccaacttcgccagg

SEQ ID NO: 97212 - DNA, 120 bp, Artificial Sequence
  ENSG00000090615_80 (sequence is synthesized)
acgtctccgccggagcatccgggccgggcggcctccggggctgccagagcagcaggagactgggtgtgttgctgtattgcccaggctggtgtggaactcctggcctcaagcgatcctccc

SEQ ID NO: 97213 - DNA, 120 bp, Artificial Sequence
  ENSG00000090615_81 (sequence is synthesized)
aataaatcatctgacatcactcagattgaagaggagctttttttcccccgattgccttaagaagtagcatactttcccaagtatcatgatattagctggtttgacatcaagtcatttgtg

SEQ ID NO: 97214 - DNA, 120 bp, Artificial Sequence
  ENSG00000090615_82 (sequence is synthesized)
ggccgacttgtcttcattccaggtggccagagcgagtggggccgggcgttgtcacggagactgggtgtgttgctgtattgcccaggctggtgtggaactcctggcctcaagcgatcctcc

SEQ ID NO: 97215 - DNA, 120 bp, Artificial Sequence
  ENSG00000090621_0 (sequence is synthesized)
gcagcctgaggaaaaaaagagaaaaagataaaaaaaatctgaaaacgcttcaaaatcctgaaaaaaaaaaaggaaaagaaaaaacgaatcctcggagaacccgcggggaagtcactttcg

SEQ ID NO: 97216 - DNA, 120 bp, Artificial Sequence
  ENSG00000090621_1 (sequence is synthesized)
ggggaagtcactttcgtacgcttccggcctgccccgcgcccgccgccgcagcgcttggcgtccgtcggtctccgtccgtcggtccgggggtgagccgcccgcccggcccgccgtgccctc

SEQ ID NO: 97217 - DNA, 120 bp, Artificial Sequence
  ENSG00000090621_2 (sequence is synthesized)
gagccccgcgccccgcgcctgccccggcgcaccacgtgtccgtgctgcccttcgccgcccgcccggggctcgccgagtcggcgcccacaaagatttggtttccctctgccccggcggttg

SEQ ID NO: 97218 - DNA, 120 bp, Artificial Sequence
  ENSG00000090621_3 (sequence is synthesized)
taatcttaaaccgccggagcccgaggcctatatttatagagaaacgcgtgtccccgaggccgccgtgggcagcgtccggtcgcctcttaaaggatttttacccttcggaaggggattccc

SEQ ID NO: 97219 - DNA, 120 bp, Artificial Sequence
  ENSG00000090621_4 (sequence is synthesized)
cgtttaatttttttcctactttgattttttgaaatttggagcttcgcaccaggaccgcggagaagtgcaaagtcgcggggagggccgtattgtgcggagagccttttgtctgcggtgctg

SEQ ID NO: 97220 - DNA, 120 bp, Artificial Sequence
  ENSG00000090621_5 (sequence is synthesized)
ccggcccccgcctcccgtttccgtcccgtctccaagcccgccgactccagctcgtcctcgccgcgccggtgccacctgtgagccgcggcgcgggcccgggctccgaaggcgcccctttgt

SEQ ID NO: 97221 - DNA, 120 bp, Artificial Sequence
  ENSG00000090621_6 (sequence is synthesized)
gcgcccctttgtcctgcggcgggcccgataagaagtcctcctggcggggctcggggtggtggggggcggggagatgaacgctgcggccagcagctaccccatggcctccctgtacgtggg

SEQ ID NO: 97222 - DNA, 120 bp, Artificial Sequence
  ENSG00000090621_7 (sequence is synthesized)
cgacctgcattcggacgtcaccgaggccatgctgtacgaaaagttcagccccgcggggcctgtgctgtccatccgggtctgccgcgatatgatcacccgccgctccctgggctatgccta

SEQ ID NO: 97223 - DNA, 120 bp, Artificial Sequence
  ENSG00000090621_8 (sequence is synthesized)
cgtcaacttccagcagccggccgacgctgagcgggctttggacaccatgaactttgatgtgattaagggaaagccaatccgcatcatgtggtctcagagggatccctctttgagaaaatc

SEQ ID NO: 97224 - DNA, 120 bp, Artificial Sequence
  ENSG00000090621_9 (sequence is synthesized)
tggtgtgggaaacgtcttcatcaagaacctggacaaatctatagataacaaggcactttatgatactttttctgcttttggaaacatactgtcctgcaaggtggtgtgtgatgagaacgg

SEQ ID NO: 97225 - DNA, 120 bp, Artificial Sequence
  ENSG00000090621_10 (sequence is synthesized)
ctctaagggttatgcctttgtccacttcgagacccaagaggctgccgacaaggccatcgagaagatgaatggcatgctcctcaatgaccgcaaagtatttgtgggcagattcaagtctcg

SEQ ID NO: 97226 - DNA, 120 bp, Artificial Sequence
  ENSG00000090621_11 (sequence is synthesized)
caaagagcgggaagctgagcttggagccaaagccaaggaattcaccaatgtttatatcaaaaactttggggaagaggtggatgatgagagtctgaaagagctattcagtcagtttggtaa

SEQ ID NO: 97227 - DNA, 120 bp, Artificial Sequence
  ENSG00000090621_12 (sequence is synthesized)
ctttggctttgtgagttacgaaaaacacgaggatgccaataaggctgtggaagagatgaatggaaaagaaataagtggtaaaatcatatttgtaggccgtgcacaaaagaaagtagaacg

SEQ ID NO: 97228 - DNA, 120 bp, Artificial Sequence
  ENSG00000090621_13 (sequence is synthesized)
gcaggcagagttaaaacggaaatttgaacagttgaaacaggagagaattagtcgatatcagggggtgaatctctacattaagaacttggatgacactattgatgatgagaaattaaggaa

SEQ ID NO: 97229 - DNA, 120 bp, Artificial Sequence
  ENSG00000090621_14 (sequence is synthesized)
agaattttctccttttggatcaattaccagtgctaaggtaatgctggaggatggaagaagcaaagggtttggcttcgtctgcttctcatctcctgaagaagcaaccaaagcagtcactga

SEQ ID NO: 97230 - DNA, 120 bp, Artificial Sequence
  ENSG00000090621_15 (sequence is synthesized)
gatgaatggacgcattgtgggctccaagccactatatgttgccctggcccagaggaaggaagagagaaaggctcacctgaccaaccagtatatgcaacgagtggctggaatgagagcact

SEQ ID NO: 97231 - DNA, 120 bp, Artificial Sequence
  ENSG00000090621_16 (sequence is synthesized)
tcctgccaatgccatcttaaatcagttccagcctgcagcgggtggctactttgtgccagcagtcccacaggctcagggaaggcctccatattatacacctaaccagttagcacagatgag

SEQ ID NO: 97232 - DNA, 120 bp, Artificial Sequence
  ENSG00000090621_17 (sequence is synthesized)
gcctaatccacgctggcagcaaggtgggagacctcaaggcttccaaggaatgccaagtgctatacgccagtctgggcctcgtccaactcttcgccatctggctccaactgggtctgagtg

SEQ ID NO: 97233 - DNA, 120 bp, Artificial Sequence
  ENSG00000090621_18 (sequence is synthesized)
cccggaccgcttggctatggactttggtggggctggtgccgcccagcaagggctgactgacagctgccagtctggaggcgttcccacagctgtgcagaacttagcgccacgcgctgctgt

SEQ ID NO: 97234 - DNA, 120 bp, Artificial Sequence
  ENSG00000090621_19 (sequence is synthesized)
tgctgctgctgctccccgggctgttgccccctacaaatacgcctccagtgtccgcagccctcatcctgccatacagcctctgcaggcaccccagcctgcggtccatgtgcaggggcagga

SEQ ID NO: 97235 - DNA, 120 bp, Artificial Sequence
  ENSG00000090621_20 (sequence is synthesized)
gccactgactgcctccatgctggctgcagcacccccccaggaacagaagcagatgctgggagaacgcttgttcccactcatccaaacaatgcattcaaatctggctgggaagatcacggg

SEQ ID NO: 97236 - DNA, 120 bp, Artificial Sequence
  ENSG00000090621_21 (sequence is synthesized)
aatgctgctggagatagacaactctgagctgctgcacatgttagagtcccccgagtctctccgctccaaggtggatgaagctgtagcagttctacaggctcatcatgccaagaaagaagc

SEQ ID NO: 97237 - DNA, 120 bp, Artificial Sequence
  ENSG00000090621_22 (sequence is synthesized)
tgcccagaaggtgggcgctgttgctgctgctacctcttagacaaggaaaaaccgattcaaaagccaaataaccccttatggaattcaactcaaggtttgaagacttcctagcttgtccta

SEQ ID NO: 97238 - DNA, 120 bp, Artificial Sequence
  ENSG00000090621_23 (sequence is synthesized)
tggacctcaacaccaaggattacaaattgcaaatttaataggtcattttgtatcaaaaggtcaattatgaagcacctagaatttttcaattatacgaatatgttctttgggttctgctgt

SEQ ID NO: 97239 - DNA, 120 bp, Artificial Sequence
  ENSG00000090621_24 (sequence is synthesized)
ggcccagacagtgttaactttttttttattgtgggttttgattttttcccccagaaattggttttatttgatgtacccaagtcttacgtttcccaataaagaaaaaaaatctccataaaa

SEQ ID NO: 97240 - DNA, 120 bp, Artificial Sequence
  ENSG00000090621_25 (sequence is synthesized)
ttgatgtaaaagaagctgtgcttttgattccttcaacaggtattaaatgcctgctctgtgttatgacgctatgttctgattcactgtccctgcccttcaggggctcactagtgggaaaga

SEQ ID NO: 97241 - DNA, 120 bp, Artificial Sequence
  ENSG00000090621_26 (sequence is synthesized)
ggatgcccaggtgcagcagaaagtgggatctgctgcccccaggacccctctcgtcatgccttgactgtgactggaggctgcagtgggtatttgggaaagtagttagcaccagaagcctag

SEQ ID NO: 97242 - DNA, 120 bp, Artificial Sequence
  ENSG00000090621_27 (sequence is synthesized)
ggatcatctgtacagttggctttggtccaccactaggtctgggcactggggaggggtggagtagctctcctagattcactgaccacctgaagatttctcgcaggtggatgaagctgtagc

SEQ ID NO: 97243 - DNA, 120 bp, Artificial Sequence
  ENSG00000090621_28 (sequence is synthesized)
ttagaagtgtggcctggggaggagggagtcaggatgactaggctctgtcctgggttggtcagtttgttgggctcgaatttatcgagtcctggttctgtaatcttagctgtgtgcttaggt

SEQ ID NO: 97244 - DNA, 120 bp, Artificial Sequence
  ENSG00000090621_29 (sequence is synthesized)
ggccacttcaggagcagagaaacagtatgagttctaggtgtgtcagttgcttttaacattctttgctcatcggtgacctatgtgaaaaaggttagttgtagaagtttgctagctggatga

SEQ ID NO: 97245 - DNA, 120 bp, Artificial Sequence
  ENSG00000090621_30 (sequence is synthesized)
ccacagaggcagcttgttcttttgggtggggtgaggaatacaaggaaacagtgtatacagaatatgtcttgtattccaagatgtggaaagagttgtatgttatcctttggctcatcctcg

SEQ ID NO: 97246 - DNA, 120 bp, Artificial Sequence
  ENSG00000090621_31 (sequence is synthesized)
aaagtagtagtggccccctgtgcaatgtgttgcgtaaacgtgctttgaaatttctccttccgtgggacgtggccagttggacatctgccgccaacactgatgtgcatttgctggtctgtt

SEQ ID NO: 97247 - DNA, 120 bp, Artificial Sequence
  ENSG00000090621_32 (sequence is synthesized)
aggtcacttccgcatccaatgacctattggatccttggctgctctgcaagatgattggtacattaatgcaggaaataacttcaacttacagatcggatgttcagcttcaaagatgtaaag

SEQ ID NO: 97248 - DNA, 120 bp, Artificial Sequence
  ENSG00000090621_33 (sequence is synthesized)
tgtgtgtaggaggtgaaggggttgaacctagagcttagattttctaagctgtaacttgctgtctctagacctgtgctctagatgcaactagtttgtttcagagcctaatagcaatttgct

SEQ ID NO: 97249 - DNA, 120 bp, Artificial Sequence
  ENSG00000090621_34 (sequence is synthesized)
gtggaggtgtcaccctaagccttcaggcccataagctgcttaggagattactctttaactgtcctgtctcatactctctaagttggggatttcctagaacttgatgctatgtaaaatacc

SEQ ID NO: 97250 - DNA, 120 bp, Artificial Sequence
  ENSG00000090621_35 (sequence is synthesized)
ttttctttgcaaggctttgactagcattgacgttgcatgttgaccgtttttaagcatttgatacaaaaacatttggtagaattaaggtgatgtggaatgtaattataaatgtgttgatat

SEQ ID NO: 97251 - DNA, 120 bp, Artificial Sequence
  ENSG00000090621_36 (sequence is synthesized)
gagtaactttgggtgtattaaggaaatgtcagaaaatgcttgcctagcactataggtttgttttattatttacgtttcacttcgctttctgatagcatgccattttcattgtaattggtt

SEQ ID NO: 97252 - DNA, 120 bp, Artificial Sequence
  ENSG00000090621_37 (sequence is synthesized)
gtgtttatgtccataccactctgttcctcaacacacccctcaatccttcaaggactgaaattagttcctttagagcaaggacagccacctcctctcctctttcacatagtcagatgttca

SEQ ID NO: 97253 - DNA, 120 bp, Artificial Sequence
  ENSG00000090621_38 (sequence is synthesized)
tatgagcattgttcctatgagcattgtctttgtggtttgacctgaggttgtatatatgctcactgcttagctctgggaatacaataagtacagttagttacacggagtgtgttgcaggtg

SEQ ID NO: 97254 - DNA, 120 bp, Artificial Sequence
  ENSG00000090621_39 (sequence is synthesized)
acttcttatcatgaggactgtggactttgtctgcaggagcttgagtgaataataaaactagtactggttgatggttgtaggtgtctccagatagggaaagaagagacagtaaaataagct

SEQ ID NO: 97255 - DNA, 120 bp, Artificial Sequence
  ENSG00000090621_40 (sequence is synthesized)
aaggaaaaagcacatggtaaggaccagagctggtgtgttgggagggttgacttggcatagtcatgaccctcttgtcaagggcctcaggagccttgtcatctagtggtaaagaccagagat

SEQ ID NO: 97256 - DNA, 120 bp, Artificial Sequence
  ENSG00000090621_41 (sequence is synthesized)
gctgctaaatgttgtacagtacacaggaggacagacccaacagaatgtccaaagtgtcaatagcactgaggttgagaaactctcttctagaataccttcctttatccactatatgttaat

SEQ ID NO: 97257 - DNA, 120 bp, Artificial Sequence
  ENSG00000090621_42 (sequence is synthesized)
aacacgaggatgccaataaggtgagtataccacaaagattgggaaaagcttttaagaggttgccccagagtatgggtagggtcttgctagcacctacctagagctgggacggtctgagta

SEQ ID NO: 97258 - DNA, 120 bp, Artificial Sequence
  ENSG00000090621_43 (sequence is synthesized)
catcgcatgagccagccgtggccccacctcgctattaactggcacacacaaggcggctactggttctcggcccaagtgtggcctgctcctacctctccactccagggctgatttgtgggc

SEQ ID NO: 97259 - DNA, 120 bp, Artificial Sequence
  ENSG00000090621_44 (sequence is synthesized)
aattagtcgatatcaggtaaggtggtcttggcccagcctagcaatgggatttgctgtgaaatatttgcagaacacccctatgtttagcgggctttctttttgaggacttggagtgtgttc

SEQ ID NO: 97260 - DNA, 120 bp, Artificial Sequence
  ENSG00000090621_45 (sequence is synthesized)
tgacagctgccagtctggaggtggtattggatgcacacagaagggggaaagatgggatttgacgggtctttgcccagactgatgggctttaattgtatttgttctttccctaaggcgttc

SEQ ID NO: 97261 - DNA, 86 bp, Artificial Sequence
  ENSG00000090621_46 (sequence is synthesized)
cttttggaaacatactgtcctgcaagagacagggtctccattgtccaacgatctggctccaacgatcctcctgctgccacagcacc

SEQ ID NO: 97262 - DNA, 120 bp, Artificial Sequence
  ENSG00000090621_47 (sequence is synthesized)
gggcagtagtttcacaactttggacttgcatcagattcatcagcagagcttgttaaaacagatagctgggctccagccccagagtttttcttattcattgggtttggggtctggcctaag

SEQ ID NO: 97263 - DNA, 120 bp, Artificial Sequence
  ENSG00000090621_48 (sequence is synthesized)
tacaggcgtgagccaccgcgtccggccgagaatttcatttctaacaagttcccaaagatgctggtgctcctggtctggggccacccttggggaaccactttcttagggaatatttgtgat

SEQ ID NO: 97264 - DNA, 120 bp, Artificial Sequence
  ENSG00000090659_0 (sequence is synthesized)
acactgggggagagtggggtgacatgagtgactccaaggaaccaagactgcagcagctgggcctcctggaggaggaacagctgagaggccttggattccgacagactcgaggatacaaga

SEQ ID NO: 97265 - DNA, 120 bp, Artificial Sequence
  ENSG00000090659_1 (sequence is synthesized)
gcttagcagggtgtcttggccatggtcccctggtgctgcaactcctctccttcacgctcttggctgggctccttgtccaagtgtccaaggtccccagctccataagtcaggaacaatcca

SEQ ID NO: 97266 - DNA, 120 bp, Artificial Sequence
  ENSG00000090659_2 (sequence is synthesized)
ggcaagacgcgatctaccagaacctgacccagcttaaagctgcagtgggtgagctctcagagaaatccaagctgcaggagatctaccaggagctgacccagctgaaggctgcagtgggtg

SEQ ID NO: 97267 - DNA, 120 bp, Artificial Sequence
  ENSG00000090659_3 (sequence is synthesized)
agcttccagagaaatctaagctgcaggagatctaccaggagctgacccggctgaaggctgcagtgggtgagcttccagagaaatctaagctgcaggagatctaccaggagctgacctggc

SEQ ID NO: 97268 - DNA, 120 bp, Artificial Sequence
  ENSG00000090659_4 (sequence is synthesized)
tgaaggctgcagtgggtgagcttccagagaaatctaagatgcaggagatctaccaggagctgactcggctgaaggctgcagtgggtgagcttccagagaaatctaagcagcaggagatct

SEQ ID NO: 97269 - DNA, 120 bp, Artificial Sequence
  ENSG00000090659_5 (sequence is synthesized)
accaggagctgacccggctgaaggctgcagtgggtgagcttccagagaaatctaagcagcaggagatctaccaggagctgacccggctgaaggctgcagtgggtgagcttccagagaaat

SEQ ID NO: 97270 - DNA, 120 bp, Artificial Sequence
  ENSG00000090659_6 (sequence is synthesized)
ctaagcagcaggagatctaccaggagctgacccagctgaaggctgcagtggaacgcctgtgccacccctgtccctgggaatggacattcttccaaggaaactgttacttcatgtctaact

SEQ ID NO: 97271 - DNA, 120 bp, Artificial Sequence
  ENSG00000090659_7 (sequence is synthesized)
cccagcggaactggcacgactccatcaccgcctgcaaagaagtgggggcccagctcgtcgtaatcaaaagtgctgaggagcagaacttcctacagctgcagtcttccagaagtaaccgct

SEQ ID NO: 97272 - DNA, 120 bp, Artificial Sequence
  ENSG00000090659_8 (sequence is synthesized)
tcacctggatgggactttcagatctaaatcaggaaggcacgtggcaatgggtggacggctcacctctgttgcccagcttcaagcagtattggaacagaggagagcccaacaacgttgggg

SEQ ID NO: 97273 - DNA, 120 bp, Artificial Sequence
  ENSG00000090659_9 (sequence is synthesized)
aggaagactgcgcggaatttagtggcaatggctggaacgacgacaaatgtaatcttgccaaattctggatctgcaaaaagtccgcagcctcctgctccagggatgaagaacagtttcttt

SEQ ID NO: 97274 - DNA, 120 bp, Artificial Sequence
  ENSG00000090659_10 (sequence is synthesized)
ctccagcccctgccaccccaaacccccctcctgcgtagcagaacttcacccccttttaagctacagttccttctctccatccttcgaccttcacaaaatctctgggactgttctttgtca

SEQ ID NO: 97275 - DNA, 120 bp, Artificial Sequence
  ENSG00000090659_11 (sequence is synthesized)
gattcttcctcctttagaaggctgggtcccattctgtccttcttgtcatgcctccaatttcccctggtgtagagcttgtttttctggcccatccttggagctttatgagtgagctggtgt

SEQ ID NO: 97276 - DNA, 120 bp, Artificial Sequence
  ENSG00000090659_12 (sequence is synthesized)
gggatgcctttgggggtggacttgtgttccaagaatccactctctcttccttttggagattaggatatttgggttgccatgtgtagctgctatgtcccctggggcgttatcttatacatg

SEQ ID NO: 97277 - DNA, 120 bp, Artificial Sequence
  ENSG00000090659_13 (sequence is synthesized)
caaacctaccatctgttcaacttccacctaccacctcctgcacccctttgatcggggacttactggttgcaagagctcattttgcaggctggaagcaccagggaattaattcccccagtc

SEQ ID NO: 97278 - DNA, 120 bp, Artificial Sequence
  ENSG00000090659_14 (sequence is synthesized)
aaccaatggcacccagagagggcatggaggctccacgcaaccccttccacccccacatcttcctttgtcttatacatggcttccatttggctgtttctaagttgtattctttattttatt

SEQ ID NO: 97279 - DNA, 120 bp, Artificial Sequence
  ENSG00000090659_15 (sequence is synthesized)
atttggctgtttctaagttgtattctttattttattattattattactatttttcgagatggagtttcactcttgtcgctcaggctggagtgccatggcgcgatcttggctcactgcaac

SEQ ID NO: 97280 - DNA, 120 bp, Artificial Sequence
  ENSG00000090659_16 (sequence is synthesized)
aaacaggtttattgggatttgggactctgaacagttctgtctctactacctgatctcctcctaccacgactttgggatctagaggagctttggctccggctgtgacggctccggccgttc

SEQ ID NO: 97281 - DNA, 120 bp, Artificial Sequence
  ENSG00000090659_17 (sequence is synthesized)
tcactgcggctgcaccggcccccgctgcggtcactatttcttcctctgctaggtgaattgtgcctctcctggctctttgacatgtgctagtgagatttcttccttttcctttcggattcc

SEQ ID NO: 97282 - DNA, 120 bp, Artificial Sequence
  ENSG00000090659_18 (sequence is synthesized)
ccatttcttttgtaggaatggtctggactagggttctccttccccgcagcctgtagtattcatcgtggtggcccaccctctctctccccttggagctcttgccaaaggaggagacaagca

SEQ ID NO: 97283 - DNA, 120 bp, Artificial Sequence
  ENSG00000090659_19 (sequence is synthesized)
gaggtctctattggatttctcaacacctgaagaaagttgcagtgttttcctcttggacattgttgtatttcaaataaaccacaaatcatcattttccaccgagccactgggcagaattca

SEQ ID NO: 97284 - DNA, 120 bp, Artificial Sequence
  ENSG00000090659_20 (sequence is synthesized)
cactgaagctgtcgtcctgcgtacataccatcgtccgttaaacagagaaagagctgcttggcattcttcttccgactggtactgaacatatatacttgcccctcaggtgaggttccaagt

SEQ ID NO: 97285 - DNA, 120 bp, Artificial Sequence
  ENSG00000090659_21 (sequence is synthesized)
tgcccctcaggtgaggttccaagttgcaactgaccttgaactgaatcactctccccacgttattttttaattactatttttttttaaagatggggtcttgctctgtcgccaggctggagt

SEQ ID NO: 97286 - DNA, 120 bp, Artificial Sequence
  ENSG00000090659_22 (sequence is synthesized)
cctcagcctcccgagtagctgggactccactaaaagtacaaaaattagctgggcgtgcaccactgcgcccagctaattcttgtatttttggtagagacggggtttcaacatgttgaccag

SEQ ID NO: 97287 - DNA, 79 bp, Artificial Sequence
  ENSG00000090659_23 (sequence is synthesized)
ttagctgggcgtgcaccactgcgcccagctaattcttgtatttttggtagagacggggtttcatcgcccgccgcgtcct

SEQ ID NO: 97288 - DNA, 120 bp, Artificial Sequence
  ENSG00000090659_24 (sequence is synthesized)
gtctctccccacgttcttgaactcgggcagcacatcctcacagaaatctaggaactgttggtaggtttcttcctcgctgtactccaggcttgcttcggagtcatagtcatccctcctgca

SEQ ID NO: 97289 - DNA, 120 bp, Artificial Sequence
  ENSG00000090659_25 (sequence is synthesized)
ctgctcctttccaaacactgtaaacatgcttttaataagaagggtaggactggatgttgggaaatcatgtgaacatctatctccaaatctgcaagctcctgttttactgtagaagggaca

SEQ ID NO: 97290 - DNA, 120 bp, Artificial Sequence
  ENSG00000090659_26 (sequence is synthesized)
attaactccatccttctccatgactctgaaatccaagggggggttccgggttttgccatgtggcgccattttccaactcattttcagcctgatccagcatcttctggacagcttccggtt

SEQ ID NO: 97291 - DNA, 120 bp, Artificial Sequence
  ENSG00000090659_27 (sequence is synthesized)
tttgtttcttctgtcgtttctgttcctcctcctctctctctttcctctgctgttcttcccattgttcctttaactttcgctcttgttcttgccgttttctagccacctcttccttttcct

SEQ ID NO: 97292 - DNA, 120 bp, Artificial Sequence
  ENSG00000090659_28 (sequence is synthesized)
tctttattctgaattcttcttgtgccttctgctctctcagcaaccactcctcatgtaatctttgcctctctcttccccatagcttttctagttgttgtttttcaataaaagtgtcctcct

SEQ ID NO: 97293 - DNA, 120 bp, Artificial Sequence
  ENSG00000090659_29 (sequence is synthesized)
ctttctgtgagagtcctgagtccctcagtggagcaagttcctgctggcgtttctttcgtttctccttcttcagggcggccctgtactttttgtggcttggtttctctggaaatgtcacct

SEQ ID NO: 97294 - DNA, 120 bp, Artificial Sequence
  ENSG00000090659_30 (sequence is synthesized)
tttcgggcgcagccatcttgccggcaccgccccgcccctctagttgtatcctttataataaactggtaaacattgtaaccgcagattcagcccaatctggttcaactttgtgtaataaaa

SEQ ID NO: 97295 - DNA, 120 bp, Artificial Sequence
  ENSG00000090659_31 (sequence is synthesized)
tggcgagttgtttttcagttgtcgtggacccccaggttgcaagttacataccctgggcatgtccagatgaacgaagcgtgcaaatccacgtggaacctaagtgctcagaccgaggaacag

SEQ ID NO: 97296 - DNA, 120 bp, Artificial Sequence
  ENSG00000090659_32 (sequence is synthesized)
ggactgagttaagaagtggacaccacgtggcatgatccttgatccaatcagattgagccctggcgtgatccagtcagatcaagcctcctgaatcccctcattacaagatccaatcatatc

SEQ ID NO: 97297 - DNA, 120 bp, Artificial Sequence
  ENSG00000090659_33 (sequence is synthesized)
atgcctcactaccctctgtatataaaatctgccccagcctccaacttggagagacagatttgggccagactcctgtgtccttgcttggctgccttgcaataaatttttctctctacaaaa

SEQ ID NO: 97298 - DNA, 120 bp, Artificial Sequence
  ENSG00000090659_34 (sequence is synthesized)
atgagtgactccaaggaaccaagactgcagcagctgggcctcctggaggaggaacagctgagaggccttggattccgacagactcgaggatacaagagcttagcagtgtccaaggtcccc

SEQ ID NO: 97299 - DNA, 120 bp, Artificial Sequence
  ENSG00000090659_35 (sequence is synthesized)
atgagtgactccaaggaaccaagactgcagcagctgggcctcctgggtgaggctgggttgggacgctgggattctgggaagggggaagggatggccagccatggcctcagcctgcccagg

SEQ ID NO: 97300 - DNA, 120 bp, Artificial Sequence
  ENSG00000090661_0 (sequence is synthesized)
gcggcgcgtgtctgcagctgctccgggtagcccgctaggcgcgccgtccccagccccgccgccggccctcggtgcgcccggccgcctgcacccccaggagcagctgctgtgaataaacac

SEQ ID NO: 97301 - DNA, 120 bp, Artificial Sequence
  ENSG00000090661_1 (sequence is synthesized)
cccaggagcagctgctgtgaataaacacagaagtggagctgggggactgattagaagcctcattcagtgcacctgggccccagcaggcccagccaggcgtggaggaagaggcattgagga

SEQ ID NO: 97302 - DNA, 120 bp, Artificial Sequence
  ENSG00000090661_2 (sequence is synthesized)
ctttccttacctgtttttccagctcacccactgccagcagagaatgctgtccagtttcaacgagtggttttggcaggacaggttctggttaccacccaatgtcacgtggacagagctaga

SEQ ID NO: 97303 - DNA, 120 bp, Artificial Sequence
  ENSG00000090661_3 (sequence is synthesized)
agaccgggatggccgtgtctacccccacccccaggacttgttggcagccctgcccctggcgctggtcctcctggccatgcgccttgcctttgagagattcattggcctgcccctgagccg

SEQ ID NO: 97304 - DNA, 120 bp, Artificial Sequence
  ENSG00000090661_4 (sequence is synthesized)
gtggctgggtgtgagggatcagaccaggaggcaagtgaagcccaacgccacgctggagaaacacttcctcacggaagggcacaggcccaaggagccccagctgtctctcctggccgccca

SEQ ID NO: 97305 - DNA, 120 bp, Artificial Sequence
  ENSG00000090661_5 (sequence is synthesized)
gtgtggcctcacgctgcagcagacccagcgatggttccggagacgccggaaccaggatcgaccccagctgaccaagaagttctgtgaggccagctggaggtttctcttctacctgtcctc

SEQ ID NO: 97306 - DNA, 120 bp, Artificial Sequence
  ENSG00000090661_6 (sequence is synthesized)
cttcgtgggcggcctctcggtcctgtaccacgagtcatggctgtgggcaccagtaatgtgctgggacaggtacccaaaccagactctgaagccatccctgtactggtggtacctcttgga

SEQ ID NO: 97307 - DNA, 120 bp, Artificial Sequence
  ENSG00000090661_7 (sequence is synthesized)
atgaccttctcctacagtgccaacctgctgcgcattggctctctggtgctgctgttacacgattcctctgactacctgctggaggcctgtaagatggtcaactacatgcagtatcagcaa

SEQ ID NO: 97308 - DNA, 120 bp, Artificial Sequence
  ENSG00000090661_8 (sequence is synthesized)
gtgtgcgacgctctcttcctcatcttctcctttgtcttcttctacacccgactggtcctctttcccacccagatcctctacaccacatactacgagtccatcagcaacaggggccccttc

SEQ ID NO: 97309 - DNA, 120 bp, Artificial Sequence
  ENSG00000090661_9 (sequence is synthesized)
ttcggctactacttcttcaacgggcttctgatgttgctgcagctgctgcacgtgttctggtcttgcctcattctgcgcatgctctatagcttcatgaagaagggccagatggagaaggac

SEQ ID NO: 97310 - DNA, 120 bp, Artificial Sequence
  ENSG00000090661_10 (sequence is synthesized)
attcgtagtgatgtagaagaatcagactccagtgaggaggcggcggcggcccaggaacctctgcagctaaagaacggggcagctggagggcccaggccagcccccactgatggccctcgg

SEQ ID NO: 97311 - DNA, 120 bp, Artificial Sequence
  ENSG00000090661_11 (sequence is synthesized)
agccgggtggccgggcgtctgaccaacaggcacacaacagccacatagccgggcggggctggctgtaaggggttgcccccccgccagtgccttggatatttctggggtgactggactggc

SEQ ID NO: 97312 - DNA, 120 bp, Artificial Sequence
  ENSG00000090661_12 (sequence is synthesized)
gcccctgggccacctttctggagacagggagggccccacccggggtgggtgggaaggctgatgatctgtctccagccccttccttctgcccacccacccttcttccctctgggcaactgg

SEQ ID NO: 97313 - DNA, 120 bp, Artificial Sequence
  ENSG00000090661_13 (sequence is synthesized)
acagatctgggagccagcagctggatgctgtggctggccagagacacctccaggctgtggcctgggggctggggggagccccaggctgaaaagggtccaattaaaacaaatggagccaaa

SEQ ID NO: 97314 - DNA, 67 bp, Artificial Sequence
  ENSG00000090661_14 (sequence is synthesized)
gtgacctgggagcagcagaaatctggaaactgacagcatggacgtgctggccgcagcttccaggatc

SEQ ID NO: 97315 - DNA, 120 bp, Artificial Sequence
  ENSG00000090661_15 (sequence is synthesized)
tgagaagaggatgtggtgggagctgggctccaggacagtgtcccaggcaacaagcaaggaggagttcgagggaaggagcagtgctggggaacattctttccaactggcttgggttgcaca

SEQ ID NO: 97316 - DNA, 120 bp, Artificial Sequence
  ENSG00000090661_16 (sequence is synthesized)
gagatgaggccccaccccttttttactccttgggagatgaggccccgcccctcttaaactctgggagatggagccctgctccctgtgtcttcctgggagatgaggccccaccgcctgcct

SEQ ID NO: 97317 - DNA, 120 bp, Artificial Sequence
  ENSG00000090661_17 (sequence is synthesized)
tcctgacatgaagcccctcccctatgaggatcctctacaccacatactacgagtccatcagcaacaggggccccttcttcggctactacttcttcaacgggcttctgatgttgctgcagc

SEQ ID NO: 97318 - DNA, 120 bp, Artificial Sequence
  ENSG00000090661_18 (sequence is synthesized)
ctgccagcagagcatgtcacgtgctcccgcctgagcctctggccgcaggaatcaggtgaccccaggcagcgggccaggctgcaggggcgggatctgctccgtcacccaggctggagtgca

SEQ ID NO: 97319 - DNA, 120 bp, Artificial Sequence
  ENSG00000090661_19 (sequence is synthesized)
actgtccccctcggggcttcccatcatggccgtctccccgagctatccgcgctcccccacgagggccggggcgcaacgggtgcccgaggacgcggctgtgaaacgggctggagcgagtag

SEQ ID NO: 97320 - DNA, 120 bp, Artificial Sequence
  ENSG00000090661_20 (sequence is synthesized)
gggcgatcctggcctcgtgacgcgggggaatccggatgtgtgagccgggggagcgccccgtttccccgacgtgccagggctggggacgcagctggggccctggcctcggagtccgcagcc

SEQ ID NO: 97321 - DNA, 120 bp, Artificial Sequence
  ENSG00000090661_21 (sequence is synthesized)
gacatctggaggaagagtgctccgggcagaaggcccagcaggtgcaaaggccctgaggctggaacaggcatggtgtgttggaggaatgcaatgaggctggggtggctggagcaaactaag

SEQ ID NO: 97322 - DNA, 80 bp, Artificial Sequence
  ENSG00000090661_22 (sequence is synthesized)
tgttggtcaggctgctcttgaactcctggcctcgtgatccacccaccttggccttcctactactctgttttacagatgaa

SEQ ID NO: 97323 - DNA, 120 bp, Artificial Sequence
  ENSG00000090661_23 (sequence is synthesized)
tttacagatgaacttgaggttcagagaggtcaagtcatttgcctgaggacacacagcccaactctgccttttaacactgaccaggcaatggagtgggagtgatgagaatgaagtggtggc

SEQ ID NO: 97324 - DNA, 120 bp, Artificial Sequence
  ENSG00000090661_24 (sequence is synthesized)
tcttctgggaccagaggacagttccaaagtcccaggcaaggggagttccatcttccagtcctgcctcctggttgtcaactgcgctgataggggcccgagtaggagttctgaggctccagc

SEQ ID NO: 97325 - DNA, 120 bp, Artificial Sequence
  ENSG00000090661_25 (sequence is synthesized)
aggagtgggggtgtggagtggtgcagccagagaggaaaacatgcagctgaggagagagcgagctttgcaagatggtggtgaatgttcactcaacaggtatttggatttactatgcaccaa

SEQ ID NO: 97326 - DNA, 120 bp, Artificial Sequence
  ENSG00000090661_26 (sequence is synthesized)
agttggggttctgcagtgaatgagccccccagtcgagagtgagaagcaggaaaaagcagggctgggtgaaggtagcatctatgtgactgtggaaggagaaccaaagagaccgcagaccca

SEQ ID NO: 97327 - DNA, 69 bp, Artificial Sequence
  ENSG00000090661_27 (sequence is synthesized)
ggaggaagagtgctccgggcagaaggcccagcaggtgcaaaggccctgaggctggaacaggcatggatc

SEQ ID NO: 97328 - DNA, 120 bp, Artificial Sequence
  ENSG00000090674_0 (sequence is synthesized)
acagatcagctgatgccggagggtttgaagccgcgccgcgagggagcgaggtcgcagtgacagcggcgggcgatcggacccaggctgccccgccgtacccgcctgcgtcccgcgctcccg

SEQ ID NO: 97329 - DNA, 120 bp, Artificial Sequence
  ENSG00000090674_1 (sequence is synthesized)
ccccagcatgacagccccggcgggtccgcgcggctcagagaccgagcggcttctgacccccaaccccgggtatgggacccaggcggggccttcaccggcccctccgacacccccagaaga

SEQ ID NO: 97330 - DNA, 120 bp, Artificial Sequence
  ENSG00000090674_2 (sequence is synthesized)
ggaagaccttcgccgtcgtctcaaatactttttcatgagtccctgcgacaagtttcgagccaagggccgcaagccctgcaagctgatgctgcaagtggtcaagatcctggtggtcacggt

SEQ ID NO: 97331 - DNA, 120 bp, Artificial Sequence
  ENSG00000090674_3 (sequence is synthesized)
gcagctcatcctgtttgggctcagtaatcagctggctgtgacattccgggaagagaacaccatcgccttccgacacctcttcctgctgggctactcggacggagcggatgacaccttcgc

SEQ ID NO: 97332 - DNA, 120 bp, Artificial Sequence
  ENSG00000090674_4 (sequence is synthesized)
agcctacacgcgggagcagctgtaccaggccatcttccatgctgtggaccagtacctggcgttgcctgacgtgtcactgggccggtatgcgtatgtccgtggtgggggtgacccttggac

SEQ ID NO: 97333 - DNA, 120 bp, Artificial Sequence
  ENSG00000090674_5 (sequence is synthesized)
caatggctcagggcttgctctctgccagcggtactaccaccgaggccacgtggacccggccaacgacacatttgacattgatccgatggtggttactgactgcatccaggtggatccccc

SEQ ID NO: 97334 - DNA, 120 bp, Artificial Sequence
  ENSG00000090674_6 (sequence is synthesized)
cgagcggccccctccgccccccagcgacgatctcaccctcttggaaagcagctccagttacaagaacctcacgctcaaattccacaagctggtcaatgtcaccatccacttccggctgaa

SEQ ID NO: 97335 - DNA, 120 bp, Artificial Sequence
  ENSG00000090674_7 (sequence is synthesized)
gaccattaacctccagagcctcatcaataatgagatcccggactgctataccttcagcgtcctgatcacgtttgacaacaaagcacacagtgggcggatccccatcagcctggagaccca

SEQ ID NO: 97336 - DNA, 120 bp, Artificial Sequence
  ENSG00000090674_8 (sequence is synthesized)
gagacaacagcttccggctcctgtttgacgtggtggtcatcctcacctgctccctgtccttcctcctctgcgcccgctcactccttcgaggcttcctgctgcagaacgagtttgtggggt

SEQ ID NO: 97337 - DNA, 120 bp, Artificial Sequence
  ENSG00000090674_9 (sequence is synthesized)
tcatgtggcggcagcggggacgggtcatcagcctgtgggagcggctggaatttgtcaatggctggtacatcctgctcgtcaccagcgatgtgctcaccatctcgggcaccatcatgaaga

SEQ ID NO: 97338 - DNA, 120 bp, Artificial Sequence
  ENSG00000090674_10 (sequence is synthesized)
tcggcatcgaggccaagaacttggcgagctacgacgtctgcagcatcctcctgggcacctcgacgctgctggtgtgggtgggcgtgatccgctacctgaccttcttccacaactacaata

SEQ ID NO: 97339 - DNA, 120 bp, Artificial Sequence
  ENSG00000090674_11 (sequence is synthesized)
tcctcatcgccacactgcgggtggccctgcccagcgtcatgcgcttctgctgctgcgtggctgtcatctacctgggctactgcttctgtggctggatcgtgctggggccctatcatgtga

SEQ ID NO: 97340 - DNA, 120 bp, Artificial Sequence
  ENSG00000090674_12 (sequence is synthesized)
agttccgctcactctccatggtgtctgagtgcctgttctcgctcatcaatggggacgacatgtttgtgacgttcgccgccatgcaggcgcagcagggccgcagcagcctggtgtggctct

SEQ ID NO: 97341 - DNA, 120 bp, Artificial Sequence
  ENSG00000090674_13 (sequence is synthesized)
tctcccagctctacctttactccttcatcagcctcttcatctacatggtgctcagcctcttcatcgcgctcatcaccggcgcctacgacaccatcaagcatcccggcggcgcaggcgcag

SEQ ID NO: 97342 - DNA, 120 bp, Artificial Sequence
  ENSG00000090674_14 (sequence is synthesized)
aggagagcgagctgcaggcctacatcgcacagtgccaggacagccccacctccggcaagttccgccgcgggagcggctcggcctgcagccttctctgctgctgcggaagggacccctcgg

SEQ ID NO: 97343 - DNA, 120 bp, Artificial Sequence
  ENSG00000090674_15 (sequence is synthesized)
aggagcattcgctgctggtgaattgattcgacctgactgccgttggaccgtaggccctggactgcagagacccccgcccccgaccccgcttatttatttgtagggtttgcttttaaggat

SEQ ID NO: 97344 - DNA, 120 bp, Artificial Sequence
  ENSG00000090674_16 (sequence is synthesized)
cggctccctgtcgcgcccgaggagggcctggacctttcgtgtcggacccttgggggcggggagactgggtggggagggtgttgaataaaagggaaaataaatgtgtcgttttcattttta

SEQ ID NO: 97345 - DNA, 120 bp, Artificial Sequence
  ENSG00000090674_17 (sequence is synthesized)
caggcccagcaagtgcaaaggcccggaggtgggaagcgatgcagatatggctggaggggagggcggacttcaagggccttggaggttgggagccactttcaggctgagcctcccggcttc

SEQ ID NO: 97346 - DNA, 120 bp, Artificial Sequence
  ENSG00000090674_18 (sequence is synthesized)
cagccaagcaggggccccagctgaaggccacctgtggctgctgtgctccttgaagagagtcttaaagcagcactttggaaggccgaggccggtggatcgcttgaggctgggagttcaaga

SEQ ID NO: 97347 - DNA, 120 bp, Artificial Sequence
  ENSG00000090674_19 (sequence is synthesized)
ctgaggctcagagaggttaggagacttgcccaaagtcacacagcaatagaacattgggagctgggatttgaacccaggcagtctgacaccatgttgacccaatggctgcacagatagttc

SEQ ID NO: 97348 - DNA, 120 bp, Artificial Sequence
  ENSG00000090674_20 (sequence is synthesized)
tccctcccccatgccagaccctgtgctgggctctgggaaccccaagatgaatcagacccagccactgccctaagtgcttacttcatgttttgggctgactttagcatgtcaccatgcctc

SEQ ID NO: 97349 - DNA, 68 bp, Artificial Sequence
  ENSG00000090674_21 (sequence is synthesized)
cttcatgttttgggctgactttagcatgtcaccatgcctctaattttccctctgaaaagggacccaat

SEQ ID NO: 97350 - DNA, 120 bp, Artificial Sequence
  ENSG00000090674_22 (sequence is synthesized)
gtgcgtcctgccaacaccctgggccccaggtcccatccctgctgtcagtgcctatccggggccatatcctcccccaggccccccaaaggaagggctgggccagataggttgacgcagctc

SEQ ID NO: 97351 - DNA, 120 bp, Artificial Sequence
  ENSG00000090674_23 (sequence is synthesized)
aaggtggggacagggcccccccgcccgcgctggtgcctgctgggtgagcacttcccctgccagctgcagagtcagcacgtggcaggggacgctggcacttggggccggaagggacccgaa

SEQ ID NO: 97352 - DNA, 120 bp, Artificial Sequence
  ENSG00000090674_24 (sequence is synthesized)
ccttcctcctctgcgcccgctcactccttcgaggcttcctgctgcagaacgtgaggcttctgcgtcatgtgtgctggtgtcctccccgcctggccctggggcgataaaagccagggcttt

SEQ ID NO: 97353 - DNA, 120 bp, Artificial Sequence
  ENSG00000090674_25 (sequence is synthesized)
caggaggtggggtgaaattaatcaaagcaaagaaatgcacaagtgaaatccgtgtttgtggcccaagttagcagggccctgccccaccccagtggacatctgcagggccctccctgtcct

SEQ ID NO: 97354 - DNA, 120 bp, Artificial Sequence
  ENSG00000090674_26 (sequence is synthesized)
atttgacattgatccgatggtggttactggtgagtgggcaggacgaggcttcactgttgggagcctgagctgctgggattaaaatcaacagctgtggctgggcacggtggctcacgccta

SEQ ID NO: 97355 - DNA, 80 bp, Artificial Sequence
  ENSG00000090674_27 (sequence is synthesized)
ggcacgtaggaagaccttgtctctacgcacaaacaaattagctgggcgtggtggcgtgcccctgtggtcccagctactca

SEQ ID NO: 97356 - DNA, 120 bp, Artificial Sequence
  ENSG00000090686_0 (sequence is synthesized)
gcggccggtcgtgcgggtcgggcgcgggcgggcgcggcggcagtggcgcgcacaggtgattgactggccagctgcctgaaggagcgccaggtcctccttgctggcaggtggcgaagccca

SEQ ID NO: 97357 - DNA, 120 bp, Artificial Sequence
  ENSG00000090686_1 (sequence is synthesized)
caggtggcgaagcccattggggcggcggtgcagaccgcggcggcggctgcggcggtctggctcgggaggcgttcctggggccaaggccatggccccgcggctgcagctggagaaggcggc

SEQ ID NO: 97358 - DNA, 120 bp, Artificial Sequence
  ENSG00000090686_2 (sequence is synthesized)
acggtgcggcccgaggaggtgtcgcaggagcacatcgagaccgcttaccgcatctggctggagccctgcattcgcggcgtgtgcagacgaaactgcaaaggaaatccgaattgcttggtt

SEQ ID NO: 97359 - DNA, 120 bp, Artificial Sequence
  ENSG00000090686_3 (sequence is synthesized)
ggtattggtgagcatatttggttaggagaaatagatgaaaatagttttcataacatcgatgatcccaactgtgagaggagaaaaaagaactcatttgtgggcctgactaaccttggagcc

SEQ ID NO: 97360 - DNA, 120 bp, Artificial Sequence
  ENSG00000090686_4 (sequence is synthesized)
acttgttatgtcaacacatttcttcaagtgtggtttctcaacttggagcttcggcaggcactctacttatgtccaagcacttgtagtgactacatgctgggagacggcatccaagaagaa

SEQ ID NO: 97361 - DNA, 120 bp, Artificial Sequence
  ENSG00000090686_5 (sequence is synthesized)
aaagattatgagcctcaaacaatttgtgagcatctccagtacttgtttgccttgttgcaaaacagtaataggcgatacattgatccatcaggatttgttaaagccttgggcctggacact

SEQ ID NO: 97362 - DNA, 120 bp, Artificial Sequence
  ENSG00000090686_6 (sequence is synthesized)
ggacaacagcaggatgctcaagaattttcaaagctctttatgtctctattggaagatactttgtctaaacaaaagaatccagatgtgcgcaatattgttcaacagcagttctgtggagaa

SEQ ID NO: 97363 - DNA, 120 bp, Artificial Sequence
  ENSG00000090686_7 (sequence is synthesized)
tatgcctatgtaactgtttgcaaccagtgtggcagagagtctaagcttttgtcaaaattttatgagctggagttaaatatccaaggccacaaacagttaacagattgtatctcggaattt

SEQ ID NO: 97364 - DNA, 120 bp, Artificial Sequence
  ENSG00000090686_8 (sequence is synthesized)
ttgaaggaagaaaaattagaaggagacaatcgctatttttgcgagaactgtcaaagcaaacagaatgcaacaagaaagattcgacttcttagccttccttgcactctgaacttgcagcta

SEQ ID NO: 97365 - DNA, 120 bp, Artificial Sequence
  ENSG00000090686_9 (sequence is synthesized)
atgcgttttgtctttgacaggcaaactggacataagaaaaagctgaatacctacattggcttctcagaaattttggatatggagccttatgtggaacataaaggtgggtcctacgtgtat

SEQ ID NO: 97366 - DNA, 120 bp, Artificial Sequence
  ENSG00000090686_10 (sequence is synthesized)
gaactcagcgcagtcctcatacacagaggagtgagtgcttattctggccactacatcgcccacgtgaaagatccacagtctggtgaatggtataagtttaatgatgaagacatagaaaag

SEQ ID NO: 97367 - DNA, 120 bp, Artificial Sequence
  ENSG00000090686_11 (sequence is synthesized)
atggaggggaagaaattacaactagggattgaggaagatctagcagaaccttctaagtctcagacacgtaaacccaagtgtggcaaaggaactcattgctctcgaaatgcatatatgttg

SEQ ID NO: 97368 - DNA, 120 bp, Artificial Sequence
  ENSG00000090686_12 (sequence is synthesized)
gtttatagactgcaaactcaagaaaagcccaacactactgttcaagttccagcctttcttcaagagctggtagatcgggataattccaaatttgaggagtggtgtattgaaatggctgag

SEQ ID NO: 97369 - DNA, 120 bp, Artificial Sequence
  ENSG00000090686_13 (sequence is synthesized)
atgcgtaagcaaagtgtggataaaggaaaagcaaaacacgaagaggttaaggagctgtaccaaaggttacctgctggagctgagccctatgagtttgtctctctggaatggctgcaaaag

SEQ ID NO: 97370 - DNA, 120 bp, Artificial Sequence
  ENSG00000090686_14 (sequence is synthesized)
tggttggatgaatcaacacctaccaaacctattgataatcacgcttgcctgtgttcccatgacaagcttcacccggataaaatatcaattatgaagaggatatctgaatatgcagctgac

SEQ ID NO: 97371 - DNA, 120 bp, Artificial Sequence
  ENSG00000090686_15 (sequence is synthesized)
attttctatagtagatatggaggaggtccaagactaactgtgaaagccctgtgtaaggaatgtgtagtagaacgttgtcgcatattgcgtctgaagaaccaactaaatgaagattataaa

SEQ ID NO: 97372 - DNA, 120 bp, Artificial Sequence
  ENSG00000090686_16 (sequence is synthesized)
actgttaataatctgctgaaagcagcagtaaagggcagcgatggattttgggtggggaagtcctccttgcggagttggcgccagctagctcttgaacagctggatgagcaagatggtgat

SEQ ID NO: 97373 - DNA, 120 bp, Artificial Sequence
  ENSG00000090686_17 (sequence is synthesized)
gcagaacaaagcaacggaaagatgaacggtagcaccttaaataaagatgaatcaaaggaagaaagaaaagaagaggaggaattaaattttaatgaagatattctgtgtccacatggtgag

SEQ ID NO: 97374 - DNA, 120 bp, Artificial Sequence
  ENSG00000090686_18 (sequence is synthesized)
gagtgctgttcacagtgcaagattttagaaagagaaggggaagaaaatgaagccttacataagatgattgcaaacgagcaaaagacttctctcccaaatttgttccaggataaaaacaga

SEQ ID NO: 97375 - DNA, 120 bp, Artificial Sequence
  ENSG00000090686_19 (sequence is synthesized)
ccgtgtctcagtaactggccagaggatacggatgtcctctacatcgtgtctcagttctttgtagaagagtggcggaaatttgttagaaagcctacaagatgcagccctgtgtcatcagtt

SEQ ID NO: 97376 - DNA, 120 bp, Artificial Sequence
  ENSG00000090686_20 (sequence is synthesized)
gggaacagtgctcttttgtgtccccacgggggcctcatgtttacatttgcttccatgaccaaagaagattctaaacttatagctctcatatggcccagtgagtggcaaatgatacaaaag

SEQ ID NO: 97377 - DNA, 120 bp, Artificial Sequence
  ENSG00000090686_21 (sequence is synthesized)
ctctttgttgtggatcatgtaattaaaatcacgagaattgaagtgggagatgtaaacccttcagaaacacagtatatttctgagcccaaactctgtccagaatgcagagaaggcttattg

SEQ ID NO: 97378 - DNA, 120 bp, Artificial Sequence
  ENSG00000090686_22 (sequence is synthesized)
tgtcagcagcagagggacctgcgtgaatacactcaagccaccatctatgtccataaagttgtggataataaaaaggtgatgaaggattcggctccggaactgaatgtgagtagttctgaa

SEQ ID NO: 97379 - DNA, 120 bp, Artificial Sequence
  ENSG00000090686_23 (sequence is synthesized)
acagaggaggacaaggaagaagctaaaccagatggagaaaaagatccagattttaatcaaagcaatggtggaacaaagcggcaaaagatatcccatcaaaattatatagcctatcaaaag

SEQ ID NO: 97380 - DNA, 120 bp, Artificial Sequence
  ENSG00000090686_24 (sequence is synthesized)
caagttattcgccgaagtatgcgacatagaaaagttcgtggtgagaaagcacttctcgtttctgctaatcagacgttaaaagaattgaaaattcagatcatgcatgcattttcagttgct

SEQ ID NO: 97381 - DNA, 120 bp, Artificial Sequence
  ENSG00000090686_25 (sequence is synthesized)
ccttttgaccagaatttgtcaattgatggaaagattttaagtgatgactgtgccaccctaggcacccttggcgtcattcctgaatctgtcattttattgaaggctgatgaaccaattgca

SEQ ID NO: 97382 - DNA, 120 bp, Artificial Sequence
  ENSG00000090686_26 (sequence is synthesized)
gattatgctgcaatggatgatgtcatgcaagtttgtatgccagaagaagggtttaaaggtactggtcttcttggacattaatctttgaatacttgctgactgctaagaaatgaccagagg

SEQ ID NO: 97383 - DNA, 120 bp, Artificial Sequence
  ENSG00000090686_27 (sequence is synthesized)
ggaagaggagtttgacatgttagggcattaaagcaaaggtggatttaagaattaaaccattacatgccccttccaaaaggcagaaatccattcaaacgtgactgtcccaaatgccttatg

SEQ ID NO: 97384 - DNA, 120 bp, Artificial Sequence
  ENSG00000090686_28 (sequence is synthesized)
tcaaataaagcagattgcactgatggacatcagacttgaaggaaatgtttccaattttatatttaaggggggtggtgggtgggagggggcaagtaaagacggaacaagtttagtagcagt

SEQ ID NO: 97385 - DNA, 120 bp, Artificial Sequence
  ENSG00000090686_29 (sequence is synthesized)
aatagtaaatcatgtttacatatgagatttatagtcgtgggaggggaataaagttctgttatatttccttgctcgagtttcataccagatgcgttggtccataaaggattgtatcaagta

SEQ ID NO: 97386 - DNA, 120 bp, Artificial Sequence
  ENSG00000090686_30 (sequence is synthesized)
gatgggacaacattctgctctgaacgaaaagtaattttagagacataacctgcttaccaatgcctgtctttgattcatattctactttcaataaagcatgaaagtgaagaacttgtccta

SEQ ID NO: 97387 - DNA, 120 bp, Artificial Sequence
  ENSG00000090686_31 (sequence is synthesized)
agtgtggaaaagtgtcttcagatttagactcttctccatgtcagctgcagcgccacccgccttacacctgcccggccgtctgtctcttggtattgggtaaaggagggggcacctgcatgt

SEQ ID NO: 97388 - DNA, 120 bp, Artificial Sequence
  ENSG00000090686_32 (sequence is synthesized)
ctcctgcaatgagcaaggaattatgtctcatgttttgacttcagaggctttttgctttggtgcatttcagaaaggatggagaacatttattatgtgtgaaagcatcctcttccggttttg

SEQ ID NO: 97389 - DNA, 120 bp, Artificial Sequence
  ENSG00000090686_33 (sequence is synthesized)
ctgttattcaaaagtgggaaatgtacctggcacgtttgaaaataaaaaatctgactacctatcagaagagtaaatcagactgaagtacatttggataacacaaggtttctataaaatttg

SEQ ID NO: 97390 - DNA, 120 bp, Artificial Sequence
  ENSG00000090686_34 (sequence is synthesized)
ttcttcctgtcctccatgtcactgtttcttggacctcagttctctttttgaaagcattattccaaaatgccctgagagggtctcttagatcattgtttaaaaaaggaaaaaagtatatgg

SEQ ID NO: 97391 - DNA, 120 bp, Artificial Sequence
  ENSG00000090686_35 (sequence is synthesized)
atgtgctgtccatccaactcaggattatcattcttagcaacacgtaaccgaagcaatattcttaagaatattgaaggggtttttttaattgaacttaagactggagtttttcctttgaaa

SEQ ID NO: 97392 - DNA, 120 bp, Artificial Sequence
  ENSG00000090686_36 (sequence is synthesized)
tgttttattgtccttttttttacttttagcttctactgcctggctttcatgccagtatctctcacatcttacctgggaaaaattttttttaatagaatttccccatatttagaggaaatc

SEQ ID NO: 97393 - DNA, 120 bp, Artificial Sequence
  ENSG00000090686_37 (sequence is synthesized)
attggaaaagaaacttcttgtcacttgttccattgaagtgcttttgaatttgaagtattgaatttcagttgtttcccatgactgtcattgtccaagttaaacactttgagaatagtgctc

SEQ ID NO: 97394 - DNA, 120 bp, Artificial Sequence
  ENSG00000090686_38 (sequence is synthesized)
gctcgggaaaggggttcggaaccggtctaggctcaagttaaatctccctctaaagagccaacactggtttctttggcgactcggtttctactctaaacaggtcccgctccacagtctggg

SEQ ID NO: 97395 - DNA, 120 bp, Artificial Sequence
  ENSG00000090686_39 (sequence is synthesized)
cgggcctgtgtgtgcgttgagtagcctctagcgtgaaaacttcatggttaaaagggaagtaccggaggcaagaaatagctttcgaggcactggtttgttagagtagtggtacgtagtgcg

SEQ ID NO: 97396 - DNA, 120 bp, Artificial Sequence
  ENSG00000090686_40 (sequence is synthesized)
ccgccctgaacgggggctgagacgctgcttttccagaagtgccagtgaggacgtggcaagaccgcctcggacgtacgcttcctctacctcagcccgtcgggttaggggcgcgggaggcgc

SEQ ID NO: 97397 - DNA, 120 bp, Artificial Sequence
  ENSG00000090686_41 (sequence is synthesized)
ggtctgtaagatattctgggacagcactgttgccattaagtgccttgtttttttatgttcacaaatgtatatgaagaaactttctcaaacttactctttctaataacccactaaagccag

SEQ ID NO: 97398 - DNA, 120 bp, Artificial Sequence
  ENSG00000090686_42 (sequence is synthesized)
cttaaacactctaaaagtactttgtaaaccaacaataacttgatgtgtagcattccatattatttcattacgttgtactcctaaaaatgggaagctgttaataaattataacatttaggt

SEQ ID NO: 97399 - DNA, 120 bp, Artificial Sequence
  ENSG00000090686_43 (sequence is synthesized)
cagcactctgcatccatgagtattgtagatatttatattttgtgagatattaacttgtttaagaaaaatccgattggattactatggaaaaagcaacttgcctgttctgtttctttgcat

SEQ ID NO: 97400 - DNA, 120 bp, Artificial Sequence
  ENSG00000090686_44 (sequence is synthesized)
actttgtgacctaacagttttaacagacattctattatatgaatacagtttttttgatactattagattaacttgaagtttaataccaaatattatgctaagagtagaaaagctttctgc

SEQ ID NO: 97401 - DNA, 120 bp, Artificial Sequence
  ENSG00000090686_45 (sequence is synthesized)
tgacccctgatttcttagaaatatcccacataatccagcttatcccttttctgtatatgtttattcaggtttacctgatgtctcaaaatgaaaccaaattaagcctttttaaaggctgat

SEQ ID NO: 97402 - DNA, 120 bp, Artificial Sequence
  ENSG00000090686_46 (sequence is synthesized)
gtgccatttgtattaagttatctttgtcattttaaagacatgaattccccaagcctaattcctacttaaggaagagagacaatttagtccttactttagaaaataaatacttaagcataa

SEQ ID NO: 97403 - DNA, 120 bp, Artificial Sequence
  ENSG00000090686_47 (sequence is synthesized)
aattgagatggtttactgtaaaattaaaatgggagttagttttctagacatgtaactctctggggagtataaaactggtcacaatgggctttgcgttgaagtatctgtccctcagatctc

SEQ ID NO: 97404 - DNA, 120 bp, Artificial Sequence
  ENSG00000090686_48 (sequence is synthesized)
atcagaaggagtatataatacaaaaatataaattcaacctctgtatgttttcttctatgttttatgctgggactcactggagatctttgtaagtaatcaaagctggccctttatctttga

SEQ ID NO: 97405 - DNA, 120 bp, Artificial Sequence
  ENSG00000090686_49 (sequence is synthesized)
ttttggcttttagggaattctagggacttcctttccccaaattaaaactcattttgaggtgtttggttttgtcttttaatttttgcaacttcaaaattgatgactcagttctagtgtact

SEQ ID NO: 97406 - DNA, 120 bp, Artificial Sequence
  ENSG00000090686_50 (sequence is synthesized)
ttatcctcgaacttgtttaaaataggttactttcttgaaataaataataatataatgaagagatcatgacttggatttgggtgggggaattaaataccttttcaaaattgccatcagtat

SEQ ID NO: 97407 - DNA, 120 bp, Artificial Sequence
  ENSG00000090686_51 (sequence is synthesized)
catcttggatgaagaaagttcagtggttaaaagcgtcttctgaagtgtggtcatagtcggtgaggtttatttcagtttggcttctcattttaattttcagatgtatatcacatatatgtg

SEQ ID NO: 97408 - DNA, 120 bp, Artificial Sequence
  ENSG00000090686_52 (sequence is synthesized)
aaaagtactgacaaaaataatttatgaaataaacacagtagggcatgaggttgtgttatttgtgaggcagcaatggagcatgacttgtagtcaacaaacatgggtgtcctgatcaaagct

SEQ ID NO: 97409 - DNA, 120 bp, Artificial Sequence
  ENSG00000090686_53 (sequence is synthesized)
ctgctgtgctattcggcaagactctatgtggatgcctcttgtagaatgtggttaataataccagccgatctcatagggcactgtgcagactcagcattatggtgcacagctccttgaact

SEQ ID NO: 97410 - DNA, 120 bp, Artificial Sequence
  ENSG00000090686_54 (sequence is synthesized)
cataggagtggcacttaactggagctttgtgtcgtactcatcaaacatcttcccccagacaatgattcttctgattctgctaactctggacagagtttgcattgtcttttgagaaaaatg

SEQ ID NO: 97411 - DNA, 120 bp, Artificial Sequence
  ENSG00000090686_55 (sequence is synthesized)
taaccatgttgattcatgtaatttcagtccatttagtttcgctgctgtggtaacattcctttgtatgaaaaactattctttgttgatgatacgtatcttttctctctaattcctttggat

SEQ ID NO: 97412 - DNA, 120 bp, Artificial Sequence
  ENSG00000090686_56 (sequence is synthesized)
taaatgttagtgttaatggttttggtttagcagactaatggattatgttaattctcttaatttccatgtgtcttaaggcatgttgtgttttttttttgcacagtatagctctcatatggc

SEQ ID NO: 97413 - DNA, 120 bp, Artificial Sequence
  ENSG00000090686_57 (sequence is synthesized)
tgggattttagatattgaagctttagtgtacagtgcttttactttgaaccttgaaaaaagcttccacatattgttacagtagaatacattatcttaaaagatcatagaaaggagggaaag

SEQ ID NO: 97414 - DNA, 120 bp, Artificial Sequence
  ENSG00000090686_58 (sequence is synthesized)
gagctctgcctgtggaggaggtcaacaagaagcaaaactaagtcagattgcagtgccccagacaggcacacacaaattagaggcctaggtacctctgaaggtgggaatgaattgtgagcc

SEQ ID NO: 97415 - DNA, 120 bp, Artificial Sequence
  ENSG00000090686_59 (sequence is synthesized)
taaaaagaagataacatgatacttgtttggaaaactgtataagaagcagttagacaactctctacctttcacatccttgtcacttccccatctccacctggacctcagatgggcacccag

SEQ ID NO: 97416 - DNA, 120 bp, Artificial Sequence
  ENSG00000090686_60 (sequence is synthesized)
aattatgtgtttccacacttggaaaaattaaactagaaaggtgggaacgaagcctataccaaataggagaccatctcttagccctttgctcaaattcgggcagcccattacttaccctcc

SEQ ID NO: 97417 - DNA, 120 bp, Artificial Sequence
  ENSG00000090686_61 (sequence is synthesized)
cccaggtgggaagggatttctctccagggaaactagtcaagaaaataaccagtggatgtaaaaagtctggttctgtatgatcaagtgagatttctcccagggatgcaaggatgttcaaca

SEQ ID NO: 97418 - DNA, 120 bp, Artificial Sequence
  ENSG00000090686_62 (sequence is synthesized)
tatgcaaaccaatacatcacatcagcagaatgaaggacaaaaatcatatgatcatcttaatagacaaagaaaaagcatttgataaaattcaacatcccttcgtggtaaaaactctcaaaa

SEQ ID NO: 97419 - DNA, 120 bp, Artificial Sequence
  ENSG00000090686_63 (sequence is synthesized)
aaccaagtacagaaggaacatacctcaatataataaaggccatatgtgagacccacagctgacatcatacctaatggcgaaaagcttaaagcctttcctctaagaactggaatagacaag

SEQ ID NO: 97420 - DNA, 120 bp, Artificial Sequence
  ENSG00000090686_64 (sequence is synthesized)
gacggccattttcaccactcttattcaacatagtattggaagtcctagcaagagcaattaggcaagataaataagtaaaaagcatgcaaaattggaaaagaggaagtcaaatggtccctc

SEQ ID NO: 97421 - DNA, 76 bp, Artificial Sequence
  ENSG00000090686_65 (sequence is synthesized)
agcatgcaaaattggaaaagaggaagtcaaatggtccctctttgcagatgacatgctttttttttagagtctttgt

SEQ ID NO: 97422 - DNA, 120 bp, Artificial Sequence
  ENSG00000090686_66 (sequence is synthesized)
aaagcatgttatttagaaataggctaaataccagaagaagctgctgtgtgagtcaaaagtgactccttccagaacttgggaatgggaggaggaaggggagagagacagctccagaggagt

SEQ ID NO: 97423 - DNA, 120 bp, Artificial Sequence
  ENSG00000090686_67 (sequence is synthesized)
cagttacatggcttcctcccaggccactcctagagtcgtgcactaggtgtgccctagttacaaaccttgtcctgtcagtatttgactttttaaatgatgcatacgtattgctttgataaa

SEQ ID NO: 97424 - DNA, 120 bp, Artificial Sequence
  ENSG00000090686_68 (sequence is synthesized)
actctactgatttcaggtaacctgtgcagctttaagataagcagtagaacttaagactctaagccacttgaattggaacacttcttaatgatatgctttaaaacaggcagctgcgtaatt

SEQ ID NO: 97425 - DNA, 120 bp, Artificial Sequence
  ENSG00000090686_69 (sequence is synthesized)
attccgctgggggatccggaaggaatggaagtcatggtctctggctttggagcttaaagtctagtatgagaagtgaaataagttagggagtttctataaagcaaacgaataagtccaagc

SEQ ID NO: 97426 - DNA, 120 bp, Artificial Sequence
  ENSG00000090686_70 (sequence is synthesized)
agattatattaaataccatagaggttttatatccaccagcatccttttcaaggataactgaacaggtcttgttttatagtaggcatttttaacaattctattttcttctgtactactatt

SEQ ID NO: 97427 - DNA, 120 bp, Artificial Sequence
  ENSG00000090776_0 (sequence is synthesized)
atgcgagctggacagcagtgggaggtttgtgaggctcgcactggccgcagaccctcgggctcgatcgcccgggagccaggactcggcgacgcgaggctgccgggctacccggccgaggct

SEQ ID NO: 97428 - DNA, 120 bp, Artificial Sequence
  ENSG00000090776_1 (sequence is synthesized)
tcgggggcgcaaactaatgggactggctcgctcggcagcatctccccgctcttctaagtacactgagcagggcccgcgctgaagtagaagctgtccgggggcgcgtagcccggagtccca

SEQ ID NO: 97429 - DNA, 120 bp, Artificial Sequence
  ENSG00000090776_2 (sequence is synthesized)
gtgtggcccggaggaacggagcccgtgccagggcggcccagtcgggagcccggggaccgagcttgtgctgtggggaaacccccacttcttccaagggacagcgatcccgggacggtcgag

SEQ ID NO: 97430 - DNA, 120 bp, Artificial Sequence
  ENSG00000090776_3 (sequence is synthesized)
gcgtcggggcggtcaccgagacctctgcgggaagaccccgtcggggagagggcgcgcagccccgaagcgtctcgggaagtcgagcggaatcgggcgggatcacccgggggcgcagagccc

SEQ ID NO: 97431 - DNA, 120 bp, Artificial Sequence
  ENSG00000090776_4 (sequence is synthesized)
ccgtcgcgcctcgtgcggcagcggagagcccaggagaacgagccctcgggggccgaagcccatgcccgggttgggggcggctgcccagtgagtcctcctggccggccgggcggagaagag

SEQ ID NO: 97432 - DNA, 120 bp, Artificial Sequence
  ENSG00000090776_5 (sequence is synthesized)
cgacaccgaagccggcgggaggggagcacttcaaggccggcggctgcggaggatgggcgcctgagcggctccgagcgcagcgcggcagaggaaggcgaggcgagctttggtgaggaggcg

SEQ ID NO: 97433 - DNA, 120 bp, Artificial Sequence
  ENSG00000090776_6 (sequence is synthesized)
ccaagggatcccgaagtgcagtctgcccccgggaagatggctcggcctgggcagcgttggctcggcaagtggcttgtggcgatggtcgtgtgggcgctgtgccggctcgccacaccgctg

SEQ ID NO: 97434 - DNA, 120 bp, Artificial Sequence
  ENSG00000090776_7 (sequence is synthesized)
gccaagaacctggagcccgtatcctggagctccctcaaccccaagttcctgagtgggaagggcttggtgatctatccgaaaattggagacaagctggacatcatctgcccccgagcagaa

SEQ ID NO: 97435 - DNA, 120 bp, Artificial Sequence
  ENSG00000090776_8 (sequence is synthesized)
gcagggcggccctatgagtactacaagctgtacctggtgcggcctgagcaggcagctgcctgtagcacagttctcgaccccaacgtgttggtcacctgcaataggccagagcaggaaata

SEQ ID NO: 97436 - DNA, 120 bp, Artificial Sequence
  ENSG00000090776_9 (sequence is synthesized)
cgctttaccatcaagttccaggagttcagccccaactacatgggcctggagttcaagaagcaccatgattactacattacctcaacatccaatggaagcctggaggggctggaaaaccgg

SEQ ID NO: 97437 - DNA, 120 bp, Artificial Sequence
  ENSG00000090776_10 (sequence is synthesized)
gagggcggtgtgtgccgcacacgcaccatgaagatcatcatgaaggttgggcaagatcccaatgctgtgacgcctgagcagctgactaccagcaggcccagcaaggaggcagacaacact

SEQ ID NO: 97438 - DNA, 120 bp, Artificial Sequence
  ENSG00000090776_11 (sequence is synthesized)
gtcaagatggccacacaggcccctggtagtcggggctccctgggtgactctgatggcaagcatgagactgtgaaccaggaagagaagagtggcccaggtgcaagtgggggcagcagcggg

SEQ ID NO: 97439 - DNA, 120 bp, Artificial Sequence
  ENSG00000090776_12 (sequence is synthesized)
gaccctgatggcttcttcaactccaaggtggcattgttcgcggctgtcggtgccggttgcgtcatcttcctgctcatcatcatcttcctgacggtcctactactgaagctacgcaagcgg

SEQ ID NO: 97440 - DNA, 120 bp, Artificial Sequence
  ENSG00000090776_13 (sequence is synthesized)
gggggcagtggcacagcgggcaccgagcccagcgacatcatcattcccttacggactacagagaacaactactgcccccactatgagaaggtgagtggggactacgggcaccctgtctac

SEQ ID NO: 97441 - DNA, 120 bp, Artificial Sequence
  ENSG00000090776_14 (sequence is synthesized)
atcgtccaagagatgccgccccagagcccggcgaacatctactacaaggtctgagtgcccggcacggcctcaggcccccgagggacagtcggcctggaccggacctctcctttcgccccc

SEQ ID NO: 97442 - DNA, 120 bp, Artificial Sequence
  ENSG00000090776_15 (sequence is synthesized)
acaccccctccccttgccagctgtgcccacctttgtatttagttttgtagtttcttggcttttataatccccctttttccctgccccctgggcttcggaggggggtgcttgtgcccctaa

SEQ ID NO: 97443 - DNA, 120 bp, Artificial Sequence
  ENSG00000090776_16 (sequence is synthesized)
cccccatgctcttgtgccttccccctctggccaggcctctgggctccgtgggggcgccccttcttggaaggcagggctggacactgatggacagcaggcagggagacagtcccctggccc

SEQ ID NO: 97444 - DNA, 120 bp, Artificial Sequence
  ENSG00000090776_17 (sequence is synthesized)
tgcccctccctcgccccccttgccaccttcccaggactgcttgtccgctatcatcactgtttttaatgcttttgtgttcattttttagctgtcaactcattttcatctgttttttgaaga

SEQ ID NO: 97445 - DNA, 120 bp, Artificial Sequence
  ENSG00000090776_18 (sequence is synthesized)
aaaatggaaaaatgtaaaaggcagcccctccccaggctttgtgagcctggcccaagccagtacaagagggcctggggcacgatgtggtcagccaggaagcataggatgccatttctttta

SEQ ID NO: 97446 - DNA, 120 bp, Artificial Sequence
  ENSG00000090776_19 (sequence is synthesized)
tagattccttggtatttctggtggggtaaggggcaggccagggctgttcacgcccatgagggaagaggaaagtgccactgggcaaggtgtcccaccctcccctcctgaccctcctacgag

SEQ ID NO: 97447 - DNA, 87 bp, Artificial Sequence
  ENSG00000090776_20 (sequence is synthesized)
tcccttccttgtgggattcttgggcatctcctgcctccctcactctcacggtaattaatgtcttaattggctgttgcctggggaaca

SEQ ID NO: 97448 - DNA, 120 bp, Artificial Sequence
  ENSG00000090776_21 (sequence is synthesized)
acggtaattaatgtcttaattggctgttgcctggggaacaggagagctgctgcaggcagatgacctcatggggggtggagggaggtgaggtgcccaggtggctatttgccctgcagagct

SEQ ID NO: 97449 - DNA, 120 bp, Artificial Sequence
  ENSG00000090776_22 (sequence is synthesized)
gggagtttcacccccaccccccaccctgttctctccttacctttggcatcctttggcctggtggggaaacagaggcccagggtggagacctaagcgggtataagaccaggtggcctgctc

SEQ ID NO: 97450 - DNA, 120 bp, Artificial Sequence
  ENSG00000090776_23 (sequence is synthesized)
cttttctgggccctagcacaggtgggtaacccccacccaacccagctcctgctgctgtcccagtcttgggctggggcctggaaagaggaagaggctgcctggggctgggccagcccgctg

SEQ ID NO: 97451 - DNA, 120 bp, Artificial Sequence
  ENSG00000090776_24 (sequence is synthesized)
tgcactttgaccccagttccttgccagcacggctgctaacagactgccacttgagtgcgccttgcaggcactcccagagcagccatggaaggagctggccctcacaccatccacctccac

SEQ ID NO: 97452 - DNA, 120 bp, Artificial Sequence
  ENSG00000090776_25 (sequence is synthesized)
actgcctcctggccagctgcccaccccagtgccaggtgggagagggagcagaacagccagccccttccaggtggcagtcggaagggtttttgtttttgtttctgttgccatttgtgtaaa

SEQ ID NO: 97453 - DNA, 120 bp, Artificial Sequence
  ENSG00000090776_26 (sequence is synthesized)
tactagtctttttggaaaaaaaataatgtaaagatgttttgtataaactctgaattattttcttgttgcttttttcttagaaaaaaatgagaactaaaaaaaaaaaattaaccacatgga

SEQ ID NO: 97454 - DNA, 120 bp, Artificial Sequence
  ENSG00000090857_0 (sequence is synthesized)
cagtgatgagttctagaaggaaagaaaaggctgatgtgacagtgaggaagggatgagtggagacttctctgagacttcagtgattcctcttcctctgagctgagccaagctgagaagctg

SEQ ID NO: 97455 - DNA, 120 bp, Artificial Sequence
  ENSG00000090857_1 (sequence is synthesized)
agaagagtaagatagggccgggaactcaggtccgttagtccgtcctccgaggtggggcgggccagcagaatggatttccgatctactctgtgagagcctcgcccaagaaagcccagagcc

SEQ ID NO: 97456 - DNA, 120 bp, Artificial Sequence
  ENSG00000090857_2 (sequence is synthesized)
acttccaagatccgcgctcccacggcgatgagaagcgttttcccccgggactgcttggcttaggactggggacccactggctttggagtaagccctggcacgggcctcgagggaagaaag

SEQ ID NO: 97457 - DNA, 120 bp, Artificial Sequence
  ENSG00000090857_3 (sequence is synthesized)
aactcccgcgctccccacactccacagggcctgcgatcatctcagatgttccggttccacgtgcagaaaccccgccggtccgaggccccggttctaaaacggccctaagagtcaaggctt

SEQ ID NO: 97458 - DNA, 120 bp, Artificial Sequence
  ENSG00000090857_4 (sequence is synthesized)
ccacagctcgcctctgagggtggcaaagaggccgcgggggcggtgcctcgcgagacccaaacaagcccacgtggcaggggcggggctccgcgaaggcgtcacggcgcgctcgtgcgctgc

SEQ ID NO: 97459 - DNA, 120 bp, Artificial Sequence
  ENSG00000090857_5 (sequence is synthesized)
tgaggtcacgcgccggcagtacccttgcccgggggccgtaaagcgcggaaggtcgcggtctcggcttccccggaactttttgctcgcttcgccccgcccccttcccatccccgaaccccg

SEQ ID NO: 97460 - DNA, 120 bp, Artificial Sequence
  ENSG00000090857_6 (sequence is synthesized)
ctttccggcccgcggcgaccccaggcaactgttgtggctgccgcattgctcccgccgggctgtagctgagcgcggagcccgtggggaccggtgagatggaactgttttcccgcgttgaga

SEQ ID NO: 97461 - DNA, 120 bp, Artificial Sequence
  ENSG00000090857_7 (sequence is synthesized)
cgtgcggtccgcttgtgcttttagaactaaagactgctgcagagtccggaggaagaagtcacctagaaaaatctgggacagggcatttgagttcctgagatctagttggtgagagacatg

SEQ ID NO: 97462 - DNA, 120 bp, Artificial Sequence
  ENSG00000090857_8 (sequence is synthesized)
atgttctaccggttgctgtcgattgttggaagacaaagagccagcccaggatggcagaactggtcctctgcaagaaacagcacgtcagctgccgaggcgcgttccatggccctgcccacc

SEQ ID NO: 97463 - DNA, 120 bp, Artificial Sequence
  ENSG00000090857_9 (sequence is synthesized)
caggcacaggtggtcatctgtggaggtggaatcacgggcacttctgtggcctatcacctctccaaaatggggtggaaggatattgtccttttggagcagggcaggctggctgctggctct

SEQ ID NO: 97464 - DNA, 120 bp, Artificial Sequence
  ENSG00000090857_10 (sequence is synthesized)
accaggttctgtgctggcatcctgagcactgccaggcacttgaccattgagcagaagatggcagactactcaaacaaactctactatcagttagagcaagaaacagggatccaaacaggt

SEQ ID NO: 97465 - DNA, 120 bp, Artificial Sequence
  ENSG00000090857_11 (sequence is synthesized)
tacacaaggacaggctcaatctttctggcccaaactcaggaccgactgatctccctgaagcgcatcaacgcagggctgaatgttataggtatcccttctgagatcatctcccccaagaaa

SEQ ID NO: 97466 - DNA, 120 bp, Artificial Sequence
  ENSG00000090857_12 (sequence is synthesized)
gtggccgagcttcaccatctcctcaacgtgcacgacctggtgggggccatgcatgttcccgaggatgcagtggtgtcttccgctgacgtggctcttgccctggcaagtgctgcctcccaa

SEQ ID NO: 97467 - DNA, 120 bp, Artificial Sequence
  ENSG00000090857_13 (sequence is synthesized)
aatggtgttcagatctatgaccggacatctgttcttcatgtaatggtcaaaaaaggtcaagttactggagtggagaccgataaaggacagattgaatgccagtattttgtcaactgtgct

SEQ ID NO: 97468 - DNA, 120 bp, Artificial Sequence
  ENSG00000090857_14 (sequence is synthesized)
ggccagtgggcatacgagctgggtctgtccaacgaggagccggttagtatcccgctacatgcctgcgaacacttctacctcctgactcgccccttggagacccctctgcagagcagcaca

SEQ ID NO: 97469 - DNA, 120 bp, Artificial Sequence
  ENSG00000090857_15 (sequence is synthesized)
ccaactattgtggatgctgatggaagaatttatattcggaactggcagggtggcatcctgtctgggggctttgagaagaacccgaaaccaattttcactgagggcaagaaccagctggag

SEQ ID NO: 97470 - DNA, 120 bp, Artificial Sequence
  ENSG00000090857_16 (sequence is synthesized)
attcagaatctacaggaagactgggatcactttgagcctctgttgagttcccttctgaggaggatgccagaattagagactctggagatcatgaagttggtgaactgcccagagaccttc

SEQ ID NO: 97471 - DNA, 120 bp, Artificial Sequence
  ENSG00000090857_17 (sequence is synthesized)
acaccagacatgaggtgcatcatgggcgagtctcctgcagtgcagggctactttgtcctggcaggaatgaactctgctggcctttcatttggtggaggagccggaaagtaccttgccgaa

SEQ ID NO: 97472 - DNA, 120 bp, Artificial Sequence
  ENSG00000090857_18 (sequence is synthesized)
tggatggtacatggttatccctcagaaaacgtttgggaattggacctgaaacgttttggagccctccagagcagccgcacctttctgcgccaccgggtcatggaagtcatgcctttgatg

SEQ ID NO: 97473 - DNA, 120 bp, Artificial Sequence
  ENSG00000090857_19 (sequence is synthesized)
tatgatctgaaggttccccgctgggacttccagaccggtaggcagttacgcacctctcctctctacgaccggctggatgcacagggagccaggtggatggagaaacatggatttgagagg

SEQ ID NO: 97474 - DNA, 120 bp, Artificial Sequence
  ENSG00000090857_20 (sequence is synthesized)
ccaaagtactttgttccccccgacaaggacctcctggcattggagcagagcaagactttctataagccagattggtttgacatcgtggagtctgaagtcaagtgctgtaaggaagctgtg

SEQ ID NO: 97475 - DNA, 120 bp, Artificial Sequence
  ENSG00000090857_21 (sequence is synthesized)
tgtgtcattgacatgtcctctttcacaaagtttgagataacatccactggggatcaggcattagaagttctacagtacctcttctccaatgacctggatgtgcctgtgggccacattgtg

SEQ ID NO: 97476 - DNA, 120 bp, Artificial Sequence
  ENSG00000090857_22 (sequence is synthesized)
catactggcatgctcaacgagggtggagggtatgaaaatgactgcagcatagcacgactgaacaagcgcagtttcttcatgatctctccaaccgaccagcaggtccactgttgggcctgg

SEQ ID NO: 97477 - DNA, 120 bp, Artificial Sequence
  ENSG00000090857_23 (sequence is synthesized)
cttaagaaacacatgccgaaagacagcaacctgctcctggaggacgtcacctggaagtacacagccctcaatctgattggccctcgagctgtggatgtgctgtctgagttgtcctatgcc

SEQ ID NO: 97478 - DNA, 120 bp, Artificial Sequence
  ENSG00000090857_24 (sequence is synthesized)
cctatgactccagaccacttcccaagcctcttttgcaaggagatgagtgtgggctatgcaaatgggatccgggtgatgagcatgacgcacacaggagagccaggattcatgctctacatc

SEQ ID NO: 97479 - DNA, 120 bp, Artificial Sequence
  ENSG00000090857_25 (sequence is synthesized)
cccatagagtacgccctgcatgtatacaatgaagtgatgagtgttggccagaaatacggaatccggaatgctgggtattacgctcttcgcagtctccgaattgagaagttttttgccttc

SEQ ID NO: 97480 - DNA, 120 bp, Artificial Sequence
  ENSG00000090857_26 (sequence is synthesized)
tggggtcaggatataaataacctcaccacgcccctggaatgtggacgagagtctcgggtgaaattagagaagggcatggatttcattggtcgcgacgccctcctgcagcagaagcagaat

SEQ ID NO: 97481 - DNA, 120 bp, Artificial Sequence
  ENSG00000090857_27 (sequence is synthesized)
ggagtgtataaacgcctcaccatgttcatcctggacgaccatgattcagacctagacctttggccttggtggggagagcccatttaccggaatgggcagtatgttggcaagaccaccagc

SEQ ID NO: 97482 - DNA, 120 bp, Artificial Sequence
  ENSG00000090857_28 (sequence is synthesized)
agtgcctacagctacagcctggagcgccacgtttgcctgggctttgtgcacaatttttctgaggacacgggggaagagcaagtggtgacagcagatttcatcaaccggggagagtatgag

SEQ ID NO: 97483 - DNA, 120 bp, Artificial Sequence
  ENSG00000090857_29 (sequence is synthesized)
attgacatcgcgggataccgcttccaggccaaggccaagctctaccctgtcgcctccctcttcacccagaagcgccgaaaggatgacatggagctgagtgacttacatgggaagtgatgc

SEQ ID NO: 97484 - DNA, 120 bp, Artificial Sequence
  ENSG00000090857_30 (sequence is synthesized)
caccagggcagcctcacctcctccccatcatcttgtcctagagtgggcgtcaccttggagcttctcttccttccgcctctgttcctcttctggagcctttgcctcccatctcttatctcc

SEQ ID NO: 97485 - DNA, 120 bp, Artificial Sequence
  ENSG00000090857_31 (sequence is synthesized)
ttgatataattttgaacttgacctactttaaacttttttgctctgcagccttccttgcccttccacctcctcctcctaatattcactctgggctcttcttcccttcccacccctcactca

SEQ ID NO: 97486 - DNA, 120 bp, Artificial Sequence
  ENSG00000090857_32 (sequence is synthesized)
gcttctcgtggtggcaggaggtatgtctgacaggacagaagcaagctccactgtggacatgagtgatggtgacagctgctttcaaattctgcatctcaaggcagggcaagccggggtggt

SEQ ID NO: 97487 - DNA, 120 bp, Artificial Sequence
  ENSG00000090857_33 (sequence is synthesized)
gcaggtctcagggcacgagtccctctcccttgggttccattttcttggagcagcctattagttctggtggggttgccgtgtgtcggatgcagccctgaggggcagctcgtgcctgcagcc

SEQ ID NO: 97488 - DNA, 120 bp, Artificial Sequence
  ENSG00000090857_34 (sequence is synthesized)
cggcagctcgttctcctgttctgctgtgctgtgggctggcactcgatacctctggcaagaggatgattatctacctcactgataagaggcatcgcatggacgttctctggtctgtagtgg

SEQ ID NO: 97489 - DNA, 120 bp, Artificial Sequence
  ENSG00000090857_35 (sequence is synthesized)
agacaagcagttaacctagcaccatcctcatcctccctgcagaagccattagcagacctttgggccagggcagcctccctataattttcttcatctcttgctaatctctataataaggtt

SEQ ID NO: 97490 - DNA, 120 bp, Artificial Sequence
  ENSG00000090857_36 (sequence is synthesized)
gctttttctttcttagttgagtaaacaagtaagccacagtgtttgaaagggaaaaaccatattgccttgtgtgttgcttttcccagtcaaaagggtctgaccttagaaagtccccaccag

SEQ ID NO: 97491 - DNA, 120 bp, Artificial Sequence
  ENSG00000090857_37 (sequence is synthesized)
tgatgctgagtgttctgctatggaaacaatgctgcttttctctcagctgtccaaagttcagccgttcctccttccccttctcccagtgcgtttgactttgtcaggtcagcctcacttgtc

SEQ ID NO: 97492 - DNA, 120 bp, Artificial Sequence
  ENSG00000090857_38 (sequence is synthesized)
ccataaagtcatgtttctctccctttagaatagggaggggaagggatcaggtgtgttgtcctgggcctttcaaccttgcgggctgtgctgagttccagagagctgccggaattccaggtt

SEQ ID NO: 97493 - DNA, 120 bp, Artificial Sequence
  ENSG00000090857_39 (sequence is synthesized)
tgactctccagcacagagcagagctacacagaggtgacccacgttagtccactgagagttctgagtccaaagggtgtacgttgcataaggctagagaccgcttttcctcctttcccccca

SEQ ID NO: 97494 - DNA, 120 bp, Artificial Sequence
  ENSG00000090857_40 (sequence is synthesized)
ggctctttgtttccctccacccacccttccatatcctctggagcaggagacaatgtgggtgcccagaagtgccctgcgctttcaggcagtgtctctgttttcccaaggtgaaacttagat

SEQ ID NO: 97495 - DNA, 120 bp, Artificial Sequence
  ENSG00000090857_41 (sequence is synthesized)
atcatggactgttgtccagcctcaatgcttcattttccccttgcatatcaactgccctaatctgactttttttaagtgcaaataaactgctataagacattttggttagtaaaactctag

SEQ ID NO: 97496 - DNA, 120 bp, Artificial Sequence
  ENSG00000090857_42 (sequence is synthesized)
cctttggcgtgttggtatcttggaagcattagctctgataggtctataagtgtattaagggacatccttccatttcattagagcagcttaaaatgctcaggtgtctgccttctctggtgt

SEQ ID NO: 97497 - DNA, 120 bp, Artificial Sequence
  ENSG00000090857_43 (sequence is synthesized)
ttctttgggatctctgtttacccacttacgctggctccttctagacatttcttgccacttccccaactagaccactcctagtgattactgactttagtgcctaaacctttttggaaggtt

SEQ ID NO: 97498 - DNA, 120 bp, Artificial Sequence
  ENSG00000090857_44 (sequence is synthesized)
ctggttggcttgttagaggagcatatgattagaattctgtttgggggtctagttgtcttggagcaagtatgtacttaactagccgagagatgctgcctctaggcagagaggaggagaggt

SEQ ID NO: 97499 - DNA, 120 bp, Artificial Sequence
  ENSG00000090857_45 (sequence is synthesized)
gttgccggctggagggccaaccagtgaacaccagctgtgaaggccttgggagaggaggaacaggcccttgggcagatgcaggcattaccagcagggagcagacttacctccgaagatgga

SEQ ID NO: 97500 - DNA, 120 bp, Artificial Sequence
  ENSG00000090857_46 (sequence is synthesized)
gacaggtgactgagagctgcaggcctcctctgctcttccaaacacgtagcatttgcacccctccaaagccatctttgtaaaggaaaacgtatttgtaattgaatccagaagaatttagtt

SEQ ID NO: 97501 - DNA, 120 bp, Artificial Sequence
  ENSG00000090857_47 (sequence is synthesized)
acacatagacataactcttcaaccttaactatggcaatacatttgtgctttaactgttacatagcagtatcaccacttaccaggatccaaatcgaaataataaaagctgtctccatagtt

SEQ ID NO: 97502 - DNA, 120 bp, Artificial Sequence
  ENSG00000090857_48 (sequence is synthesized)
taaaatcgaatagtgccatcatcacagtatattagtcaaatagaagcttcatcagaaatgtatcccacatagagttttaagacttggattctcttctgcccttgttaatctccaactaat

SEQ ID NO: 97503 - DNA, 120 bp, Artificial Sequence
  ENSG00000090857_49 (sequence is synthesized)
tactacagattgacacgtttttaattagctgtcctttgtaagaagtcaggaaatctgatgctgtgtccaaaattatgcactgtttgttgaagtagaaccagaaatcctgacctcctgtta

SEQ ID NO: 97504 - DNA, 120 bp, Artificial Sequence
  ENSG00000090857_50 (sequence is synthesized)
aatgacatcagtttccccctctgagcaacagactgcttgtcttgctaggagaggaggatggggggctgagcactcaggctgtccattgaaaccccttgtccatgaatagggtcatactcc

SEQ ID NO: 97505 - DNA, 120 bp, Artificial Sequence
  ENSG00000090857_51 (sequence is synthesized)
taagactgatggggtgttgatcttctaggacatcacttgtttattcagtgccccaaacacagatttctcttctagcactttagagttgatccttgaagtctctcctggttcattcaaata

SEQ ID NO: 97506 - DNA, 120 bp, Artificial Sequence
  ENSG00000090857_52 (sequence is synthesized)
caagctgtgtgagtctggtggttttctgtgattggtctaatgtgagctctttgaacagacagatctgacagtgaatgactctcccctgcttctggcataactgctttgcctctgtctagt

SEQ ID NO: 97507 - DNA, 120 bp, Artificial Sequence
  ENSG00000090857_53 (sequence is synthesized)
gtccaagcatcttagctgttcaagaggagagggcagcataacttcctgaccaccggtgtcagatatcagagcattctggactcctgagaggcagtggcctcttgagtgaacaggggaggc

SEQ ID NO: 97508 - DNA, 120 bp, Artificial Sequence
  ENSG00000090857_54 (sequence is synthesized)
cagtagatgccccagatccagagccgtggctgcaaatccagcaggaataaggagggacaaccacagcctcctcatccatgtgtcatttccaagggtttgccttgtgtctcagctcattct

SEQ ID NO: 97509 - DNA, 120 bp, Artificial Sequence
  ENSG00000090857_55 (sequence is synthesized)
gggcagcacgtttgtcttctgtccctagagatttgaaggattttggactcttgtgaatgggtgactggacttggctttacagagttgggtgcttttttctctctgcaattacctgtcata

SEQ ID NO: 97510 - DNA, 120 bp, Artificial Sequence
  ENSG00000090857_56 (sequence is synthesized)
gcattttgtgctcaccacgaaggatggtctctgccttctcttgtcggtgtatgccatctgaacctaggaacacaaagtatattggcctcaaacggagacccagggttgccagttttccgt

SEQ ID NO: 97511 - DNA, 120 bp, Artificial Sequence
  ENSG00000090857_57 (sequence is synthesized)
gggccttcccctcccttgaaatgtctttaattacctccccttcatcgtcaggccacgtgtgacttctgttcttagcactgccagggtcattgacttccatctaagcttgcatcaggaaga

SEQ ID NO: 97512 - DNA, 120 bp, Artificial Sequence
  ENSG00000090857_58 (sequence is synthesized)
tgttccttctgtgatcattggtactgaagccagaaaagctctcattcaggaactctgaagagcaaaaagggacaaacactaactgctgagctgggccatttgatctcctttcaccttgca

SEQ ID NO: 97513 - DNA, 120 bp, Artificial Sequence
  ENSG00000090857_59 (sequence is synthesized)
ttgctgtcacagcaccttgtatgatggcaggacaggctccagcagagagaactgcacagtgaccactgtatttttcacgctcttccagggatccctgtcccccgacattgaagagatctc

SEQ ID NO: 97514 - DNA, 120 bp, Artificial Sequence
  ENSG00000090857_60 (sequence is synthesized)
attcaggccagagacacagagaccacatagcccagtgattaaaccccggtttcactctggccccaggagtggagcctggccactcctgtttggttctcactgggaggcccactggccttg

SEQ ID NO: 97515 - DNA, 120 bp, Artificial Sequence
  ENSG00000090857_61 (sequence is synthesized)
gatcatctcctcatgcacacccggagttttacctgcttgcttgctttcctggactgctgtttgcaagaaagtaactaaaacatgaaaagtaaacctccagcttccacagtatattacctg

SEQ ID NO: 97516 - DNA, 120 bp, Artificial Sequence
  ENSG00000090857_62 (sequence is synthesized)
ccgttgcatgcatttgaaagttagcctcctcccttgccaccgtcttggtggcagtagcgatgcaagaatgatgggagctttccgagagcgttcagtgtttcactgaagacaggacccata

SEQ ID NO: 97517 - DNA, 120 bp, Artificial Sequence
  ENSG00000090857_63 (sequence is synthesized)
gccttcatttctggctctgtgtctcctctggcatatggacacatttcctggcatttgcctgagtctacaccactttttgagaacctgaaatagaagggaatcttctgtggcccacagtct

SEQ ID NO: 97518 - DNA, 120 bp, Artificial Sequence
  ENSG00000090857_64 (sequence is synthesized)
ccatattggcactagaagactggcctggcggaggaatttgcgttggcttgctttcaggggttagctacaagattcagctttatatctctgttgcttcttggccagtgtagtcaataaggg

SEQ ID NO: 97519 - DNA, 86 bp, Artificial Sequence
  ENSG00000090857_65 (sequence is synthesized)
tatatctctgttgcttcttggccagtgtagtcaataagggtcttctttaacatctaagatagaggtttggttggccgggcgtggtc

SEQ ID NO: 97520 - DNA, 79 bp, Artificial Sequence
  ENSG00000090857_66 (sequence is synthesized)
gttctaagatagaggtttggtcaacagtgcttaataataaataagaacctcctgccattctaattttcctgctgcaccc

SEQ ID NO: 97521 - DNA, 120 bp, Artificial Sequence
  ENSG00000090857_67 (sequence is synthesized)
aataagaacctcctgccattctaattttcctgctgcaccccatcccccacacacccctcacgaacattgatataagcagtattaacacagtataaagaatgttcaccttgcatatgtcat

SEQ ID NO: 97522 - DNA, 120 bp, Artificial Sequence
  ENSG00000090857_68 (sequence is synthesized)
ttcaggcacatggattcaggagaagcacagttgagtggaagaaatggtagacttgtgaggcttgccccaggccttgtgtacacgcaataagtggtgagccatgggtctctccgtcagcgc

SEQ ID NO: 97523 - DNA, 120 bp, Artificial Sequence
  ENSG00000090857_69 (sequence is synthesized)
ctccctccccgccaccacttcaggccaacaatttaaggtgctgagttgtaaggctcctccattgtcagtacagggctcgcctttgtagccctgatcactaccagtacacttttcaagaca

SEQ ID NO: 97524 - DNA, 120 bp, Artificial Sequence
  ENSG00000090857_70 (sequence is synthesized)
actgagtatttttgtatgcctttgccttccctttgtccatgaaacatgaagagttgtttatggttcttgacttctctgagcagagtgtctgcatctcttggagagttacacatttcttca

SEQ ID NO: 97525 - DNA, 120 bp, Artificial Sequence
  ENSG00000090857_71 (sequence is synthesized)
tgagccatttttctcattcttagatgcacctgtttttatcctttgcagaccatcttctgccttcttattttcctgtctgtcaaagacagaaattacaggagatagggagggttttttagc

SEQ ID NO: 97526 - DNA, 120 bp, Artificial Sequence
  ENSG00000090857_72 (sequence is synthesized)
atctctttcaaaagatgtatgtcagaatttcctttgcacaccaagaactggagcttagagccccactattctctaagccaggttctagtgccttacactccagaatgtcagatggtgggt

SEQ ID NO: 97527 - DNA, 120 bp, Artificial Sequence
  ENSG00000090857_73 (sequence is synthesized)
gcagattggaagaaagagaaaagttcatctcggtgtgtgggttcccatccgccccacatagcctctccttcttcggaacaatgggcgtggggtagaaagctctttcagtgaagggtgttc

SEQ ID NO: 97528 - DNA, 120 bp, Artificial Sequence
  ENSG00000090857_74 (sequence is synthesized)
tagcagctcagttaacactttactctccagtcaacacttgggacatataaaaatgccattgtaactactgtagagtcctgtgactcatcgtttgtgtttgtcaatttgcagttcagctta

SEQ ID NO: 97529 - DNA, 120 bp, Artificial Sequence
  ENSG00000090857_75 (sequence is synthesized)
gcccttccctgttcctgtgtagttacaatctggccctgaagacatccgaggcacttcagtaagtgggatcttttctagagatcctgggtgactttgggtgcacagggtgaccgagcattt

SEQ ID NO: 97530 - DNA, 120 bp, Artificial Sequence
  ENSG00000090857_76 (sequence is synthesized)
ctgcccctgtgaatgtggcactaacactgtgcactgtctccaccaagcaaggtttccactgagtttcttctcatgttactgggtttgtaaatgaataaacacattttaactactcttgca

SEQ ID NO: 97531 - DNA, 120 bp, Artificial Sequence
  ENSG00000090857_77 (sequence is synthesized)
gcctcttttgcaagtggcaaccacagctgagtgaaacaaactgtaaccgaatgaaagcaatgacaacggaatcctccccaggaagctgctgattagagagggccaaacggacagacatct

SEQ ID NO: 97532 - DNA, 64 bp, Artificial Sequence
  ENSG00000090857_78 (sequence is synthesized)
gccaccctcaaatatttgctgaatgaatggctatcgttctttgtcaaatccctttctcattaat

SEQ ID NO: 97533 - DNA, 120 bp, Artificial Sequence
  ENSG00000090857_79 (sequence is synthesized)
gaatggctatcgttctttgtcaaatccctttctcattaatcccatgcactgagtagaatggcatgaaatatgtttggtttctctgtctagtttgagttcctgagatctagttggtgagag

SEQ ID NO: 97534 - DNA, 120 bp, Artificial Sequence
  ENSG00000090857_80 (sequence is synthesized)
atactttttggttgggcagatctccaccgggtactgatttggggttggggcttcttccatcacatagccttgctgggaaaaggaggagaacgggaattgtgtggggtggttatggccagc

SEQ ID NO: 97535 - DNA, 120 bp, Artificial Sequence
  ENSG00000090857_81 (sequence is synthesized)
cctgctgcgttcagcaggccctgttggcagaggtgtattcgccagaatcggggtgcttagcatccatccttggagtgtctaagcaaagggacatattcctggtctctgcacccaggcctg

SEQ ID NO: 97536 - DNA, 120 bp, Artificial Sequence
  ENSG00000090857_82 (sequence is synthesized)
attaggatatgtttgaagtggatttagcttctctgaatttaaagtctgtatactttttggttgggcagatctccaccggccctcaatctgattggccctcgagctgtggatgtgctgtct

SEQ ID NO: 97537 - DNA, 120 bp, Artificial Sequence
  ENSG00000090857_83 (sequence is synthesized)
cgctttccggcccgcggcgaccccaggcaactgttgtggctgccgcattgctcccgccgggctgtagctgagcgcggagcccgtggggaccggtgagtttgagttcctgagatctagttg

SEQ ID NO: 97538 - DNA, 120 bp, Artificial Sequence
  ENSG00000090861_0 (sequence is synthesized)
cgtggcgggttgtggtaggtcgtggtctgaggccggtacagctgcgcgtctgcgggaataggtgcagcgggcccttggcgggggactctgagggaggagctggggacggcgaccctagga

SEQ ID NO: 97539 - DNA, 120 bp, Artificial Sequence
  ENSG00000090861_1 (sequence is synthesized)
gagttctttggggtgactttcaagatggactctactctaacagcaagtgaaatccggcagcgatttatagatttcttcaagaggaacgagcatacgtatgttcactcgtctgccaccatc

SEQ ID NO: 97540 - DNA, 120 bp, Artificial Sequence
  ENSG00000090861_2 (sequence is synthesized)
ccattggatgaccccactttgctctttgccaatgcaggcatgaaccagtttaaacccattttcctgaacacaattgacccatctcaccccatggcaaagctgagcagagctgccaatacc

SEQ ID NO: 97541 - DNA, 120 bp, Artificial Sequence
  ENSG00000090861_3 (sequence is synthesized)
cagaagtgcatccgggctgggggcaaacataatgacctggacgatgtgggcaaggatgtctatcatcacaccttcttcgagatgctgggctcttggtcttttggagattactttaaggaa

SEQ ID NO: 97542 - DNA, 120 bp, Artificial Sequence
  ENSG00000090861_4 (sequence is synthesized)
ttggcatgtaagatggctctggaactcctcacccaagagtttggcattcccattgaaagactttatgttacttactttggcggggatgaagcagctggcttagaagcagatctggaatgc

SEQ ID NO: 97543 - DNA, 120 bp, Artificial Sequence
  ENSG00000090861_5 (sequence is synthesized)
aaacagatctggcaaaatttggggctggatgacaccaaaatcctcccaggcaacatgaaggataacttctgggagatgggtgacacgggcccctgtggtccttgcagtgagatccactac

SEQ ID NO: 97544 - DNA, 120 bp, Artificial Sequence
  ENSG00000090861_6 (sequence is synthesized)
gaccggattggtggtcgggacgccgcacatcttgtcaaccaggacgaccctaatgtgctggagatctggaaccttgtgttcatccagtataacagggaagctgatggcattctgaaacct

SEQ ID NO: 97545 - DNA, 120 bp, Artificial Sequence
  ENSG00000090861_7 (sequence is synthesized)
cttcccaagaaaagcattgacacagggatgggcctggaacgactggtatctgtgctgcagaataagatgtccaactatgacactgacctttttgtcccttactttgaagccattcagaag

SEQ ID NO: 97546 - DNA, 120 bp, Artificial Sequence
  ENSG00000090861_8 (sequence is synthesized)
ggcacaggtgcccgaccatacactgggaaagttggtgctgaggatgccgatgggattgacatggcctaccgggtgctggctgaccacgctcggaccatcactgtggcactggctgatggt

SEQ ID NO: 97547 - DNA, 120 bp, Artificial Sequence
  ENSG00000090861_9 (sequence is synthesized)
ggccggcctgacaacacagggcgtggatatgtgttgagacggattctccgccgagctgtccgatacgcccatgaaaagctcaatgccagcaggggcttctttgctacgttagtggatgtt

SEQ ID NO: 97548 - DNA, 120 bp, Artificial Sequence
  ENSG00000090861_10 (sequence is synthesized)
gtcgtccagtccctgggagatgcatttcctgagctgaagaaggacccagacatggtgaaggacatcattaatgaagaagaggtgcagtttctcaagactctcagcagagggcgtcgcatc

SEQ ID NO: 97549 - DNA, 120 bp, Artificial Sequence
  ENSG00000090861_11 (sequence is synthesized)
ctggacaggaaaattcagagcctgggagacagcaagaccattcccggagacactgcttggctcctctatgacacctatgggtttccagtggatctgactggactgattgctgaagagaag

SEQ ID NO: 97550 - DNA, 120 bp, Artificial Sequence
  ENSG00000090861_12 (sequence is synthesized)
ggcctggtggtagacatggatggctttgaagaggagaggaaactggcccagctgaaatcacagggcaagggagctggtggggaagacctcattatgctggacatttacgctatcgaagag

SEQ ID NO: 97551 - DNA, 120 bp, Artificial Sequence
  ENSG00000090861_13 (sequence is synthesized)
ctccgggcacggggtctggaggtcacagatgattccccaaagtacaattaccatttggactccagtggtagctatgtatttgagaacacagtggctacggtgatggctctgcgcagggag

SEQ ID NO: 97552 - DNA, 120 bp, Artificial Sequence
  ENSG00000090861_14 (sequence is synthesized)
gatgacagcagtgaagataaaacagagtttacagtgaagaatgctcaggtccgaggagggtatgtgctacacattggaaccatctacggtgacctgaaagtgggggatcaggtctggctg

SEQ ID NO: 97553 - DNA, 120 bp, Artificial Sequence
  ENSG00000090861_15 (sequence is synthesized)
tttattgatgagccccgacgaagacccatcatgagcaaccacacagctacgcacattctgaacttcgccctgcgctcagtgcttggggaagctgaccagaaaggctcattggttgctcct

SEQ ID NO: 97554 - DNA, 120 bp, Artificial Sequence
  ENSG00000090861_16 (sequence is synthesized)
gaccgcctcagatttgactttactgccaagggagccatgtccacccaacagatcaagaaggctgaagagattgctaatgagatgattgaggcagccaaggccgtctatacccaggattgc

SEQ ID NO: 97555 - DNA, 120 bp, Artificial Sequence
  ENSG00000090861_17 (sequence is synthesized)
cccctggcagcagcgaaagccatccagggcctacgggctgtgtttgatgagacctatcctgaccctgtgcgagtcgtctccattggggtcccggtgtccgagttgctggatgacccctct

SEQ ID NO: 97556 - DNA, 120 bp, Artificial Sequence
  ENSG00000090861_18 (sequence is synthesized)
gggcctgctggctccctgacttctgttgagttctgtgggggaacgcacctgcggaactcgagtcatgcaggagcttttgtgatcgtgacggaagaagccattgccaagggtatccggagg

SEQ ID NO: 97557 - DNA, 120 bp, Artificial Sequence
  ENSG00000090861_19 (sequence is synthesized)
attgtggctgtcacaggtgccgaggcccagaaggccctcaggaaagcagagagcttgaagaaatgtctctctgtcatggaagccaaagtgaaggctcagactgctccaaacaaggatgtg

SEQ ID NO: 97558 - DNA, 120 bp, Artificial Sequence
  ENSG00000090861_20 (sequence is synthesized)
cagagggagatcgctgaccttggagaggccctggccactgcagtcatcccccagtggcagaaggatgaattgcgggagactctcaaatccctaaagaaggtcatggatgacttggaccga

SEQ ID NO: 97559 - DNA, 120 bp, Artificial Sequence
  ENSG00000090861_21 (sequence is synthesized)
gccagcaaagccgatgtccagaaacgagtgttagagaagacgaagcagttcatcgacagcaaccccaaccagcctcttgtcatcctggagatggagagcggcgcctcagccaaggccctg

SEQ ID NO: 97560 - DNA, 120 bp, Artificial Sequence
  ENSG00000090861_22 (sequence is synthesized)
aatgaagccttgaagctcttcaagatgcactcccctcagacttctgccatgctcttcacggtggacaatgaggctggcaagatcacgtgcctgtgtcaagttccccagaatgcagccaat

SEQ ID NO: 97561 - DNA, 120 bp, Artificial Sequence
  ENSG00000090861_23 (sequence is synthesized)
cggggcttaaaagccagcgagtgggtgcagcaggtgtcaggcttgatggacggtaaaggtggtggcaaggatgtgtctgcacaggccacaggcaagaacgttggctgcctgcaggaggcg

SEQ ID NO: 97562 - DNA, 120 bp, Artificial Sequence
  ENSG00000090861_24 (sequence is synthesized)
ctgcagctggccacttccttcgcccagctgcgcctcggggatgtaaagaactgagtggggaaggaggaggctcccactggatccatccgtccagccaagagctcttcatctgctacaaga

SEQ ID NO: 97563 - DNA, 120 bp, Artificial Sequence
  ENSG00000090861_25 (sequence is synthesized)
acatttgaatcttgggacctttaaagagcccctcctaacccagcagtaactggaacacacttgggagcagtcctatgtctcagtgccccttaaatttctgccctgagccctccacgtcag

SEQ ID NO: 97564 - DNA, 120 bp, Artificial Sequence
  ENSG00000090861_26 (sequence is synthesized)
tgccatcggtctagaaccactaaccccgcattgctgttgatcgtcacgctcgcatctatagataacggctctccagacctgagctttccgcgtcagcaagtaggaatcgtttttgctgca

SEQ ID NO: 97565 - DNA, 120 bp, Artificial Sequence
  ENSG00000090861_27 (sequence is synthesized)
gagaataaaaggaccacgtgcaatacttaatgccgcatgatctctatccctcttcccaataggggctggctcttttgacagcctttggcgtctgtagaataaatgctgtggctcctgctg

SEQ ID NO: 97566 - DNA, 120 bp, Artificial Sequence
  ENSG00000090861_28 (sequence is synthesized)
aggaaacccaacaccttccaacccagcaccacttggctgcagactgagcatgagtttccttccattaaagtctttgaagtgctttttcccctagatcagtggttctcaagtgggggcgag

SEQ ID NO: 97567 - DNA, 120 bp, Artificial Sequence
  ENSG00000090861_29 (sequence is synthesized)
tctgccttccagggagtaattggcgataatgtctgaagacatttttgattttcacaactaggggcagatcctgctgtcacgtacttggtagaggccagggtgcccctcagcatcccacac

SEQ ID NO: 97568 - DNA, 120 bp, Artificial Sequence
  ENSG00000090861_30 (sequence is synthesized)
gtttccacaacagagaatgatctggccccaaatgtcagtagtgccaggattgaaaaaccctgttctggcagtttatgctgggcatagtttagcaagttccagtcctttggagtccctttt

SEQ ID NO: 97569 - DNA, 67 bp, Artificial Sequence
  ENSG00000090861_31 (sequence is synthesized)
tcaggtgatctactctatttaatcatatttaatgatattaagggagtatgtgtgtgtgtgcaattta

SEQ ID NO: 97570 - DNA, 120 bp, Artificial Sequence
  ENSG00000090861_32 (sequence is synthesized)
tattaagggagtatgtgtgtgtgtgcaatttacatatgtaaagagaagttatatacacgagtttatattgaaaatataagaaaatttgtatgtttttaaggatttatttattggtctctt

SEQ ID NO: 97571 - DNA, 120 bp, Artificial Sequence
  ENSG00000090861_33 (sequence is synthesized)
agagggagatcgctgaccttggagagccttgtagcagggaccccatggatcctgtccttggaccctggacattccctgctgctcccagtgctgctagcaggagagctcttcccaagcatg

SEQ ID NO: 97572 - DNA, 120 bp, Artificial Sequence
  ENSG00000090861_34 (sequence is synthesized)
tcccctcccctagggctcatcagctctctggtggctgacatgtggcctctgtggctctgagcgaagtggttgcctaagggcccacggtctgggattgagattgggaggagcagcagctcc

SEQ ID NO: 97573 - DNA, 120 bp, Artificial Sequence
  ENSG00000090861_35 (sequence is synthesized)
ctgcatgtgggaggcatacctgggccagggtaggggcagggcccggcgctggggtcctccccacaggccctgggcacagcccctgctctgggaaggggtaggggtgggtggcaggccttc

SEQ ID NO: 97574 - DNA, 120 bp, Artificial Sequence
  ENSG00000090861_36 (sequence is synthesized)
taccatttggactccagtggtagctatgggagaagatgttcgtggaagaggtgtccacaggccaggagtgtggagtggtgctggacaagacctgtttctatgctgagcaaggaggccaga

SEQ ID NO: 97575 - DNA, 120 bp, Artificial Sequence
  ENSG00000090863_0 (sequence is synthesized)
gagctcgccgcggactcaagatggcggcgtgtggacgtgtacggaggatgttccgcttgtcggcggcgctgcatctgctgctgctattcgcggccggggccgagaaactccccggccagg

SEQ ID NO: 97576 - DNA, 120 bp, Artificial Sequence
  ENSG00000090863_1 (sequence is synthesized)
gcgtccacagccagggccagggtcccggggccaactttgtgtccttcgtagggcaggccggaggcggcggcccggcgggtcagcagctgccccagctgcctcagtcatcgcagcttcagc

SEQ ID NO: 97577 - DNA, 120 bp, Artificial Sequence
  ENSG00000090863_2 (sequence is synthesized)
agcaacagcagcagcagcaacagcaacagcagcctcagccgccgcagccgcctttcccggcgggtgggcctccggcccggcggggaggagcgggggctggtgggggctggaagctggcgg

SEQ ID NO: 97578 - DNA, 120 bp, Artificial Sequence
  ENSG00000090863_3 (sequence is synthesized)
aggaagagtcctgcagggaggacgtgacccgcgtgtgccctaagcacacctggagcaacaacctggcggtgctcgagtgcctgcaggatgtgagggagcctgaaaatgaaatttcttcag

SEQ ID NO: 97579 - DNA, 120 bp, Artificial Sequence
  ENSG00000090863_4 (sequence is synthesized)
actgcaatcatttgttgtggaattataagctgaacctaactacagatcccaaatttgaatctgtggccagagaggtttgcaaatctactataacagagattaaagaatgtgctgatgaac

SEQ ID NO: 97580 - DNA, 120 bp, Artificial Sequence
  ENSG00000090863_5 (sequence is synthesized)
cggttggaaaaggttacatggtttcctgcttggtggatcaccgaggcaacatcactgagtatcagtgtcaccagtacattaccaagatgacggccatcatttttagtgattaccgtttaa

SEQ ID NO: 97581 - DNA, 120 bp, Artificial Sequence
  ENSG00000090863_6 (sequence is synthesized)
tctgtggcttcatggatgactgcaaaaatgacatcaacattctgaaatgtggcagtattcggcttggagaaaaggatgcacattcacaaggtgaggtggtatcatgcttggagaaaggcc

SEQ ID NO: 97582 - DNA, 120 bp, Artificial Sequence
  ENSG00000090863_7 (sequence is synthesized)
tggtgaaagaagcagaagaaagagaacccaagattcaagtttctgaactctgcaagaaagccattctccgggtggctgagctgtcatcggatgactttcacttagaccggcatttatatt

SEQ ID NO: 97583 - DNA, 120 bp, Artificial Sequence
  ENSG00000090863_8 (sequence is synthesized)
ttgcttgccgagatgatcgggagcgtttttgtgaaaatacacaagctggtgagggcagagtgtataagtgcctctttaaccataaatttgaagaatccatgagtgaaaagtgtcgagaag

SEQ ID NO: 97584 - DNA, 120 bp, Artificial Sequence
  ENSG00000090863_9 (sequence is synthesized)
cacttacaacccgccaaaagctgattgcccaggattataaagtcagttattcattggccaaatcctgtaaaagtgacttgaagaaataccggtgcaatgtggaaaaccttccgcgatcgc

SEQ ID NO: 97585 - DNA, 120 bp, Artificial Sequence
  ENSG00000090863_10 (sequence is synthesized)
gtgaagccaggctctcctacttgttaatgtgcctggagtcagctgtacacagagggcgacaagtcagcagtgagtgccagggggagatgctggattaccgacgcatgttgatggaagact

SEQ ID NO: 97586 - DNA, 120 bp, Artificial Sequence
  ENSG00000090863_11 (sequence is synthesized)
tttctctgagccctgagatcatcctaagctgtcggggggagattgaacaccattgttccggattacatcgaaaagggcggaccctacactgtctgatgaaagtagttcgaggggagaagg

SEQ ID NO: 97587 - DNA, 120 bp, Artificial Sequence
  ENSG00000090863_12 (sequence is synthesized)
ggaaccttggaatgaactgccagcaggcgcttcaaacactgattcaggagactgaccctggtgcagattaccgcattgatcgagctttgaatgaagcttgtgaatctgtaatccagacag

SEQ ID NO: 97588 - DNA, 120 bp, Artificial Sequence
  ENSG00000090863_13 (sequence is synthesized)
cctgcaaacatataagatctggagacccaatgatcttgtcgtgcctgatggaacatttatacacagagaagatggtagaagactgtgaacaccgtctcttagagctgcagtatttcatct

SEQ ID NO: 97589 - DNA, 120 bp, Artificial Sequence
  ENSG00000090863_14 (sequence is synthesized)
cccgggattggaagctggaccctgtcctgtaccgcaagtgccagggagacgcttctcgtctttgccacacccacggttggaatgagaccagtgaatttatgcctcagggagctgtgttct

SEQ ID NO: 97590 - DNA, 120 bp, Artificial Sequence
  ENSG00000090863_15 (sequence is synthesized)
cttgtttatacagacacgcctaccgcactgaggaacagggaaggaggctctcacgggagtgccgagctgaagtccaaaggatcctacaccagcgtgccatggatgtcaagctggatcctg

SEQ ID NO: 97591 - DNA, 120 bp, Artificial Sequence
  ENSG00000090863_16 (sequence is synthesized)
ccctccaggataagtgcctgattgatctgggaaaatggtgcagtgagaaaacagagactggacaggagctggagtgccttcaggaccatctggatgacttggtggtggagtgtagagata

SEQ ID NO: 97592 - DNA, 120 bp, Artificial Sequence
  ENSG00000090863_17 (sequence is synthesized)
tagttggcaacctcactgagttagaatcagaggatattcaaatagaagccttgctgatgagagcctgtgagcccataattcagaacttctgccacgatgtggcagataaccagatagact

SEQ ID NO: 97593 - DNA, 120 bp, Artificial Sequence
  ENSG00000090863_18 (sequence is synthesized)
ctggggacctgatggagtgtctgatacagaacaaacaccagaaggacatgaacgagaagtgtgccatcggagttacccacttccagctggtgcagatgaaggattttcggttttcttaca

SEQ ID NO: 97594 - DNA, 120 bp, Artificial Sequence
  ENSG00000090863_19 (sequence is synthesized)
agtttaaaatggcctgcaaggaggacgtgttgaagctttgcccaaacataaaaaagaaggtggacgtggtgatctgcctgagcacgaccgtgcgcaatgacactctgcaggaagccaagg

SEQ ID NO: 97595 - DNA, 120 bp, Artificial Sequence
  ENSG00000090863_20 (sequence is synthesized)
agcacagggtgtccctgaagtgccgcaggcagctccgtgtggaggagctggagatgacggaggacatccgcttggagccagatctatacgaagcctgcaagagtgacatcaaaaacttct

SEQ ID NO: 97596 - DNA, 120 bp, Artificial Sequence
  ENSG00000090863_21 (sequence is synthesized)
gttccgctgtgcaatatggcaacgctcagattatcgaatgtctgaaagaaaacaagaagcagctaagcacccgctgccaccaaaaagtatttaagctgcaggagacagagatgatggacc

SEQ ID NO: 97597 - DNA, 120 bp, Artificial Sequence
  ENSG00000090863_22 (sequence is synthesized)
cagagctagactacaccctcatgagggtctgcaagcagatgataaagaggttctgtccggaagcagattctaaaaccatgttgcagtgcttgaagcaaaataaaaacagtgaattgatgg

SEQ ID NO: 97598 - DNA, 120 bp, Artificial Sequence
  ENSG00000090863_23 (sequence is synthesized)
atcccaaatgcaaacagatgataaccaagcgccagatcacccagaacacagattaccgcttaaaccccatgttaagaaaagcctgtaaagctgacattcctaaattctgtcacggtatcc

SEQ ID NO: 97599 - DNA, 120 bp, Artificial Sequence
  ENSG00000090863_24 (sequence is synthesized)
tgactaaggccaaggatgattcagaattagaaggacaagtcatctcttgcctgaagctgagatatgctgaccagcgcctgtcttcagactgtgaagaccagatccgaatcattatccagg

SEQ ID NO: 97600 - DNA, 120 bp, Artificial Sequence
  ENSG00000090863_25 (sequence is synthesized)
agtccgccctggactaccgcctggatcctcagctccagctgcactgctcagacgagatctccagtctatgtgctgaagaagcagcagcccaagagcagacaggtcaggtggaggagtgcc

SEQ ID NO: 97601 - DNA, 120 bp, Artificial Sequence
  ENSG00000090863_26 (sequence is synthesized)
tcaaggtcaacctgctcaagatcaaaacagaattgtgtaaaaaggaagtgctaaacatgctgaaggaaagcaaagcagacatctttgttgacccggtacttcatactgcttgtgccctgg

SEQ ID NO: 97602 - DNA, 120 bp, Artificial Sequence
  ENSG00000090863_27 (sequence is synthesized)
acattaaacaccactgcgcagccatcacccctggccgcgggcgtcaaatgtcctgtctcatggaagcactggaggataagcgggtgaggttacagcccgagtgcaaaaagcgcctcaatg

SEQ ID NO: 97603 - DNA, 120 bp, Artificial Sequence
  ENSG00000090863_28 (sequence is synthesized)
accggattgagatgtggagttacgcagcaaaggtggccccagcagatggcttctctgatcttgccatgcaagtaatgacgtctccatctaagaactacattctctctgtgatcagtggga

SEQ ID NO: 97604 - DNA, 120 bp, Artificial Sequence
  ENSG00000090863_29 (sequence is synthesized)
gcatctgtatattgttcctgattggcctgatgtgtggacggatcaccaagcgagtgacacgagagctcaaggacaggctacaatacaggtcagagacaatggcttataaaggtttagtgt

SEQ ID NO: 97605 - DNA, 120 bp, Artificial Sequence
  ENSG00000090863_30 (sequence is synthesized)
ggtctcaggatgtgacaggcagtccagcctgacctttctgcacactccagacaaacttcccagacaagctcctttgtgcctctacgtggagagggtgtggaaagttatcacattaaaaga

SEQ ID NO: 97606 - DNA, 120 bp, Artificial Sequence
  ENSG00000090863_31 (sequence is synthesized)
tggaggatttgctctgttttttttctttctgtccatttgctgcgtgtacccactctagtaggcattggctaaatgttgtattttggcgattcatcaacctttgcagaatatgggctttat

SEQ ID NO: 97607 - DNA, 120 bp, Artificial Sequence
  ENSG00000090863_32 (sequence is synthesized)
agaagcaatattcttggccatcccgcctcattcctccagtgtggagatgacaagtctgggtgtgagagggaggggtccgggcatcatggttcagcgtggcactcctttggttgagtttgg

SEQ ID NO: 97608 - DNA, 120 bp, Artificial Sequence
  ENSG00000090863_33 (sequence is synthesized)
ggcatgagatcacagtggctgcacaagagagcagtgtgtacagtaggagagacatttatgtaatatatattttattaacctgttagatgtccacaaagtattataaatcacgtgcctaaa

SEQ ID NO: 97609 - DNA, 120 bp, Artificial Sequence
  ENSG00000090863_34 (sequence is synthesized)
ctgaagggtgttcagtacaaggcgtgtcagtttgtggatcagttgatccaagttactccttgtctaacctgactgacatatatttgaatactgtggttttctttcttttttttctatttg

SEQ ID NO: 97610 - DNA, 120 bp, Artificial Sequence
  ENSG00000090863_35 (sequence is synthesized)
ctgcccttcctggaggcagtgggttccagaagccaactgattgtccccctgccaagtcaccaagggaagctgctaagctgcttagtcccctcggtcctgcttgtagggtcttcctgattg

SEQ ID NO: 97611 - DNA, 120 bp, Artificial Sequence
  ENSG00000090863_36 (sequence is synthesized)
tcaacagctgtctgggatgcttcagtctcctaaaactggaaacgcagggtgcgagcagcacacactgcctcccgccactgccagccggagtgagcggcccgagagtctctgcaggttccc

SEQ ID NO: 97612 - DNA, 120 bp, Artificial Sequence
  ENSG00000090863_37 (sequence is synthesized)
ctgggggctgggggccgctgaggcctaatatcaagagccaggaatgtcatgtacatggaggtgcctacggacgtgcctggtgtggtttgcaggtaggatggatgttcactgtttgaccgg

SEQ ID NO: 97613 - DNA, 120 bp, Artificial Sequence
  ENSG00000090863_38 (sequence is synthesized)
gtggggtatccttcctctctgcagtctccttcccagtatgcgtaaacacccttatagttctaattgtgttgatatttctgttctttctgaattgagagaaaatcccattcgttgtctgca

SEQ ID NO: 97614 - DNA, 120 bp, Artificial Sequence
  ENSG00000090863_39 (sequence is synthesized)
aatcccattcgttgtctgcagatttggaagtttgatgaggaatttggttcttgaaacatctgtctttttttttttttttgagacagagtatctctctgttgcccaggctgcagtgcagtg

SEQ ID NO: 97615 - DNA, 61 bp, Artificial Sequence
  ENSG00000090863_40 (sequence is synthesized)
aaacatttgtcatctttataaatggtcagaatagaaaagttagctctgccagtatcttcaa

SEQ ID NO: 97616 - DNA, 120 bp, Artificial Sequence
  ENSG00000090863_41 (sequence is synthesized)
atggtcagaatagaaaagttagctctgccagtatcttcaattacttattacaagaatgtctttcatcatcttacttggagcattttccaatgactggctcttgagagccccaggcagggc

SEQ ID NO: 97617 - DNA, 120 bp, Artificial Sequence
  ENSG00000090863_42 (sequence is synthesized)
cccgagcaagtttttctaagtgccaaggccagcaaagtctgaactggccgcactcattaagtccctcatttggcaaaacaaaacagggcctggggcacccctggttcctggccttatagg

SEQ ID NO: 97618 - DNA, 120 bp, Artificial Sequence
  ENSG00000090863_43 (sequence is synthesized)
tcagtcaactggctgagaaatggtcaagaaaagaaacaatgacccttctgtggatgtgagtggatgatggactctggcctgtgtctactctcctgatgtgtagcccaccaacagtaatag

SEQ ID NO: 97619 - DNA, 120 bp, Artificial Sequence
  ENSG00000090863_44 (sequence is synthesized)
aagtagagggtagggggttttgccaaggctaaggcttcaggtacttgctaacagttatagcagctgggtcactgtcatctggacttaccagttcatgccagtgtccctgtgacttatgca

SEQ ID NO: 97620 - DNA, 120 bp, Artificial Sequence
  ENSG00000090863_45 (sequence is synthesized)
tagtgtgcgccacagccctctagaggtacctggagcccggactgccaggctggaggctctggggtactgaaggtgagctgtctgggcaaactattaagaacaagacgaactgttcacaat

SEQ ID NO: 97621 - DNA, 120 bp, Artificial Sequence
  ENSG00000090863_46 (sequence is synthesized)
ggagcttctcccacagatggggagctctgtgaggccttcacctgggtgcatgttggacttccattgctgttgctgttgtccctagacaagcccgttagcaagaagcaccggcaggggagc

SEQ ID NO: 97622 - DNA, 120 bp, Artificial Sequence
  ENSG00000090863_47 (sequence is synthesized)
catgcactccataggcttgggatcacccccgggaaagcgatcttccccgggctaccacccccagctgcagttctgtgttagtgcatccttcaaagctaggagaattctagggtgaccagt

SEQ ID NO: 97623 - DNA, 120 bp, Artificial Sequence
  ENSG00000090863_48 (sequence is synthesized)
gagctaatgttgagtgagcaggtattgacttgaacacactgcaggcctttggctgtctcatgctgtccttactcttcttgggaacagtgagtcactcagctggccagggtggggatgcat

SEQ ID NO: 97624 - DNA, 120 bp, Artificial Sequence
  ENSG00000090863_49 (sequence is synthesized)
cctggtgaagagacagctttccctgaagatgctacagaaagttactgtcagatttcatttgtttctgtttcctgagatcaactaacagaagaatctaatggtgagagtgtcttcattcat

SEQ ID NO: 97625 - DNA, 120 bp, Artificial Sequence
  ENSG00000090863_50 (sequence is synthesized)
gttttacgttttatcaaggcacactggaaagggaattatgtggctgacttcccttggccttcccaagagaagattctgttcttatgtcagtgtggcttctggaagtgtctcctatcctcc

SEQ ID NO: 97626 - DNA, 120 bp, Artificial Sequence
  ENSG00000090863_51 (sequence is synthesized)
catcctccaggcctgtggtgtgacttctgccccgaagttcctactatagtgagtcatctggggagaggccactgaaaagaggccttcccttcccatttcctcccctgcctccttagaaca

SEQ ID NO: 97627 - DNA, 120 bp, Artificial Sequence
  ENSG00000090863_52 (sequence is synthesized)
cactctaagtcagaacttaatctaagaagaaggaagctggaccaggaaccttggaagtcagccagccctagaacagtcagcctaaattttggccgtaatggcttttttggttttttgttt

SEQ ID NO: 97628 - DNA, 120 bp, Artificial Sequence
  ENSG00000090863_53 (sequence is synthesized)
ggttttttgttttgtttctgagatggagtctcactccgttgccaggctggagtgctgtggcgctatctcagcttaccgaatcctccgactccctggttcaagcgattgtcctgcctcagc

SEQ ID NO: 97629 - DNA, 120 bp, Artificial Sequence
  ENSG00000090863_54 (sequence is synthesized)
catctcctgacctcatgatgtgcccacttcggccttccaaagtggccgcaaagtggcccacttcggccaaagtgcacttcggccttccaaagtgcattacaggcgtgagccaccacgccc

SEQ ID NO: 97630 - DNA, 120 bp, Artificial Sequence
  ENSG00000090863_55 (sequence is synthesized)
gcatgcaccaccatgcctggataattttttcttatttttagtagagacaggatttcatcatgttggccacgctggtttcgaactcctgaccacatgtggtccacccaccttggcctcaat

SEQ ID NO: 97631 - DNA, 120 bp, Artificial Sequence
  ENSG00000090863_56 (sequence is synthesized)
tatgtgcattttggtatatttacttgtatttcaacatcttgtgagtttgaaaaacctgaaaggccagaatgcttccttttatttctcaccatttgggcagcacctaagtggttttgtaaa

SEQ ID NO: 97632 - DNA, 120 bp, Artificial Sequence
  ENSG00000090863_57 (sequence is synthesized)
atgcagcatctggtgctgtgggtctctctcaggccttgagggacacttccttcctccccactcgcctcctctccactagactttggttcctagagggcgtggggccgggtctgaggttct

SEQ ID NO: 97633 - DNA, 120 bp, Artificial Sequence
  ENSG00000090863_58 (sequence is synthesized)
tgcctgccttccctcccattggtctttggttgctcatccctctaactgcaccccttcttggtccttcctccacagacttcagataatagataagtcattagcaaaccagaccgaatcttt

SEQ ID NO: 97634 - DNA, 120 bp, Artificial Sequence
  ENSG00000090863_59 (sequence is synthesized)
agggtgaagagctccccaaagccatctggtgaggtcattgtggggaccagggactgattatttgtcacctggatcacaaagatgggactgtctgctcaggctggtggtgacaggatcctg

SEQ ID NO: 97635 - DNA, 120 bp, Artificial Sequence
  ENSG00000090863_60 (sequence is synthesized)
acccgtggtcctctcccgctccctctgctccaccaggacacatgtataggacactgtgctgtgtgcagtggagaaatctccctgggccaggggaaagttcagacagtgcctctagattgt

SEQ ID NO: 97636 - DNA, 120 bp, Artificial Sequence
  ENSG00000090863_61 (sequence is synthesized)
gttttgcctcctccaatgtagagttgacatctggaccccagagcccagcagggctttctgtcagacatgctagggtggtagaaatgggccctccaggtccccctgcagtgcactgggcag

SEQ ID NO: 97637 - DNA, 120 bp, Artificial Sequence
  ENSG00000090863_62 (sequence is synthesized)
agacctccggaaagccggcagcgggagcgcttcctgggcagcttcccccagcacagtgttcccaaaccagtccatccggaaaacagtctgtacagcaaatgctgtgtgagatcttaggct

SEQ ID NO: 97638 - DNA, 120 bp, Artificial Sequence
  ENSG00000090863_63 (sequence is synthesized)
tttcactttttttgttttgttttgtttttgaaagaaagaaaaaaatacaattaacaagcctcttttgtaaatgggtttcctttctatgtataaaatcgtggtggtcccttgtttttacat

SEQ ID NO: 97639 - DNA, 120 bp, Artificial Sequence
  ENSG00000090863_64 (sequence is synthesized)
gttcatgctgtgtaattttgagatgttactgagatatgttctgaacataatgtgcatttttttctgtacagatgaaatgggagaatttaataaagagtttgcaggtttttacttgttaaa

SEQ ID NO: 97640 - DNA, 120 bp, Artificial Sequence
  ENSG00000090863_65 (sequence is synthesized)
tgaccaccaaaggaactacctatccagtgcccagtttgtacagccctcttgtatagcatccccactcacctcgctcttctcagaagtgacaccaaccccgtgttagagcattagcagatg

SEQ ID NO: 97641 - DNA, 120 bp, Artificial Sequence
  ENSG00000090863_66 (sequence is synthesized)
tccactgcgttgtcccatccagcctccactcgtgtccatggtgtcctcctcctcctcaccgtgcagcagcagcagctggtcgctggggttactgcctttgtttggcaaacttgggtttac

SEQ ID NO: 97642 - DNA, 120 bp, Artificial Sequence
  ENSG00000090863_67 (sequence is synthesized)
ctgcctgtagacaagtctctctcataccaacagaacttccggtacttccagaaccaactcacctgacctgcaactcaaaggcttttttaagaaaaccaccaaaaaaaaaaatttttttaa

SEQ ID NO: 97643 - DNA, 120 bp, Artificial Sequence
  ENSG00000090863_68 (sequence is synthesized)
agaaaaaaatgtatatagtaacgcatctcctccaggcttgatttgggcaatggggttatgtctttcatatgactgtgtaaaacaaagacaggacttggaggggaagcacaccacccagtg

SEQ ID NO: 97644 - DNA, 120 bp, Artificial Sequence
  ENSG00000090863_69 (sequence is synthesized)
tgccatgactgaggtgtctcgttcatctctcagaagcaccttggggcctcgccagggccgtggtcttcaccgaggcgtgggtgggcagccgttccccaggctgtgtggggtcctgctttc

SEQ ID NO: 97645 - DNA, 120 bp, Artificial Sequence
  ENSG00000090863_70 (sequence is synthesized)
ttctgctgagacagtgacgctttccagtttccaccctaatcagccactgctggtcacagccccacagccatgggtatttctgtggtctcctcgcttcattgaagcaaagcatgagccttc

SEQ ID NO: 97646 - DNA, 120 bp, Artificial Sequence
  ENSG00000090863_71 (sequence is synthesized)
ctagacaagggcagctggggaggggaagggaccggaagtttgtgaagttgaacagtccatccatctgcactgagaggctggatcctgagtcccggggcagcaggatcccaggaaccttcc

SEQ ID NO: 97647 - DNA, 120 bp, Artificial Sequence
  ENSG00000090863_72 (sequence is synthesized)
tcctccagggcagcacaggactcagccatgtctggaccggccctgctgaggctacagtcactctggaagctctgcgcttcatcaggaggcaggactgtggcgggaggggtccttgaagat

SEQ ID NO: 97648 - DNA, 120 bp, Artificial Sequence
  ENSG00000090863_73 (sequence is synthesized)
gatgtaggttaaaaggagtggaccagtgttctctttctgacagaaccattaaaattcctaacccacattggactgtcatctttcatccattaagacataatgctgcctatggataaggtt

SEQ ID NO: 97649 - DNA, 120 bp, Artificial Sequence
  ENSG00000090863_74 (sequence is synthesized)
ggctgtaaaagttttcacaaataaaagtgtgccccattggtgcaccataagaccccttttctgttgttcatagaggcataaacaaggaaaacattgagagcctgaaaatgaaatttcttc

SEQ ID NO: 97650 - DNA, 120 bp, Artificial Sequence
  ENSG00000090863_75 (sequence is synthesized)
catgtttgctttataaagaagtatattgtgttgctttgtgagctccttccctcatttctctagaacaacactctatacagccctttggttttcttcataaattaggtttatcatagtcat

SEQ ID NO: 97651 - DNA, 120 bp, Artificial Sequence
  ENSG00000090863_76 (sequence is synthesized)
cttcataaattaggtttatcatagtcattagacttgcctctgtttctcccttaagatagcagctgtacggccgggagcggtggctcacgccttgaatcccagcactttgagaggccgagg

SEQ ID NO: 97652 - DNA, 120 bp, Artificial Sequence
  ENSG00000090863_77 (sequence is synthesized)
aaaaaaaaaaaaaaaaaaagacatttcaagctggaagatttggttccctaactttgagcctagctctttcattaaagtaataataaaagtagaactctacatttatataatggttttgac

SEQ ID NO: 97653 - DNA, 120 bp, Artificial Sequence
  ENSG00000090863_78 (sequence is synthesized)
taataaaagtagaactctacatttatataatggttttgactttccaaagtgattttcacatctcagcagtcctgtgaaggactaaataaggtgtttcagggtagacttggcattgtgttt

SEQ ID NO: 97654 - DNA, 120 bp, Artificial Sequence
  ENSG00000090863_79 (sequence is synthesized)
tgcaaagaaggtccaaggccatgcagctatttggtgacagaattgaaagtaaagcctgattctcttgctgcaaggcgactttgctatgtagaagccagggtcactagacaagatgcagtc

SEQ ID NO: 97655 - DNA, 120 bp, Artificial Sequence
  ENSG00000090863_80 (sequence is synthesized)
aacaaataagtctccagaacatatgacatctccagcctaaaccaagctcacctttccatgctggctccctcatgcagacggaggacatccgcttggagccagatctatacgaagcctgca

SEQ ID NO: 97656 - DNA, 120 bp, Artificial Sequence
  ENSG00000090863_81 (sequence is synthesized)
aattcagtggctgtagagtgacctgctcaaactcccagggctttgttgcctgggaattttaagggaggagtctgagtgtaagcagggccttcctcctttgaggagcatccagaaaaatgg

SEQ ID NO: 97657 - DNA, 120 bp, Artificial Sequence
  ENSG00000090863_82 (sequence is synthesized)
agggagagtcaggggagagaggaggccacaagaaccagaaaactgccctaaaagaacgttcagaaggaatcaggccggcagtccttggaaagaaaaatctagaaattcaataaaacttca

SEQ ID NO: 97658 - DNA, 120 bp, Artificial Sequence
  ENSG00000090863_83 (sequence is synthesized)
acagtgagttggatattgtatttctttttcagtgttctcaaaagtgtctgttatggggaaggttgctgatgtccccttgatttttctgaggactccttagagtattggagtctgcacaaa

SEQ ID NO: 97659 - DNA, 120 bp, Artificial Sequence
  ENSG00000090863_84 (sequence is synthesized)
accccgcagagtagaaagattcctgaggacctccagaagtactcgttaacaagtcatattgctgattaaaaacagtgtagtgagagctcagtaaatgtttattgaatagataaatccatg

SEQ ID NO: 97660 - DNA, 120 bp, Artificial Sequence
  ENSG00000090863_85 (sequence is synthesized)
gttgtagtcatgatcattgacataatatgctccctttaggaaggtggatatctaaaaatgtgtgaatcaggtggaatgttttgtcacatgctcactgctttctactctagattaccgctt

SEQ ID NO: 97661 - DNA, 120 bp, Artificial Sequence
  ENSG00000090863_86 (sequence is synthesized)
atttgcgtgcaaaactggttacgcacagagctgctcagagaagtttccactggagaaaagttgtttactttctctcccttcagccgtgaatgatctggtgaattgaaggccatcttctag

SEQ ID NO: 97662 - DNA, 120 bp, Artificial Sequence
  ENSG00000090863_87 (sequence is synthesized)
gctctccatggtctgcattcctgttctttgtaacactgaattcaacttggcattagtcctgacactctaaagcgttgttccatatttctctgttgaacaagggtgttctttcattatagc

SEQ ID NO: 97663 - DNA, 120 bp, Artificial Sequence
  ENSG00000090863_88 (sequence is synthesized)
gttctttcattatagctctctgtaaatttgttcttcccttcttcttattctggatggtaaacccaagacctgccagaaagataaaagtgctttcagctgggcacggtggctcacgcctgt

SEQ ID NO: 97664 - DNA, 120 bp, Artificial Sequence
  ENSG00000090863_89 (sequence is synthesized)
tattttaaaatgatacgacatgacatacgggaatgccaaaaacacaaatctgatcttacagtcacttacagtcccctgcttttttccaacacacagttttgtatccctaaaagtagttag

SEQ ID NO: 97665 - DNA, 120 bp, Artificial Sequence
  ENSG00000090863_90 (sequence is synthesized)
ttactcaattaaattctgcattctgtacatcatcaccaccttgcaacctgtcccaaagtggtctctgttgttagccctcaacttccccccttttttattagtatatgaagtatttacaga

SEQ ID NO: 97666 - DNA, 120 bp, Artificial Sequence
  ENSG00000090863_91 (sequence is synthesized)
catggacttatgagagcagtctgggtgtatagctctttaaaggaaggtgttttttcaggagctagtgttgcacgggtttctctctttaaaggcattattagtatgtgttccccagtaaca

SEQ ID NO: 97667 - DNA, 120 bp, Artificial Sequence
  ENSG00000090863_92 (sequence is synthesized)
gtggtttggcatctgctttgagggcagtgctctggcttatgagcttataaactgaagatggatatcagttacccctgttttcattttgaactacttagcattttgggaaaatctgcaaag

SEQ ID NO: 97668 - DNA, 120 bp, Artificial Sequence
  ENSG00000090863_93 (sequence is synthesized)
gctttgcatactctaatgttattgctacatgtgtttttacctcacttttcttaattctgccttctcatttgttcaggccgaaagggaatatgtctttaaaaatttgcctttcaaagtata

SEQ ID NO: 97669 - DNA, 120 bp, Artificial Sequence
  ENSG00000090863_94 (sequence is synthesized)
acggaggagcagttctatatttattctggggctatctacttcaaatactagaatcgtttccaaaagtatgtattagattatttgcccatcagatattactgattcagaaagagaaactgc

SEQ ID NO: 97670 - DNA, 120 bp, Artificial Sequence
  ENSG00000090863_95 (sequence is synthesized)
gaagttcctcttagctccggaatgagtatgcgagatgttaggcagccctcctgctgcctcgtggggttagccctggaggcctcccgcatctctcctttgattagcgtggcaaacactcgg

SEQ ID NO: 97671 - DNA, 120 bp, Artificial Sequence
  ENSG00000090863_96 (sequence is synthesized)
actgtctggacagagcatctggcgatggtagttctcacatggaggtcccataggctaaaggagcatttttaatttttccaggtcaggccatctaactgaccaagtagggctggattgtgt

SEQ ID NO: 97672 - DNA, 120 bp, Artificial Sequence
  ENSG00000090863_97 (sequence is synthesized)
acttagagaagcagggtgcagtgtgagtgaaagaggcgaactgacctcttccctgcgtcgtcccgttatgtcatctcatctaagatgcagcagtttttgtattggattagatatttagtg

SEQ ID NO: 97673 - DNA, 120 bp, Artificial Sequence
  ENSG00000090863_98 (sequence is synthesized)
attcatttaagaattaagtctttttgaggaaactgatgagctttttcagcgtgactgtccaaattcttccatgttgctctttgaaaggaccatttctagaacacttgccctcatacaaac

SEQ ID NO: 97674 - DNA, 120 bp, Artificial Sequence
  ENSG00000090863_99 (sequence is synthesized)
caaattcccaatttgctcaggtttctctacctttcaggagtgagtttcacagtaggtcaaaagtacagtcctagagttaagagcagcattcctctgtggtcacatgtttttaacacagat

SEQ ID NO: 97675 - DNA, 120 bp, Artificial Sequence
  ENSG00000090863_100 (sequence is synthesized)
gttgaactgtcgttgcacacatgtgccctgtgtggcttccccttctgtcaggaatgtagtcagcattcatgctgctgcctgcctttcatgacacccacagtcaaattgcagcttttagca

SEQ ID NO: 97676 - DNA, 120 bp, Artificial Sequence
  ENSG00000090863_101 (sequence is synthesized)
ccctgaaaaaaaatacagtgagccttacaggaaagacattcccccaaagggcatcttgaattcttaatggtgtgaccccccccaagcccagctctcaggccatctgcccttgtgtggccc

SEQ ID NO: 97677 - DNA, 120 bp, Artificial Sequence
  ENSG00000090863_102 (sequence is synthesized)
cagccagcctcaagcttctttcgtctgcagggtggacgtggtgatctgcctgagcacgaccgtgcgcaatgacactctgcaggaagccaaggagcacagggtgtccctgaagtgccgcag

SEQ ID NO: 97678 - DNA, 120 bp, Artificial Sequence
  ENSG00000090863_103 (sequence is synthesized)
gcagctccgtgtggaggagctggagatggtaatgcctcccagcctctgctcccagaaaccacagtgggccagggcttggaaagctggggagaggctagggcaagggggaggcattttatc

SEQ ID NO: 97679 - DNA, 120 bp, Artificial Sequence
  ENSG00000090863_104 (sequence is synthesized)
cactactgtgatggttaagacttgaagtcctgtgcaaaagttttaacatacgaccattagcttcctgtgtcattcttttgattttgaatgataaaacctttcttcccacatgtaactgga

SEQ ID NO: 97680 - DNA, 120 bp, Artificial Sequence
  ENSG00000090863_105 (sequence is synthesized)
tggaagtccagctgtaagacaggctctaactaagcatgtgatccaatcactggatcagtaatgtcctcaggggctgggtgctgtggctcatgcaggtaatcccagcactttgggaggccg

SEQ ID NO: 97681 - DNA, 79 bp, Artificial Sequence
  ENSG00000090863_106 (sequence is synthesized)
gtcaggagttcaaaaccagcctggccaacgtgatgaaaccctgcctgtactaaaagagacttaggccagaatgcggtca

SEQ ID NO: 97682 - DNA, 120 bp, Artificial Sequence
  ENSG00000090889_0 (sequence is synthesized)
agggcggcgggaggcccagggagaacggggaagggacatttagtttgagacggtgctgagataggatcatgaaggaagaggtgaagggaattcccgtaagagtggcgctgcgttgtcgcc

SEQ ID NO: 97683 - DNA, 120 bp, Artificial Sequence
  ENSG00000090889_1 (sequence is synthesized)
ctctggtccccaaagagattagcgagggctgccagatgtgcctttccttcgtgcccggagagcctcaggtggtggttggtacagataaatccttcacctacgattttgtatttgatccct

SEQ ID NO: 97684 - DNA, 120 bp, Artificial Sequence
  ENSG00000090889_2 (sequence is synthesized)
ctactgaacaggaagaagtcttcaatacagcagtagcgccactcataaaaggtgtatttaaaggatataatgcaacggtcctggcctatgggcagactggctctggaaaaacctattcaa

SEQ ID NO: 97685 - DNA, 120 bp, Artificial Sequence
  ENSG00000090889_3 (sequence is synthesized)
tgggaggtgcatatactgcagagcaagagaatgaaccaacagttggggttattcctagggtaatacaactgctcttcaaagaaattgataaaaagagtgactttgaatttactctgaaag

SEQ ID NO: 97686 - DNA, 120 bp, Artificial Sequence
  ENSG00000090889_4 (sequence is synthesized)
tgtcttacttagagatttacaatgaagaaattttggatcttctatgcccatctcgtgagaaagctcaaataaatatacgagaggatcctaaggaaggcataaagattgtgggactcactg

SEQ ID NO: 97687 - DNA, 120 bp, Artificial Sequence
  ENSG00000090889_5 (sequence is synthesized)
agaagactgttttggttgccttggatactgtttcctgtttggaacagggcaacaactctaggactgtggcctccacggctatgaactcccagtcgtcccgatctcatgccatctttacaa

SEQ ID NO: 97688 - DNA, 120 bp, Artificial Sequence
  ENSG00000090889_6 (sequence is synthesized)
tctccttagagcaaagaaagaaaagtgacaagaatagcagctttcgctccaagctgcatcttgtagacctcgctggatcagaaagacagaagaaaaccaaggctgaaggggatcgtctaa

SEQ ID NO: 97689 - DNA, 120 bp, Artificial Sequence
  ENSG00000090889_7 (sequence is synthesized)
aagagggtattaatattaaccgaggcctcctatgcttgggaaatgtaatcagtgctcttggagatgacaaaaagggtggctttgtgccctacagagattccaagttgactcgactgcttc

SEQ ID NO: 97690 - DNA, 120 bp, Artificial Sequence
  ENSG00000090889_8 (sequence is synthesized)
aagattctctaggaggtaatagccatactcttatgatagcctgtgtgagtcctgctgactccaatctagaggaaacattaaatacccttcgctatgctgacagagcaagaaaaatcaaga

SEQ ID NO: 97691 - DNA, 120 bp, Artificial Sequence
  ENSG00000090889_9 (sequence is synthesized)
acaaacctattgttaatattgatccccagacagctgaacttaatcatctaaagcaacaggtacaacagctacaagtcttgttgctacaggcccatggaggtaccctgcctggatctataa

SEQ ID NO: 97692 - DNA, 120 bp, Artificial Sequence
  ENSG00000090889_10 (sequence is synthesized)
ctgtggaaccatcagagaatctacaatccctgatggagaagaatcagtccctggtagaggagaatgaaaaattaagtcgtggtctgagcgaggcagctggtcagacagcccagatgttgg

SEQ ID NO: 97693 - DNA, 120 bp, Artificial Sequence
  ENSG00000090889_11 (sequence is synthesized)
agaggatcattttgacagagcaagcgaatgaaaaaatgaacgccaagctagaagagctcaggcagcatgcggcctgcaaactggatcttcaaaagctagtggagactttggaagaccagg

SEQ ID NO: 97694 - DNA, 120 bp, Artificial Sequence
  ENSG00000090889_12 (sequence is synthesized)
aattgaaagaaaatgtagagataatttgtaacctgcagcaattgattacccagttatcggatgaaactgttgcttgcatggctgcagccattgatactgcggtggagcaagaagcccaag

SEQ ID NO: 97695 - DNA, 120 bp, Artificial Sequence
  ENSG00000090889_13 (sequence is synthesized)
tagaaaccagtccagagacgagcaggtcttctgacgcttttaccactcagcatgctctccgtcaagcgcagatgtctaaggagctggttgagttgaataaagcgcttgcactgaaagagg

SEQ ID NO: 97696 - DNA, 120 bp, Artificial Sequence
  ENSG00000090889_14 (sequence is synthesized)
ccctggctaggaagatgactcagaatgacagccaactgcagcccattcagtaccaataccaggataacataaaagagctagaattagaagtcatcaatctgcaaaaggaaaaggaagaat

SEQ ID NO: 97697 - DNA, 120 bp, Artificial Sequence
  ENSG00000090889_15 (sequence is synthesized)
tggttcttgaacttcagacagcaaagaaggatgccaaccaagccaagttgagtgagcgccgccgcaaacgtctccaggagctggagggtcaaattgctgatctgaagaagaaactgaatg

SEQ ID NO: 97698 - DNA, 120 bp, Artificial Sequence
  ENSG00000090889_16 (sequence is synthesized)
agcagtccaaacttctgaaactaaaggaatccacagagcgtactgtctccaaactgaaccaggagatacggatgatgaaaaaccagcgggtacagttaatgcgtcaaatgaaagaagatg

SEQ ID NO: 97699 - DNA, 120 bp, Artificial Sequence
  ENSG00000090889_17 (sequence is synthesized)
ctgagaagtttagacagtggaagcagaaaaaagacaaagaagtaatacagttaaaagaacgagaccgtaagaggcaatatgagctgctgaaacttgaaagaaacttccagaaacaatcca

SEQ ID NO: 97700 - DNA, 120 bp, Artificial Sequence
  ENSG00000090889_18 (sequence is synthesized)
caacgggaggttgcagataagcggaaagagactcagagccgtggaatggaaggcactgcagctcgagtgaagaattggcttggaaacgaaattgaggttatggtcagtactgaggaagcc

SEQ ID NO: 97701 - DNA, 120 bp, Artificial Sequence
  ENSG00000090889_19 (sequence is synthesized)
aaacgccatctgaatgacctccttgaagatagaaagatcctggctcaagatgtggctcaactcaaagaaaaaaaggaatctggggagaatccacctcctaaactccggaggcgtacattc

SEQ ID NO: 97702 - DNA, 120 bp, Artificial Sequence
  ENSG00000090889_20 (sequence is synthesized)
tcccttactgaagtgcgtggtcaagtttcggagtcagaagattctattacaaagcagattgaaagcctagagactgaaatggaattcaggagtgctcagattgctgacctacagcagaag

SEQ ID NO: 97703 - DNA, 120 bp, Artificial Sequence
  ENSG00000090889_21 (sequence is synthesized)
ctgctggatgcagaaagtgaagacagaccaaaacaacgctgggagaatattgccaccattctggaagccaagtgtgccctgaaatatttgattggagagctggtctcctccaaaatacag

SEQ ID NO: 97704 - DNA, 120 bp, Artificial Sequence
  ENSG00000090889_22 (sequence is synthesized)
gtcagcaaacttgaaagcagcctgaaacagagcaagaccagctgtgctgacatgcagaagatgctgtttgaggaacgaaatcattttgccgagatagagacagagttacaagctgagctg

SEQ ID NO: 97705 - DNA, 120 bp, Artificial Sequence
  ENSG00000090889_23 (sequence is synthesized)
gtcagaatggagcaacagcaccaagagaaggtgctgtaccttctcagccagctgcagcaaagccaaatggcagagaagcagttagaggaatcagtcagtgaaaaggaacagcagctgctg

SEQ ID NO: 97706 - DNA, 120 bp, Artificial Sequence
  ENSG00000090889_24 (sequence is synthesized)
agcacactgaagtgtcaggatgaagaacttgagaaaatgcgagaagtgtgtgagcaaaatcagcagcttctccgagagaatgaaatcatcaagcagaaactgaccctcctccaggtagcc

SEQ ID NO: 97707 - DNA, 120 bp, Artificial Sequence
  ENSG00000090889_25 (sequence is synthesized)
agcagacagaaacatcttcctaaggatacccttctatctccagactcttcttttgaatatgtcccacctaagccaaaaccttctcgtgttaaagaaaagttcctggagcaaagcatggac

SEQ ID NO: 97708 - DNA, 120 bp, Artificial Sequence
  ENSG00000090889_26 (sequence is synthesized)
atcgaggatctaaaatattgttcagagcattctgtgaatgagcatgaggatggtgatggtgatgatgatgagggggatgacgaggaatggaagccaacaaaattagttaaggtgtccagg

SEQ ID NO: 97709 - DNA, 120 bp, Artificial Sequence
  ENSG00000090889_27 (sequence is synthesized)
aagaacatccaagggtgttcctgcaagggctggtgtggaaacaagcagtgtgggtgcaggaagcaaaagtcagactgtggtgtggactgttgctgtgaccccacaaagtgtcggaaccgc

SEQ ID NO: 97710 - DNA, 120 bp, Artificial Sequence
  ENSG00000090889_28 (sequence is synthesized)
cagcaaggcaaggatagcttgggcactgttgaacggacccaggattccgaaggctccttcaaactggaggatcctaccgaggtgaccccaggattgagcttctttaatcccgtctgtgcc

SEQ ID NO: 97711 - DNA, 120 bp, Artificial Sequence
  ENSG00000090889_29 (sequence is synthesized)
acccccaatagcaagatcctgaaagagatgtgcgatgtggagcaggtgctgtcaaagaagactcccccagctccctccccttttgacctcccagagttgaaacatgtagcaacagaatac

SEQ ID NO: 97712 - DNA, 120 bp, Artificial Sequence
  ENSG00000090889_30 (sequence is synthesized)
caagaaaacaaggctccagggaagaaaaagaaacgggctctggccagcaacaccagcttcttctctggctgctcccctatcgaagaagaggcccactgaagttggagtcatcatctctac

SEQ ID NO: 97713 - DNA, 120 bp, Artificial Sequence
  ENSG00000090889_31 (sequence is synthesized)
ccccagtctggcttgggagatgctttcaggttgcagccagaaggggttttttaaatgacttctctggatttcaggtttcttgctgttgaaaaaaggaacaaagcgttactgaaaagaagg

SEQ ID NO: 97714 - DNA, 120 bp, Artificial Sequence
  ENSG00000090889_32 (sequence is synthesized)
taacctttgttggatgtgggccttagcctccaggtccagactactactctatgttctccagaagggtgctaagtcacctactgaagagagaaccaactgactttcctattgactcatcag

SEQ ID NO: 97715 - DNA, 120 bp, Artificial Sequence
  ENSG00000090889_33 (sequence is synthesized)
gaaccagtcctcagtctggtcaagttgtttcttatttgtgagcagttcaggctatctcctgatggggatgaggccaaggctttcttatcttttggttgtctctgcttaatggaggagcct

SEQ ID NO: 97716 - DNA, 120 bp, Artificial Sequence
  ENSG00000090889_34 (sequence is synthesized)
ggcctaggatggaggcctggcttagatctttcattccacctcaggaatgaggttgtgatctttcctgtcctgaccctctctgaattatgtttcaatagtactcttgattgtctgccatgt

SEQ ID NO: 97717 - DNA, 120 bp, Artificial Sequence
  ENSG00000090889_35 (sequence is synthesized)
tgttgaagcaaatgaattatttttaaatgttaagtaagtaaataaaccttagcccgtctactgtttgggaagatccttctgtgctagagggagaaataaaatttcaacctgtgttcctca

SEQ ID NO: 97718 - DNA, 120 bp, Artificial Sequence
  ENSG00000090889_36 (sequence is synthesized)
gggaggcccagggagaacggggaagggacatttagtttggtgagttacgggggcacaccttagctcagaacctgtttttacccagtaccctagggctttggttctttgtcgccgtccccg

SEQ ID NO: 97719 - DNA, 120 bp, Artificial Sequence
  ENSG00000090889_37 (sequence is synthesized)
ttggagttttttctttgcctttcagaagcccgtgcactctctttagagtgcagggctgacgggcggtccagccctggccaagtcatggagcgtgaatctcccaaagacggtgctgagata

SEQ ID NO: 97720 - DNA, 80 bp, Artificial Sequence
  ENSG00000090905_0 (sequence is synthesized)
cggcggcggcggcggcggcggcggcggcagcgggtcggtgtagaaaatggcgctggtgcagcggctcgggcctctccccg

SEQ ID NO: 97721 - DNA, 120 bp, Artificial Sequence
  ENSG00000090905_1 (sequence is synthesized)
cggcgctgcggagggcttgaggctcgcgagcctccttcgccgcgccccacttgctcgtgcactttacacacatgagagaattggaagctaaagctaccaaagacgtagaaagaaatctta

SEQ ID NO: 97722 - DNA, 120 bp, Artificial Sequence
  ENSG00000090905_2 (sequence is synthesized)
gcagggatttagtgcaagaagaagaacagttgatggaagaaaagaaaaagaaaaaagacgacaagaaaaagaaggaagctgctcaaaagaaggccactgaacaaaaaatcaaagtgccag

SEQ ID NO: 97723 - DNA, 120 bp, Artificial Sequence
  ENSG00000090905_3 (sequence is synthesized)
aacagataaagcccagtgtaagccagcctcagcctgccaactctaataacggcacttccacagcaaccagcactaataataatgccaagcgagctacagccaacaatcagcagccacagc

SEQ ID NO: 97724 - DNA, 120 bp, Artificial Sequence
  ENSG00000090905_4 (sequence is synthesized)
agcagcagcaacagcagcagccgcagcagcagcagccacagcagcagccacagccgcagccgcagcagcagcagccacagcagcagccacaggccttgcctcggtatcctcgtgaagtac

SEQ ID NO: 97725 - DNA, 120 bp, Artificial Sequence
  ENSG00000090905_5 (sequence is synthesized)
ctccacgatttcgccaccaggaacacaaacagcttctaaagaggggtcagcattttcctgttatagcagcaaaccttggatctgctgttaaggtgttaaacagccagtcagaaagcagtg

SEQ ID NO: 97726 - DNA, 120 bp, Artificial Sequence
  ENSG00000090905_6 (sequence is synthesized)
ctttaacaaatcaacagccacaaaataacggagaggtgcagaacagcaaaaaccagtcagatataaaccacagtacttcaggatcccattatgaaaattcccagcggggacctgtgtctt

SEQ ID NO: 97727 - DNA, 120 bp, Artificial Sequence
  ENSG00000090905_7 (sequence is synthesized)
ctacaagtgattctagcacaaactgtaagaatgctgttgtaagtgacttgtcggaaaaagaagcatggccctcagcccctggcagtgatccggagttggcttcagaatgtatggatgctg

SEQ ID NO: 97728 - DNA, 120 bp, Artificial Sequence
  ENSG00000090905_8 (sequence is synthesized)
attctgcctccagttctgaatcagagagaaacatcactatcatggcttcagggaacacaggtggtgaaaaagatggccttcggaatagcactggacttggttcccaaaacaagtttgtag

SEQ ID NO: 97729 - DNA, 120 bp, Artificial Sequence
  ENSG00000090905_9 (sequence is synthesized)
ttggtagcagcagcaataatgtgggccatggaagtagtactgggccatggggtttttcccatggagccataataagcacatgtcaggtctctgtggatgctcctgaaagcaaatctgaaa

SEQ ID NO: 97730 - DNA, 120 bp, Artificial Sequence
  ENSG00000090905_10 (sequence is synthesized)
gtagcaacaatagaatgaatgcttggggcactgtaagttcttcatcaaatggagggttaaatccaagcactttgaattcagctagcaaccatggtgcctggccagtattagagaacaatg

SEQ ID NO: 97731 - DNA, 120 bp, Artificial Sequence
  ENSG00000090905_11 (sequence is synthesized)
gacttgccctaaaagggcctgtagggagtggtagttctggcattaatattcagtgcagtactataggccagatgcctaacaatcagagtattaactctaaagtgagtggtggttctaccc

SEQ ID NO: 97732 - DNA, 120 bp, Artificial Sequence
  ENSG00000090905_12 (sequence is synthesized)
atggtacctggggaagccttcaggaaacttgtgaatctgaagtaagtggtacacagaaggtttcattcagtggtcaacctcaaaatattaccactgaaatgactggaccaaataacacta

SEQ ID NO: 97733 - DNA, 120 bp, Artificial Sequence
  ENSG00000090905_13 (sequence is synthesized)
ctaactttatgacctctagtttaccaaactccggttcagtgcagaataatgagctgcctagtagtaacacaggggcctggcgtgtgagcacaatgaatcatcctcagatgcaggctccat

SEQ ID NO: 97734 - DNA, 120 bp, Artificial Sequence
  ENSG00000090905_14 (sequence is synthesized)
caggtatgaatggcacttccctttctcaccttagcaatggagagtcaaaaagtggaggctcttatggtactacatggggtgcctatggttctaattactctggagacaaatgttcaggcc

SEQ ID NO: 97735 - DNA, 120 bp, Artificial Sequence
  ENSG00000090905_15 (sequence is synthesized)
ctaatggccaagctaatggtgacactgtgaatgcaactctaatgcagcctggcgtaaatggtcctatgggcactaactttcaagttaacacaaacaaaggaggtggtgtgtgggaatctg

SEQ ID NO: 97736 - DNA, 120 bp, Artificial Sequence
  ENSG00000090905_16 (sequence is synthesized)
gtgcagcaaactcccagagtacatcatggggaagtggaaatggcgcaaattctggaggaagtcgaagaggatggggaacccctgcacaaaacactggcactaatttacccagcgttgagt

SEQ ID NO: 97737 - DNA, 120 bp, Artificial Sequence
  ENSG00000090905_17 (sequence is synthesized)
ggaacaaactgcctagcaatcagcattccaatgatagtgcaaatggcaatggtaagacgtttacaaatggatggaaatctactgaggaagaggatcagggttctgccacatctcagacaa

SEQ ID NO: 97738 - DNA, 120 bp, Artificial Sequence
  ENSG00000090905_18 (sequence is synthesized)
atgagcaaagcagtgtgtgggccaaaacaggaggtacagtggagagcgatggtagtacagaaagcactggacgccttgaggaaaaaggaactggggaaagtcagagtagagacagaagaa

SEQ ID NO: 97739 - DNA, 120 bp, Artificial Sequence
  ENSG00000090905_19 (sequence is synthesized)
aaattgatcagcacacattactccaaagcattgtaaacagaactgacttagatccacgtgtcctgtccaactctggttggggacagactcctattaagcagaatactgcctgggatacag

SEQ ID NO: 97740 - DNA, 120 bp, Artificial Sequence
  ENSG00000090905_20 (sequence is synthesized)
aaacatcacctagaggggaacgaaagactgacaatgggacagaggcctggggaagctctgcaacacagacttttaactcaggggcatgtatagataagactagccctaatggtaatgata

SEQ ID NO: 97741 - DNA, 120 bp, Artificial Sequence
  ENSG00000090905_21 (sequence is synthesized)
cctcatctgtatcagggtggggcgatcccaaacctgctctgaggtggggagattccaaaggctcaaactgccagggggggtgggaagatgattctgctgctacaggaatggtcaagagca

SEQ ID NO: 97742 - DNA, 120 bp, Artificial Sequence
  ENSG00000090905_22 (sequence is synthesized)
atcagtgggggaattgcaaagaggagaaggctgcatggaatgactcgcaaaagaataaacagggatggggtgatggacaaaaatcaagccaagggtggtctgtttctgccagtgataact

SEQ ID NO: 97743 - DNA, 120 bp, Artificial Sequence
  ENSG00000090905_23 (sequence is synthesized)
ggggagaaacttcaaggaataaccattggggtgaggccaataagaaatccagctcaggaggtagtgacagtgacaggtccgtttccggttggaacgaacttggtaaaactagttctttca

SEQ ID NO: 97744 - DNA, 120 bp, Artificial Sequence
  ENSG00000090905_24 (sequence is synthesized)
cttggggaaacaacataaatccaaataattcatcaggatgggatgaatcttctaaacctactccttcccagggatggggagaccctccaaagtctaatcagtctctaggttggggagatt

SEQ ID NO: 97745 - DNA, 120 bp, Artificial Sequence
  ENSG00000090905_25 (sequence is synthesized)
cgtcaaagccagtcagctctccagactggaacaagcaacaagacattgttggatcttggggaatcccaccagctacaggcaaacctcctggtacaggctggctggggggacctataccag

SEQ ID NO: 97746 - DNA, 120 bp, Artificial Sequence
  ENSG00000090905_26 (sequence is synthesized)
ccccagcaaaagaagaagaacccacaggctgggaggaaccatccccagaatctatacgtcgcaaaatggagattgatgatggaacttcagcttggggagatccaagcaaatacaactaca

SEQ ID NO: 97747 - DNA, 120 bp, Artificial Sequence
  ENSG00000090905_27 (sequence is synthesized)
aaaatgtgaacatgtggaacaaaaacgtcccaaatggcaacagccgttcagaccagcaagcacaggtacatcagctgctaacgcctgcaagtgccatctcaaacaaagaggcaagcagtg

SEQ ID NO: 97748 - DNA, 120 bp, Artificial Sequence
  ENSG00000090905_28 (sequence is synthesized)
gctctggctggggtgagccctggggggagccttctactccagccacaactgtggataatggtacttcagcatggggtaagcccatagacagtggtcccagctggggggaacccattgctg

SEQ ID NO: 97749 - DNA, 120 bp, Artificial Sequence
  ENSG00000090905_29 (sequence is synthesized)
cggcatccagcacatccacgtggggctccagctctgttggtccacaagcattaagcaaatctgggccaaaatctatgcaagatggctggtgtggtgatgatatgccattgcctggaaatc

SEQ ID NO: 97750 - DNA, 120 bp, Artificial Sequence
  ENSG00000090905_30 (sequence is synthesized)
gccccactggctgggaagaggaagaggatgtggagattggaatgtggaatagtaattcatctcaagagcttaactcatctttaaattggccaccatatacaaagaaaatgtcatcgaagg

SEQ ID NO: 97751 - DNA, 120 bp, Artificial Sequence
  ENSG00000090905_31 (sequence is synthesized)
gtctgagtggcaaaaaaaggagaagggaaaggggaatgatgaaaggtggaaacaaacaagaagaagcgtggataaatccatttgttaaacagttttcaaacatcagtttttcgagagact

SEQ ID NO: 97752 - DNA, 120 bp, Artificial Sequence
  ENSG00000090905_32 (sequence is synthesized)
caccagaggaaaatgtacaaagcaataagatggacctttctggaggaatgttacaagacaaacgaatggagatagataaacatagcctaaatattggtgattacaatcgaacggtcggga

SEQ ID NO: 97753 - DNA, 120 bp, Artificial Sequence
  ENSG00000090905_33 (sequence is synthesized)
aaggccctggttctcggcctcagatttccaaagagtcttccatggagcgcaatccttattttgataaggatggcattgtagcagatgaatcccaaaacatgcagtttatgtccagtcaaa

SEQ ID NO: 97754 - DNA, 120 bp, Artificial Sequence
  ENSG00000090905_34 (sequence is synthesized)
gcatgaagcttcccccttcaaatagtgcactacctaaccaggcccttggctccatagcagggctgggtatgcaaaacttgaattctgttagacagaatggcaatcccagtatgtttggtg

SEQ ID NO: 97755 - DNA, 120 bp, Artificial Sequence
  ENSG00000090905_35 (sequence is synthesized)
tcctccattactctcccctcaggttccagtttcattgctgaagtatgcaccaaacaacggtggcctgaatccactctttggccctcaacaggtagccatgctgaaccagctatcccagct

SEQ ID NO: 97756 - DNA, 120 bp, Artificial Sequence
  ENSG00000090905_36 (sequence is synthesized)
aaaccagctttctcagatctcccagttacagcgattgttagcgcagcagcaaagggcgcagagtcagagaagcgtgccttctgggaaccggccgcagcaagaccagcagggtcgacctct

SEQ ID NO: 97757 - DNA, 120 bp, Artificial Sequence
  ENSG00000090905_37 (sequence is synthesized)
tagtgtgcagcagcaaatgatgcaacaatctcgtcaacttgatccaaacctgttggtgaagcagcagactccaccatctcagcagcagccactccatcagccagccatgaagtctttcct

SEQ ID NO: 97758 - DNA, 120 bp, Artificial Sequence
  ENSG00000090905_38 (sequence is synthesized)
tgacaatgtcatgccccacactacacctgagctgcaaaaagggccatcaccaataaatgctttcagcaacttccctataggcttgaactcaaacttgaatgtaaatatggatatgaacag

SEQ ID NO: 97759 - DNA, 120 bp, Artificial Sequence
  ENSG00000090905_39 (sequence is synthesized)
tattaaagagccacagtcaagactaaggaagtggacgacagtggacagcatttctgtgaacacatctttggatcaaaactccagcaaacatggtgctatttcaagtggtttcaggctgga

SEQ ID NO: 97760 - DNA, 120 bp, Artificial Sequence
  ENSG00000090905_40 (sequence is synthesized)
agagtctccatttgttccctatgactttatgaacagcagtacttcaccagccagtcctccaggttcaataggagatggctggccacgtgccaaatcgcctaacggctctagcagtgttaa

SEQ ID NO: 97761 - DNA, 120 bp, Artificial Sequence
  ENSG00000090905_41 (sequence is synthesized)
ttggccaccagaatttcgtcctggtgagccatggaaaggttatccaaacattgaccctgaaactgacccttacgtcactcctggcagtgtcataaacaatctttcaattaatactgtgcg

SEQ ID NO: 97762 - DNA, 120 bp, Artificial Sequence
  ENSG00000090905_42 (sequence is synthesized)
ggaagttgaccacctcagggacaggaacagtgggtcatcctcatccttgaacaccacgctgccttcaactagtgcctggtcatccattcgtgcctccaactacaacgttcccctcagcag

SEQ ID NO: 97763 - DNA, 120 bp, Artificial Sequence
  ENSG00000090905_43 (sequence is synthesized)
tacagcacaaagcacttcagccagaaatagtgattccaaattgacatggtctcctggttcagttacaaacacctctctggctcatgagctgtggaaggtccctttgccacctaaaaacat

SEQ ID NO: 97764 - DNA, 120 bp, Artificial Sequence
  ENSG00000090905_44 (sequence is synthesized)
cactgctccgtcccgcccacctccgggactgactggtcagaagccacccttgtctacgtgggataattctccccttcgtataggtggaggatggggaaattctgacgccagatatacccc

SEQ ID NO: 97765 - DNA, 120 bp, Artificial Sequence
  ENSG00000090905_45 (sequence is synthesized)
aggttccagctggggtgagagcagctcagggagaataacaaattggcttgttctaaaaaaccttacacctcagatcgatggctcaactctgcgcactctgtgcatgcagcacggcccgct

SEQ ID NO: 97766 - DNA, 120 bp, Artificial Sequence
  ENSG00000090905_46 (sequence is synthesized)
gatcacattccacctgaacctccctcacggaaatgctctggtccgctacagttcaaaagaagaggtagtgaaggcacaaaagtctctgcacatgtgtgtactggggaacactactattct

SEQ ID NO: 97767 - DNA, 120 bp, Artificial Sequence
  ENSG00000090905_47 (sequence is synthesized)
tgctgagtttgccagtgaagaggagatcagtcgtttctttgcacaaagccagtctctgaccccttctcccggctggcagtctctcgggtccagccagagccggctgggctccctcgactg

SEQ ID NO: 97768 - DNA, 120 bp, Artificial Sequence
  ENSG00000090905_48 (sequence is synthesized)
ttcccactcattctccagccggaccgatctcaatcactggaatggtgctgggctgtcgggaactaactgtggagaccttcacggcacttcactctgggggaccccgcattattccacaag

SEQ ID NO: 97769 - DNA, 120 bp, Artificial Sequence
  ENSG00000090905_49 (sequence is synthesized)
cctgtggggtcccccaagcagcagcgacccccgaggaattagcagcccatctcccattaacgcttttctttctgttgaccacctgggtgggggtggagagtccatgtaacagtgtagatg

SEQ ID NO: 97770 - DNA, 120 bp, Artificial Sequence
  ENSG00000090905_50 (sequence is synthesized)
cagactcaccgaccgggacctcagacgcgagggaaaggagcactaagtggggctcgccgcctgcagccaggggccgcctgtgggaacagctattctctgcacattttccactttgttttc

SEQ ID NO: 97771 - DNA, 120 bp, Artificial Sequence
  ENSG00000090905_51 (sequence is synthesized)
cccaaaacatatcagtttgaatacttgaatcatgcaggccaatattataatgtgaaaaggtatctactctatttacactcccaaatagcgccatacatgctaaaccgtagagaatgagct

SEQ ID NO: 97772 - DNA, 120 bp, Artificial Sequence
  ENSG00000090905_52 (sequence is synthesized)
cgcttgtgtctattcatcatgtttagcctttggattctttttttttttttccttctattcctccccaacccccccccccgcccctttttttctctcttgcaaaaccattttttgggctga

SEQ ID NO: 97773 - DNA, 120 bp, Artificial Sequence
  ENSG00000090905_53 (sequence is synthesized)
taacgtatgagcttttccctttgcactgaatgatgttctctccgtctcatcggcagtatggggggcagctgtcccagtgtcaatgtttactcaagggtgttcttaggaggcgtgcgctct

SEQ ID NO: 97774 - DNA, 120 bp, Artificial Sequence
  ENSG00000090905_54 (sequence is synthesized)
ctactatgccttgatgttgcctaccttattgtggtatcgtggagtttaaaagatcaagttaggatgctgacttaggattattaatgaaagtgttgcaccagttttttcatgttgtaaaac

SEQ ID NO: 97775 - DNA, 120 bp, Artificial Sequence
  ENSG00000090905_55 (sequence is synthesized)
taaagaatttcgctctgcagtttgaaaaactgtggccacagctgtgacttgcagcccacctgccacccaggacgggccctgcactttgaataggctttccattttgttttggaggttctc

SEQ ID NO: 97776 - DNA, 120 bp, Artificial Sequence
  ENSG00000090905_56 (sequence is synthesized)
actttgaaccttcttgtttacagatttttttgtttgttttttgagaaaaaaaaatgtttactcttccatcatttaaaaaaaatgtaaaagacaaaaaaaaaatggaggatgatttaaaag

SEQ ID NO: 97777 - DNA, 120 bp, Artificial Sequence
  ENSG00000090905_57 (sequence is synthesized)
atgctttctatctctgggaaaaaggagcagcatttggccatgttcttttgtttttctattcctgtcccaaatcaaagagcatggttctcaggaaaaccagttccccagtttaaaaaaaaa

SEQ ID NO: 97778 - DNA, 120 bp, Artificial Sequence
  ENSG00000090905_58 (sequence is synthesized)
aaaaaaaattccttgtagtttcttagaggaaaaaaagaaaaaccccaacttttagcactgatactacatattgctctgttaaagaattttctctgccaaaaaaaaagaaaaaacaaaaaa

SEQ ID NO: 97779 - DNA, 120 bp, Artificial Sequence
  ENSG00000090905_59 (sequence is synthesized)
acgcttaaagctggagtttgacattctgctttcagatgctgtctttttattagtgagtgatgatggtttgctaataatcaataggtaataattttttgtaatcccatcaagtggctccat

SEQ ID NO: 97780 - DNA, 120 bp, Artificial Sequence
  ENSG00000090905_60 (sequence is synthesized)
atgtttctgctctctcgtgactgtgttaatgtttaactgttgtaccttaaagccgaaatcagtaactatgcatactgtaaccaaggtattgggcttacagagttgtttgttgtataaaga

SEQ ID NO: 97781 - DNA, 120 bp, Artificial Sequence
  ENSG00000090905_61 (sequence is synthesized)
aaattttaaatgttgttgcaaactaacgagttacaccattttaaactttctttcctcccccctttttttgcccacaaatggtattataatgcttgcttagtcaaagaagagagactaaac

SEQ ID NO: 97782 - DNA, 120 bp, Artificial Sequence
  ENSG00000090905_62 (sequence is synthesized)
aagggtaaaaattttaacagtacagaatttgccatcatatcattgccttgattctaactgtttgtgtcctaagatgcaaaagaagtcagtggcttttaactgtttacaaatagaatgtga

SEQ ID NO: 97783 - DNA, 120 bp, Artificial Sequence
  ENSG00000090905_63 (sequence is synthesized)
ttgtaaaatgtacagtttggttgtgtttgaattatgaaatttcttcagatataataaaccatgactttttggctgctcaacattaattgtctcctttttgtgaatttatttgtaggctct

SEQ ID NO: 97784 - DNA, 120 bp, Artificial Sequence
  ENSG00000090905_64 (sequence is synthesized)
tttttataatgaaagtttcaaagttgctatgtatgagggttctcatagagcaaccgattaaaaatctaagcaaatatttgaacattttatctgaactcatcacaatttcaccctgaaata

SEQ ID NO: 97785 - DNA, 120 bp, Artificial Sequence
  ENSG00000090905_65 (sequence is synthesized)
atgtgagaacaatgggaaactgtagcttgctccttcccaccctctctgagcatctttgggatcttgttgctcaaaactcttctgtgacttcatcttccccaccatttgtgcccatctcaa

SEQ ID NO: 97786 - DNA, 120 bp, Artificial Sequence
  ENSG00000090905_66 (sequence is synthesized)
gcctcagcaagaaaccatgtggaacatgaagcttaatgacttgacagtgtactagtgttaaactctcatacctctgttacaaagcgagaaacgccacacccggactggccttttcttccc

SEQ ID NO: 97787 - DNA, 120 bp, Artificial Sequence
  ENSG00000090905_67 (sequence is synthesized)
ccttcacggccctcgcttctccctgcaggagctcgggggcgaaacctgtgtatggatttcagtgtatgacttcagatcatgctccaacttgccaggtgtgagctaatgttgtcggacacc

SEQ ID NO: 97788 - DNA, 120 bp, Artificial Sequence
  ENSG00000090905_68 (sequence is synthesized)
ttactataagcaaatgttattcagtgcgttcaatgtatattgacttccatactggtttttccaaaaaccaaaggtagctttgaaaaaccatgtctggaaatgtttggagcgttaagctga

SEQ ID NO: 97789 - DNA, 120 bp, Artificial Sequence
  ENSG00000090905_69 (sequence is synthesized)
ttgaccttctgaccttggggctttgagtagtatataattcataactgcgttaattgtattgttaaagtgtttgggagttttttgcgcttgttatgtggaaataaagtgtttgatttaaaa

SEQ ID NO: 97790 - DNA, 120 bp, Artificial Sequence
  ENSG00000090905_70 (sequence is synthesized)
tttatttagcctctgctgtgtgccaggtactgtgcttggtgctggggattcaaatacactaagatatgagtttcacctttcgggagctcacagtctagtatggggcattaggagagcttc

SEQ ID NO: 97791 - DNA, 120 bp, Artificial Sequence
  ENSG00000090905_71 (sequence is synthesized)
atagaagtgtcagcttgaatttggaagatgcttgggatgggatgtgttaaggaagatagtagcccaacataaccaaaatgtagaatttttaggaagaagtgacaagagatctggctctgt

SEQ ID NO: 97792 - DNA, 120 bp, Artificial Sequence
  ENSG00000090905_72 (sequence is synthesized)
agttgaggcagattgtagtgtcttcagtagcatgccaaggaatttgaactttattttgtgtaaaatatggaaccaacgaaattgagtagaaaacaacatcagtggggtttttaaattact

SEQ ID NO: 97793 - DNA, 120 bp, Artificial Sequence
  ENSG00000090905_73 (sequence is synthesized)
aggttatcagccagccaccttctgtttactagtctatttcaagttaattatttcagtaaaataacagtatctcctaattgcgacttcatttgtgaggaatgcaaaatttatgaaatggaa

SEQ ID NO: 97794 - DNA, 120 bp, Artificial Sequence
  ENSG00000090905_74 (sequence is synthesized)
gtgtatttttcacatacccttgtcttggctgaagtcatttcagtttggaaagtgagtgttttgcttttgttgtaaatttatctgaaaccaattgggttgtcttcctgtttgataacagtc

SEQ ID NO: 97795 - DNA, 120 bp, Artificial Sequence
  ENSG00000090905_75 (sequence is synthesized)
aagagtcttccatggagcgcaatccttattttgataagaatggcaatcccagtatgtttggtgttggaaacacagcagcacaaccccggggcatgcagcagcctccagcacaacctctta

SEQ ID NO: 97796 - DNA, 120 bp, Artificial Sequence
  ENSG00000090905_76 (sequence is synthesized)
gttcatctcagcctaatctccgtgctcaagtgcctcctccattactctcccctcaggtaaataagctttccttacattctcctgtttacctgcaaaaaggatcttgcatgattttgtatt

SEQ ID NO: 97797 - DNA, 120 bp, Artificial Sequence
  ENSG00000090905_77 (sequence is synthesized)
tgaataaaatggctaactaagcattatcatatttattggcatctttgagattcagctagttttgaattaactattaaaaaaggttgtagtaaggaaaagtcaaggataatttaaatccaa

SEQ ID NO: 97798 - DNA, 120 bp, Artificial Sequence
  ENSG00000090905_78 (sequence is synthesized)
aatttaccattttcttctttaaaacattcttgagagtaggacaaaagcaaagtaaaattgactagtttaagatgcacctctgtcatcttttacttaacccacgaaaaagtgtaagtgagt

SEQ ID NO: 97799 - DNA, 120 bp, Artificial Sequence
  ENSG00000090905_79 (sequence is synthesized)
ggtcagttagtaagacagagacaaagactataacccccaatgaatagtccacaaatttaactgctctattgacaactgaaaacacacagtacgtgtagttagtgtgagttattttatcaa

SEQ ID NO: 97800 - DNA, 120 bp, Artificial Sequence
  ENSG00000090905_80 (sequence is synthesized)
cccagatcggcgtgcttagactgacgtgtgcggatgagaaggaatgcagaagtgattgaggaaaagttaagcatgaagtcttgggcaagtgagtgtgtcagcctgttacctatgccttta

SEQ ID NO: 97801 - DNA, 120 bp, Artificial Sequence
  ENSG00000090905_81 (sequence is synthesized)
cctatgcctttatgctcaagcagcagaggtagaagtgagccccattgaccagcatgaagaattatattaaaaactttaggctgggcgcagtggcacatgccagtaatcccagcactttgg

SEQ ID NO: 97802 - DNA, 62 bp, Artificial Sequence
  ENSG00000090905_82 (sequence is synthesized)
acaacaacaaaaactttaattcgctgtttctcgtaagttgtgtcagggagtaacttgcagta

SEQ ID NO: 97803 - DNA, 120 bp, Artificial Sequence
  ENSG00000090905_83 (sequence is synthesized)
gctgtttctcgtaagttgtgtcagggagtaacttgcagtattttcattcatacataggagttaccagaagtgcttctatggcctgctttctcctacctgagttgcagtagctttgtgatt

SEQ ID NO: 97804 - DNA, 120 bp, Artificial Sequence
  ENSG00000090905_84 (sequence is synthesized)
gctttctcctacctgagttgcagtagctttgtgatttgtcttaaagcttaaagcacttttaaatgttactgtttaaaaataaacatgaatctggcgggtacggtggctcatgcctgtaat

SEQ ID NO: 97805 - DNA, 73 bp, Artificial Sequence
  ENSG00000090905_85 (sequence is synthesized)
gcactttgggaggctgaggtgggcaggtaacgaggtcccaggagatggagaccgaaattagccgggtatggcg

SEQ ID NO: 97806 - DNA, 120 bp, Artificial Sequence
  ENSG00000090905_86 (sequence is synthesized)
cctgctgaccctttgatttcaaatgtgcagaggggtgtctcggaacaaaagccagaactggaacccatatggaccttgacagagaccaggccttcagccctggcggaactttgcatgaat

SEQ ID NO: 97807 - DNA, 120 bp, Artificial Sequence
  ENSG00000090905_87 (sequence is synthesized)
ttttacctctgacttgataaaccagtatacttcatagcgtaattttcacactaatattttaaaaccttttatataatataaagtgttacaatccactaccaaatcttattactggatttt

SEQ ID NO: 97808 - DNA, 120 bp, Artificial Sequence
  ENSG00000090905_88 (sequence is synthesized)
gaagttcactgtctttttatgtctcaatttatcatagaggttgcatttatatttttcttcttaatcccatgaaatatgtttggctctttttgtgtgctctagaattaacactaatccgat

SEQ ID NO: 97809 - DNA, 120 bp, Artificial Sequence
  ENSG00000090905_89 (sequence is synthesized)
ctcttctgttttctacctgtttcctgttgatgctggaatgtcatgtgacttctcttctgttcctgcaatgatttctcccttccacttgtttgcttggctggtgttgcacatctttctgtc

SEQ ID NO: 97810 - DNA, 120 bp, Artificial Sequence
  ENSG00000090905_90 (sequence is synthesized)
atgagaagatctcaaaaagatgcagccttttgtggctcactgccctcctctgtggtgaactgggagccattctgagctcactgtcgccagaggcagagccccctgccataggagttaatg

SEQ ID NO: 97811 - DNA, 120 bp, Artificial Sequence
  ENSG00000090905_91 (sequence is synthesized)
cctggccatggctagggcgagctgaaattctgggcctagggagaaagcctcccatgtagaagtgcaaggaagtgaaggaagtcaagaggccaggtgatctgctaagtaactgtagttggg

SEQ ID NO: 97812 - DNA, 120 bp, Artificial Sequence
  ENSG00000090905_92 (sequence is synthesized)
atttttcatttggctgaatttgcctattgccttgccatatagcttatgaagtgcttttacatgttttacataagtcatttgatcctcacaaccatctaagataggacactgatgaatttg

SEQ ID NO: 97813 - DNA, 120 bp, Artificial Sequence
  ENSG00000090905_93 (sequence is synthesized)
agactggaaaaggtggtgacttgcccaaagttgcgataactagtaagcgacagagtaaggacttaagtttaggtcttccagttccaaaccccatgttcttcccactggaccatgctgttt

SEQ ID NO: 97814 - DNA, 120 bp, Artificial Sequence
  ENSG00000090905_94 (sequence is synthesized)
caaaccttggatctgctgttaaggtgttaaacagccagtcagaaagcagtgctttaacaaatcaacagccacaaaataacggagaggtgcagaacagcaaaaaccagtcagtgaataagt

SEQ ID NO: 97815 - DNA, 120 bp, Artificial Sequence
  ENSG00000090905_95 (sequence is synthesized)
agcagatcctggactcacatcaagatctgtctgactccaaagatatgcttgtaaccaccatgctgtgctttggcaacatacaggatgtgattggtaatgaggaagaggacacaaatatat

SEQ ID NO: 97816 - DNA, 120 bp, Artificial Sequence
  ENSG00000090905_96 (sequence is synthesized)
attattcagtacataaacatgaagttcttcatccttggtccctaagttttctttattgtcccttattccactgcacctccttaccttctatgctgatgacttcttttcccacactttcta

SEQ ID NO: 97817 - DNA, 120 bp, Artificial Sequence
  ENSG00000090905_97 (sequence is synthesized)
cacgcacatccatgacatgattctactgaaagagccctgacgtagatcaggacaggggaggctgtgctctccaatagacgtacacatgctgtggttaaatgagtgcatgtgccttgaaag

SEQ ID NO: 97818 - DNA, 120 bp, Artificial Sequence
  ENSG00000090905_98 (sequence is synthesized)
tgtgatggctccggtgatgttggaggcggcatgtgactcccagggctacgtgggttcaaaaacaatttaatacaaaaacacaagcaggttcccctcctctcctttgcctttggtctggct

SEQ ID NO: 97819 - DNA, 120 bp, Artificial Sequence
  ENSG00000090905_99 (sequence is synthesized)
ctctgctgggggcccccaggagcggtgccccatcattttgcagcccactgactcccagcctggtgtgaaaactgaggcccggagaggtgatgtgatttgcctaaagtcatgcaactagtg

SEQ ID NO: 97820 - DNA, 120 bp, Artificial Sequence
  ENSG00000090905_100 (sequence is synthesized)
gcagagccaggcctagacgccaggtgtcctggctctcaagacattccgctgcccgaggaatggaacagggatttagtgcaagaagaagaacagttgatggaagaaaagaaaaagaaaaaa

SEQ ID NO: 97821 - DNA, 120 bp, Artificial Sequence
  ENSG00000090905_101 (sequence is synthesized)
tatattcacattcagtgagatgatttcagttgtaaaaacttgcaagtaatttataaagaatagcttctataatactaattgtattaactgaaccatcctcttagagtattagtgtaaatt

SEQ ID NO: 97822 - DNA, 120 bp, Artificial Sequence
  ENSG00000090924_0 (sequence is synthesized)
agatgtggcgccgccgccgtcacacgagccccgtgacacccagccgggagcccgaggggtccagaggctcggacccgggcgtccggaatttctgcaccgcatcctgagagaccccgaggt

SEQ ID NO: 97823 - DNA, 120 bp, Artificial Sequence
  ENSG00000090924_1 (sequence is synthesized)
ccagaccccggcgcccaggctggaggacttgagccatccaggtgcgcagcgccccctcctggagcagccgggagcccggacgtcaccccgcgagaccctggaggccgagcgccccgtatc

SEQ ID NO: 97824 - DNA, 120 bp, Artificial Sequence
  ENSG00000090924_2 (sequence is synthesized)
cccgtttcaagaactcaggatccaggaccgcagactccctccagggctccgatcccaagaccccgcgttggaggaacttgagatccggacttctaagcgccccaaccagtttcgggctgc

SEQ ID NO: 97825 - DNA, 120 bp, Artificial Sequence
  ENSG00000090924_3 (sequence is synthesized)
agcggccatcgcttcaaggggacccaggactttgggacccccctgtgctcccacctggagggagtttcattcctgcccctagaattaggggaactcagaaatccatcccccaccccacgg

SEQ ID NO: 97826 - DNA, 120 bp, Artificial Sequence
  ENSG00000090924_4 (sequence is synthesized)
ccctacctagaagacttaggaatgtgggtccccagcgccgccatctgagactccagagtcgaggctcctagcatcccctacgtagaacactgagaaattccgactgcgggaccccagtct

SEQ ID NO: 97827 - DNA, 120 bp, Artificial Sequence
  ENSG00000090924_5 (sequence is synthesized)
ccgagagaccccagattctattcctggagcctgagagcccgaagttcacgcccctgagtctgggctccgcacctccctggggaccgcgtcggggtcgcgcaggagccgggctgcctcgag

SEQ ID NO: 97828 - DNA, 120 bp, Artificial Sequence
  ENSG00000090924_6 (sequence is synthesized)
ccggggctggaggctccccgggaggactctgctgggccgctcagccatgcctgagggagcccaaggactgagcctctccaaacctagcccaagcctcgggtgtggccgaagaggtgaagt

SEQ ID NO: 97829 - DNA, 120 bp, Artificial Sequence
  ENSG00000090924_7 (sequence is synthesized)
gtgtgactgtggcaccgtgtgtgagactcggacagctcctgcagcccccaccatggcctccccccgaggttctgggagctccacatccctgagcacagtgggctctgagggggatccagc

SEQ ID NO: 97830 - DNA, 120 bp, Artificial Sequence
  ENSG00000090924_8 (sequence is synthesized)
ccctgggcccactccagcctgctcagcctccaggccagagccccttccagggcctcccatccgcctacatctctctccggtggggatcccaggttcagccagaccctcaaggctggagcg

SEQ ID NO: 97831 - DNA, 120 bp, Artificial Sequence
  ENSG00000090924_9 (sequence is synthesized)
tgtggcccgggagatcgtggagacagaacgggcctatgtcagggacctccgcagcatcgtggaggactacctgggccctctgctggacggcggggtcctggggctgagcgtggagcaggt

SEQ ID NO: 97832 - DNA, 120 bp, Artificial Sequence
  ENSG00000090924_10 (sequence is synthesized)
gggcacgctgtttgccaacattgaggacatctacgagttcagcagcgagctcctggaggacttggagaacagcagcagcgccgggggtattgccgagtgcttcgtgcagaggagcgagga

SEQ ID NO: 97833 - DNA, 120 bp, Artificial Sequence
  ENSG00000090924_11 (sequence is synthesized)
ttttgacatctacacattgtactgcatgaactacccgagctccctggccctgctccgggagctgtcgttgtctccgccagcagccctgtggctgcaggagcgccaggcccagcttcgcca

SEQ ID NO: 97834 - DNA, 120 bp, Artificial Sequence
  ENSG00000090924_12 (sequence is synthesized)
ctcgctgcccctgcagagcttcctgctgaaacctgtccagcgcattctcaagtaccatctgctgctgcaggaactagggaagcactgggcggagggcccaggcactgggggtcgcgagat

SEQ ID NO: 97835 - DNA, 120 bp, Artificial Sequence
  ENSG00000090924_13 (sequence is synthesized)
ggtggaggaagctattgtgtccatgacagcggttgcctggtacatcaacgacatgaagcgcaagcaggagcatgcagcgcgcctccaggaagtgcagcggcggctgggtggctggaccgg

SEQ ID NO: 97836 - DNA, 120 bp, Artificial Sequence
  ENSG00000090924_14 (sequence is synthesized)
accagagctcagtgcttttggggaactggtgttggagggcgcgttccgaggaggcggagggggtggcccccggctacgagggggtgagcggctgctcttcctgttctctcggatgctgct

SEQ ID NO: 97837 - DNA, 120 bp, Artificial Sequence
  ENSG00000090924_15 (sequence is synthesized)
ggtggccaagcgcagggggctggagtacacctacaaaggccacatcttctgctgcaacctgagcgtgagcgagagtccccgagaccctctagggttcaaggtgtctgatctgaccattcc

SEQ ID NO: 97838 - DNA, 120 bp, Artificial Sequence
  ENSG00000090924_16 (sequence is synthesized)
caagcacagacacctgctccaggccaagaaccaagaagagaagaggctgtggattcactgtctccagcgcctcttctttgagaaccaccctgcctccatccctgccaaggcaaagcaagt

SEQ ID NO: 97839 - DNA, 120 bp, Artificial Sequence
  ENSG00000090924_17 (sequence is synthesized)
tctccttgaaaacagcctgcattgtgcccccaaaagtaagcctgtcctagagcccctgacacccccacttgggtctcctcgacctcgagatgctagaagttttacccctgggcgaaggaa

SEQ ID NO: 97840 - DNA, 120 bp, Artificial Sequence
  ENSG00000090924_18 (sequence is synthesized)
cacagctccatctcctgggccctctgtgattcgccgaggccgcaggcagtctgagccggtgaaggacccttatgtcatgttcccacagaacgctaagcctggattcaagcacgctggcag

SEQ ID NO: 97841 - DNA, 120 bp, Artificial Sequence
  ENSG00000090924_19 (sequence is synthesized)
cgaaggggaactctaccctccagaatctcagccaccagtttcaggctctgcaccccctgaggacctggaggatgctggacccccaacactggacccctctgggacctcaatcactgaaga

SEQ ID NO: 97842 - DNA, 120 bp, Artificial Sequence
  ENSG00000090924_20 (sequence is synthesized)
aatcctggaactgctgaatcagcgaggccttcgagatccagggccgtccacccatgacattcccaagttccccggagactcccaggtgcctggcgacagcgaaaccctcacattccaagc

SEQ ID NO: 97843 - DNA, 120 bp, Artificial Sequence
  ENSG00000090924_21 (sequence is synthesized)
cctgcccagccgggactcttcagaagaggaggaggaggaagaggaagggctggagatggatgaacgggggccttccccactccacgtcctggaagggctcgaaagttccattgcagctga

SEQ ID NO: 97844 - DNA, 120 bp, Artificial Sequence
  ENSG00000090924_22 (sequence is synthesized)
aatgcccagcattccctgccttaccaaaattcctgacgtgcccaaccttcctgaaattcccagccgctgtgaaattcccgaaggttctcgccttcctagtctctctgacatttccgatgt

SEQ ID NO: 97845 - DNA, 120 bp, Artificial Sequence
  ENSG00000090924_23 (sequence is synthesized)
ttttgagatgccctgccttccagccatacctagtgtccccaacacccccagtctgtctagcactcccaccctctcctgtgactcctggctccaagggcctctgcaggaaccagctgaggc

SEQ ID NO: 97846 - DNA, 120 bp, Artificial Sequence
  ENSG00000090924_24 (sequence is synthesized)
tccagccaccaggagagaactgttttctgggagcaatcctgggaaactgggagagccgccttcaggaggcaaggcagggccagaggaggatgaagaaggggtatcattcacagacttcca

SEQ ID NO: 97847 - DNA, 120 bp, Artificial Sequence
  ENSG00000090924_25 (sequence is synthesized)
gccccaggatgtcacccaacatcagggattcccagatgagctggcattccgctcttgctcagaaatccggagcgcctggcaggcattggaacagggacagctggcccggccaggcttccc

SEQ ID NO: 97848 - DNA, 120 bp, Artificial Sequence
  ENSG00000090924_26 (sequence is synthesized)
agagccactgctgatcctggaggattcggatctgggtggagacagcgggagcgggaaggcaggagccccgagttcagaaaggacggcgtcccgagtgcgagagctggcccggctttacag

SEQ ID NO: 97849 - DNA, 120 bp, Artificial Sequence
  ENSG00000090924_27 (sequence is synthesized)
cgagcggatccagcagatgcagcgggcggagactcgggcatcagccaatgccccgcgccgccggcctcgggttctggcccaaccccagccatccccctgtctgccccaggagcaggcaga

SEQ ID NO: 97850 - DNA, 120 bp, Artificial Sequence
  ENSG00000090924_28 (sequence is synthesized)
gccagggctcctgcctgcctttggacacgtgctggtatgtgagctggccttcccactgacatgtgcccaggagtctgtccccctgggtcctgctgtctgggttcaagctgccataccttt

SEQ ID NO: 97851 - DNA, 120 bp, Artificial Sequence
  ENSG00000090924_29 (sequence is synthesized)
gtcaaagcagggaggcagcccggatggccagggtctacatgtttccaatttgcctaagcaagaccttccgggcatccacgtttcagctgctacccttttgcctgagcaaggaggttcccg

SEQ ID NO: 97852 - DNA, 120 bp, Artificial Sequence
  ENSG00000090924_30 (sequence is synthesized)
gcatgtccaggctccagccgccacacctttgcccaagcaagaaggccccctgcacctccaggtgccggctcttacaactttctctgatcaaggccacccagaaatccaagttccagccac

SEQ ID NO: 97853 - DNA, 120 bp, Artificial Sequence
  ENSG00000090924_31 (sequence is synthesized)
cactcctttgcctgagcatagaagtcacatggttataccagctccatccaccgccttttgtcctgagcagggacactgtgcggacatccacgttcccaccactccagctttgcccaagga

SEQ ID NO: 97854 - DNA, 120 bp, Artificial Sequence
  ENSG00000090924_32 (sequence is synthesized)
gatttgttctgatttcacagtttcagtcaccacccctgtgcccaagcaagaaggtcacctagacagcgagagcccaaccaatatcccactgacaaagcaaggaggttccagggatgttca

SEQ ID NO: 97855 - DNA, 120 bp, Artificial Sequence
  ENSG00000090924_33 (sequence is synthesized)
accctgtctgcagtcaacccatccagcctttgtcttggcatggaagcagcctggatccccagggcccaggcgacaccctaccacccttgccatgtcacctcccagaccttcagattccag

SEQ ID NO: 97856 - DNA, 120 bp, Artificial Sequence
  ENSG00000090924_34 (sequence is synthesized)
gtacctcacctttgcctgcacatggaagccacctggaccatcggatcccagccaacgccccactgtctttgtcccaggagctcccagacactcaggttccagctaccacacctttgcccc

SEQ ID NO: 97857 - DNA, 120 bp, Artificial Sequence
  ENSG00000090924_35 (sequence is synthesized)
tgccacaagtcctcacagacatctgggtccaagccctcccaacttcacccaagcagggaagcctcccagacatccagggtccagcggctgcacctccacttccggagccaagccttacag

SEQ ID NO: 97858 - DNA, 120 bp, Artificial Sequence
  ENSG00000090924_36 (sequence is synthesized)
atacacaggtccaaaaactcacaccttcgttggagcagaagagcctcatagatgcccatgttccagctgccacacctttacctgagagaggaggctctctagacattcagggcctctcac

SEQ ID NO: 97859 - DNA, 120 bp, Artificial Sequence
  ENSG00000090924_37 (sequence is synthesized)
ccaccccagttcagaccaccatggttttgtccaaaccaggaggctccttagcctctcacgttgccaggttggagtcttcagacttgacgccacctcatagtcccccaccttccagccgtc

SEQ ID NO: 97860 - DNA, 120 bp, Artificial Sequence
  ENSG00000090924_38 (sequence is synthesized)
agctcctgggccccaatgcagctgccctctccagatacctggcagcctcatatatcagccagagcctggctcggcggcaggggcctgggggaggggcccccgcagcctcccggggctcct

SEQ ID NO: 97861 - DNA, 120 bp, Artificial Sequence
  ENSG00000090924_39 (sequence is synthesized)
ggtcctctgctcccacgtcacgggcatcttcgccgcccccccagccccagccaccacctcccccagccaggcggctcagctatgccacgacggttaacatccacgtgggcgggggtgggc

SEQ ID NO: 97862 - DNA, 120 bp, Artificial Sequence
  ENSG00000090924_40 (sequence is synthesized)
ggctgcggccagccaaggcccaggtccggttgaaccaccctgctctcttggcctccacacaggaatctatgggccttcacagggcccagggggctcctgatgcccccttccacatgtgag

SEQ ID NO: 97863 - DNA, 120 bp, Artificial Sequence
  ENSG00000090924_41 (sequence is synthesized)
ccaggacatgaggcttccctgaagcaaggatttcagccagatgccatagaccctcagaacttgacctggaagtccagacactgaacgcaggcctcaaaactgctgcggccttccaactcc

SEQ ID NO: 97864 - DNA, 120 bp, Artificial Sequence
  ENSG00000090924_42 (sequence is synthesized)
tggtatctgcatcggcgaatggcccttcttgccttgatccacagggatggggaagggaggaatgtcattaatgttttgttaatactgattctttcatgcaatgatgtgtattttcccatt

SEQ ID NO: 97865 - DNA, 120 bp, Artificial Sequence
  ENSG00000090924_43 (sequence is synthesized)
ctggaggctgtgggagatgacaagacaatgaatgggaaggtctgacacagaacaaatcagcggttctgaaagcttggggaatctcagactcctttgagaattattggaaaatggacccac

SEQ ID NO: 97866 - DNA, 120 bp, Artificial Sequence
  ENSG00000090924_44 (sequence is synthesized)
tataacttggcgtgtgtgtgaactgcttgatgcccatccaggaaagccaagttaagaagctttgcttcaagtagacactagaaatccattcccttggcaatttatacagttcacgtctcc

SEQ ID NO: 97867 - DNA, 120 bp, Artificial Sequence
  ENSG00000090924_45 (sequence is synthesized)
caccatccgttcatctcacccaccctgccatctctccacctatccatctggctattgctccatctagctttcccgctccatctacccatcttccaatccatcatctcacgtatctgcctt

SEQ ID NO: 97868 - DNA, 120 bp, Artificial Sequence
  ENSG00000090924_46 (sequence is synthesized)
gcttatccaactgtctgccttattcacccacccatccctttatcattctaaccccatctggcattccatccctccatttatccatcttcccacttacccatcttctccatccagcactcc

SEQ ID NO: 97869 - DNA, 120 bp, Artificial Sequence
  ENSG00000090924_47 (sequence is synthesized)
gttcatcagtccgtctctccctccatatttccatctgtccattcatccactcattttgccatccatacatattcacccagccatctcccaatccatcgacataccccatccctccctcac

SEQ ID NO: 97870 - DNA, 120 bp, Artificial Sequence
  ENSG00000090924_48 (sequence is synthesized)
tggactctccggggtcttagtactatgatacttcagagacaattccatgctgatacgggggagatcaattttggggctctgggataagtctgtcccacatctgtctgatttcccttggca

SEQ ID NO: 97871 - DNA, 120 bp, Artificial Sequence
  ENSG00000090924_49 (sequence is synthesized)
tccttcccgtcagttcctcttgaatatcccagttcttgtacccactcacatacctcagatcccttcactcctccccgcagtttgcagcctctacaattcatccacatgctccctccccca

SEQ ID NO: 97872 - DNA, 120 bp, Artificial Sequence
  ENSG00000090924_50 (sequence is synthesized)
gcaaaataattcaggtcgtggagacaaaaggcttttatgttaggttctgtctgcccccttgttccagcagtggtatgcccagtgagaggcacaatttaaacggtttctttggtgatgata

SEQ ID NO: 97873 - DNA, 120 bp, Artificial Sequence
  ENSG00000090924_51 (sequence is synthesized)
ttagctactttcatcaaatacttagcctcttgtgctttagcacattatttatgtaagctcccctaggattctctgaagcaccctggtgtcctggctgtgaattcaagtcccatctttact

SEQ ID NO: 97874 - DNA, 120 bp, Artificial Sequence
  ENSG00000090924_52 (sequence is synthesized)
tatttggtgtgggtcctccctctgagccggttttctcatctacaaaatgaagacaacagtacttccctcctgggatcattgaaagatttagggagcatatccttccacttcccaaacata

SEQ ID NO: 97875 - DNA, 120 bp, Artificial Sequence
  ENSG00000090924_53 (sequence is synthesized)
tttgaacctctgacttgcttaggagcatcattcaaatcacagatcccccagtatctagtcccaacctattgaatcaggatccccagggaaggaggagcttgggaatctgatttttttttt

SEQ ID NO: 97876 - DNA, 60 bp, Artificial Sequence
  ENSG00000090924_54 (sequence is synthesized)
ccccagggaaggaggagcttgggaatctgatttttttttttttttttagataaagtctca

SEQ ID NO: 97877 - DNA, 75 bp, Artificial Sequence
  ENSG00000090924_55 (sequence is synthesized)
tgggttcaagcaattctcatgcctcagcttcccgaccgttgttgttgttgttgttttgtttttgagacagagtct

SEQ ID NO: 97878 - DNA, 64 bp, Artificial Sequence
  ENSG00000090924_56 (sequence is synthesized)
gcattacaggcgtgagccatcattcctggctgggaatccgaagcatgatctcggctcactgcaa

SEQ ID NO: 97879 - DNA, 80 bp, Artificial Sequence
  ENSG00000090924_57 (sequence is synthesized)
tagctgggattgtagtagagacgggatttcgccatattggccaggccatagtggtcttggactcctgacctcaggtgatc

SEQ ID NO: 97880 - DNA, 120 bp, Artificial Sequence
  ENSG00000090924_58 (sequence is synthesized)
cacctcggcctcccaaagtgttgggtttacaggcgtgagctaccataccctgcccaggaatctgaatttttagcaatcagttagcagcaaataagctgagatttcctgggtactaagcac

SEQ ID NO: 97881 - DNA, 120 bp, Artificial Sequence
  ENSG00000090924_59 (sequence is synthesized)
atactatgagcattacagccgctttatataagctcgttcactgtcctcattacattcctaatatgcaagtgagcatgttttttaatcctcagtctagaggtgaggaaactgaggcaggca

SEQ ID NO: 97882 - DNA, 120 bp, Artificial Sequence
  ENSG00000090924_60 (sequence is synthesized)
cagagaggctaagggatttgcctagtcgcacagctaggaaggtgcagcactgagactcgaatccacacagcttggcttaagtctaccattaaatttgcctgtcctggccaggtgcggtgg

SEQ ID NO: 97883 - DNA, 76 bp, Artificial Sequence
  ENSG00000090924_61 (sequence is synthesized)
gttgaggccaaggcaggtggatcacttgaagtgaggagttcgagaccacaccagcctggccaacatggtgaaatcc

SEQ ID NO: 97884 - DNA, 120 bp, Artificial Sequence
  ENSG00000090924_62 (sequence is synthesized)
tccagcctgggagacgagcaaaactgtctcaaaaaaataaaatgaaatacataaataaatgtgcctatcctgtgccgggtgctgttcttgccagtggggatacatgagagaacactgcct

SEQ ID NO: 97885 - DNA, 120 bp, Artificial Sequence
  ENSG00000090924_63 (sequence is synthesized)
tgcccgcatgaggcttgtggcctggtactgtgcacacctcaggggattctgataattagctgagcacagttgccagcacagggcctggctcaataaatattagctgctggcttctgctca

SEQ ID NO: 97886 - DNA, 120 bp, Artificial Sequence
  ENSG00000090924_64 (sequence is synthesized)
ctgcaggaccctggcatccggtcccccagcctccgccctcccctgggaccccgcggcctcccgcccacggcttttcccagccctgcccctcgccctccgctccagctggagcccaaacgt

SEQ ID NO: 97887 - DNA, 120 bp, Artificial Sequence
  ENSG00000090924_65 (sequence is synthesized)
tcccaggatccctaagcctccggccccagacaaacgggactcgcagcttctgcgcctcctgctccgctcactcttctttgtctcagcctttccatctttttcgccaggactctgctgggc

SEQ ID NO: 97888 - DNA, 120 bp, Artificial Sequence
  ENSG00000090924_66 (sequence is synthesized)
agacaaacgggactcgcagcttctgcgcctcctgctccgctcactcttctttgtctcagcctttccatctttttcgccaggttctctctccttgtccccttctttctgtcactttgtgcc

SEQ ID NO: 97889 - DNA, 120 bp, Artificial Sequence
  ENSG00000090924_67 (sequence is synthesized)
tcccccattagttactcccaggggcccctccctggatttacaccacgctcctaattcccagcccccatctgtgagtctgggcggcggagaggcccatggggtcctgatatccaagaaggg

SEQ ID NO: 97890 - DNA, 80 bp, Artificial Sequence
  ENSG00000090924_68 (sequence is synthesized)
gtcacagtgagaccctgtctcaaataaataaataaaaattttaagagaaaaataaaaaaatttaaaaattgagccaggta

SEQ ID NO: 97891 - DNA, 75 bp, Artificial Sequence
  ENSG00000090924_69 (sequence is synthesized)
aggccgaggtaggtggatcatctgagatcaggaatttgagaccaggctggccaacaatgtggcaggcgcctgtaa

SEQ ID NO: 97892 - DNA, 79 bp, Artificial Sequence
  ENSG00000090924_70 (sequence is synthesized)
acccgggaggcggagattgcagtgagcagagatggcgccattgcactgcaggcaaaagaaggggattgggacttggggt

SEQ ID NO: 97893 - DNA, 120 bp, Artificial Sequence
  ENSG00000090924_71 (sequence is synthesized)
tctcctcgacctcgagatgctagaagttttacccctgggcgaaggaacacagctccatctcctgggccctctgtgattcgccgaggccgcaggcagtctgctaagcctggattcaagcac

SEQ ID NO: 97894 - DNA, 120 bp, Artificial Sequence
  ENSG00000090932_0 (sequence is synthesized)
gaaggggcggggccattctctcagatataaggcttggaagccagcagctgcgactcccgagacccccccaccagaaggccatggtctccccacggatgtccgggctcctctcccagactg

SEQ ID NO: 97895 - DNA, 120 bp, Artificial Sequence
  ENSG00000090932_1 (sequence is synthesized)
tgatcctagcgctcattttcctcccccagacacggcccgctggcgtcttcgagctgcagatccactctttcgggccgggtccaggccctggggccccgcggtccccctgcagcgcccggc

SEQ ID NO: 97896 - DNA, 120 bp, Artificial Sequence
  ENSG00000090932_2 (sequence is synthesized)
tcccctgccgcctcttcttcagagtctgcctgaagcctgggctctcagaggaggccgccgagtccccgtgcgccctgggcgcggcgctgagtgcgcgcggaccggtctacaccgagcagc

SEQ ID NO: 97897 - DNA, 120 bp, Artificial Sequence
  ENSG00000090932_3 (sequence is synthesized)
ccggagcgcccgcgcctgatctcccactgcccgacggcctcttgcaggtgcccttccgggacgcctggcctggcaccttctctttcatcatcgaaacctggagagaggagttaggagacc

SEQ ID NO: 97898 - DNA, 120 bp, Artificial Sequence
  ENSG00000090932_4 (sequence is synthesized)
agattggagggcccgcctggagcctgctggcgcgcgtggctggcaggcggcgcttggcagccggaggcccgtgggcccgggacattcagcgcgcaggcgcctgggagctgcgcttctcgt

SEQ ID NO: 97899 - DNA, 120 bp, Artificial Sequence
  ENSG00000090932_5 (sequence is synthesized)
cgcgcgctgcgagccgcctgccgtcgggaccgcgtgcacgcgcctctgccgtccgcgcagcgccccctcgcggtgcggtccgggactgcgcccctgcgcaccgctcgaggacgaatgtga

SEQ ID NO: 97900 - DNA, 120 bp, Artificial Sequence
  ENSG00000090932_6 (sequence is synthesized)
gtgaggcgccgctggtgtgccgagcaggctgcagccctgagcatggcttctgtgaacagcccggtgaatgccgatgcctagagggctggactggacccctctgcacggtccctgtctcca

SEQ ID NO: 97901 - DNA, 120 bp, Artificial Sequence
  ENSG00000090932_7 (sequence is synthesized)
ccagcagctgcctcagccccaggggcccgtcctctgctaccaccggatgccttgtccctgggcctgggccctgtgacgggaacccgtgtgccaatggaggcagctgtagtgagacaccca

SEQ ID NO: 97902 - DNA, 120 bp, Artificial Sequence
  ENSG00000090932_8 (sequence is synthesized)
cctgcccgcgtgggttctacgggctgcggtgtgaggtgagcggggtgacatgtgcagatggaccctgcttcaacggcggcttgtgtgtcgggggtgcagaccctgactctgcctacatct

SEQ ID NO: 97903 - DNA, 120 bp, Artificial Sequence
  ENSG00000090932_9 (sequence is synthesized)
gccactgcccacccggtttccaaggctccaactgtgagaagagggtggaccggtgcagcctgcagccatgccgcaatggcggactctgcctggacctgggccacgccctgcgctgccgct

SEQ ID NO: 97904 - DNA, 120 bp, Artificial Sequence
  ENSG00000090932_10 (sequence is synthesized)
cgctgccgcgccggcttcgcgggtcctcgctgcgagcacgacctggacgactgcgcgggccgcgcctgcgctaacggcggcacgtgtgtggagggcggcggcgcgcaccgctgctcctgc

SEQ ID NO: 97905 - DNA, 120 bp, Artificial Sequence
  ENSG00000090932_11 (sequence is synthesized)
cttcggcggccgcgactgccgcgagcgcgcggacccgtgcgccgcgcgcccctgtgctcacggcggccgctgctacgcccacttctccggcctcgtctgcgcttgcgctcccggctacat

SEQ ID NO: 97906 - DNA, 120 bp, Artificial Sequence
  ENSG00000090932_12 (sequence is synthesized)
acatgggagcgcggtgtgagttcccagtgcaccccgacggcgcaagcgccttgcccgcggccccgccgggcctcaggcccggggaccctcagcgctaccttttgcctccggctctgggac

SEQ ID NO: 97907 - DNA, 120 bp, Artificial Sequence
  ENSG00000090932_13 (sequence is synthesized)
tgctcgtggccgcgggcgtggccggcgctgcgctcttgctggtccacgtgcgccgccgtggccactcccaggatgctgggtctcgcttgctggctgggaccccggagccgtcagtccacg

SEQ ID NO: 97908 - DNA, 120 bp, Artificial Sequence
  ENSG00000090932_14 (sequence is synthesized)
cactcccggatgcactcaacaacctaaggacgcaggagggttccggggatggtccgagctcgtccgtagattggaatcgccctgaagatgtagaccctcaagggatttatgtcatatctg

SEQ ID NO: 97909 - DNA, 120 bp, Artificial Sequence
  ENSG00000090932_15 (sequence is synthesized)
ctccttccatctacgctcgggaggcctgacgcgtctcctccatccgcacctggagtcagagcgtggatttttgtatttgctcggtggtgcccagtctctgccccagaggctttggagttc

SEQ ID NO: 97910 - DNA, 120 bp, Artificial Sequence
  ENSG00000090932_16 (sequence is synthesized)
aatcttgaaggggtgtctgggggaactttactgttgcaagttgtaaataatggttatttatatcctattttttctcaccccatctctctagaaacacctataaaggctattattgtgatc

SEQ ID NO: 97911 - DNA, 120 bp, Artificial Sequence
  ENSG00000090932_17 (sequence is synthesized)
tccgtgaaatgaattgggtagagtctctggaaggttttaagcccattttcagttctaacttactttcatcctattttgcatccctcttatcgttttgagctacctgccatcttctctttg

SEQ ID NO: 97912 - DNA, 120 bp, Artificial Sequence
  ENSG00000090932_18 (sequence is synthesized)
aaaaacctatgggcttgaggaggtcacgatgccgactccgccagagcttttccactgattgtactcagcggggaggcaggggaggcagaggggcagcctctctaatgcttcctactcatt

SEQ ID NO: 97913 - DNA, 120 bp, Artificial Sequence
  ENSG00000090932_19 (sequence is synthesized)
gagggtggaccggtgcagcctgcagccatgccgcaatggtgaggcctggaggcctgaacggcgagggatggggtgggggtcctggatggctcagacagtccagggttggaatcctggctt

SEQ ID NO: 97914 - DNA, 120 bp, Artificial Sequence
  ENSG00000090932_20 (sequence is synthesized)
tgactcttctaaccctagggcctggggacctgaccttccacctgcaagcctgtaaaatgggcaaggagacattccctatctcataactattaatatttactgagaatttactgtgtgcca

SEQ ID NO: 97915 - DNA, 120 bp, Artificial Sequence
  ENSG00000090971_0 (sequence is synthesized)
acttccgcccgcgacccccttccagacccgctcccgaaaccttgtcgaaggaccaaaggcgaccggtgcaggtgcacgacgccagctcccttctggggggccggggcctgggggttgcca

SEQ ID NO: 97916 - DNA, 120 bp, Artificial Sequence
  ENSG00000090971_1 (sequence is synthesized)
tggcccccagccacctgtcagtgcgggagatgagggaagatgagaagcccctggtgctggagatgctgaaggccggcgtgaaggacacggaaaaccgcgtggccctccatgccttgacac

SEQ ID NO: 97917 - DNA, 120 bp, Artificial Sequence
  ENSG00000090971_2 (sequence is synthesized)
ggccgccggccctgctcctcctggcggcggccagcagcggcctgcgctttgtcctggcttccttcgccctggccctcctcctgccggtgttcctggctgtggccgccgtgaagctgggcc

SEQ ID NO: 97918 - DNA, 120 bp, Artificial Sequence
  ENSG00000090971_3 (sequence is synthesized)
ggcccgatggggctcgctgcctccgccgggtggcctggggggcccctgggtggccgtgcggggctccggtgacgtgtgtggggtcctggctctggcccctggcacaaatgcaggggacgg

SEQ ID NO: 97919 - DNA, 120 bp, Artificial Sequence
  ENSG00000090971_4 (sequence is synthesized)
ccctggcacaaatgcaggggacggggcccgggtcacccgcctgtctgtctctcgctggcaccgccgccggggcgtgggcaggaggctgctggccttcgcggaggcccgggctcgggcctg

SEQ ID NO: 97920 - DNA, 120 bp, Artificial Sequence
  ENSG00000090971_5 (sequence is synthesized)
tggccgcctggggggtgggagggatgctggagggctgtggctaccaggccgaggggggctggggctgcctgggctacacgctggtgagggaattcagcaaagacctgtgaagctacagac

SEQ ID NO: 97921 - DNA, 120 bp, Artificial Sequence
  ENSG00000090971_6 (sequence is synthesized)
tgacagccagggcaggggaggagggaggggcgccagcacctgatgatcgcctactgtctgcgggttcttttacctgctctccctcagtgagtcctcaaccaccctgggcccagaaacaga

SEQ ID NO: 97922 - DNA, 120 bp, Artificial Sequence
  ENSG00000090971_7 (sequence is synthesized)
ggcctgccgaggggaggagcctggcctctgtccacccgtcagcagtgtgaagtctgttgtgtttgagcttctcagagtggaatgactccttttccttcctggccctcgggggcctctcga

SEQ ID NO: 97923 - DNA, 120 bp, Artificial Sequence
  ENSG00000090971_8 (sequence is synthesized)
ggtcagcctctccaacccctacctcagctcctgtctgcactgagaaacctccccgggtgatgtctgcaaagtctgtgctgtccgtgccccaggctgggagagctatctggggagggggag

SEQ ID NO: 97924 - DNA, 120 bp, Artificial Sequence
  ENSG00000090971_9 (sequence is synthesized)
aggaggccgagcagaatacaccccagagttagggtttgcgactccgcctccctgggacctggattgggtcagatgcctgtccttggaggggacaaggttgactgcttaggaggcgcgacg

SEQ ID NO: 97925 - DNA, 120 bp, Artificial Sequence
  ENSG00000090971_10 (sequence is synthesized)
cacagggctgccaggcctggcccctctctgggaaggttgagagctgagacgggcagccctgtcccttcctccagatccgtctggttttttacaccgtttgttaataaagcctgaaaccgc

SEQ ID NO: 97926 - DNA, 120 bp, Artificial Sequence
  ENSG00000090971_11 (sequence is synthesized)
tggattcagccaccccctcccacccacctgagccagcctggacccctggagcgggatcttttcctcctgagcctcagccgccctgctgctgaaaaccacagcaggtgtggcaggtggggg

SEQ ID NO: 97927 - DNA, 120 bp, Artificial Sequence
  ENSG00000090971_12 (sequence is synthesized)
ctcacccccccagccctactgggaccccagcaccaacgccctccctggtctcccatctccagtcggctgtgcacgccagcacaacagccagctctgtgcctcggaccccaactcttcaaa

SEQ ID NO: 97928 - DNA, 120 bp, Artificial Sequence
  ENSG00000090971_13 (sequence is synthesized)
ccagcctgaggcaacctccctgtccttacttccctggggcctcactgcggcattgctactgaattgagtgcccccacagctcctaattcactcatccatccatcattcgctctcgttcat

SEQ ID NO: 97929 - DNA, 120 bp, Artificial Sequence
  ENSG00000090971_14 (sequence is synthesized)
tcattcactccatacccagtgtgccacactgaacatcggactgtgctgccttcccttcccatttgggagctctcaccccgccccgggcagggtctacctcctctctttgtccaggaggcc

SEQ ID NO: 97930 - DNA, 120 bp, Artificial Sequence
  ENSG00000090971_15 (sequence is synthesized)
gaaaccttgtcgaaggaccaaaggcgaccggtgcaggtgcacgacgccagctcccttctggggggccggggcctgggggttgccatggcccccagccacctgtcacagtgtgaagtctgt

SEQ ID NO: 97931 - DNA, 120 bp, Artificial Sequence
  ENSG00000090975_0 (sequence is synthesized)
cctcctttgacagggacatcagtggagccttctcagacccacaggggtccttggtgaattttgtcatggttatttaaggaaccttgcctagaagtcccaacttgcagttccccatcgacg

SEQ ID NO: 97932 - DNA, 120 bp, Artificial Sequence
  ENSG00000090975_1 (sequence is synthesized)
ggaaggcttggactccaagatgattataaaggaatatcggattcctctgccaatgaccgtggaggagtaccgcatcgcccagctgtacatgatacagaagaagagccgtaacgagacata

SEQ ID NO: 97933 - DNA, 120 bp, Artificial Sequence
  ENSG00000090975_2 (sequence is synthesized)
tggcgaaggcagcggcgtggagatcctggagaaccggccgtacacagatggcccaggcggctctgggcagtacacacacaaggtgtatcatgtgggcatgcacattcccagctggttccg

SEQ ID NO: 97934 - DNA, 120 bp, Artificial Sequence
  ENSG00000090975_3 (sequence is synthesized)
ctccatcctgcccaaggcagccctgcgggtggtggaggagtcttggaatgcctacccctacacccgaaccaggttcacctgtcctttcgtggagaaattctccatcgacattgaaacctt

SEQ ID NO: 97935 - DNA, 120 bp, Artificial Sequence
  ENSG00000090975_4 (sequence is synthesized)
ttataaaactgatgctggagaaaaccccgacgtgttcaacctctctcctgtggaaaagaaccagctgacaatcgacttcatcgacattgtcaaagaccctgtgccccacaacgagtataa

SEQ ID NO: 97936 - DNA, 120 bp, Artificial Sequence
  ENSG00000090975_5 (sequence is synthesized)
gacagaagaggaccccaagctgttccagtcaaccaagacccagcgggggcccctgtccgagaactggatcgaggagtacaagaagcaggtcttccccatcatgtgcgcatacaagctctg

SEQ ID NO: 97937 - DNA, 120 bp, Artificial Sequence
  ENSG00000090975_6 (sequence is synthesized)
caaggtggagttccgctactggggcatgcagtccaagatcgagaggttcatccacgacaccggactacggagggtgatggtgcgggctcaccggcaggcctggtgctggcaggacgagtg

SEQ ID NO: 97938 - DNA, 120 bp, Artificial Sequence
  ENSG00000090975_7 (sequence is synthesized)
gtatgggctgagcatggagaacatccgggagctggagaaggaggcacagctcatgctttcccgtaagatggcccagttcaatgaggatggtgaggaggccactgagctcgtcaagcacga

SEQ ID NO: 97939 - DNA, 120 bp, Artificial Sequence
  ENSG00000090975_8 (sequence is synthesized)
agccgtctcggaccagacctctggggagcccccggagcccagcagcagcaatggggagcccctagtggggcgcggcctcaagaaacagtggtccacatcctccaagtcgtctcggtcgtc

SEQ ID NO: 97940 - DNA, 120 bp, Artificial Sequence
  ENSG00000090975_9 (sequence is synthesized)
caagcggggagcgagtccttcccgccacagcatctcagagtggaggatgcagagtattgccagggactcggatgagagctcagatgatgagttcttcgatgcgcacgaggacctgtccga

SEQ ID NO: 97941 - DNA, 120 bp, Artificial Sequence
  ENSG00000090975_10 (sequence is synthesized)
cacagaggaaatgttccccaaggacatcaccaagtggagctccaatgacctcatggacaagatcgagagcccagagccggaagacacacaagatggtctgtaccgccagggtgcccctga

SEQ ID NO: 97942 - DNA, 120 bp, Artificial Sequence
  ENSG00000090975_11 (sequence is synthesized)
gttcagggtggcctccagtgtggagcagctgaacatcatagaggacgaggttagccagccgctggctgcaccgccctccaagatccacgtgctgctactggtgctgcacggaggcaccat

SEQ ID NO: 97943 - DNA, 120 bp, Artificial Sequence
  ENSG00000090975_12 (sequence is synthesized)
cctggacacaggcgccggggaccccagctccaagaagggcgatgctaacaccatcgccaacgtgttcgacaccgtcatgcgcgtgcactaccccagcgccctgggccgccttgccatccg

SEQ ID NO: 97944 - DNA, 120 bp, Artificial Sequence
  ENSG00000090975_13 (sequence is synthesized)
cctggtgccctgcccgcccgtctgctctgacgcctttgccctggtctccaacctcagcccctacagccatgacgaaggctgtctgtccagcagtcaggaccacattcccctggctgccct

SEQ ID NO: 97945 - DNA, 120 bp, Artificial Sequence
  ENSG00000090975_14 (sequence is synthesized)
ccccctgctggccacctcctccccccagtaccaggaggcagttgccacagtgattcagcgagccaaccttgcctatggggacttcatcaagtcccaggagggcatgaccttcaatgggca

SEQ ID NO: 97946 - DNA, 120 bp, Artificial Sequence
  ENSG00000090975_15 (sequence is synthesized)
ggtctgcctgattggggactgcgtcgggggcatcctggcatttgatgccctgtgctacagtaaccagccggtgtctgagagtcagagcagcagccgccggggcagcgtggtcagcatgca

SEQ ID NO: 97947 - DNA, 120 bp, Artificial Sequence
  ENSG00000090975_16 (sequence is synthesized)
ggacaatgacctgctgtccccgggcatcctgatgaatgcagcacactgctgcggtggtggcggtggcggcggtggcggtggtggcagcagtggtggtggtggcagtagtggtggctccag

SEQ ID NO: 97948 - DNA, 120 bp, Artificial Sequence
  ENSG00000090975_17 (sequence is synthesized)
cctggagagcagtcggcacctgagccgaagcaacgtcgacatcccccgcagcaacggcactgaggaccccaaaaggcaactgccccgcaagaggagcgactcatccacctacgagctgga

SEQ ID NO: 97949 - DNA, 120 bp, Artificial Sequence
  ENSG00000090975_18 (sequence is synthesized)
taccatccagcagcaccaggccttcctgtccagcctccatgccagcgtgctgaggactgagccctgctcacgccattccagcagctccaccatgctggatggcacaggtgccctgggcag

SEQ ID NO: 97950 - DNA, 120 bp, Artificial Sequence
  ENSG00000090975_19 (sequence is synthesized)
gtttgactttgagatcaccgacctcttcctcttcgggtgcccgctggggctggtcctggccttgaggaagactgtcatcccagccctggatgttttccagctgcggccggcctgccagca

SEQ ID NO: 97951 - DNA, 120 bp, Artificial Sequence
  ENSG00000090975_20 (sequence is synthesized)
agtctacaacctcttccaccccgcggacccgtcagcttcacgcctggagccgctgctggaacggcgctttcacgccctgccgcctttcagcgtcccccgctaccaacgctacccgctggg

SEQ ID NO: 97952 - DNA, 120 bp, Artificial Sequence
  ENSG00000090975_21 (sequence is synthesized)
ggatggctgctccacgctgctggcggatgtgctccagacccacaatgcagccttccaagagcatggcgccccctcctcgccgggcactgcccctgccagtcgtggcttccgccgagccag

SEQ ID NO: 97953 - DNA, 120 bp, Artificial Sequence
  ENSG00000090975_22 (sequence is synthesized)
tgagatcagcatcgccagccaggtgtcaggcatggctgagagctacacggcatccagcatcgcccagaaggcccccgatgcgctcagccatacccccagcgtcaggcgtctgtccctgct

SEQ ID NO: 97954 - DNA, 120 bp, Artificial Sequence
  ENSG00000090975_23 (sequence is synthesized)
cgccctgcccgcccccagccccaccacccctggcccccaccctccagccaggaaggcaagccctggcctggagagggcccctggcctccctgagctggacattggagaagtcgctgcaaa

SEQ ID NO: 97955 - DNA, 120 bp, Artificial Sequence
  ENSG00000090975_24 (sequence is synthesized)
gtggtggggccagaagcggatcgactacgccctgtactgccctgacgccctcacggccttccccacggtggctctgcctcacctcttccacgccagctactgggagtcaacagacgtggt

SEQ ID NO: 97956 - DNA, 120 bp, Artificial Sequence
  ENSG00000090975_25 (sequence is synthesized)
ctcctttctgctgagacaggtcatgaggcatgacaactccagcatcttggagctggatggcaaggaagtgtcggtgttcaccccctcaaagccaagggagaagtggcagcgcaagcggac

SEQ ID NO: 97957 - DNA, 120 bp, Artificial Sequence
  ENSG00000090975_26 (sequence is synthesized)
ccacgtgaagctgcggaacgtgacggccaaccaccggatcaatgatgcccttgccaatgaggacggcccccaggttctgacgggcaggttcatgtatgggcccctggacatggtcaccct

SEQ ID NO: 97958 - DNA, 120 bp, Artificial Sequence
  ENSG00000090975_27 (sequence is synthesized)
gactggggagaaggtggatgtgcacatcatgacccagccgccctcaggcgagtggctctacctggatacgctggtgaccaacaacagtgggcgtgtctcctacaccatccctgagtcgca

SEQ ID NO: 97959 - DNA, 120 bp, Artificial Sequence
  ENSG00000090975_28 (sequence is synthesized)
gtctaccctatcaagatggtggtcaggggagaccacacgtttgccgacagctacatcaccgtgctgcccaagggcacagagttcgtggtcttcagcatcgacggttcctttgccgctagc

SEQ ID NO: 97960 - DNA, 120 bp, Artificial Sequence
  ENSG00000090975_29 (sequence is synthesized)
gtgtccatcatgggcagcgaccccaaggtgcgggccggggccgtggacgtggtgcggcactggcaggacctgggctacctcatcatctacgtgacgggccggcccgacatgcagaagcag

SEQ ID NO: 97961 - DNA, 120 bp, Artificial Sequence
  ENSG00000090975_30 (sequence is synthesized)
cgggtggtggcgtggctggcccagcacaacttcccccatggcgtggtgtccttctgtgacggcctggtgcatgacccgctgcggcacaaggccaacttcctgaagctgctcatctccgag

SEQ ID NO: 97962 - DNA, 120 bp, Artificial Sequence
  ENSG00000090975_31 (sequence is synthesized)
ctgcacctgcgcgtgcacgcggcctatggctccaccaaggacgtggcggtgtacagcgccattagcctgtcccccatgcagatctacatcgtgggccggcccaccaagaagctgcagcag

SEQ ID NO: 97963 - DNA, 120 bp, Artificial Sequence
  ENSG00000090975_32 (sequence is synthesized)
cagtgccagttcatcacggatggctacgcggcccacctggcgcagctgaagtacagccaccgggcgcggcccgctcgcaacacggccacccgcatggcgctgcgcaagggcagcttcggc

SEQ ID NO: 97964 - DNA, 120 bp, Artificial Sequence
  ENSG00000090975_33 (sequence is synthesized)
ctgcccggccagggcgactttctgcgctcccggaaccacctgcttcgcaccatctcggcccagcccagcgggcccagccaccggcacgagcggacacagagccaggcggatggcgagcag

SEQ ID NO: 97965 - DNA, 120 bp, Artificial Sequence
  ENSG00000090975_34 (sequence is synthesized)
gccagcgcagcatgagtgtggcggccggctgctggggccgcgccatgactggccgcctggagccgggggcagccgcgggccccaagtagggcaccgtgagtgcagcgcggggtctccatg

SEQ ID NO: 97966 - DNA, 120 bp, Artificial Sequence
  ENSG00000090975_35 (sequence is synthesized)
catggtgctaggccagggtggccagccccgccaggaggcctggcctgggcacacgcactgacgtgggcctgggagattgtcccagggccttgtggaggacacgggccgcaccacacagtg

SEQ ID NO: 97967 - DNA, 120 bp, Artificial Sequence
  ENSG00000090975_36 (sequence is synthesized)
ctccctgccctgcctcacgtcctcgggcctgacgggtccggcttgtcatggaagctggcagggaccaccagccccaggatggcagagggaccagaacctcccactcagactggcccggga

SEQ ID NO: 97968 - DNA, 120 bp, Artificial Sequence
  ENSG00000090975_37 (sequence is synthesized)
ggttctcccagacattttgccctgtgtggatctccaagtgtcctggtgccaggtgtgggcccaggcgcagcctgccacctccccatccactggccaccctcactcccaggtcccctccca

SEQ ID NO: 97969 - DNA, 120 bp, Artificial Sequence
  ENSG00000090975_38 (sequence is synthesized)
tttggtagcagctccaacaggggtccagcctgcatcttgttaactcgagtttctcaactgttcaacctcactggttttgcactgatttttgagagcggagacccattaccacctcctatg

SEQ ID NO: 97970 - DNA, 120 bp, Artificial Sequence
  ENSG00000090975_39 (sequence is synthesized)
gctacagccccgttgacatgcatgaaactcagtacctgctgacccaggacctacaaccacactgaaggctccagtgcggcagagcctcgtgcaagcaggagagaaaggctgtatcttaat

SEQ ID NO: 97971 - DNA, 120 bp, Artificial Sequence
  ENSG00000090975_40 (sequence is synthesized)
ttctgcaccccggaccctgcccacctgtctgcctgccccgcctggagcccaggccagtgttgtttccagcctcaggccacgggctggacgggcctggccgcctcttccgctccctgccat

SEQ ID NO: 97972 - DNA, 120 bp, Artificial Sequence
  ENSG00000090975_41 (sequence is synthesized)
cagtcaaggccgcccgcccacgtttctacgcctttctacttctcaatctgatttctatgaggtttttttaaacgagcaatccttggctgcttccttttcttaactctttcagtactgaga

SEQ ID NO: 97973 - DNA, 120 bp, Artificial Sequence
  ENSG00000090975_42 (sequence is synthesized)
gcagcccctccacactgaaaacacccagcactgtgacggagtccagcctggttctgggtcccgtgggccctgctcctgcccacttagcgaggcatgggctccttgcctcacctggccccg

SEQ ID NO: 97974 - DNA, 120 bp, Artificial Sequence
  ENSG00000090975_43 (sequence is synthesized)
gcaatcccactgaatttctactctggggtgggtggggcacacacttcggtttttttaatgccaattccgttttcatgccgaatctaagaagccacaacttgctttgtcagcttcagggca

SEQ ID NO: 97975 - DNA, 120 bp, Artificial Sequence
  ENSG00000090975_44 (sequence is synthesized)
ggcagccatgacttcatttctcgcctgaacaaggaccatgctgtcctgcacgctgggtctgaccgtctgccctctctccccagcaccaagcgtgaccttggctgtggcgctcaacggcca

SEQ ID NO: 97976 - DNA, 120 bp, Artificial Sequence
  ENSG00000090975_45 (sequence is synthesized)
gctccggcggcccctctgctgctcctcggctttcccggaagtgggagagcctgcctggcctcggcctttgtccagcgaccaggctctgtccccgagaagctacggccgacctgggtctgg

SEQ ID NO: 97977 - DNA, 120 bp, Artificial Sequence
  ENSG00000090975_46 (sequence is synthesized)
tgttgggacgcatggaccgggctggggaggtgcacagagtgatgttaactttttcccgtgtgtagatatgtacagccaaagggtcgtgtaaatgttctgcaaaagtgggtctatacagag

SEQ ID NO: 97978 - DNA, 120 bp, Artificial Sequence
  ENSG00000090975_47 (sequence is synthesized)
tgaaagctatttattttgtgcagagaaaaaagtctggagggatggaaccttcagggtttattcatatttaagatgtagctttttgttgtttcaggcattatgtataaagcaacgattatt

SEQ ID NO: 97979 - DNA, 120 bp, Artificial Sequence
  ENSG00000090975_48 (sequence is synthesized)
ttatggaccaagttttcatgtaactgttgcagtgaaagtgcaatatctgacccccctgctcccagcaggaagttgcttggcccgacaatcacagcccctgtcaggggccctgtggccagt

SEQ ID NO: 97980 - DNA, 120 bp, Artificial Sequence
  ENSG00000090975_49 (sequence is synthesized)
gcctcctcctctcttggccccaccttatcctgtcttgcctgctgcctgggagaccagccatccagagaagcacctggaagagtctcgggccctcctgcaataaaggccgggaggccctgt

SEQ ID NO: 97981 - DNA, 120 bp, Artificial Sequence
  ENSG00000090975_50 (sequence is synthesized)
gggcagtgggctcagcctctccccaggggggcagctcccccacggctcctcactccccgcctgcctgcccagccgccagccatgccaaggacaacagcaatagtcccctggggctctccc

SEQ ID NO: 97982 - DNA, 120 bp, Artificial Sequence
  ENSG00000090975_51 (sequence is synthesized)
agcggccctcagccatagatggcaaggtgggcagcctgcccccccatgggaagtctcttctgtatccaggtctgctttccacctcccttcagattccttttggcacattctcctcttgag

SEQ ID NO: 97983 - DNA, 120 bp, Artificial Sequence
  ENSG00000090975_52 (sequence is synthesized)
gaagtaccagtctttctgaaactaagagagggagggcagcgtcctttaaaaataccaaaaatgtttacagagttgggtgctgagctgcagggctcaggcctgaccagtcataaccaaagg

SEQ ID NO: 97984 - DNA, 120 bp, Artificial Sequence
  ENSG00000090975_53 (sequence is synthesized)
gtgaggcaggccttgctgactgccaccccccaggcctgttagaatagaagccttagtcccactcccaccacacccccacgccccaccacctgccttctctttgatttctaaagagggatt

SEQ ID NO: 97985 - DNA, 120 bp, Artificial Sequence
  ENSG00000090975_54 (sequence is synthesized)
cagcagagaccccccacccctccctggctcggtctgagtcccactgcccaccccatcacagccttcacgtctcagcccctcccgtctggtctgtccgtgtgccgtctgtttctctgggcc

SEQ ID NO: 97986 - DNA, 120 bp, Artificial Sequence
  ENSG00000090975_55 (sequence is synthesized)
atgtgtgagcagtgtccccatctccccatccgtccctgctgtccccgcatcattgggcctgagtgtgctctgtatacaacgtcatgtctgttacaccaattaaagaagcgggaaggcttc

SEQ ID NO: 97987 - DNA, 120 bp, Artificial Sequence
  ENSG00000090975_56 (sequence is synthesized)
tcctggagggcggccccctggcccctctcccccacggggacggcttcctggaaaccagtatgcctgttcccgcgcccacctggcaagacgggccccgcccgggctgtgccgagtcggatg

SEQ ID NO: 97988 - DNA, 120 bp, Artificial Sequence
  ENSG00000090975_57 (sequence is synthesized)
agaacagggcagaggagaggcctgcagttccagacccacgtcattatggagtctatggtgcccactccccagttggtatctatgctgttccctgagagccccaccatccaccttctctcc

SEQ ID NO: 97989 - DNA, 120 bp, Artificial Sequence
  ENSG00000090975_58 (sequence is synthesized)
aagacgaaaagggaggaagcgacagtcgtctaggcagaagtgatgtggccgtggccgacaagatggccccgcgggaggcaggcggagctcagtgtgtccaataaaactgtcttggtagag

SEQ ID NO: 97990 - DNA, 120 bp, Artificial Sequence
  ENSG00000090975_59 (sequence is synthesized)
gtttagtttggttttggtttgctagtgagcggaaaatctgatgtgacaccttaaaggccagcccacaagtggcagcacctgatcgtcatctctgctctcagcctctatgggaggcacccg

SEQ ID NO: 97991 - DNA, 120 bp, Artificial Sequence
  ENSG00000090975_60 (sequence is synthesized)
gccctgccgttgctgctgggcttcctctgccctgagggctttcgtgtgagctcagggcaatgcaagtgtgtgttcagttaccaagcccaaaagtcaaaagaacagccagagccaagctgg

SEQ ID NO: 97992 - DNA, 120 bp, Artificial Sequence
  ENSG00000090975_61 (sequence is synthesized)
ctctgccccagcctctccgccctcctgtgtcctttctcagcggctgctctaaagtataacttcacgtagtggtgacttaacttgaaaggagccgcagggggcgtgagagcagcttggaga

SEQ ID NO: 97993 - DNA, 120 bp, Artificial Sequence
  ENSG00000090975_62 (sequence is synthesized)
ggtgggagcctgggccgccgatggctccagcctgtgaaagtgtggaaagctcgttccaggaaaattggaataatcacctcattggctggctttcaggcggggtccttggtgaattttgtc

SEQ ID NO: 97994 - DNA, 120 bp, Artificial Sequence
  ENSG00000090975_63 (sequence is synthesized)
ccctttccaccgacttgctcctgcagagacatcctgcactcctctccctcccactgaagtgtgggctgggtgcctctccaaacaccccggcctacctgcctcccccacccagagtcggga

SEQ ID NO: 97995 - DNA, 120 bp, Artificial Sequence
  ENSG00000090975_64 (sequence is synthesized)
ttcttcaaaggagacctcactggaacatctgtctttgtccacaaccagctctctccccggcctccacctgggagtgaccagagctgctaggatagaccccccacttctggagggaaggca

SEQ ID NO: 97996 - DNA, 90 bp, Artificial Sequence
  ENSG00000090975_65 (sequence is synthesized)
agacagggtcttgtttcgttgcccaggctgatctcaaacccttggactcaagctgtcctcccacctaatcctcccaaagtgttgggatta

SEQ ID NO: 97997 - DNA, 120 bp, Artificial Sequence
  ENSG00000090975_66 (sequence is synthesized)
tgggattacaggcatgagccactgcgcccttccaactgtggcttctgaccggacacattgctttgggaggcccctccactctaattatagaaccactatgagcttgtgagactatctgtg

SEQ ID NO: 97998 - DNA, 120 bp, Artificial Sequence
  ENSG00000090975_67 (sequence is synthesized)
agaaccactatgagcttgtgagactatctgtgagccagtccccttattttacaaatggggaaactgaggcacagacaggcagtgactttagtttgacctgcaacatgggtacagcctccc

SEQ ID NO: 97999 - DNA, 120 bp, Artificial Sequence
  ENSG00000090975_68 (sequence is synthesized)
aaagcccctgcctgggccccacacttccgtgcaggctcctgcgctgacctccctcccctcgtctctccctctctgatccccatggggcacaggactacggagggtgatggtgcgggctca

SEQ ID NO: 98000 - DNA, 120 bp, Artificial Sequence
  ENSG00000090975_69 (sequence is synthesized)
gagacagtgtacagagcttggaattctctgaggggttcctgagatggcgccattcaagccagggggttgaatagcttgactcttcatttcagcagcacgattgacccctcagtggatcag

SEQ ID NO: 98001 - DNA, 120 bp, Artificial Sequence
  ENSG00000090975_70 (sequence is synthesized)
ggtcatggggtgagggtgggtcgcgccagcgcacagacaccacatgtgggttaggtggagttgtggccttcacagtgcagtgcctgccccagaacttcctggtaagtgtgaattgtgctg

SEQ ID NO: 98002 - DNA, 120 bp, Artificial Sequence
  ENSG00000090975_71 (sequence is synthesized)
gacccctggcctctaggcacgatgccaggcgcacagagcacaccatgggcgcacggcatcagattgctttccggcactgtgtcccgccgcctacaacgcgaacacttgcccttgcgttca

SEQ ID NO: 98003 - DNA, 120 bp, Artificial Sequence
  ENSG00000090989_0 (sequence is synthesized)
agtgttgggggaacggccgcttcccgttcaacgctttattgaggggcgtatcctagtggcccccatccggtctccgttttggaagacccgcctcggcacagccaggctcagtccggcctt

SEQ ID NO: 98004 - DNA, 120 bp, Artificial Sequence
  ENSG00000090989_1 (sequence is synthesized)
gcgctgagaaaagatgacagcaatcaagcatgcattacaaagagacatttttacaccaaatgatgaacgcctgctgagcattgtgaatgtctgcaaagcaggaaaaaagaaaaagaactg

SEQ ID NO: 98005 - DNA, 120 bp, Artificial Sequence
  ENSG00000090989_2 (sequence is synthesized)
ttttttatgtgccacagtgacaactgaacgccctgtgcaggttaaggtggtcaaagtcaagaaatccgataagggagatttctacaaaaggcagattgcatgggcccttcgagatcttgc

SEQ ID NO: 98006 - DNA, 120 bp, Artificial Sequence
  ENSG00000090989_3 (sequence is synthesized)
tgtggtagatgccaaagatgctatcaaagaaaatcctgaatttgatttacactttgaaaaaatatataaatgggttgccagcagcactgctgaaaagaatgcatttatttcatgcatttg

SEQ ID NO: 98007 - DNA, 120 bp, Artificial Sequence
  ENSG00000090989_4 (sequence is synthesized)
gaaattgaatcagcgatatctccggaagaaaattgattttgtcaatgttagctcacagcttttggaagaatctgttccaagtggagaaaatcagagtgtgacaggaggtgatgaagaagt

SEQ ID NO: 98008 - DNA, 120 bp, Artificial Sequence
  ENSG00000090989_5 (sequence is synthesized)
agtagatgaataccaagagttaaatgcaagagaagaacaggatatcgaaataatgatggaaggctgtgaatatgcaatctcgaatgcggaagcctttgcagaaaaattgtccagagagct

SEQ ID NO: 98009 - DNA, 120 bp, Artificial Sequence
  ENSG00000090989_6 (sequence is synthesized)
gcaggtgctagatggggctaacatccagtcaatcatggcatctgaaaaacaagtcaacatcctgatgaaattgctagatgaggctctaaaggaggtagatcagattgaattgaaactgag

SEQ ID NO: 98010 - DNA, 120 bp, Artificial Sequence
  ENSG00000090989_7 (sequence is synthesized)
cagttatgaggaaatgctccaaagtgtaaaagaacaaatggatcagatctctgaaagcaaccacctaattcatcttagtaacactaataatgtaaaactcctatctgagatagagttcct

SEQ ID NO: 98011 - DNA, 120 bp, Artificial Sequence
  ENSG00000090989_8 (sequence is synthesized)
tgtgaaccacatggacttggccaaaggtcatataaaggcccttcaggaaggagatcttgcttcttccagaggcattgaggcctgcaccaatgctgctgatgcccttctgcagtgcatgaa

SEQ ID NO: 98012 - DNA, 120 bp, Artificial Sequence
  ENSG00000090989_9 (sequence is synthesized)
tgtagctcttcgaccaggccatgacttgcttctggcagtcaaacagcaacagcagcgattcagtgatttgcgagagctttttgcccggagactggccagtcacctcaacaatgtttttgt

SEQ ID NO: 98013 - DNA, 120 bp, Artificial Sequence
  ENSG00000090989_10 (sequence is synthesized)
tcaacagggtcatgatcagagttcgactcttgcccaacactctgttgaactgactttacccaatcatcatccatttcatagagatttgctccgatatgccaagctgatggagtggctaaa

SEQ ID NO: 98014 - DNA, 120 bp, Artificial Sequence
  ENSG00000090989_11 (sequence is synthesized)
gagtacagattatggaaaatatgaaggactaacaaagaattacatggattatttatcccgactatatgaaagagaaatcaaagatttctttgaagttgcaaagatcaagatgactggcac

SEQ ID NO: 98015 - DNA, 120 bp, Artificial Sequence
  ENSG00000090989_12 (sequence is synthesized)
aactaaagaaagcaagaagtttgctacactgcctcgaaaagaaagtgctgtcaaacaggaaacagagagtcttcatggaagttcggggaaattaactggatctacttctagtctaaataa

SEQ ID NO: 98016 - DNA, 120 bp, Artificial Sequence
  ENSG00000090989_13 (sequence is synthesized)
tgaacaggtactaagtgaactggagcccctatgtctggcagaacaggacttcataagtaaatttttcaaactacagcaacatcaaagtatgcctggaactatggctgaagcagaggacct

SEQ ID NO: 98017 - DNA, 120 bp, Artificial Sequence
  ENSG00000090989_14 (sequence is synthesized)
ggatggaggaacattatcacggcaacataattgtggcacaccactgcctgtttcatctgagaaagatatgatccgccaaatgatgattaaaatatttcgctgcattgagccagagctgaa

SEQ ID NO: 98018 - DNA, 120 bp, Artificial Sequence
  ENSG00000090989_15 (sequence is synthesized)
caacctaattgcattaggagacaaaattgatagctttaactctctttatatgttagtcaaaatgagtcatcatgtgtggactgcacaaaatgtggaccctgcttctttcctaagtactac

SEQ ID NO: 98019 - DNA, 120 bp, Artificial Sequence
  ENSG00000090989_16 (sequence is synthesized)
attgggaaatgttttggtgactgtcaaaaggaactttgacaaatgcattagtaaccaaataaggcaaatggaagaagtaaagatctcaaaaaagagtaaagttggaattcttccatttgt

SEQ ID NO: 98020 - DNA, 120 bp, Artificial Sequence
  ENSG00000090989_17 (sequence is synthesized)
tgctgaatttgaagaatttgctggacttgcagaatcaatcttcaaaaatgctgagcgtcgtggagacctggataaagcatacaccaaacttatcagaggagtatttgttaatgtggagaa

SEQ ID NO: 98021 - DNA, 120 bp, Artificial Sequence
  ENSG00000090989_18 (sequence is synthesized)
agtagcaaatgaaagccagaagacccccagggatgtggttatgatggaaaactttcaccatatttttgcaactctttctcgattgaaaatctcatgtctagaagcagaaaaaaaagaagc

SEQ ID NO: 98022 - DNA, 120 bp, Artificial Sequence
  ENSG00000090989_19 (sequence is synthesized)
caaacaaaaatacacagatcaccttcagtcttatgtcatttactctttaggacaacctcttgaaaaactaaatcatttctttgaaggtgttgaagctcgcgtggcacagggcataaggga

SEQ ID NO: 98023 - DNA, 120 bp, Artificial Sequence
  ENSG00000090989_20 (sequence is synthesized)
ggaggaagtaagttaccaacttgcatttaacaaacaagaacttcgtaaagtcattaaggagtaccctggaaaggaagtaaaaaaaggtctagataacctctacaagaaagttgataaaca

SEQ ID NO: 98024 - DNA, 120 bp, Artificial Sequence
  ENSG00000090989_21 (sequence is synthesized)
tttatgtgaagaagagaacttacttcaggtggtgtggcactccatgcaagatgaatttatacgccagtataagcactttgaaggtttgatagctcgctgttatcctggatctggtgttac

SEQ ID NO: 98025 - DNA, 120 bp, Artificial Sequence
  ENSG00000090989_22 (sequence is synthesized)
aatggaattcactattcaggacattctggattattgttccagcattgcacagtcccactaaaccttgtgaaagaagaaaagataactgaatgaagcatttgagtataacagacactatac

SEQ ID NO: 98026 - DNA, 120 bp, Artificial Sequence
  ENSG00000090989_23 (sequence is synthesized)
caaaataccaagcaactgttttgagaacccagacttaaaattttatgtattattaaatgttagataaatgggtagtaccatactacaaatatttaaatgcaaaattaccaacctatatag

SEQ ID NO: 98027 - DNA, 120 bp, Artificial Sequence
  ENSG00000090989_24 (sequence is synthesized)
cagttttatttgccctataggttgcatactaacttaagcattcatgtcaccataaaatgcctttagcatttctcaatgactggatgggaaattttcctttattgcctagctgcttgtgtt

SEQ ID NO: 98028 - DNA, 120 bp, Artificial Sequence
  ENSG00000090989_25 (sequence is synthesized)
tgagtggttgtcctatgagcaatgcatttggagttcttcagctttcactacttctctgttgcttgctaatcatgtaactactaaaatactgtacaaaattgttttttcacactaacaaat

SEQ ID NO: 98029 - DNA, 120 bp, Artificial Sequence
  ENSG00000090989_26 (sequence is synthesized)
gtgtatatggagaagagggctcatgtgatgatcatttgtgaacttagatttttgaggattatgtgactagtaataaatgtgaaataaattttcaaaaaagttgacatttgataatatttt

SEQ ID NO: 98030 - DNA, 120 bp, Artificial Sequence
  ENSG00000090989_27 (sequence is synthesized)
acaaatatttacacaacatgtaccttttggaaggtatacctgatctttaaagcaggtaaacatgttctaaaaattgacacattaatttgaaataatataggaaattgaagcttagatttt

SEQ ID NO: 98031 - DNA, 120 bp, Artificial Sequence
  ENSG00000090989_28 (sequence is synthesized)
atgataaacttaaaagaataggtacaacttttctgctttatttaaattttattttctggtttatttaaatttagtcaaattctgtttgtggcatttaacttcatacttggaaaaatatac

SEQ ID NO: 98032 - DNA, 120 bp, Artificial Sequence
  ENSG00000090989_29 (sequence is synthesized)
agtctcccactgttgaggaactcttctggagagtatatttttatgtgataataagtagagatgatgaagaaatgatttttgtatgccaaaggatacaaaaatgtttttatttaagcgaga

SEQ ID NO: 98033 - DNA, 120 bp, Artificial Sequence
  ENSG00000090989_30 (sequence is synthesized)
attaatcaaatctgttttaagaaaattaattacttgattttgaaaactgtaagatatactaatgaagttcttatggaaaataacctattttggagtaatatcccaagctggcagaggctc

SEQ ID NO: 98034 - DNA, 120 bp, Artificial Sequence
  ENSG00000090989_31 (sequence is synthesized)
agtgaaactaaatattcttaagtgccattgacactatttattattggtctgtttttaaagcaacatgacaatatagaggaagagcaattaagattcccatacactttgaccctgttattc

SEQ ID NO: 98035 - DNA, 120 bp, Artificial Sequence
  ENSG00000090989_32 (sequence is synthesized)
catccttaagaaattatttcaaagaaatagttcattagagatgaaaagcttattgtaacattgtctatcatagcaaaacatggaaaccacttcattgtcctgtgttaggggattggttta

SEQ ID NO: 98036 - DNA, 120 bp, Artificial Sequence
  ENSG00000090989_33 (sequence is synthesized)
cttaatggtgctacaccaacaaaactgaatactgtgctgtcattaaaatgtgagactggagaaatgtatttgttctgatttagatattctgtatagtgtgattacagtgatatttaaaat

SEQ ID NO: 98037 - DNA, 120 bp, Artificial Sequence
  ENSG00000090989_34 (sequence is synthesized)
atgcaaaaggtaatatagaaaaatgaaaatataaatatggttatgtttgacttcatatttttgtaaattgttaatgttatgatgcctattcaattgttttttaagacagaaagtaaccta

SEQ ID NO: 98038 - DNA, 120 bp, Artificial Sequence
  ENSG00000090989_35 (sequence is synthesized)
tttttatatcctgtgaaatacatcaaagttttggactatgaaatttaaaacaagcatgaaggacttggggaattgaaaaattgaaattgttatatgtgttttattaataagaagtacatg

SEQ ID NO: 98039 - DNA, 70 bp, Artificial Sequence
  ENSG00000090989_36 (sequence is synthesized)
agctaacaagcatttctttgaaggtgttgaagctcgcgtggcacagggcataagggaggaggaagtaagt

SEQ ID NO: 98040 - DNA, 120 bp, Artificial Sequence
  ENSG00000090989_37 (sequence is synthesized)
gctagatggggtaagactttcctgaattctatgaataagtgatgtatagtggattgagaaggctaatgatgttcatattatactacctcagcacttaagcctttatagtgtgttattgcc

SEQ ID NO: 98041 - DNA, 120 bp, Artificial Sequence
  ENSG00000090989_38 (sequence is synthesized)
atctttatctataagcacattaccagctgccatcagtcttttactgttcttgttcaaaagatgaactattcctgttaagccaatgaagacagttggctgagattctggatttggggaggt

SEQ ID NO: 98042 - DNA, 120 bp, Artificial Sequence
  ENSG00000090989_39 (sequence is synthesized)
ctgtatgtattcacacatcaaaagattacaaggaactctacaatattaacaatgttcatctcagaagtatgttaataagtgattgttattttattgtttatactttcacacactgatttt

SEQ ID NO: 98043 - DNA, 120 bp, Artificial Sequence
  ENSG00000090989_40 (sequence is synthesized)
tgcatggtgattatacactactttgtaatcagatttttttaatgtaaataataataaatgcaggtcttagccattgtttcttttcatttccttgaagcatttctttgaaggtgttgaagc

SEQ ID NO: 98044 - DNA, 120 bp, Artificial Sequence
  ENSG00000091009_0 (sequence is synthesized)
agttcctgttaggccccggccgggggagtaggttgaagtctcctaagatgcccggtgggctggggcaccgggagctgtgaagggaacgtgagggggcggcgtagtggagacccacggcag

SEQ ID NO: 98045 - DNA, 120 bp, Artificial Sequence
  ENSG00000091009_1 (sequence is synthesized)
gcctgaagaagagcggcggccgagcccgccttccctgcaccatgctcatagaggatgtggatgccctcaagtcctggctggccaagttactggagccgatatgtgatgctgatccttcag

SEQ ID NO: 98046 - DNA, 120 bp, Artificial Sequence
  ENSG00000091009_2 (sequence is synthesized)
ccttagccaactatgttgtagcactggtcaagaaggacaaacctgagaaagaattaaaagccttttgtgctgatcaacttgatgtctttttacaaaaagaaacttcaggttttgtggaca

SEQ ID NO: 98047 - DNA, 120 bp, Artificial Sequence
  ENSG00000091009_3 (sequence is synthesized)
aactatttgaaagtctctatactaagaactaccttccacttttggaaccagtaaagcctgagccaaaaccactagtccaagaaaaagaagaaattaaagaagaggtatttcaggagccag

SEQ ID NO: 98048 - DNA, 120 bp, Artificial Sequence
  ENSG00000091009_4 (sequence is synthesized)
cagaggaagaacgagatggcagaaaaaagaaatatcctagtccccagaagactcgttcagaatctagtgaacgaaggacacgtgagaaaaaaagagaagacgggaaatggagagactatg

SEQ ID NO: 98049 - DNA, 120 bp, Artificial Sequence
  ENSG00000091009_5 (sequence is synthesized)
accggtactatgagcggaatgaattgtaccgtgagaagtatgactggagaagaggcaggagtaagagtcggagtaagagtcgaggcctgagtcgcagtagaagccgaagtagggggcgca

SEQ ID NO: 98050 - DNA, 120 bp, Artificial Sequence
  ENSG00000091009_6 (sequence is synthesized)
gcaaagaccgggatccaaataggaatgttgagcacagggaaagatcgaagtttaagagtgaaaggaatgacctggagagttcctatgtgcctgtgtctgcaccacctccaaactcttctg

SEQ ID NO: 98051 - DNA, 120 bp, Artificial Sequence
  ENSG00000091009_7 (sequence is synthesized)
agcagtattcctctggggcacagtctattcccagcactgttactgtgatcgcacctgctcaccactctgaaaacacaactgagagttggtctaattactataacaatcatagctcttcca

SEQ ID NO: 98052 - DNA, 120 bp, Artificial Sequence
  ENSG00000091009_8 (sequence is synthesized)
attcttttggtcgaaacctaccaccaaagaggcgatgcagagattatgatgaaagaggattttgtgtacttggtgacctttgtcagtttgatcatggaaatgatcccctagttgttgatg

SEQ ID NO: 98053 - DNA, 120 bp, Artificial Sequence
  ENSG00000091009_9 (sequence is synthesized)
aagttgctctgccaagtatgattcctttcccaccccctcctcctgggcttcctcctccaccacctcctggaatgttaatgcctccaatgccaggtccaggcccaggcccgggcccaggtc

SEQ ID NO: 98054 - DNA, 120 bp, Artificial Sequence
  ENSG00000091009_10 (sequence is synthesized)
caggcccaggcccgggcccaggtccaggtcctggccatagtatgagacttcctgttccccaaggacatggtcagcctccaccatccgttgtgcttcccataccaagaccacctataacac

SEQ ID NO: 98055 - DNA, 120 bp, Artificial Sequence
  ENSG00000091009_11 (sequence is synthesized)
aatcaagcttgataaacagccgtgaccagcctgggacaagtgcagtgcccaatcttgcatcagtgggaacaagactacctcctcctttaccccagaacctcctttacacagtatcagaac

SEQ ID NO: 98056 - DNA, 120 bp, Artificial Sequence
  ENSG00000091009_12 (sequence is synthesized)
gacagcccatgtactctcgtgaacatggtgctgctgcatctgagcgacttcagttggggacaccgcctcctctgttggcagctcgtttggtgccacctcgaaacctcatgggatcctcca

SEQ ID NO: 98057 - DNA, 120 bp, Artificial Sequence
  ENSG00000091009_13 (sequence is synthesized)
ttggataccatacctcagtctccagccctacccctctggttccagatacatatgaaccagatggttacaacccagaagctcctagtattactagttctggtagatctcagtacagacagt

SEQ ID NO: 98058 - DNA, 120 bp, Artificial Sequence
  ENSG00000091009_14 (sequence is synthesized)
tcttttcaagaactcagacacagcgtcccaatctgattggcctaacatctggagatatggatgtaaatccaagagctgctaacattgtgatccagactgaaccaccagttcctgtttcga

SEQ ID NO: 98059 - DNA, 120 bp, Artificial Sequence
  ENSG00000091009_15 (sequence is synthesized)
ttaatagcaacataaccagagtagttcttgaaccagatagtcgaaaaagagctatgagtggtttggaagggccactcacaaagaaaccttggctgggaaagcaaggaaataacaatcaaa

SEQ ID NO: 98060 - DNA, 120 bp, Artificial Sequence
  ENSG00000091009_16 (sequence is synthesized)
ataaaccagggttcttacgaaagaatcagtatacaaacaccaaattagaagtcaagaaaatccctcaggaattgaacaacattaccaagctcaatgaacacttcagcaaatttggaacta

SEQ ID NO: 98061 - DNA, 120 bp, Artificial Sequence
  ENSG00000091009_17 (sequence is synthesized)
ttgttaatatccaggttgcttttaagggtgacccagaagcagccctaatccaatatcttaccaatgaggaggccaggaaagccatttctagcacagaagcagttctaaacaaccgattca

SEQ ID NO: 98062 - DNA, 120 bp, Artificial Sequence
  ENSG00000091009_18 (sequence is synthesized)
ttcgagtcttgtggcatagggaaaataatgagcaaccgacactacagtcctcagcacagctgctcctgcaacaacagcaaacacttagtcacctctcacagcagcaccatcacctgccac

SEQ ID NO: 98063 - DNA, 120 bp, Artificial Sequence
  ENSG00000091009_19 (sequence is synthesized)
agcatctacatcagcagcaggtgctagtggcccagtctgctccttcaacagtgcacggaggtatccagaagatgatgagcaaaccacagacatcaggtgcatatgttcttaacaaagttc

SEQ ID NO: 98064 - DNA, 120 bp, Artificial Sequence
  ENSG00000091009_20 (sequence is synthesized)
ctgttaaacatcgtcttggacatgcaggtggtaaccagagtgatgcatcacatttgttgaatcagtctggtggtgctggagaagattgccagatattttcaactccaggccatccaaaaa

SEQ ID NO: 98065 - DNA, 120 bp, Artificial Sequence
  ENSG00000091009_21 (sequence is synthesized)
tgatttacagctcctcaaacttaaagacaccttcaaagctctgttcagggtctaaatctcatgatgttcaagaagtgcttaaaaaaaaacaggaagcaatgaagttacaacaagatatga

SEQ ID NO: 98066 - DNA, 120 bp, Artificial Sequence
  ENSG00000091009_22 (sequence is synthesized)
ggaaaaaaagacaggaagtgttagaaaagcaaatagaatgccaaaagatgttaatatccaagttagaaaaaaacaaaaacatgaaaccagaagaaagagcaaatataatgaagactttga

SEQ ID NO: 98067 - DNA, 120 bp, Artificial Sequence
  ENSG00000091009_23 (sequence is synthesized)
aagagcttggagagaagatctcacaattaaaagatgaattaaaaacatcttctgcagtctccacaccatctaaagtgaagacaaaaacggaggcccagaaggagttattagatactgaac

SEQ ID NO: 98068 - DNA, 120 bp, Artificial Sequence
  ENSG00000091009_24 (sequence is synthesized)
tggacctccacaagaggctgtcctcaggagaagacaccacagaattacggaaaaaactcagtcagttacaggttgaggctgcacggttaggtattttacctgtgggtcgaggaaagacca

SEQ ID NO: 98069 - DNA, 120 bp, Artificial Sequence
  ENSG00000091009_25 (sequence is synthesized)
tgtcctctcaaggtcgaggaagaggccgagggcgtggaggaagaggaaggggctcactaaatcacatggtggtggaccatcgtcccaaagcactaacagttggaggattcattgaggaag

SEQ ID NO: 98070 - DNA, 120 bp, Artificial Sequence
  ENSG00000091009_26 (sequence is synthesized)
aaaaagaagacttgcttcagcatttctcaaccgcaaaccaagggccaaaatttaaagaccgtcggctacagatatcatggcacaagcccaaggtaccatctatatccactgagactgaag

SEQ ID NO: 98071 - DNA, 120 bp, Artificial Sequence
  ENSG00000091009_27 (sequence is synthesized)
acgatgaagatgaagatgaatatgagtctcgctcatggcgaagatgaaatctgatgctagctgtataatttttaggaatattgtttagaagaacaacttttaaaaattatttaaaagaag

SEQ ID NO: 98072 - DNA, 120 bp, Artificial Sequence
  ENSG00000091009_28 (sequence is synthesized)
tcaatgagccaaaaaaaatttttttatttttcttttcaacacagtaggttcaagaacagcaagtttgctatttaaacacatctcataactgtacatgatattaaagcaccaaaggcctag

SEQ ID NO: 98073 - DNA, 120 bp, Artificial Sequence
  ENSG00000091009_29 (sequence is synthesized)
tgacttttacacagttgtgaagatccacagcaatgacatggataatctctagagccttattttccacaccaccttttttttgttgctgttggtgttggattatgatgtaaatgacagggt

SEQ ID NO: 98074 - DNA, 120 bp, Artificial Sequence
  ENSG00000091009_30 (sequence is synthesized)
gttcagaaattttattttggattataatctactgataaaatttaattaaatgtcaaaatcacctgtaatcttttaactctcagttgttatggatgggtcatcagacagtaggaaatattt

SEQ ID NO: 98075 - DNA, 120 bp, Artificial Sequence
  ENSG00000091009_31 (sequence is synthesized)
cagttgttatggatgggtcatcagacagtaggaaatatttgtaattaaaatacccttttgctttcaagagtggtcttggaagaaaaatatgtttattttaattttaattttttttttttt

SEQ ID NO: 98076 - DNA, 120 bp, Artificial Sequence
  ENSG00000091009_32 (sequence is synthesized)
tttttcatggtttttatgtgtggtagtactagttcagtgaaaatcacaacaaactgtgtgttcttaaatgctacagcaatggtagctagctctatagtatttccattctcttgtcatatg

SEQ ID NO: 98077 - DNA, 120 bp, Artificial Sequence
  ENSG00000091009_33 (sequence is synthesized)
aactcctggacttttcctgctactgattcttagtttgctttgatatttagtgagcgctggttcggctggtctttttaaaaatttttataactcagaatgtaaaaggctttcacctattgc

SEQ ID NO: 98078 - DNA, 120 bp, Artificial Sequence
  ENSG00000091009_34 (sequence is synthesized)
ccctttctcgtcccccttttcttcctcttgcctttctattaataggcctgacttagtcatcattgatataagtggttcatttgggcaaccgcaggcagtctccaataaaaggttcaaacc

SEQ ID NO: 98079 - DNA, 120 bp, Artificial Sequence
  ENSG00000091009_35 (sequence is synthesized)
agcacctggataaataagtgatgttttgatgagaatgatggaaggattttggggagaagagaatcaccagctttattttttccctcttttgaagcttcagttcagtatagttacacagaa

SEQ ID NO: 98080 - DNA, 120 bp, Artificial Sequence
  ENSG00000091009_36 (sequence is synthesized)
gggtttaaaaatgtctgaaattcttttcctaaatttaaaccatgatggtgaggtgactggggggtggggggtggaggtgggagggggttgagggctgagtatgctagtaataaatgggag

SEQ ID NO: 98081 - DNA, 120 bp, Artificial Sequence
  ENSG00000091009_37 (sequence is synthesized)
tcatatatgactttgttcagatgaccttattttttcataattttgtagcttgttgctatccatgaacatacgcatccctcagtagacagtttcctttactgtgtgcatttttactgtaca

SEQ ID NO: 98082 - DNA, 120 bp, Artificial Sequence
  ENSG00000091009_38 (sequence is synthesized)
ctgtatagagtagagtatctgttaagtaaaatatatatgtaaatttatgtcttcgtgttctgaatgttagatggaaaagcagaggagcaacactacactgtactgacccctgggaaaata

SEQ ID NO: 98083 - DNA, 120 bp, Artificial Sequence
  ENSG00000091009_39 (sequence is synthesized)
aaatgattaatgtacctaggctgtcactttttcaaggatatacacatctgtgtttttatatatgtgtggtatgaaaatttgaaacctcctgttgtctccaaaagggtcttggtgaccact

SEQ ID NO: 98084 - DNA, 120 bp, Artificial Sequence
  ENSG00000091009_40 (sequence is synthesized)
atatcaaggattttgtttgctgaggtaaagacaatttctcaatatagaaactattcactaagaacttaaaaccatcaggattctagatttacttagctataagaagttaaatcccacgtt

SEQ ID NO: 98085 - DNA, 120 bp, Artificial Sequence
  ENSG00000091009_41 (sequence is synthesized)
ctgataatctttattcttctacatgttttcctggaatgatgtgtcaaaccagggtcatttttaagttcatataattttctttcataataatgaggacttcctttttctaggttattgtta

SEQ ID NO: 98086 - DNA, 120 bp, Artificial Sequence
  ENSG00000091009_42 (sequence is synthesized)
tatttctagtaacactgaaggtaaaataagcttataaaagaaggaaaacatcagaatggtgtatctagaatacacaatcttgctccttactcctccatcatctctaatgaaatttttctt

SEQ ID NO: 98087 - DNA, 120 bp, Artificial Sequence
  ENSG00000091009_43 (sequence is synthesized)
gatgtctgtggctcagtcagtatatattttgaaagattcattgtggtgaatattttgagtcctgacagtttaaacgtgatagagggaacaaaggatttatatattttttgtacaaagttt

SEQ ID NO: 98088 - DNA, 120 bp, Artificial Sequence
  ENSG00000091009_44 (sequence is synthesized)
tttcttaaactgtataattttgtaaataatttgtttgggttttttttttgtgtactaaaactaccagcgtatagatttcaataagaattgttgtatttttgtatttggaaactgaaaatt

SEQ ID NO: 98089 - DNA, 120 bp, Artificial Sequence
  ENSG00000091009_45 (sequence is synthesized)
acagtaaataaatggaactctaagaaaaatttcagtagacagttcaacagaatgagattccttttcatatgatttttttgacctcaaaatggacatcttatttcactctcagtaaaaagt

SEQ ID NO: 98090 - DNA, 120 bp, Artificial Sequence
  ENSG00000091009_46 (sequence is synthesized)
tgaaaatttgactttttagtattgggggcagaagatagaagtgtgttaaagtgaaaaacagttttttcagtaaggtttgaggccctttctataagttttcagtacaccttaaacaggact

SEQ ID NO: 98091 - DNA, 120 bp, Artificial Sequence
  ENSG00000091009_47 (sequence is synthesized)
aaaaatactttaaaagtgtgctttcaaagaattttaaaacatgtttgactcaaagatgaatttgaagtgagttaattataatactggaaaacttcaggttagcataaaatagtttatata

SEQ ID NO: 98092 - DNA, 120 bp, Artificial Sequence
  ENSG00000091009_48 (sequence is synthesized)
tatcccctgccccctttgggatttacttccaccatcaaatcttcaactgttagaatttcacttaaaagtgaataactgccatacatgttttcttggcatcttcatttacagaaataacat

SEQ ID NO: 98093 - DNA, 120 bp, Artificial Sequence
  ENSG00000091009_49 (sequence is synthesized)
acagcatctaaagcaagttctgtccctcttaatgtgtatgacatctttttaagtagctgatcagcaataatagccaccagttgactaggtcagcctgatatactagtggatcactgtcca

SEQ ID NO: 98094 - DNA, 120 bp, Artificial Sequence
  ENSG00000091009_50 (sequence is synthesized)
agataaaaaggtaaccccaagtattgcaaaatttccctcaatttctttatgtaacattgaagaaatgttgttaccagctaagatgataaattggaaaacagtcttgttaaggtgaaaggg

SEQ ID NO: 98095 - DNA, 120 bp, Artificial Sequence
  ENSG00000091009_51 (sequence is synthesized)
gtccttggtgatggatcattatttcaaaaaagaaaaaaatcatgtgaaaaggaatagtggttcctcttgatgtatagtatgcctgtattatagtttttacaaaattgtgaacttgtgtaa

SEQ ID NO: 98096 - DNA, 120 bp, Artificial Sequence
  ENSG00000091009_52 (sequence is synthesized)
tagtataataggagatattgttgaatttctaactgtttatacatttaaattcatatatgtaatgtttgttttatcaattacaatctgaatttctaagaagcatgttgacttttgcaataa

SEQ ID NO: 98097 - DNA, 120 bp, Artificial Sequence
  ENSG00000091009_53 (sequence is synthesized)
agatgcaatatggaatggttcacaattggaaaaaaaaaagaaaaaagatgaaagtattacaaatttaaaagaatttggaaaatttatgaaccattccaaaaattataacaatcaccaaaa

SEQ ID NO: 98098 - DNA, 120 bp, Artificial Sequence
  ENSG00000091009_54 (sequence is synthesized)
agtaatgttggagtttagggctttaacatgtgtattttggggaaaacattcattacatagcagtgggtcataatttatttaactattttctgtttttgggaatttatattgttttatttt

SEQ ID NO: 98099 - DNA, 120 bp, Artificial Sequence
  ENSG00000091010_0 (sequence is synthesized)
gggcgcagaaaggcgcgccgctagctgctgtctctcctcacctcccgggccgcccctgcgagtccccggcgcgtgagcacgcctgcgcgcgcccgggcccttcctggcaggctgcttgta

SEQ ID NO: 98100 - DNA, 120 bp, Artificial Sequence
  ENSG00000091010_1 (sequence is synthesized)
agatgagtgaagaagcaggtgggggagaggggaggcagcgagcgagagggcgaggggagcgcgggcgctgagcagcgctcacttggagagcggcaagcaagctagacaagcctgattcca

SEQ ID NO: 98101 - DNA, 120 bp, Artificial Sequence
  ENSG00000091010_2 (sequence is synthesized)
tgtcacccgctgccaccctgccaggagcgcgaagatgatggccatgaactccaagcagcctttcggcatgcacccggtgctgcaagaacccaaattctccagtctgcactctggctccga

SEQ ID NO: 98102 - DNA, 120 bp, Artificial Sequence
  ENSG00000091010_3 (sequence is synthesized)
ggccatgcgccgagtctgtctcccagccccgcagctgcagggtaatatatttggaagctttgatgagagcctgctggcacgcgccgaagctctggcggcggtggatatcgtctcccacgg

SEQ ID NO: 98103 - DNA, 120 bp, Artificial Sequence
  ENSG00000091010_4 (sequence is synthesized)
caagaaccatccgttcaagcccgacgccacctaccataccatgagcagcgtgccctgcacgtccacttcgtccaccgtgcccatctcccacccagctgcgctcacctcacaccctcacca

SEQ ID NO: 98104 - DNA, 120 bp, Artificial Sequence
  ENSG00000091010_5 (sequence is synthesized)
cgccgtgcaccagggcctcgaaggcgacctgctggagcacatctcgcccacgctgagtgtgagcggcctgggcgctccggaacactcggtgatgcccgcacagatccatccacaccacct

SEQ ID NO: 98105 - DNA, 120 bp, Artificial Sequence
  ENSG00000091010_6 (sequence is synthesized)
gggcgccatgggccacctgcaccaggccatgggcatgagtcacccgcacaccgtggcccctcatagcgccatgcctgcatgcctcagcgacgtggagtcagacccgcgcgagctggaagc

SEQ ID NO: 98106 - DNA, 120 bp, Artificial Sequence
  ENSG00000091010_7 (sequence is synthesized)
cttcgccgagcgcttcaagcagcggcgcatcaagctgggggtgacccaggcggacgtgggcgcggctctggctaatctcaagatccccggcgtgggctcgctgagccaaagcaccatctg

SEQ ID NO: 98107 - DNA, 120 bp, Artificial Sequence
  ENSG00000091010_8 (sequence is synthesized)
caggttcgagtctctcactctctcgcacaacaacatgatcgctctcaagccggtgctccaggcctggttggaggaggccgaggccgcctaccgagagaagaacagcaagccagagctctt

SEQ ID NO: 98108 - DNA, 120 bp, Artificial Sequence
  ENSG00000091010_9 (sequence is synthesized)
caacggcagcgaacggaagcgcaaacgcacgtccatcgcggcgccggagaagcgttcactcgaggcctatttcgctatccagccacgtccttcatctgagaagatcgcggccatcgctga

SEQ ID NO: 98109 - DNA, 120 bp, Artificial Sequence
  ENSG00000091010_10 (sequence is synthesized)
aaacagaaacgaatgaagtattcggctgtccactgattgcggcagggcgcagcgtcgggagccgggagagcctagtgctcatccctcccgggttcgggggatggttatcgggaactccaa

SEQ ID NO: 98110 - DNA, 120 bp, Artificial Sequence
  ENSG00000091010_11 (sequence is synthesized)
ggcgtttcctaggcaggttaggctctctcctccgaagccacagactttccccctttgtcccgcctggttgcctccggccttctctctctttcctttctattcccaccaaaaaaattttgg

SEQ ID NO: 98111 - DNA, 120 bp, Artificial Sequence
  ENSG00000091010_12 (sequence is synthesized)
cgctgggaaaatattgcagaagggcgggcctgagtgtacttgtgctgtccgtggtgctgaaatttgccctcgcgcaggggccgcacgacttcagagcaggagccccaaagcagaggacag

SEQ ID NO: 98112 - DNA, 120 bp, Artificial Sequence
  ENSG00000091010_13 (sequence is synthesized)
tcaattggcccaaccgcccgaagctagggtgaaaatgccactttgctaagcgcgattaggcaaagggtgaagggataaaaaggaagtgatcaataataacacaaagtctaggatatctaa

SEQ ID NO: 98113 - DNA, 120 bp, Artificial Sequence
  ENSG00000091010_14 (sequence is synthesized)
gggggacacaaacatgcactggagatttattagagtatataaaatacatgtatgtttccaaaggatagccttatactcccttccttgcctaaattctattcaccttatcctttggtttgg

SEQ ID NO: 98114 - DNA, 120 bp, Artificial Sequence
  ENSG00000091010_15 (sequence is synthesized)
cgtaaattctcataaggtagcatgaagattaggttcagggaaagtatgcagggagttgcgggctccaagttgccattttttcgtggtaagtagggctccaaaacaggtgggcccagtctg

SEQ ID NO: 98115 - DNA, 120 bp, Artificial Sequence
  ENSG00000091010_16 (sequence is synthesized)
gcgactgaaaattctgggatcgcttggctgtttgtaatcagctgccagcaccagctctggccatctttcactacctactggtgtttgaggggtaattactgcttgctggagagcgggagt

SEQ ID NO: 98116 - DNA, 120 bp, Artificial Sequence
  ENSG00000091010_17 (sequence is synthesized)
ttgtagtattcataaccgttgaggactctctgaccccagctcgctgctcttgccagattgccagctcagcgtgcagtcggctgctggaaaacgactgtaacttctctgcattatatgcaa

SEQ ID NO: 98117 - DNA, 120 bp, Artificial Sequence
  ENSG00000091010_18 (sequence is synthesized)
gtcctttcaacacgtctaacctccttgcacttttgttattactgttgttgttaacatcgttcattactattatttatttaattctgcttctttccattccctttatgtgggtgtctttcg

SEQ ID NO: 98118 - DNA, 120 bp, Artificial Sequence
  ENSG00000091010_19 (sequence is synthesized)
gtggaagttcacttatagttttgtgagggaagaggagtgggaccatgggcctgaacccttctcaccctgcccctctagcccaaattttattttattttttcgttgtttcatgtagtttgt

SEQ ID NO: 98119 - DNA, 120 bp, Artificial Sequence
  ENSG00000091010_20 (sequence is synthesized)
gtgttgctgtgtgacctttggtttcattctctgaatagatacaaataaaatattaagttttcttttccctttaccccttgaattaacttctaaaataaatgctttatttttcaacccgaa

SEQ ID NO: 98120 - DNA, 120 bp, Artificial Sequence
  ENSG00000091039_0 (sequence is synthesized)
agaaaggcggcgacgcggcggatgacaacattaggccgcgacgcgctcctggccaggcggcggctgtagtgttagctttggacgccgcagtagccgctgccggtagcaagccgactgagg

SEQ ID NO: 98121 - DNA, 120 bp, Artificial Sequence
  ENSG00000091039_1 (sequence is synthesized)
gagggaaggtgggggtccgcccgggctggtggacctcggggccgaaagttcccgccccgctcgggggctgagccggcagtgcctccgcggccgctgggcagcgcccttcgtccaggctcg

SEQ ID NO: 98122 - DNA, 120 bp, Artificial Sequence
  ENSG00000091039_2 (sequence is synthesized)
ccagctgccgccgacgacagcggccgagagaagttggggtctgactagacgcttacggggcctcggaccccggcgccgcggcgacctcggaggaaccggctccttgcgtcccgcctccct

SEQ ID NO: 98123 - DNA, 120 bp, Artificial Sequence
  ENSG00000091039_3 (sequence is synthesized)
gggagctccgcacgggatttgcagatttacagaatggctgcacattaatggaaagagaagcataaacctatcttctttcattatggagggaggtttggcagatggagaacctgatcgaac

SEQ ID NO: 98124 - DNA, 120 bp, Artificial Sequence
  ENSG00000091039_4 (sequence is synthesized)
ttcgcttcttggtgatagcaaagatgtccttgggccatcaactgttgtagcaaacagtgacgaatctcagcttctgacaccaggaaagatgagtcagcgccaaggaaaagaagcttatcc

SEQ ID NO: 98125 - DNA, 120 bp, Artificial Sequence
  ENSG00000091039_5 (sequence is synthesized)
aacgccaaccaaagatttgcatcagccatctcttagtccagcaagtcctcatagccagggttttgaaagagggaaggaagatatttctcaaaataaagatgaatcttcactttctatgtc

SEQ ID NO: 98126 - DNA, 120 bp, Artificial Sequence
  ENSG00000091039_6 (sequence is synthesized)
aaagagcaagtctgaatctaaactttataatggctcagagaaggacagttcaacttcaagcaaactcacaaaaaaagaatctcttaaggtacaaaagaaaaattaccgagaagaaaagaa

SEQ ID NO: 98127 - DNA, 120 bp, Artificial Sequence
  ENSG00000091039_7 (sequence is synthesized)
aagagccacaaaggagctgctcagtacaatcacagatccttctgttattgttatggctgattggttaaagattcgtggtactctaaagagctggaccaagttatggtgtgtgttgaaacc

SEQ ID NO: 98128 - DNA, 120 bp, Artificial Sequence
  ENSG00000091039_8 (sequence is synthesized)
tggggtgctactgatctataaaacccaaaaaaatggtcagtgggtaggaacagttcttctgaatgcctgtgaaatcattgaacgtccatcaaaaaaggatggcttttgtttcaaactttt

SEQ ID NO: 98129 - DNA, 120 bp, Artificial Sequence
  ENSG00000091039_9 (sequence is synthesized)
ccatcctttggagcaatctatttgggcagtgaagggtccaaaaggtgaagcggttggatccattactcaacccttacctagcagttatttgatcatccgagctacttcagagtcagatgg

SEQ ID NO: 98130 - DNA, 120 bp, Artificial Sequence
  ENSG00000091039_10 (sequence is synthesized)
aaggtgctggatggatgctttggagttggctttgaaatgttctagtcttcttaaacgtacaatgatcagagaaggaaaggaacatgacctgagcgtttcatcagatagcacacatgtgac

SEQ ID NO: 98131 - DNA, 120 bp, Artificial Sequence
  ENSG00000091039_11 (sequence is synthesized)
tttctatggcttactacgtgctaacaatctccacagtggtgataacttccagttaaatgatagtgaaattgaacgacaacattttaaggaccaagatatgtattctgataaatctgataa

SEQ ID NO: 98132 - DNA, 120 bp, Artificial Sequence
  ENSG00000091039_12 (sequence is synthesized)
agaaaatgatcaagaacatgatgagtctgataatgaggtgatggggaaaagtgaagaaagtgacacagatacatcagaaagacaagatgactcatatatcgaacctgagcctgttgagcc

SEQ ID NO: 98133 - DNA, 120 bp, Artificial Sequence
  ENSG00000091039_13 (sequence is synthesized)
tttaaaggagactacctacactgaacagagccatgaagaacttggagaggcaggtgaggcttctcaaacagaaactgtatctgaagaaaacaaaagccttatctggacactattgaaaca

SEQ ID NO: 98134 - DNA, 120 bp, Artificial Sequence
  ENSG00000091039_14 (sequence is synthesized)
agtccgtcctggcatggacctatccaaggtggttctgcctacatttattttggaaccccgttctttcctggataaactttcagattactactatcatgcagatttcctatctgaggcagc

SEQ ID NO: 98135 - DNA, 120 bp, Artificial Sequence
  ENSG00000091039_15 (sequence is synthesized)
tcttgaagaaaatccttatttccgtttgaagaaagtagtgaaatggtatttgtcaggattctataaaaagccaaagggactgaagaaaccttataatcctatacttggcgagactttccg

SEQ ID NO: 98136 - DNA, 120 bp, Artificial Sequence
  ENSG00000091039_16 (sequence is synthesized)
ttgtttatggattcatcccagaacaaacagcaaaactttttatattgctgaacaggtgtcccatcatccaccaatatctgccttttatgttagtaatcgaaaagatggattttgccttag

SEQ ID NO: 98137 - DNA, 120 bp, Artificial Sequence
  ENSG00000091039_17 (sequence is synthesized)
cggtagtatcctggctaagtctaagttttatggaaactcattatctgcaatattagagggagaagcacggttaactttcttgaatagaggtgaagattatgtaatgacaatgccatacgc

SEQ ID NO: 98138 - DNA, 120 bp, Artificial Sequence
  ENSG00000091039_18 (sequence is synthesized)
tcattgtaaaggaattctttatggtacaatgacactggagcttggtggaacagtcaatattacatgtcaaaaaactggatacagtgcaatacttgaatttaaactaaagccattcctagg

SEQ ID NO: 98139 - DNA, 120 bp, Artificial Sequence
  ENSG00000091039_19 (sequence is synthesized)
gagtagtgactgtgttaatcaaatatcagggaaacttaaactgggaaaagaagtcctagctactttggaaggtcattgggatagtgaagtttttattactgataaaaagactgataattc

SEQ ID NO: 98140 - DNA, 120 bp, Artificial Sequence
  ENSG00000091039_20 (sequence is synthesized)
agaggttttctggaatccaacacctgacattaagcaatggagattaataaggcacactgtaaaatttgaagaacagggagattttgaatcagagaaactctggcaacgggtaactcgagc

SEQ ID NO: 98141 - DNA, 120 bp, Artificial Sequence
  ENSG00000091039_21 (sequence is synthesized)
cataaatgccaaagaccaaactgaagctacccaagagaagtatgttttggaagaagctcaaagacaagctgccagggatcggaaaacaaaaaatgaagagtggtcttgcaaattatttga

SEQ ID NO: 98142 - DNA, 120 bp, Artificial Sequence
  ENSG00000091039_22 (sequence is synthesized)
acttgatccactcacaggagaatggcattacaagtttgcagatacccgaccatgggacccacttaatgatatgatacagtttgaaaaagatggtgttattcagaccaaagtgaaacatcg

SEQ ID NO: 98143 - DNA, 120 bp, Artificial Sequence
  ENSG00000091039_23 (sequence is synthesized)
tactccaatggttagcgtccccaaaatgaaacataagccaaccaggcaacagaagaaagtagcaaaaggctattcctccccagaacctgacattcaagactcctctggaagtgaagctca

SEQ ID NO: 98144 - DNA, 120 bp, Artificial Sequence
  ENSG00000091039_24 (sequence is synthesized)
atcagtaaaaccaagtacaagaagaaagaaaggaatagaactgggagacattcagagttccatcgaatctataaaacaaacacaggaagaaattaaaagaaatattatggctcttcgaaa

SEQ ID NO: 98145 - DNA, 120 bp, Artificial Sequence
  ENSG00000091039_25 (sequence is synthesized)
tcatttagtttcaagcacaccggccacggattattttctgcaacaaaaagactacttcatcattttcctcctgattttgcttcaagtcataataaacttcatgttcaagtagaagttctc

SEQ ID NO: 98146 - DNA, 120 bp, Artificial Sequence
  ENSG00000091039_26 (sequence is synthesized)
taccattgaatcagtgaactagaaagatctgatttggcctgggaccagtgttcaagttggtttggtctttattaaaaatcacaatattccgaaaacaaaaaaacctaggagataaatgta

SEQ ID NO: 98147 - DNA, 120 bp, Artificial Sequence
  ENSG00000091039_27 (sequence is synthesized)
gaggtattgacttttcgtatcttttatcttcacactgaaacaagagctatcctatttgattattaaagtgagctatgtgttaagtgccaggacatttctagcttttgtgagaatgtgtct

SEQ ID NO: 98148 - DNA, 120 bp, Artificial Sequence
  ENSG00000091039_28 (sequence is synthesized)
acatatgagtataataaacccacatgtatacacaattgtctcttatgtactcctacctgacagtagtctttgtattctatagtatgttctgagatataatgttaacattgttcataacaa

SEQ ID NO: 98149 - DNA, 120 bp, Artificial Sequence
  ENSG00000091039_29 (sequence is synthesized)
aaaatgctatcaatcttataaatatatgtaatctattttcttcataaaacaggcacaaaagttttatcagtaaggaattacagattgagaaatgatggaataatagacataattaattca

SEQ ID NO: 98150 - DNA, 120 bp, Artificial Sequence
  ENSG00000091039_30 (sequence is synthesized)
actactgttaaaatcatttgcaaagcactcagctcaattatcttcttagaaagaaagaaaaagtatgaatggtcaaaatgaatacatcgagagagataaatggcaaattgcttttttaaa

SEQ ID NO: 98151 - DNA, 120 bp, Artificial Sequence
  ENSG00000091039_31 (sequence is synthesized)
agtttacataagttttttttaacccctagaatttaatatttgtagatgcaggtaaatatatatacttacgtgtatatcagtataaaaacactggtgtgcaattaattggattgattataa

SEQ ID NO: 98152 - DNA, 120 bp, Artificial Sequence
  ENSG00000091039_32 (sequence is synthesized)
taccaccttaagcacttgctgaaaaaagtgtggtcaaaattgattgctgtccttttgtcttatttttgtttttcttaagtcagctggttcataacataggccaaattctagagatgttta

SEQ ID NO: 98153 - DNA, 120 bp, Artificial Sequence
  ENSG00000091039_33 (sequence is synthesized)
tagagcatttgaagtgctgataatttatgttttttcattatgaaaacttattttagctttagactccagtgtgttcagtgaataagtagaatataaaaaaatataaccagtattttactt

SEQ ID NO: 98154 - DNA, 120 bp, Artificial Sequence
  ENSG00000091039_34 (sequence is synthesized)
caaaagccaaaaagaggcaataagaaaagacactttgtggtggcctttatgtgtgcattaaaattggtttctgtaaaacgtgtaataagttgagtatctacgaagagtatcaagttctga

SEQ ID NO: 98155 - DNA, 120 bp, Artificial Sequence
  ENSG00000091039_35 (sequence is synthesized)
agtttaatttttttattatcctcctctcttcttagtaacttctttctgtggcaaaaccacaattctttaagattcctattgttcaggctaaggcaaatttttttgtttgtttcttcagtt

SEQ ID NO: 98156 - DNA, 120 bp, Artificial Sequence
  ENSG00000091039_36 (sequence is synthesized)
taatattttgattttgtgtttttacgtaaatatttatattccttgaaagcaatttttgccaaggtagttcagtttaggaatatgttgttctaaaatatgtcttagaatcctgaaagcata

SEQ ID NO: 98157 - DNA, 120 bp, Artificial Sequence
  ENSG00000091039_37 (sequence is synthesized)
gattttgaaatgtttttttaatgaaaatgaaggtcagagagaataattgccctgaccacatttgcctttcagtaggaggaggctgtgaaatagtaaaattataatcgtttatgccatgat

SEQ ID NO: 98158 - DNA, 120 bp, Artificial Sequence
  ENSG00000091039_38 (sequence is synthesized)
aaatacaagattggtaaataaatacattgattggtaaattatgagaatcaaaatgataaaaagagcctgcttttttccctaaccaatatagctatcttaagtatccttaggtttctgtga

SEQ ID NO: 98159 - DNA, 120 bp, Artificial Sequence
  ENSG00000091039_39 (sequence is synthesized)
agaaccatttcccatgttttcttggcaaaataatgctgtattccatatgtacatgtgaaatgatgttttaaattgataaaagcttaaataagatctacctatacccagtattttcatgat

SEQ ID NO: 98160 - DNA, 120 bp, Artificial Sequence
  ENSG00000091039_40 (sequence is synthesized)
attagaacaaatgggtttttggttatattttatatttgtcaatataatttttgtattcacattctgttacactctgcctattcattgatatatgatattctgtaaatattgtacaatttg

SEQ ID NO: 98161 - DNA, 120 bp, Artificial Sequence
  ENSG00000091039_41 (sequence is synthesized)
atcttttttatggtttaaattagttaattacatacaaattgattggcttatcacaaaaatcatttcatcagtaaaccttgttaacattttgtactggtgacccacctcttaggactttgg

SEQ ID NO: 98162 - DNA, 120 bp, Artificial Sequence
  ENSG00000091039_42 (sequence is synthesized)
tcttatccacgtgtatgttgttttcatttggtccaaataatattttatttgtatgggtatcttctaagactaaataggtagttgtgttctttatttttaaaatttctttttagagcaaat

SEQ ID NO: 98163 - DNA, 120 bp, Artificial Sequence
  ENSG00000091039_43 (sequence is synthesized)
gttatgggttcttacccaaagagtcaaaaactatttcttaagaaagagcagagttattcatgactgttctttatacactaaaagcatgcatctaatctaatagtcctcttattatgcttt

SEQ ID NO: 98164 - DNA, 120 bp, Artificial Sequence
  ENSG00000091039_44 (sequence is synthesized)
tagttgtatgagtctctttctatgaactgaacacaaaactcaggaattggtggcttaattttagatcagtgcttgtactaggcttagttatatgaatctttataacacataattactaac

SEQ ID NO: 98165 - DNA, 120 bp, Artificial Sequence
  ENSG00000091039_45 (sequence is synthesized)
tttgtagccatatatgtaattgactttgaatgttatttacctgaaattaatcttccttcacacatggaccgtaaacggttcccagttgtctgagagcctcatgagggtttctaggattta

SEQ ID NO: 98166 - DNA, 120 bp, Artificial Sequence
  ENSG00000091039_46 (sequence is synthesized)
tgaccttatgaccagtttttttcatttaccaagattttattttcctacatgaaaatttaattgagtaataattattcacatgtgcattttctttttagctgttaaatgtactatgccatc

SEQ ID NO: 98167 - DNA, 90 bp, Artificial Sequence
  ENSG00000091039_47 (sequence is synthesized)
gggcatgtgaaatgttaagttacagcaatagatattttatttgtatttcatgttagtacttttttgttttatatcacttataaaggtaca

SEQ ID NO: 98168 - DNA, 120 bp, Artificial Sequence
  ENSG00000091039_48 (sequence is synthesized)
tgttagtacttttttgttttatatcacttataaaggtacagtgtactctttgtcacagctcagttggtaaccgcattccattgaaaagttggccttgtaaaatacaactctcatttaata

SEQ ID NO: 98169 - DNA, 120 bp, Artificial Sequence
  ENSG00000091039_49 (sequence is synthesized)
ttcatgcttttgtgcctttaagaaaatattttttgtcattttttgtgttacagaactataatgtgattcaaggtgtttataggcttgtcataaaagggtcatttctgtgtgttactttct

SEQ ID NO: 98170 - DNA, 120 bp, Artificial Sequence
  ENSG00000091039_50 (sequence is synthesized)
ttttatatagctatagtatatttaaacaataatactatcttttataggggtttgtctatttacctattctttactcagacattgatgtagacttgtcagattattctgagtattgttaac

SEQ ID NO: 98171 - DNA, 120 bp, Artificial Sequence
  ENSG00000091039_51 (sequence is synthesized)
agtgccttttcgatggaatcacactttttggctgtcaccttgtgccatatacacacaaaattttgtggaaggcagttttaactttctgaagaatatctgtcaaaatttaagaaaacaaat

SEQ ID NO: 98172 - DNA, 120 bp, Artificial Sequence
  ENSG00000091039_52 (sequence is synthesized)
gtataaaattccattttttccagtgtttagcatttctagtaagcagtgaggttgtttgacatacagtgatgatggcattattgataagccatacatgagactgcagattatattgaatca

SEQ ID NO: 98173 - DNA, 120 bp, Artificial Sequence
  ENSG00000091039_53 (sequence is synthesized)
tattaaatgtacagaaataaaatattagatttatatcaaattttccaatttgaaccagtggggaaaatcccacagaaatcagtaagtttacatttcaatttctatcttatttgactaagt

SEQ ID NO: 98174 - DNA, 120 bp, Artificial Sequence
  ENSG00000091039_54 (sequence is synthesized)
ggaaagagattctttaaaatgtataacctgccattatgtaatttggtttcattttattctacctgttgtgtgagtttagtatatttaatttactttttgttactctttacatactgttta

SEQ ID NO: 98175 - DNA, 120 bp, Artificial Sequence
  ENSG00000091039_55 (sequence is synthesized)
tttttgttagtttttaattgaagatggactgttgaaattgtataggaccagtgtcttattaatatgattaatatatttagaagagccacgtgaaacccatgacaaaatgaatgtgaatat

SEQ ID NO: 98176 - DNA, 120 bp, Artificial Sequence
  ENSG00000091039_56 (sequence is synthesized)
tctttctaaaaatttagaaaatgttatctttttgcatttattatgtaaaactgttttacagtatcaaaatttttcacttaaagaaaaaaaatgccatgaaacatttgaactgatgagcca

SEQ ID NO: 98177 - DNA, 120 bp, Artificial Sequence
  ENSG00000091039_57 (sequence is synthesized)
cagaacttcagttgaaatttttttcactttttagcatgctaaatatacatctgagtttaaatgttctgtttaatggccattcataaattcaagcactaccactggtcagttttgtgtgat

SEQ ID NO: 98178 - DNA, 120 bp, Artificial Sequence
  ENSG00000091039_58 (sequence is synthesized)
agaataaaaatatgttacctgcagtgtaagtacagcacactgtcaaattcttttccttaaggtgcacagtaaatgtacagatagttataggccactgttttgtaatgtagtacatttcta

SEQ ID NO: 98179 - DNA, 120 bp, Artificial Sequence
  ENSG00000091039_59 (sequence is synthesized)
atctattattcctaacctattataactgtttgcagaaagaaaagaatttttctaataatctgtaaaattatgctaacttctacaagtaggcttctaaataaaatttttaaaaagagcaaa

SEQ ID NO: 98180 - DNA, 120 bp, Artificial Sequence
  ENSG00000091039_60 (sequence is synthesized)
tgttggaatccatcaacgttgtgcttgaaagagtatctttccttatgaatgtttaatcatggctgaggcaagctgtagattagatataaatctagaagcttcagggaagataaaaagcat

SEQ ID NO: 98181 - DNA, 120 bp, Artificial Sequence
  ENSG00000091039_61 (sequence is synthesized)
tatgtttatatccatctttgaagtaagtaaaagctgggaaggaaggagtcggaagaggtgggaagtgtggccggatagtacagaaacataatggatatgataaaaggattgcatttctga

SEQ ID NO: 98182 - DNA, 120 bp, Artificial Sequence
  ENSG00000091039_62 (sequence is synthesized)
gaagagaaaatgactttattgcttcatcttgaattgctaagtattgatcttgttttgttttcctaaagcagcaattcagtgcagggtggtttgataaaaaggtaaaacattagtagaata

SEQ ID NO: 98183 - DNA, 120 bp, Artificial Sequence
  ENSG00000091039_63 (sequence is synthesized)
gcctttcatgtttatcagttcctttttttaaaaaatcagcagcatggtttaatgctttttctgtcaggctttctctatctgtttattgctgatttgacagtctttggtccttctcctttg

SEQ ID NO: 98184 - DNA, 120 bp, Artificial Sequence
  ENSG00000091039_64 (sequence is synthesized)
ctgttaaatgtgtgtgttctttgtttgtgctggtgggttttgctacagttggatgtgagagaaaagcctgtctttgccatattggtctaattagcctttgggtgagcatatacattaaat

SEQ ID NO: 98185 - DNA, 120 bp, Artificial Sequence
  ENSG00000091039_65 (sequence is synthesized)
agaccttctgagctatgaaagaagagagctcacaacgtagattttcttcctgtactggggttttgcctgttttatttcctccccggattgatggccgaaagcttgttcggaatgcttcat

SEQ ID NO: 98186 - DNA, 120 bp, Artificial Sequence
  ENSG00000091039_66 (sequence is synthesized)
aaatttattaagtaaaacttatgaaatttcacaaactggatattcaaccaaattctttttaattaactagtattacgtagtcaatcttaatgtttttataaaaatgataagaaacttgga

SEQ ID NO: 98187 - DNA, 120 bp, Artificial Sequence
  ENSG00000091039_67 (sequence is synthesized)
aacttggagtttttggaaaagtgctagttatatttgttttaaaaatgcttttaactggaggattaaccagaagaaattatcaccgtcatattactatactatataattgccttctaagta

SEQ ID NO: 98188 - DNA, 120 bp, Artificial Sequence
  ENSG00000091039_68 (sequence is synthesized)
actgcgtttaaagaactgtggctaacctccaagagactgaagctggtaattgatttgcagatttacagaatggctgcacattaatggaaagagaagcataaacctatcttctttcattat

SEQ ID NO: 98189 - DNA, 120 bp, Artificial Sequence
  ENSG00000091039_69 (sequence is synthesized)
ttcgcttcttggtgatagcaaagatgtccttgggccatcaacaaacagtgacgaatctcagcttctgacaccaggaaagatgagtcagcgccaaggaaaagaagcttatccaacgccaac

SEQ ID NO: 98190 - DNA, 120 bp, Artificial Sequence
  ENSG00000091039_70 (sequence is synthesized)
agaggttctggattttcatattcttgggaattcttaaatgaaattgaagatattatttgcttgatctattgcctatttttctgtgatagaatgtgatattttaaaaattgcatacatatg

SEQ ID NO: 98191 - DNA, 120 bp, Artificial Sequence
  ENSG00000091039_71 (sequence is synthesized)
agaagtaagtatactgttttacagctaacttcatgaggatcagagagtagtttttcaattccttaatgatatggtcattttgtcaccttctgtcatatcttaattcagcaaaatagttta

SEQ ID NO: 98192 - DNA, 120 bp, Artificial Sequence
  ENSG00000091039_72 (sequence is synthesized)
tcatttgtggaagtgacagtattctgtttttgtgtatatgaatgtcaaatataatataaatcgtcttgcttttctgtagctcaaaactactcatttttttctttctcaattgttccagca

SEQ ID NO: 98193 - DNA, 120 bp, Artificial Sequence
  ENSG00000091039_73 (sequence is synthesized)
atagctatagattttattattattttttgtttccacatttaaagaatgcttggagtagtcctgagaagagttcatattttcaacattagctggcttgtttacatatctgtctgaaataaa

SEQ ID NO: 98194 - DNA, 120 bp, Artificial Sequence
  ENSG00000091039_74 (sequence is synthesized)
tggaaacaaaactgatctggaagttattggaatatttttatagaaaatatttacccagtaaactcaatattatttagcctttcttatttctgaacatttggtaaacatttaaccttttaa

SEQ ID NO: 98195 - DNA, 120 bp, Artificial Sequence
  ENSG00000091073_0 (sequence is synthesized)
gcgacgccgagtttcactctggctgccttctcctgagagtcggagccacagccagagccctgcccaggccgagccggagctgcagcccgagcgcggtggtgccctcagccccgtcctctt

SEQ ID NO: 98196 - DNA, 120 bp, Artificial Sequence
  ENSG00000091073_1 (sequence is synthesized)
gtcctcctcagcctcggtgccttggaatttgtgtcgctgagtcagcaagcctttcagatttgcccggtttttgttgtttgtggtttgtatcaagatgggaactcaaacaagtcattcctc

SEQ ID NO: 98197 - DNA, 120 bp, Artificial Sequence
  ENSG00000091073_2 (sequence is synthesized)
ctaaggagctggtgtcttcatccagaagggacagtttgtgccagctctccagagagaaaaggatctggtactgttctggagtggcctgtagcagacactgaaccaccagccagctgcatt

SEQ ID NO: 98198 - DNA, 120 bp, Artificial Sequence
  ENSG00000091073_3 (sequence is synthesized)
tgttgtcctggaagtcattgccaactctgccagtcacactggggtccccagagaagtcaagatctgccggaggcgctgggcaatgaccccgggactccaggccagaggggtctgaagctg

SEQ ID NO: 98199 - DNA, 120 bp, Artificial Sequence
  ENSG00000091073_4 (sequence is synthesized)
tttgggaaagcagcgggactccttgggaagatggccatggccccaagcccttccctggtgcaggtgtacaccagccccgcggctgtggccgtgtgggaatggcaggacgggctgggcacc

SEQ ID NO: 98200 - DNA, 120 bp, Artificial Sequence
  ENSG00000091073_5 (sequence is synthesized)
tggcacccctacagtgccaccgtctgcagcttcatcgagcagcagtttgtccagcagaagggccaacgttttgggcttgggagcctggcccacagcatccccttgggccaggcagacccc

SEQ ID NO: 98201 - DNA, 120 bp, Artificial Sequence
  ENSG00000091073_6 (sequence is synthesized)
tcgctggccccttacattattgacctccccagctggacccagttccgccaggacaccggcaccatgcgggctgtgcggagacacctgttcccccagcactcagcccctggccgaggtgtc

SEQ ID NO: 98202 - DNA, 120 bp, Artificial Sequence
  ENSG00000091073_7 (sequence is synthesized)
gtctgggagtggctgagcgacgatggctcctggactgcctatgaagccagcgtctgtgactatctggagcagcaggtggccaggggcaaccagctcgtggacttggcccccctggggtac

SEQ ID NO: 98203 - DNA, 120 bp, Artificial Sequence
  ENSG00000091073_8 (sequence is synthesized)
aactacactgtcaactacaccacccacacgcagaccaacaagacttccagcttctgccgcagcgtgcggcgccaagcagggccgccttacccggtgaccaccatcatcgctccgccgggc

SEQ ID NO: 98204 - DNA, 120 bp, Artificial Sequence
  ENSG00000091073_9 (sequence is synthesized)
cacacaggcgtcgcctgctcttgccaccagtgcctcagtggcagcagaactggccccgtgtcaggccgctaccgccactccatgaccaacctccctgcataccccgtcccccagcacccc

SEQ ID NO: 98205 - DNA, 120 bp, Artificial Sequence
  ENSG00000091073_10 (sequence is synthesized)
ccacacaggaccgcttctgtgtttgggacccaccaggcctttgcaccgtacaacaaaccctcactctccggggcccggtctgcgcccaggctgaacaccaccaacgcctggggcgcagct

SEQ ID NO: 98206 - DNA, 120 bp, Artificial Sequence
  ENSG00000091073_11 (sequence is synthesized)
ctggggagccagcccctctaccgctccagcctctcccacctgggaccgcagcacctgcccccaggatcctccacctccggtgcagtcagtgcctccctccccagcggtccctcaagcagc

SEQ ID NO: 98207 - DNA, 120 bp, Artificial Sequence
  ENSG00000091073_12 (sequence is synthesized)
ccagggagcgtccctgccactgtgcccatgcagatgccaaagcccagcagagtccagcaggcgctcgcaggcatgacgagtgttctgatgtcagccattggactccctgtgtgtcttagc

SEQ ID NO: 98208 - DNA, 120 bp, Artificial Sequence
  ENSG00000091073_13 (sequence is synthesized)
cgcgcaccccagcccaccagccctcccgcctcccgtctggcttccaaaagtcacggctcagttaagagattgaggaaaatgtccgtgaaaggagcgaccccgaagccagagccagagcca

SEQ ID NO: 98209 - DNA, 120 bp, Artificial Sequence
  ENSG00000091073_14 (sequence is synthesized)
gagcaggtcataaaaaactacacggaagagctgaaagtgcccccagatgaggactgcatcatctgcatggagaagctgtccacagcgtctggatacagcgatgtgactgacagcaaggca

SEQ ID NO: 98210 - DNA, 120 bp, Artificial Sequence
  ENSG00000091073_15 (sequence is synthesized)
atcgggtccctagctgtgggccacctcaccaagtgcagccatgccttccacctgctgtgcctcctggccatgtactgcaacggcaataaggatggaagtctgcagtgtccctcctgcaaa

SEQ ID NO: 98211 - DNA, 120 bp, Artificial Sequence
  ENSG00000091073_16 (sequence is synthesized)
accatctatggagagaagacggggacccagccccagggaaagatggaggtattacggttccagatgtcgctccccggccacgaggactgcgggaccatcctcatagtttacagcattccc

SEQ ID NO: 98212 - DNA, 120 bp, Artificial Sequence
  ENSG00000091073_17 (sequence is synthesized)
catggtatccagggccctgagcaccccaatcccggaaagccgttcactgccagagggtttccccgccagtgctaccttccagacaacgcccagggccgcaaggtcctagagctcctgaag

SEQ ID NO: 98213 - DNA, 120 bp, Artificial Sequence
  ENSG00000091073_18 (sequence is synthesized)
gtggcctggaagaggcggctcatcttcacagtgggcacgtccagcaccacgggtgagacggacaccgtggtatggaacgagatccaccacaagacagagatggaccgcaacattacgggc

SEQ ID NO: 98214 - DNA, 120 bp, Artificial Sequence
  ENSG00000091073_19 (sequence is synthesized)
cacggctatcccgaccccaactacctgcagaacgtgctggctgagctggctgcccagggggtgaccgaggactgcctggagcagcagtgacctcgcaccccagcacgcccgcctctggtg

SEQ ID NO: 98215 - DNA, 120 bp, Artificial Sequence
  ENSG00000091073_20 (sequence is synthesized)
gccaccccgctgccccatggctggctgggtggccaggcaggaagtgcccagcccgagaggctgggaggtttgttgagggtgtggggtgtgccccacctgaagccggggctccccctgcct

SEQ ID NO: 98216 - DNA, 120 bp, Artificial Sequence
  ENSG00000091073_21 (sequence is synthesized)
gcctctctctcctcctcccctctgggaattgggcagccctgggcagttgtactcatgggggcttaggatgcagctacctcagtgcgcagggcccgtctgtcctctgggggctgcttcggg

SEQ ID NO: 98217 - DNA, 120 bp, Artificial Sequence
  ENSG00000091073_22 (sequence is synthesized)
cccgcggtgctcggggcctggtgtggggcgagtagagacttccccagcctggacgggcgtgggttctgggtcagcttcttttacctcaattttgtttgcaataaatgctctatagccaaa

SEQ ID NO: 98218 - DNA, 120 bp, Artificial Sequence
  ENSG00000091073_23 (sequence is synthesized)
gccagagccagagcaggtcataaaaaactacacggaagagctgaaagtgcccccagatgagtctgttgagtccatgagaaaaatctggactgcatcatctgcatggagaagctgtccaca

SEQ ID NO: 98219 - DNA, 120 bp, Artificial Sequence
  ENSG00000091073_24 (sequence is synthesized)
gggtcaccccactgggaggtgggagccaggccttgaggcagggctgatcctgggccccacagcagcctacacatgaagagccgcgcccagactgacccccagctgctctccctgcatcgg

SEQ ID NO: 98220 - DNA, 120 bp, Artificial Sequence
  ENSG00000091073_25 (sequence is synthesized)
ttcatccagaagggacagtttgtgccagctctccagagagaaaagaaacttccaattgaagacactgagctgaaccattccgcccgcccgcccgcccgagggcactccagatctgccgga

SEQ ID NO: 98221 - DNA, 76 bp, Artificial Sequence
  ENSG00000091073_26 (sequence is synthesized)
cctgccacccgtgttggccaggctggcctcaaattcctgacctcaagtgatcggcctcctagagtgctgggattac

SEQ ID NO: 98222 - DNA, 120 bp, Artificial Sequence
  ENSG00000091073_27 (sequence is synthesized)
ttacaggcctgagccactgcgcctggcctcggaattgactttgactgcacttccagcatttcagcacatgaaagcctctttttccaagactggcccacgtcagcccagcccactgttggc

SEQ ID NO: 98223 - DNA, 120 bp, Artificial Sequence
  ENSG00000091073_28 (sequence is synthesized)
gaaaacaaaaccaaaggcctccacacaggcacccaaggagcgtaaaagcgcgaagacacctcagtgactcccacttggccatgacgcagtgtttctccagctctcgtttccaataagtca

SEQ ID NO: 98224 - DNA, 120 bp, Artificial Sequence
  ENSG00000091073_29 (sequence is synthesized)
tggctgccttctcctgagagtcggagccacagccagagccctgcccaggccgagccggagctgcagcccgagcgcggtggtgccctcagccccgtcctcttgtcctcctcagcctcgaaa

SEQ ID NO: 98225 - DNA, 120 bp, Artificial Sequence
  ENSG00000091073_30 (sequence is synthesized)
gttggttcatccgggccatgaggacatgttgggacataccccgtgtgccgatgatggaggcggccgtggctgcccgagagatgcgtgacacccaggagtaattggcttggaaggcagtcc

SEQ ID NO: 98226 - DNA, 120 bp, Artificial Sequence
  ENSG00000091073_31 (sequence is synthesized)
tgatacaatctggtgattcccgagcatacacatcatattttatccccattttgccaatgaggaaactgagacccagatctgccggaggcgctgggcaatgaccccgggactccaggccag

SEQ ID NO: 98227 - DNA, 120 bp, Artificial Sequence
  ENSG00000091073_32 (sequence is synthesized)
gtgtgcacagacagcgagtgaggccgtcagggtgggctcctgccacgtcttggcccctccccagagtcgctggacttaggagctagtctgcatgtgacagaccttcccagtcagtggcag

SEQ ID NO: 98228 - DNA, 120 bp, Artificial Sequence
  ENSG00000091073_33 (sequence is synthesized)
gcgtttcccgggacagtgtctgtgtggcggtcggcgtgtgtgcagctgcctgtacatgctggaccccagactcccttgtccctgtgatgttcatgccagggtaatgcaagttgaatcaaa

SEQ ID NO: 98229 - DNA, 120 bp, Artificial Sequence
  ENSG00000091073_34 (sequence is synthesized)
tcgtggtgccacaacgccccctggagtagtttgtgcccgaagcggctgtctgactcttccgcgcagcctcagaagcgccggggtcggttcctcactcaatgtgcgcggggatgcggctcc

SEQ ID NO: 98230 - DNA, 120 bp, Artificial Sequence
  ENSG00000091073_35 (sequence is synthesized)
caggagactgtgctgctgtttctgctcttctgcatcctccatggctcctggggctgagccgggtccccggacggtgggactggggaaggctttgcccgacggagctcggggctctgtgcc

SEQ ID NO: 98231 - DNA, 120 bp, Artificial Sequence
  ENSG00000091073_36 (sequence is synthesized)
tggcgctgagctctcccgtcccgcacactggcctccctgtctgggcccctctcgcatttcctcctggcagcttagacctcttccttcccttcctcgccctctggcctcctctccagcctg

SEQ ID NO: 98232 - DNA, 120 bp, Artificial Sequence
  ENSG00000091073_37 (sequence is synthesized)
attctagaacactcaccacgtggcatgcccctgctgggtcccggtgatgcagctgtgaatgaagcaggcttggggttgctgccacctggggaggagcagaaggactgtggtcacagccac

SEQ ID NO: 98233 - DNA, 120 bp, Artificial Sequence
  ENSG00000091073_38 (sequence is synthesized)
ctgtctcagccagctgccctcctcctccaagctggctccacttctctaagcgccaacagcgatggaaataaatagcatgtgtacagacgcctggacccttgagaaactcagaatatttct

SEQ ID NO: 98234 - DNA, 120 bp, Artificial Sequence
  ENSG00000091106_0 (sequence is synthesized)
tgtttatactccggagggtgtccccgtgcgtcatcggtggagtggaccaaaactggtgatctgtttgccctgtgtgaccttgcccagaaccctgctgactgagagaacacatctgctgga

SEQ ID NO: 98235 - DNA, 120 bp, Artificial Sequence
  ENSG00000091106_1 (sequence is synthesized)
agtcctctgggattcaaggtacagggaatgaagagtagttttacagaaaaaagaggacaatattgggatcacctttgacctttccatttggaaataatattttctattgtgttatagaaa

SEQ ID NO: 98236 - DNA, 120 bp, Artificial Sequence
  ENSG00000091106_2 (sequence is synthesized)
ggtgggaagctttcatccagaacaatgaatttcataaaggacaatagccgagcccttattcaaagaatgggaatgactgttataaagcaaatcacagatgacctatttgtatggaatgtt

SEQ ID NO: 98237 - DNA, 120 bp, Artificial Sequence
  ENSG00000091106_3 (sequence is synthesized)
ctgaatcgcgaagaagtaaacatcatttgctgcgagaaggtggagcaggatgctgctagagggatcattcacatgattttgaaaaagggttcagagtcctgtaacctctttcttaaatcc

SEQ ID NO: 98238 - DNA, 120 bp, Artificial Sequence
  ENSG00000091106_4 (sequence is synthesized)
cttaaggagtggaactatcctctatttcaggacttgaatggacaaagtctttttcatcagacatcagaaggagacttggacgatttggctcaggatttaaaggacttgtaccatacccca

SEQ ID NO: 98239 - DNA, 120 bp, Artificial Sequence
  ENSG00000091106_5 (sequence is synthesized)
tcttttctgaacttttatccccttggtgaagatattgacattatttttaacttgaaaagcaccttcacagaacctgtcctgtggaggaaggaccaacaccatcaccgcgtggagcagctg

SEQ ID NO: 98240 - DNA, 120 bp, Artificial Sequence
  ENSG00000091106_6 (sequence is synthesized)
accctgaatggcctcctgcaggctcttcagagcccctgcatcattgaaggggaatctggcaaaggcaagtccactctgctgcagcgaattgccatgctctggggctccggaaagtgcaag

SEQ ID NO: 98241 - DNA, 120 bp, Artificial Sequence
  ENSG00000091106_7 (sequence is synthesized)
gctctgaccaagttcaaattcgtcttcttcctccgtctcagcagggcccagggtggactttttgaaaccctctgtgatcaactcctggatatacctggcacaatcaggaagcagacattc

SEQ ID NO: 98242 - DNA, 120 bp, Artificial Sequence
  ENSG00000091106_8 (sequence is synthesized)
atggccatgctgctgaagctgcggcagagggttcttttccttcttgatggctacaatgaattcaagccccagaactgcccagaaatcgaagccctgataaaggaaaaccaccgcttcaag

SEQ ID NO: 98243 - DNA, 120 bp, Artificial Sequence
  ENSG00000091106_9 (sequence is synthesized)
aacatggtcatcgtcaccactaccactgagtgcctgaggcacatacggcagtttggtgccctgactgctgaggtgggggatatgacagaagacagcgcccaggctctcatccgagaagtg

SEQ ID NO: 98244 - DNA, 120 bp, Artificial Sequence
  ENSG00000091106_10 (sequence is synthesized)
ctgatcaaggagcttgctgaaggcttgttgctccaaattcagaaatccaggtgcttgaggaatctcatgaagacccctctctttgtggtcatcacttgtgcaatccagatgggtgaaagt

SEQ ID NO: 98245 - DNA, 120 bp, Artificial Sequence
  ENSG00000091106_11 (sequence is synthesized)
gagttccactctcacacacaaacaacgctgttccataccttctatgatctgttgatacagaaaaacaaacacaaacataaaggtgtggctgcaagtgacttcattcggagcctggaccac

SEQ ID NO: 98246 - DNA, 120 bp, Artificial Sequence
  ENSG00000091106_12 (sequence is synthesized)
tgtggagacctagctctggagggtgtgttctcccacaagtttgatttcgaactgcaggatgtgtccagcgtgaatgaggatgtcctgctgacaactgggctcctctgtaaatatacagct

SEQ ID NO: 98247 - DNA, 120 bp, Artificial Sequence
  ENSG00000091106_13 (sequence is synthesized)
ttacttgcagaaaatggtttccatttcggacattacatccacttatagcagcctgctccggtacacctgtgggtcatctgtggaagccaccagggctgttatgaagcacctcgcagcagt

SEQ ID NO: 98248 - DNA, 120 bp, Artificial Sequence
  ENSG00000091106_14 (sequence is synthesized)
gtatcaacacggctgccttctcggactttccatcgccaagaggcctctctggagacaggaatctttgcaaagtgtgaaaaacaccactgagcaagaaattctgaaagccataaacatcaa

SEQ ID NO: 98249 - DNA, 120 bp, Artificial Sequence
  ENSG00000091106_15 (sequence is synthesized)
ttcctttgtagagtgtggcatccatttatatcaagagagtacatccaaatcagccctgagccaagaatttgaagctttctttcaaggtaaaagcttatatatcaactcagggaacatccc

SEQ ID NO: 98250 - DNA, 120 bp, Artificial Sequence
  ENSG00000091106_16 (sequence is synthesized)
cgattacttatttgacttctttgaacatttgcccaattgtgcaagtgccctggacttcattaaactggacttttatgggggagctatggcttcatgggaaaaggctgcagaagacacagg

SEQ ID NO: 98251 - DNA, 120 bp, Artificial Sequence
  ENSG00000091106_17 (sequence is synthesized)
tggaatccacatggaagaggccccagaaacctacattcccagcagggctgtatctttgttcttcaactggaagcaggaattcaggactctggaggtcacactccgggatttcagcaagtt

SEQ ID NO: 98252 - DNA, 120 bp, Artificial Sequence
  ENSG00000091106_18 (sequence is synthesized)
gaataagcaagatatcagatatctggggaaaatattcagctctgccacaagcctcaggctgcaaataaagagatgtgctggtgtggctggaagcctcagtttggtcctcagcacctgtaa

SEQ ID NO: 98253 - DNA, 120 bp, Artificial Sequence
  ENSG00000091106_19 (sequence is synthesized)
gaacatttattctctcatggtggaagccagtcccctcaccatagaagatgagaggcacatcacatctgtaacaaacctgaaaaccttgagtattcatgacctacagaatcaacggctgcc

SEQ ID NO: 98254 - DNA, 120 bp, Artificial Sequence
  ENSG00000091106_20 (sequence is synthesized)
gggtggtctgactgacagcttgggtaacttgaagaaccttacaaagctcataatggataacataaagatgaatgaagaagatgctataaaactagctgaaggcctgaaaaacctgaagaa

SEQ ID NO: 98255 - DNA, 120 bp, Artificial Sequence
  ENSG00000091106_21 (sequence is synthesized)
gatgtgtttatttcatttgacccacttgtctgacattggagagggaatggattacatagtcaagtctctgtcaagtgaaccctgtgaccttgaagaaattcaattagtctcctgctgctt

SEQ ID NO: 98256 - DNA, 120 bp, Artificial Sequence
  ENSG00000091106_22 (sequence is synthesized)
gtctgcaaatgcagtgaaaatcctagctcagaatcttcacaatttggtcaaactgagcattcttgatttatcagaaaattacctggaaaaagatggaaatgaagctcttcatgaactgat

SEQ ID NO: 98257 - DNA, 120 bp, Artificial Sequence
  ENSG00000091106_23 (sequence is synthesized)
cgacaggatgaacgtgctagaacagctcaccgcactgatgctgccctggggctgtgacgtgcaaggcagcctgagcagcctgttgaaacatttggaggaggtcccacaactcgtcaagct

SEQ ID NO: 98258 - DNA, 120 bp, Artificial Sequence
  ENSG00000091106_24 (sequence is synthesized)
tgggttgaaaaactggagactcacagatacagagattagaattttaggtgcattttttggaaagaaccctctgaaaaacttccagcagttgaatttggcgggaaatcgtgtgagcagtga

SEQ ID NO: 98259 - DNA, 120 bp, Artificial Sequence
  ENSG00000091106_25 (sequence is synthesized)
tggatggcttgccttcatgggtgtatttgagaatcttaagcaattagtgttttttgactttagtactaaagaatttctacctgatccagcattagtcagaaaacttagccaagtgttatc

SEQ ID NO: 98260 - DNA, 120 bp, Artificial Sequence
  ENSG00000091106_26 (sequence is synthesized)
caagttaacttttctgcaagaagctaggcttgttgggtggcaatttgatgatgatgatctcagtgttattacaggtgcttttaaactagtaactgcttaaataaagtgtactcgaagcca

SEQ ID NO: 98261 - DNA, 120 bp, Artificial Sequence
  ENSG00000091106_27 (sequence is synthesized)
ctctgtacactgtcctctcacagaacaagaaggtatctggtctacaagaactcgaggcctcactgaaacggaaagcaaatacaaagaaactttattttaaaaacatgtcttggtctccca

SEQ ID NO: 98262 - DNA, 120 bp, Artificial Sequence
  ENSG00000091106_28 (sequence is synthesized)
agaagatgctataaaactaggtcagatttctgttctcatatttgtatcaatgtaagtttgataataagaggagttaacttcaggctctgacattggctgtgtctgcacaagctgaaggcc

SEQ ID NO: 98263 - DNA, 120 bp, Artificial Sequence
  ENSG00000091106_29 (sequence is synthesized)
ggagtttggcctggagggttggagaagagttggtggcggtcttactccggggaaaaaccatctcccttctggctaccccatctgctgagagcttcttccactcaatgaaaccttgcgctc

SEQ ID NO: 98264 - DNA, 120 bp, Artificial Sequence
  ENSG00000091127_0 (sequence is synthesized)
cgcgtcgctgcgccgcacgtgtgcgagcccggccgccggtgagtcggctggagcgcatctggtcctccgcgcggaaagcgctgcttttgcctggccgccctagccgctggctcatccaag

SEQ ID NO: 98265 - DNA, 120 bp, Artificial Sequence
  ENSG00000091127_1 (sequence is synthesized)
tggccttcgccgctctcttgcgtcccaaccagagcgctggccacctcgccgcccagctcacgccgcgcccgcgctcccaggctccggccttaaagatggagatgacagaaatgactggtg

SEQ ID NO: 98266 - DNA, 120 bp, Artificial Sequence
  ENSG00000091127_2 (sequence is synthesized)
tgtcgctgaaacgtggggcactggttgtcgaagataatgacagtggagtcccagttgaagagacaaaaaaacagaagctgtcggaatgcagtctaaccaaaggtcaagatgggctacaga

SEQ ID NO: 98267 - DNA, 120 bp, Artificial Sequence
  ENSG00000091127_3 (sequence is synthesized)
atgactttctgtccatcagtgaagacgtgcctcggcctcctgacactgtcagtactgggaaaggtggaaagaattctgaggctcagttggaagatgaggaagaagaggaggaagatggac

SEQ ID NO: 98268 - DNA, 120 bp, Artificial Sequence
  ENSG00000091127_4 (sequence is synthesized)
tttcagaggagtgcgaggaggaggaatcagagagttttgcagacatgatgaagcatggactcactgaggctgacgtaggcatcaccaagtttgtgagttctcatcaagggttctcgggaa

SEQ ID NO: 98269 - DNA, 120 bp, Artificial Sequence
  ENSG00000091127_5 (sequence is synthesized)
tcttaaaagaaagatactccgacttcgttgttcatgaaataggaaaagatggacggatcagccatttgaatgacttgtccattccagtggatgaggaggacccttcagaagacatattta

SEQ ID NO: 98270 - DNA, 120 bp, Artificial Sequence
  ENSG00000091127_6 (sequence is synthesized)
cagttttgacagctgaagaaaagcagcgattggaagagctccagctgttcaaaaataaggaaaccagtgttgccattgaggttatcgaggacaccaaagagaaaagaaccatcatccatc

SEQ ID NO: 98271 - DNA, 120 bp, Artificial Sequence
  ENSG00000091127_7 (sequence is synthesized)
aggctatcaaatctctgtttccaggattagagacaaaaacagaggatagggaggggaagaaatacattgtagcctaccacgcagctgggaaaaaggctttggcaaatccaagaaaacatt

SEQ ID NO: 98272 - DNA, 120 bp, Artificial Sequence
  ENSG00000091127_8 (sequence is synthesized)
cttggccaaaatctaggggaagttactgccacttcgtactatataaggaaaacaaagacaccatggatgctattaatgtactctccaaatacttaagagtcaagccaaatatattctcct

SEQ ID NO: 98273 - DNA, 120 bp, Artificial Sequence
  ENSG00000091127_9 (sequence is synthesized)
acatgggaaccaaagataaaagggctataacagttcaagaaattgctgttctcaaaataactgcacaaagacttgcccacctgaataagtgcttgatgaactttaagctagggaatttca

SEQ ID NO: 98274 - DNA, 120 bp, Artificial Sequence
  ENSG00000091127_10 (sequence is synthesized)
gctatcaaaaaaacccactgaaattgggagagcttcaaggaaaccacttcactgttgttctcagaaatataacaggaactgatgaccaagtacagcaagctatgaactctctcaaggaga

SEQ ID NO: 98275 - DNA, 120 bp, Artificial Sequence
  ENSG00000091127_11 (sequence is synthesized)
ttggatttattaactactatggaatgcaaagatttggaaccacagctgtccctacgtatcaggttggaagagctatactacaaaattcctggacagaagtcatggatttaatattgaaac

SEQ ID NO: 98276 - DNA, 120 bp, Artificial Sequence
  ENSG00000091127_12 (sequence is synthesized)
cccgctctggagctgaaaagggctacttggttaaatgcagagaagaatgggcaaagaccaaagacccaactgctgccctcagaaaactacctgtcaaaaggtgtgtggaagggcagctgc

SEQ ID NO: 98277 - DNA, 120 bp, Artificial Sequence
  ENSG00000091127_13 (sequence is synthesized)
ttcgaggactttcaaaatatggaatgaagaatatagtctctgcatttggcataatacccagaaataatcgcttaatgtatattcatagctaccaaagctatgtgtggaataacatggtaa

SEQ ID NO: 98278 - DNA, 120 bp, Artificial Sequence
  ENSG00000091127_14 (sequence is synthesized)
gcaagaggatagaagactatggactaaaacctgttccaggggacctcgttctcaaaggagccacagccacctatattgaggaagatgatgttaataattactctatccatgatgtggtaa

SEQ ID NO: 98279 - DNA, 120 bp, Artificial Sequence
  ENSG00000091127_15 (sequence is synthesized)
tgcccttgcctggtttcgatgttatctacccaaagcataaaattcaagaagcctacagggaaatgctcacagctgacaatcttgatattgacaacatgagacacaaaattcgagattatt

SEQ ID NO: 98280 - DNA, 120 bp, Artificial Sequence
  ENSG00000091127_16 (sequence is synthesized)
ccttgtcaggggcctaccgaaagatcattattcgtcctcagaatgttagctgggaagtcgttgcatatgatgatcccaaaattccacttttcaacacagatgtggacaacctagaaggga

SEQ ID NO: 98281 - DNA, 120 bp, Artificial Sequence
  ENSG00000091127_17 (sequence is synthesized)
agacaccaccagtttttgcttctgaaggcaaatacagggctctgaaaatggatttttctctacccccttctacttacgccaccatggccattcgagaagtgctaaaaatggataccagta

SEQ ID NO: 98282 - DNA, 120 bp, Artificial Sequence
  ENSG00000091127_18 (sequence is synthesized)
tcaagaaccagacgcagctgaatacaacctggcttcgctgagcagtaccttgtccacagattagaaaacgtacacaagtgtttgcttcctggctccctgtgcatttttgtcttagttcag

SEQ ID NO: 98283 - DNA, 120 bp, Artificial Sequence
  ENSG00000091127_19 (sequence is synthesized)
actcatatatggatttcaaatctttgtaataaaaattatttgtatttttaagtttttattagcttaaagaaataatttgcaatatttgtacatgtacacaaatcctgaggttcttaattt

SEQ ID NO: 98284 - DNA, 120 bp, Artificial Sequence
  ENSG00000091127_20 (sequence is synthesized)
tagctcagaatataaattagtcaaaatacacttcaggtgcttaaatcagagtaaaatgtcagctttacaataataaaaaaaggactttggtttaaagtagcaggtttaggttttgctaca

SEQ ID NO: 98285 - DNA, 120 bp, Artificial Sequence
  ENSG00000091127_21 (sequence is synthesized)
ttctcaaaagacagcaggagtatttgacacatctgtgatggagtatacaacaatgcattttaagagcaaatgcaacaaaacaaatctggactatggataaataatttgagagctgccacc

SEQ ID NO: 98286 - DNA, 120 bp, Artificial Sequence
  ENSG00000091127_22 (sequence is synthesized)
cacaaatataaatacagtactcatgctgactgaaataataagacatctacaaatttataaacaaaaagtgattgtcattatcctgcttatgtactagattcaggcaagcattatagactt

SEQ ID NO: 98287 - DNA, 120 bp, Artificial Sequence
  ENSG00000091127_23 (sequence is synthesized)
tttggttgcggtggcttttgcatttatattatcaatgccttgcaggaacgttgcattgataggcccattttatttttttattttttttttcgagacaggatctcactctgtagcacaggc

SEQ ID NO: 98288 - DNA, 120 bp, Artificial Sequence
  ENSG00000091127_24 (sequence is synthesized)
aggatctcactctgtagcacaggctggattgcagtgcaatcctgcaattctcaatcttgcactgcagcctcgacctcccaggctccagtgactctcccacctcagcctcctaagtagctg

SEQ ID NO: 98289 - DNA, 120 bp, Artificial Sequence
  ENSG00000091127_25 (sequence is synthesized)
cctagctgatttttgtatttttttgtagagacgggggtttggccatgttgccgaggctaactcctgggattacaggcatgagctgtgctggccgggtttttttttcttgatgtaaacgtg

SEQ ID NO: 98290 - DNA, 120 bp, Artificial Sequence
  ENSG00000091127_26 (sequence is synthesized)
tacagctgttttattagttaaggtctaatttttactctaggtgccttttatgttcagaactctttccactggactggtatttgctcaaaaataaataatggtagagaagaaaactataaa

SEQ ID NO: 98291 - DNA, 120 bp, Artificial Sequence
  ENSG00000091127_27 (sequence is synthesized)
aatggacaaggctttcttctatcagtagcgtttaccctttgtcaccagtggctttggtatttccatgtctggcattgcataaacttctctggtgtgaaaggataaatatgcctttctaaa

SEQ ID NO: 98292 - DNA, 120 bp, Artificial Sequence
  ENSG00000091127_28 (sequence is synthesized)
tgtgaaaggataaatatgcctttctaaagttgtatatcaaaattgtatcaatttttattttctatgatttctagaaacaaatgtaataaatatttttaaaatctcctttctactggttat

SEQ ID NO: 98293 - DNA, 120 bp, Artificial Sequence
  ENSG00000091127_29 (sequence is synthesized)
ctcgggaatcttaaaagaaagatactccgacttcgttgttcatgaaataggaaaagatggacggatcagccatttgaatgacttgtccattccagtggatgaggaggttatcgaggacac

SEQ ID NO: 98294 - DNA, 120 bp, Artificial Sequence
  ENSG00000091127_30 (sequence is synthesized)
attggccaggctggtgtcaaactcctgacttcagggaagtcgttgcatatgatgatcccaaaattccacttttcaacacagatgtggacaacctagaagggaagacaccaccagtttttg

SEQ ID NO: 98295 - DNA, 120 bp, Artificial Sequence
  ENSG00000091127_31 (sequence is synthesized)
tggacaacctagaagggaagacaccaccagtttttgcttctggtctcaatgaattatggaattataggaaagagccagcaggtggaatcctatccatggagaaaaagaagaggaagttgc

SEQ ID NO: 98296 - DNA, 120 bp, Artificial Sequence
  ENSG00000091127_32 (sequence is synthesized)
acttagcccaacacatggtatgtaataaaggaaatcctggcaactggcaaacccacggtcaacaaaaagagcagggctgtgccaggaagccatctttagggtaattcattaaggaagcat

SEQ ID NO: 98297 - DNA, 120 bp, Artificial Sequence
  ENSG00000091127_33 (sequence is synthesized)
taatgctttttaaatttcatcttgaaagattttactaaactttgaaagagcagaaggtaaataaggatcctttggtgatctctgaggtgtttcacctgagtagtctttgttcagaccctg

SEQ ID NO: 98298 - DNA, 120 bp, Artificial Sequence
  ENSG00000091127_34 (sequence is synthesized)
agtggtgatgttgggggtggatgcgggcattacttattgagggcacaagaaaagcgtcaatgtggaaaacataatcttcagtggaaattctgtgtaaattaagtctcttggtatttgaga

SEQ ID NO: 98299 - DNA, 120 bp, Artificial Sequence
  ENSG00000091127_35 (sequence is synthesized)
aatttcgaatctattgtatagtcatttcttgatcattccgttaccagaactgtaaactgccttagtaaaagggttgaacagtaagcagtctatagttgcattttagtctggtttcatcat

SEQ ID NO: 98300 - DNA, 120 bp, Artificial Sequence
  ENSG00000091128_0 (sequence is synthesized)
acatgccccgtttgctgcctgaacctctccacaaagactcccagatcctgaattgaatttaatcatctcctgacaaaagaatgcaatttcaactgaccctttttttgcaccttgggtggc

SEQ ID NO: 98301 - DNA, 120 bp, Artificial Sequence
  ENSG00000091128_1 (sequence is synthesized)
tcagttactcaaaagctcaagatgactgcaacaggggtgcctgtcatcccaccactggtgatctcctggtgggcaggaacacgcagcttatggcttcttctacctgtgggctgagcagag

SEQ ID NO: 98302 - DNA, 120 bp, Artificial Sequence
  ENSG00000091128_2 (sequence is synthesized)
cccagaaatactgcatcctcagttacctggagggggaacaaaaatgcttcatctgtgactctagatttccatatgatccgtatgaccaacccaacagccacaccattgagaatgtcattg

SEQ ID NO: 98303 - DNA, 120 bp, Artificial Sequence
  ENSG00000091128_3 (sequence is synthesized)
taagttttgaaccagacagagaaaagaaatggtggcaatctgaaaatggtcttgatcatgtcagcatcagactggacttagaggcattatttcggttcagccaccttatcctgaccttta

SEQ ID NO: 98304 - DNA, 120 bp, Artificial Sequence
  ENSG00000091128_4 (sequence is synthesized)
agacttttcggcctgctgcaatgttagttgaacgttccacagactatggacacaactggaaagtgttcaaatattttgcaaaagactgtgccacttcctttcctaacatcacatctggcc

SEQ ID NO: 98305 - DNA, 120 bp, Artificial Sequence
  ENSG00000091128_5 (sequence is synthesized)
aggcccagggagtgggagacattgtttgtgactccaaatactcggatattgaaccctcaacaggtggagaggttgttttaaaagttttggatcccagttttgaaattgaaaacccttata

SEQ ID NO: 98306 - DNA, 120 bp, Artificial Sequence
  ENSG00000091128_6 (sequence is synthesized)
gcccctacatccaagaccttgtgacattgacaaacctgaggataaactttaccaagctccacacccttggggatgctttgcttggaaggaggcaaaatgattcccttgataaatactact

SEQ ID NO: 98307 - DNA, 120 bp, Artificial Sequence
  ENSG00000091128_7 (sequence is synthesized)
atgctctgtacgagatgattgttcggggaagctgcttttgcaatggccatgctagcgaatgtcgccctatgcagaagatgcggggagatgttttcagccctcctggaatggttcacggtc

SEQ ID NO: 98308 - DNA, 120 bp, Artificial Sequence
  ENSG00000091128_8 (sequence is synthesized)
agtgtgtgtgtcagcacaatacagatggtccgaactgtgagagatgcaaggacttcttccaggatgctccttggaggccagctgcagacctccaggacaacgcttgcagatcgtgcagct

SEQ ID NO: 98309 - DNA, 120 bp, Artificial Sequence
  ENSG00000091128_9 (sequence is synthesized)
gtaatagccactccagccgctgtcactttgacatgactacgtacctggcaagcggtggcctcagcgggggcgtgtgtgaagactgccagcacaacactgaggggcagcactgcgaccgct

SEQ ID NO: 98310 - DNA, 120 bp, Artificial Sequence
  ENSG00000091128_10 (sequence is synthesized)
gcagacccctcttctacagggacccgctcaagaccatctcagatccctacgcgtgcattccttgtgaatgtgaccccgatgggaccatatctggtggcatttgtgtgagccactctgatc

SEQ ID NO: 98311 - DNA, 120 bp, Artificial Sequence
  ENSG00000091128_11 (sequence is synthesized)
ctgccttagggtctgtggccggccagtgcctttgtaaagagaacgtggaaggagccaaatgcgaccagtgcaaacccaaccactacggactaagcgccaccgaccccctgggctgccagc

SEQ ID NO: 98312 - DNA, 120 bp, Artificial Sequence
  ENSG00000091128_12 (sequence is synthesized)
cctgcgactgtaacccccttgggagtctgccattcttgacctgtgatgtggatacaggccaatgcttgtgcctgtcatatgtcaccggagcacactgcgaagaatgcactgttggatact

SEQ ID NO: 98313 - DNA, 120 bp, Artificial Sequence
  ENSG00000091128_13 (sequence is synthesized)
ggggcctgggaaatcatctccatgggtgttctccctgtgactgtgatattggaggtgcttattctaacgtgtgctcacccaagaatgggcagtgtgaatgccgcccacatgtcactggcc

SEQ ID NO: 98314 - DNA, 120 bp, Artificial Sequence
  ENSG00000091128_14 (sequence is synthesized)
gtagctgctctgaaccagcccctggctacttctttgctcctttgaatttctatctctacgaggcagaggaagccacaacactccaaggactggcgcctttgggctcggagacgtttggcc

SEQ ID NO: 98315 - DNA, 120 bp, Artificial Sequence
  ENSG00000091128_15 (sequence is synthesized)
agagtcctgctgttcacgttgttttaggagagccagttcctgggaaccctgttacatggactggacctggatttgccagggttctccctggggctggcttgagatttgctgtcaacaaca

SEQ ID NO: 98316 - DNA, 120 bp, Artificial Sequence
  ENSG00000091128_16 (sequence is synthesized)
ttccctttcctgtggacttcaccattgccattcactatgaaacccagtctgcagctgactggactgtccagattgtggtgaacccccctggagggagtgagcactgcatacccaagactc

SEQ ID NO: 98317 - DNA, 120 bp, Artificial Sequence
  ENSG00000091128_17 (sequence is synthesized)
tacagtcaaagcctcagtcttttgccttaccagcggctacgagaatcatgctgcttcccacacccatctgtttagaaccagatgtacaatattccatagatgtctatttttctcagcctt

SEQ ID NO: 98318 - DNA, 120 bp, Artificial Sequence
  ENSG00000091128_18 (sequence is synthesized)
tgcaaggagagtcccacgctcattcacatgtcctggtggactctcttggccttattccccaaatcaattcattggagaatttctgcagcaagcaggacttagatgagtatcagcttcaca

SEQ ID NO: 98319 - DNA, 120 bp, Artificial Sequence
  ENSG00000091128_19 (sequence is synthesized)
actgtgttgaaattgcctcagcaatgggacctcaagtgctcccgggtgcctgtgaaaggctgatcatcagcatgtctgccaagctgcatgatggggctgtggcctgcaagtgtcaccccc

SEQ ID NO: 98320 - DNA, 120 bp, Artificial Sequence
  ENSG00000091128_20 (sequence is synthesized)
agggctcagtcggatccagctgcagccgacttggaggccagtgccagtgtaaacctcttgtggtcgggcgctgctgtgacaggtgctcaactggaagctatgatttggggcatcacggct

SEQ ID NO: 98321 - DNA, 120 bp, Artificial Sequence
  ENSG00000091128_21 (sequence is synthesized)
gtcacccatgtcactgccatcctcaaggatcaaaggacactgtatgtgaccaagtaacaggacagtgcccctgccatggagaggtgtctggccgccgctgtgatcgctgcctggcaggct

SEQ ID NO: 98322 - DNA, 120 bp, Artificial Sequence
  ENSG00000091128_22 (sequence is synthesized)
actttggatttcccagctgccacccttgcccttgtaataggtttgctgaactttgtgatcctgagacagggtcatgcttcaattgtggaggctttacaactggcagaaactgtgaaaggt

SEQ ID NO: 98323 - DNA, 120 bp, Artificial Sequence
  ENSG00000091128_23 (sequence is synthesized)
gtattgatggttactatggaaatccttcttcaggacagccctgtcgtccttgcctgtgtccagatgatccctcaagcaatcagtattttgcccattcctgttatcagaatctgtggagct

SEQ ID NO: 98324 - DNA, 120 bp, Artificial Sequence
  ENSG00000091128_24 (sequence is synthesized)
ttgccaaccatgtgcctgcaacaacaacatagatgtaaccgatccagagtcctgcagccgggtaacaggggagtgccttcgatgtttgcacaacactcagggcgcaaactgccagctctg

SEQ ID NO: 98325 - DNA, 120 bp, Artificial Sequence
  ENSG00000091128_25 (sequence is synthesized)
caaaccaggtcactatggatcagccctcaatcagacctgcagaagatgctcctgccatgcttccggcgtgagtcccatggagtgtccccctggtgggggagcttgcctctgtgaccctgt

SEQ ID NO: 98326 - DNA, 120 bp, Artificial Sequence
  ENSG00000091128_26 (sequence is synthesized)
cactggtgcatgtccttgtctgccgaatgtcacaggcctggcctgtgaccgttgtgctgatggatactggaatctggtccctggcagaggatgtcagtcatgtgactgtgaccctaggac

SEQ ID NO: 98327 - DNA, 120 bp, Artificial Sequence
  ENSG00000091128_27 (sequence is synthesized)
ctctcaaagtagccactgtgaccagcttacaggccagtgtccgtgtaaattaggttacggcgggaaacgttgcagtgagtgccaggaaaattattatggtgatccacctgggcgatgcat

SEQ ID NO: 98328 - DNA, 120 bp, Artificial Sequence
  ENSG00000091128_28 (sequence is synthesized)
tccatgtgattgtaacagggcaggtacccagaagcccatctgtgatccagacacaggcatgtgccgctgccgggagggtgtcagcggccagagatgtgatcgctgtgcccggggacacag

SEQ ID NO: 98329 - DNA, 120 bp, Artificial Sequence
  ENSG00000091128_29 (sequence is synthesized)
ccaggaattccctacttgtcttcaatgtcacttgtgctttgatcagtgggaccacaccatttcttccctctccaaagcggtgcaagggttaatgagactggctgctaacatggaagataa

SEQ ID NO: 98330 - DNA, 120 bp, Artificial Sequence
  ENSG00000091128_30 (sequence is synthesized)
aagagagaccctgcctgtctgtgaggcagacttcaaagacctcagagggaacgtgtctgaaatagaaaggattttgaaacatcctgttttcccatctgggaaattcttaaaagtcaagga

SEQ ID NO: 98331 - DNA, 120 bp, Artificial Sequence
  ENSG00000091128_31 (sequence is synthesized)
ttatcatgactctgttagaagacaaatcatgcagctaaatgaacaactgaaagcagtgtatgaatttcaagatctgaaagatacaatagaaagagcaaagaatgaagcagacctcttact

SEQ ID NO: 98332 - DNA, 120 bp, Artificial Sequence
  ENSG00000091128_32 (sequence is synthesized)
tgaagaccttcaggaagaaattgatttgcaatccagtgtccttaatgcaagcattgcggactcctcagaaaacatcaagaaatattatcacatatcatcatctgctgaaaagaaaattaa

SEQ ID NO: 98333 - DNA, 120 bp, Artificial Sequence
  ENSG00000091128_33 (sequence is synthesized)
tgaaactagttccaccattaatacctctgcaaatacaaggaatgacttacttaccatcttagatacactaacctcaaaaggaaacttgtcattggaaagattaaagcagattaagatacc

SEQ ID NO: 98334 - DNA, 120 bp, Artificial Sequence
  ENSG00000091128_34 (sequence is synthesized)
agatatccaaatattgaatgaaaaggtgtgcggagatccaggaaatgtgccatgtgtgcccttgccctgtggcggtgctctctgcacgggccggaaggggcacaggaagtgtaggggtcc

SEQ ID NO: 98335 - DNA, 120 bp, Artificial Sequence
  ENSG00000091128_35 (sequence is synthesized)
cggctgtcacggctccctgaccctctcaacgaatgccctccaaaaagcccaggaagcaaaatccattattcgtaatttggacaaacaggttcgtgggttgaaaaatcagatcgaaagtat

SEQ ID NO: 98336 - DNA, 120 bp, Artificial Sequence
  ENSG00000091128_36 (sequence is synthesized)
aagtgaacaggcagaagtctccaaaaacaatgccttacagctgagggaaaaactgggaaatataagaaaccaaagtgactctgaagaagaaaacatcaatcttttcatcaaaaaagtgaa

SEQ ID NO: 98337 - DNA, 120 bp, Artificial Sequence
  ENSG00000091128_37 (sequence is synthesized)
aaactttttgttagaggaaaacgtgcctccagaagacatcgagaaggttgcgaatggtgtgcttgacattcacctaccaattccatcccaaaatctaaccgatgaacttgtcaaaataca

SEQ ID NO: 98338 - DNA, 120 bp, Artificial Sequence
  ENSG00000091128_38 (sequence is synthesized)
gaaacatatgcaactctgtgaggattacaggacagatgaaaacaggttaaatgaagaagcagatggagcccaaaagcttttggtgaaggccaaagcagctgagaaagcagcaaatattct

SEQ ID NO: 98339 - DNA, 120 bp, Artificial Sequence
  ENSG00000091128_39 (sequence is synthesized)
attaaatcttgacaaaacattgaaccagttacaacaagctcaaatcactcaaggacgggcaaactctaccattacacagctgactgccaatataacaaaaataaaaaagaatgtgctgca

SEQ ID NO: 98340 - DNA, 120 bp, Artificial Sequence
  ENSG00000091128_40 (sequence is synthesized)
ggctgaaaatcaaaccagggaaatgaagagtgagctggagttagcaaagcagcgatcagggctggaggatggactttccctgctgcagaccaagttgcaaaggcatcaagaccacgctgt

SEQ ID NO: 98341 - DNA, 120 bp, Artificial Sequence
  ENSG00000091128_41 (sequence is synthesized)
caatgcgaaagttcaggctgaatctgcccaacaccaggctgggagtcttgagaaggaatttgttgagctgaaaaaacaatatgctattctccaacgtaagacaagcactacaggactaac

SEQ ID NO: 98342 - DNA, 120 bp, Artificial Sequence
  ENSG00000091128_42 (sequence is synthesized)
aaaggagacattaggaaaagttaaacagctaaaagatgcggcagaaaaattggctggagatacagaggccaagataagaagaataacagatttagaaaggaaaatccaagatttgaatct

SEQ ID NO: 98343 - DNA, 120 bp, Artificial Sequence
  ENSG00000091128_43 (sequence is synthesized)
aagtagacaagcaaaagctgatcaactgagaatattggaagatcaagttgttgccattaaaaatgaaattgttgaacaagaaaaaaaatatgctaggtgctatagctaggcagagttaaa

SEQ ID NO: 98344 - DNA, 120 bp, Artificial Sequence
  ENSG00000091128_44 (sequence is synthesized)
gagcaaaagcttgtgcctttgtttctggtttctgatgtacaagcccctggggctctgttgaacctgtgaaatactgacaatgtcttctaccttccttccccacaccctgtccttattaga

SEQ ID NO: 98345 - DNA, 120 bp, Artificial Sequence
  ENSG00000091128_45 (sequence is synthesized)
cacctgctcagtgtggctggaggttgaaatgccaccaggaaaatgccacttcataattgaaaggggaaagtaatgaaattgtctctggtttcagaaacttttcctcttaccttcctttct

SEQ ID NO: 98346 - DNA, 120 bp, Artificial Sequence
  ENSG00000091128_46 (sequence is synthesized)
ttctctttcctaacttaaaaataacagtttccatataacaagtagaaatttaagtaagtactctactaactaataatcatttcagtcagataaacctaaacattaaataaatatctccaa

SEQ ID NO: 98347 - DNA, 120 bp, Artificial Sequence
  ENSG00000091128_47 (sequence is synthesized)
aggatggaatacatatgtatggcatgtactagattgtcctatattttatgtttatttggatttgcttttatttgtaaaattattcttttctgaataaactgcatacaattcaaaatgcaa

SEQ ID NO: 98348 - DNA, 61 bp, Artificial Sequence
  ENSG00000091128_48 (sequence is synthesized)
tccccaattaatttttaagatcattagtacagtatgaaggtaccagtttcatcccaccttc

SEQ ID NO: 98349 - DNA, 120 bp, Artificial Sequence
  ENSG00000091128_49 (sequence is synthesized)
cattagtacagtatgaaggtaccagtttcatcccaccttcaacagaattatatagaattgtgtgggatttttaaaaagtaatttcatggataaaaataaaatttctttgttaaaattgca

SEQ ID NO: 98350 - DNA, 120 bp, Artificial Sequence
  ENSG00000091128_50 (sequence is synthesized)
aacaggctgttttcagaactcagcaagatagaaaaatgagacattgatttggctgtcttccccatgctgccacttgagaaggggcggaaccacaaggctgtgcctgttcctctctgttag

SEQ ID NO: 98351 - DNA, 120 bp, Artificial Sequence
  ENSG00000091128_51 (sequence is synthesized)
gaagaggagcccctggatcccagtatggagcccttggcagcaacaatgttgagagagtggggaatggactctagtcttcagccagggtccttccacagaacttggtgtcagtcggggtcc

SEQ ID NO: 98352 - DNA, 120 bp, Artificial Sequence
  ENSG00000091128_52 (sequence is synthesized)
cagcaagaaacagaaagcatgcgtgggcataattttggataaagtatttagaagtggagttgtctcagtcatttattcactgcataataaattaccccaaaatgtaatggcttaaaataa

SEQ ID NO: 98353 - DNA, 120 bp, Artificial Sequence
  ENSG00000091128_53 (sequence is synthesized)
ttactagtgcactcaaagtgagcatgatagtgagacatggtttctaaatgtgtaaagaaagtttcttttatgtactgttgttaattagtgcattgaaacaggattggccttacaggggat

SEQ ID NO: 98354 - DNA, 120 bp, Artificial Sequence
  ENSG00000091128_54 (sequence is synthesized)
ggagtcagcctctatcaaggaatgaaaaccaaaaaaagagaatgagcatctcaaagttcagcttcgcctacttcagttttctctctgtgactgaggaagtcagaattcatacacagtgaa

SEQ ID NO: 98355 - DNA, 120 bp, Artificial Sequence
  ENSG00000091128_55 (sequence is synthesized)
acacagacatcagcctcacctttcactatttcatacatgtaaccatagggaagacctaagaaatagttaatcagaagagattatgaatcagaatgaaaataaacagataccttcaaaacc

SEQ ID NO: 98356 - DNA, 120 bp, Artificial Sequence
  ENSG00000091129_0 (sequence is synthesized)
agtccgagcctcagacgcgcgggcgcgggggacggcgcaggggccgcctggctggagcagccagaggggatagcttcgtcgagaacggaggacaccggcggtccagggtcctgggcagtc

SEQ ID NO: 98357 - DNA, 120 bp, Artificial Sequence
  ENSG00000091129_1 (sequence is synthesized)
gcgccagagctgagcggagggcgcggcgcgagaacgaatctttgtgacattctctctcagcattctttatcccctgtttgctgaagacttcgacaaaagctggtcttagctgttggcatt

SEQ ID NO: 98358 - DNA, 120 bp, Artificial Sequence
  ENSG00000091129_2 (sequence is synthesized)
ctcctgagaaaaggatagcttcagaaatcagaaaaacatttgggaggtgtctagcccagtggaccttctgaagagcaatgctaagaagacgtttggtttaaagaattaaaaggaagaaca

SEQ ID NO: 98359 - DNA, 120 bp, Artificial Sequence
  ENSG00000091129_3 (sequence is synthesized)
acttaagagcttcttcaaagtttcccgcatgaaaattacttaaacgttgcacacaacgtttcacaaaatcttttgtgaaagaagaaaaggaaattcagtgtgtgagtctcagcaggagtt

SEQ ID NO: 98360 - DNA, 120 bp, Artificial Sequence
  ENSG00000091129_4 (sequence is synthesized)
aagctaatgcagcttaaaataatgccgaaaaagaagcgcttatctgcgggcagagtgcccctgattctcttcctgtgccagatgattagtgcactggaagtacctcttgatccaaaactt

SEQ ID NO: 98361 - DNA, 120 bp, Artificial Sequence
  ENSG00000091129_5 (sequence is synthesized)
cttgaagacttggtacagcctccaaccatcacccaacagtctccaaaagattacattattgaccctcgggagaatattgtaatccagtgtgaagccaaagggaaaccgcccccaagcttt

SEQ ID NO: 98362 - DNA, 120 bp, Artificial Sequence
  ENSG00000091129_6 (sequence is synthesized)
tcctggacccgtaatgggactcattttgacatcgataaagaccctctggtcaccatgaagcctggcacaggaacgctcataattaacatcatgagcgaagggaaagctgagacctatgaa

SEQ ID NO: 98363 - DNA, 120 bp, Artificial Sequence
  ENSG00000091129_7 (sequence is synthesized)
ggagtctatcagtgtacagcaaggaacgaacgcggagctgcagtttctaataacattgttgtccgcccatccagatcaccattgtggaccaaagaaaaacttgaaccaatcacacttcaa

SEQ ID NO: 98364 - DNA, 120 bp, Artificial Sequence
  ENSG00000091129_8 (sequence is synthesized)
agtggtcagtctttagtacttccctgcagacccccaattggattaccaccacctataatattttggatggataattcctttcaaagacttccacaaagtgagagagtttctcaaggtttg

SEQ ID NO: 98365 - DNA, 120 bp, Artificial Sequence
  ENSG00000091129_9 (sequence is synthesized)
aatggggacctttatttttccaatgtcctcccagaggacacccgcgaagactatatctgttatgctagatttaatcatactcaaaccatacagcagaagcaacctatttctgtgaaggtg

SEQ ID NO: 98366 - DNA, 120 bp, Artificial Sequence
  ENSG00000091129_10 (sequence is synthesized)
atttcagtggatgaattgaatgacactatagctgctaatttgagtgacactgagttttatggtgctaaatcaagtagagagaggccaccaacatttttaactccagaaggcaatgcaagt

SEQ ID NO: 98367 - DNA, 120 bp, Artificial Sequence
  ENSG00000091129_11 (sequence is synthesized)
aacaaagaggaattaagaggaaatgtgctttcactggagtgcattgcagaaggactgcctaccccaattatttactgggcaaaggaagatggaatgctacccaaaaacaggacagtttat

SEQ ID NO: 98368 - DNA, 120 bp, Artificial Sequence
  ENSG00000091129_12 (sequence is synthesized)
aagaactttgagaaaaccttgcagatcattcatgtttcagaagcagactctggaaattaccaatgtatagcaaaaaacgcattaggagccatccaccataccatttctgttagagttaaa

SEQ ID NO: 98369 - DNA, 120 bp, Artificial Sequence
  ENSG00000091129_13 (sequence is synthesized)
gcggctccatactggatcacagcccctcaaaatcttgtgctgtccccaggagaggatgggaccttgatctgcagagctaatggcaaccccaaacccagaattagctggttaacaaatgga

SEQ ID NO: 98370 - DNA, 120 bp, Artificial Sequence
  ENSG00000091129_14 (sequence is synthesized)
gtcccaatagaaattgcccctgatgaccccagcagaaaaatagatggcgataccattattttttcaaatgttcaagaaagatcaagtgcagtctatcagtgcaatgcctctaatgaatat

SEQ ID NO: 98371 - DNA, 120 bp, Artificial Sequence
  ENSG00000091129_15 (sequence is synthesized)
ggatatttactggcaaacgcatttgtaaatgtgctggctgagccaccacgaatcctcacacctgcaaacacactctaccaggtcattgcaaacaggcctgctttactagactgtgccttc

SEQ ID NO: 98372 - DNA, 120 bp, Artificial Sequence
  ENSG00000091129_16 (sequence is synthesized)
tttgggtctcctctcccaaccatcgagtggtttaaaggagctaaaggaagtgctcttcatgaagatatttatgttttacatgaaaatggaactttggaaattcctgtggcccaaaaggac

SEQ ID NO: 98373 - DNA, 120 bp, Artificial Sequence
  ENSG00000091129_17 (sequence is synthesized)
agtacaggaacttatacgtgtgttgcaaggaataaattagggatggcgaagaatgaagttcacttagaaatcaaagatcctacatggatcgttaaacagcccgaatatgcagttgtgcaa

SEQ ID NO: 98374 - DNA, 120 bp, Artificial Sequence
  ENSG00000091129_18 (sequence is synthesized)
agagggagcatggtgtcctttgaatgcaaagtgaaacatgatcacaccttatccctcactgtcctgtggctgaaggacaacagggaactgcccagtgatgaaaggttcactgttgacaag

SEQ ID NO: 98375 - DNA, 120 bp, Artificial Sequence
  ENSG00000091129_19 (sequence is synthesized)
gatcatctagtggtagctgatgtcagtgacgatgacagcgggacctacacgtgtgtggccaacaccactctggacagcgtctccgccagcgctgtgcttagcgttgttgctcctactcca

SEQ ID NO: 98376 - DNA, 120 bp, Artificial Sequence
  ENSG00000091129_20 (sequence is synthesized)
actccagctcccgtttacgatgtcccaaatcctccctttgacttagaactgacagatcaacttgacaaaagtgttcagctgtcatggaccccaggcgatgacaacaatagccccattaca

SEQ ID NO: 98377 - DNA, 120 bp, Artificial Sequence
  ENSG00000091129_21 (sequence is synthesized)
aaattcatcatcgaatatgaagatgcaatgcacaagccagggctgtggcaccaccaaactgaagtttctggaacacagaccacagcccagctgaagctgtctccttacgtgaactactcc

SEQ ID NO: 98378 - DNA, 120 bp, Artificial Sequence
  ENSG00000091129_22 (sequence is synthesized)
ttccgcgtgatggcagtgaacagcattgggaagagcttgcccagcgaggcgtctgagcagtatttgacgaaagcctcagaaccagataaaaaccccacagctgtggaaggactgggatca

SEQ ID NO: 98379 - DNA, 120 bp, Artificial Sequence
  ENSG00000091129_23 (sequence is synthesized)
gagcctgataatttggtgattacgtggaagcccttgaatggtttcgaatctaatgggccaggccttcagtacaaagttagctggcgccagaaagatggtgatgatgaatggacatctgtg

SEQ ID NO: 98380 - DNA, 120 bp, Artificial Sequence
  ENSG00000091129_24 (sequence is synthesized)
gttgtggcaaatgtatccaaatatattgtctcaggcacgccaacctttgttccatacctgatcaaagttcaggccctgaatgacatggggtttgcccccgagccagctgtagtcatggga

SEQ ID NO: 98381 - DNA, 120 bp, Artificial Sequence
  ENSG00000091129_25 (sequence is synthesized)
cattctggagaagacctcccaatggtggctcctgggaacgtgcgtgtgaatgtggtgaacagtaccttagccgaggtgcactgggacccagtacctctgaaaagcatccgaggacaccta

SEQ ID NO: 98382 - DNA, 120 bp, Artificial Sequence
  ENSG00000091129_26 (sequence is synthesized)
caaggctatcggatttactattggaagacccagagttcatctaaaagaaacagacgtcacattgagaaaaagatcctcaccttccaaggcagcaagactcatggcatgttgccggggcta

SEQ ID NO: 98383 - DNA, 120 bp, Artificial Sequence
  ENSG00000091129_27 (sequence is synthesized)
ctccagaaggagtccccagtgctccctcgtctttgaagattgtgaatccaacactggactctctcactttggaatgggatccaccgagccacccgaatggcattttgacagagtacacct

SEQ ID NO: 98384 - DNA, 120 bp, Artificial Sequence
  ENSG00000091129_28 (sequence is synthesized)
taaagtatcagccaattaacagcacacatgaattaggccctctggtagatttgaaaattcctgccaacaagacacggtggactttaaaaaatttaaatttcagcactcgatataagtttt

SEQ ID NO: 98385 - DNA, 120 bp, Artificial Sequence
  ENSG00000091129_29 (sequence is synthesized)
atttctatgcacaaacatcagcaggatcaggaagtcaaattacagaggaagcagtaacaactgtggatgaagctggtattcttccacctgatgtaggtgcaggcaaagttcaagcagtaa

SEQ ID NO: 98386 - DNA, 120 bp, Artificial Sequence
  ENSG00000091129_30 (sequence is synthesized)
atcccaggatcagcaatcttactgctgcagctgctgagacctatgccaatatcagttgggaatatgagggaccagagcatgtgaacttttatgttgaatatggtgtagcaggcagcaaag

SEQ ID NO: 98387 - DNA, 120 bp, Artificial Sequence
  ENSG00000091129_31 (sequence is synthesized)
aagaatggagaaaagaaattgtaaatggttctcggagcttctttgggttaaagggtctaatgccaggaacagcatacaaagttcgagttggtgctgtgggggactctggttttgtgagtt

SEQ ID NO: 98388 - DNA, 120 bp, Artificial Sequence
  ENSG00000091129_32 (sequence is synthesized)
cagaggatgtgtttgagacaggcccagcgatggcaagccggcaggtggatattgcaactcagggctggttcattggtctgatgtgtgctgttgctctccttatcttaattttgctgattg

SEQ ID NO: 98389 - DNA, 120 bp, Artificial Sequence
  ENSG00000091129_33 (sequence is synthesized)
tttgcttcatcagaagaaacaagggtggtaaatatccagttaaagaaaaggaagatgcccatgctgaccctgaaatccagcctatgaaggaagatgatgggacatttggagaatacagtg

SEQ ID NO: 98390 - DNA, 120 bp, Artificial Sequence
  ENSG00000091129_34 (sequence is synthesized)
atgcagaagaccacaagcctttgaaaaaaggaagtcgaactccttcagacaggactgtgaaaaaagaagatagtgacgacagcctagttgactatggagaaggggttaatggccagttca

SEQ ID NO: 98391 - DNA, 120 bp, Artificial Sequence
  ENSG00000091129_35 (sequence is synthesized)
atgaggatggctcctttattggacaatacagtggtaagaaagagaaagagccggctgaaggaaacgaaagctcagaggcaccttctcctgtcaacgccatgaattcctttgtttaatttt

SEQ ID NO: 98392 - DNA, 120 bp, Artificial Sequence
  ENSG00000091129_36 (sequence is synthesized)
taagctctttgccaatattccatttctctagaatgtttatcctaagcacttgtttgtcagccctctcatactatgaacatatgggtagagagtatattttctgctgtatgttagtattat

SEQ ID NO: 98393 - DNA, 120 bp, Artificial Sequence
  ENSG00000091129_37 (sequence is synthesized)
gagaatagttacagcaaaaacataactcagtcaaatgatatgttaatatgaactggaatgcaaagtgcatactttttcattcaaaatgggtattcttgatttcctcagaactgataaaaa

SEQ ID NO: 98394 - DNA, 120 bp, Artificial Sequence
  ENSG00000091129_38 (sequence is synthesized)
ataatgcaacatcaccaacagatcctgttatttcctctgcaggatacagttcaatatgatgcatgaaaaatgctccacatttaaaggacatacccgtgtatgttatgaaaacatggtttg

SEQ ID NO: 98395 - DNA, 120 bp, Artificial Sequence
  ENSG00000091129_39 (sequence is synthesized)
atactttgtttatactaccctcagctgaacccctatatatgaattccgttttcattgtcaagaatgttactgtagtattctctagaacttcaatgtctttgtggacattgttgtgaaatt

SEQ ID NO: 98396 - DNA, 120 bp, Artificial Sequence
  ENSG00000091129_40 (sequence is synthesized)
ggtgactatgtatagctgtcgttagtctttttgggagactgttaggaacagtttgtacagtatatacttgctaaatgagttcattatgacagtcacattgctgatgcttactgagaacta

SEQ ID NO: 98397 - DNA, 120 bp, Artificial Sequence
  ENSG00000091129_41 (sequence is synthesized)
ttacctactcttggctcctgttactccgtaggcttcttaatcttccaggcattacagcagcacagtgttctactttttacatcatttctatgttcggttgtttttaggcataaacaatgt

SEQ ID NO: 98398 - DNA, 120 bp, Artificial Sequence
  ENSG00000091129_42 (sequence is synthesized)
gtattgcagtgcatttcggcatttgtgccatactgaaagaatcaaaaacaaatcatccaaattaaatttcaaacattatttcagagaacacagggcaagacacatacagtgccttcagat

SEQ ID NO: 98399 - DNA, 120 bp, Artificial Sequence
  ENSG00000091129_43 (sequence is synthesized)
attaagcattccacaacatcgtgcattctgtatcagctggtccagtccattctgggtcctagattactgtcattgtctaaaagtaacttttaaaaagcagagttcatgaaaactgcaatg

SEQ ID NO: 98400 - DNA, 120 bp, Artificial Sequence
  ENSG00000091129_44 (sequence is synthesized)
ctgggaaaagaaggaaacatgaaaataaaaataagacagtttattagaaatagcatttcctcataagcataaaaagaaaatctttgttgccaactgaagcacatgatgattttgtggtcc

SEQ ID NO: 98401 - DNA, 120 bp, Artificial Sequence
  ENSG00000091129_45 (sequence is synthesized)
tttatggtttctattacattcagtaagaaagatgtcaacatgctagaaaattaattttaaaactaagttattccaacactaaaagcatacaacagcatgccaacagtaatatattattct

SEQ ID NO: 98402 - DNA, 120 bp, Artificial Sequence
  ENSG00000091129_46 (sequence is synthesized)
ccaagactttacctatgtaagtgttcaaaactctgcagcattaaacaacgtgtatgcaaattgttatggatacatttcagaatctaagaaatcaggcaagtgcttaaaaggccaacggtc

SEQ ID NO: 98403 - DNA, 120 bp, Artificial Sequence
  ENSG00000091129_47 (sequence is synthesized)
caagggattacatctgcagtttaaaaagtaaatatatattctatcgtattcataaacaatatctatcaaatgggttacctccaaatatgaaaatctataacaacctatggttgaaggaat

SEQ ID NO: 98404 - DNA, 120 bp, Artificial Sequence
  ENSG00000091129_48 (sequence is synthesized)
gctcagtttcatttgccaataaattggtttctcataacttgcatcaagtttaattttaagtaaagctttttatatgtagatattttgttgaatttgtaaatacacttaaaatgtagatgc

SEQ ID NO: 98405 - DNA, 120 bp, Artificial Sequence
  ENSG00000091129_49 (sequence is synthesized)
tatatgcttataggtgttacatacaaataaacatgcaatgtttatgttgtactgtataagaggtaagctaattaatgcagtgaatgggattggaaagcatctacttaaatatctattggg

SEQ ID NO: 98406 - DNA, 120 bp, Artificial Sequence
  ENSG00000091129_50 (sequence is synthesized)
ttcccccctccccccaccttttttgctgtgaaactgaaatagtgaacttttctacgtattgacagcagatttttcgatgaaatcttcagagctttgcctatggggcacagtaggcctagt

SEQ ID NO: 98407 - DNA, 120 bp, Artificial Sequence
  ENSG00000091129_51 (sequence is synthesized)
aacctggcatgtttgatatatgtaggtaaagcataatttaaagtaatcccaggtaaagatggccctaaatactttcatgtctctatattcatttttcacagatccacctgtctcttgaaa

SEQ ID NO: 98408 - DNA, 120 bp, Artificial Sequence
  ENSG00000091129_52 (sequence is synthesized)
atataaaaagacaaaacaggtttgccttggcatcagagagcacaaagattaaaagttactttaaatttgccaatattttgggagaacaataaaactacattttttcctcttccatactgg

SEQ ID NO: 98409 - DNA, 120 bp, Artificial Sequence
  ENSG00000091129_53 (sequence is synthesized)
tagatgcgaaatttatctgtgcatgaaagggtcacttctgtaatagtgcaacagatttggtattaaaaattaaatgtggttttaaaagttcctctctcttttgtaatttatgttcccaat

SEQ ID NO: 98410 - DNA, 120 bp, Artificial Sequence
  ENSG00000091129_54 (sequence is synthesized)
tgagtgtgaatgtccaagtaatggtgtatgtaatggtacaggcaaatgtgactggatttccctcaaaaaagtaactattaaacagtcttgatctctttgtgacttttaactttttcaaac

SEQ ID NO: 98411 - DNA, 120 bp, Artificial Sequence
  ENSG00000091129_55 (sequence is synthesized)
tttaaaatattaggtttgagtccatctaaaggcaaagtcattatgtgttttgagaggatggttttattaaatataaatgtaaatgacaagagagaaaaaggaagagaataactaaatggg

SEQ ID NO: 98412 - DNA, 120 bp, Artificial Sequence
  ENSG00000091129_56 (sequence is synthesized)
tgcctgtcacaggtttgtactaatgtattttcagctgaatcaggaatgagttactgaaactcaaaaccttgaatcgtgcgagcacggtgaaatgtcaatttaatacatgttgaaacattc

SEQ ID NO: 98413 - DNA, 120 bp, Artificial Sequence
  ENSG00000091129_57 (sequence is synthesized)
atttgcaaaggaaacattgaggctgacgagaggagagttggagactgcagaacttgggagctgtccactgctctgcctttgtcacagcccagagcaatgctaagaagacgtttggtttaa

SEQ ID NO: 98414 - DNA, 120 bp, Artificial Sequence
  ENSG00000091129_58 (sequence is synthesized)
agtgaataaatggtgataaaaaaataactcaggttaaggaaggaagccacatgtatgttaaacacaggcaccaaattacctttgcattttattaccattagatatttattatgaatgtga

SEQ ID NO: 98415 - DNA, 120 bp, Artificial Sequence
  ENSG00000091129_59 (sequence is synthesized)
atagtttatgctgttaacataatggcatgtgatgactggtacttggcaatatttcgtctgctttttacatggataatgggaagaatgacagggtcagaaataaatatcacttcaaagttt

SEQ ID NO: 98416 - DNA, 120 bp, Artificial Sequence
  ENSG00000091129_60 (sequence is synthesized)
attgtattgccacaaagccaggctgatcaccctgggaggcctgggaggtctgagcagctttggattggctgtcaggagcaggactttaacattttactgcacatgggccagccacagcag

SEQ ID NO: 98417 - DNA, 120 bp, Artificial Sequence
  ENSG00000091129_61 (sequence is synthesized)
ggttcaattgccagtgcttttatctgcagaaatgtgctgggatgggcactttgtttaaaatttccctttgctactgggaggaaatggaaagcagtaagataacttcatttgtaagagcaa

SEQ ID NO: 98418 - DNA, 120 bp, Artificial Sequence
  ENSG00000091129_62 (sequence is synthesized)
gaaaccgtttctacatggctggctctaagccagatgatatttcatagtgcaaagagggatagaacctcactggtggccaaatgtgattatatgctataaccctgtgcccctactctgaca

SEQ ID NO: 98419 - DNA, 120 bp, Artificial Sequence
  ENSG00000091129_63 (sequence is synthesized)
cccacccccaagcagttaccctctgttggaagcctgcagctttctttgtttgtttctttaattatacagacagtaggatctgcatccttactagcatatagaaaaatcagagaaacaatg

SEQ ID NO: 98420 - DNA, 120 bp, Artificial Sequence
  ENSG00000091129_64 (sequence is synthesized)
gattttccatgggcaggagccagaggacgggctggaccattgcttcgtcctcctctaacagaatctacactagagacgatttgtggctaatggtgcagtttaacttaaaacttctgagga

SEQ ID NO: 98421 - DNA, 120 bp, Artificial Sequence
  ENSG00000091136_0 (sequence is synthesized)
cttctttgggctcgggggctcccggagcagggcgagagctcgcgtcgccggaaaggaagacgggaagaaagggcaggcggctcggcgggcgtcttctccactcctctgccgcgtccccgt

SEQ ID NO: 98422 - DNA, 120 bp, Artificial Sequence
  ENSG00000091136_1 (sequence is synthesized)
ggctgcagggagccggcatggggcttctccagttgctagctttcagtttcttagccctgtgcagagcccgagtgcgcgctcaggaacccgagttcagctacggctgcgcagaaggcagct

SEQ ID NO: 98423 - DNA, 120 bp, Artificial Sequence
  ENSG00000091136_2 (sequence is synthesized)
gctatcccgccacgggcgaccttctcatcggccgagcacagaagctttcggtgacctcgacgtgcgggctgcacaagcccgaaccctactgtatcgtcagccacttgcaggaggacaaaa

SEQ ID NO: 98424 - DNA, 120 bp, Artificial Sequence
  ENSG00000091136_3 (sequence is synthesized)
aatgcttcatatgcaattcccaagatccttatcatgagaccctgaatcctgacagccatctcattgaaaatgtggtcactacatttgctccaaaccgccttaagatttggtggcaatctg

SEQ ID NO: 98425 - DNA, 120 bp, Artificial Sequence
  ENSG00000091136_4 (sequence is synthesized)
aaaatggtgtggaaaatgtaactatccaactggatttggaagcagaattccattttactcatctcataatgactttcaagacattccgtccagctgctatgctgatagaacgatcgtccg

SEQ ID NO: 98426 - DNA, 120 bp, Artificial Sequence
  ENSG00000091136_5 (sequence is synthesized)
actttgggaaaacctggggtgtgtatagatacttcgcctatgactgtgaggcctcgtttccaggcatttcaactggccccatgaaaaaagtcgatgacataatttgtgattctcgatatt

SEQ ID NO: 98427 - DNA, 120 bp, Artificial Sequence
  ENSG00000091136_6 (sequence is synthesized)
ctgacattgaaccctcaactgaaggagaggtgatatttcgtgctttagatcctgctttcaaaatagaagatccttatagcccaaggatacagaatttattaaaaattaccaacttgagaa

SEQ ID NO: 98428 - DNA, 120 bp, Artificial Sequence
  ENSG00000091136_7 (sequence is synthesized)
tcaagtttgtgaaactgcatactttgggagataaccttctggattccaggatggaaatcagagaaaagtattattatgcagtttatgatatggtggttcgaggaaattgcttctgctatg

SEQ ID NO: 98429 - DNA, 120 bp, Artificial Sequence
  ENSG00000091136_8 (sequence is synthesized)
gtcatgccagcgaatgtgcccctgtggatggattcaatgaagaagtggaaggaatggttcacggacactgcatgtgcaggcataacaccaagggcttaaactgtgaactctgcatggatt

SEQ ID NO: 98430 - DNA, 120 bp, Artificial Sequence
  ENSG00000091136_9 (sequence is synthesized)
tctaccatgatttaccttggagacctgctgaaggccgaaacagcaacgcctgtaaaaaatgtaactgcaatgaacattccatctcttgtcactttgacatggctgtttacctggccacgg

SEQ ID NO: 98431 - DNA, 120 bp, Artificial Sequence
  ENSG00000091136_10 (sequence is synthesized)
ggaacgtcagcggaggcgtgtgtgatgactgtcagcacaacaccatggggcgcaactgtgagcagtgcaagccgttttactaccagcacccagagagggacatccgagatcctaatttct

SEQ ID NO: 98432 - DNA, 120 bp, Artificial Sequence
  ENSG00000091136_11 (sequence is synthesized)
gtgaacgatgtacgtgtgacccagctggctctcaaaatgagggaatttgtgacagctatactgatttttctactggtctcattgctggccagtgtcggtgtaaattaaatgtggaaggag

SEQ ID NO: 98433 - DNA, 120 bp, Artificial Sequence
  ENSG00000091136_12 (sequence is synthesized)
aacattgtgatgtttgcaaagaaggcttctatgatttaagcagtgaagatccatttggttgtaaatcttgtgcttgcaatcctctgggaacaattcctggagggaatccttgtgattccg

SEQ ID NO: 98434 - DNA, 120 bp, Artificial Sequence
  ENSG00000091136_13 (sequence is synthesized)
agacaggtcactgctactgcaagcgtctggtgacaggacagcattgtgaccagtgcctgccagagcactggggcttaagcaatgatttggatggatgtcgaccatgtgactgtgaccttg

SEQ ID NO: 98435 - DNA, 120 bp, Artificial Sequence
  ENSG00000091136_14 (sequence is synthesized)
ggggagccttaaacaacagttgctttgcggagtcaggccagtgctcatgccggcctcacatgattggacgtcagtgcaacgaagtggaacctggttactactttgccaccctggatcact

SEQ ID NO: 98436 - DNA, 120 bp, Artificial Sequence
  ENSG00000091136_15 (sequence is synthesized)
acctctatgaagcggaggaagccaacttggggcctggggttagcatagtggagcggcaatatatccaggaccggattccctcctggactggagccggcttcgtccgagtgcctgaagggg

SEQ ID NO: 98437 - DNA, 120 bp, Artificial Sequence
  ENSG00000091136_16 (sequence is synthesized)
cttatttggagtttttcattgacaacataccatattccatggagtacgacatcctaattcgctacgagccacagctacccgaccactgggaaaaagctgtcatcacagtgcagcgacctg

SEQ ID NO: 98438 - DNA, 120 bp, Artificial Sequence
  ENSG00000091136_17 (sequence is synthesized)
gaaggattccaaccagcagccgatgtggtaataccatccccgatgatgacaaccaggtggtgtcattatcaccaggctcaagatatgtcgtccttcctcggccggtgtgctttgagaagg

SEQ ID NO: 98439 - DNA, 120 bp, Artificial Sequence
  ENSG00000091136_18 (sequence is synthesized)
gaacaaactacacggtgaggttggagctgcctcagtacacctcctctgatagcgacgtggagagcccctacacgctgatcgattctcttgttctcatgccatactgtaaatcactggaca

SEQ ID NO: 98440 - DNA, 120 bp, Artificial Sequence
  ENSG00000091136_19 (sequence is synthesized)
tcttcaccgtgggaggttcaggagatggggtggtcaccaacagtgcctgggaaacctttcagagataccgatgtctagagaacagcagaagcgttgtgaaaacaccgatgacagatgttt

SEQ ID NO: 98441 - DNA, 120 bp, Artificial Sequence
  ENSG00000091136_20 (sequence is synthesized)
gcagaaacatcatctttagcatttctgccctgttacaccagacaggcctggcttgtgaatgcgaccctcagggttcgttaagttccgtgtgtgatcccaacggaggccagtgccagtgcc

SEQ ID NO: 98442 - DNA, 120 bp, Artificial Sequence
  ENSG00000091136_21 (sequence is synthesized)
ggcccaacgtggttggaagaacctgcaacagatgtgcacctggaacttttggctttggccccagtggatgcaaaccttgtgagtgccatctgcaaggatctgtcaatgccttctgcaatc

SEQ ID NO: 98443 - DNA, 120 bp, Artificial Sequence
  ENSG00000091136_22 (sequence is synthesized)
ccgtcactggccagtgccactgtttccagggagtgtatgctcggcagtgtgatcggtgcttacctgggcactggggctttccaagttgccagccctgccagtgcaatggccacgccgatg

SEQ ID NO: 98444 - DNA, 120 bp, Artificial Sequence
  ENSG00000091136_23 (sequence is synthesized)
agtgactggggagtgcttgaactgccaggactacaccatgggtcataactgtgaaaggtgcttggctggttactatggcgaccccatcattgggtcaggagatcactgccgcccttgccc

SEQ ID NO: 98445 - DNA, 120 bp, Artificial Sequence
  ENSG00000091136_24 (sequence is synthesized)
ttgcccagatggtcccgacagtggacgccagtttgccaggagctgctaccaagatcctgttactttacagcttgcctgtgtttgtgatcctggatacattggttccagatgtgacgactg

SEQ ID NO: 98446 - DNA, 120 bp, Artificial Sequence
  ENSG00000091136_25 (sequence is synthesized)
tgcctcaggatactttggcaatccatcagaagttggggggtcgtgtcagccttgccagtgtcacaacaacattgacacgacagacccagaagcctgtgacaaggagactgggaggtgtct

SEQ ID NO: 98447 - DNA, 120 bp, Artificial Sequence
  ENSG00000091136_26 (sequence is synthesized)
caagtgcctgtaccacacggaaggggaacactgtcagttctgccggtttggatactatggtgatgccctccagcaggactgtcgaaagtgtgtctgtaattacctgggcaccgtgcaaga

SEQ ID NO: 98448 - DNA, 120 bp, Artificial Sequence
  ENSG00000091136_27 (sequence is synthesized)
gcactgtaacggctctgactgccagtgcgacaaagccactggtcagtgcttgtgtcttcctaatgtgatcgggcagaactgtgaccgctgtgcgcccaatacctggcagctggccagtgg

SEQ ID NO: 98449 - DNA, 120 bp, Artificial Sequence
  ENSG00000091136_28 (sequence is synthesized)
cactggctgtgacccatgcaactgcaatgctgctcattccttcgggccatcttgcaatgagttcacggggcagtgccagtgcatgcctgggtttggaggccgcacctgcagcgagtgcca

SEQ ID NO: 98450 - DNA, 120 bp, Artificial Sequence
  ENSG00000091136_29 (sequence is synthesized)
ggaactcttctggggagaccccgacgtggagtgccgagcctgtgactgtgaccccaggggcattgagacgccacagtgtgaccagtccacgggccagtgtgtctgcgttgagggtgttga

SEQ ID NO: 98451 - DNA, 120 bp, Artificial Sequence
  ENSG00000091136_30 (sequence is synthesized)
gggtccacgctgtgacaagtgcacgcgagggtactcgggggtcttccctgactgcacaccctgccaccagtgctttgctctctgggatgtgatcattgccgagctgaccaacaggacaca

SEQ ID NO: 98452 - DNA, 120 bp, Artificial Sequence
  ENSG00000091136_31 (sequence is synthesized)
cagattcctggagaaagccaaggccttgaagatcagtggtgtgatcgggccttaccgtgagactgtggactcggtggagaggaaagtcagcgagataaaagacatcctggcgcagagccc

SEQ ID NO: 98453 - DNA, 120 bp, Artificial Sequence
  ENSG00000091136_32 (sequence is synthesized)
cgcagcagagccactgaaaaacattgggaatctctttgaggaagcagagaaactgattaaagatgttacagaaatgatggctcaagtagaagtgaaattatctgacacaacttcccaaag

SEQ ID NO: 98454 - DNA, 120 bp, Artificial Sequence
  ENSG00000091136_33 (sequence is synthesized)
caacagcacagccaaagaactggattctctacagacagaagccgaaagcctagacaacactgtgaaagaacttgctgaacaactggaatttatcaaaaactcagatattcggggtgcctt

SEQ ID NO: 98455 - DNA, 120 bp, Artificial Sequence
  ENSG00000091136_34 (sequence is synthesized)
ggatagcattaccaagtatttccagatgtctcttgaggcagaggagagggtgaatgcctccaccacagaacccaacagcactgtggagcagtcagccctcatgagagacagagtagaaga

SEQ ID NO: 98456 - DNA, 120 bp, Artificial Sequence
  ENSG00000091136_35 (sequence is synthesized)
cgtgatgatggagcgagaatcccagttcaaggaaaaacaagaggagcaggctcgcctccttgatgaactggcaggcaagctacaaagcctagacctttcagccgctgccgaaatgacctg

SEQ ID NO: 98457 - DNA, 120 bp, Artificial Sequence
  ENSG00000091136_36 (sequence is synthesized)
tggaacacccccaggggcctcctgttccgagactgaatgtggcgggccaaactgcagaactgacgaaggagagaggaagtgtggggggcctggctgtggtggtctggttactgttgcaca

SEQ ID NO: 98458 - DNA, 120 bp, Artificial Sequence
  ENSG00000091136_37 (sequence is synthesized)
caacgcctggcagaaagccatggacttggaccaagatgtcctgagtgccctggctgaagtggaacagctctccaagatggtctctgaagcaaaactgagggcagatgaggcaaaacaaag

SEQ ID NO: 98459 - DNA, 120 bp, Artificial Sequence
  ENSG00000091136_38 (sequence is synthesized)
tgctgaagacattctgttgaagacaaatgctaccaaagaaaaaatggacaagagcaatgaggagctgagaaatctaatcaagcaaatcagaaactttttgacccaggatagtgctgattt

SEQ ID NO: 98460 - DNA, 120 bp, Artificial Sequence
  ENSG00000091136_39 (sequence is synthesized)
ggacagcattgaagcagttgctaatgaagtattgaaaatggagatgcctagcaccccacagcagttacagaacttgacagaagatatacgtgaacgagttgaaagcctttctcaagtaga

SEQ ID NO: 98461 - DNA, 120 bp, Artificial Sequence
  ENSG00000091136_40 (sequence is synthesized)
ggttattcttcagcatagtgctgctgacattgccagagctgagatgttgttagaagaagctaaaagagcaagcaaaagtgcaacagatgttaaagtcactgcagatatggtaaaggaagc

SEQ ID NO: 98462 - DNA, 120 bp, Artificial Sequence
  ENSG00000091136_41 (sequence is synthesized)
tctggaagaagcagaaaaggcccaggtcgcagcagagaaggcaattaaacaagcagatgaagacattcaaggaacccagaacctgttaacttcgattgagtctgaaacagcagcttctga

SEQ ID NO: 98463 - DNA, 120 bp, Artificial Sequence
  ENSG00000091136_42 (sequence is synthesized)
ggaaaccttgttcaacgcgtcccagcgcatcagcgagttagagaggaatgtggaagaacttaagcggaaagctgcccaaaactccggggaggcagaatatattgaaaaagtagtatatac

SEQ ID NO: 98464 - DNA, 120 bp, Artificial Sequence
  ENSG00000091136_43 (sequence is synthesized)
tgtgaagcaaagtgcagaagatgttaagaagactttagatggtgaacttgatgaaaagtataaaaaagtagaaaatttaattgccaaaaaaactgaagagtcagctgatgccagaaggaa

SEQ ID NO: 98465 - DNA, 120 bp, Artificial Sequence
  ENSG00000091136_44 (sequence is synthesized)
agccgaaatgctacaaaatgaagcaaaaactcttttagctcaagcaaatagcaagctgcaactgctcaaagatttagaaagaaaatatgaagacaatcaaagatacttagaagataaagc

SEQ ID NO: 98466 - DNA, 120 bp, Artificial Sequence
  ENSG00000091136_45 (sequence is synthesized)
tcaagaattagcaagactggaaggagaagtccgttcactcctaaaggatataagccagaaagttgctgtgtatagcacatgcttgtaacagaggagaataaaaaatggctgaggtgaaca

SEQ ID NO: 98467 - DNA, 120 bp, Artificial Sequence
  ENSG00000091136_46 (sequence is synthesized)
aggtaaaacaactacattttaaaaactgacttaatgctcttcaaaataaaacatcacctatttaatgtttttaatcacattttgtatggagttaaataaagtacagtgcttttgtatata

SEQ ID NO: 98468 - DNA, 120 bp, Artificial Sequence
  ENSG00000091136_47 (sequence is synthesized)
attactgctaagaaggggttagcaaccactgaagtcacgcatgtgctagaggaagctgctacagtctctacctgagccattggtcaattgttgtcgatggttgacaccttcccattttca

SEQ ID NO: 98469 - DNA, 120 bp, Artificial Sequence
  ENSG00000091136_48 (sequence is synthesized)
cagtgaagtgagtattctaaatgccacatcttgtcactgaggttcatgattaagtagatcagctagcattgcttattcccttctagcctgtgactgtgaccccaggggcattgagacgcc

SEQ ID NO: 98470 - DNA, 120 bp, Artificial Sequence
  ENSG00000091136_49 (sequence is synthesized)
ttgtgggcgttctcgcattgacttgatcagagagtggagggaactggggttctacaagagccttctgtaaattataaaacacagtacaaattaacgtgtctataagaacctgtatttaat

SEQ ID NO: 98471 - DNA, 120 bp, Artificial Sequence
  ENSG00000091136_50 (sequence is synthesized)
ttttaactcatttgggcagaagatattgatgagttgtaaacttccattgtttccttggaaataagcaggttagtttactcctaaactctctgctcctctctccattctgtctcccaaaca

SEQ ID NO: 98472 - DNA, 120 bp, Artificial Sequence
  ENSG00000091136_51 (sequence is synthesized)
ctgttttcaagcacccttgctgaggaccacctacacattctctggggccacccaggccctgcacagctgttttgctgcagcagattcactatccgaagtattgtgcctgatccttggctt

SEQ ID NO: 98473 - DNA, 120 bp, Artificial Sequence
  ENSG00000091136_52 (sequence is synthesized)
ggggctgatcagggtgggcgcgagcgtcggtgggtttcccgggagggaggctctcgctgctggacagacctgatgacgtgtgtgggtttctttccgtgtccttctcctttcggagtccct

SEQ ID NO: 98474 - DNA, 120 bp, Artificial Sequence
  ENSG00000091136_53 (sequence is synthesized)
gccttcccagcctctcctgcgctcatctctccattgtcttttctgtgcattttgctttcttccgaatggactgtcctctctccgcacccactcccccgcccccgcttgttcgtttttttc

SEQ ID NO: 98475 - DNA, 120 bp, Artificial Sequence
  ENSG00000091136_54 (sequence is synthesized)
attgctgcagagccgatgcttccctcctgaagttgatcacaccaacccatgagcattctgaattggggacagggtgcttataaaaggagcatgtttccattgaatgagtttctcaaggca

SEQ ID NO: 98476 - DNA, 120 bp, Artificial Sequence
  ENSG00000091136_55 (sequence is synthesized)
ctttcccgtaacatactctgccgttcctgtctccccatctggaattgtcctttcttctttcaaattctattatcccttaaaatctgatcagctcctcatcttccacgaaggtttccctca

SEQ ID NO: 98477 - DNA, 120 bp, Artificial Sequence
  ENSG00000091136_56 (sequence is synthesized)
ctacccagcctaaaacaaattctagtagtactcaattgtctgcagttacttttttgtgtgtgtaggtctcatctcccctcaaaatcccagatagattataaactcttaaacaggaagtta

SEQ ID NO: 98478 - DNA, 120 bp, Artificial Sequence
  ENSG00000091136_57 (sequence is synthesized)
gtgtctcttggtgtgtaaccccaccatgctagtccatagtagatgaccagtaagtggttgaatgaatgaaccatctattcttttcacctctttttggggacatctttgcttttcacagag

SEQ ID NO: 98479 - DNA, 120 bp, Artificial Sequence
  ENSG00000091136_58 (sequence is synthesized)
tgtgtatctatcatggagtaaaaagtatctctttaaccaatgaaacttctaagaaggacctatgcgagtctctctgggtcatttcaggaaggctattctttaaagaaaagaacactgaga

SEQ ID NO: 98480 - DNA, 120 bp, Artificial Sequence
  ENSG00000091136_59 (sequence is synthesized)
gtgcacgcacacgcactctcgcttcccaagctcacagatctccacgcgcacactcacaccgaggatgcgcgggctgccgcgtgcacgcgggttcacgtgcgtggccctgtgcagagcccg

SEQ ID NO: 98481 - DNA, 120 bp, Artificial Sequence
  ENSG00000091136_60 (sequence is synthesized)
cccgacgtggagtgccgagatgtggaagacgtgactcagtttcctgattacccagggtcacataacatgtgtggagaaggcaggatttaccacctcagtccgcagttcatgctcttaacc

SEQ ID NO: 98482 - DNA, 120 bp, Artificial Sequence
  ENSG00000091136_61 (sequence is synthesized)
ataatgctgtactcctcaaacctgccactcgagagcttggaatgtagggggagaacaaagacaataaaaagataaactagcaatacaaggcaggatgtggtgagggccaaatgaatgggc

SEQ ID NO: 98483 - DNA, 120 bp, Artificial Sequence
  ENSG00000091136_62 (sequence is synthesized)
ttctttgggctcgggggctcccggagcagggcgagagctcgcgtcgccgggtgaggagaacaaagtggctgcacgattttccccactttccagcccaccccccgcttccgtgggagcgac

SEQ ID NO: 98484 - DNA, 90 bp, Artificial Sequence
  ENSG00000091136_63 (sequence is synthesized)
cgaaagcctagacaacactgtgaaagaacttgctgaacaactggaatttatcaaaaactcagatattcgggagatgggctcttgctatgc

SEQ ID NO: 98485 - DNA, 120 bp, Artificial Sequence
  ENSG00000091137_0 (sequence is synthesized)
attccgggcggggcgcgagcagagacaggtcatggcagcgccaggcggcaggtcggagccgccgcagctccccgagtacagctgcagctacatggtgtcgcggccggtctacagcgagct

SEQ ID NO: 98486 - DNA, 120 bp, Artificial Sequence
  ENSG00000091137_1 (sequence is synthesized)
cgctttccagcaacagcacgagcggcgcctgcaggagcgcaagacgctgcgggagagcctggccaagtgctgcagttgttcaagaaagagagcctttggtgtgctaaagactcttgtgcc

SEQ ID NO: 98487 - DNA, 120 bp, Artificial Sequence
  ENSG00000091137_2 (sequence is synthesized)
catcttggagtggctccccaaataccgagtcaaggaatggctgcttagtgacgtcatttcgggagttagtactgggctagtggccacgctgcaagggatggcatatgccctactagctgc

SEQ ID NO: 98488 - DNA, 120 bp, Artificial Sequence
  ENSG00000091137_3 (sequence is synthesized)
agttcctgtcggatatggtctctactctgcttttttccctatcctgacatactttatctttggaacatcaagacatatctcagttggaccttttccagtggtgagtttaatggtgggatc

SEQ ID NO: 98489 - DNA, 120 bp, Artificial Sequence
  ENSG00000091137_4 (sequence is synthesized)
tgttgttctgagcatggcccccgacgaacactttctcgtatccagcagcaatggaactgtattaaatactactatgatagacactgcagctagagatacagctagagtcctgattgccag

SEQ ID NO: 98490 - DNA, 120 bp, Artificial Sequence
  ENSG00000091137_5 (sequence is synthesized)
tgccctgactctgctggttggaattatacagttgatatttggtggcttgcagattggattcatagtgaggtacttggcagatcctttggttggtggcttcacaacagctgctgccttcca

SEQ ID NO: 98491 - DNA, 120 bp, Artificial Sequence
  ENSG00000091137_6 (sequence is synthesized)
agtgctggtctcacagctaaagattgtcctcaatgtttcaaccaaaaactacaatggagttctctctattatctatacgctggttgagatttttcaaaatattggtgataccaatcttgc

SEQ ID NO: 98492 - DNA, 120 bp, Artificial Sequence
  ENSG00000091137_7 (sequence is synthesized)
tgatttcactgctggattgctcaccattgtcgtctgtatggcagttaaggaattaaatgatcggtttagacacaaaatcccagtccctattcctatagaagtaattgtgacgataattgc

SEQ ID NO: 98493 - DNA, 120 bp, Artificial Sequence
  ENSG00000091137_8 (sequence is synthesized)
tactgccatttcatatggagccaacctggaaaaaaattacaatgctggcattgttaaatccatcccaagggggtttttgcctcctgaacttccacctgtgagcttgttctcggagatgct

SEQ ID NO: 98494 - DNA, 120 bp, Artificial Sequence
  ENSG00000091137_9 (sequence is synthesized)
ggctgcatcattttccatcgctgtggtggcttatgctattgcagtgtcagtaggaaaagtatatgccaccaagtatgattacaccatcgatgggaaccaggaattcattgcctttgggat

SEQ ID NO: 98495 - DNA, 120 bp, Artificial Sequence
  ENSG00000091137_10 (sequence is synthesized)
cagcaacatcttctcaggattcttctcttgttttgtggccaccactgctctttcccgcacggccgtccaggagagcactggaggaaagacacaggttgctggcatcatctctgctgcgat

SEQ ID NO: 98496 - DNA, 120 bp, Artificial Sequence
  ENSG00000091137_11 (sequence is synthesized)
tgtgatgatcgccattcttgccctggggaagcttctggaacccttgcagaagtcggtcttggcagctgttgtaattgccaacctgaaagggatgtttatgcagctgtgtgacattcctcg

SEQ ID NO: 98497 - DNA, 120 bp, Artificial Sequence
  ENSG00000091137_12 (sequence is synthesized)
tctgtggagacagaataagattgatgctgttatctgggtgtttacgtgtatagtgtccatcattctggggctggatctcggtttactagctggccttatatttggactgttgactgtggt

SEQ ID NO: 98498 - DNA, 120 bp, Artificial Sequence
  ENSG00000091137_13 (sequence is synthesized)
cctgagagttcagtttccttcttggaatggccttggaagcatccctagcacagatatctacaaaagtaccaagaattacaaaaacattgaagaacctcaaggagtgaagattcttagatt

SEQ ID NO: 98499 - DNA, 120 bp, Artificial Sequence
  ENSG00000091137_14 (sequence is synthesized)
ttccagtcctattttctatggcaatgtcgatggttttaaaaaatgtatcaagtccacagttggatttgatgccattagagtatataataagaggctgaaagcgctgaggaaaatacagaa

SEQ ID NO: 98500 - DNA, 120 bp, Artificial Sequence
  ENSG00000091137_15 (sequence is synthesized)
actaataaaaagtggacaattaagagcaacaaagaatggcatcataagtgatgctgtttcaacaaataatgcttttgagcctgatgaggatattgaagatctggaggaacttgatatccc

SEQ ID NO: 98501 - DNA, 120 bp, Artificial Sequence
  ENSG00000091137_16 (sequence is synthesized)
aaccaaggaaatagagattcaagtggattggaactctgagcttccagtcaaagtgaacgttcccaaagtgccaatccatagccttgtgcttgactgtggagctatatctttcctggacgt

SEQ ID NO: 98502 - DNA, 120 bp, Artificial Sequence
  ENSG00000091137_17 (sequence is synthesized)
tgttggagtgagatcactgcgggtgattgtcaaagaattccaaagaattgatgtgaatgtgtattttgcatcacttcaagattatgtgatagaaaagctggagcaatgcgggttctttga

SEQ ID NO: 98503 - DNA, 120 bp, Artificial Sequence
  ENSG00000091137_18 (sequence is synthesized)
cgacaacattagaaaggacacattctttttgacggtccatgatgctatactctatctacagaaccaagtgaaatctcaagagggtcaaggttccattttagaaacgatcactctcattca

SEQ ID NO: 98504 - DNA, 120 bp, Artificial Sequence
  ENSG00000091137_19 (sequence is synthesized)
tgtccaggatgaggctatgcgtacacttgcatcctgaaagtgggttcgggaggtctctatgagcaaggaatacaagacaaaacttcctcaatgcattgactatttcttcagactcaaaac

SEQ ID NO: 98505 - DNA, 120 bp, Artificial Sequence
  ENSG00000091137_20 (sequence is synthesized)
actcattcttttttctattaagccattgaaagagaagcactaagactgcttctaggctttatttataaaataaacaccttatccctaacatgggcaaaatggctagaattattcagacga

SEQ ID NO: 98506 - DNA, 120 bp, Artificial Sequence
  ENSG00000091137_21 (sequence is synthesized)
tttggcagcgtccagggtaagctggtgttataatacgctgctgatctacatcacagatttgctaataatgttcacgtgggccctggcatatctctgttcagttagagtgagtgctgaccc

SEQ ID NO: 98507 - DNA, 120 bp, Artificial Sequence
  ENSG00000091137_22 (sequence is synthesized)
aacagcctctgtggtcaagcgagtcacgaatgattaatcataaagaaaaatcagtttttgactgacctggatatccatgagctgcactgatcaccatgtaaggtcacatttagtaaatgc

SEQ ID NO: 98508 - DNA, 120 bp, Artificial Sequence
  ENSG00000091137_23 (sequence is synthesized)
tgaaataaaatgattaatgcatttatcaataaaagcctttgaaaatactttggataataaattggagttttaaaaatgcaaatttgcttagtatctaataatgaagtgttattacatata

SEQ ID NO: 98509 - DNA, 120 bp, Artificial Sequence
  ENSG00000091137_24 (sequence is synthesized)
gccggaattgaggatctctttgatcctggaaatggtttacctaaaagctacagaaccaggccaatatattttgaaatattgatgcagacaaatgaaataataaagagattttcatggttt

SEQ ID NO: 98510 - DNA, 120 bp, Artificial Sequence
  ENSG00000091137_25 (sequence is synthesized)
aaatcttttttgatatgataataatcatgatcacaactgagatcaaaaaaatatatgacagattattttgtttaaaaatgcagttttaattatcttagtctatagaaatgatcattgcat

SEQ ID NO: 98511 - DNA, 120 bp, Artificial Sequence
  ENSG00000091137_26 (sequence is synthesized)
gcatggaggcatgtataggtatgatctgtgtaaaatctgacataaaaacagtgctattctgagtgaaaatttttttgatgtgcttacataaccatggtgattaaaatgagtttatatttt

SEQ ID NO: 98512 - DNA, 120 bp, Artificial Sequence
  ENSG00000091137_27 (sequence is synthesized)
ttctcaaaaattttagcagtgtgtaaagtaagtaatctttaactgaactctgaccacttaaaaaaaaatctaaaaattgaactacctatagtagtctgtgtttaaagtgaatttttaaag

SEQ ID NO: 98513 - DNA, 120 bp, Artificial Sequence
  ENSG00000091137_28 (sequence is synthesized)
acaaagcattctaaatgaactcaatataaaaacattcatttggaatgtacatactgaaaaatacaggtttttttgaccaaaagtttttatatcttttctttttatttatttttttcctaa

SEQ ID NO: 98514 - DNA, 120 bp, Artificial Sequence
  ENSG00000091137_29 (sequence is synthesized)
gtgccaacaattttctagatattatatacaacacaggctttgatcttggggacttttcccatatatttcacactggagtgaatgaagttgtacttcatttctagagaaaagttataccca

SEQ ID NO: 98515 - DNA, 120 bp, Artificial Sequence
  ENSG00000091137_30 (sequence is synthesized)
ggtccccaattgagaatgtcttgcttgattgaaaacgacatcatcccttggtatactccagggattggtttcaggacccctgcatttaccaaaatttgtgcacactcaagtcctgcagtc

SEQ ID NO: 98516 - DNA, 120 bp, Artificial Sequence
  ENSG00000091137_31 (sequence is synthesized)
acccctgcctaaagatagaatggcttctctgtttttcttctgaaatacaaccagaaacaatgtgtctatttctgaaagaataggattaatgatcatacaaatgggttaatcctgaattct

SEQ ID NO: 98517 - DNA, 120 bp, Artificial Sequence
  ENSG00000091137_32 (sequence is synthesized)
ggttgtaaatctggttacagcataactaggattataatgctgcctcattttcacagcactacttgcttatattgacaacaaatcatctcgctaaagagtgaatgtaggccaggcgcggtg

SEQ ID NO: 98518 - DNA, 120 bp, Artificial Sequence
  ENSG00000091137_33 (sequence is synthesized)
aaaaaaaaaaaaaaaaaaaaagagtgaatgtaatagtcttgcagaaaatgaatgaatacctttgttcaataaaggaaatatgcactgctcacttttttgaaggaaatgccaaagttacgt

SEQ ID NO: 98519 - DNA, 120 bp, Artificial Sequence
  ENSG00000091137_34 (sequence is synthesized)
tgcactgctcacttttttgaaggaaatgccaaagttacgttttacaacaaggctagagtttgtaaattctgggttcatttgtgatgacataagtcagcaaactgcgggaatactgtctct

SEQ ID NO: 98520 - DNA, 120 bp, Artificial Sequence
  ENSG00000091137_35 (sequence is synthesized)
tctatgtattttgtgaatagtaagcataattttagttttgtattatcaatgaaaatttcacttgaaattaaagctgccttttgttatatttttaacctataggataagattccagtattg

SEQ ID NO: 98521 - DNA, 120 bp, Artificial Sequence
  ENSG00000091137_36 (sequence is synthesized)
tatatgagttttaacaaattaaaaaatcaaatcatgtacatttgaaaatatttgcacacatttaaaaataaatgtaaagttgtcttttaaactactcggatgtgtcctttctgaacaaaa

SEQ ID NO: 98522 - DNA, 120 bp, Artificial Sequence
  ENSG00000091137_37 (sequence is synthesized)
aggctgctcggaaaacaggacgaggggagagacttgctcaataagctgaaagttctgcccccgagagggctgcgacagctgctggaatgtgcctgcagcgtccgcctcttggggacccgc

SEQ ID NO: 98523 - DNA, 120 bp, Artificial Sequence
  ENSG00000091137_38 (sequence is synthesized)
atttgagacggagcactgacaagctctccagagcacatggtcttcagcgggtgcaggcaaatctcaaactgctgatgtccattctcctgatgttacctccaggctcaaatgaggcatggg

SEQ ID NO: 98524 - DNA, 120 bp, Artificial Sequence
  ENSG00000091137_39 (sequence is synthesized)
ctggctgtcccaagcttctaatcttcatcttggctctgccccagctgtctcaacagagaattcattggtcatctaatcaaacgagagagtagtccccaccccctcagcctctctcctaac

SEQ ID NO: 98525 - DNA, 120 bp, Artificial Sequence
  ENSG00000091137_40 (sequence is synthesized)
ggccactctcctggcatgagtttggcagctgactgtggtccttgtccccaaatctccatatctttctccagttcacagagctccccatccacagtgagatgcaagtggctcggttgctgg

SEQ ID NO: 98526 - DNA, 120 bp, Artificial Sequence
  ENSG00000091137_41 (sequence is synthesized)
tattgcctcaggctgacccaactataatctaaatataaatgatcaatttgccaggtagagcaagtgctttctaattttctgtttatatttgctgtgtctgtctcccgtaactcagacctt

SEQ ID NO: 98527 - DNA, 120 bp, Artificial Sequence
  ENSG00000091137_42 (sequence is synthesized)
gaagaacctcaaggagtgaagattcttagattttccagtcctattttctatggcaatgtcgatggttttaaaaaatgtatcaagtccacaaatggcatcataagtgatgctgtttcaaca

SEQ ID NO: 98528 - DNA, 120 bp, Artificial Sequence
  ENSG00000091138_0 (sequence is synthesized)
cctgagtggatggacactgcctcttagaactagaacttagaactttatcttgaaaatgtaccactgttgcagaagctcctcacagagtatgtgtcaggcatttttaacctgctaaaggca

SEQ ID NO: 98529 - DNA, 120 bp, Artificial Sequence
  ENSG00000091138_1 (sequence is synthesized)
agaagaagtgttcaccacatagttgcaaaggtcttcaacttgccacagccaacagaaaaatcaaaatgattgaaccctttgggaatcagtatattgtggccaggccagtgtattctacaa

SEQ ID NO: 98530 - DNA, 120 bp, Artificial Sequence
  ENSG00000091138_2 (sequence is synthesized)
atgcttttgaggaaaatcataaaaagacaggaagacatcataagacatttctggatcatctcaaagtgtgttgtagctgttccccacaaaaggccaagagaattgtcctctctttgttcc

SEQ ID NO: 98531 - DNA, 120 bp, Artificial Sequence
  ENSG00000091138_3 (sequence is synthesized)
ccatagcatcttggttgccagcataccggcttaaagaatggttgctcagtgatattgtttctggtatcagcacagggattgtggccgtactacaaggtttagcatttgctctgctggtcg

SEQ ID NO: 98532 - DNA, 120 bp, Artificial Sequence
  ENSG00000091138_4 (sequence is synthesized)
acattcccccagtctatgggttgtatgcatcctttttcccagccataatctaccttttcttcggcacttccagacacatatccgtgggtccgtttccgattctgagtatgatggtgggac

SEQ ID NO: 98533 - DNA, 120 bp, Artificial Sequence
  ENSG00000091138_5 (sequence is synthesized)
tagcagtttcaggagcagtttcaaaagcagtcccagatcgcaatgcaactactttgggattgcctaacaactcgaataattcttcactactggatgacgagagggtgagggtggcggcgg

SEQ ID NO: 98534 - DNA, 120 bp, Artificial Sequence
  ENSG00000091138_6 (sequence is synthesized)
cggcatcagtcacagtgctttctggaatcatccagttggcttttgggattctgcggattggatttgtagtgatatacctgtctgagtccctcatcagtggcttcactactgctgctgctg

SEQ ID NO: 98535 - DNA, 120 bp, Artificial Sequence
  ENSG00000091138_7 (sequence is synthesized)
ttcatgttttggtttcccaactcaaattcatttttcagttgacagtcccgtcacacactgatccagtttcaattttcaaagtactatactctgtattctcacaaatagagaagactaata

SEQ ID NO: 98536 - DNA, 120 bp, Artificial Sequence
  ENSG00000091138_8 (sequence is synthesized)
ttgcagacctggtgacagctctgattgtccttttggttgtatccattgttaaagaaataaatcagcgcttcaaagacaaacttccagtgcccattccaatcgaattcattatgaccgtga

SEQ ID NO: 98537 - DNA, 120 bp, Artificial Sequence
  ENSG00000091138_9 (sequence is synthesized)
ttgcagcaggtgtatcctacggctgtgactttaaaaacaggtttaaagtggctgtggttggggacatgaatcctggatttcagccccctattacacctgacgtggagactttccaaaaca

SEQ ID NO: 98538 - DNA, 120 bp, Artificial Sequence
  ENSG00000091138_10 (sequence is synthesized)
ccgtaggagattgcttcggcatcgcaatggttgcatttgcagtggccttttcagttgccagcgtctattccctcaaatacgattatccacttgatggcaatcaggagttaatagccttgg

SEQ ID NO: 98539 - DNA, 120 bp, Artificial Sequence
  ENSG00000091138_11 (sequence is synthesized)
tgggcttattggtgccatcatcgtgctgattgtcgttctagccattggatttctcctggcgcctctacaaaagtccgtcctggcagctttagcattgggaaacttaaagggaatgctgat

SEQ ID NO: 98540 - DNA, 120 bp, Artificial Sequence
  ENSG00000091138_12 (sequence is synthesized)
gcagtttgctgaaataggcagattgtggcgaaaggacaaatatgattgtttaatttggatcatgaccttcatcttcaccattgtcctgggactcgggttaggcctggcagctagtgtggc

SEQ ID NO: 98541 - DNA, 120 bp, Artificial Sequence
  ENSG00000091138_13 (sequence is synthesized)
atttcaactgctaaccatcgtgttcaggacccaatttccaaaatgcagcacgctggctaatattggaagaaccaacatctataagaataaaaaagattattatgatatgtatgagccaga

SEQ ID NO: 98542 - DNA, 120 bp, Artificial Sequence
  ENSG00000091138_14 (sequence is synthesized)
aggagtgaaaattttcagatgtccatctcctatctactttgcaaacattggtttctttaggcggaaacttatcgatgctgttggctttagtccacttcgaattctacgcaagcgcaacaa

SEQ ID NO: 98543 - DNA, 120 bp, Artificial Sequence
  ENSG00000091138_15 (sequence is synthesized)
agctttgaggaaaatccgaaaactgcagaagcaaggcttgctacaagtgacaccaaaaggatttatatgtactgttgacaccataaaagattctgacgaagagctggacaacaatcagat

SEQ ID NO: 98544 - DNA, 120 bp, Artificial Sequence
  ENSG00000091138_16 (sequence is synthesized)
agaagtactggaccagccaatcaataccacagacctgcctttccacattgactggaatgatgatcttcctctcaacattgaggtccccaaaatcagcctccacagcctcattcttgactt

SEQ ID NO: 98545 - DNA, 120 bp, Artificial Sequence
  ENSG00000091138_17 (sequence is synthesized)
ttcagcagtgtcctttcttgatgtttcttcagtgaggggccttaaatcgattttgcaagaatttatcaggatcaaggtagatgtgtatatcgttggaactgatgatgacttcattgagaa

SEQ ID NO: 98546 - DNA, 120 bp, Artificial Sequence
  ENSG00000091138_18 (sequence is synthesized)
gcttaaccggtatgaattttttgatggtgaagtgaaaagctcaatatttttcttaacaatccatgatgctgttttgcatattttgatgaagaaagattacagtacttcaaagtttaatcc

SEQ ID NO: 98547 - DNA, 120 bp, Artificial Sequence
  ENSG00000091138_19 (sequence is synthesized)
cagtcaggaaaaagatggaaaaattgattttaccataaatacaaatggaggattacgtaatcgggtatatgaggtgccagttgaaacaaaattctaatcaacatataattcagaaggatc

SEQ ID NO: 98548 - DNA, 120 bp, Artificial Sequence
  ENSG00000091138_20 (sequence is synthesized)
ttcatctgactatgacataaaaacaactttatacccagaaagttattgataagttcatacattgtacgaagagtatttttgacagaatatgtttcaaactttggaacaagatggttctag

SEQ ID NO: 98549 - DNA, 120 bp, Artificial Sequence
  ENSG00000091138_21 (sequence is synthesized)
catggcatatttttcacatatctagtatgaaattatataagtattctaaattttatatcttgtagctttatcaaagggtgaaaattattttgttcatacatatttttgtagcactgacag

SEQ ID NO: 98550 - DNA, 120 bp, Artificial Sequence
  ENSG00000091138_22 (sequence is synthesized)
atttccatcctagtcactaccttcatgcataggtttagcagtatagtggcgccactgttttgaatctcataatttatacaggtcatattaatatatttccattaaaaaatcagttgtaca

SEQ ID NO: 98551 - DNA, 120 bp, Artificial Sequence
  ENSG00000091138_23 (sequence is synthesized)
tgttgagactgggttgtgtcacatatgttgaggtggggttgtgtcagtattttttgtcccacgtcccagaacagatgaaactaccttatggggagtttgttaataggttgggaaataagc

SEQ ID NO: 98552 - DNA, 120 bp, Artificial Sequence
  ENSG00000091138_24 (sequence is synthesized)
ctcttcagatgacatctaatatagaagaatccttttctcaaattctgatgtagagtaaaagaaatttaccaagttttgggctgctagcttttagtagatgtcatcctacagattttcttt

SEQ ID NO: 98553 - DNA, 120 bp, Artificial Sequence
  ENSG00000091138_25 (sequence is synthesized)
gggcatcaacttcagaaacaatgaaggagcatttaatatttgaccacatcctcaaagagattcagtataacagttgtaaatgaatagttaatactgaataacaatacatactgagtgtcc

SEQ ID NO: 98554 - DNA, 120 bp, Artificial Sequence
  ENSG00000091138_26 (sequence is synthesized)
gcacacagagcctgtagacctgagtggatggacactgcctcttagaactagaacttagaactttatcttgaaaatgtaccactgttgcagaagctcctcacagagcatttttaacctgct

SEQ ID NO: 98555 - DNA, 120 bp, Artificial Sequence
  ENSG00000091140_0 (sequence is synthesized)
cttggcggagcggcggaggcgcccagcggaggtgaaagtattggcggaaaggaaaatacagcggaaaaatgcagagctggagtcgtgtgtactgctccttggccaagagaggccatttca

SEQ ID NO: 98556 - DNA, 120 bp, Artificial Sequence
  ENSG00000091140_1 (sequence is synthesized)
atcgaatatctcatggcctacagggactttctgcagtgcctctgagaacttacgcagatcagccgattgatgctgatgtaacagttataggttctggtcctggaggatatgttgctgcta

SEQ ID NO: 98557 - DNA, 120 bp, Artificial Sequence
  ENSG00000091140_2 (sequence is synthesized)
ttaaagctgcccagttaggcttcaagacagtctgcattgagaaaaatgaaacacttggtggaacatgcttgaatgttggttgtattccttctaaggctttattgaacaactctcattatt

SEQ ID NO: 98558 - DNA, 120 bp, Artificial Sequence
  ENSG00000091140_3 (sequence is synthesized)
accatatggcccatggaaaagattttgcatctagaggaattgaaatgtccgaagttcgcttgaatttagacaagatgatggagcagaagagtactgcagtaaaagctttaacaggtggaa

SEQ ID NO: 98559 - DNA, 120 bp, Artificial Sequence
  ENSG00000091140_4 (sequence is synthesized)
ttgcccacttattcaaacagaataaggttgttcatgtcaatggatatggaaagataactggcaaaaatcaagtcactgctacgaaagctgatggcggcactcaggttattgatacaaaga

SEQ ID NO: 98560 - DNA, 120 bp, Artificial Sequence
  ENSG00000091140_5 (sequence is synthesized)
acattcttatagccacgggttcagaagttactccttttcctggaatcacgatagatgaagatacaatagtgtcatctacaggtgctttatctttaaaaaaagttccagaaaagatggttg

SEQ ID NO: 98561 - DNA, 120 bp, Artificial Sequence
  ENSG00000091140_6 (sequence is synthesized)
ttattggtgcaggagtaataggtgtagaattgggttcagtttggcaaagacttggtgcagatgtgacagcagttgaatttttaggtcatgtaggtggagttggaattgatatggagatat

SEQ ID NO: 98562 - DNA, 120 bp, Artificial Sequence
  ENSG00000091140_7 (sequence is synthesized)
ctaaaaactttcaacgcatccttcaaaaacaggggtttaaatttaaattgaatacaaaggttactggtgctaccaagaagtcagatggaaaaattgatgtttctattgaagctgcttctg

SEQ ID NO: 98563 - DNA, 120 bp, Artificial Sequence
  ENSG00000091140_8 (sequence is synthesized)
gtggtaaagctgaagttatcacttgtgatgtactcttggtttgcattggccgacgaccctttactaagaatttgggactagaagagctgggaattgaactagatcccagaggtagaattc

SEQ ID NO: 98564 - DNA, 120 bp, Artificial Sequence
  ENSG00000091140_9 (sequence is synthesized)
cagtcaataccagatttcaaactaaaattccaaatatctatgccattggtgatgtagttgctggtccaatgctggctcacaaagcagaggatgaaggcattatctgtgttgaaggaatgg

SEQ ID NO: 98565 - DNA, 120 bp, Artificial Sequence
  ENSG00000091140_10 (sequence is synthesized)
ctggtggtgctgtgcacattgactacaattgtgtgccatcagtgatttacacacaccctgaagttgcttgggttggcaaatcagaagagcagttgaaagaagagggtattgagtacaaag

SEQ ID NO: 98566 - DNA, 120 bp, Artificial Sequence
  ENSG00000091140_11 (sequence is synthesized)
ttgggaaattcccatttgctgctaacagcagagctaagacaaatgctgacacagatggcatggtgaagatccttgggcagaaatcgacagacagagtactgggagcacatattcttggac

SEQ ID NO: 98567 - DNA, 120 bp, Artificial Sequence
  ENSG00000091140_12 (sequence is synthesized)
caggtgctggagaaatggtaaatgaagctgctcttgctttggaatatggagcatcctgtgaagatatagctagagtctgtcatgcacatccgaccttatcagaagcttttagagaagcaa

SEQ ID NO: 98568 - DNA, 120 bp, Artificial Sequence
  ENSG00000091140_13 (sequence is synthesized)
atcttgctgcgtcatttggcaaatcaatcaacttttgaattagaagattatatatatttttttctgaaatttcctgggagcttttgtagaagtcacattcctgaacaggatattctcaca

SEQ ID NO: 98569 - DNA, 120 bp, Artificial Sequence
  ENSG00000091140_14 (sequence is synthesized)
ggacaaaatggaatactcttatatctatattttacataaatttagtattttgtttcagtgcactaatgtgtaagacaaaaagctacttattgtagcatcctggaatatctccgtcaactc

SEQ ID NO: 98570 - DNA, 120 bp, Artificial Sequence
  ENSG00000091140_15 (sequence is synthesized)
atattttcatgctgttcatgaaagattcaatgcccctgaatttaaatagcttttttctctgatacagaaaagttgaattttacatggctggagctagaatttgatatgtgaacagttgtg

SEQ ID NO: 98571 - DNA, 120 bp, Artificial Sequence
  ENSG00000091140_16 (sequence is synthesized)
tttgaagcacagtgatcaagttatttttaatttggttttcacattggaaacaagtcagtcattcagatatgattcaaatgtctataaaccgaactgatgtaagtaaacggtctctcactt

SEQ ID NO: 98572 - DNA, 120 bp, Artificial Sequence
  ENSG00000091140_17 (sequence is synthesized)
gttttatttaacctctaaattctttcattttaggggtagcatttgtgttgaagaggttttaaagcttccattgttgtctgcaactctgaagggtaattatatagttacccaaattaagag

SEQ ID NO: 98573 - DNA, 120 bp, Artificial Sequence
  ENSG00000091140_18 (sequence is synthesized)
agtctatttacggaactcaaatacgtgggcattcaaatgtattacagtggggaatgaagatactgaaataaacgtcttaaatattcatttactggttatcatgagtacgtgttgagatgg

SEQ ID NO: 98574 - DNA, 120 bp, Artificial Sequence
  ENSG00000091140_19 (sequence is synthesized)
tcatagttttttttatgactacttctagtgtatattctaatttcttttctaggcctgaatgtatctttattttcatgttataggacaatattaaggcattttaaaggtcatcatcctttc

SEQ ID NO: 98575 - DNA, 120 bp, Artificial Sequence
  ENSG00000091140_20 (sequence is synthesized)
atctattttagatacacctactaaatgtttaatatatacttttggagaagtacaacataagggagtctttaatctgtgttttccttggctgggttaatgactgtttatttaaagagtgtt

SEQ ID NO: 98576 - DNA, 120 bp, Artificial Sequence
  ENSG00000091140_21 (sequence is synthesized)
gtaaaattggatgtgtggtgtttaaaatggccatgtcctgaggaaacttaagtaacaaagtactaaatgctaagtaggcttttgcatattgtaactaaatttaagaataattcagattaa

SEQ ID NO: 98577 - DNA, 120 bp, Artificial Sequence
  ENSG00000091140_22 (sequence is synthesized)
gtagttctgaaatttggtatagatagcatagattgtctcatgctcatgagtgacataatgaccctggattctgttacatacttctaaagaaaattgattgttgtcttaggaggcagttaa

SEQ ID NO: 98578 - DNA, 120 bp, Artificial Sequence
  ENSG00000091140_23 (sequence is synthesized)
cttggctgaacaccaactccacactctgtcttgtttgtaggtggcagcagctgaaatctcttctcagttgttttagctttagctatgctgctggaagtctttcccatgcaagtgtgtagt

SEQ ID NO: 98579 - DNA, 120 bp, Artificial Sequence
  ENSG00000091140_24 (sequence is synthesized)
tcaggggtcaaccagagtttgggcagaaggaagtctgccccttctgtgcctcctgttttttgggggtttcccctttatgttccagctgttgtggttgccccatattctgccttctgatcc

SEQ ID NO: 98580 - DNA, 120 bp, Artificial Sequence
  ENSG00000091140_25 (sequence is synthesized)
ttaaccaataaaacttggcttttgtttccccctcaagtgagaacccgttaaaaatgagacattgagccagtgctgttcactttttaagtgccaacttccctctactttccacttgtttat

SEQ ID NO: 98581 - DNA, 120 bp, Artificial Sequence
  ENSG00000091140_26 (sequence is synthesized)
agttgtttccagtgcctttagttttttctaaaatatatttgttcagagtttgcagttgctatcagcaggagggttggtctgatatctgtgtgctactttgccattattggaagtgaactc

SEQ ID NO: 98582 - DNA, 120 bp, Artificial Sequence
  ENSG00000091140_27 (sequence is synthesized)
tgcatctttttaaaaatttgaaatcccggtatcatgtgaagtgctgtttatgtaaatctcaacatatcccttactcagggaaaaaaaagtttttagttagggaatagtgaaatataattt

SEQ ID NO: 98583 - DNA, 120 bp, Artificial Sequence
  ENSG00000091140_28 (sequence is synthesized)
aatatggaattctagctgtagagttaaatccatctttaagtgtttacattcagtatgagaatgcaaatttatctgtatggggaataaagtcctaggaataaaacaagttttaagtgttca

SEQ ID NO: 98584 - DNA, 120 bp, Artificial Sequence
  ENSG00000091140_29 (sequence is synthesized)
taaccatcgtaaagtgttcagaggatatgttatcacagtgggatataatgttttattttggactgcctttttacccaaggtagacattttatagtgtttgataggttctgtttctgtgat

SEQ ID NO: 98585 - DNA, 120 bp, Artificial Sequence
  ENSG00000091140_30 (sequence is synthesized)
acaatgatgttggccttttgtcaactataattataagttattacattttgaaactttaatactgccttttataagcattaggttgaaattttccagttggtgagtgaaaaacactgcata

SEQ ID NO: 98586 - DNA, 120 bp, Artificial Sequence
  ENSG00000091140_31 (sequence is synthesized)
aggaattgaaagtaagtatacttttcatgcttaatgatattaccagactgcttgacttggctcttctgtctaaagacttaaatgtgtctaacgtacgcataatagatgtttagtgaagga

SEQ ID NO: 98587 - DNA, 120 bp, Artificial Sequence
  ENSG00000091140_32 (sequence is synthesized)
agagtaaaataaataatctaaaaaatgtggagagatttacttaaaaaagaaggcctaaatccagatttctcccagccaagtataaccaagcctaaccctgcaaatccagatttctaccat

SEQ ID NO: 98588 - DNA, 120 bp, Artificial Sequence
  ENSG00000091140_33 (sequence is synthesized)
cttcagagacctaaatatgaagaataaattacccagggaagactttcattctttctaaaggagaccagaatattggaaatggctcaaaaatgatgttgaaaaactatgtacttggaatca

SEQ ID NO: 98589 - DNA, 120 bp, Artificial Sequence
  ENSG00000091140_34 (sequence is synthesized)
tatgtctgggaaacaactttctcccattcaacaaagtattgtatcttacagactgcaagtattcagtatagagattcctaaacagtattctgatataaatagaactagcatttaaaattt

SEQ ID NO: 98590 - DNA, 120 bp, Artificial Sequence
  ENSG00000091140_35 (sequence is synthesized)
tacaaccattacaacttttctttagaaatacgttttataagttatttatgctatttgtgaactttgagagatttctgactgaaatactatattttgatggtcattcagctttgggaagtt

SEQ ID NO: 98591 - DNA, 120 bp, Artificial Sequence
  ENSG00000091140_36 (sequence is synthesized)
acctgtctttattctgcagtgattctgaccagctatagaacactttatattaagatatgtttgaatacagtatgaagttaaaattgaccattgcgtttggaatattggtggataaaattt

SEQ ID NO: 98592 - DNA, 120 bp, Artificial Sequence
  ENSG00000091140_37 (sequence is synthesized)
agctgacagttcctttctatttcaatgtaaaagcaagtgaatattggaataacttatgttaagtgtcttatagttcatttgttcatgtatttattcgtttgaatgtatattgagctagtg

SEQ ID NO: 98593 - DNA, 120 bp, Artificial Sequence
  ENSG00000091140_38 (sequence is synthesized)
tgttccaggcggtgaacaaggtaaaaaaaccctgctcttatgaaacttgtaatttggtgataaaagacaaacaatatataagtaatggataaatattttgggaagtaactgaaaattaaa

SEQ ID NO: 98594 - DNA, 120 bp, Artificial Sequence
  ENSG00000091140_39 (sequence is synthesized)
ggctcagcccggccctgggctccgaggtggccgctcatcctgcagcaggcgagggacggggctgggcccaggctgtggcgagtcctttcgggttgtgtgacggccggcggtcacacatgc

SEQ ID NO: 98595 - DNA, 120 bp, Artificial Sequence
  ENSG00000091157_0 (sequence is synthesized)
ggcggcaccggcaccttgcagtatcactggggagacggcggctgtatagcgcttgccgccccacggattatcccagcaggatctacgcaccccgcatcctccgtagttccgccctatcct

SEQ ID NO: 98596 - DNA, 120 bp, Artificial Sequence
  ENSG00000091157_1 (sequence is synthesized)
tgtcctccttggctggggcgcccaccggcggtctgataggctacatcgcggcatgagatgaagctgtgacaggtttgaaaacacaaacacaatggcaggaaacagccttgttctacccat

SEQ ID NO: 98597 - DNA, 120 bp, Artificial Sequence
  ENSG00000091157_2 (sequence is synthesized)
tgttctttggggtcgaaaagcgcccacacattgcatctcagccgtacttttaacagatgatggggccacgatcgtaacaggatgtcacgacggacaaatatgtctctgggatctttcagt

SEQ ID NO: 98598 - DNA, 120 bp, Artificial Sequence
  ENSG00000091157_3 (sequence is synthesized)
agaactgcaaattaatcctcgagcactgttgtttggtcatacagcatcaatcacttgtttgtctaaagcttgtgcttccagtgacaaacagtatattgtgagtgcatctgaaagtggaga

SEQ ID NO: 98599 - DNA, 120 bp, Artificial Sequence
  ENSG00000091157_4 (sequence is synthesized)
gatgtgcctctgggatgtgagtgatggcagatgtattgaatttacaaaattagcttgcacacatactggcatacagttctaccagttctctgttgggaatcagcgagaaggaaggctttt

SEQ ID NO: 98600 - DNA, 120 bp, Artificial Sequence
  ENSG00000091157_5 (sequence is synthesized)
atgccacggacattaccctgaaatccttgttgtggatgctaccagccttgaagtattatactccttagtatcaaagatatcaccagactggattagctccatgagtattattcgatccca

SEQ ID NO: 98601 - DNA, 120 bp, Artificial Sequence
  ENSG00000091157_6 (sequence is synthesized)
ccgaacacaagaggacacagtggtagcactctcggtgactggcatcctgaaggtctggattgttacctcggaaataagtgacatgcaggatactgagccaatatttgaggaggaatccaa

SEQ ID NO: 98602 - DNA, 120 bp, Artificial Sequence
  ENSG00000091157_7 (sequence is synthesized)
accaatttattgtcagaattgccaaagcatctctttttgtgcatttacacaaaggtcacttttggttgtgtgttccaaatattggagggtgttcgatgccggagactattccttgttgtg

SEQ ID NO: 98603 - DNA, 120 bp, Artificial Sequence
  ENSG00000091157_8 (sequence is synthesized)
ttcaggtcctagtgaaaatggacagacatggaccgggggggactttgtctcatcagataaagtcatcatttggacagaaaatgggcaaagttatatttacaaactacctgccagttgcct

SEQ ID NO: 98604 - DNA, 120 bp, Artificial Sequence
  ENSG00000091157_9 (sequence is synthesized)
tccagctagtgattcattccgcagtgatgtggggaaggcagttgaaaatttaattcctcctgtacaacatatcctcttggatcgaaaagataaagagttgctaatttgtcctcctgttac

SEQ ID NO: 98605 - DNA, 120 bp, Artificial Sequence
  ENSG00000091157_10 (sequence is synthesized)
tcggttcttctatggatgcagagaatatttccataaactgttaattcagggtgattcttctggaaggttgaatatttggaacatatcagacacagctgataaacagggaagtgaagaagg

SEQ ID NO: 98606 - DNA, 120 bp, Artificial Sequence
  ENSG00000091157_11 (sequence is synthesized)
gctggcaatgacaacttctattagtttgcaagaggcatttgataaactgaatccttgtcctgctggaattatagatcagctgagtgtgattcccaatagtaatgaacctcttaaagtaac

SEQ ID NO: 98607 - DNA, 120 bp, Artificial Sequence
  ENSG00000091157_12 (sequence is synthesized)
tgcaagtgtgtacataccagcacatggacgacttgtttgtggtcgtgaagatggaagcatagttattgtacctgccacacagacggccatagtacagctgttgcaaggggaacacatgct

SEQ ID NO: 98608 - DNA, 120 bp, Artificial Sequence
  ENSG00000091157_13 (sequence is synthesized)
cagaagaggttggccacctcacagaacactccgtggtcatcggaacaaagtcacatgtttgctatatcctcatcaggtctcagctcggtatgatcaaagatacctgatatctggaggtgt

SEQ ID NO: 98609 - DNA, 120 bp, Artificial Sequence
  ENSG00000091157_14 (sequence is synthesized)
ggatttttcagtcataatttgggacatattttctggagaaatgaaacatatcttctgtgttcatggtggtgagattactcaacttctagttccacctgaaaactgtagtgcaagagtaca

SEQ ID NO: 98610 - DNA, 120 bp, Artificial Sequence
  ENSG00000091157_15 (sequence is synthesized)
gcactgcatctgctctgtagccagtgaccactcagtaggacttctaagtttgcgagagaaaaaatgcataatgttggcatctcgtcacctttttcctattcaagtaatcaaatggaggcc

SEQ ID NO: 98611 - DNA, 120 bp, Artificial Sequence
  ENSG00000091157_16 (sequence is synthesized)
ttctgatgattacctggtggtggggtgttcagatggttctgtgtacgtctggcaaatggatactggtgcattggatcgttgtgtgatggggataacagcagttgagattctaaacgcttg

SEQ ID NO: 98612 - DNA, 120 bp, Artificial Sequence
  ENSG00000091157_17 (sequence is synthesized)
tgatgaagctgttcctgctgctgttgattcacttagtcatccagcagtcaacctaaaacaagctatgacgagacgtagtcttgctgctcttaaaaatatggcccatcataagctacaaac

SEQ ID NO: 98613 - DNA, 120 bp, Artificial Sequence
  ENSG00000091157_18 (sequence is synthesized)
ccttgcaactaacctcttggcttctgaggcatctgacaagggaaatttacctaaatattctcataactccctgatggttcaagcaataaagacaaacctaacagacccggacatacatgt

SEQ ID NO: 98614 - DNA, 120 bp, Artificial Sequence
  ENSG00000091157_19 (sequence is synthesized)
gctattctttgatgtggaagcgttgattattcaactcctgactgaagaagcctctaggccgaatactgctcttatttccccagagaatttgcaaaaagcatctggcagttcagacaaagg

SEQ ID NO: 98615 - DNA, 120 bp, Artificial Sequence
  ENSG00000091157_20 (sequence is synthesized)
gggctcttttttaactggaaaacgagcagcagttctcttccaacaagtgaaagaaacgatcaaagagaacatcaaggaacacctccttgatgatgaagaggaggatgaggagataatgag

SEQ ID NO: 98616 - DNA, 120 bp, Artificial Sequence
  ENSG00000091157_21 (sequence is synthesized)
gcagagaagggaagaaagtgatcctgaatatcggtccagcaaatcaaagccattgaccctattagaatataatttaactatggacactgcaaagctgtttatgtcctgccttcacgcctg

SEQ ID NO: 98617 - DNA, 120 bp, Artificial Sequence
  ENSG00000091157_22 (sequence is synthesized)
gggtttgaatgaagtactggatgaagtttgcctggatcgccttggaatgctgaaaccccactgcaccgtatcgtttggcctcttgtcaagaggaggccatatgtcactgatgctgccggg

SEQ ID NO: 98618 - DNA, 120 bp, Artificial Sequence
  ENSG00000091157_23 (sequence is synthesized)
ttataatcagcctgcttgtaaactgtcacatgggaaaacagaagtaggaaggaagctgccagcgtctgagggagtaggaaagggaacttacggagtgtcccgtgccgtcaccacacagca

SEQ ID NO: 98619 - DNA, 120 bp, Artificial Sequence
  ENSG00000091157_24 (sequence is synthesized)
tctcctgtctatcatttctttggcaaatactttaatgagtatgaccaatgcaacttttattggtgatcatatgaagaagggtcctaccaggccacctagaccaagcaccccagacctttc

SEQ ID NO: 98620 - DNA, 120 bp, Artificial Sequence
  ENSG00000091157_25 (sequence is synthesized)
taaggcaaggggttcccctccaacttccagtaatattgtgcaaggacagattaaacaagttgctgcacctgtcgtttccgctcggtctgatgctgatcactctggctctgaccctccttc

SEQ ID NO: 98621 - DNA, 120 bp, Artificial Sequence
  ENSG00000091157_26 (sequence is synthesized)
tgctcctgctttacatacctgtttcttagtaaatgaaggttggagtcagttagctgctatgcactgtgttatgctgccagacctactgggattggataaatttaggcctccccttctgga

SEQ ID NO: 98622 - DNA, 120 bp, Artificial Sequence
  ENSG00000091157_27 (sequence is synthesized)
gatgctggcccgaagatggcaagatcgatgcttggaggtgagagaagccgcgcaggccctgcttctggcggaactgagaagaattgagcaggcaggcaggaaggaagccattgatgcctg

SEQ ID NO: 98623 - DNA, 120 bp, Artificial Sequence
  ENSG00000091157_28 (sequence is synthesized)
ggctccttacttacctcagtacatagaccacgtcatatcacctggagtcacatcagaagccgcgcagactatcaccacggctcctgatgcctcagggcctgaagcaaaagtccaggagga

SEQ ID NO: 98624 - DNA, 120 bp, Artificial Sequence
  ENSG00000091157_29 (sequence is synthesized)
agagcatgaccttgttgacgatgacatcaccactggttgcttatcaagtgtcccacaaatgaaaaaaatttctacatcttacgaggaaagacggaagcaagctaccgctattgttttact

SEQ ID NO: 98625 - DNA, 120 bp, Artificial Sequence
  ENSG00000091157_30 (sequence is synthesized)
tggagtaataggagctgaatttggtgctgaaattgaacctcctaaactattgaccagacctcgaagctctagccaaattcctgagggattcgggttgactagtggtggatccaactactc

SEQ ID NO: 98626 - DNA, 120 bp, Artificial Sequence
  ENSG00000091157_31 (sequence is synthesized)
gctggccagacatacttgcaaggcactgacgtttcttctgctacagcctccaagccccaaacttcctccacacagcactatccgaagaacagccattgatctgattggacgtgggttcac

SEQ ID NO: 98627 - DNA, 120 bp, Artificial Sequence
  ENSG00000091157_32 (sequence is synthesized)
tgtttgggagccttacatggatgtgtccgctgttctgatggggcttctcgaactttgtgccgatgccgagaaacaacttgccaacatcacaatggggttgcctctgagcccagcagctga

SEQ ID NO: 98628 - DNA, 120 bp, Artificial Sequence
  ENSG00000091157_33 (sequence is synthesized)
ctcggcccgctctgcgaggcatgccctctcgctcattgccaccgccagaccacccgccttcatcaccaccatagccaaagaggtacacagacatacggctcttgcagcaaatacccaatc

SEQ ID NO: 98629 - DNA, 120 bp, Artificial Sequence
  ENSG00000091157_34 (sequence is synthesized)
acagcagaatatgcacacaacaactcttgcacgagctaaaggggaaattttgagagtcattgaaattcttattgaaaagatgcccacagatgttgtggatcttctcgtggaggttatgga

SEQ ID NO: 98630 - DNA, 120 bp, Artificial Sequence
  ENSG00000091157_35 (sequence is synthesized)
catcattatgtactgccttgaaggatctttagttaaaaagaaaggtcttcaagaatgtttcccagccatctgcaggttctacatggtcagctattatgagcggaatcacagaatagcagt

SEQ ID NO: 98631 - DNA, 120 bp, Artificial Sequence
  ENSG00000091157_36 (sequence is synthesized)
tggagctcgccatggttcagtggccctgtacgacatccggactggaaaatgtcagacaatccatggacacaagggaccaatcactgcagtggcttttgctcctgatggaagatatcttgc

SEQ ID NO: 98632 - DNA, 120 bp, Artificial Sequence
  ENSG00000091157_37 (sequence is synthesized)
cacctactcaaacactgacagccacatttctttttggcagatgaacacgtcactgctgggaagcatcggcatgctgaactcggcacctcagctgcgctgcattaaaacctaccaggtgcc

SEQ ID NO: 98633 - DNA, 120 bp, Artificial Sequence
  ENSG00000091157_38 (sequence is synthesized)
ccctgtgcagcccgcgtcccccggctcccacaatgccctcaagctggcccggctcatctggacttccaaccgcaacgtcatcctcatggcccatgacgggaaggagcaccgcttcatggt

SEQ ID NO: 98634 - DNA, 120 bp, Artificial Sequence
  ENSG00000091157_39 (sequence is synthesized)
ctaatgctgctgcctgccgccgtgactgcgttttagttctctaaattatccaagccgatgttgctctgtccttcctcacaccagattgttcccaggggcctgcccaccccagtgccatcc

SEQ ID NO: 98635 - DNA, 120 bp, Artificial Sequence
  ENSG00000091157_40 (sequence is synthesized)
agtggcacggccgggtcttgtcacttgtgcatgcttctcaggggcagaacccgctcgtgccatctgtcgattcagaggcacgcacacatgctctgcaggatgtggccatcctgtcaccag

SEQ ID NO: 98636 - DNA, 120 bp, Artificial Sequence
  ENSG00000091157_41 (sequence is synthesized)
gtagtttttccctgccagagatggcaggggaaagccagtggttcctgggaacgctcttgttgcttggtgcaacagaagcacaaaaatcaataaacactgtgattgcactcccagcccaga

SEQ ID NO: 98637 - DNA, 120 bp, Artificial Sequence
  ENSG00000091157_42 (sequence is synthesized)
tcagcatttttagccatctcaaccgcacctctgaagtgctgcttgaatctggccgttctgacactgggtgttgaggtcatgtggcagtcctcacgattgaaattattgccctttgaatta

SEQ ID NO: 98638 - DNA, 120 bp, Artificial Sequence
  ENSG00000091157_43 (sequence is synthesized)
cctaaaatattgtttaccaaaaagattctgtgtttacatgttcttttcttctggtgattgctaggaaattactcaatccaatttcctagggtttagctaccaccttctttatcaacagct

SEQ ID NO: 98639 - DNA, 120 bp, Artificial Sequence
  ENSG00000091157_44 (sequence is synthesized)
aaccaatttgagattcatgattaattatgtacacaaaaatattttccttgtagaaaatagttttccagacacttagccttctgaagtgctcatctcttgcttaaatgatagtctatttag

SEQ ID NO: 98640 - DNA, 120 bp, Artificial Sequence
  ENSG00000091157_45 (sequence is synthesized)
tagtttaaaataaaaataatcactccctatgatctagttaatgtaattatccagtcactgtaactaatctcttgaagggacttttgtgataaagagccaagttcagaagcatagcgtgta

SEQ ID NO: 98641 - DNA, 120 bp, Artificial Sequence
  ENSG00000091157_46 (sequence is synthesized)
ccgaaaatgaagactctcctatctactgctacagatcctgttgaagaaagagcttacccctttcccccggaaaacttgcaatcctgtagttcccatatgtgtggcatatgtcagttatga

SEQ ID NO: 98642 - DNA, 120 bp, Artificial Sequence
  ENSG00000091157_47 (sequence is synthesized)
aattattataattcagccttcaaactactactgatcaactaaaggaaagctaataaggtatttcttttaaacaagtattctggaaaagtaataactatggcacaaatgttcaggagtgta

SEQ ID NO: 98643 - DNA, 120 bp, Artificial Sequence
  ENSG00000091157_48 (sequence is synthesized)
tataaaaatatgtgggctctcgatttatttgagcaaacattgcaatgagggtgttcattatgcttctaagtaagctttaactagaccactttcttcttatgtcagattgtgctggttcta

SEQ ID NO: 98644 - DNA, 120 bp, Artificial Sequence
  ENSG00000091157_49 (sequence is synthesized)
gctcataataatgaaaaaaatagaattatattttgtatgaattgtttctaacaaaccttgatctgtatatacttgtgaggggttgtttggttgcctaattgttgattggttggttagttg

SEQ ID NO: 98645 - DNA, 120 bp, Artificial Sequence
  ENSG00000091157_50 (sequence is synthesized)
ggcaaaatcatttattacatgcaaaaatagaaaattatttgttaaattcagagaaaatatgtgaagtttacaaaggaaccaaaatgataatgggagaatttagtcttaaaagtttaggtt

SEQ ID NO: 98646 - DNA, 120 bp, Artificial Sequence
  ENSG00000091157_51 (sequence is synthesized)
gtcagagtttatctgatatacaaaaaagtaggatcaaagtctaggaacaaacattggttatttcactgaaacagatttttaaagagcatattaagaaattaagaccattagatcatctct

SEQ ID NO: 98647 - DNA, 120 bp, Artificial Sequence
  ENSG00000091157_52 (sequence is synthesized)
ttcataatgatatgatgttatttccattgacggcaaatctatactgttccttggttttagagttgggtattctttcaaaagtgaatttaggcacatgcatgtacattgtatttataaaga

SEQ ID NO: 98648 - DNA, 120 bp, Artificial Sequence
  ENSG00000091157_53 (sequence is synthesized)
ttatatatgtagtttccaaggaagaaacaaagacctatacagtttagactttatttgtttggtgaacgtgctgttgtgtttggcatagctagagaaatgtaaggtaaaaggctcactttg

SEQ ID NO: 98649 - DNA, 120 bp, Artificial Sequence
  ENSG00000091157_54 (sequence is synthesized)
ttttccagtgggtccagagtcttctctatacccaacatatgtttactttatgaacttaaatggaaattaatttattgtagactacatctctatttggaatgatgaggtaaatgtatacct

SEQ ID NO: 98650 - DNA, 120 bp, Artificial Sequence
  ENSG00000091157_55 (sequence is synthesized)
tagcattttctttaacaaaaatgttctgtgtgtcaggaaagaggtgtgagagtggtaggcagcctgccgcaaacacacggatggctccccccgccacgaaggttgagaacaaagccaggg

SEQ ID NO: 98651 - DNA, 120 bp, Artificial Sequence
  ENSG00000091157_56 (sequence is synthesized)
ggcccagaggagcaatagccctgggccacaagcgtgggtaggcctttcacgtattccgtctgcacaggcaaccaaggccagtagaaagctatggctgcaaaaccctggggtggacgatgt

SEQ ID NO: 98652 - DNA, 120 bp, Artificial Sequence
  ENSG00000091157_57 (sequence is synthesized)
ttgatgattagacggtcatctctaactactaaactaatatctgcattcttgttaacataaatctctccttggctattttaatagccacagtcccaaacttcatcccagcttagatttctc

SEQ ID NO: 98653 - DNA, 120 bp, Artificial Sequence
  ENSG00000091157_58 (sequence is synthesized)
taatgttttattgatttcactggcactgtatttggacctgtccttgtatatgtagagacatatgtggcttcattggtaatttacaagcaaaagatgacatgacgtgacacctgtatgaaa

SEQ ID NO: 98654 - DNA, 120 bp, Artificial Sequence
  ENSG00000091157_59 (sequence is synthesized)
atgtgatgattgaactccctgtgtacagcgagtgaattaaaatgtctgcctctccagacatttcttaatgattccacttaatagactctatgtgtgctgaatgttcctgtgtacatatgt

SEQ ID NO: 98655 - DNA, 120 bp, Artificial Sequence
  ENSG00000091157_60 (sequence is synthesized)
gtgttaaataaaacaattgtattgaagactgtttttctcacaatattaccttttccagtgttcactcatcttaaacatcctcagttgaaatccgtatgctccgctagccctgctgcttct

SEQ ID NO: 98656 - DNA, 120 bp, Artificial Sequence
  ENSG00000091157_61 (sequence is synthesized)
aatcattcatttccctggagagctggcttgggaaaggcaacttattcccagaggacagtagagcagaagtgcagaggtaagctctccctccagaaactcactggcactctctgtggtttg

SEQ ID NO: 98657 - DNA, 120 bp, Artificial Sequence
  ENSG00000091157_62 (sequence is synthesized)
ggaaaggcgttgcatgcctgttgctttatctctactctacatgctcccaaatagactggtaatggcaccaaatcatatcttgtcagattggatggcatgggttggctgcctctcgggagc

SEQ ID NO: 98658 - DNA, 120 bp, Artificial Sequence
  ENSG00000091157_63 (sequence is synthesized)
taggctgagatcatcaagttcattgcatttcacgctcagtttggagtcgaatttgaatccctcaggtaaagggtataattggttttcagaaaaatcaagaataataaaataggtccttac

SEQ ID NO: 98659 - DNA, 120 bp, Artificial Sequence
  ENSG00000091157_64 (sequence is synthesized)
tgctcatagagggttatgtgtaagtagtgaatgtacttcttgtctcttaattatttcagataagaacacaaaagcttgatttgagtcaatcatcgtgtaacagtataattttctgtaaga

SEQ ID NO: 98660 - DNA, 120 bp, Artificial Sequence
  ENSG00000091157_65 (sequence is synthesized)
attcggtgaacattccaggagtggtctgaggcatcttgggccctattaaatgcccactgtgggccccaggaaatgttttaacatctcatgacttaaatgtattcttatagggaaaatagg

SEQ ID NO: 98661 - DNA, 120 bp, Artificial Sequence
  ENSG00000091157_66 (sequence is synthesized)
ggcagtaacagttctatatgatcagcgatcacataaactgatcaaatgtggaaaggcgtgacgttaataggaaggtaaagccaagcagtgctgggtgaactttcacctttcaccccttcg

SEQ ID NO: 98662 - DNA, 120 bp, Artificial Sequence
  ENSG00000091157_67 (sequence is synthesized)
gctgactgacagagcccagtgttgaagaaaatcaatactttggagccaggagggaaatacttccaccctctaactagagaatgtgttttgacaaggccaagataatccaagctgcacagg

SEQ ID NO: 98663 - DNA, 120 bp, Artificial Sequence
  ENSG00000091157_68 (sequence is synthesized)
agaaagagaaaagaagactcatttttaaagcctgacacttcaaggtgtttttgtgcaatggtttagagatcgtcaatacatacaaataccaaaggtcaaaaagaaaagccagaagaattt

SEQ ID NO: 98664 - DNA, 120 bp, Artificial Sequence
  ENSG00000091157_69 (sequence is synthesized)
caaaaattagatgttcagttctttttgctgtttaaaaaaaaaaaaaaaaggactacagagagttttgtgcttgtaattgtccttttaatgaactaagctcacaattgtgtgaccattgag

SEQ ID NO: 98665 - DNA, 120 bp, Artificial Sequence
  ENSG00000091157_70 (sequence is synthesized)
gtgatcatccctctttaatcaaaacttacatttttgtagcagcagaacgatgaatattgaatgctcaaaaagcattcagacttcctgcttctgtacaccttttggctacagattgttttg

SEQ ID NO: 98666 - DNA, 120 bp, Artificial Sequence
  ENSG00000091157_71 (sequence is synthesized)
ttttgttttgttttgtttttttgagtggttacattgttttgtgctaacatctcagaatttggttttgcaattcatgttgattctgccataatggcattgtaaatcctggatcctccttca

SEQ ID NO: 98667 - DNA, 120 bp, Artificial Sequence
  ENSG00000091157_72 (sequence is synthesized)
cattcagttcaatcctttgcatgagaaaagagttcttgtacctagaacttaattttttttctagtttcccaagtccctttaagcaaattacttatgaagatattctaattaatgtctctc

SEQ ID NO: 98668 - DNA, 120 bp, Artificial Sequence
  ENSG00000091157_73 (sequence is synthesized)
tgagtgagaggtttatgcacctctaggaagatggtaaacaattcattcttaccagcaagattagagccattcattctgtagacaaatacctccatcaagtggatatagattctttgcttt

SEQ ID NO: 98669 - DNA, 120 bp, Artificial Sequence
  ENSG00000091157_74 (sequence is synthesized)
cctactgataagaaaactaagaagccagtggtgcccatacctgccagacaagctcagaaggacaaaggagtcttaagtatctaaagtacatcatcaggcctgctgtaaacatgtgctaat

SEQ ID NO: 98670 - DNA, 120 bp, Artificial Sequence
  ENSG00000091157_75 (sequence is synthesized)
taaagagtattaaaaatatagtgaaaatatagcttctatttatatacctgcttactcattaataaatcccgttctattctgaggtgatagatcaggctggaaatttttattttgttttgt

SEQ ID NO: 98671 - DNA, 120 bp, Artificial Sequence
  ENSG00000091157_76 (sequence is synthesized)
ttcaaaaagagaacgcagccagccaaacctcctcaatattctgagatttcccagagaaggccaggagtctagcactgctcgaattgtaggggtatgaagtaaatatgtgctgcatttgtg

SEQ ID NO: 98672 - DNA, 120 bp, Artificial Sequence
  ENSG00000091157_77 (sequence is synthesized)
aaatccattgtattgcacctgtcaaatgctcagaagagtggcacacaggaagcactcaatagatgtaagctaatatttttaggagacaggagtcctaattgagcatggataaacaagatg

SEQ ID NO: 98673 - DNA, 120 bp, Artificial Sequence
  ENSG00000091157_78 (sequence is synthesized)
acctgtgttctttggaaaacttggatttttgttttatgttttcatctctatgtggactccacaagtagatctgaacatcctatccaaaggagggctcctgtggttctgtttgtattcccc

SEQ ID NO: 98674 - DNA, 120 bp, Artificial Sequence
  ENSG00000091157_79 (sequence is synthesized)
agctgctttgccatattgctatgtgttaccaccccgcttctcaccaaaatttgtagacatgaagaaatgcctaaatacatgccaatggaggaaactggttggttgtggctgaagttatca

SEQ ID NO: 98675 - DNA, 120 bp, Artificial Sequence
  ENSG00000091157_80 (sequence is synthesized)
ctgattcctcaaaaagaaagatcaccgcattagatttaggactcacattagcatcaggggtgactttgagtttcttaatgagtttcttccaaatatgcatctatcgagattgaataagac

SEQ ID NO: 98676 - DNA, 120 bp, Artificial Sequence
  ENSG00000091157_81 (sequence is synthesized)
tctggacaaaagtattgtagagtggatttcatggaatcaccaaagcaaaggaaactgaatatgtaggttctgttgccaatatcttcttgttctgacttaacgtcaaaatgacttagtgct

SEQ ID NO: 98677 - DNA, 120 bp, Artificial Sequence
  ENSG00000091157_82 (sequence is synthesized)
ttagtcttcccaaatttgaaatgtattctctaaaacagcggccctcaacccctgatatcagactgtggcctgtgaggaaccaggctgcacagcaggaggtgagtggtggtgagccagcaa

SEQ ID NO: 98678 - DNA, 120 bp, Artificial Sequence
  ENSG00000091157_83 (sequence is synthesized)
agtttcatctgtatttacagaggtccccatcacttgcattactgcctgagctcagcctcctgtcatatcagctgcggcattagattctcataagagcgtgaatcctattgtgaactgagc

SEQ ID NO: 98679 - DNA, 120 bp, Artificial Sequence
  ENSG00000091157_84 (sequence is synthesized)
gagcatgtgagggatctaggttgcactctccttgtgagaatctaatacctgatgatctgtcagtgtatcccatcacccccagagaggaccgtttagttgcaggaaaacaagctcagggct

SEQ ID NO: 98680 - DNA, 80 bp, Artificial Sequence
  ENSG00000091157_85 (sequence is synthesized)
atatatatatacagtgtaataatagaaataatgtgcacaataaatataatgcatttgaatcatcccgaaaacatccccaa

SEQ ID NO: 98681 - DNA, 120 bp, Artificial Sequence
  ENSG00000091157_86 (sequence is synthesized)
atttgaatcatcccgaaaacatccccaaccaccagccttttttgcatgaaactggtccctcgtgcaaaaaaggttgggaaatgatgctctaaaacttgacccacccagcggcacttcaag

SEQ ID NO: 98682 - DNA, 120 bp, Artificial Sequence
  ENSG00000091157_87 (sequence is synthesized)
ttttagtgaaaatgtgtgaataaagatacggcaatgaaacattatttgtattcaaccagcaagcttgtattgaaccttagaatatgccaagcgtatgttctttattttattttcctcttg

SEQ ID NO: 98683 - DNA, 120 bp, Artificial Sequence
  ENSG00000091157_88 (sequence is synthesized)
ctgatgagctcacaatctcaccaagcaccataacactatggaataagtgctgagacccggggcaggtaaagagcaatgagaacacaggaagtgatcgattctgatgaggtggtattgtta

SEQ ID NO: 98684 - DNA, 120 bp, Artificial Sequence
  ENSG00000091157_89 (sequence is synthesized)
ggtttcccagagaggaaacatttgggctaggccttaaaaaataaataggaattaattaggaggatactggggatgttataatgtaggaatttatagaagtcaaagttttgtgtgatcgga

SEQ ID NO: 98685 - DNA, 120 bp, Artificial Sequence
  ENSG00000091157_90 (sequence is synthesized)
atgagtataaactacttcagacctacaacctgaaggacattggtagatgctgccaacaatcaagaaagttcttcactttgcagccattattgcaataacagaaaaccagactcctttgtc

SEQ ID NO: 98686 - DNA, 120 bp, Artificial Sequence
  ENSG00000091157_91 (sequence is synthesized)
aaaggacactcgaaatccataagtcaaaaaccctaataaaagatttttccggctttagtgttttccatgtttcattttctttatttaagaaaagcttttgttgttttaaaaataagttgt

SEQ ID NO: 98687 - DNA, 120 bp, Artificial Sequence
  ENSG00000091157_92 (sequence is synthesized)
gtgttctcctactcctggattctactgtgtgactggcacagtgagttgaatgcctggcacagtgcactgcccaggtcctcccacccccacccaaatcccactgcagaaccgaagcattct

SEQ ID NO: 98688 - DNA, 120 bp, Artificial Sequence
  ENSG00000091157_93 (sequence is synthesized)
aacagctgtgtgctgagtccttccgtaaagattgcttcccagccaaagagaactgtctcacccaaggtcatgcttcctttcctggggagcaaacacatcccatgatgggtcaggaaagag

SEQ ID NO: 98689 - DNA, 82 bp, Artificial Sequence
  ENSG00000091157_94 (sequence is synthesized)
cctggggagcaaacacatcccatgatgggtcaggaaagaggtttaaagacccagccccggctggagggtgaggcggggagga

SEQ ID NO: 98690 - DNA, 78 bp, Artificial Sequence
  ENSG00000091157_95 (sequence is synthesized)
ggtcaggagttcaagaccagcctggacaatgtggtgaaaccccatctgtattagaaatacaaaaattagatgggcgtg

SEQ ID NO: 98691 - DNA, 120 bp, Artificial Sequence
  ENSG00000091157_96 (sequence is synthesized)
agattgtgccactgcactccagcccaggcaagagagtgagactctgggtgacagagactcagcaagtcgtaaggaaggtgctaaggatggtgagtctccgcctcaaaaaaaaaataaata

SEQ ID NO: 98692 - DNA, 120 bp, Artificial Sequence
  ENSG00000091157_97 (sequence is synthesized)
aaaaaataaataaataaaaataaaagacccagccccaagctccatttcaaaaccacttggaaaggccatcccagctccagaactcccttgagcattgactgaaggcttcactgaactgca

SEQ ID NO: 98693 - DNA, 120 bp, Artificial Sequence
  ENSG00000091157_98 (sequence is synthesized)
tcccagctcaacctctctgtctgcccaggcctgggcatttccttacagatgctgatcccgagaacactgctccataaacttcctatgtgcagacctctctcacacatagtctgcatccca

SEQ ID NO: 98694 - DNA, 120 bp, Artificial Sequence
  ENSG00000091157_99 (sequence is synthesized)
aagaacccaccaggagtgtcccaagaaaacagattcaaaaatggagtttgggagctgagccacccattgaaccatgaaaagaaggacccatcactggtcgtgggccctcatggacagcct

SEQ ID NO: 98695 - DNA, 120 bp, Artificial Sequence
  ENSG00000091157_100 (sequence is synthesized)
ctggcacgcttggctgcacaattgttaaaactttccttggtgatgcttgtatggcgtgctgatggagggcgatgtgctggagggtaccacgtggcaggaattgaaaagtaagggaaagga

SEQ ID NO: 98696 - DNA, 120 bp, Artificial Sequence
  ENSG00000091157_101 (sequence is synthesized)
aaaattataaagacgatggacttggatgactgttgtggagtgctctggaaaaaagacaatgaaaagctgaagggtgattaatcacccagtagaggctaaatgtgaaagcctctggctttc

SEQ ID NO: 98697 - DNA, 120 bp, Artificial Sequence
  ENSG00000091157_102 (sequence is synthesized)
tctcagagagagaaagtctctctgagactccttaacatctaaggagagcttcatctcctacagccaaacatgagcaggctcagcccatggagaagcacagctccagaggctgaactcacc

SEQ ID NO: 98698 - DNA, 120 bp, Artificial Sequence
  ENSG00000091157_103 (sequence is synthesized)
tctaaaaatcttctgccccagggtcagagccctgacagaggtgaacggggttctctgggttgatgcacttgaacaatcttgaacccccgattccagtgaaccctcctcgggcctgcctac

SEQ ID NO: 98699 - DNA, 120 bp, Artificial Sequence
  ENSG00000091157_104 (sequence is synthesized)
atggccagctcctccctgttcaaagccggcgttcctctttctttgcttgaagataatgcagaggcttctcccatgcaaaactacacatgccccccactggagtgacttgggttaagtcat

SEQ ID NO: 98700 - DNA, 120 bp, Artificial Sequence
  ENSG00000091157_105 (sequence is synthesized)
ggtacaacctggctgccaaagtgctggacctgctaggacagggaaagaaccatctcccataggagctgtaggtcctcaccaacatgtacccaacatagccactgaaatgggactggattt

SEQ ID NO: 98701 - DNA, 120 bp, Artificial Sequence
  ENSG00000091157_106 (sequence is synthesized)
agcaggtgctgggtcaaggggaaacggactataaagtgggtcaagggagagtttatcgataggagattgaacaacccgcaaggacccagggaaaaagtgctgccctgatgttataagctg

SEQ ID NO: 98702 - DNA, 120 bp, Artificial Sequence
  ENSG00000091157_107 (sequence is synthesized)
cttggcttggagaaaatggtggctgacactaagaagaaatgtcagaactgatgtgacagagggtggaggcaagaacaggaaagctcagagtgaggagactgctggagcaggtatgctagg

SEQ ID NO: 98703 - DNA, 120 bp, Artificial Sequence
  ENSG00000091157_108 (sequence is synthesized)
tacccccaaatccactggatgcctctgctctgcgagagaggctggggacattcattccagcaatgaattgaaggaaggtgctagaagggcacccacatccctgcaggccaggactgaggg

SEQ ID NO: 98704 - DNA, 120 bp, Artificial Sequence
  ENSG00000091157_109 (sequence is synthesized)
tagaagatgtcatgacagaactgggccccaggtatcaaggaggatgacaaggtcctgaaataatacagacctggtgggtgcaatcatcataattagtagcaagtttggagtggcggccag

SEQ ID NO: 98705 - DNA, 120 bp, Artificial Sequence
  ENSG00000091157_110 (sequence is synthesized)
agagaccagacctgcagagatctttggatctaataaaacatgtcatccctaagtgcaagatgggagggcagccaacaagggtattgttcatctatacaggcaaaagaaatcgaaaatgga

SEQ ID NO: 98706 - DNA, 120 bp, Artificial Sequence
  ENSG00000091157_111 (sequence is synthesized)
tcacaggaggctgaaagcagccattccagtaagaagtcaaaatcccttgcctggtttgtaaacccaaatggcatggttagcaggagctcagaccccttgtggatgagactctgggtttgc

SEQ ID NO: 98707 - DNA, 120 bp, Artificial Sequence
  ENSG00000091157_112 (sequence is synthesized)
ccagtagtaagcaatggaaagtagcagagattcttgccaagggggaggagagtttagaatgagtagtagagaagggaagcaatagatatcagtggtggctttgggagcagctgcgacagc

SEQ ID NO: 98708 - DNA, 120 bp, Artificial Sequence
  ENSG00000091157_113 (sequence is synthesized)
aggggttgtagtttgttccactaatatttctgttatgtttcccccagaatcctggaatggctgttcccaggcttttttcaaagcaagtggatctgagcggggcaaagggtgaaggcaggg

SEQ ID NO: 98709 - DNA, 120 bp, Artificial Sequence
  ENSG00000091157_114 (sequence is synthesized)
gacactgtggtatgcattcactcccccaggtactgggttgtcggcagctgatatttcccaactgagacctgctacaggaattgcttgaggctaaagagagccactctcctcaaggccaca

SEQ ID NO: 98710 - DNA, 120 bp, Artificial Sequence
  ENSG00000091157_115 (sequence is synthesized)
tcctcctccctaatgagagctacacccaataacccatcatggggataaaaggactcaaccctctttgcttcagtttggaacatctctgaagggccattccagcttcatagctcccagcgc

SEQ ID NO: 98711 - DNA, 120 bp, Artificial Sequence
  ENSG00000091157_116 (sequence is synthesized)
atttgtcagagaactctgttgcaaccacatcacagtccagctcccccctgcctatgtattgcttccttcacacagatgttgatcccaggaacacttcctaatacacccgctttcagcaaa

SEQ ID NO: 98712 - DNA, 120 bp, Artificial Sequence
  ENSG00000091157_117 (sequence is synthesized)
gaaaatcatcctggttgcagatgccactggacttacatcaccattacatctgtgtttagacagtgactcttcacttaagctatgtactcaaatcacttgcagaatgtttttaaaatgcaa

SEQ ID NO: 98713 - DNA, 120 bp, Artificial Sequence
  ENSG00000091157_118 (sequence is synthesized)
gcaggaatatgtagaaaaggtacctgtactcacaaatatatatgctactacccatcaacaaaaatgagtcactgaccttaaagtgaaaagaacagatcctcaaattcactttattatttt

SEQ ID NO: 98714 - DNA, 120 bp, Artificial Sequence
  ENSG00000091157_119 (sequence is synthesized)
ctgaatctctgtagtttggaacttgctttaaaaaacaaaaggcaaaggctgtctatatcaaaatattcattaatgaactgacttttataaatgaattccccatcaaacatcctactctag

SEQ ID NO: 98715 - DNA, 120 bp, Artificial Sequence
  ENSG00000091157_120 (sequence is synthesized)
tactaacatgtgcctccgcccattgcattattatgcttatggatgccagcttgttcgatatggatctgatgatatgcaagtgcagatacaaggcaaactctcttgctagttaaagttggg

SEQ ID NO: 98716 - DNA, 120 bp, Artificial Sequence
  ENSG00000091157_121 (sequence is synthesized)
attgtgaatccttagaaaaacaaagatctgatagagttagactcaggcaatatttacaaagagaaaattgggaaggattttgatggataaatctttcaaaagagtataatttgaaaggat

SEQ ID NO: 98717 - DNA, 120 bp, Artificial Sequence
  ENSG00000091157_122 (sequence is synthesized)
attctttcacatctctaaatagttaaaaaactacccaaacactagcaacaagatttagccagatgaacctcttgcttccctcttacgaagttattaaaggtgcattggatcgttgtgtga

SEQ ID NO: 98718 - DNA, 120 bp, Artificial Sequence
  ENSG00000091157_123 (sequence is synthesized)
gatttagccagatgaacctcttgcttccctcttacgaagttattaaaggtgggtcactgacctaggtggtttctgtggagctgttgatgtgcttctgggatcaaccgtctcgttcttcac

SEQ ID NO: 98719 - DNA, 120 bp, Artificial Sequence
  ENSG00000091157_124 (sequence is synthesized)
ctagccgggggcggtgctagctgtcagatcgctgcggctgcaagcctgcaggtcgggcccaaaagtaggcgccgttaccaagagcgtgggggccagccgggggtctttgtggctcccttg

SEQ ID NO: 98720 - DNA, 120 bp, Artificial Sequence
  ENSG00000091157_125 (sequence is synthesized)
atgccctctcgctcattgccaccgccagaccacccgccttcatcaccaccatagccaaagagcaggcatatgaaaactcaaatacattaaaggtgttcacacttttcacatgtacacaga

SEQ ID NO: 98721 - DNA, 120 bp, Artificial Sequence
  ENSG00000091157_126 (sequence is synthesized)
acatggtcagctattatgagcggaatcacagaatagcagttggagctcgccatggttcagtggccctgtacgacatccggactggaaaatgtcaggcactataccaggcaaaggagaggt

SEQ ID NO: 98722 - DNA, 120 bp, Artificial Sequence
  ENSG00000091157_127 (sequence is synthesized)
gacaaaggagcgggaacacatgtgaagatcctgacctactgctctaaccaaaccatcttccgttaaccataacccaaatcaaaacccacgaaaatgccaagtcccatcatgacggacatt

SEQ ID NO: 98723 - DNA, 120 bp, Artificial Sequence
  ENSG00000091157_128 (sequence is synthesized)
tggagataatcaagaccattcatgctgctgaggaactccatgtggaagcaggaggggagggatttattttcatagcacagtataagacttctagcatgtgttcaaatagttttctattag

SEQ ID NO: 98724 - DNA, 120 bp, Artificial Sequence
  ENSG00000091157_129 (sequence is synthesized)
aaatactgaaaaaaacatttagctttgggtttgcccagatctgaagaaaacattttgtgtgactttttaggcatatgcaagtgaaactttaataaatatttcatatgagcagtgtaaata

SEQ ID NO: 98725 - DNA, 120 bp, Artificial Sequence
  ENSG00000091164_0 (sequence is synthesized)
actgagagtcccgggagaagactcggcggtcgccacctcttctgtccaggcctcggccttcctgagcatctctccttcctctcccagatcgtcttctccttcagtttcaaagccagtggc

SEQ ID NO: 98726 - DNA, 120 bp, Artificial Sequence
  ENSG00000091164_1 (sequence is synthesized)
gtcgcggccaccctgccgggctctctgtgaggatggtgggggtgaagcccgtcgggagcgacccggatttccagccagagctgagcggcgcgggctccagactcgccgtggtcaagttca

SEQ ID NO: 98727 - DNA, 120 bp, Artificial Sequence
  ENSG00000091164_2 (sequence is synthesized)
ccatgagagggtgtgggccatgtttgaggattgccccagcattcagttctatgagtaataaatatccacaggctgttttcttggaagtcgatgtacatcagtgtcagggaacagctgcca

SEQ ID NO: 98728 - DNA, 120 bp, Artificial Sequence
  ENSG00000091164_3 (sequence is synthesized)
ccaacaatatatcagcaacacctacatttttgttttttcgaaacaaagtgagaattgatcaatatcaaggagcagatgctgtgggattagaagaaaaaatcaagcagcacttagaaaatg

SEQ ID NO: 98729 - DNA, 120 bp, Artificial Sequence
  ENSG00000091164_4 (sequence is synthesized)
accctggaagcaatgaggacacagatattccaaaaggctatatggatttaatgccttttattaacaaagctggttgtgaatgtcttaatgaaagtgatgagcatggatttgacaactgtt

SEQ ID NO: 98730 - DNA, 120 bp, Artificial Sequence
  ENSG00000091164_5 (sequence is synthesized)
tacgaaaagacacaaccttcttggaatctgactgtgatgaacagctgcttattactgtggcattcaatcaacctgttaagctttattccatgaaatttcaagggccagataatggtcagg

SEQ ID NO: 98731 - DNA, 120 bp, Artificial Sequence
  ENSG00000091164_6 (sequence is synthesized)
gccctaaatatgtaaaaatttttatcaacctaccccgatctatggattttgaagaggcagaaagaagtgaaccaactcaagctctggaactgacagaggatgatattaaagaagatggca

SEQ ID NO: 98732 - DNA, 120 bp, Artificial Sequence
  ENSG00000091164_7 (sequence is synthesized)
ttgttccacttcgttatgttaagtttcagaatgttaacagtgtaactatatttgttcagtcgaatcaaggtgaagaggaaacaacaagaatttcatattttacttttattggtactccag

SEQ ID NO: 98733 - DNA, 120 bp, Artificial Sequence
  ENSG00000091164_8 (sequence is synthesized)
tccaggcaacaaatatgaatgacttcaaacgagtagttggcaaaaaaggagaaagccactaaggtacaaaagacactggacaaccatattgcaatcagatctacagctcctggataattg

SEQ ID NO: 98734 - DNA, 120 bp, Artificial Sequence
  ENSG00000091164_9 (sequence is synthesized)
cttgattctcgccagagactgtcaatgtttcattcattgccattaccaataaatcattgcttttgttcagatggtatcactagtgtttccattgtaatcttgacacatgcaattgtaaat

SEQ ID NO: 98735 - DNA, 120 bp, Artificial Sequence
  ENSG00000091164_10 (sequence is synthesized)
aaaagtcaccacttttgccaagcttaatttttgtctttctaaatcagtattttctctttccatgtatttgaaaactggttaacttctgattttagtagagacttaagtgtctggtagtat

SEQ ID NO: 98736 - DNA, 120 bp, Artificial Sequence
  ENSG00000091164_11 (sequence is synthesized)
attgattgaaagccagtttctttagaaaaggagaaactgttctagggaattaagaagtacatgtgtacacattcatggcaagttattttgataagtgaacctggaacagctaaccatgtt

SEQ ID NO: 98737 - DNA, 120 bp, Artificial Sequence
  ENSG00000091164_12 (sequence is synthesized)
aaattattactgcatttttattaaaggacatttgtatatctgagctatggaaattactcaaattataaattagaagaaataaacaggtttaatgagatttagctactcttacctaaaact

SEQ ID NO: 98738 - DNA, 120 bp, Artificial Sequence
  ENSG00000091164_13 (sequence is synthesized)
ttacctaaaacttagctaatgggtccacagattctttcttggtatatatcaagattttaatctcttctggtaaactttaaaatttgagtcagcctttttttttttttttttttttttaac

SEQ ID NO: 98739 - DNA, 120 bp, Artificial Sequence
  ENSG00000091164_14 (sequence is synthesized)
taactaatagaagaatgtggaaatcagacagttggggaaaaaatacagcatagtgaattcagaaaacaggaattggccaggtgtggtggctaatgtctgtaatcccagtactttgggagg

SEQ ID NO: 98740 - DNA, 88 bp, Artificial Sequence
  ENSG00000091164_15 (sequence is synthesized)
cagtgagctgagattgcgccattgcgccccagcctgagcggggaattattacccttaatcaagtatttattacctgaactaccaaaac

SEQ ID NO: 98741 - DNA, 120 bp, Artificial Sequence
  ENSG00000091164_16 (sequence is synthesized)
ttacccttaatcaagtatttattacctgaactaccaaaacgtgcagtgtaaatatacagagaacatgatttaaggttgaaaatgaggtgctcaaatagaaatgtttaaaaggtctttcac

SEQ ID NO: 98742 - DNA, 120 bp, Artificial Sequence
  ENSG00000091164_17 (sequence is synthesized)
aaaaggctggtaaaatacctattcgttaccttttttatcttaaaattgtaatctaaaaagtattggtagttttaattttaaaatttctgagtattttgaaaactatttttaaagagtaca

SEQ ID NO: 98743 - DNA, 120 bp, Artificial Sequence
  ENSG00000091164_18 (sequence is synthesized)
taagactgtaaaattgtgattcagttaaacatttgagggcattcttgtctaggaatatggtagagataccatttgcctttgtgagagcagtgtgtttatacttgtttatgaaaaaattct

SEQ ID NO: 98744 - DNA, 120 bp, Artificial Sequence
  ENSG00000091164_19 (sequence is synthesized)
acagaagttttagtgttgaaagagtccctttctgaaacccaagtgtcattagatagtttagttcatttgtatatgggcacattaactggtctgtgatgatcttaacactccttaaataga

SEQ ID NO: 98745 - DNA, 120 bp, Artificial Sequence
  ENSG00000091164_20 (sequence is synthesized)
ccatctcagattaatcacatctgaaattaaggataagattaatatgcagggttttggtttacagttttgtacacttaacctttctgagtaattgttaaagtgcctcatcctaagtattgc

SEQ ID NO: 98746 - DNA, 120 bp, Artificial Sequence
  ENSG00000091164_21 (sequence is synthesized)
tgaccttttcctatttatacttgatagtttgaaaacccagtgaaacaaatttcgtatttgtaaaggattggacatcagatttatattgtctatgtgactcttctataacaattagttgca

SEQ ID NO: 98747 - DNA, 120 bp, Artificial Sequence
  ENSG00000091164_22 (sequence is synthesized)
gtatgcaagtattacataattcaaattgtaaatagtgaaaaatgaacgtttataggtaactataacgtttcacttaatgggaaatcttactattataaatgtgcataattggcatttaaa

SEQ ID NO: 98748 - DNA, 120 bp, Artificial Sequence
  ENSG00000091164_23 (sequence is synthesized)
atatcaaactgaaatgctgttttctcctaaaacagtatatatatatacacacatatgtatatgtaacatttatatataacactgaattttccagatgaataagagcatttgaaaaaatgt

SEQ ID NO: 98749 - DNA, 120 bp, Artificial Sequence
  ENSG00000091164_24 (sequence is synthesized)
aactctagttattttaactgaagttatttattagtgcatctagaaaactggtattcagtttcttgttcattttgtcggacatagcaaaaaagaatttcatgatctctgtattttgataca

SEQ ID NO: 98750 - DNA, 120 bp, Artificial Sequence
  ENSG00000091164_25 (sequence is synthesized)
ttgacatcaggtgcttttgatgagaaacaacagtgaaatatcgtgttcataatagaaacgaaagtcaggtattgcagtaggaagtctttgtcagcttaatgctgaagccaagagtagcac

SEQ ID NO: 98751 - DNA, 120 bp, Artificial Sequence
  ENSG00000091164_26 (sequence is synthesized)
aaggtaccacattcttgtgcccacgacaggcttttataatccttctgagttctctttgacatcaagccccacgttgttccccagtctcaatattctgttggaggcagccacgtaacaatt

SEQ ID NO: 98752 - DNA, 120 bp, Artificial Sequence
  ENSG00000091164_27 (sequence is synthesized)
agagttgaaacctgccccacgttgttccccagtctcaatatactgttggaggcagccacgtaacaattagagttgaaacctgccccacgttgttccccagtctcaatatactgttggagg

SEQ ID NO: 98753 - DNA, 120 bp, Artificial Sequence
  ENSG00000091164_28 (sequence is synthesized)
cagccacataacaattagagttgaaacctgccccacgttgttccccagtctcaatattctgttggaggcagccacgtaacaattagagttgaaacctgccccacattgttccccagtctc

SEQ ID NO: 98754 - DNA, 120 bp, Artificial Sequence
  ENSG00000091164_29 (sequence is synthesized)
aatattctgttggaggcagccacgtaacaattagagttgaaacctgccccactttgttccccagtctcaatattctgttggaggcagccacgtaacaattagagttgaaacctgccccac

SEQ ID NO: 98755 - DNA, 120 bp, Artificial Sequence
  ENSG00000091164_30 (sequence is synthesized)
attgttccccagtctcaatattctgttggaggcagccacttaacaattagagttgaaacctgtctgccatcctttgtctcaatgtttgaggatgtatgcagtgtttttggcagcgattat

SEQ ID NO: 98756 - DNA, 120 bp, Artificial Sequence
  ENSG00000091164_31 (sequence is synthesized)
aggaatgcagttgtttatttggcctcagcagtttatttatggctgcaattaatatccctgatcatgggcttttaaacctaaaatagttcagatcctcccttgttcctcttaatgtctaaa

SEQ ID NO: 98757 - DNA, 120 bp, Artificial Sequence
  ENSG00000091164_32 (sequence is synthesized)
agctttgattctgtaataagaataaagtgttggagttgaataaattagttacaccctttgtaagctttaaaaacatgaaatttaaggcttactcatgttgcttgtattgatactcatata

SEQ ID NO: 98758 - DNA, 120 bp, Artificial Sequence
  ENSG00000091164_33 (sequence is synthesized)
gttcaatttagtaggttaatttttgtgttaggtatatctcttctggaactgataatttgtaatcttagactattttttttttaagataagtaacttagagtaagaaatccagctgggaac

SEQ ID NO: 98759 - DNA, 120 bp, Artificial Sequence
  ENSG00000091164_34 (sequence is synthesized)
agcccgggcaacagagtgagactgtctcaaaagaaaaaaaaaaaaaatccattcacagaactgctaaagaaaaactagaggaatattttgctcatttagctttaaaactcattattagag

SEQ ID NO: 98760 - DNA, 120 bp, Artificial Sequence
  ENSG00000091164_35 (sequence is synthesized)
gtgtgtattttacagttttgtaaatatagattatgctttataatacacataaagcaagtatatataacatgcatatagtaaataaattttaaaatattgactattccccagttaagccta

SEQ ID NO: 98761 - DNA, 120 bp, Artificial Sequence
  ENSG00000091164_36 (sequence is synthesized)
tacttcttaaggaagactactgatgtcattttaagcatgtttcaaaattcaagttttatttttgatcaataaggtttttttttttttttaacatgctcagcactataggaataagaggac

SEQ ID NO: 98762 - DNA, 120 bp, Artificial Sequence
  ENSG00000091164_37 (sequence is synthesized)
agtggagatttgtaggctaataagatcgcttttaaactttgtggtccatgtaaaattattagttggagaatgtgtaattagagaactataagataaagagataacctttagaatttgaat

SEQ ID NO: 98763 - DNA, 120 bp, Artificial Sequence
  ENSG00000091164_38 (sequence is synthesized)
gtactaaaattgtacacagcttggaatattaaaatcttaaggatatgcaatgttaaaactgctagagtatttttccttcgtgcttgctatgcttctctatgggaagaggaattttatttt

SEQ ID NO: 98764 - DNA, 120 bp, Artificial Sequence
  ENSG00000091164_39 (sequence is synthesized)
ggaattatttctaagttgaacagaccagaattaattgtgaaaacatgatctgttggtttataattggacacgcatttggagatactggctcatcatactacctaggagcaaaatctctga

SEQ ID NO: 98765 - DNA, 120 bp, Artificial Sequence
  ENSG00000091164_40 (sequence is synthesized)
agtttgaatccctgctcttccacttgttagctgtgtcatcttgagcaagtaacatccttcagagctcaaatttcttcttgtgtaaaaataggaacatctatctcttagacttgttctgaa

SEQ ID NO: 98766 - DNA, 120 bp, Artificial Sequence
  ENSG00000091164_41 (sequence is synthesized)
gatgcgccttactttgtatctggaacaaggataagtatcttctgtatcctgctctcagctgtcactgctttttaggccatcattacttgcttggcatactgcagtgcctcctaattgtct

SEQ ID NO: 98767 - DNA, 120 bp, Artificial Sequence
  ENSG00000091164_42 (sequence is synthesized)
ctttgtttctgctctggcctctctcatgtatcccccacatggccgctggttctcttttctttatggggtctttgtaatgtaatctctcctcctctagcctccccatgcccctcatttctc

SEQ ID NO: 98768 - DNA, 120 bp, Artificial Sequence
  ENSG00000091164_43 (sequence is synthesized)
cagtgtgctgtgctgtattaccaggtagcagaacgtaccctaatatcgcatgccttcctctgacctaacttttccatctgaccaattcctacttatctacaaggctcagtccaaggaaaa

SEQ ID NO: 98769 - DNA, 120 bp, Artificial Sequence
  ENSG00000091164_44 (sequence is synthesized)
ctgataccgggaataatcataacaattgtgcacgcctcctcagctgctatgacaccttgccattatttcatccggatacttatcaagctacttgtaatgatctgtagtcttatttggact

SEQ ID NO: 98770 - DNA, 120 bp, Artificial Sequence
  ENSG00000091164_45 (sequence is synthesized)
actagattgtgagctgtaatacaagtattttgtctctagtattaagccagtttatttggtttctatcattaaatacaatgttgaaaaaattctcagggtccaaggggagatgcttgggtt

SEQ ID NO: 98771 - DNA, 120 bp, Artificial Sequence
  ENSG00000091164_46 (sequence is synthesized)
gagtcagagataaagtaggaatatgcagttgaggaaggtaaggaagataatttagctgaagtaaaggaaaagtgcatagtgtgttcatagagtgggagttaagtgtaagagacattctag

SEQ ID NO: 98772 - DNA, 120 bp, Artificial Sequence
  ENSG00000091164_47 (sequence is synthesized)
ggaagtgaaggagaagctgaaagagcaagtagagacggtaaggtgaagctcctcttgccatgtgaaagagatcaaactttctccttaatttatgggaggagcgagcatagagaagtctgt

SEQ ID NO: 98773 - DNA, 120 bp, Artificial Sequence
  ENSG00000091164_48 (sequence is synthesized)
gatgtctcacaaggttctcacttttacaattgaatatagaagtagctcttaggagaagcagaacgttcagaggggaagatgaatatggttttgggtacattgccttaaattgcatttttg

SEQ ID NO: 98774 - DNA, 120 bp, Artificial Sequence
  ENSG00000091164_49 (sequence is synthesized)
gtatttgggtggcgatgtctagtaagtaaaaagccaggaatgtgattttagagcttagagctagaagcaaggaactaggagttgtttagatgatgaaaactgaaatatgtatatgaatgg

SEQ ID NO: 98775 - DNA, 120 bp, Artificial Sequence
  ENSG00000091164_50 (sequence is synthesized)
gaatttttagaatataaagggagagaatgaaactaaggagcaaatgttagggaatcctaagaaatattaaagaattgggaaaagaggaacctggaaggtagagtagtaaacaggaaaggg

SEQ ID NO: 98776 - DNA, 120 bp, Artificial Sequence
  ENSG00000091164_51 (sequence is synthesized)
aggaaaaacaggaggtggtaataaagtagtgttaatgaatccaagagggagcagtcaccatcttcaaatgtgatattgaaattagctgggatgtccagttgtttaatccattaaattgtg

SEQ ID NO: 98777 - DNA, 120 bp, Artificial Sequence
  ENSG00000091164_52 (sequence is synthesized)
gaaacagtctttctagtgcttaattataggaatcattgatcatattaataaactttcagttgaagcatcagcagataattattccaaaaccctctggcaaagaaatgtagatgcttttat

SEQ ID NO: 98778 - DNA, 120 bp, Artificial Sequence
  ENSG00000091164_53 (sequence is synthesized)
agtctaccattgaacacagttttacatgacacttggcaaaacttggagatggatggcactattttgtaagagaatatgaaacactgctttgaagttgtcattaaaggatcttatcaggtg

SEQ ID NO: 98779 - DNA, 120 bp, Artificial Sequence
  ENSG00000091164_54 (sequence is synthesized)
ccaagatggagcgaaggatgaagtagcaagtgcacgtctttcttgggagcaggatgttgcgcaagtttacacttctgaccccatcacactgcttcccactgagatgcaagagaggattcc

SEQ ID NO: 98780 - DNA, 120 bp, Artificial Sequence
  ENSG00000091164_55 (sequence is synthesized)
gcaaggcctaagccggcgccgagagagccagccgcgttacgatggagaccgaaagtggagaaaaggccagctgtgggcaaggagtgcacggccgccatcttggttgtgggaagtctcgtc

SEQ ID NO: 98781 - DNA, 120 bp, Artificial Sequence
  ENSG00000091164_56 (sequence is synthesized)
ctccatgataatctgagaaacctcctccgtaaaagcctcagatctgggaaacgcggatgcatatgccaacttttgagtctcagtctgcgcctgcgcacgtgacctctacacgtctcctct

SEQ ID NO: 98782 - DNA, 120 bp, Artificial Sequence
  ENSG00000091164_57 (sequence is synthesized)
gcgcctgcgccgctcaagttagcgcgaggctactcagtcgagggtgggactacgcttcgcgttttgggattgggcgctgaaggccaaaccggacgacgcggaaatgacgtcacgccgggg

SEQ ID NO: 98783 - DNA, 120 bp, Artificial Sequence
  ENSG00000091164_58 (sequence is synthesized)
cttgaaagcccccttacctgtcacagcttcatctcatgccgcgatgtagcctatcagaccgccggtgggcgccccagccaaggaggacaaggatagggcggaactacggaggatgcgggg

SEQ ID NO: 98784 - DNA, 120 bp, Artificial Sequence
  ENSG00000091164_59 (sequence is synthesized)
tgcgtagatcctgctgggataatccgtggggcggcaagcgctatacagccgccgtctccccagtgatactgcaaggtgccggtgccgccgccgccgccactgcagtaaatcagctgacac

SEQ ID NO: 98785 - DNA, 120 bp, Artificial Sequence
  ENSG00000091164_60 (sequence is synthesized)
aatgatacttcgggatagtaaaaatataattttaatggaataatttcatgtatctcaactgtcacactttcttttaacaaaataattcaaaattatatcatgtcatgaaattttacaagg

SEQ ID NO: 98786 - DNA, 120 bp, Artificial Sequence
  ENSG00000091164_61 (sequence is synthesized)
ctaaactaggatagaaagttcccctaactatatttttagatatccaacaaagtaatctttaataaaaaatgatgtcttaactgataaaagagtcttttaatgaatgacatcaacataagg

SEQ ID NO: 98787 - DNA, 120 bp, Artificial Sequence
  ENSG00000091164_62 (sequence is synthesized)
gtaaaaataatggcttggttatagaaagtggttagtaataatggaaaaatgaaagtaaaatcatttgaaagcagttgtgagaattaaataacttagttgatagtaagattctggtgatta

SEQ ID NO: 98788 - DNA, 120 bp, Artificial Sequence
  ENSG00000091164_63 (sequence is synthesized)
tttctgatgaaattttaaattacttgaataattttatttaaaaaaaatggactgagttttaatatactgacatgttaactttccaaaccatgtttgtatgctgaaatagcacatttcatc

SEQ ID NO: 98789 - DNA, 120 bp, Artificial Sequence
  ENSG00000091164_64 (sequence is synthesized)
aaataatgatgaacaggcaagttttctgaagtatttttgtatatctttatgtgtgtgcatataattttcttttgaaaagacacaattataaggttagtaaagaattaatagggtacatgg

SEQ ID NO: 98790 - DNA, 120 bp, Artificial Sequence
  ENSG00000091164_65 (sequence is synthesized)
gacctttgttaatccagattaattccttctgtacattactggaacgacttctaatgggcaacagttccctagcgtcactcttaaatatacagccagagattatcaaagtgctactgagag

SEQ ID NO: 98791 - DNA, 120 bp, Artificial Sequence
  ENSG00000091164_66 (sequence is synthesized)
ctttatcagtacagagcgttagttgctatatactcagtttaaatgtggcagcacagaatacataggtatcccactgtctctaatgattgcatctggcaggcagtctagaacttgaggaag

SEQ ID NO: 98792 - DNA, 120 bp, Artificial Sequence
  ENSG00000091164_67 (sequence is synthesized)
ttgaagatggagaacatcttgagcactctcattctttttggtgcatctacagatcttactttaattcaattatagaaaaatgtattagattgcataacagaggatgatcttacaaaattg

SEQ ID NO: 98793 - DNA, 120 bp, Artificial Sequence
  ENSG00000091164_68 (sequence is synthesized)
tatgctgtttttaccaaattgcaaacctggacaataggtattttaactggttgttttccaattactattttcctgtctcatagcgtgattaccttttggggactgcaggaataattatgc

SEQ ID NO: 98794 - DNA, 120 bp, Artificial Sequence
  ENSG00000091164_69 (sequence is synthesized)
actttagagctgttatgtctagatgtttcacatatgtattatgacaggtcagaagaagcagagattaagcatctacatttttacgatatgaaatatgttttattgggaaaatgtgtgagc

SEQ ID NO: 98795 - DNA, 120 bp, Artificial Sequence
  ENSG00000091164_70 (sequence is synthesized)
aacaaagacgtcttggctgcctgctttacctttttgaattagatgccattggacttggctttaagtgtgccttgtgtggtttattcttaacttagttttttataagatctattactatta

SEQ ID NO: 98796 - DNA, 120 bp, Artificial Sequence
  ENSG00000091164_71 (sequence is synthesized)
tcttattattttctcatatcattcattaatttggctctagtttcctgtttcttacctcagtttatgctatttgattttcatttttttctgtaaccaccattctatcttgtttaccttctt

SEQ ID NO: 98797 - DNA, 120 bp, Artificial Sequence
  ENSG00000091164_72 (sequence is synthesized)
accagctagccattcagttaaagtttctctaatttgcatgaataattatccatctaactatctgcctccacctcgtgtttaacatccccctcacatcccttctagcctagtattttctct

SEQ ID NO: 98798 - DNA, 120 bp, Artificial Sequence
  ENSG00000091164_73 (sequence is synthesized)
tttctgactgtcaaactacgtttttgggggctgtctttaggatagcaaaggtgtaagaccttttttgtttgagagtatttgtgcttgttttataacagccatttattcatttgatttttt

SEQ ID NO: 98799 - DNA, 120 bp, Artificial Sequence
  ENSG00000091164_74 (sequence is synthesized)
ttaactttaaattaccatatgatagcagttctcaagctttttgatctcaggacctctttatattattaaatactattgaaggccaaaaagaacttttgtttatgtgggctatatttatct

SEQ ID NO: 98800 - DNA, 120 bp, Artificial Sequence
  ENSG00000091164_75 (sequence is synthesized)
aagttaaaagtgggaaatataaaaaatatttgtaaataatgaacacatgttaatgaatatttttaaattagaaataagcatattttctaaaagaaaaaccaatttggtaagaagagcatt

SEQ ID NO: 98801 - DNA, 86 bp, Artificial Sequence
  ENSG00000091164_76 (sequence is synthesized)
aaattagaaataagcatattttctaaaagaaaaaccaatttggtaagaagagcattgattcagaattttatgttctgtcacccatg

SEQ ID NO: 98802 - DNA, 120 bp, Artificial Sequence
  ENSG00000091164_77 (sequence is synthesized)
agtagctgagactacaggcgtgtgccaccacactcggctaatgttttatttttgtgtggggacagggtcttactatgttgcccaggcttctctgtttacgagccttatagtgtcctttcc

SEQ ID NO: 98803 - DNA, 120 bp, Artificial Sequence
  ENSG00000091164_78 (sequence is synthesized)
cccaggcttctctgtttacgagccttatagtgtcctttccttctcatatctgcttctgcattcagtcagctttcctgtcacacatcatatagcccctggaaaactcccctggatacttgt

SEQ ID NO: 98804 - DNA, 120 bp, Artificial Sequence
  ENSG00000091164_79 (sequence is synthesized)
gaagagaataagagtctaaaaggcaaaaaacgatttagcattatgaaaatagtgttgacctcccagactccttgagagggtcttggagaccacactttgagaactgctacaagaataatt

SEQ ID NO: 98805 - DNA, 120 bp, Artificial Sequence
  ENSG00000091164_80 (sequence is synthesized)
tgaataccataatctactcccttgttggtgttctgggcttcttagccccttgcttttaatgtttaataaattttagttgattaagtgattttcttaggtatattaatattgcattttctt

SEQ ID NO: 98806 - DNA, 120 bp, Artificial Sequence
  ENSG00000091164_81 (sequence is synthesized)
gtaatatttctgaatgacatttgtactgtagttattctttgtcttttagggttattctttaaaagtaagctagtatttcattgtttttatattgtacaaagtaacaacttcaatgtagtt

SEQ ID NO: 98807 - DNA, 120 bp, Artificial Sequence
  ENSG00000091164_82 (sequence is synthesized)
ccatgataatctgagacctgccccgaatacagtacaggagcatcttcaaagtacttccagtgggtgccctggacagcagctaagaaccccgggatcgtcttctccttcagtttcaaagcc

SEQ ID NO: 98808 - DNA, 120 bp, Artificial Sequence
  ENSG00000091164_83 (sequence is synthesized)
tcacactgcttcccactgagatgcaagagaggattcctcatcttccagatgtgcaggctgaaatatttatggatgaaattgtcagatgcctagcatttgctccatgataatctgaggtaa

SEQ ID NO: 98809 - DNA, 120 bp, Artificial Sequence
  ENSG00000091164_84 (sequence is synthesized)
ggaagacagtggcaatagctaccttaactttacttccatcttcatgaaatagtacattcttttacttctaattctaattcatcaaggtgaaaaacatcacttattcaccatccagtggtt

SEQ ID NO: 98810 - DNA, 120 bp, Artificial Sequence
  ENSG00000091164_85 (sequence is synthesized)
catacagaaaatgcagagacttggttcttgtggtcaagttactcagtctggcagggaggcagggagacaggcagacccactactgtgaggagtgatgtacctggtgctttccaccagttg

SEQ ID NO: 98811 - DNA, 120 bp, Artificial Sequence
  ENSG00000091164_86 (sequence is synthesized)
ccatggggctgatcctcctactgaccttgtaatactaatgttctgaattttgatgggaaatattgtttttaacattgtgtgaaaagccacttccttattgtacagaaaccactaacatac

SEQ ID NO: 98812 - DNA, 120 bp, Artificial Sequence
  ENSG00000091181_0 (sequence is synthesized)
ccgctgcttctcatcgcatggccaccgcatttctcaggccaggcacattgagcattggtcctgtgcctgacgctatgctagatgctggggttgcagccacgagcatagacacgacagaca

SEQ ID NO: 98813 - DNA, 120 bp, Artificial Sequence
  ENSG00000091181_1 (sequence is synthesized)
cggtcctcgccatcttctgttgagtactggtcggaacaagaggatcgtctgtagacaggctacagattgttttagattgaagtttcctgtcatgttcactcatctttaaatcctcatagt

SEQ ID NO: 98814 - DNA, 120 bp, Artificial Sequence
  ENSG00000091181_2 (sequence is synthesized)
gaaaaaggatatgatcatcgtggcgcatgtattactcatccttttgggggccactgagatactgcaagctgacttacttcctgatgaaaagatttcacttctcccacctgtcaatttcac

SEQ ID NO: 98815 - DNA, 120 bp, Artificial Sequence
  ENSG00000091181_3 (sequence is synthesized)
cattaaagttactggtttggctcaagttcttttacaatggaaaccaaatcctgatcaagagcaaaggaatgttaatctagaatatcaagtgaaaataaacgctccaaaagaagatgacta

SEQ ID NO: 98816 - DNA, 120 bp, Artificial Sequence
  ENSG00000091181_4 (sequence is synthesized)
tgaaaccagaatcactgaaagcaaatgtgtaaccatcctccacaaaggcttttcagcaagtgtgcggaccatcctgcagaacgaccactcactactggccagcagctgggcttctgctga

SEQ ID NO: 98817 - DNA, 120 bp, Artificial Sequence
  ENSG00000091181_5 (sequence is synthesized)
acttcatgccccaccagggtctcctggaacctcaattgtgaatttaacttgcaccacaaacactacagaagacaattattcacgtttaaggtcataccaagtttcccttcactgcacctg

SEQ ID NO: 98818 - DNA, 120 bp, Artificial Sequence
  ENSG00000091181_6 (sequence is synthesized)
gcttgttggcacagatgcccctgaggacacgcagtattttctctactataggtatggctcttggactgaagaatgccaagaatacagcaaagacacactggggagaaatatcgcatgctg

SEQ ID NO: 98819 - DNA, 120 bp, Artificial Sequence
  ENSG00000091181_7 (sequence is synthesized)
gtttcccaggacttttatcctcagcaaagggcgtgactggcttgcggtgcttgttaacggctccagcaagcactctgctatcaggccctttgatcagctgtttgcccttcacgccattga

SEQ ID NO: 98820 - DNA, 120 bp, Artificial Sequence
  ENSG00000091181_8 (sequence is synthesized)
ttttccaatccattgctttgattatgaagtaaaaatacacaatacaaggaatggatatttgcagatagaaaaattgatgaccaatgcattcatctcaataattgatgatctttctaagta

SEQ ID NO: 98821 - DNA, 120 bp, Artificial Sequence
  ENSG00000091181_9 (sequence is synthesized)
cgatgttcaagtgagagcagcagtgagctccatgtgcagagaggcagggctctggagtgagtggagccaacctatttatgtgggaaatgatgaacacaagcccttgagagagtggtttgt

SEQ ID NO: 98822 - DNA, 120 bp, Artificial Sequence
  ENSG00000091181_10 (sequence is synthesized)
cattgtgattatggcaaccatctgcttcatcttgttaattctctcgcttatctgtaaaatatgtcatttatggatcaagttgtttccaccaattccagcaccaaaaagtaatatcaaaga

SEQ ID NO: 98823 - DNA, 120 bp, Artificial Sequence
  ENSG00000091181_11 (sequence is synthesized)
tctctttgtaaccactaactatgagaaagctgggtccagtgagacggaaattgaagtcatctgttatatagagaagcctggagttgagaccctggaggattctgtgttttgactgtcact

SEQ ID NO: 98824 - DNA, 120 bp, Artificial Sequence
  ENSG00000091181_12 (sequence is synthesized)
ttggcatcctctgatgaactcacacatgcctcagtgcctcagtgaaaagaacagggatgctggctcttggctaagaggtgttcagaatttaggcaacactcaatttacctgcgaagcaat

SEQ ID NO: 98825 - DNA, 120 bp, Artificial Sequence
  ENSG00000091181_13 (sequence is synthesized)
acacccagacacaccagtcttgtatctcttaaaagtatggatgcttcatccaaatcgcctcacctacagcagggaagttgactcatccaagcattttgccatgttttttctccccatgcc

SEQ ID NO: 98826 - DNA, 120 bp, Artificial Sequence
  ENSG00000091181_14 (sequence is synthesized)
gtacagggtagcacctcctcacctgccaatctttgcaatttgcttgactcacctcagacttttcattcacaacagacagcttttaaggctaacgtccagctgtatttacttctggctgtg

SEQ ID NO: 98827 - DNA, 120 bp, Artificial Sequence
  ENSG00000091181_15 (sequence is synthesized)
cccgtttggctgtttaagctgccaattgtagcactcagctaccatctgaggaagaaagcattttgcatcagcctggagtgaaccatgaacttggattcaagactgtcttttctatagcaa

SEQ ID NO: 98828 - DNA, 120 bp, Artificial Sequence
  ENSG00000091181_16 (sequence is synthesized)
aaacaaaacagaaatgcaacgctttagagtacccacggaaaacttgtttaccttgtcaccatgagtaaaagttaattcccactcctgaagagagcaaaccaactctgaaagagagtgaaa

SEQ ID NO: 98829 - DNA, 120 bp, Artificial Sequence
  ENSG00000091181_17 (sequence is synthesized)
atgcagacaagacagttatcagataatggctatctggacgagagattctttcgtttgacagcagtttggttgttgggagttccagttcagctcctgcacagttgctctgtacaaatcctc

SEQ ID NO: 98830 - DNA, 120 bp, Artificial Sequence
  ENSG00000091181_18 (sequence is synthesized)
ctccatatttgcttagagaaaacgtgttgccatcccatcatgaaggaagctgcctgagagtttttaaccattacagccgtgatgatgaaagagtgaagaaccgcctctaagttaaaaagt

SEQ ID NO: 98831 - DNA, 86 bp, Artificial Sequence
  ENSG00000091181_19 (sequence is synthesized)
gtgtgtttatctcaagctccagaggcctgatccaggatacatcatttgaaaccaactaatttaaaagcataatagagctaatatat

SEQ ID NO: 98832 - DNA, 120 bp, Artificial Sequence
  ENSG00000091181_20 (sequence is synthesized)
cgtatctgaaataaaaacaacagcagggatagcagattacatgtgttttttaatttttatttattttgccaagcactatgctaaatacataatcttagtcctatcaaaaaacttgtttgg

SEQ ID NO: 98833 - DNA, 120 bp, Artificial Sequence
  ENSG00000091181_21 (sequence is synthesized)
aaagtttaggtaattggcttaactctgttctgcatggccaacaagtggcagggatggggctctaaccccagattaactgactctagcacttgatctctggacactctggcatggtgggac

SEQ ID NO: 98834 - DNA, 120 bp, Artificial Sequence
  ENSG00000091181_22 (sequence is synthesized)
cagaaacgtacccgttcactcgtgggtcttaaaatggtttcatatctctattgtgactaattttctctcggtctactgccttttcaatcaggaatagatttgccatgaagccagtgaagt

SEQ ID NO: 98835 - DNA, 120 bp, Artificial Sequence
  ENSG00000091181_23 (sequence is synthesized)
ttttaagtgtctaggcttctcattagcgccaactctcctagacctggtgcctgttttttttccaagttttgtttctacttctatccattttttaaattaaactttttattttgaaataat

SEQ ID NO: 98836 - DNA, 120 bp, Artificial Sequence
  ENSG00000091181_24 (sequence is synthesized)
tatcacactcacaagctgtgggaagaaataatagagatcctgtgtctctttcatccagttttcctcaagggtaacatcttacaaaactatagtacaatagtggaatagaatattggtgtt

SEQ ID NO: 98837 - DNA, 120 bp, Artificial Sequence
  ENSG00000091181_25 (sequence is synthesized)
actcaccacagaggccaggcacattgagcattggtcctgtgcctgacgctatgctagatgctggggttgcagccacgagcatagacacgacagacacggtcctcgccatcttctgttgag

SEQ ID NO: 98838 - DNA, 120 bp, Artificial Sequence
  ENSG00000091181_26 (sequence is synthesized)
caatcatgaaagggaccactgaatcaagaatgaactttctgaagagatgtttgctgccaaagacttcagaacaacttgttggtcaagtaatgccagatcaatcctagtctctcaagtttg

SEQ ID NO: 98839 - DNA, 120 bp, Artificial Sequence
  ENSG00000091181_27 (sequence is synthesized)
gaaaagtttctacaaggccattccatcaaatatcccaatatacacagaaattcttcttcctaacatcttcatatatgagtctgcatccagattggaggcctttgtggtgggtggtggact

SEQ ID NO: 98840 - DNA, 120 bp, Artificial Sequence
  ENSG00000091181_28 (sequence is synthesized)
gcaggtggaaccaagcacaggtgtgccctgggcagaggtgggcaagaggaaggaacccaaacagtgctgattccacatggcccttggtcaagaagctgaaggcctagaaaggaggtaaca

SEQ ID NO: 98841 - DNA, 120 bp, Artificial Sequence
  ENSG00000091181_29 (sequence is synthesized)
tgcccagaatccccacctggcacactctttaaatgctttctggaggtgttttagtcagttttgatccatcggtggggacacactgactaccatatatttccaggtttgtttgttttctta

SEQ ID NO: 98842 - DNA, 120 bp, Artificial Sequence
  ENSG00000091181_30 (sequence is synthesized)
actaacctgtaattatccactgtaactagcagagggttgaaccctgggtaataggcacagaaacatcttgaatcttgacaagcctgcactgtcttatagtaatctgtattactgtcccat

SEQ ID NO: 98843 - DNA, 120 bp, Artificial Sequence
  ENSG00000091181_31 (sequence is synthesized)
tttatagttgcagttactaaggttcagagaagttgataggaaatggcatagtgaggagttgaataccaggctcaggtaaaagtgaccccagaaatgtgcagaggagtgtcagggaaagct

SEQ ID NO: 98844 - DNA, 120 bp, Artificial Sequence
  ENSG00000091181_32 (sequence is synthesized)
gaggcctgcttaggggtgtggctgagaaggcaacacccatggaggtgctgcaatagttggcaaaatgtttaaaatgtttggtcactcaaatgattcataatctcaaacctgtttttgttt

SEQ ID NO: 98845 - DNA, 120 bp, Artificial Sequence
  ENSG00000091181_33 (sequence is synthesized)
ttttttttttttttttttgtggggtgggtggtggagacagtcttgttctgtctcccaggctagagtgtagtgatgtgatcttagctcactacaacctccctgtcctgggctcaagccatc

SEQ ID NO: 98846 - DNA, 120 bp, Artificial Sequence
  ENSG00000091181_34 (sequence is synthesized)
ccaagtagctgggactacaggtgcataacaccattcccagctcttttttgtatttttttttgtaaagctggggttttgccatgctgtctaggttcatctcgaactcctgggctcaagcga

SEQ ID NO: 98847 - DNA, 120 bp, Artificial Sequence
  ENSG00000091181_35 (sequence is synthesized)
tcctgggctcaagcgatacaccggcctcagccttccaaagtactgggattacaggcatgaaccaccattcctggccaggaaactgtatttgtaatgaacaccttaggtcagaatcagagg

SEQ ID NO: 98848 - DNA, 120 bp, Artificial Sequence
  ENSG00000091181_36 (sequence is synthesized)
cgcctggagggctccttaagacacagaggagtgggctccattcttagagtctctaactgaataggtctgggtgaggtctgaaaagctgcgtttctaacaagttctcaggtgatgctcatg

SEQ ID NO: 98849 - DNA, 120 bp, Artificial Sequence
  ENSG00000091181_37 (sequence is synthesized)
ctgctggtctccaggacacactcggagaactgctgctccaggagagtcttatgaataccaaaatttgaaaatcagccgctgaaggaagatgtgacagaaaagtcctgtccccagaaaact

SEQ ID NO: 98850 - DNA, 120 bp, Artificial Sequence
  ENSG00000091181_38 (sequence is synthesized)
gtccttttggggcggcttggagcaccctgtctgatctctttcaaaccacaacccagacagttggcattgtggaaactgcctctgcttaggaggcaggaacagaagcagggagctccccct

SEQ ID NO: 98851 - DNA, 120 bp, Artificial Sequence
  ENSG00000091181_39 (sequence is synthesized)
ccacaaatgtggccagctcttcagtgcttggtgtggtgcccacttcagactcctccctccactcagcagccatagatcacctgggctctgtggagctccttgccacacttccctgagctg

SEQ ID NO: 98852 - DNA, 120 bp, Artificial Sequence
  ENSG00000091181_40 (sequence is synthesized)
gtaccgttatctggcccttggtatatgtgtttcaggagcaacacaaagtagcccattggcctccttggtggattgggaactccttcctcccttcttgccctgtgcaactcatagtcattc

SEQ ID NO: 98853 - DNA, 120 bp, Artificial Sequence
  ENSG00000091181_41 (sequence is synthesized)
tttgggaacccgtaaccatcatcacttcctccatgaagccttcaaaagcagagttggttgatcccgcctctggattctcattctgggcctcatacccgtgttagagctactgcattgtag

SEQ ID NO: 98854 - DNA, 120 bp, Artificial Sequence
  ENSG00000091181_42 (sequence is synthesized)
aatataccattaacagctgggaggcctcccctctagactgcggcttccaggaggatggagcttgtgtgaaatacgtctttttatctgcagtgtctaggacagtatctgacttaagaaaat

SEQ ID NO: 98855 - DNA, 120 bp, Artificial Sequence
  ENSG00000091181_43 (sequence is synthesized)
ataaatgtttcttaaaccctctgtcagccctgatacggcaccttgtatataggttagactgaacagtatttggcagagatcctcaaggcctacaataatgacagggggaggaagctgggt

SEQ ID NO: 98856 - DNA, 120 bp, Artificial Sequence
  ENSG00000091181_44 (sequence is synthesized)
atctaatgagaatgcggttagttagaagcaaccaggagacacatgtgcctaacaactgggctactgcaacctggatgtttttgctgccaaagtgtctaaatggttatgtataaattgctg

SEQ ID NO: 98857 - DNA, 120 bp, Artificial Sequence
  ENSG00000091181_45 (sequence is synthesized)
tgtaagaggcatttcagaagtggctcactgtgagtggtctatactgttctcaccagccttgtcatagcaagtcaaagagtttgaaattcacttaacagtaaacaccatcagcagcaggtt

SEQ ID NO: 98858 - DNA, 120 bp, Artificial Sequence
  ENSG00000091181_46 (sequence is synthesized)
gatgtaaggtaaagtcatgatattggctcccatctcttgccatctctcactaggacgagtgtagagagtcacttttctcctagagcctccacagccacgggatcagaacaaacatgcttt

SEQ ID NO: 98859 - DNA, 120 bp, Artificial Sequence
  ENSG00000091181_47 (sequence is synthesized)
tccaagatatccgttccaatagggatttttagcccaatttctttccttggcatttggaattcactgcgtgcagcatgggggagtgctggggagactggagggtgaaggtcacatttgcca

SEQ ID NO: 98860 - DNA, 120 bp, Artificial Sequence
  ENSG00000091181_48 (sequence is synthesized)
acagcccgaccacctgagcctcattgaaatgcctcagacctcaagctattcatgcaggctggggaagaatccacgtgggcaaagaacatcctgattaaaaatccaaacgttttcatggtg

SEQ ID NO: 98861 - DNA, 120 bp, Artificial Sequence
  ENSG00000091181_49 (sequence is synthesized)
agacttctatgtgtcaggaccatctgctggtggaattaagaagcctgaggtgctaatttgttaaagaaaaagtagatatctggaagtgagaacagagaactgaaaacaatctctgatggc

SEQ ID NO: 98862 - DNA, 120 bp, Artificial Sequence
  ENSG00000091181_50 (sequence is synthesized)
acaagtaaaggtgaaaaacctaattagaataggacttggtgctagcctaaggactgtagctattcctgcttctacatccttcaaattgagtaccagggtgcaaattttttcaaaaccatt

SEQ ID NO: 98863 - DNA, 120 bp, Artificial Sequence
  ENSG00000091181_51 (sequence is synthesized)
ccttcctttggaattttgtattgtactataagacaatcatgcttatctcctgttttgtaggtaatagatgtgaatataaatatgtttcagaatgagaaatattaaacataaatgacagtg

SEQ ID NO: 98864 - DNA, 120 bp, Artificial Sequence
  ENSG00000091262_0 (sequence is synthesized)
cgctgggacccacgacgacagaaggcgccgatggccgcgcctgctgagccctgcgcggggcagggggtctggaaccagacagagcctgaacctgccgccaccagcctgctgagcctgtgc

SEQ ID NO: 98865 - DNA, 120 bp, Artificial Sequence
  ENSG00000091262_1 (sequence is synthesized)
ttcctgagaacagcaggggtctgggtaccccccatgtacctctgggtccttggtcccatctacctcctcttcatccaccaccatggccggggctacctccggatgtccccactcttcaaa

SEQ ID NO: 98866 - DNA, 120 bp, Artificial Sequence
  ENSG00000091262_2 (sequence is synthesized)
gccaagatggtgcttggattcgccctcatagtcctgtgtacctccagcgtggctgtcgctctttggaaaatccaacagggaacgcctgaggccccagaattcctcattcatcctactgtg

SEQ ID NO: 98867 - DNA, 120 bp, Artificial Sequence
  ENSG00000091262_3 (sequence is synthesized)
tggctcaccacgatgagcttcgcagtgttcctgattcacaccgagaggaaaaagggagtccagtcatctggagtgctgtttggttactggcttctctgctttgtcttgccagctaccaac

SEQ ID NO: 98868 - DNA, 120 bp, Artificial Sequence
  ENSG00000091262_4 (sequence is synthesized)
gctgcccagcaggcctccggagcgggcttccagagcgaccctgtccgccacctgtccacctacctatgcctgtctctggtggtggcacagtttgtgctgtcctgcctggcggatcaaccc

SEQ ID NO: 98869 - DNA, 120 bp, Artificial Sequence
  ENSG00000091262_5 (sequence is synthesized)
cccttcttccctgaagacccccagcagtctaacccctgtccagagactggggcagccttcccctccaaagccacgttctggtgggtttctggcctggtctggaggggatacaggaggcca

SEQ ID NO: 98870 - DNA, 120 bp, Artificial Sequence
  ENSG00000091262_6 (sequence is synthesized)
ctgagaccaaaagacctctggtcgcttgggagagaaaactcctcagaagaacttgtttcccggcttgaaaaggagtggatgaggaaccgcagtgcagcccggaggcacaacaaggcaata

SEQ ID NO: 98871 - DNA, 120 bp, Artificial Sequence
  ENSG00000091262_7 (sequence is synthesized)
gcatttaaaaggaaaggcggcagtggcatgaaggctccagagaccgagcccttcctacggcaagaagggagccagtggcgcccactgctgaaggccatctggcaggtgttccattctacc

SEQ ID NO: 98872 - DNA, 120 bp, Artificial Sequence
  ENSG00000091262_8 (sequence is synthesized)
ttcctcctggggaccctcagcctcatcatcagtgatgtcttcaggttcactgtccccaagctgctcagccttttcctggagtttattggtgatcccaagcctccagcctggaagggctac

SEQ ID NO: 98873 - DNA, 120 bp, Artificial Sequence
  ENSG00000091262_9 (sequence is synthesized)
ctcctcgccgtgctgatgttcctctcagcctgcctgcaaacgctgtttgagcagcagaacatgtacaggctcaaggtgctgcagatgaggttgcggtcggccatcactggcctggtgtac

SEQ ID NO: 98874 - DNA, 120 bp, Artificial Sequence
  ENSG00000091262_10 (sequence is synthesized)
agaaaggtcctggctctgtccagcggctccagaaaggccagtgcggtgggtgatgtggtcaatctggtgtccgtggacgtgcagcggctgaccgagagcgtcctctacctcaacgggctg

SEQ ID NO: 98875 - DNA, 120 bp, Artificial Sequence
  ENSG00000091262_11 (sequence is synthesized)
tggctgcctctcgtctggatcgtggtctgcttcgtctatctctggcagctcctggggccctccgccctcactgccatcgctgtcttcctgagcctcctccctctgaatttcttcatctcc

SEQ ID NO: 98876 - DNA, 120 bp, Artificial Sequence
  ENSG00000091262_12 (sequence is synthesized)
aagaaaaggaaccaccatcaggaggagcaaatgaggcagaaggactcacgggcacggctcaccagctctatcctcaggaactcgaagaccatcaagttccatggctgggagggagccttt

SEQ ID NO: 98877 - DNA, 120 bp, Artificial Sequence
  ENSG00000091262_13 (sequence is synthesized)
ctggacagagtcctgggcatccgaggccaggagctgggcgccttgcggacctccggcctcctcttctctgtgtcgctggtgtccttccaagtgtctacatttctggtcgcactggtggtg

SEQ ID NO: 98878 - DNA, 120 bp, Artificial Sequence
  ENSG00000091262_14 (sequence is synthesized)
tttgctgtccacactctggtggccgagaatgctatgaatgcagagaaagcctttgtgactctcacagttctcaacatcctcaacaaggcccaggctttcctgcccttctccatccactcc

SEQ ID NO: 98879 - DNA, 120 bp, Artificial Sequence
  ENSG00000091262_15 (sequence is synthesized)
ctcgtccaggcccgggtgtcctttgaccgtctggtcaccttcctctgcctggaagaagttgaccctggtgtcgtagactcaagttcctctggaagcgctgccgggaaggattgcatcacc

SEQ ID NO: 98880 - DNA, 120 bp, Artificial Sequence
  ENSG00000091262_16 (sequence is synthesized)
atacacagtgccaccttcgcctggtcccaggaaagccctccctgcctccacagaataaacctcacggtgccccagggctgtctgctggctgttgtcggtccagtgggggcagggaagtcc

SEQ ID NO: 98881 - DNA, 120 bp, Artificial Sequence
  ENSG00000091262_17 (sequence is synthesized)
tccctgctgtccgccctccttggggagctgtcaaaggtggaggggttcgtgagcatcgagggtgctgtggcctacgtgccccaggaggcctgggtgcagaacacctctgtggtagagaat

SEQ ID NO: 98882 - DNA, 120 bp, Artificial Sequence
  ENSG00000091262_18 (sequence is synthesized)
gtgtgcttcgggcaggagctggacccaccctggctggagagagtactagaagcctgtgccctgcagccagatgtggacagcttccctgagggaatccacacttcaattggggagcagggc

SEQ ID NO: 98883 - DNA, 120 bp, Artificial Sequence
  ENSG00000091262_19 (sequence is synthesized)
atgaatctctccggaggccagaagcagcggctgagcctggcccgggctgtatacagaaaggcagctgtgtacctgctggatgaccccctggcggccctggatgcccacgttggccagcat

SEQ ID NO: 98884 - DNA, 120 bp, Artificial Sequence
  ENSG00000091262_20 (sequence is synthesized)
gtcttcaaccaggtcattgggcctggtggactactccagggaacaacacggattctcgtgacgcacgcactccacatcctgccccaggctgattggatcatagtgctggcaaatggggcc

SEQ ID NO: 98885 - DNA, 120 bp, Artificial Sequence
  ENSG00000091262_21 (sequence is synthesized)
atcgcagagatgggttcctaccaggagcttctgcagaggaagggggccctcatgtgtcttctggatcaagccagacagccaggagatagaggagaaggagaaacagaacctgggaccagc

SEQ ID NO: 98886 - DNA, 120 bp, Artificial Sequence
  ENSG00000091262_22 (sequence is synthesized)
accaaggaccccagaggcacctctgcaggcaggaggcccgagcttagacgcgagaggtccatcaagtcagtccctgagaaggaccgtaccacttcagaagcccagacagaggttcctctg

SEQ ID NO: 98887 - DNA, 120 bp, Artificial Sequence
  ENSG00000091262_23 (sequence is synthesized)
ctgcctctacgcactcttcctcttcctctgccagcaagtggcctccttctgccggggctactggctgagcctgtgggcggacgaccctgcagtaggtgggcagcagacgcaggcagccct

SEQ ID NO: 98888 - DNA, 120 bp, Artificial Sequence
  ENSG00000091262_24 (sequence is synthesized)
gcgtggcgggatcttcgggctcctcggctgtctccaagccattgggctgtttgcctccatggctgcggtgctcctaggtggggcccgggcatccaggttgctcttccagaggctcctgtg

SEQ ID NO: 98889 - DNA, 120 bp, Artificial Sequence
  ENSG00000091262_25 (sequence is synthesized)
ggatgtggtgcgatctcccatcagcttctttgagcggacacccattggtcacctgctaaaccgcttctccaaggagacagacacggttgacgtggacattccagacaaactccggtccct

SEQ ID NO: 98890 - DNA, 120 bp, Artificial Sequence
  ENSG00000091262_26 (sequence is synthesized)
gctgatgtacgcctttggactcctggaggtcagcctggtggtggcagtggctaccccactggccactgtggccatcctgccactgtttctcctctacgctgggtttcagagcctgtatgt

SEQ ID NO: 98891 - DNA, 120 bp, Artificial Sequence
  ENSG00000091262_27 (sequence is synthesized)
ggttagctcatgccagctgagacgcttggagtcagccagctactcgtctgtctgctcccacatggctgagacgttccagggcagcacagtggtccgggcattccgaacccaggccccctt

SEQ ID NO: 98892 - DNA, 120 bp, Artificial Sequence
  ENSG00000091262_28 (sequence is synthesized)
tgtggctcagaacaatgctcgcgtagatgaaagccagaggatcagtttcccgcgactggtggctgacaggtggcttgcggccaatgtggagctcctggggaatggcctggtgtttgcagc

SEQ ID NO: 98893 - DNA, 120 bp, Artificial Sequence
  ENSG00000091262_29 (sequence is synthesized)
tgccacgtgtgctgtgctgagcaaagcccacctcagtgctggcctcgtgggcttctctgtctctgctgccctccaggtgacccagacactgcagtgggttgttcgcaactggacagacct

SEQ ID NO: 98894 - DNA, 120 bp, Artificial Sequence
  ENSG00000091262_30 (sequence is synthesized)
agagaacagcatcgtgtcagtggagcggatgcaggactatgcctggacgcccaaggaggctccctggaggctgcccacatgtgcagctcagcccccctggcctcagggcgggcagatcga

SEQ ID NO: 98895 - DNA, 120 bp, Artificial Sequence
  ENSG00000091262_31 (sequence is synthesized)
gttccgggactttgggctaagataccgacctgagctcccgctggctgtgcagggcgtgtccttcaagatccacgcaggagagaaggtgggcatcgttggcaggaccggggcagggaagtc

SEQ ID NO: 98896 - DNA, 120 bp, Artificial Sequence
  ENSG00000091262_32 (sequence is synthesized)
ctccctggccagtgggctgctgcggctccaggaggcagctgagggtgggatctggatcgacggggtccccattgcccacgtggggctgcacacactgcgctccaggatcagcatcatccc

SEQ ID NO: 98897 - DNA, 120 bp, Artificial Sequence
  ENSG00000091262_33 (sequence is synthesized)
ccaggaccccatcctgttccctggctctctgcggatgaacctcgacctgctgcaggagcactcggacgaggctatctgggcagccctggagacggtgcagctcaaagccttggtggccag

SEQ ID NO: 98898 - DNA, 120 bp, Artificial Sequence
  ENSG00000091262_34 (sequence is synthesized)
cctgcccggccagctgcagtacaagtgtgctgaccgaggcgaggacctgagcgtgggccagaaacagctcctgtgtctggcacgtgcccttctccggaagacccagatcctcatcctgga

SEQ ID NO: 98899 - DNA, 120 bp, Artificial Sequence
  ENSG00000091262_35 (sequence is synthesized)
cgaggctactgctgccgtggaccctggcacggagctgcagatgcaggccatgctcgggagctggtttgcacagtgcactgtgctgctcattgcccaccgcctgcgctccgtgatggactg

SEQ ID NO: 98900 - DNA, 120 bp, Artificial Sequence
  ENSG00000091262_36 (sequence is synthesized)
tgcccgggttctggtcatggacaaggggcaggtggcagagagcggcagcccggcccagctgctggcccagaagggcctgttttacagactggcccaggagtcaggcctggtctgagccag

SEQ ID NO: 98901 - DNA, 120 bp, Artificial Sequence
  ENSG00000091262_37 (sequence is synthesized)
gaccctcaaccgtaccccagttggaccagcccgcacagcctgcagtgctggagatggaagtgacccgtggtcatcgatagctccacacgatattgagtctagacctgtgtttgctctctg

SEQ ID NO: 98902 - DNA, 120 bp, Artificial Sequence
  ENSG00000091262_38 (sequence is synthesized)
ggaggaaaatggcagagaaagtggccaattatcacagagcatcagagccggaaggacctagcaatacacaggtctgcccgggcagggcccatctcgccctgtccaccctgcagccaatgt

SEQ ID NO: 98903 - DNA, 120 bp, Artificial Sequence
  ENSG00000091262_39 (sequence is synthesized)
caacagcgactctcagccccgctgtactctggactcacctgggggcctcaagcacatgcccaggctcccggctagacccttaaatcagaatctctgaggctgggaactgccatgctgtgt

SEQ ID NO: 98904 - DNA, 120 bp, Artificial Sequence
  ENSG00000091262_40 (sequence is synthesized)
gtactttttacaaattaacacttttattttgggataatcccagactcacatgcagttaaagaaacaataatatagagagattcgtgtacttggtaccccatttcacccaatggtaacatc

SEQ ID NO: 98905 - DNA, 120 bp, Artificial Sequence
  ENSG00000091262_41 (sequence is synthesized)
ttgcaaaactctaggataaagcatcacagccagggtgttgacattgacacaacaatcttgctcgatttcccgttttacctgtactcctgtgtgtgtgtgtgtttattttgtcccatgcag

SEQ ID NO: 98906 - DNA, 120 bp, Artificial Sequence
  ENSG00000091262_42 (sequence is synthesized)
ttttatcacacatgtaggctcatgaatccacaccagggtgaggatacggaatagccaccaccattttccgaccacacccatcactctcgctcctgcccccagtgaccatgctctgttctc

SEQ ID NO: 98907 - DNA, 88 bp, Artificial Sequence
  ENSG00000091262_43 (sequence is synthesized)
tctcctgcctcagcctcccgtgcagctgacttgtgtaatttttattagatacgaggtttcagcatattggccaggctggtcttgaact

SEQ ID NO: 98908 - DNA, 75 bp, Artificial Sequence
  ENSG00000091262_44 (sequence is synthesized)
taccgcacctggccgagtttggtgtataattttaaagctcccccataggattccaatgtgcggccaggactgaga

SEQ ID NO: 98909 - DNA, 120 bp, Artificial Sequence
  ENSG00000091262_45 (sequence is synthesized)
agctcccccataggattccaatgtgcggccaggactgagaactacagccctcgcatctcctgctgctcctcctcccccaccagagatgagctccaaggacacaaaaaccaggtgcccccc

SEQ ID NO: 98910 - DNA, 120 bp, Artificial Sequence
  ENSG00000091262_46 (sequence is synthesized)
tggggtgacccacatgtttccatcattaattaaacaaataatgttgaacccacaccatgtgtcagacactgaggatgcaatagtagcaagagagataaggatggagggtggataacagca

SEQ ID NO: 98911 - DNA, 120 bp, Artificial Sequence
  ENSG00000091262_47 (sequence is synthesized)
tgggagatggataacagaatggacacatggataagatggaggatgaatggaaggatggatgagggaaggatggactggatggatggatgggagaaaataaatgaatgaaaggattagtga

SEQ ID NO: 98912 - DNA, 120 bp, Artificial Sequence
  ENSG00000091262_48 (sequence is synthesized)
attgatggatgaatagggaagaagaaacgagagacggatagacagatgaatggatggatgaatggaatggggtggaagagagatggagggatgggattgaggatggatgatggatggatg

SEQ ID NO: 98913 - DNA, 120 bp, Artificial Sequence
  ENSG00000091262_49 (sequence is synthesized)
gatggcaggatggggtggaaaaaaggataagggatggatggacggacagacagatggatgggatggggtagaaaaaaggatgagagatgatggagaggtgtaaatagaaggatgaggaaa

SEQ ID NO: 98914 - DNA, 120 bp, Artificial Sequence
  ENSG00000091262_50 (sequence is synthesized)
gatggaggaactaaaggaagggtggggagaaagatgggagagagatatcaggataagggaaagatagagaagaacacagatggaagactggatggattgatgggtggatatatagaaagg

SEQ ID NO: 98915 - DNA, 120 bp, Artificial Sequence
  ENSG00000091262_51 (sequence is synthesized)
tagacagatggaaagagagatggaaggtagacctttacacaatgagggatggatagacagatctcgggtacagcagaaagatctccccaataaatgcccacaaaccctctggtcagagca

SEQ ID NO: 98916 - DNA, 120 bp, Artificial Sequence
  ENSG00000091262_52 (sequence is synthesized)
tgtagaagggaatctgttaatcaaacagagcaatattagaaaggctacagaggtcaactcagtggaacacggttctcccaaacagattttgtaattccgaaaatccacgcatgcgcaaac

SEQ ID NO: 98917 - DNA, 120 bp, Artificial Sequence
  ENSG00000091262_53 (sequence is synthesized)
atacgcatacactcccatgttcctggacagtttatagctaccataacctggcattttccaaaacataccatgtagactcttggatacacaaggtaattttagagccacattaggatgaac

SEQ ID NO: 98918 - DNA, 120 bp, Artificial Sequence
  ENSG00000091262_54 (sequence is synthesized)
cttttaaaaagttatgcatttatttttatgttcccccactggctgtattataggacaatttttatatgtgatatgtatttaccttagtgtgttaaataaacactggcattccaagtgtga

SEQ ID NO: 98919 - DNA, 85 bp, Artificial Sequence
  ENSG00000091262_55 (sequence is synthesized)
atcaccatacacagtgccaccttcgcctggtcccaggaaagccctccctgcctccacagagtcttgctctgttgcacaggctggc

SEQ ID NO: 98920 - DNA, 120 bp, Artificial Sequence
  ENSG00000091262_56 (sequence is synthesized)
gatggccagcaggaaaggacagcatccaatacggcagggtaaccaccagcttcacccacccctccccacccactgctgccacctccaggggcccaagtcttcccaccaaatgtagcactt

SEQ ID NO: 98921 - DNA, 120 bp, Artificial Sequence
  ENSG00000091262_57 (sequence is synthesized)
ggcagtgatactcacctttcttgagcacctactatgtgccagtagcattctagatgttcattttcttaatcctcacaaccaccctaaaaaatagatatgataggtctatttcagacataa

SEQ ID NO: 98922 - DNA, 120 bp, Artificial Sequence
  ENSG00000091317_0 (sequence is synthesized)
gagaaggcccaggaagtgacggccgcctcccggctaccggggacttctggagtccgagaagtcaacggcgcggttgctgcggccgccgcgctccccggcccgaggcgatggagaacggag

SEQ ID NO: 98923 - DNA, 120 bp, Artificial Sequence
  ENSG00000091317_1 (sequence is synthesized)
cggtgtacagccccactacggaggaggacccgggccccgccagaggcccccggagcggcctcgctgcctactttttcatgggccggctcccattgctccggcgcgttctcaagggcttgc

SEQ ID NO: 98924 - DNA, 120 bp, Artificial Sequence
  ENSG00000091317_2 (sequence is synthesized)
agctgttgctgtctctgctggccttcatctgtgaagaagttgtatcacaatgtactttatgtggaggactttatttttttgagtttgtaagctgcagtgcctttcttctgagtctcctta

SEQ ID NO: 98925 - DNA, 120 bp, Artificial Sequence
  ENSG00000091317_3 (sequence is synthesized)
tactgattgtgtattgcactccattttatgagagagttgataccacaaaagtaaaatcatcggatttttatattactttgggaacaggatgtgtgtttttgttggcatccatcatttttg

SEQ ID NO: 98926 - DNA, 120 bp, Artificial Sequence
  ENSG00000091317_4 (sequence is synthesized)
tttccacacatgacaggacttcagctgagattgctgcaattgtgtttggatttatagcaagttttatgttcctacttgactttatcactatgctgtatgaaaaacgacaggagtcccagc

SEQ ID NO: 98927 - DNA, 120 bp, Artificial Sequence
  ENSG00000091317_5 (sequence is synthesized)
tgagaaaacctgaaaataccactagggctgaagccctcactgagccacttaatgcctaaagactctggggagcagatgttacctaaggtagtgaccctgcattgtggtgcctgagccctg

SEQ ID NO: 98928 - DNA, 120 bp, Artificial Sequence
  ENSG00000091317_6 (sequence is synthesized)
gcagaagctcttgtaaaatttgttaattgtttaaaccacttcttttggagagcaaggggaaggtcaagaaggcagttttatcaatattgtgtcagtcaccacaaagtaggccagataagt

SEQ ID NO: 98929 - DNA, 120 bp, Artificial Sequence
  ENSG00000091317_7 (sequence is synthesized)
taaaaaaaatttttttttaaataataattgaaacttatctcaaatggagattttggtgggaggaggagaaaacaattgtttttaaatcacacagctcaacggttgataaatgattctgtc

SEQ ID NO: 98930 - DNA, 120 bp, Artificial Sequence
  ENSG00000091317_8 (sequence is synthesized)
attctgttacaggtcattcttttactaggcttagcttccaaattatgctttatagctgtataaacatcgtgattatattcatctacttagaaattgttttatttttaaattaatttgctt

SEQ ID NO: 98931 - DNA, 120 bp, Artificial Sequence
  ENSG00000091317_9 (sequence is synthesized)
agctgtttgttttgatgcttagattatgttctgttaatgggaatttaacatatttaagaaaccaatatttaaaatgttggtctaggtttttttccttaacatatattaccaggctttact

SEQ ID NO: 98932 - DNA, 120 bp, Artificial Sequence
  ENSG00000091317_10 (sequence is synthesized)
gtatttcactcagccttaaatgttataatatttttggataacggttattaattctttgagaccttcgtatagcctataaaatgtatgggagatgttggtattttatgtgtataaaagcaa

SEQ ID NO: 98933 - DNA, 120 bp, Artificial Sequence
  ENSG00000091317_11 (sequence is synthesized)
caatatcagcaacttcgtgtttatactgcaccttggttgttgatgtcaagtaaaaaaaagattgttttgtaacacataaaaaaatggaagaaactgataccacacctaaggaccaaagat

SEQ ID NO: 98934 - DNA, 120 bp, Artificial Sequence
  ENSG00000091317_12 (sequence is synthesized)
aagaaagactttttgcccaagacagtgaaagtaattataaaaacaagctttgaccacttaccaagtatctgaagagatgagttcatactatgatttagaaagtggttcaattcccctgtt

SEQ ID NO: 98935 - DNA, 120 bp, Artificial Sequence
  ENSG00000091317_13 (sequence is synthesized)
caatctgttttttttaggacaccagcctttggtttttcatctgttcgagatgcctcttctctgtctccttatcagatagaaatggagtcatgtgctgctgcttcatctagcagaggttgg

SEQ ID NO: 98936 - DNA, 120 bp, Artificial Sequence
  ENSG00000091317_14 (sequence is synthesized)
cctctggctctgacactttttgtcagttgtctttaggtggtcctgaatcttgggcccttttgattgtgaatactgtgtagcaggatcttgagagtccttgttcttacataggcattgctc

SEQ ID NO: 98937 - DNA, 120 bp, Artificial Sequence
  ENSG00000091317_15 (sequence is synthesized)
tagtttgtctttggcaaaaaaaaaaaaaaaaaaaagtaaatatccagggaaccctgcccagactaatactgttggtggcataagagaatcaagccattctcaagagataacttcataacc

SEQ ID NO: 98938 - DNA, 120 bp, Artificial Sequence
  ENSG00000091317_16 (sequence is synthesized)
agaattgtctgttggctagcagctgtcacagataggcagggcacttgggatatgacctttctgtccaggtgattcacagactagacctttcttatcctcctcctagagttttgacttggg

SEQ ID NO: 98939 - DNA, 120 bp, Artificial Sequence
  ENSG00000091317_17 (sequence is synthesized)
actctagtgttaagatgatgagcccgtgcatcaggtccttctgcactttggtggaagtctcccagggtaggtttcctatttgaaacagtggaatcatgtttccagtgataaagtttaatg

SEQ ID NO: 98940 - DNA, 120 bp, Artificial Sequence
  ENSG00000091317_18 (sequence is synthesized)
acctcatccttttttttttttctcatctgccatttgtgtgtcttagatgggttttaattgcatgaatgtggctaatgtggttctcagaaattggtcagtatggcccaacatagcttctgc

SEQ ID NO: 98941 - DNA, 120 bp, Artificial Sequence
  ENSG00000091317_19 (sequence is synthesized)
tctgtcttactgactcaatacctttaggatttgtatcagagtttggatactagtgttagtggtggtgtcaccactacttaattgggagataatgaaaccaatcatggatgctgtttttat

SEQ ID NO: 98942 - DNA, 120 bp, Artificial Sequence
  ENSG00000091317_20 (sequence is synthesized)
tgggcatgtcatctaagagaggagaaatagctgggttttgggtctaattatgaataaggactgattcagaaaacgagtttatggtaggtagactaaagtttcacatcagactgtaccatt

SEQ ID NO: 98943 - DNA, 120 bp, Artificial Sequence
  ENSG00000091317_21 (sequence is synthesized)
gtgatttagacctatctaaaattcagagcatatcatctgggctacctcagggtcaccacccatgtattgggcttagtcaggattgacagatacattctcagctggcctgtcatataaaac

SEQ ID NO: 98944 - DNA, 120 bp, Artificial Sequence
  ENSG00000091317_22 (sequence is synthesized)
atactgtcattgagcttaagctccgcttgttctgaggtttcacctccatgtgtttcattggtgcaaaagtggatctcttagttggtcacttaattctttctttttcagaaagatagtatg

SEQ ID NO: 98945 - DNA, 120 bp, Artificial Sequence
  ENSG00000091317_23 (sequence is synthesized)
ttcactggtatatttggtcactcttagaaccttccttcacattgttttttatgggacccatgaatggttagcctttcttttctattgtagaaggaaataaataggagtaaaaagaccatt

SEQ ID NO: 98946 - DNA, 120 bp, Artificial Sequence
  ENSG00000091317_24 (sequence is synthesized)
gtagtaaataagttcaaggggaacttgggaccagaaaccactgttatgtacaaaaaaatggcaaattcaataaactcaaatttaaaataatttttaaattaacagttatgataaatttta

SEQ ID NO: 98947 - DNA, 120 bp, Artificial Sequence
  ENSG00000091317_25 (sequence is synthesized)
tattttatacaaatagattgcttagaatggttctcaagaattataagagaaatgaactcacagtacaaaaattttataattactatacttgtgttttgtttgggggctgggaaatgtatt

SEQ ID NO: 98948 - DNA, 120 bp, Artificial Sequence
  ENSG00000091317_26 (sequence is synthesized)
tttacattgtagccaatcattttatatttgtcaatttaaatcttatgggtcttttttttttatctctcttgatgtcagattttatagtctttttaaataaatccatttaattaaaacgtt

SEQ ID NO: 98949 - DNA, 120 bp, Artificial Sequence
  ENSG00000091317_27 (sequence is synthesized)
cacatgacaggacttcagctgagattgctgcaattgtaagtaccttgtatttttaacattgcttatttttgtttccttagaaatatggaatttggagagtacttgacaagttatacagca

SEQ ID NO: 98950 - DNA, 120 bp, Artificial Sequence
  ENSG00000091317_28 (sequence is synthesized)
tgttagagttgtttttcttataacttactttttagtgtaattttgaatagaagacctacaagcaaatcaatatgatagcctttaaaacctagagcctatagaatttgactgaattttgtt

SEQ ID NO: 98951 - DNA, 120 bp, Artificial Sequence
  ENSG00000091317_29 (sequence is synthesized)
tttttttttttttttctttttttggactggataataaaaaatgtcccagttagctgggactacaggctcatgccacctctcctggcataggggattgttgttattaaaagtttatcttgt

SEQ ID NO: 98952 - DNA, 120 bp, Artificial Sequence
  ENSG00000091317_30 (sequence is synthesized)
aatgtgttctctcaataatcccagcccagtgtggatactgtttttttacagggtatttattgaatgccaggcttattgaaaagttagaagtttgggtatgtaagtttgggttgtatcaag

SEQ ID NO: 98953 - DNA, 120 bp, Artificial Sequence
  ENSG00000091317_31 (sequence is synthesized)
aaaaacaagtaagtagccagagctttttaaagttaaaaatgaaaaagttcatttccatgaatctaactgtattgtattccttttgtgttttgtatgtatgcataggatttttatattact

SEQ ID NO: 98954 - DNA, 120 bp, Artificial Sequence
  ENSG00000091409_0 (sequence is synthesized)
ttgataaaacgcctgcgagtctccagagaacaacgggctcattcagcggtcgcgagctgcccgcgagggggagcggccggacggagagcgcgacccgtcccgggggtggggccgggcgca

SEQ ID NO: 98955 - DNA, 120 bp, Artificial Sequence
  ENSG00000091409_1 (sequence is synthesized)
cgcagcggcgagaggaggcgaaggtggctgcggtagcagcagcgcggcagcctcggacccagcccggagcgcagggcggccgctgcaggtccccgctcccctccccgtgcgtccgcccat

SEQ ID NO: 98956 - DNA, 120 bp, Artificial Sequence
  ENSG00000091409_2 (sequence is synthesized)
gccgccgggcagctgtgcttgctctacctgtcggcggggctcctgtcccggctcggcgcagccttcaacttggacactcgggaggacaacgtgatccggaaatatggagaccccgggagc

SEQ ID NO: 98957 - DNA, 120 bp, Artificial Sequence
  ENSG00000091409_3 (sequence is synthesized)
ctcttcggcttctcgctggccatgcactggcaactgcagcccgaggacaagcggctgttgctcgtgggggccccgcgggcagaagcgcttccactgcagagagccaacagaacgggaggg

SEQ ID NO: 98958 - DNA, 120 bp, Artificial Sequence
  ENSG00000091409_4 (sequence is synthesized)
ctgtacagctgcgacatcaccgcccgggggccatgcacgcggatcgagtttgataacgatgctgaccccacgtcagaaagcaaggaagatcagtggatgggggtcaccgtccagagccaa

SEQ ID NO: 98959 - DNA, 120 bp, Artificial Sequence
  ENSG00000091409_5 (sequence is synthesized)
ggtccagggggcaaggtcgtgacatgtgctcaccgatatgaaaaaaggcagcatgttaatacgaagcaggaatcccgagacatctttgggcggtgttatgtcctgagtcagaatctcagg

SEQ ID NO: 98960 - DNA, 120 bp, Artificial Sequence
  ENSG00000091409_6 (sequence is synthesized)
attgaagacgatatggatgggggagattggagcttttgtgatgggcgattgagaggccatgagaaatttggctcttgccagcaaggtgtagcagctacttttactaaagactttcattac

SEQ ID NO: 98961 - DNA, 120 bp, Artificial Sequence
  ENSG00000091409_7 (sequence is synthesized)
attgtatttggagccccgggtacttataactggaaagggattgttcgtgtagagcaaaagaataacactttttttgacatgaacatctttgaagatgggccttatgaagttggtggagag

SEQ ID NO: 98962 - DNA, 120 bp, Artificial Sequence
  ENSG00000091409_8 (sequence is synthesized)
actgagcatgatgaaagtctcgttcctgttcctgctaacagttacttaggtttttctttggactcagggaaaggtattgtttctaaagatgagatcacttttgtatctggtgctcccaga

SEQ ID NO: 98963 - DNA, 120 bp, Artificial Sequence
  ENSG00000091409_9 (sequence is synthesized)
gccaatcacagtggagccgtggttttgctgaagagagacatgaagtctgcacatctcctccctgagcacatattcgatggagaaggtctggcctcttcatttggctatgatgtggcggtg

SEQ ID NO: 98964 - DNA, 120 bp, Artificial Sequence
  ENSG00000091409_10 (sequence is synthesized)
gtggacctcaacaaggatgggtggcaagatatagttattggagccccacagtattttgatagagatggagaagttggaggtgcagtgtatgtctacatgaaccagcaaggcagatggaat

SEQ ID NO: 98965 - DNA, 120 bp, Artificial Sequence
  ENSG00000091409_11 (sequence is synthesized)
aatgtgaagccaattcgtcttaatggaaccaaagattctatgtttggcattgcagtaaaaaatattggagatattaatcaagatggctacccagatattgcagttggagctccgtatgat

SEQ ID NO: 98966 - DNA, 120 bp, Artificial Sequence
  ENSG00000091409_12 (sequence is synthesized)
gacttgggaaaggtttttatctatcatggatctgcaaatggaataaataccaaaccaacacaggttctcaagggtatatcaccttattttggatattcaattgctggaaacatggacctt

SEQ ID NO: 98967 - DNA, 120 bp, Artificial Sequence
  ENSG00000091409_13 (sequence is synthesized)
gatcgaaattcctaccctgatgttgctgttggttccctctcagattcagtaactattttcagatcccggcctgtgattaatattcagaaaaccatcacagtaactcctaacagaattgac

SEQ ID NO: 98968 - DNA, 120 bp, Artificial Sequence
  ENSG00000091409_14 (sequence is synthesized)
ctccgccagaaaacagcgtgtggggcgcctagtgggatatgcctccaggttaaatcctgttttgaatatactgctaaccccgctggttataatccttcaatatcaattgtgggcacactt

SEQ ID NO: 98969 - DNA, 120 bp, Artificial Sequence
  ENSG00000091409_15 (sequence is synthesized)
gaagctgaaaaagaaagaagaaaatctgggctatcctcaagagttcagtttcgaaaccaaggttctgagcccaaatatactcaagaactaactctgaagaggcagaaacagaaagtgtgc

SEQ ID NO: 98970 - DNA, 120 bp, Artificial Sequence
  ENSG00000091409_16 (sequence is synthesized)
atggaggaaaccctgtggctacaggataatatcagagataaactgcgtcccattcccataactgcctcagtggagatccaagagccaagctctcgtaggcgagtgaattcacttccagaa

SEQ ID NO: 98971 - DNA, 120 bp, Artificial Sequence
  ENSG00000091409_17 (sequence is synthesized)
gttcttccaattctgaattcagatgaacccaagacagctcatattgatgttcacttcttaaaagagggatgtggagacgacaatgtatgtaacagcaaccttaaactagaatataaattt

SEQ ID NO: 98972 - DNA, 120 bp, Artificial Sequence
  ENSG00000091409_18 (sequence is synthesized)
tgcacccgagaaggaaatcaagacaaattttcttatttaccaattcaaaaaggtgtaccagaactagttctaaaagatcagaaggatattgctttagaaataacagtgacaaacagccct

SEQ ID NO: 98973 - DNA, 120 bp, Artificial Sequence
  ENSG00000091409_19 (sequence is synthesized)
tccaacccaaggaatcccacaaaagatggcgatgacgcccatgaggctaaactgattgcaacgtttccagacactttaacctattctgcatatagagaactgagggctttccctgagaaa

SEQ ID NO: 98974 - DNA, 120 bp, Artificial Sequence
  ENSG00000091409_20 (sequence is synthesized)
cagttgagttgtgttgccaaccagaatggctcgcaagctgactgtgagctcggaaatccttttaaaagaaattcaaatgtcactttttatttggttttaagtacaactgaagtcaccttt

SEQ ID NO: 98975 - DNA, 120 bp, Artificial Sequence
  ENSG00000091409_21 (sequence is synthesized)
gacaccccagatctggatattaatctgaagttagaaacaacaagcaatcaagataatttggctccaattacagctaaagcaaaagtggttattgaactgcttttatcggtctcgggagtt

SEQ ID NO: 98976 - DNA, 120 bp, Artificial Sequence
  ENSG00000091409_22 (sequence is synthesized)
gctaaaccttcccaggtgtattttggaggtacagttgttggcgagcaagctatgaaatctgaagatgaagtgggaagtttaatagagtatgaattcagggtaataaacttaggtaaacct

SEQ ID NO: 98977 - DNA, 120 bp, Artificial Sequence
  ENSG00000091409_23 (sequence is synthesized)
attggaaaaggtaacttgtgagccacaaaaggagataaactccctgaacctaacggagtctcacaactcaagaaagaaacgggaaattactgaaaaacagatagatgataacagaaaatt

SEQ ID NO: 98978 - DNA, 120 bp, Artificial Sequence
  ENSG00000091409_24 (sequence is synthesized)
ttctttatttgctgaaagaaaataccagactcttaactgtagcgtgaacgtgaactgtgtgaacatcagatgcccgctgcgggggctggacagcaaggcgtctcttattttgcgctcgag

SEQ ID NO: 98979 - DNA, 120 bp, Artificial Sequence
  ENSG00000091409_25 (sequence is synthesized)
gttatggaacagcacatttctagaggaatattccaaactgaactacttggacattctcatgcgagccttcattgatgtgactgctgctgccgaaaatatcaggctgccaaatgcaggcac

SEQ ID NO: 98980 - DNA, 120 bp, Artificial Sequence
  ENSG00000091409_26 (sequence is synthesized)
tcaggttcgagtgactgtgtttccctcaaagactgtagctcagtattcgggagtaccttggtggatcatcctagtggctattctcgctgggatcttgatgcttgctttattagtgtttat

SEQ ID NO: 98981 - DNA, 120 bp, Artificial Sequence
  ENSG00000091409_27 (sequence is synthesized)
actatggaagtgtggtttcttcaagagaaataagaaagatcattatgatgccacatatcacaaggctgagatccatgctcagccatctgataaagagaggcttacttctgatgcatagta

SEQ ID NO: 98982 - DNA, 120 bp, Artificial Sequence
  ENSG00000091409_28 (sequence is synthesized)
ttgatctacttctgtaattgtgtggattctttaaacgctctaggtacgatgacagtgttccccgataccatgctgtaaggatccggaaagaagagcgagagatcaaagatgaaaagtata

SEQ ID NO: 98983 - DNA, 120 bp, Artificial Sequence
  ENSG00000091409_29 (sequence is synthesized)
ttgataaccttgaaaaaaaacagtggatcacaaagtggaacgaaaatgaaagctactcatagcgggggcctaaaaaaaaaaagcttcacagtacccaaactgctttttccaactcagaaa

SEQ ID NO: 98984 - DNA, 120 bp, Artificial Sequence
  ENSG00000091409_30 (sequence is synthesized)
ttcaatttggatttaaaagcctgctcaatccctgaggactgatttcagagtgactacacacagtacgaacctacagttttaactgtggatattgttacgtagcctaaggctcctgttttg

SEQ ID NO: 98985 - DNA, 120 bp, Artificial Sequence
  ENSG00000091409_31 (sequence is synthesized)
cacagccaaatttaaaactgttggaatggatttttctttaactgccgtaatttaactttctgggttgcctttatttttggcgtggctgacttacatcatgtgttggggaagggcctgccc

SEQ ID NO: 98986 - DNA, 120 bp, Artificial Sequence
  ENSG00000091409_32 (sequence is synthesized)
agttgcactcaggtgacatcctccagatagtgtagctgaggaggcacctacactcacctgcactaacagagtggccgtcctaacctcgggcctgctgcgcagacgtccatcacgttagct

SEQ ID NO: 98987 - DNA, 120 bp, Artificial Sequence
  ENSG00000091409_33 (sequence is synthesized)
gtcccacatcacaagactatgccattggggtagttgtgtttcaacggaaagtgctgtcttaaactaaatgtgcaatagaaggtgatgttgccatcctaccgtcttttcctgtttcctagc

SEQ ID NO: 98988 - DNA, 120 bp, Artificial Sequence
  ENSG00000091409_34 (sequence is synthesized)
tgtgtgaatacctgctcacgtcaaatgcatacaagtttcattctccctttcactaaaacacacaggtgcaacagacttgaatgctagttatacttatttgtatatggtatttattttttc

SEQ ID NO: 98989 - DNA, 120 bp, Artificial Sequence
  ENSG00000091409_35 (sequence is synthesized)
ttttctttacaaaccattttgttattgactaacaggccaaagagtctccagtttacccttcaggttggtttaatcaatcagaattagagcatgggaggtcatcactttgacctaaattat

SEQ ID NO: 98990 - DNA, 120 bp, Artificial Sequence
  ENSG00000091409_36 (sequence is synthesized)
ttactgcaaaaagaaaatctttataaatgtaccagagagagttgttttaataacttatctataaactataacctctccttcatgacagcctccaccccacaacccaaaaggtttaagaaa

SEQ ID NO: 98991 - DNA, 120 bp, Artificial Sequence
  ENSG00000091409_37 (sequence is synthesized)
tagaattataactgtaaagatgtttatttcaggcattggatattttttactttagaagcctgcataatgtttctggatttcatactgtaacattcaggaattcttggagaaaatgggttt

SEQ ID NO: 98992 - DNA, 120 bp, Artificial Sequence
  ENSG00000091409_38 (sequence is synthesized)
attcactgaactctagtgcggtttactcactgctgcaaatactgtatattcaggacttgaaagaaatggtgaatgcctatggtggatccaaactgatccagtataagactactgaatctg

SEQ ID NO: 98993 - DNA, 120 bp, Artificial Sequence
  ENSG00000091409_39 (sequence is synthesized)
ctaccaaaacagttaatcagtgagtcgatgttctattttttgttttgtttcctcccctatctgtattcccaaaaattactttggggctaatttaacaagaactttaaattgtgttttaat

SEQ ID NO: 98994 - DNA, 120 bp, Artificial Sequence
  ENSG00000091409_40 (sequence is synthesized)
tgtaaaaatggcagggggtggaattattactctatacattcaacagagactgaatagatatgaaagctgattttttttaattaccatgcttcacaatgttaagttatatggggagcaaca

SEQ ID NO: 98995 - DNA, 120 bp, Artificial Sequence
  ENSG00000091409_41 (sequence is synthesized)
gcaaacaggtgctaatttgttttggatatagtataagcagtgtctgtgttttgaaagaatagaacacagtttgtagtgccactgttgttttgggggggcttttttcttttcggaaatctt

SEQ ID NO: 98996 - DNA, 120 bp, Artificial Sequence
  ENSG00000091409_42 (sequence is synthesized)
aaaccttaagatactaaggacgttgttttggttgtactttggaattcttagtcacaaaatatattttgtttacaaaaatttctgtaaaacaggttataacagtgtttaaagtctcagttt

SEQ ID NO: 98997 - DNA, 120 bp, Artificial Sequence
  ENSG00000091409_43 (sequence is synthesized)
cttgcttggggaacttgtgtccctaatgtgtttagattgctagattgctaaggagctgatactttgacagtgtttttagacctgtgttactaaaaaaaagatgaatgtcctgaaaagggt

SEQ ID NO: 98998 - DNA, 120 bp, Artificial Sequence
  ENSG00000091409_44 (sequence is synthesized)
gttgggagggtggttcaacaaagaaacaaagatgttatggtgtttagatttatggttgttaaaaatgtcatctcaagtcaagtcactggtctgtttgcatttgatacatttttgtactaa

SEQ ID NO: 98999 - DNA, 120 bp, Artificial Sequence
  ENSG00000091409_45 (sequence is synthesized)
ctagcattgtaaaattatttcatgattagaaattacctgtggatatttgtataaaagtgtgaaataaattttttataaaagtgttcattgtttcgtaacacagcattgtatatgtgaagc

SEQ ID NO: 99000 - DNA, 120 bp, Artificial Sequence
  ENSG00000091409_46 (sequence is synthesized)
tgccaaagcaatgggattcggggtttttttctgttttcgctctatgtaggtgatcctcaagtctttcattttccttctttatgattaaaagaaacctacaggtatttaacaacctacaaa

SEQ ID NO: 99001 - DNA, 120 bp, Artificial Sequence
  ENSG00000091409_47 (sequence is synthesized)
aaggtcagagtgggaatgaattacttagtcctatgagtaaatcaataaacttgaatttagagtgataatacttgctggttttacacttacttctgtgcctttggcaggagagaggcaaat

SEQ ID NO: 99002 - DNA, 120 bp, Artificial Sequence
  ENSG00000091409_48 (sequence is synthesized)
tgattatgtgaatctggcactgtttgggaggatatgctcaagaggcttgtatggtaatgacaaagaattacataaattggaactattttggatataatttttttcaggagtctcacaact

SEQ ID NO: 99003 - DNA, 120 bp, Artificial Sequence
  ENSG00000091409_49 (sequence is synthesized)
taaatgcaaattagagaaactaacttgttaggggaaaatcattactgttcttaggaaagtggcatattctggcaggttgactttctctttggttgtcacaatttctcttttctagttggg

SEQ ID NO: 99004 - DNA, 120 bp, Artificial Sequence
  ENSG00000091409_50 (sequence is synthesized)
taactgagggaggctgaggcatttttgctggttaatgaccattatagtacataaggcagagtcattcagtgcttgctgaggcaaatggtattttctgatgtttcatcatgacccagtatg

SEQ ID NO: 99005 - DNA, 120 bp, Artificial Sequence
  ENSG00000091409_51 (sequence is synthesized)
aattctgtccacagagggcggcgcagtggggctgcttcgccgcgagctcgcctccggggctcccacgtcgtggcttccgggcaggtaccgggcagctggagacgccagagccggcgggtt

SEQ ID NO: 99006 - DNA, 120 bp, Artificial Sequence
  ENSG00000091409_52 (sequence is synthesized)
gtatttggagccccgggtacttataactggaaaggcctgctgtttttgaccagcgtttcctatacagatcctgatcagtttgtttataaaacacggcctccccgggagcagcctgacaca

SEQ ID NO: 99007 - DNA, 120 bp, Artificial Sequence
  ENSG00000091409_53 (sequence is synthesized)
aagatgaggacatgcttaatcatcctctttagaattaacctctgtattgaccattttattcatatgtaattttttaaaaacaaggtttatagacaagaatgggctactttcttccatctg

SEQ ID NO: 99008 - DNA, 80 bp, Artificial Sequence
  ENSG00000091428_0 (sequence is synthesized)
gagcggggtccgcgcggcggacgaggcgggggcggaggcgcaggcagagcgagcgcgggaggtcgccgcagccagggaca

SEQ ID NO: 99009 - DNA, 120 bp, Artificial Sequence
  ENSG00000091428_1 (sequence is synthesized)
ccgcgcgccgccgctcaacatggtcgctgcgcacgctgcccattcttcctcctctgccgagtggatcgcctgcctggataaaagaccactggagcgatccagcgaagatgtggatataat

SEQ ID NO: 99010 - DNA, 120 bp, Artificial Sequence
  ENSG00000091428_2 (sequence is synthesized)
cttcactcgactgaaagaagttaaagcttttgagaaatttcacccaaatctccttcatcagatttgcttatgtggttattatgagaatctggaaaagggaataacattatttcgccaggg

SEQ ID NO: 99011 - DNA, 120 bp, Artificial Sequence
  ENSG00000091428_3 (sequence is synthesized)
tgatattggaacaaactggtatgctgtcctggcagggtctttggatgttaaagtatctgagaccagcagtcaccaggatgctgtgaccatctgtaccctgggaattgggacggcctttgg

SEQ ID NO: 99012 - DNA, 120 bp, Artificial Sequence
  ENSG00000091428_4 (sequence is synthesized)
agagtccattctggacaacacaccccgccatgcaaccatcgttaccagggagagcagtgaactgctccgcatcgagcagaaggacttcaaggcactatgggagaaatatcgacagtatat

SEQ ID NO: 99013 - DNA, 120 bp, Artificial Sequence
  ENSG00000091428_5 (sequence is synthesized)
ggcaggacttctggctcctccttatggtgttatggaaacgggctctaacaatgacaggattcctgacaaggagaacacacctctcattgaacctcacgttcctcttcgtcctgctaacac

SEQ ID NO: 99014 - DNA, 120 bp, Artificial Sequence
  ENSG00000091428_6 (sequence is synthesized)
cattaccaaggtcccttcagagaagatcctcagagctggaaaaattttacgaaatgccattctctctcgagcacctcacatgataagagatagaaaataccacctaaagacatacagaca

SEQ ID NO: 99015 - DNA, 120 bp, Artificial Sequence
  ENSG00000091428_7 (sequence is synthesized)
atgctgtgtgggaactgaactggtggactggatgatgcagcagacaccatgtgttcactcccggactcaagctgttggcatgtggcaagtcctgttagaagatggtgttctcaaccacgt

SEQ ID NO: 99016 - DNA, 120 bp, Artificial Sequence
  ENSG00000091428_8 (sequence is synthesized)
ggaccaggagcaccatttccaagacaaatatttattctatcgatttctggatgatgagcacgaggatgcccctttgcctactgaggaggagaagaaggagtgtgatgaggagctccagga

SEQ ID NO: 99017 - DNA, 120 bp, Artificial Sequence
  ENSG00000091428_9 (sequence is synthesized)
caccatgctgctgctgtcacagatgggccccgacgcccacatgaggatgatccttcgcaaaccacctggccagaggactgtggatgacctagagattatctatgaggagcttcttcatat

SEQ ID NO: 99018 - DNA, 120 bp, Artificial Sequence
  ENSG00000091428_10 (sequence is synthesized)
taaagccttatcccatctttctaccacagtgaaacgagagttagcaggtgttctcatttttgagtctcacgccaaaggagggactgtgttgtttaaccagggggaagaaggtacctcctg

SEQ ID NO: 99019 - DNA, 120 bp, Artificial Sequence
  ENSG00000091428_11 (sequence is synthesized)
gtacattattctaaaaggatcagtgaatgtagtcatttacggcaagggtgtggtctgcaccctgcatgaaggagatgacttcggcaagttagcactagtgaatgatgccccacgagctgc

SEQ ID NO: 99020 - DNA, 120 bp, Artificial Sequence
  ENSG00000091428_12 (sequence is synthesized)
ctctatcgtcttacgagaagataactgccatttcttaagagtagacaaggaggatttcaaccggatcctaagggacgtggaggcgaatacagtcagacttaaagaacatgaccaagatgt

SEQ ID NO: 99021 - DNA, 120 bp, Artificial Sequence
  ENSG00000091428_13 (sequence is synthesized)
cttggtgctggagaaggtcccagcagggaacagagcttctaatcaaggaaactcacagcctcagcaaaagtatactgtgatgtcaggaacacctgaaaaaattttagagcattttctaga

SEQ ID NO: 99022 - DNA, 120 bp, Artificial Sequence
  ENSG00000091428_14 (sequence is synthesized)
aacaatacgccttgaggcaactttaaatgaagcaacagattctgttttaaatgactttattatgatgcactgtgtttttatgccaaatacccagctttgcccggcactggtggcccacta

SEQ ID NO: 99023 - DNA, 120 bp, Artificial Sequence
  ENSG00000091428_15 (sequence is synthesized)
ccacgcacagccttcacaaggtacagaacaggagaaaatggattatgccctcaacaataagaggcgagtcatccgcctggttctacagtgggctgccatgtatggagacctcctgcaaga

SEQ ID NO: 99024 - DNA, 120 bp, Artificial Sequence
  ENSG00000091428_16 (sequence is synthesized)
ggatgacgtgtctatggccttcctggaggagttttatgtatctgtatcagatgatgcccggatgattgctgccctcaaggagcaactgccagagttggagaagattgtcaagcaaatctc

SEQ ID NO: 99025 - DNA, 120 bp, Artificial Sequence
  ENSG00000091428_17 (sequence is synthesized)
atgaagttctgtttaaggtctattgcatggaccacacctacacaaccattcgggtgccagtggccacttcggtgaaggaagtcatcagtgcagttgccgacaagctgggctccggggagg

SEQ ID NO: 99026 - DNA, 120 bp, Artificial Sequence
  ENSG00000091428_18 (sequence is synthesized)
gcctgatcatagtcaagatgagttccggaggagaaaaggtggtgctcaaacctaatgatgtttcagtatttacgacgctcaccattaatggacgcctgtttgcttgcccgcgagagcaat

SEQ ID NO: 99027 - DNA, 120 bp, Artificial Sequence
  ENSG00000091428_19 (sequence is synthesized)
tcgattcactgactcccttaccagaacaggaaggcccaactgttggaacagtgggaacttttgaactgatgagctccaaagatttagcataccagatgacaatttatgattgggaactct

SEQ ID NO: 99028 - DNA, 120 bp, Artificial Sequence
  ENSG00000091428_20 (sequence is synthesized)
tcaactgcgtgcatgagctggagctaatctatcacacatttggaaggcataattttaaaaagaccacagcaaacttggatttgttcctgaggagatttaatgaaattcagttttgggtcg

SEQ ID NO: 99029 - DNA, 120 bp, Artificial Sequence
  ENSG00000091428_21 (sequence is synthesized)
tcactgagatctgcctttgttctcagctcagcaagcgtgttcagctattaaaaaaatttattaagatagcagcccactgtaaggagtataaaaatctgaattccttttttgccatcgtca

SEQ ID NO: 99030 - DNA, 120 bp, Artificial Sequence
  ENSG00000091428_22 (sequence is synthesized)
tgggactaagtaacgttgctgtgagccgcttggcactaacgtgggagaaactgccaagcaagttcaagaagttctatgcggagtttgaaagtttaatggacccttcaaggaaccacaggg

SEQ ID NO: 99031 - DNA, 120 bp, Artificial Sequence
  ENSG00000091428_23 (sequence is synthesized)
cctacaggctgacagtagctaagctggaacctcctctcatccccttcatgcctttgctcattaaagatatgacatttactcatgaggggaacaagacgttcattgacaatctagtaaact

SEQ ID NO: 99032 - DNA, 120 bp, Artificial Sequence
  ENSG00000091428_24 (sequence is synthesized)
ttgaaaaaatgcgcatgattgcaaatacggccagaacagtgagatactacaggagccaacccttcaatcctgatgcagctcaagctaataagaaccatcaggatgtccggagttatgtac

SEQ ID NO: 99033 - DNA, 120 bp, Artificial Sequence
  ENSG00000091428_25 (sequence is synthesized)
ggcaattaaatgtgattgacaaccagagaactttatcacagatgtcacacagattagagcctcgtcgaccatagacatttcaaatgcccaaagcaacagtttgtctccagtccacaatct

SEQ ID NO: 99034 - DNA, 120 bp, Artificial Sequence
  ENSG00000091428_26 (sequence is synthesized)
ttcaaaaatgccatttatgctactactgactgtattgccactagagaattctacaaaacaagcaaaaacacatcctgagacacctcagggctgcattcagcttaccagctacctagcaag

SEQ ID NO: 99035 - DNA, 120 bp, Artificial Sequence
  ENSG00000091428_27 (sequence is synthesized)
agaaggaattatttgacatgcctaaagcttacacactctagcttaggaatccccagtttgtggctaccctgtttcatttccacttgtgccatcttctttgctgaagtgttgaataaggcc

SEQ ID NO: 99036 - DNA, 120 bp, Artificial Sequence
  ENSG00000091428_28 (sequence is synthesized)
cacgtgaagagtttggtagaaatagccttgtcaagagaactagcaagcccctgacatttttttctaagagtgtttatgggatgagatgtgctacaaatgggatagatttggataaaattt

SEQ ID NO: 99037 - DNA, 120 bp, Artificial Sequence
  ENSG00000091428_29 (sequence is synthesized)
taactcaacatcttgatttggagcctggggtttcgggaaggtgttgaggaatctatagaagtccaaattataggttgtattcttccatcttcattgtcttacctctgaaggaatagaacc

SEQ ID NO: 99038 - DNA, 120 bp, Artificial Sequence
  ENSG00000091428_30 (sequence is synthesized)
tgaccacattattatgaaacattatggctgtttatgtaatttagggaggactggtctgtaatttctgaatgtatatagaataatatttatgtttacaatgtaacttttcaaaatttacaa

SEQ ID NO: 99039 - DNA, 120 bp, Artificial Sequence
  ENSG00000091428_31 (sequence is synthesized)
atcaggattatatacataagaattccactaagaaatgccaagattcttaaatttgccagcgttaaagtagaaaataacatttcagaagagcacaatatgcataaaacatttttcaaaatt

SEQ ID NO: 99040 - DNA, 120 bp, Artificial Sequence
  ENSG00000091428_32 (sequence is synthesized)
gaaatattttcctgggcattaaaaacctttactattggctacaaatttattgtacctgatgaaaacatattttctggacttaaatgttattacaaatatcttaattttcagtaattgttt

SEQ ID NO: 99041 - DNA, 120 bp, Artificial Sequence
  ENSG00000091428_33 (sequence is synthesized)
tgcactttcaaagattgtaaatagttcattcaatcaatggtatggagttatttatttgctacataatagatactgtgccaaataattactttttatttattttatttagtacgtaatttt

SEQ ID NO: 99042 - DNA, 120 bp, Artificial Sequence
  ENSG00000091428_34 (sequence is synthesized)
gaagtacattttttcctgttttcacaattagactacatttaatgtgtaggaattgtatgtatgtatatcttctgtaaataacatctagtatcttcactaaatataattgtcgacaagaaa

SEQ ID NO: 99043 - DNA, 120 bp, Artificial Sequence
  ENSG00000091428_35 (sequence is synthesized)
aatttagattaccaatgataaagccggggctacggctaaagaaaggtaggatgcatacgcagaaacattagtgctaatatgctgcagaaaagccaagataaatcagtccagctctcatac

SEQ ID NO: 99044 - DNA, 120 bp, Artificial Sequence
  ENSG00000091428_36 (sequence is synthesized)
atcactaagggagaagctgattgcaacttgaccatgttgcctgagtagtcccatcagtgagaagaggagaacatggatttaaaaaaaactagaatgtacccctagggctcctgccgtggt

SEQ ID NO: 99045 - DNA, 120 bp, Artificial Sequence
  ENSG00000091428_37 (sequence is synthesized)
acagtctgggcagggcagagtgagaagggcgaggaggctcccggctttgctgccacttggccctcctgcctgacactctgcatttgtttctagtaaacggagctgtgaggccgaggtgct

SEQ ID NO: 99046 - DNA, 120 bp, Artificial Sequence
  ENSG00000091428_38 (sequence is synthesized)
tttcctatgtccttttccacatctaaccagtcactaattgtcttgacttttattccacttttatttcagggccttagcatctggatctccccgttttctgtttccagtctggaaaacatg

SEQ ID NO: 99047 - DNA, 120 bp, Artificial Sequence
  ENSG00000091428_39 (sequence is synthesized)
atatagtcaaatcagctttgtcttaggatcagccagacctggattcaaattctgtcacctctaccctctagctatgtgatcttggccaagttattaatctttttgaatctttgttttcac

SEQ ID NO: 99048 - DNA, 120 bp, Artificial Sequence
  ENSG00000091428_40 (sequence is synthesized)
acagtcaagccttaatgtgttctgttctgagctggtagatggaatttaattttcaaaacttgtttttgaaatgagtgagtgaaaaagccattttgacacaagacatccttttttttgttt

SEQ ID NO: 99049 - DNA, 120 bp, Artificial Sequence
  ENSG00000091428_41 (sequence is synthesized)
aatttagtgcttgctcaattttctgtagtttgacataccttataattatttcttgaatgaccatagagtgttttatgtattttctcccttcttttccacagatgtattcttaaccaggga

SEQ ID NO: 99050 - DNA, 120 bp, Artificial Sequence
  ENSG00000091428_42 (sequence is synthesized)
ttgcgcccagcccttcctcaccccgcaggagaagctggcctctcattcctcactgagagactcgacgggcgtccccacgccaagccttcctcgccctcccctccagccttttctgaaggg

SEQ ID NO: 99051 - DNA, 120 bp, Artificial Sequence
  ENSG00000091428_43 (sequence is synthesized)
acagttctgattcttttaaaccaagcggaagcctgcttcgatgacttggacttatgtctgcaccagggtctcattcctgtgtcttcaagcttttccatggagtggcaaaatgattcaaat

SEQ ID NO: 99052 - DNA, 86 bp, Artificial Sequence
  ENSG00000091428_44 (sequence is synthesized)
ttttcttattgccttagactgcctgagctttcctggagaaccatcagcaccagtttcctttctgtggactgagagccactcagtag

SEQ ID NO: 99053 - DNA, 120 bp, Artificial Sequence
  ENSG00000091428_45 (sequence is synthesized)
gcaccagtttcctttctgtggactgagagccactcagtagtagacacgaacagggaatgaacggcaatgaaggtacattttgctgatcaaataaaggatagatgctcactggatgtctga

SEQ ID NO: 99054 - DNA, 120 bp, Artificial Sequence
  ENSG00000091428_46 (sequence is synthesized)
aaatgtttgtttttgtacttgtgagttatgcattttatggggcagactgtcgttgctgaatttctttctgctttttattccatctgttcctcaactcttacaaaagctagccataccatc

SEQ ID NO: 99055 - DNA, 120 bp, Artificial Sequence
  ENSG00000091428_47 (sequence is synthesized)
aatgtcagtatttaaactcctggaccatatgtggcttctcttagcagattttgcaaaggaaacttactccagtatgcaagactaaatatcgacagtatatggcaggacttctggctcctc

SEQ ID NO: 99056 - DNA, 120 bp, Artificial Sequence
  ENSG00000091428_48 (sequence is synthesized)
aaacattaactcattcggcacgagactcaggtggagagagtcagtatgtattttgctttgcctccatcttgcactgagattttctgggaccggctcactaggacagtttctgttcctctg

SEQ ID NO: 99057 - DNA, 120 bp, Artificial Sequence
  ENSG00000091428_49 (sequence is synthesized)
attagcttgccagacaatctccccctctagcggccccctggtctcccctggtgctacaagttgtaatgctttcatttaaccagccttgctttaaagttctctcatgagctgagtggcttt

SEQ ID NO: 99058 - DNA, 120 bp, Artificial Sequence
  ENSG00000091428_50 (sequence is synthesized)
caaaaatgtgaaggtagaatattttgacttgctgttcagccaataaaatctcatacctcattagtgagtcttatttactgtgaggaacttgataagctaacccttctccacatctaggat

SEQ ID NO: 99059 - DNA, 120 bp, Artificial Sequence
  ENSG00000091428_51 (sequence is synthesized)
agttacagattctcttacaaattcatggcaacctcaagaaaggatggtgaaaaagcactaatgtacagtctcaggcatgatagatgttttttacatcatggggaatatgccaacaattat

SEQ ID NO: 99060 - DNA, 120 bp, Artificial Sequence
  ENSG00000091428_52 (sequence is synthesized)
gagagttatgccattaatattccttacctgaaaatgccttgtatgtatgtgggtacccctttgaaataattaaacaagttatacatcagctagttgccttcagatagtcaacatctcaga

SEQ ID NO: 99061 - DNA, 120 bp, Artificial Sequence
  ENSG00000091436_0 (sequence is synthesized)
ctcattggcgccgtgcagagaggcggaatgttcaactcctaactgcagcggaaacgtgggagccgcgcgggccgctgtcgtcccaacccccgccgccctcgtcgcgcgcggggcctccgc

SEQ ID NO: 99062 - DNA, 120 bp, Artificial Sequence
  ENSG00000091436_1 (sequence is synthesized)
gcccccggctgctgctcacgccccgcccgggagccagattttgtggaagtataatactttgtcattatgagatgtcgtctctcggtgcctcctttgtgcaaattaaatttgatgacttgc

SEQ ID NO: 99063 - DNA, 120 bp, Artificial Sequence
  ENSG00000091436_2 (sequence is synthesized)
agttttttgaaaactgcggtggaggaagttttgggagtgtttatcgagccaaatggatatcacaggacaaggaggtggctgtaaagaagctcctcaaaatagagaaagaggcagaaatac

SEQ ID NO: 99064 - DNA, 120 bp, Artificial Sequence
  ENSG00000091436_3 (sequence is synthesized)
tcagtgtcctcagtcacagaaacatcatccagttttatggagtaattcttgaacctcccaactatggcattgtcacagaatatgcttctctgggatcactctatgattacattaacagta

SEQ ID NO: 99065 - DNA, 120 bp, Artificial Sequence
  ENSG00000091436_4 (sequence is synthesized)
acagaagtgaggagatggatatggatcacattatgacctgggccactgatgtagccaaaggaatgcattatttacatatggaggctcctgtcaaggtgattcacagagacctcaagtcaa

SEQ ID NO: 99066 - DNA, 120 bp, Artificial Sequence
  ENSG00000091436_5 (sequence is synthesized)
gaaacgttgttatagctgctgatggagtattgaagatctgtgactttggtgcctctcggttccataaccatacaacacacatgtccttggttggaactttcccatggatggctccagaag

SEQ ID NO: 99067 - DNA, 120 bp, Artificial Sequence
  ENSG00000091436_6 (sequence is synthesized)
ttatccagagtctccctgtgtcagaaacttgtgacacatattcctatggtgtggttctctgggagatgctaacaagggaggtcccctttaaaggtttggaaggattacaagtagcttggc

SEQ ID NO: 99068 - DNA, 120 bp, Artificial Sequence
  ENSG00000091436_7 (sequence is synthesized)
ttgtagtggaaaaaaacgagagattaaccattccaagcagttgccccagaagttttgctgaactgttacatcagtgttgggaagctgatgccaagaaacggccatcattcaagcaaatca

SEQ ID NO: 99069 - DNA, 120 bp, Artificial Sequence
  ENSG00000091436_8 (sequence is synthesized)
tttcaatcctggagtccatgtcaaatgacacgagccttcctgacaagtgtaactcattcctacacaacaaggcggagtggaggtgcgaaattgaggcaactcttgagaggctaaagaaac

SEQ ID NO: 99070 - DNA, 120 bp, Artificial Sequence
  ENSG00000091436_9 (sequence is synthesized)
tagagcgtgatctcagctttaaggagcaggagcttaaagaacgagaaagacgtttaaagatgtgggagcaaaagctgacagagcagtccaacaccccgctgctgccttcctttgagattg

SEQ ID NO: 99071 - DNA, 120 bp, Artificial Sequence
  ENSG00000091436_10 (sequence is synthesized)
gtgcatggacggaagacgatgtgtattgttgggttcagcagctcgtcagaaaaggtgactcttcagcagagatgagtgtatatgcaagcttgtttaaagaaaacaacattacagggaagc

SEQ ID NO: 99072 - DNA, 120 bp, Artificial Sequence
  ENSG00000091436_11 (sequence is synthesized)
ggctgctgctgctggaggaagaagacctgaaagacatgggcattgtctccaaggggcatatcattcacttcaagtcagccattgagaaattaacccatgattacataaatttgtttcact

SEQ ID NO: 99073 - DNA, 120 bp, Artificial Sequence
  ENSG00000091436_12 (sequence is synthesized)
tcccaccactaattaaggactcaggaggtgaacctgaagaaaatgaggaaaaaatagtgaacctggaactggtttttggttttcacttgaaaccaggaactggcccacaggattgtaagt

SEQ ID NO: 99074 - DNA, 120 bp, Artificial Sequence
  ENSG00000091436_13 (sequence is synthesized)
ggaaaatgtatatggagatggatggggatgaaattgcaataacctacataaaagatgtgacattcaacactaacctacctgatgcggagattttaaagatgacaaagccaccatttgtaa

SEQ ID NO: 99075 - DNA, 120 bp, Artificial Sequence
  ENSG00000091436_14 (sequence is synthesized)
tggagaagtggattgtaggaatagcaaaaagtcagactgtggagtgcactgtcacatatgagagtgatgttagaactccaaaaagcactaaacatgtccattcgattcagtggagtagaa

SEQ ID NO: 99076 - DNA, 120 bp, Artificial Sequence
  ENSG00000091436_15 (sequence is synthesized)
caaaacctcaggatgaagtgaaagcagtccaacttgccattcagacattattcaccaattcagatggcaaccctggaagcaggtccgactcaagtgctgattgccagtggttagatactc

SEQ ID NO: 99077 - DNA, 120 bp, Artificial Sequence
  ENSG00000091436_16 (sequence is synthesized)
atccaacacttctttacagcgttcccagagcaatcctattctggggtcaccgttcttctcacactttgatggccaggattcctacgctgctgctgtgagacggccccaggtgcccattaa

SEQ ID NO: 99078 - DNA, 120 bp, Artificial Sequence
  ENSG00000091436_17 (sequence is synthesized)
gtatcaacagattacacctgtgaaccagtccagaagctcgtctcctactcagtatggactgaccaaaaacttctcttccctacatctcaactctagggacagtggcttttccagtggcaa

SEQ ID NO: 99079 - DNA, 120 bp, Artificial Sequence
  ENSG00000091436_18 (sequence is synthesized)
tactgacacctcttcagagaggggtcgatactcagacagaagcaggaacaaatatggacgtggtagtatatcactcaattcttctcctagaggaagatacagtggaaagagtcagcattc

SEQ ID NO: 99080 - DNA, 120 bp, Artificial Sequence
  ENSG00000091436_19 (sequence is synthesized)
cactccttcaagaggaagataccctggaaagttctacagggtttctcagtcagcactcaatcctcaccagtcgcctgacttcaagagaagccccagggacctccaccaacccaacaccat

SEQ ID NO: 99081 - DNA, 120 bp, Artificial Sequence
  ENSG00000091436_20 (sequence is synthesized)
accagggatgcctttgcaccctgagactgactcaagagccagtgaagaggacagcaaagtcagcgaagggggctggacaaaagtggaataccggaaaaagccccacaggccatctcccgc

SEQ ID NO: 99082 - DNA, 120 bp, Artificial Sequence
  ENSG00000091436_21 (sequence is synthesized)
caaaaccaataaagagagagccagaggggaccaccgtggatggagaaacttttgatgaattgaactacatagcttttctaagcaggttaaaaaaaaaaaaaaaaagaaatgtaatggttt

SEQ ID NO: 99083 - DNA, 120 bp, Artificial Sequence
  ENSG00000091436_22 (sequence is synthesized)
ttgataatatgatcccttcagattgaattaacgaaaagacaacacttccagtttttggattgggaaataccttctaattgagactatagccaaaccagggccaaaattatggatattggt

SEQ ID NO: 99084 - DNA, 120 bp, Artificial Sequence
  ENSG00000091436_23 (sequence is synthesized)
cacccagtgatcataactaggcttgaaaatcactacacatattttctgccttgagtgaacatttttagaggaaaggttatgccatctttttaccctaaccactgatattctggttagcag

SEQ ID NO: 99085 - DNA, 120 bp, Artificial Sequence
  ENSG00000091436_24 (sequence is synthesized)
ggccaggacaaggggaaggaaaatgaggtcaacaaaaaaatcaaatttttaggaaaagataagatgaatgttactgatttttccttttggctgaggctgcaatatggcctggcaaggcac

SEQ ID NO: 99086 - DNA, 120 bp, Artificial Sequence
  ENSG00000091436_25 (sequence is synthesized)
tgttactgatcttgtctttaacattttgatattttgttcatcataatttttgcatttatttttttaaatattgcattaaaatatcatttagcttgattatcgagttttttggtttgaggt

SEQ ID NO: 99087 - DNA, 120 bp, Artificial Sequence
  ENSG00000091436_26 (sequence is synthesized)
tttttgttgcttcttttttcttttctttctttccccctcttttttttggatgtccccttaaattttgtgcccaaggcaggtacctcactcatctcatccttggctcagccctgctggtta

SEQ ID NO: 99088 - DNA, 120 bp, Artificial Sequence
  ENSG00000091436_27 (sequence is synthesized)
gtatttagtatttattttagtaagatatttgtgtctgtatgatggtcagagttgaactgatctggcttgtcatttttcagtaataaaaaaagttactgaatttaatgttgaatatgatgc

SEQ ID NO: 99089 - DNA, 120 bp, Artificial Sequence
  ENSG00000091436_28 (sequence is synthesized)
atatctcattcattacgatttatcagaaaccaaagatttaaattgcctagatttgtggttctttctcttcctaagttcccagcgactgctttcaaatactattttctaaatttcaccaaa

SEQ ID NO: 99090 - DNA, 120 bp, Artificial Sequence
  ENSG00000091436_29 (sequence is synthesized)
ggagcaaagaggataaaacaacactccataaaggcctcttgggatgtcagaaatctaaaatctaaaagaaaacagacacagagcaagacaataacatcacaagctaaaagccagagaaat

SEQ ID NO: 99091 - DNA, 120 bp, Artificial Sequence
  ENSG00000091436_30 (sequence is synthesized)
ttaaaattaccaacatccttgttggagtaagacagtaaatatcagccttgcagcaagacagctctgagcagctgtgggcaaagaggtaaaccagtgggggtgcaaggagactgtctgcag

SEQ ID NO: 99092 - DNA, 120 bp, Artificial Sequence
  ENSG00000091436_31 (sequence is synthesized)
cttagggcagaaatggtgggatccaacttgtgaaatgcttcatgttttacaaaccaaaaagtcaggtagcaacaaacttattgtatgtcaaatcaataaatgttactttcaatattctga

SEQ ID NO: 99093 - DNA, 120 bp, Artificial Sequence
  ENSG00000091436_32 (sequence is synthesized)
ggtgccccccgggcgcaggccagggaggcccgagcgccttccccacgccccgctcgcccgcgcgtgtgaggggagggcggcccagccgtttcgcgccgggagattttgtggaagtataat

SEQ ID NO: 99094 - DNA, 120 bp, Artificial Sequence
  ENSG00000091436_33 (sequence is synthesized)
tgaagaagtgaaccagagatctgaatgacagtcctgatttctgaccatagcttagggaaaaagaaaaggttttttttatgattttggaactcttataagtcctgcatttcataagcaaga

SEQ ID NO: 99095 - DNA, 120 bp, Artificial Sequence
  ENSG00000091436_34 (sequence is synthesized)
attttggaactcttataagtcctgcatttcataagcaagaaatagtgtttctccaagcttgttgccttgtgtaagtatttgaaaagaatattgaggccggtcgcggtggctcacgcctgt

SEQ ID NO: 99096 - DNA, 72 bp, Artificial Sequence
  ENSG00000091436_35 (sequence is synthesized)
aactccatctcaaaaaaaaaaaaattgaaatcctgtcttctgagacaaaagatggttaccagacatttctct

SEQ ID NO: 99097 - DNA, 120 bp, Artificial Sequence
  ENSG00000091436_36 (sequence is synthesized)
ctgtcttctgagacaaaagatggttaccagacatttctctgtgtttactttgttaggaagctttgtcctctgttgtgtaagaaacaagaatactgtttaccttgaaattcgctgagcact

SEQ ID NO: 99098 - DNA, 120 bp, Artificial Sequence
  ENSG00000091436_37 (sequence is synthesized)
gtgtctgctagtgaagggggatagggagacatcaaaaatactcttaaaagaaaacttgatatcataaatcctattaaagcttgttaaataaatttagtaatgagaaaattgtattgcatg

SEQ ID NO: 99099 - DNA, 120 bp, Artificial Sequence
  ENSG00000091436_38 (sequence is synthesized)
agtggaagagtaaacccaggatgaaacatttgagccaggtcacatgatgcatgactataaatagcatgtttggaagctgacattattccccccctgactcagcggagatttaggtaactt

SEQ ID NO: 99100 - DNA, 120 bp, Artificial Sequence
  ENSG00000091436_39 (sequence is synthesized)
tgctgatgccaaatgaatactgcatgcactttgaaaattactgcgttgtttactcctgttactagatacttctttgggctttctgtttgttgttttacaataaccttatttatttttatt

SEQ ID NO: 99101 - DNA, 120 bp, Artificial Sequence
  ENSG00000091436_40 (sequence is synthesized)
cctttgaaatatcttatctagggctagtgaggtaaatgaatttttatttagggatacaaaaattatacagtgagctcaagtctaggtataagggacttttttctgggctgagataattaa

SEQ ID NO: 99102 - DNA, 120 bp, Artificial Sequence
  ENSG00000091436_41 (sequence is synthesized)
caaaacagaacatttaagtaatatttgttttttgcagtaagagatcagtatacatgtcatcagatcattctcctttaaaatccatatatgagttcccattactcttaagacaaagaccag

SEQ ID NO: 99103 - DNA, 120 bp, Artificial Sequence
  ENSG00000091436_42 (sequence is synthesized)
aatcccagcacttcaggaggccaaggctggtggattacttgagcccaggagttcaagcccagcctggtgacagagcaagaatcattctcaagaaatgaaaaggaccagaatacttaagaa

SEQ ID NO: 99104 - DNA, 120 bp, Artificial Sequence
  ENSG00000091436_43 (sequence is synthesized)
aaatgaaaaggaccagaatacttaagaagactcaccagaccctcattactgtggcctcaccagtgtcagcttaagaagatcattctccccttaatttctggctttcagtccctcaacaga

SEQ ID NO: 99105 - DNA, 120 bp, Artificial Sequence
  ENSG00000091436_44 (sequence is synthesized)
tgcgtatttctccccttttcaggatctttacaagcagtttcctctctttgaagcttatcccatttcagctgtgtaccacgcctgccgtcacaccccaccttaactcctgttcatcattca

SEQ ID NO: 99106 - DNA, 120 bp, Artificial Sequence
  ENSG00000091436_45 (sequence is synthesized)
catggcagttgaataacacgtctgcagggaaacacttcctgaccccaggccagatcaggttccactttatgtgctctgagagcatctccttcataggctttgctgctattggaattaaga

SEQ ID NO: 99107 - DNA, 120 bp, Artificial Sequence
  ENSG00000091436_46 (sequence is synthesized)
acacagcaagactccgtctcaaaaaaaaagaagtaattcggcagttagttgtttaatgtgtgtctcacgggctgaaatataagagaggcagacaatcacgtttgttcatcactcacagca

SEQ ID NO: 99108 - DNA, 120 bp, Artificial Sequence
  ENSG00000091436_47 (sequence is synthesized)
caatcacgtttgttcatcactcacagcatcaaaatgtgccttgaacacagcatttgctccgtaaatatttggggaagcaagagagaaaattaccatggtggtaataatataaaaagagat

SEQ ID NO: 99109 - DNA, 120 bp, Artificial Sequence
  ENSG00000091436_48 (sequence is synthesized)
tgtgatattatacaagagaatataaatatgtatgtttgccatgacaaaagtacttcttatgttcattcattcattatccattcattgaacttctgctggtgtgagaacgactgttgccat

SEQ ID NO: 99110 - DNA, 120 bp, Artificial Sequence
  ENSG00000091436_49 (sequence is synthesized)
tcgggtactgggctgtagcgatgagcacaagagtcccagggcatgtggagctctccagcccgagtgtccaatgttaaactattaaatatattcaaaactatcgcatttctattttgacaa

SEQ ID NO: 99111 - DNA, 120 bp, Artificial Sequence
  ENSG00000091436_50 (sequence is synthesized)
gtattatgacagagaaatatactagatgtctgagagcatatggccatgaaatctgatctagtccaaggacatagtaaaaggattttggagaaaatgctatttgatctattaccgaaggga

SEQ ID NO: 99112 - DNA, 120 bp, Artificial Sequence
  ENSG00000091436_51 (sequence is synthesized)
gattttggagaaaatgctatttgatctattaccgaagggattagtaagattttaataccaagatagggagtcttttaaagtatgtcaacaaggccaggcgtggtagctcacacctgtaat

SEQ ID NO: 99113 - DNA, 120 bp, Artificial Sequence
  ENSG00000091436_52 (sequence is synthesized)
ccagaagttcaagactagcctgagcaacgtagacctcatctctactcacaatttaaaaattagctgggcattgtgactctaacctgtggtcccagttactcaactcgggaggctgaggtg

SEQ ID NO: 99114 - DNA, 120 bp, Artificial Sequence
  ENSG00000091436_53 (sequence is synthesized)
ggtgggaggatcacttgagctggggaggtcaaagctgcattgagccgagatctggccacgacactccagcctgggctacagagtgagatcctattcaaaaaaaaaaaaaaaaaaagaaaa

SEQ ID NO: 99115 - DNA, 120 bp, Artificial Sequence
  ENSG00000091436_54 (sequence is synthesized)
tgcttaagaagagtggggaaatgactggtgtattttttttttcatagcatttgtaactgtttttcttccaaagaaaagtcttcatgatgtcaaacatcattcagaatataggatgtattc

SEQ ID NO: 99116 - DNA, 120 bp, Artificial Sequence
  ENSG00000091436_55 (sequence is synthesized)
tattatgggtttgaattcagttcatttatccttctttattgccctgaatactaaagagcatcatttgaaaaagaacctatggaattgtgaagtttgctgctttttatgtgactgtgactg

SEQ ID NO: 99117 - DNA, 120 bp, Artificial Sequence
  ENSG00000091436_56 (sequence is synthesized)
aatgggtcttgttaagcccaaagtgactcaaagggcatgacctgtgtataactctctggtgattatatacaggattgaaaatcctccaagcctgcttttaaagttgtagcacagcagttt

SEQ ID NO: 99118 - DNA, 120 bp, Artificial Sequence
  ENSG00000091436_57 (sequence is synthesized)
gcaagaatgtctgaggagtcttactttgaatctaaaacagaggagtcaaacagtgcagagatgtcatgtcagatcacagcaacaagtaacggggagggccatggcatgaacccaagtctg

SEQ ID NO: 99119 - DNA, 120 bp, Artificial Sequence
  ENSG00000091436_58 (sequence is synthesized)
caggccatgatgctgatgggctttggggatatcttctcaatgaacaaagcaggagctgtgatgcattctgggatgcagataaacatgcaagccaagcagaattcttccaaaaccacatct

SEQ ID NO: 99120 - DNA, 120 bp, Artificial Sequence
  ENSG00000091436_59 (sequence is synthesized)
aagagaagggggaagaaagtcaacatggctctggggttcagtgattttgacttgtcagaaggtgacgatgatgatgatgatgacggtgaggaggaggataatgacatggataatagtgaa

SEQ ID NO: 99121 - DNA, 120 bp, Artificial Sequence
  ENSG00000091436_60 (sequence is synthesized)
tgaaagcagaaagcaaagtaataaaatcacaaatgtttggaaaacacaaaagtaacttgtttatctcagtctgtacaaaaacagtaaggaggcagaaagccaagcactgcatttttaggc

SEQ ID NO: 99122 - DNA, 120 bp, Artificial Sequence
  ENSG00000091436_61 (sequence is synthesized)
caatcacatttacatgaccgtaatttcttatcaattctacttttatttttgcttacagaaaaacggggggagaattaagccaaagaagtatatttatgaatcagcaaatgtggtgcctga

SEQ ID NO: 99123 - DNA, 120 bp, Artificial Sequence
  ENSG00000091436_62 (sequence is synthesized)
ttatagaaatttgtgatcctatatacaatataggacttttaaagttgtgacattctggctttttcttttaatgaatactttttagtttgtatttgactttatttcctttattcaaatcat

SEQ ID NO: 99124 - DNA, 120 bp, Artificial Sequence
  ENSG00000091436_63 (sequence is synthesized)
ttttaaaaacttacattttgaacaaacactcttaactcctaattgttctttgacacgtagtaattctgtgacatactttttttttcttatagcaatacactgtaatatcagaaatggttg

SEQ ID NO: 99125 - DNA, 120 bp, Artificial Sequence
  ENSG00000091436_64 (sequence is synthesized)
aatggttggcctgagcaacctagtaagacctcgtctctactaataattaaaaaactagctggcatggtagcacacacctgtagtcccagatacttgggaggccaaggcaggaggattgct

SEQ ID NO: 99126 - DNA, 120 bp, Artificial Sequence
  ENSG00000091436_65 (sequence is synthesized)
ggcaccactgcactctagcctgggcaagagaacaagatcctgtctcaaaaaacaaaaaaaagaaagaattgatagtacaaaatccaacaacaatactgagatgatctaagaaggttataa

SEQ ID NO: 99127 - DNA, 120 bp, Artificial Sequence
  ENSG00000091436_66 (sequence is synthesized)
aacaatactgagatgatctaagaaggttataacaaaatgctcttcagaaatacctaagtgctgagaatttttagtactaaagagcacagctgctcaaagtaaagcctgagcagtgttctc

SEQ ID NO: 99128 - DNA, 120 bp, Artificial Sequence
  ENSG00000091436_67 (sequence is synthesized)
agtaatgtatttgaaggaaaaataccctgatttgaaaccaacagcagatgttgcaaactttcataccactgctggccatggaagcctcttaacaacacactgtcatttaaggctgtgctt

SEQ ID NO: 99129 - DNA, 120 bp, Artificial Sequence
  ENSG00000091436_68 (sequence is synthesized)
gtgctttatacaaagagaaagaggtggtcttaaggggatgcttccaggggggtgagttcatgcctctcctgtattttccagcaagtggggtatgtgtggtggtttgttttttagaggggc

SEQ ID NO: 99130 - DNA, 120 bp, Artificial Sequence
  ENSG00000091436_69 (sequence is synthesized)
ataataatccaggattctaagcatatgctcagctattttaaagaggaaattaaatattataaaagaaatagtaaagataagttatcctcacttaggcaaaagcacaggtcctttccatat

SEQ ID NO: 99131 - DNA, 120 bp, Artificial Sequence
  ENSG00000091436_70 (sequence is synthesized)
caagtttagcctaccagggttgttttttgttttaaccctgcttaataatgttggtgttttagaagtagatacaggcactgctctgaaaacctggctagccaaggatattctcagaatgtt

SEQ ID NO: 99132 - DNA, 120 bp, Artificial Sequence
  ENSG00000091436_71 (sequence is synthesized)
atcacctgtttgtcaaagcttgtttaaattataaaacacttttaattatatatatgaggcaaaagaactaagacttttttcaaactaaattagaaaggagtgtcattatttgactgttaa

SEQ ID NO: 99133 - DNA, 120 bp, Artificial Sequence
  ENSG00000091436_72 (sequence is synthesized)
accaaaatatttttggtgggtctttttatggaagtttaaagaaaggacatcatcatagatatgatctaacagtatttctaactatatttgatcattaaaagcctcttggaatttgaagcg

SEQ ID NO: 99134 - DNA, 120 bp, Artificial Sequence
  ENSG00000091436_73 (sequence is synthesized)
tgacgtgtttctaatgccccttgagaggtgaaaaataccacataatgatcagtatgctgtgccagcttcatttggggagaaataactagtagaaagttctgggtgtgaggtgtacagcag

SEQ ID NO: 99135 - DNA, 120 bp, Artificial Sequence
  ENSG00000091436_74 (sequence is synthesized)
tctaggtggcatagtgatgaagaaagggatcagagtctgactgtcactcagaatcctgggctcagttgcttgacaaccttgggaaaattgttttatctttgtgcgtctgtttgctgatct

SEQ ID NO: 99136 - DNA, 120 bp, Artificial Sequence
  ENSG00000091436_75 (sequence is synthesized)
tcagcgtgggaataataacagtacctacttgaaaggatcattgtgcggattaaaagaaataatatatgtaaagcactttaacacagcaccaggcccacggaaagtggctaatgttagcta

SEQ ID NO: 99137 - DNA, 120 bp, Artificial Sequence
  ENSG00000091436_76 (sequence is synthesized)
gaaattaaaagtggatagctttcaggaaagataaagagaacatgcttagaatgtaagctaaacagattttttctgttgctctttgaaaactatgagccctggccagcttaacctggtctg

SEQ ID NO: 99138 - DNA, 120 bp, Artificial Sequence
  ENSG00000091436_77 (sequence is synthesized)
aggtgagactaaacacaaaaacagtagataaatctctccctaaaagatggattcccccacatacccatgctactagtttctctgtctattcacacatatgtacaaatacatgaacacagc

SEQ ID NO: 99139 - DNA, 120 bp, Artificial Sequence
  ENSG00000091436_78 (sequence is synthesized)
ctgtctgtgctcagacatagagaagtactacctgacttgagtcaatgcacccaagaagaaaagcttggagtagagcagaagggagggcttgggactcctgtctttccagcatgccctggg

SEQ ID NO: 99140 - DNA, 120 bp, Artificial Sequence
  ENSG00000091436_79 (sequence is synthesized)
gtgcagtggtcagccacctgaagagagagccaatagcatggggtttacaaggcaaagatagtcattcattcaacacatattcatagagctccttctctgtgccagacactgttctggaag

SEQ ID NO: 99141 - DNA, 120 bp, Artificial Sequence
  ENSG00000091436_80 (sequence is synthesized)
atagctagatgaaaatctttgcactcacagagcttacatgccagtgagtgaagatcgatgataaataaagcaaatgcatcatatgttcacatttgataagtatatgccaaaaaatgaagc

SEQ ID NO: 99142 - DNA, 120 bp, Artificial Sequence
  ENSG00000091436_81 (sequence is synthesized)
cgggaaggaggacaaggcccatgggtgggtgttgaggtttttaaagtgtggtcaggaaaggccccactgataaggtaacatttgagcaagtctgaaaaaggcaaggggatctttggggct

SEQ ID NO: 99143 - DNA, 120 bp, Artificial Sequence
  ENSG00000091436_82 (sequence is synthesized)
aacttcgggatccctgcactttatgtaagaatgtaaacctggagtctcatttaagaatgatcagcaatacgtttagaacatatgaactgaatgaaatggacattttttcttaatttatgt

SEQ ID NO: 99144 - DNA, 120 bp, Artificial Sequence
  ENSG00000091436_83 (sequence is synthesized)
ataaatccatatgattatacataaagttctgatgcattaataaaagcagccaaatagggccaaagagaaaaataacaggactctgtactggacctaactttatcattaattaggtaatat

SEQ ID NO: 99145 - DNA, 120 bp, Artificial Sequence
  ENSG00000091436_84 (sequence is synthesized)
tttcctcatttctttactgctgccattttcctcaccagtattccagagatggtcatagctcattactctaccaccaagaacctaaaaggaattagaatacagcagaattggcctcagtga

SEQ ID NO: 99146 - DNA, 120 bp, Artificial Sequence
  ENSG00000091436_85 (sequence is synthesized)
agagcttaaaattgttctcctcgtagaactggactattgatcattaccacgtgacgttggctctattactttctgttcccaatgtccttctagtggtttgaaaatgttaaaacatcccta

SEQ ID NO: 99147 - DNA, 120 bp, Artificial Sequence
  ENSG00000091436_86 (sequence is synthesized)
aaatctaaatcatataatcagaattctatagtgtcccactctatctgtaaagatcatttggaagactttagactctattaattttaaaaggaatatttattagccatatgcagaatttct

SEQ ID NO: 99148 - DNA, 120 bp, Artificial Sequence
  ENSG00000091436_87 (sequence is synthesized)
aatgatgatattgtacagcttctaattcacttttcagatcagtgtttgaaatggcaattatcagtgttggatttagttccaactacttgatttacaaaaatgtacatttagaggttaaaa

SEQ ID NO: 99149 - DNA, 120 bp, Artificial Sequence
  ENSG00000091436_88 (sequence is synthesized)
gaaacagtgagaaatgtaaacattcaaaatgataattgaatctctcagttgtgggaataattatcagagacatgcaactgaaaatgtctcacctttcatctttttttcttaattcataaa

SEQ ID NO: 99150 - DNA, 120 bp, Artificial Sequence
  ENSG00000091436_89 (sequence is synthesized)
gttatcttgtagaatttgatgagaccctccctagtcattctcaactggggcggtgctgtcaccgaatggtgtttgagagtgttggggctagggcacatttttggttgtcacagcaactgg

SEQ ID NO: 99151 - DNA, 120 bp, Artificial Sequence
  ENSG00000091436_90 (sequence is synthesized)
gcaactggggtggcatttgctgcccagtgccaggaatagtaacattatgaatgccagggacagtgtgctcagtaaagtcttccatccaaaaggggcagggcacggtggctcacgcctgta

SEQ ID NO: 99152 - DNA, 120 bp, Artificial Sequence
  ENSG00000091436_91 (sequence is synthesized)
aaaaaaaaaacaaaaaaaaacaacccggtagcattgtcccttccccactgacaaacttatcaaatccagaagctttagagtttcgtctctaattatttttctcctgaacaaaattaccca

SEQ ID NO: 99153 - DNA, 120 bp, Artificial Sequence
  ENSG00000091436_92 (sequence is synthesized)
caaaattacccaagtcaaaacaaaatgtatttttagaattacggcagcatacgacctgaattttgtgagtttcgtggctttatcttaaatcaccatttccctaaaaatggtttctttctc

SEQ ID NO: 99154 - DNA, 120 bp, Artificial Sequence
  ENSG00000091436_93 (sequence is synthesized)
cttagaaatgctggtggcaacttgatgaaacagccaaatgcaccagggcaggtcactttcccattacactgattccacaattaaaaaaaaaaaagaaaaaaaactcattgagatagctac

SEQ ID NO: 99155 - DNA, 120 bp, Artificial Sequence
  ENSG00000091436_94 (sequence is synthesized)
agttctataggttaatttaaagcctcctttttctactcatttttgaaagcaaaattacattttactattttacataaccagtgaaaagacgttgaaagcctacagctcactgtttttggt

SEQ ID NO: 99156 - DNA, 120 bp, Artificial Sequence
  ENSG00000091436_95 (sequence is synthesized)
gctctggaaatgttgagggtgggtttttaaccagtgatttttaacgtgcagtgaatttgttagacttttaaacaccagctaaggtagtcaaacttgatccccattaaaaatcaaggaatt

SEQ ID NO: 99157 - DNA, 120 bp, Artificial Sequence
  ENSG00000091436_96 (sequence is synthesized)
aggggtcgggggagggtttaggagtgatccagaatgacctcccagaattactgtgcgtacaactttatttttcagagttttcattggaatggtaagagttttatgaaagacagttttaaa

SEQ ID NO: 99158 - DNA, 120 bp, Artificial Sequence
  ENSG00000091436_97 (sequence is synthesized)
acttattctgagttaaatattaatactttaaaaaattattgtactagacttattgcagccttttgaaagtagcagagtttcatcataccacatatataacagagcataaattttctataa

SEQ ID NO: 99159 - DNA, 120 bp, Artificial Sequence
  ENSG00000091436_98 (sequence is synthesized)
tcaggcaccttttgctgcttttgagtaagactgttttcctgtttaagtgttaagcatcgccagacataaaaatctattctctcctctcgattgtagcatagcctgacagctctagataca

SEQ ID NO: 99160 - DNA, 120 bp, Artificial Sequence
  ENSG00000091436_99 (sequence is synthesized)
gcatttctatgatgaaaaatgagtatccatcaggaaatctagaagactagccgtgttttctcagactccacctttgtttgcactctgttgcctgtgaggagctttctggcatgtgattat

SEQ ID NO: 99161 - DNA, 120 bp, Artificial Sequence
  ENSG00000091436_100 (sequence is synthesized)
ttacttcaaaactagagttccaagcacctacattaattattttatattgtgtgcagaatagtatatcttttaatgtcagatatgatacactgcacatattgcttttgcactcttaaaatt

SEQ ID NO: 99162 - DNA, 120 bp, Artificial Sequence
  ENSG00000091436_101 (sequence is synthesized)
tttgtactaaataatagaaaatatttatattctttgagtgtgagctttgaatagatggcattatcactttattgtttttttaacaaaaactttttctcaattattctattgcaatgttat

SEQ ID NO: 99163 - DNA, 120 bp, Artificial Sequence
  ENSG00000091436_102 (sequence is synthesized)
tctgagcaagtcctatgccaaatatcttgtataatgtttgtatggaagattaaattttactcttgtgtggtaagactatttcagttactgattttatagttggaatttgatattccagca

SEQ ID NO: 99164 - DNA, 120 bp, Artificial Sequence
  ENSG00000091436_103 (sequence is synthesized)
caaagtccacagtgtattcagaaatccaagttggtgtcatacatttcattttgatgtgaacttttctttgctttcctttgttctaagactccattttgcaataaacgttttgacagtaaa

SEQ ID NO: 99165 - DNA, 120 bp, Artificial Sequence
  ENSG00000091436_104 (sequence is synthesized)
agagaggcagccttcagacctatgttcccagaaatctctacgtttgtgcctttcccaactagagaattaactcttgcggggcacaaaacagcctctatttctttgcgtccccagcgcctg

SEQ ID NO: 99166 - DNA, 120 bp, Artificial Sequence
  ENSG00000091436_105 (sequence is synthesized)
tttgttgaagactgagttgaaggagtagcaggtggtgttaatttgtcaaaaagatgagttaaggtgctgggggcgagggggaacacccccacggccctccccccacagcaaggcagattt

SEQ ID NO: 99167 - DNA, 120 bp, Artificial Sequence
  ENSG00000091436_106 (sequence is synthesized)
atgcaagcttgctgtggaaagcatgcttcccgtctgtcagggcttcctgagaggagacctggtgacacagtagcctttcggcagagctccttgggatgagtaggaagtgctgctgcaggt

SEQ ID NO: 99168 - DNA, 120 bp, Artificial Sequence
  ENSG00000091436_107 (sequence is synthesized)
tttgtctgggggatatctgagccatttctctgtgggcagctgtgtttcaaagtctgggcaggttgttgttgaattttgcgtgggctgccaggattttgtggaagtataatactttgtcat

SEQ ID NO: 99169 - DNA, 120 bp, Artificial Sequence
  ENSG00000091482_0 (sequence is synthesized)
agcagttctcaataccgggagaggcacagagctatttcagccacatgaaaagcatcggaattgagatcgcagctcagaggacaccgggcgccccttccaccttccaaggagctttgtatt

SEQ ID NO: 99170 - DNA, 120 bp, Artificial Sequence
  ENSG00000091482_1 (sequence is synthesized)
cttgcatctggctgcctgggacttcccttaggcagtaaacaaatacataaagcagggataagactgcatgaatatgtcgaaacagccagtttccaatgttagagccatccaggcaaatat

SEQ ID NO: 99171 - DNA, 120 bp, Artificial Sequence
  ENSG00000091482_2 (sequence is synthesized)
caatattccaatgggagcctttcggccaggagcaggtcaaccccccagaagaaaagaatgtactcctgaagtggaggagggtgttcctcccacctcggatgaggagaagaagccaattcc

SEQ ID NO: 99172 - DNA, 120 bp, Artificial Sequence
  ENSG00000091482_3 (sequence is synthesized)
ccagaatattaaaagtgaactaaaatatgtccccaaagctgaacagtagtaggaagaaaaaaggattgatgtgaagaaataaagaggcagaagatggattcaatagctcactaaaatttt

SEQ ID NO: 99173 - DNA, 120 bp, Artificial Sequence
  ENSG00000091482_4 (sequence is synthesized)
atatatttgtatgatgattgtgaacctcctgaatgcctgagactctagcagaaatggcctgtttgtacatttatatctcttccttctagttggctgtatttcttactttatcttcatttt

SEQ ID NO: 99174 - DNA, 120 bp, Artificial Sequence
  ENSG00000091482_5 (sequence is synthesized)
tggcacctcacagaacaaattagcccataaattcaacacctggagggtgtggttttgaggagggatatgattttatggagaatgatatggcaatgtgcctaacgattttgatgaaaagtt

SEQ ID NO: 99175 - DNA, 120 bp, Artificial Sequence
  ENSG00000091482_6 (sequence is synthesized)
tcccaagctacttcctacagtattttggtcaatatttggaatgcgttttagttcttcaccttttaaattatgtcactaaactttgtatgagttcaaataaatatttgactaaatgtaaaa

SEQ ID NO: 99176 - DNA, 120 bp, Artificial Sequence
  ENSG00000091482_7 (sequence is synthesized)
gaacagtagtaggaagaaaaaaggcaggtggcacaaaggttgctcagaacaattcatctggactgctggataaacagccgaaagcaagcgtgtcctattgccagaaagtcattggatgcc

SEQ ID NO: 99177 - DNA, 120 bp, Artificial Sequence
  ENSG00000091482_8 (sequence is synthesized)
ttctataggaaggacagtggcacttccttccaccctagaagatagtggcacttccttccacctgtcaccgatgtaatagaatccttaacaagtaatacatattttactgcctagctctta

SEQ ID NO: 99178 - DNA, 120 bp, Artificial Sequence
  ENSG00000091482_9 (sequence is synthesized)
cctgatcccccaattttggatacagatgataagaatcatggctgcattttagtttcagaggcagcaattaattcctgaaaactaccccaacaggtttattaaattctgagtgttcaatca

SEQ ID NO: 99179 - DNA, 120 bp, Artificial Sequence
  ENSG00000091482_10 (sequence is synthesized)
acaaaataagtatcaaagtggtaatgacgcatcaattacaagaaaaagaaatgattagcaaaggattgatgtgaagaaataaagaggcagaagatggattcaatagctcactaaaatttt

SEQ ID NO: 99180 - DNA, 120 bp, Artificial Sequence
  ENSG00000091483_0 (sequence is synthesized)
acagccgcccagaaattctacccaagctccctcagcaccatgtaccgagcacttcggctcctcgcgcgctcgcgtcccctcgtgcgggctccagccgcagccttagcttcggctcccggc

SEQ ID NO: 99181 - DNA, 120 bp, Artificial Sequence
  ENSG00000091483_1 (sequence is synthesized)
ttgggtggcgcggccgtgccctcgttttggcctccgaacgcggctcgaatggcaagccaaaattccttccggatagaatatgatacctttggtgaactaaaggtgccaaatgataagtat

SEQ ID NO: 99182 - DNA, 120 bp, Artificial Sequence
  ENSG00000091483_2 (sequence is synthesized)
tatggcgcccagaccgtgagatctacgatgaactttaagattggaggtgtgacagaacgcatgccaaccccagttattaaagcttttggcatcttgaagcgagcggccgctgaagtaaac

SEQ ID NO: 99183 - DNA, 120 bp, Artificial Sequence
  ENSG00000091483_3 (sequence is synthesized)
caggattatggtcttgatccaaagattgctaatgcaataatgaaggcagcagatgaggtagctgaaggtaaattaaatgatcattttcctctcgtggtatggcagactggatcaggaact

SEQ ID NO: 99184 - DNA, 120 bp, Artificial Sequence
  ENSG00000091483_4 (sequence is synthesized)
cagacaaatatgaatgtaaatgaagtcattagcaatagagcaattgaaatgttaggaggtgaacttggcagcaagatacctgtgcatcccaacgatcatgttaataaaagccagagctca

SEQ ID NO: 99185 - DNA, 120 bp, Artificial Sequence
  ENSG00000091483_5 (sequence is synthesized)
aatgatacttttcccacagcaatgcacattgctgctgcaatagaagttcatgaagtactgttaccaggactacagaagttacatgatgctcttgatgcaaaatccaaagagtttgcacag

SEQ ID NO: 99186 - DNA, 120 bp, Artificial Sequence
  ENSG00000091483_6 (sequence is synthesized)
atcatcaagattggacgtactcatactcaggatgctgttccacttactcttgggcaggaatttagtggttatgttcaacaagtaaaatatgcaatgacaagaataaaagctgccatgcca

SEQ ID NO: 99187 - DNA, 120 bp, Artificial Sequence
  ENSG00000091483_7 (sequence is synthesized)
actgctccgaataaatttgaagctctggctgctcatgacgctctggttgagctcagtggagccatgaacactactgcctgcagtctgatgaagatagcaaatgatattcgatttttgggt

SEQ ID NO: 99188 - DNA, 120 bp, Artificial Sequence
  ENSG00000091483_8 (sequence is synthesized)
tctggtcctcggtcaggtctgggagaattgatcttgcctgaaaatgaaccaggaagcagtatcatgccaggcaaggtgaaccctactcagtgtgaagcaatgaccatggttgcagcccaa

SEQ ID NO: 99189 - DNA, 120 bp, Artificial Sequence
  ENSG00000091483_9 (sequence is synthesized)
gtcatggggaaccatgttgctgtcactgtcggaggcagcaatggacattttgagttgaatgttttcaagccaatgatgattaaaaatgtgttacactcagccaggctgctgggggatgct

SEQ ID NO: 99190 - DNA, 120 bp, Artificial Sequence
  ENSG00000091483_10 (sequence is synthesized)
tcagtttcctttacagaaaactgcgtggtgggaatccaggccaatacagaaaggatcaacaagctgatgaatgagtctctaatgttggtgacagctctcaatcctcatatagggtatgac

SEQ ID NO: 99191 - DNA, 120 bp, Artificial Sequence
  ENSG00000091483_11 (sequence is synthesized)
aaggcagcaaagattgctaagacagcacacaaaaatggatcaaccttaaaggaaactgctatcgaacttggctatctcacagcagagcagtttgacgaatgggtaaaacctaaggacatg

SEQ ID NO: 99192 - DNA, 120 bp, Artificial Sequence
  ENSG00000091483_12 (sequence is synthesized)
ctgggtccaaagtgatttacataaatttataatgaaaataaacatgtataaaatttaaaaaaacagactcccatttcttaaaaacggataagtttgaaaggaaactgctattgaacttaa

SEQ ID NO: 99193 - DNA, 120 bp, Artificial Sequence
  ENSG00000091483_13 (sequence is synthesized)
gcatctctagcagagcaatttgatcagtatataaaaccctaggatgtgctaggtctaagatggattaaacaagtataaaataaaatacatttataaaataaaaaggaaaacagacttaaa

SEQ ID NO: 99194 - DNA, 120 bp, Artificial Sequence
  ENSG00000091483_14 (sequence is synthesized)
gggccgaggccggggcgttttgaggtaacttcgctgctgctggcgcgcaggcccccagccccggggcgctgccctcaaggacagtgccggcgtgggcggagggtgctgggagaggggcag

SEQ ID NO: 99195 - DNA, 120 bp, Artificial Sequence
  ENSG00000091483_15 (sequence is synthesized)
tgtgcatctagtggtttctgaactgtggtttgtttcgccaaggggcactgcactgctttcaggccctccaggcaagccaaaattccttccggatagaatatgatacctttggtgaactaa

SEQ ID NO: 99196 - DNA, 80 bp, Artificial Sequence
  ENSG00000091490_0 (sequence is synthesized)
cggccgggggcgggcgggaaggtggcgcctcgggcgggggccggtccctgcaccaggtgacctgttccggcccggatccg

SEQ ID NO: 99197 - DNA, 80 bp, Artificial Sequence
  ENSG00000091490_1 (sequence is synthesized)
cctgttccggcccggatccgggcggcctcgccatgcagcggcgcggcgcggggctcgggtggccgcggcagcagcagcag

SEQ ID NO: 99198 - DNA, 120 bp, Artificial Sequence
  ENSG00000091490_2 (sequence is synthesized)
tggtcccgagtggcggcgtcccccagggcctcggcggccgctctgcctgcgcgctgctcctgctctgctacctgaatgttgtaccatctttgggtaggcagacttccctgacgacatcag

SEQ ID NO: 99199 - DNA, 120 bp, Artificial Sequence
  ENSG00000091490_3 (sequence is synthesized)
tgatacccaaagctgagcagagcgtggcttacaaagactttatttattttactgtctttgaaggaaacgttcgcaacgtttctgaagtctcggttgagtatttatgctctcagccttgtg

SEQ ID NO: 99200 - DNA, 120 bp, Artificial Sequence
  ENSG00000091490_4 (sequence is synthesized)
ttgtcaatttggaagcagttgtttcatctgagttcagaagtagcattcccgtgtacaaaaaaaggtggaagaatgagaaacatcttcacaccagcaggacacaaatagtacatgtgaaat

SEQ ID NO: 99201 - DNA, 120 bp, Artificial Sequence
  ENSG00000091490_5 (sequence is synthesized)
ttccaagcattatggtttacagagatgattatttcatcagacattccatctctgtatctgcagtgatagtacgcgcctggattactcacaaatacagtggcagagactggaatgttaaat

SEQ ID NO: 99202 - DNA, 120 bp, Artificial Sequence
  ENSG00000091490_6 (sequence is synthesized)
gggaggaaaacttgctccatgctgtagcaaagaattataccctcctgcagaccatcccgccttttgaacgccctttcaaagatcatcaagtgtgccttgagtggaacatgggttatattt

SEQ ID NO: 99203 - DNA, 120 bp, Artificial Sequence
  ENSG00000091490_7 (sequence is synthesized)
ggaaccttcgggcaaacaggattccacagtgtcctctggaaaatgatgtggttgccctgcttggctttccttatgcctccagtggagaaaacacaggcattgtcaagaagttcccgaggt

SEQ ID NO: 99204 - DNA, 120 bp, Artificial Sequence
  ENSG00000091490_8 (sequence is synthesized)
ttcggaaccgagagctggaggccactcgacgccagaggatggattacccagtgtttactgtttcattgtggctttatttactccattattgcaaggccaacctctgtgggattctgtact

SEQ ID NO: 99205 - DNA, 120 bp, Artificial Sequence
  ENSG00000091490_9 (sequence is synthesized)
ttgttgactctaatgagatgtacggcacaccttctgtatttcttacggaagagggctatttgcatattcagatgcatcttgtcaaaggggaagaccttgctgtaaaaactaaattcatca

SEQ ID NO: 99206 - DNA, 120 bp, Artificial Sequence
  ENSG00000091490_10 (sequence is synthesized)
tacctttgaaggagtggtttcgactggatatctcttttaacggaggccagatagtagtaaccactagcattggacaggatttgaaaagctaccacaatcagaccattagcttccgggagg

SEQ ID NO: 99207 - DNA, 120 bp, Artificial Sequence
  ENSG00000091490_11 (sequence is synthesized)
atttccattataatgacacagctgggtacttcattattggagggagcaggtatgtggctggcattgaagggttttttggacccctgaagtactatcgccttcgcagtctgcaccccgccc

SEQ ID NO: 99208 - DNA, 120 bp, Artificial Sequence
  ENSG00000091490_12 (sequence is synthesized)
agatttttaatcccctccttgagaagcaacttgctgaacaaatcaagttatattatgaaaggtgtgctgaggttcaagaaatagtatctgtgtatgcatctgcagcaaagcacgggggcg

SEQ ID NO: 99209 - DNA, 120 bp, Artificial Sequence
  ENSG00000091490_13 (sequence is synthesized)
agagacaagaagcatgccacctccacaactcctacctggacctccagcgcaggtatgggagaccctcgatgtgcagagccttcccctgggagaaggagctgaaagacaaacaccccagct

SEQ ID NO: 99210 - DNA, 120 bp, Artificial Sequence
  ENSG00000091490_14 (sequence is synthesized)
tgttccaggcattgctggagatggatctgctgaccgtgccaaggaaccaaaatgaatctgtatcagaaatcggtgggaagatatttgagaaggctgtaaagagactctctagcattgatg

SEQ ID NO: 99211 - DNA, 120 bp, Artificial Sequence
  ENSG00000091490_15 (sequence is synthesized)
gtcttcaccaaattagctctatcgtcccctttctgacggattccagctgctgtggataccataaagcatcctactaccttgcagtcttttatgagactggattaaatgttcctcgggatc

SEQ ID NO: 99212 - DNA, 120 bp, Artificial Sequence
  ENSG00000091490_16 (sequence is synthesized)
agctgcagggcatgttgtatagtttggttggaggccaggggagtgagaggctgtcttcaatgaatcttgggtataaacactaccagggtattgacaactaccccctggactgggaactgt

SEQ ID NO: 99213 - DNA, 120 bp, Artificial Sequence
  ENSG00000091490_17 (sequence is synthesized)
cgtatgcctactacagcaacattgccaccaagacaccccttgaccagcacacactgcaaggagatcaggcatatgttgaaacaattagactaaaagatgatgaaatactcaaggtacaaa

SEQ ID NO: 99214 - DNA, 120 bp, Artificial Sequence
  ENSG00000091490_18 (sequence is synthesized)
aggtgtggccaagaatcccgaagcagcaattgagtggtacgccaagggcgccctggagacggaggatcctgcgttaatctatgactatgccattgtgctattcaagggtcaaggagtaaa

SEQ ID NO: 99215 - DNA, 120 bp, Artificial Sequence
  ENSG00000091490_19 (sequence is synthesized)
aaagaacagacggcttgccttagagctgatgaagaaagcagcttccaagggattgcatcaggcagtcaatggcctgggatggtattaccacaaattcaagaaaaattacgccaaagcagc

SEQ ID NO: 99216 - DNA, 120 bp, Artificial Sequence
  ENSG00000091490_20 (sequence is synthesized)
aaagtactggttaaaagcagaagaaatggggaacccagatgcgtcatacaatcttggagtcctgcatttggatggcatcttccctggagttcctggaaggaatcaaactttagctggtga

SEQ ID NO: 99217 - DNA, 120 bp, Artificial Sequence
  ENSG00000091490_21 (sequence is synthesized)
atatttccataaggctgcgcaaggtggacacatggaagggaccttgtggtgttctctctactatatcacaggcaacctggagacattccctagagatcctgagaaagctgttgtatgggc

SEQ ID NO: 99218 - DNA, 120 bp, Artificial Sequence
  ENSG00000091490_22 (sequence is synthesized)
aaaacatgtagctgagaaaaatggctacttgggccatgtcatccgcaaaggcctcaatgcctacctggaaggttcatggcatgaagctttgctgtattatgttttagcagcagaaactgg

SEQ ID NO: 99219 - DNA, 120 bp, Artificial Sequence
  ENSG00000091490_23 (sequence is synthesized)
aattgaagtgtcacagacaaatttagcacacatctgtgaggagaggccagacctggccaggagatacttgggtgttaactgtgtttggagatactataatttctctgtttttcaaatcga

SEQ ID NO: 99220 - DNA, 120 bp, Artificial Sequence
  ENSG00000091490_24 (sequence is synthesized)
tgctccttcctttgcatatttgaagatgggagacctttactactatggccaccaaaaccagtcacaagacctggagttgtctgtgcagatgtacgcccaagccgccctggatggagactc

SEQ ID NO: 99221 - DNA, 120 bp, Artificial Sequence
  ENSG00000091490_25 (sequence is synthesized)
ccagggattttttaacctggccctgctaatcgaggaaggtacgataatcccacaccatatcttggatttcttggaaattgactcaactctccattctaataacatctccattctccagga

SEQ ID NO: 99222 - DNA, 120 bp, Artificial Sequence
  ENSG00000091490_26 (sequence is synthesized)
actgtacgaaaggtgctggagccacagtaacgaggagtccttcagcccctgctccttggcctggctttacctgcacttgcggcttctctggggtgctatcctgcactcagccctgatcta

SEQ ID NO: 99223 - DNA, 120 bp, Artificial Sequence
  ENSG00000091490_27 (sequence is synthesized)
ctttctgggaacctttctgctatccatattgatcgcctggactgtgcagtatttccagtctgtctcagcaagcgatccccctccaagaccatcccaggcctccccagacactgccacgtc

SEQ ID NO: 99224 - DNA, 120 bp, Artificial Sequence
  ENSG00000091490_28 (sequence is synthesized)
cactgcaagtccagctgtgactccagctgcagatgcctctgaccaagaccagcccacagtaactaataacccggagccacgtgggtgaactgtgcactccagttctctccagatgagaga

SEQ ID NO: 99225 - DNA, 120 bp, Artificial Sequence
  ENSG00000091490_29 (sequence is synthesized)
gaatcttttcaacagctggtattgggaagctggggccagggcatgatcctgataaacaccttaaatgtcttgtcaactggatgcaaattttgcaattggtgtcattttttttaaagtcaa

SEQ ID NO: 99226 - DNA, 120 bp, Artificial Sequence
  ENSG00000091490_30 (sequence is synthesized)
attacaaggaagtacccagatcaggcagtggtaataccaaaggtcatcaaacacatacaaggaacatcttgatcatagggcatgtggggaagtttactgggccatcacagacttttgttc

SEQ ID NO: 99227 - DNA, 120 bp, Artificial Sequence
  ENSG00000091490_31 (sequence is synthesized)
tagtgattgtatgtattaggagtcatagcatgccctacggcagatctggattcttatacactaagatgtgtcttaagaatcacagtgcgtgcttcatccctttattgaagaacagaaaat

SEQ ID NO: 99228 - DNA, 120 bp, Artificial Sequence
  ENSG00000091490_32 (sequence is synthesized)
tatgactactctacaaggtggataatattttggtacctgtgcttgccacagccctgttcctcaaagctgaattgatagatttctctttgacttccaagacctagcagttataaggcacct

SEQ ID NO: 99229 - DNA, 120 bp, Artificial Sequence
  ENSG00000091490_33 (sequence is synthesized)
tgaaataaattgtttgtgcctggaaatgcagggagggcaatagctttgtaaattggtttacatttttctccttgaatttttctagggtcctagtgcttccgaatcatttaatggcattgt

SEQ ID NO: 99230 - DNA, 120 bp, Artificial Sequence
  ENSG00000091490_34 (sequence is synthesized)
cggatatcttttacatttcaattgcaatccatgaaattacatttagaagattcttagtacttaactgtagtcttctccatgaattacacgttagaatagactggcagcaacggaatatgc

SEQ ID NO: 99231 - DNA, 120 bp, Artificial Sequence
  ENSG00000091490_35 (sequence is synthesized)
agaatagactggcagcaacggaatatgcagcaagtaagcctctagcttatagtttcatccctacccctcatgcctgcgtgagtctgtacagggatatgtgtgtgtgtgtgtgtgtgtgtg

SEQ ID NO: 99232 - DNA, 120 bp, Artificial Sequence
  ENSG00000091490_36 (sequence is synthesized)
gtctgtatactacatgctgctaaggtagtgaataaatcagtaatgcaatattgtgggtccaaactactctttgcactactttatttacagtagtaaataaaattatttttatacaattga

SEQ ID NO: 99233 - DNA, 120 bp, Artificial Sequence
  ENSG00000091490_37 (sequence is synthesized)
tcaaaatccatcctgaaggcctgggagccgggcagctgcgcggcacaactccagggggcacactcgccctgcgccctgcgggaatggcgccccggccaaaaaagcaaccagacaaaaacc

SEQ ID NO: 99234 - DNA, 120 bp, Artificial Sequence
  ENSG00000091490_38 (sequence is synthesized)
cacactcgccctgcgccctgcgggaatggcgccccggccaaaaaagcaaccagacaaaaacccattgcacgggcgggaactggtctgtgcgacccgcaaaagggaatgttgtaccatctt

SEQ ID NO: 99235 - DNA, 120 bp, Artificial Sequence
  ENSG00000091490_39 (sequence is synthesized)
cactgataccctggctctccaaaagattgttcttcataacacatttgggttcaaattcaacctgacctgaccttggtgataaacttgacttagactgacttgaagttttttatcattgtt

SEQ ID NO: 99236 - DNA, 120 bp, Artificial Sequence
  ENSG00000091490_40 (sequence is synthesized)
atttagtatatttgacatgaatattcatgttttgtggattttctgttatcctcttgttaatgatttctagcttaatttcactgtgatcagagaatatattctgaatgattccaatccttt

SEQ ID NO: 99237 - DNA, 120 bp, Artificial Sequence
  ENSG00000091490_41 (sequence is synthesized)
ggtggcggcggcaccacacaaaaccctcgggaaacatccagaacgtgccgcgaaccagccggcagggtggggcgcagcccggctgcaaacatgccagcaaggaggcagtcccaaccccgc

SEQ ID NO: 99238 - DNA, 120 bp, Artificial Sequence
  ENSG00000091490_42 (sequence is synthesized)
tagagaacaaagcaaaatagggaaagctaataataagtcagtaaacatgacttaatagagtactagaactcttggtagagattatattttttcatattggtggatatatttcattatgta

SEQ ID NO: 99239 - DNA, 120 bp, Artificial Sequence
  ENSG00000091490_43 (sequence is synthesized)
tcttacatgtctttgtttccataaaagacaactcctaatcattcataagaaagggcactaaatgaaaagctctcagaatgcattttctttaccttaacattcagttctggtttgttgctc

SEQ ID NO: 99240 - DNA, 120 bp, Artificial Sequence
  ENSG00000091490_44 (sequence is synthesized)
aatctgtatgacaaacctgtacatgtacccctaaagttgaaacagaagttaaaaacaaaacacaaaaaacatgatcctgagttctttcaatggcaacaatccagtttaattggtcaagtt

SEQ ID NO: 99241 - DNA, 120 bp, Artificial Sequence
  ENSG00000091490_45 (sequence is synthesized)
ctaatggtaagtaccacatcgtttattgcttgtttcttaatctggccacctgctcggcttgtgatggagggtgtgcattctccaggcagtgtaatagtacccatcctttatgaagcatgt

SEQ ID NO: 99242 - DNA, 120 bp, Artificial Sequence
  ENSG00000091490_46 (sequence is synthesized)
ctttggtcgggccctctaactgtgtttattttattggatccgtacagcccaataagacaggtcttacctctaaggatcaagaacaaggtgtcagaggaagaggtaggaaaatataccata

SEQ ID NO: 99243 - DNA, 120 bp, Artificial Sequence
  ENSG00000091490_47 (sequence is synthesized)
gtgggaatctgtgccaagaggagtcatgagaagaggtttctgcaccagcctaggaaagttgagatgagtgcccttaggtgatcccgtgcaagggaggcaccgccttgggttgtcagtcat

SEQ ID NO: 99244 - DNA, 120 bp, Artificial Sequence
  ENSG00000091490_48 (sequence is synthesized)
tggaagccgccctagccacagaaatattttgtcagatttccaacagggctatggcaactgagggcatagtctgtaggcaatggacatggtattcgactcagtattcttgtttcgtttatg

SEQ ID NO: 99245 - DNA, 120 bp, Artificial Sequence
  ENSG00000091490_49 (sequence is synthesized)
atacaagggcacgttttccagtaagttctattctgagagagtgagcgagaaaggacggatctcccggttgactggcttcggagcagatgggacacagcagcttctgaaagcctcctggtt

SEQ ID NO: 99246 - DNA, 120 bp, Artificial Sequence
  ENSG00000091490_50 (sequence is synthesized)
ctcctgcaaataaatttctcagatgcatatatttagggaaacaattcatcaatgaagatgacaaaaccatctggctctagagacttaaaaaaaattttagaggttgtaaacatttacatt

SEQ ID NO: 99247 - DNA, 120 bp, Artificial Sequence
  ENSG00000091490_51 (sequence is synthesized)
aaaacacagcgccaaagctcctggcagcatgaagtcttccctttcatttcagtcaagcaatcagatgtgtaagaggataaacaaacactcgtaatgaataaaaatcctcggccacacgga

SEQ ID NO: 99248 - DNA, 120 bp, Artificial Sequence
  ENSG00000091490_52 (sequence is synthesized)
ctcagagggagggactgagcaggaatcgtaaagtgggcatttagctgagcatggtttccactaatcattgttatttttctgagccagtatagaatagttaaggacaagggagccctgctt

SEQ ID NO: 99249 - DNA, 120 bp, Artificial Sequence
  ENSG00000091490_53 (sequence is synthesized)
gtttgggcttagagtccaggcttggctactcattagctgtatgactcatggcaagttatttaaccttcctgatccccaaatttctcatcaatacaatgaggttatgagagtagctacttc

SEQ ID NO: 99250 - DNA, 120 bp, Artificial Sequence
  ENSG00000091490_54 (sequence is synthesized)
ctaggaacataaaatgaaaaaaatattaagtgaaaaaaaatgcacgtaagatacttaccaaaatgacggctgtagttaaacgttagctgttatatttatctggcatataaaaccttctca

SEQ ID NO: 99251 - DNA, 120 bp, Artificial Sequence
  ENSG00000091490_55 (sequence is synthesized)
ataaatgttagctcttacatttactcctctattagaccataagctgagtaagaggaaggccccagtcgtgtcatttgtgataactcatgcatagtaggtactcacacccacagacgactc

SEQ ID NO: 99252 - DNA, 120 bp, Artificial Sequence
  ENSG00000091490_56 (sequence is synthesized)
cggtctctcaagagacaagaaaactgattttttaccatctcggacggctacaaaagggtataataactcatgaaggcaaacagagacatttacaaatgggtagattaggactggacatgg

SEQ ID NO: 99253 - DNA, 120 bp, Artificial Sequence
  ENSG00000091490_57 (sequence is synthesized)
cattggagcatttgcgtagctgttatttctgtagcagataatggaaagtgaaaggggtgcacgtcagcgtctcttccacggtgagaaggaagtcactgttgcaagaagctaatgcgaaat

SEQ ID NO: 99254 - DNA, 120 bp, Artificial Sequence
  ENSG00000091490_58 (sequence is synthesized)
catttctctctgatttacctgaggaggttaacaaggacccatcaaaaccttccaggcttgatgccccatagtctgctggttaataaacttcactcatgcaaattctgtcccatccttaaa

SEQ ID NO: 99255 - DNA, 120 bp, Artificial Sequence
  ENSG00000091513_0 (sequence is synthesized)
acagaagcgagtccgactgtgctcgctgctcagcgccgcacccggaagatgaggctcgccgtgggagccctgctggtctgcgccgtcctggggctgtgtctggctgtccctgataaaact

SEQ ID NO: 99256 - DNA, 120 bp, Artificial Sequence
  ENSG00000091513_1 (sequence is synthesized)
gtgagatggtgtgcagtgtcggagcatgaggccactaagtgccagagtttccgcgaccatatgaaaagcgtcattccatccgatggtcccagtgttgcttgtgtgaagaaagcctcctac

SEQ ID NO: 99257 - DNA, 120 bp, Artificial Sequence
  ENSG00000091513_2 (sequence is synthesized)
cttgattgcatcagggccattgcggcaaacgaagcggatgctgtgacactggatgcaggtttggtgtatgatgcttacctggctcccaataacctgaagcctgtggtggcagagttctat

SEQ ID NO: 99258 - DNA, 120 bp, Artificial Sequence
  ENSG00000091513_3 (sequence is synthesized)
gggtcaaaagaggatccacagactttctattatgctgttgctgtggtgaagaaggatagtggcttccagatgaaccagcttcgaggcaagaagtcctgccacacgggtctaggcaggtcc

SEQ ID NO: 99259 - DNA, 120 bp, Artificial Sequence
  ENSG00000091513_4 (sequence is synthesized)
gctgggtggaacatccccataggcttactttactgtgacttacctgagccacgtaaacctcttgagaaagcagtggccaatttcttctcgggcagctgtgccccttgtgcggatgggacg

SEQ ID NO: 99260 - DNA, 120 bp, Artificial Sequence
  ENSG00000091513_5 (sequence is synthesized)
gacttcccccagctgtgtcaactgtgtccagggtgtggctgctccacccttaaccaatacttcggctactcgggagccttcaagtgtctgaaggatggtgctggggatgtggcctttgtc

SEQ ID NO: 99261 - DNA, 120 bp, Artificial Sequence
  ENSG00000091513_6 (sequence is synthesized)
aagcactcgactatatttgagaacttggcaaacaaggctgacagggaccagtatgagctgctttgcctggacaacacccggaagccggtagatgaatacaaggactgccacttggcccag

SEQ ID NO: 99262 - DNA, 120 bp, Artificial Sequence
  ENSG00000091513_7 (sequence is synthesized)
gtcccttctcataccgtcgtggcccgaagtatgggcggcaaggaggacttgatctgggagcttctcaaccaggcccaggaacattttggcaaagacaaatcaaaagaattccaactattc

SEQ ID NO: 99263 - DNA, 120 bp, Artificial Sequence
  ENSG00000091513_8 (sequence is synthesized)
agctctcctcatgggaaggacctgctgtttaaggactctgcccacgggtttttaaaagtcccccccaggatggatgccaagatgtacctgggctatgagtatgtcactgccatccggaat

SEQ ID NO: 99264 - DNA, 120 bp, Artificial Sequence
  ENSG00000091513_9 (sequence is synthesized)
ctacgggaaggcacatgcccagaagccccaacagatgaatgcaagcctgtgaagtggtgtgcgctgagccaccacgagaggctcaagtgtgatgagtggagtgttaacagtgtagggaaa

SEQ ID NO: 99265 - DNA, 120 bp, Artificial Sequence
  ENSG00000091513_10 (sequence is synthesized)
atagagtgtgtatcagcagagaccaccgaagactgcatcgccaagatcatgaatggagaagctgatgccatgagcttggatggagggtttgtctacatagcgggcaagtgtggtctggtg

SEQ ID NO: 99266 - DNA, 120 bp, Artificial Sequence
  ENSG00000091513_11 (sequence is synthesized)
cctgtcttggcagaaaactacaataagagcgataattgtgaggatacaccagaggcagggtattttgctatagcagtggtgaagaaatcagcttctgacctcacctgggacaatctgaaa

SEQ ID NO: 99267 - DNA, 120 bp, Artificial Sequence
  ENSG00000091513_12 (sequence is synthesized)
ggcaagaagtcctgccatacggcagttggcagaaccgctggctggaacatccccatgggcctgctctacaataagatcaaccactgcagatttgatgaatttttcagtgaaggttgtgcc

SEQ ID NO: 99268 - DNA, 120 bp, Artificial Sequence
  ENSG00000091513_13 (sequence is synthesized)
cctgggtctaagaaagactccagtctctgtaagctgtgtatgggctcaggcctaaacctgtgtgaacccaacaacaaagagggatactacggctacacaggcgctttcaggtgtctggtt

SEQ ID NO: 99269 - DNA, 120 bp, Artificial Sequence
  ENSG00000091513_14 (sequence is synthesized)
gagaagggagatgtggcctttgtgaaacaccagactgtcccacagaacactgggggaaaaaaccctgatccatgggctaagaatctgaatgaaaaagactatgagttgctgtgccttgat

SEQ ID NO: 99270 - DNA, 120 bp, Artificial Sequence
  ENSG00000091513_15 (sequence is synthesized)
ggtaccaggaaacctgtggaggagtatgcgaactgccacctggccagagccccgaatcacgctgtggtcacacggaaagataaggaagcttgcgtccacaagatattacgtcaacagcag

SEQ ID NO: 99271 - DNA, 120 bp, Artificial Sequence
  ENSG00000091513_16 (sequence is synthesized)
cacctatttggaagcaacgtaactgactgctcgggcaacttttgtttgttccggtcggaaaccaaggaccttctgttcagagatgacacagtatgtttggccaaacttcatgacagaaac

SEQ ID NO: 99272 - DNA, 120 bp, Artificial Sequence
  ENSG00000091513_17 (sequence is synthesized)
acatatgaaaaatacttaggagaagaatatgtcaaggctgttggtaacctgagaaaatgctccacctcatcactcctggaagcctgcactttccgtagaccttaaaatctcagaggtagg

SEQ ID NO: 99273 - DNA, 120 bp, Artificial Sequence
  ENSG00000091513_18 (sequence is synthesized)
gctgccaccaaggtgaagatgggaacgcagatgatccatgagtttgccctggtttcactggcccaagtggtttgtgctaaccacgtctgtcttcacagctctgtgttgccatgtgtgctg

SEQ ID NO: 99274 - DNA, 120 bp, Artificial Sequence
  ENSG00000091513_19 (sequence is synthesized)
aacaaaaaataaaaattattattgattttatatttcaaaaactccattctttcctaaatattttcaacaaaggatttctttatgcattctgcctaaatacctatgcaactgagcccttcc

SEQ ID NO: 99275 - DNA, 120 bp, Artificial Sequence
  ENSG00000091513_20 (sequence is synthesized)
ttctcagctcaagattcgtctggtctttccctacagctttgtgtgtgccatggccacatctcctgggtacagttcaaggagacatcttttctaaaagggtctgcgtgatcattaaaatat

SEQ ID NO: 99276 - DNA, 120 bp, Artificial Sequence
  ENSG00000091513_21 (sequence is synthesized)
aatcaaatgtatactggtgtgtgtgtgcacgtgcgcgtgcgtgtgtcatgctaaggaaggggcaagaaggaggatgcagagtgagttacagagatcaagtactcaagtgagtacagaaag

SEQ ID NO: 99277 - DNA, 120 bp, Artificial Sequence
  ENSG00000091513_22 (sequence is synthesized)
actacagaagacttacctttatttggtattttaaatgaattccatcaggctgaggtcctgattctaactagctgaaaaaagtgaaacactgacatcttttttgctgaaaagcattccctg

SEQ ID NO: 99278 - DNA, 120 bp, Artificial Sequence
  ENSG00000091513_23 (sequence is synthesized)
agcttgatgccacagcagttactgccctgtctcctgcccttctcagcccagcttcctgtaaggtggaggctgacttttctgtctcacttattattggctgaacatacagaatttggtctt

SEQ ID NO: 99279 - DNA, 120 bp, Artificial Sequence
  ENSG00000091513_24 (sequence is synthesized)
ctgcttcaccaacttacctgaatgtaccctggcaaaagtcaccgtctacctgccaactgttaaaccaattcaggtcttccattcctgagcccatttcctgcagttgataaagttgaccac

SEQ ID NO: 99280 - DNA, 120 bp, Artificial Sequence
  ENSG00000091513_25 (sequence is synthesized)
tccctcctccttggaactcttttcctcagtttctctgacatggcaggtctctgctttgattcctacctctctctgttcatttgtagtcttcactgtgggctcatcctactggcctggaaa

SEQ ID NO: 99281 - DNA, 120 bp, Artificial Sequence
  ENSG00000091513_26 (sequence is synthesized)
ccttagggaaatcttcctggggttttctcttgatctggtcagtgctcctctcactttgcaggccctccttcagtgatgctcatgactcctaggcatctgtatctatagctgtgaccccag

SEQ ID NO: 99282 - DNA, 120 bp, Artificial Sequence
  ENSG00000091513_27 (sequence is synthesized)
cctccagcagtatccctgcacttatacatcctactacctacctgtgggtctatactcgagtcttgcagcagtcagaaacccaacaaatcaaaaattgaagtgatcatcctgttcttctct

SEQ ID NO: 99283 - DNA, 120 bp, Artificial Sequence
  ENSG00000091513_28 (sequence is synthesized)
ctcttgcttccctaaaccaactgttgttatagtatattccatatcagctgaagacctggtcatctacccaatcacataagccataaatagaggggtgaaatttcagttcgccattttccc

SEQ ID NO: 99284 - DNA, 120 bp, Artificial Sequence
  ENSG00000091513_29 (sequence is synthesized)
tcacactacatccagcgtcaccaagttctgttgattttgctttctaaataacttcagttggctcctttcttttcctgactcctaacacagcctcatcttatactcaaatacagaagtgca

SEQ ID NO: 99285 - DNA, 120 bp, Artificial Sequence
  ENSG00000091513_30 (sequence is synthesized)
gataaggggtatctggacacaacattccacacctctctcaactgtctagtattcaagaaaataggactctgggtccactttgcagtccagacctgatatggaccgttttacacacagccc

SEQ ID NO: 99286 - DNA, 120 bp, Artificial Sequence
  ENSG00000091513_31 (sequence is synthesized)
tgctttcctctgagcctatcaacgatctgccttatttaatattaacctaaacttaccccaaatcctataactctgccttttcctttgtttggtgagataccccatggctcccctgggacg

SEQ ID NO: 99287 - DNA, 120 bp, Artificial Sequence
  ENSG00000091513_32 (sequence is synthesized)
cagtctgtctcattgcaatggatcaataaacctaattttattacactacaggtatattcctggaagtcttagacaactgggctaaaacaaaaatattcaacatccattcttaattattaa

SEQ ID NO: 99288 - DNA, 120 bp, Artificial Sequence
  ENSG00000091513_33 (sequence is synthesized)
attagttactaaaataggatagacagatgttatttggccataattttatatacatgtaaacaaaagctaatacatacctaatgatgaagaaacagaagcattcctactaaagttaggaac

SEQ ID NO: 99289 - DNA, 120 bp, Artificial Sequence
  ENSG00000091513_34 (sequence is synthesized)
atgaaaaaaattgattactatctatcttattttacagtgttttagaacaggtggccaatccaattatacaagaaaaataagttataatatttaaagaaatgccaaaattacttttatttg

SEQ ID NO: 99290 - DNA, 120 bp, Artificial Sequence
  ENSG00000091513_35 (sequence is synthesized)
atttaaagaaatgccaaaattacttttatttgtaagtgattatacacctaggaaatccatgagaaccaaataataataaagtattatggccaggcgcagtggttcatgcctataatccca

SEQ ID NO: 99291 - DNA, 120 bp, Artificial Sequence
  ENSG00000091513_36 (sequence is synthesized)
gaggcagaggttgcagtgagccaaggtcgcaccagagcactccagcctagtgacagagcaagactctgtctggaaaataataaaaataataataataggcagggcgtggtggctcacacc

SEQ ID NO: 99292 - DNA, 90 bp, Artificial Sequence
  ENSG00000091513_37 (sequence is synthesized)
caccattgcactccagtctagataaaaataataataataataaataaagtggtaaaagtggtaagataaaattcagtaaagtgaaaggaa

SEQ ID NO: 99293 - DNA, 120 bp, Artificial Sequence
  ENSG00000091513_38 (sequence is synthesized)
atcaaagtaaaaaataatgtaaagaagacatattgctttggataggaagactcagtattgtaaagatgtcaattctccctaaattaatcaatatacaattttttaacttgacaaaatgat

SEQ ID NO: 99294 - DNA, 120 bp, Artificial Sequence
  ENSG00000091513_39 (sequence is synthesized)
actaatcctcaactaaaaaacaaaagtgagacagataagaaaaattctgatgagagtggaagagctcttccagctgttaaaatgtaatgataagctcctgaaccttggccttagcaatga

SEQ ID NO: 99295 - DNA, 120 bp, Artificial Sequence
  ENSG00000091513_40 (sequence is synthesized)
ttttttggctatcacatcaaaagcccaggccacaaaagcaaaaataaataaatgggactacatcaagctgaaaagcttctgcatagcaaagacaacaagcaacaaaatgaaatggcaacc

SEQ ID NO: 99296 - DNA, 120 bp, Artificial Sequence
  ENSG00000091513_41 (sequence is synthesized)
tatggattggaaaaaatatttgcaaactatatatctaataagatacaacaaattgataaagaactcatacaactcaatagcaggaaaacaaatgatcccagttaaaaatgggcaaaaacc

SEQ ID NO: 99297 - DNA, 120 bp, Artificial Sequence
  ENSG00000091513_42 (sequence is synthesized)
tgaaaagacatttctccaagaagaaaaatggccaagatggatatgaaaaggtgttcaacatcactaatcataagggaaatgtgaattgaaaccattatgagacactagataataatagga

SEQ ID NO: 99298 - DNA, 120 bp, Artificial Sequence
  ENSG00000091513_43 (sequence is synthesized)
tgactattatcaaaaagtcaaaagatattaatcataaacgtggataagggtgaagagaacagaaaacctttgtgcattgttggtgagaatgtacagccattgtggaaaacagtatggagg

SEQ ID NO: 99299 - DNA, 120 bp, Artificial Sequence
  ENSG00000091513_44 (sequence is synthesized)
tttctaaataaactgaaaatagggctacatatgacccaacaatccctctttaggggatatacacaaataaaatgagatagccaccttgtagagataaatgtgatcccacgttcattgcag

SEQ ID NO: 99300 - DNA, 120 bp, Artificial Sequence
  ENSG00000091513_45 (sequence is synthesized)
cattgcagccaatatagggaagcaacctaaatgcctgttgaagaatgaatggataaagaaactgtatacacacacacacacacacaatggaatattattcagccctaaaaagaatatctt

SEQ ID NO: 99301 - DNA, 120 bp, Artificial Sequence
  ENSG00000091513_46 (sequence is synthesized)
gccatttgccacaacatggatgaaactggaggatattaagtgaaataaggcagatacagaaagaaaaatattacacgatttcactcacatggggaatctaaagaaaacactcaaatacag

SEQ ID NO: 99302 - DNA, 120 bp, Artificial Sequence
  ENSG00000091513_47 (sequence is synthesized)
actcaaatacaggtatacagagataacaaaacctgaggtggaggagggtggagagatgtaggtcagaggatacaaagcagcagataggagggctaggcgcagtggctcactcctgtaatc

SEQ ID NO: 99303 - DNA, 80 bp, Artificial Sequence
  ENSG00000091513_48 (sequence is synthesized)
gaccagcctaggcaacatgacaaaaccccatctccaaaacaacaacaaacaaacaagcaaacaaaacacacacacacaaa

SEQ ID NO: 99304 - DNA, 120 bp, Artificial Sequence
  ENSG00000091513_49 (sequence is synthesized)
aacaaaaaaaaccccaaaaaaccaaaacaacaacaaacaaacaagcaaacaaaacacacacacacaaaaaaaattagcgaggagtgctggtgcccacctgtagtcccagctactcaggag

SEQ ID NO: 99305 - DNA, 120 bp, Artificial Sequence
  ENSG00000091513_50 (sequence is synthesized)
cgtgccactgcactccagcctggggacaggagaccccgtctcaaacaaaacaaaaccaagtagcagatatgcatgatgaacaagcctagagatctaatgtacaacataaggaccacagta

SEQ ID NO: 99306 - DNA, 120 bp, Artificial Sequence
  ENSG00000091513_51 (sequence is synthesized)
acaacataaggaccacagtataggtaataaattctactttatttgggattcctccttcactgtagtaatctttttttaactatgtatgtatctcataacatgttgtataccttaaatata

SEQ ID NO: 99307 - DNA, 120 bp, Artificial Sequence
  ENSG00000091513_52 (sequence is synthesized)
ttcaacgaagcttattttaaaaaatgaaatgtataatgatgactggaaagggtggtagtcacatggaaataatgaagcagaataaaagttccagatattaaatgcaaatgagaatttatt

SEQ ID NO: 99308 - DNA, 120 bp, Artificial Sequence
  ENSG00000091513_53 (sequence is synthesized)
acatgataaagctggcattatactcgggggggacagataggctactcactgaagtgtttagaagcagagtagctgaaaattttggcgcagaagaaaatctcgtggacctccaacttaccg

SEQ ID NO: 99309 - DNA, 120 bp, Artificial Sequence
  ENSG00000091513_54 (sequence is synthesized)
gttaaagtaaaaactttcgaaacgtataaaggtttaaatataaaattaaaatcgtaaaaacaattactatgttaacatatttcttatatagtacttagattttccaacattccacaaacc

SEQ ID NO: 99310 - DNA, 120 bp, Artificial Sequence
  ENSG00000091513_55 (sequence is synthesized)
tagtagcaattaaggaaaatattaatttcagatcatataaaattcagaagtcctgtaagacaaaaatagacaaataaaatgtgaagatttttaagaaagaacaaagggctaatctatatt

SEQ ID NO: 99311 - DNA, 120 bp, Artificial Sequence
  ENSG00000091513_56 (sequence is synthesized)
ttgaaatcagtataaaaagacgaacagaatttgagatgtgagcgcggacagctctgctgggccctccaggccctccgcccggtagaacccggagccctggccgcggctgccccaccgggc

SEQ ID NO: 99312 - DNA, 120 bp, Artificial Sequence
  ENSG00000091513_57 (sequence is synthesized)
ccatttcttgaagcagcggcgaaccacttttcctccccgacctgccggctgcagggtctccccgcccaaccctgccaggctcagacgaagcttctgctgagccgcctggacgcagcgccc

SEQ ID NO: 99313 - DNA, 120 bp, Artificial Sequence
  ENSG00000091513_58 (sequence is synthesized)
ctgggtggcggcaggtatagcagggcgggaagcagggaggcggccccaacgccgcggaggccaccagcgggtgcagagggccaggaaagctggtctgcgcgcggctcagctgcctccgta

SEQ ID NO: 99314 - DNA, 120 bp, Artificial Sequence
  ENSG00000091513_59 (sequence is synthesized)
ggccatggagccgagcagatccgggtcttcgggtggccgcaatgtcccaagtggacgacacccacctagtcccgaggacaaccgacaaagtccttaatgggcccagaaggtgaggggagt

SEQ ID NO: 99315 - DNA, 120 bp, Artificial Sequence
  ENSG00000091513_60 (sequence is synthesized)
ccggcaatgaggggtggtagggttagcggccatcgcccagctcgtcttccttctaccagacgctggtgctggaaaagagaagtgtaagaataacttgcgccattaggcccatcggaaagg

SEQ ID NO: 99316 - DNA, 120 bp, Artificial Sequence
  ENSG00000091513_61 (sequence is synthesized)
cccaccaccctttaggaagattactggctgtttatagaaggcccgtgtatatcctatgaagaagctgctctcaacttcccccccagccttttaaaagaaaacatttgctacatcgagccg

SEQ ID NO: 99317 - DNA, 120 bp, Artificial Sequence
  ENSG00000091513_62 (sequence is synthesized)
gaaaacatttgctacatcgagccgttctaggtgtaaagaggttgtgacttatgatagagttagaaaatcacacatcttgtaaattcccatttgttaaaaaaataataataataataataa

SEQ ID NO: 99318 - DNA, 120 bp, Artificial Sequence
  ENSG00000091513_63 (sequence is synthesized)
aatggcttctggagatgactttttgcaatgaagttgttagaccacctctggaagtgacagcaggagccacacatccacgtttattaagtgagttagagcaggagtccccaacccctggat

SEQ ID NO: 99319 - DNA, 85 bp, Artificial Sequence
  ENSG00000091513_64 (sequence is synthesized)
gcccctaccttccatggaaaaattgccttccgtgaaaccattccctggtgccaaagaggttggggaccactgggttagaggacat

SEQ ID NO: 99320 - DNA, 120 bp, Artificial Sequence
  ENSG00000091513_65 (sequence is synthesized)
tggtgccaaagaggttggggaccactgggttagaggacatggggcagaagacctgagaaggaagagaggacagttctgtgccacactggtcatatttagaagacattttcatattccaac

SEQ ID NO: 99321 - DNA, 120 bp, Artificial Sequence
  ENSG00000091513_66 (sequence is synthesized)
tatttagaagacattttcatattccaaccattgttctgtgtgtgcattttatttctcacgactgtatatgtagttaacaatactattttttagggaggtgggggggtcagccccccgcct

SEQ ID NO: 99322 - DNA, 120 bp, Artificial Sequence
  ENSG00000091513_67 (sequence is synthesized)
attaaaaaaaaaaaaaaaaaacaatactattttttgaactatctaccctttctagatgttctgaaatgcctatgttaaaattagagatagtaaaataacacattttgtaaatctttttgt

SEQ ID NO: 99323 - DNA, 120 bp, Artificial Sequence
  ENSG00000091513_68 (sequence is synthesized)
aacacattttgtaaatctttttgttaaaattcatatgtaatgttgttttggttggggggggtggccaaaccacctgttaataatacacattgtgtttgtgcactggttcaggggaggaga

SEQ ID NO: 99324 - DNA, 120 bp, Artificial Sequence
  ENSG00000091513_69 (sequence is synthesized)
gaggaaaggaagtgtaagagctctatgccaatgtgcttatagtgaggcaaggttaaccattgtctcatgcctgggcattttgttttacttatctgggtatattgtggatctaaaggacaa

SEQ ID NO: 99325 - DNA, 120 bp, Artificial Sequence
  ENSG00000091513_70 (sequence is synthesized)
cctgactttacatctagtctttctagatgttaaagaggttgctagtgtatgacaaaagtagttagtaaactaatatattttgtacatttcgttttaagattcccaggaaagacagtcttc

SEQ ID NO: 99326 - DNA, 120 bp, Artificial Sequence
  ENSG00000091513_71 (sequence is synthesized)
tgaaaatttgagcattattgcccagtgggttgatggagatgggaaggtgtaggccagaatgttcatacttggaagactcagtcataactgtttttacatgtgttcactttattcaagact

SEQ ID NO: 99327 - DNA, 120 bp, Artificial Sequence
  ENSG00000091513_72 (sequence is synthesized)
tctgtgcatatagtggacgaattaacttcttacctgaaacatcttatctatgtagatgttcagaattgcctgatgtatgttaagtgtagaggtagtaaaatatcaccttgtaaatatctt

SEQ ID NO: 99328 - DNA, 120 bp, Artificial Sequence
  ENSG00000091513_73 (sequence is synthesized)
tttgctaaaattcttgggaagtactgtcttttggaagtggaattgtgaagccacctctgtaagcagtatagtactgtctatacttgttcaatggtttagaaatgggagggaagaaattgc

SEQ ID NO: 99329 - DNA, 120 bp, Artificial Sequence
  ENSG00000091513_74 (sequence is synthesized)
caaaggtaatatgctagtgtgttcatacttggacatttcacttgccatttttctgtctgttttgtgcattttgttttgctgtgtatgtagagtacataatggacaaatgagtcctaattt

SEQ ID NO: 99330 - DNA, 120 bp, Artificial Sequence
  ENSG00000091513_75 (sequence is synthesized)
tgcaacatttggtctctagatgtttaagaagttgccagtgtatgacaaagtatctagtaaaattagcacattttgcacactttgtattgaaattcataggaaagcttgtcttctgtaaat

SEQ ID NO: 99331 - DNA, 120 bp, Artificial Sequence
  ENSG00000091513_76 (sequence is synthesized)
gatttttgggtatgaatttgttcagccatctctaagcgttacacatgcctgtacctgtccactggattgaagacagagagaagggagtgaggaaggactggttcaaggtcaaaattgtca

SEQ ID NO: 99332 - DNA, 120 bp, Artificial Sequence
  ENSG00000091513_77 (sequence is synthesized)
tatttagaagatacctccgattatagccactgatacatgtgcaattttattttacagtgctatgtacacagtggaaagttatatgaaatatctggtctctctagatagttagaaatgctt

SEQ ID NO: 99333 - DNA, 120 bp, Artificial Sequence
  ENSG00000091513_78 (sequence is synthesized)
gatgtatttaaaagtagaaatagtataataacactttttgtaaatagcttttaaaaactgatgggaaatactgtgtttgcaagtgggattgttaaatcacctctgtgaacagtgttactt

SEQ ID NO: 99334 - DNA, 120 bp, Artificial Sequence
  ENSG00000091513_79 (sequence is synthesized)
gttcattcagttgaggaaggtgagagggaagaaattacaaaagatgttttgctattgtgtactagaaaatttcagtttatccattgccttatatgttaaatgcattgcaagtaactttgc

SEQ ID NO: 99335 - DNA, 120 bp, Artificial Sequence
  ENSG00000091513_80 (sequence is synthesized)
tatactacatattgtgttatatactggaaaaatgagtcctaattttaaaatatccactctctagatactaaagaggttgccaatgtatgacaaaaatagtaaagtaacacattttgtaca

SEQ ID NO: 99336 - DNA, 120 bp, Artificial Sequence
  ENSG00000091513_81 (sequence is synthesized)
ctttgtgttaacgtttataaaaagactatcttctgaaaacgacttttggaagtgaaatgataacatcaaccctaagtgacacatgggcccatatccaccaggttggtggtgcagaggagc

SEQ ID NO: 99337 - DNA, 120 bp, Artificial Sequence
  ENSG00000091513_82 (sequence is synthesized)
tggaagaaatgaaggattctagatcagaatattcctatttagaagacagtttaagataaaccatgtgtgtagtttattcaaccctactgatgcaagagaatagggtctggaggcaggaaa

SEQ ID NO: 99338 - DNA, 120 bp, Artificial Sequence
  ENSG00000091513_83 (sequence is synthesized)
cataaagcagattcatgcagacttcctagaaataaatgaaatggaaacacatcagctatgacaggacatatactctccaacagagtaaatgactttgtaactttatttcatcctctccat

SEQ ID NO: 99339 - DNA, 120 bp, Artificial Sequence
  ENSG00000091513_84 (sequence is synthesized)
ttacatagggcgtacatcaagtaaatgactagggtgtatactaagtaaatgactttgtaactttatttcatcctcttcatttacataaggcatataccaagtaaccaatggaaaccttga

SEQ ID NO: 99340 - DNA, 120 bp, Artificial Sequence
  ENSG00000091513_85 (sequence is synthesized)
gagggtatttaaacccgagaaaattctgtaactgggctcttgagcccctaagcacaggccttctcccaccctgtggagcgtactttcatttcataaatctctgcttttgttgtttcattc

SEQ ID NO: 99341 - DNA, 120 bp, Artificial Sequence
  ENSG00000091513_86 (sequence is synthesized)
cttgctttgtgtgttttgtccaattcttggttcaatatgcccagaacctggacaccctccactggtaacatattttggcaaggcagccaggaggtaagcccaaagtttgggatttttcat

SEQ ID NO: 99342 - DNA, 120 bp, Artificial Sequence
  ENSG00000091513_87 (sequence is synthesized)
tcatcttttcttttccactccatacaggggaatctctccctctgtctctttttcctttccaactcgggacccttggtgggcagcgcctaaacacggaggcaaccgcaggtttctgggtgg

SEQ ID NO: 99343 - DNA, 120 bp, Artificial Sequence
  ENSG00000091513_88 (sequence is synthesized)
ggccatcctgaaggacttttttctatcttttctggttgtggtccctgattcctatgtgtggcgcagctcagggcaaacttgcagctcagggtgaacttgcatgtgtttcaggcgacggaa

SEQ ID NO: 99344 - DNA, 120 bp, Artificial Sequence
  ENSG00000091513_89 (sequence is synthesized)
accctacttgactggctaaggacaaaagaagcctactcagcttccatttcctatcattacagttcatggctatcatgctagtggaacaggaagcatgggataatgtggccttatcaaatt

SEQ ID NO: 99345 - DNA, 120 bp, Artificial Sequence
  ENSG00000091513_90 (sequence is synthesized)
ataaggatgctaaacgccagtgattacacccaggaaccaaaggacagctcacaattgcctctggagggaaaatatgcaaagcggcactggtgcccacgtaaggtcagagatgcctgacac

SEQ ID NO: 99346 - DNA, 120 bp, Artificial Sequence
  ENSG00000091513_91 (sequence is synthesized)
tcttaagactggaccccaaagggggattccccaggggatcctccagacttcaacctctccaaaggggatgcccttggcagcagttctaaggactagtactaagccctccttagaattttc

SEQ ID NO: 99347 - DNA, 120 bp, Artificial Sequence
  ENSG00000091513_92 (sequence is synthesized)
tcttgcagttgcaatactgtttggccccaatatggtttggattctggcatttgctgttgaatgggaaagcgggatgcagttgcatgtatccaggctttggtgctgctgttctaagcaggg

SEQ ID NO: 99348 - DNA, 120 bp, Artificial Sequence
  ENSG00000091513_93 (sequence is synthesized)
gcaggcctagttattatgtgatgttctcctttggtgctgtttgaccccagtgttctttcgagtctggggaggtttggcctttaaaaatcaaactgccatggaaattgctttacctgaaat

SEQ ID NO: 99349 - DNA, 120 bp, Artificial Sequence
  ENSG00000091513_94 (sequence is synthesized)
aatagttcacagccttcattggattgcttattgggtacacaaagtaaaattggcaagcttgtattgctatctcatggttagggttccaaggtaaaagctattgaatcttcatttgtgtgt

SEQ ID NO: 99350 - DNA, 120 bp, Artificial Sequence
  ENSG00000091513_95 (sequence is synthesized)
gtgtatacacatgtctagatgtgtttatttgcacatttgttatatgttgtgttttggcatataagtaaaagagcactcataaattaagtaaataagtcgaagcaattttcaagttcacat

SEQ ID NO: 99351 - DNA, 120 bp, Artificial Sequence
  ENSG00000091513_96 (sequence is synthesized)
gacttaagtataactttcctaaacaggctagttttaaaattattggtgaagtaaaaatagaaatgccttcagaattgtcagcatatatttttgtctgggttttatatttgtctctgctag

SEQ ID NO: 99352 - DNA, 120 bp, Artificial Sequence
  ENSG00000091513_97 (sequence is synthesized)
gggttttatatttgtctctgctagatattttgaggtgttagggtttggcatagaaggttataaaactataaacccagccaaaacaaaacgatctcgtttgcgtttttttttttttttttt

SEQ ID NO: 99353 - DNA, 120 bp, Artificial Sequence
  ENSG00000091513_98 (sequence is synthesized)
aatttaatgttagctaaatcttctgggttactggcaaaaatacgtatgtattaactttgaggctcttacttaggtttaagtgcacacctggctattcaaaatgtggttaacagggaaata

SEQ ID NO: 99354 - DNA, 120 bp, Artificial Sequence
  ENSG00000091513_99 (sequence is synthesized)
actgactttaaaagatagtgtctaacatttcggtttacagaggtaatctagataaactgttaaaagtgaaacaattgagtacagtgaatgggacaaatgttttagataagctttttgtgt

SEQ ID NO: 99355 - DNA, 120 bp, Artificial Sequence
  ENSG00000091513_100 (sequence is synthesized)
aaagtcttaaaatcatttttgatgctcatttaagatctgggccatttccaattagaaaggttgtgatatggggaaatatgtttctaaaattgtggaattgttcttaactataaattccca

SEQ ID NO: 99356 - DNA, 120 bp, Artificial Sequence
  ENSG00000091513_101 (sequence is synthesized)
tatctgatagttcaggatttctagctttttagcgtttcactaaagttttaggttactaaggataagaattctagttaacacataattctgtatacaaaacatgccagaaagtttgtgtta

SEQ ID NO: 99357 - DNA, 120 bp, Artificial Sequence
  ENSG00000091513_102 (sequence is synthesized)
ttagtgagaaaaagaataatttagaagttatctaaaagttagttcaaattacagatttgaaaaggttacttatgaaacaatgtagtaaggaaccagtaagtagaggagaacgatatggaa

SEQ ID NO: 99358 - DNA, 120 bp, Artificial Sequence
  ENSG00000091513_103 (sequence is synthesized)
aaagtttagataataaaatattctttaaaacctgatagagaattggagatatttggctaattaacattttcatagtgaaagctgttagtcttgataaaagtaaaataagcattgtaaaga

SEQ ID NO: 99359 - DNA, 120 bp, Artificial Sequence
  ENSG00000091513_104 (sequence is synthesized)
ttagtcttgataaaagtaaaataagcattgtaaagaaatgcatcggcagtttggcaattcctttttactatagttaagcatgaagccggatttggtgtggagccaaatttcacatacatg

SEQ ID NO: 99360 - DNA, 120 bp, Artificial Sequence
  ENSG00000091513_105 (sequence is synthesized)
atagtgctggcactggagtacttattggttatgtgcctatagtgtatttcttgattgcacaggatgtatggtgatattggtgaacttaaggatactgaattgtgtatcaggaacaaaata

SEQ ID NO: 99361 - DNA, 120 bp, Artificial Sequence
  ENSG00000091513_106 (sequence is synthesized)
ttcattatgtgggttttggggggccctaggtaaacactgtagcctccagggtagattgagaaggaaaaatttagggttgggttcctatttgtttttgcttctaattttcatttgtttgcc

SEQ ID NO: 99362 - DNA, 120 bp, Artificial Sequence
  ENSG00000091513_107 (sequence is synthesized)
atttattctcctctggctttgcttgtgtatgcacatataaaatcatatatattttttttaaatttctagtggaaggcttttatttggttctgtgaatagttattttgttccctatgcatt

SEQ ID NO: 99363 - DNA, 120 bp, Artificial Sequence
  ENSG00000091513_108 (sequence is synthesized)
tctagcaagtcatcatttgttccatttatctggaattcctaggctacctttgtcaggctggcaggaattgatggagcacaccagctttttaaccttgaactaactcaaattctgtttatg

SEQ ID NO: 99364 - DNA, 120 bp, Artificial Sequence
  ENSG00000091513_109 (sequence is synthesized)
atactttaagtgtgttgagtatattttcataaacagaatttgagtcatatttctctgtctgcccattttctccaaaattcgtaaactatttgtgaatattcttaattcatggcaatgtgt

SEQ ID NO: 99365 - DNA, 120 bp, Artificial Sequence
  ENSG00000091513_110 (sequence is synthesized)
ttgtttgcatatagtcaagcagggttcctagggctgctttgggagacagaacccagaaacctggcatactggcaaaagggtaagaatttcttaccagccagactctggtctctgtctctc

SEQ ID NO: 99366 - DNA, 120 bp, Artificial Sequence
  ENSG00000091513_111 (sequence is synthesized)
tgtgcaaactgcataaatgaatagtaaaagtcactgtttatctcctctgtaaagttttgattaatataaaaaaagaattctgaggccgatcttaagctgtagtgaatctggtgtgctttg

SEQ ID NO: 99367 - DNA, 120 bp, Artificial Sequence
  ENSG00000091513_112 (sequence is synthesized)
tgtctttctgtattgttttgtcataaagaggggtaccttagaataaaatgtgtgcttaggaccccatagacctgctgttcaagacacaccagcagactggtcagtcatgtctttgggagc

SEQ ID NO: 99368 - DNA, 120 bp, Artificial Sequence
  ENSG00000091513_113 (sequence is synthesized)
ccatgtggccatgctttctcttttcacagtggcagcctgggtttagggttcaattcctggcttagggaatgagtcctttatcttctgtctgtgtatttatatgtgttgtgtgtgtactat

SEQ ID NO: 99369 - DNA, 120 bp, Artificial Sequence
  ENSG00000091513_114 (sequence is synthesized)
gttgtgtgtgtactataaaagagcattaattaattagcttaataataataagagcttaaatcaaatattttatcagaaaagtaaaaaatgtaatgccttctatttacttcatgtaactta

SEQ ID NO: 99370 - DNA, 120 bp, Artificial Sequence
  ENSG00000091513_115 (sequence is synthesized)
attggtaaaataaaaatatcttcaaaatgtaaatatttagtctaaattatgcaggtcagatattagatttgcaaaatgctttaaggtcataaaccgcttctttgacttttaaaaattgct

SEQ ID NO: 99371 - DNA, 120 bp, Artificial Sequence
  ENSG00000091513_116 (sequence is synthesized)
ataaaccgcttctttgacttttaaaaattgctcaatttattttggagcattagattctagataaggcctggggacaaatagaattagccatgtcccctagctatgcaaagaaggttataa

SEQ ID NO: 99372 - DNA, 120 bp, Artificial Sequence
  ENSG00000091513_117 (sequence is synthesized)
agaaaggagattttatataagaaaggatcttatatcgtaaattcgtgtcctaaagtaaaataagcggttgttaaaaaagagggatgtttaggacaagttagaaagtcaaagcatgtcgta

SEQ ID NO: 99373 - DNA, 120 bp, Artificial Sequence
  ENSG00000091513_118 (sequence is synthesized)
gatggtctgtgtaagtcatgaaataatttacaaaagagaatttatgcaagaaatatacaatttaacggtgattagacctcctaaatgcttcataaaatgccactatgactcttaactcta

SEQ ID NO: 99374 - DNA, 120 bp, Artificial Sequence
  ENSG00000091513_119 (sequence is synthesized)
caacttgcctgctttacagctcggtaaggcctgagacacgtggagtcagatgctggagtcagaccttaagtgtacttctctctgggtcctagactccacaactaatatataattaaaatc

SEQ ID NO: 99375 - DNA, 120 bp, Artificial Sequence
  ENSG00000091513_120 (sequence is synthesized)
cttaacttaccaaagttttcaccaaaagtaaaactcgctaagagttaacattgtaacatgtaagtgagactactgaagcaacagttttacatgcaagttacgtaagaaaagtgaatgcat

SEQ ID NO: 99376 - DNA, 120 bp, Artificial Sequence
  ENSG00000091513_121 (sequence is synthesized)
tttcagtgaaagattataacaaggcatgggaatgtagatttttttttctgtctaaagggttaaaggattgttttaagttaggataaagctaaaagtttgaatgagttgtggaagatttat

SEQ ID NO: 99377 - DNA, 120 bp, Artificial Sequence
  ENSG00000091513_122 (sequence is synthesized)
aaaaattaatattgtaaaaaattatgtgtgtgaacatattgactaaatttaaaggggtattttctggtttttccataaattgaacatcaaaataaaagcacaaacagggttttcttaaag

SEQ ID NO: 99378 - DNA, 120 bp, Artificial Sequence
  ENSG00000091513_123 (sequence is synthesized)
caccgatctgctctttaacaaacatttgtaaaggattataaaaggtttatgagaatctcaccttatggtcaaacggattaagattggaaagatatgtctacaaggttttcttaaaaattg

SEQ ID NO: 99379 - DNA, 120 bp, Artificial Sequence
  ENSG00000091513_124 (sequence is synthesized)
gggttgacattaatagcacactaatgcaagggtgaaatttggctttctctcttgaacaagattttcatgcagtattaaaagataatgaaagatctttgtttgccttttgaataaactacc

SEQ ID NO: 99380 - DNA, 120 bp, Artificial Sequence
  ENSG00000091513_125 (sequence is synthesized)
cccccaccaaaaaaaaggaagggaaagacaagagacagattgtttgtaaagtaagtcttccatctatcaacatggaaaggtttttgccttttaaaacatttttgagtcatcattttgcta

SEQ ID NO: 99381 - DNA, 120 bp, Artificial Sequence
  ENSG00000091513_126 (sequence is synthesized)
aatgaatgactatggtaacctggaattccatttcataatgtcaagtgttttaaatctttaacatatttaataggcttcccaaaatcaaatttcagcttcaaaattgtcttttctaacctc

SEQ ID NO: 99382 - DNA, 120 bp, Artificial Sequence
  ENSG00000091513_127 (sequence is synthesized)
taactttgagatgctgcagagggcccctgaagcatccaaaagagaggtaaacagaattatttgacatgtttaattacatgggaagcattgtcaaaaagaaaaaaatttaatcttcttcag

SEQ ID NO: 99383 - DNA, 120 bp, Artificial Sequence
  ENSG00000091513_128 (sequence is synthesized)
tgaataatattaatatatgttccaaaattgtatgagatttctaaaattccaatatgtctgagtatatgctatcaatcataattatgattattatgttattgtagaccacagaaataacca

SEQ ID NO: 99384 - DNA, 79 bp, Artificial Sequence
  ENSG00000091513_129 (sequence is synthesized)
tgatgcagtttctgaaaacttcacaagcatgcaaagtcctagaatatggtgtcttttaggagattcatgaaagattgga

SEQ ID NO: 99385 - DNA, 120 bp, Artificial Sequence
  ENSG00000091513_130 (sequence is synthesized)
tagaatatggtgtcttttaggagattcatgaaagattggaaaggaccctaaaaagcactcttgaatacaggtttctaataagtttagaattatatcatttgaactgggtaagaattcctg

SEQ ID NO: 99386 - DNA, 120 bp, Artificial Sequence
  ENSG00000091513_131 (sequence is synthesized)
gaactttaatgaaaagactgactgagttctaaaactgctaacccaagtagaacaaaaattaattaaataccaagaaaatactttgccagattttcatgctaaatcagctgatactgaaac

SEQ ID NO: 99387 - DNA, 120 bp, Artificial Sequence
  ENSG00000091513_132 (sequence is synthesized)
tgtttagatataaaatttgaataaactccatcatttaaatcaaattacctatgataacccatcagttatcagtgttatgcacctaatttggggaaacaactggtattcaagaggatatga

SEQ ID NO: 99388 - DNA, 120 bp, Artificial Sequence
  ENSG00000091513_133 (sequence is synthesized)
gtctaatgttaattaagcatgaactcatggagaaccaggatggccaccttgtccttcctaagtcgttaaagcttttgttagtaaaatttctgcattacatgactcgtcacggaaaagata

SEQ ID NO: 99389 - DNA, 120 bp, Artificial Sequence
  ENSG00000091513_134 (sequence is synthesized)
aaatgatccaaattgaatatattgatgtggtgacttataaattgctaaaatagtttataaccaatgtttggtcccatattcctgggaaaacaatcaaagcttcaggtacatccagtcacc

SEQ ID NO: 99390 - DNA, 120 bp, Artificial Sequence
  ENSG00000091513_135 (sequence is synthesized)
cctgggaaaacaatcaaagcttcaggtacatccagtcacctgataggccatttaaacattttatagagggattttattcaattgttattttcagtgcatgttttctggttgtataaaagc

SEQ ID NO: 99391 - DNA, 120 bp, Artificial Sequence
  ENSG00000091513_136 (sequence is synthesized)
tatgccaccaagtattttcacaaggtaaagaaagctttttatggttcactgaggacaatcaactccttcacaacctagaaactgaagattgtatcttctgaaaacattggataaagactg

SEQ ID NO: 99392 - DNA, 120 bp, Artificial Sequence
  ENSG00000091513_137 (sequence is synthesized)
tccttgccatccacactacagcaaaacttctggactttgaactttgggttcatgatctcacaactgagaagagtccctccacactcttggaactgtacacccattggaacccttaaggta

SEQ ID NO: 99393 - DNA, 89 bp, Artificial Sequence
  ENSG00000091513_138 (sequence is synthesized)
gaatcaagacttctctattatcatgagactcttatctttgaatattttttccttgcttttgcctctatgaagaatagaagtggaaaaag

SEQ ID NO: 99394 - DNA, 120 bp, Artificial Sequence
  ENSG00000091513_139 (sequence is synthesized)
tccttgcttttgcctctatgaagaatagaagtggaaaaaggatctgttgtgtacaattatgggttatacttttatttgtgaagaattttgcagccagctttaggtcctttttccatgatt

SEQ ID NO: 99395 - DNA, 120 bp, Artificial Sequence
  ENSG00000091513_140 (sequence is synthesized)
tggaataaaagaggcaaatgtatccctcataataggctccatagcagtttactgtaaaggctatggttacataatagactaaattatcttaagaaagttatgctaaataatagagttggc

SEQ ID NO: 99396 - DNA, 120 bp, Artificial Sequence
  ENSG00000091513_141 (sequence is synthesized)
taaacagaagagtatctgtgcagctgctggcactcatggcctatggagaaaacatcaggtattatagagattcagttgtagcaaattaatgaagagactgcttagttaagtgagtagact

SEQ ID NO: 99397 - DNA, 120 bp, Artificial Sequence
  ENSG00000091513_142 (sequence is synthesized)
ctttagctcattgtttaatctatttgagtttaggaggtttggtttatggtgaccctggataaggagcatacttactctcaactcttggtattatcctcctgatagtcataataatagtct

SEQ ID NO: 99398 - DNA, 120 bp, Artificial Sequence
  ENSG00000091513_143 (sequence is synthesized)
ccctggtgtgctgtattctctcaacggttttaaatgtttgcatgctgccacctctagaatgtcaaatggcctctcttcaactggaatgacaagagctgaaagaaattgcagccatgagga

SEQ ID NO: 99399 - DNA, 120 bp, Artificial Sequence
  ENSG00000091513_144 (sequence is synthesized)
cactgtaacctacgaatgatgtgctgagtccaaaagcccaaagtgttggtaactgagagtggtgctaagtaaggccctaagttttggtcacactctcacttaagtgagaacctgaccaaa

SEQ ID NO: 99400 - DNA, 86 bp, Artificial Sequence
  ENSG00000091513_145 (sequence is synthesized)
aaaaaggggaattttttttaaacaaaattatgggaggtcatttttttgtactgagcccatgcgccaggccccaacagaccaaacta

SEQ ID NO: 99401 - DNA, 120 bp, Artificial Sequence
  ENSG00000091513_146 (sequence is synthesized)
tgtactgagcccatgcgccaggccccaacagaccaaactaaaccaaaacggagtcacgtatgccaagaccttaaggaaacacatagatcctagaacagaccacaggccaggttttgtttt

SEQ ID NO: 99402 - DNA, 120 bp, Artificial Sequence
  ENSG00000091513_147 (sequence is synthesized)
tctcctacaaatctctataacaaacattcctgacagcatagatatccaccccctgagttcccattaaatcttttaaccaaattaatttcctctcgccaaaagaccatcaagcttcagatg

SEQ ID NO: 99403 - DNA, 120 bp, Artificial Sequence
  ENSG00000091513_148 (sequence is synthesized)
atcatgcaacaaaagtttcatccagttccaccacccctggccatcaaggagctaccctgccttcactagaaagagcagagcaggacttctgtgatcctcaataggtagggactaggcctc

SEQ ID NO: 99404 - DNA, 120 bp, Artificial Sequence
  ENSG00000091513_149 (sequence is synthesized)
aagccaacatgaagcagttacaaaagaaagaccatcggcccctccacctcccataaagatttatggggatcccatctctggagggaaatgaggcagaagaatagggtctgtaggcaagga

SEQ ID NO: 99405 - DNA, 77 bp, Artificial Sequence
  ENSG00000091513_150 (sequence is synthesized)
cagatgcatgctgggaaatgtcttctgtatttacatagggcatacactgagtaaccaatggaaacctctagagggta

SEQ ID NO: 99406 - DNA, 86 bp, Artificial Sequence
  ENSG00000091513_151 (sequence is synthesized)
gggctattgagcccctatgctcaagccctctgccaccctgtggagtgtacttttgttttcaataaacctctgcttttgttgcttca

SEQ ID NO: 99407 - DNA, 120 bp, Artificial Sequence
  ENSG00000091513_152 (sequence is synthesized)
agattgtcatctccagctgggaggtgatggccatgcctgcacccctctggccagcagagggtggtcagtaggaaactgggaggccattagggcaaccttctattggctcagactcagaat

SEQ ID NO: 99408 - DNA, 120 bp, Artificial Sequence
  ENSG00000091513_153 (sequence is synthesized)
gcagtagaacttgtgccctgtagtgttcatggacaggagtgagaggaggacaggactgaggggatgtggctgtcaaggcctttctaggggcgatgctgtctctccctcagcatagggagt

SEQ ID NO: 99409 - DNA, 120 bp, Artificial Sequence
  ENSG00000091513_154 (sequence is synthesized)
gactgcgcagataggactggtggcacggaccagctctgcagccctggagtcaggagcagagccccccggctcccagcccgccgtagccgctcctggcaccgagcgagccgcgatgacaat

SEQ ID NO: 99410 - DNA, 120 bp, Artificial Sequence
  ENSG00000091513_155 (sequence is synthesized)
agagacatgttcacctgagtgcgcagaatgatcaggattatggggcccccaatggccctaaatcctccccaacacacactcccacagctgcaagccttgtgctcctttcccctaaatact

SEQ ID NO: 99411 - DNA, 120 bp, Artificial Sequence
  ENSG00000091513_156 (sequence is synthesized)
tcagtgcctatttcctaagaataagacaatctcttgcatacccacagtatgattaccaagatcaggatcttttacattatgtggatttaatactcgtcacgtccacagtccacatttaac

SEQ ID NO: 99412 - DNA, 120 bp, Artificial Sequence
  ENSG00000091513_157 (sequence is synthesized)
agatataatgaacattcatctttggagagtgagtagagaatgaggggccctgtcagctgccacagccacacatcaaggcctctgggggctttgggctggctgaggactggtgctcctaaa

SEQ ID NO: 99413 - DNA, 120 bp, Artificial Sequence
  ENSG00000091513_158 (sequence is synthesized)
attcatggggcatttgtcacactgttggggcttccacgtttagttttctctccccataagctagcaattccttgagagaggaccccacgttacttgcctttatccccgcacagagcactt

SEQ ID NO: 99414 - DNA, 120 bp, Artificial Sequence
  ENSG00000091513_159 (sequence is synthesized)
gtgtgcagcttgacctgaaggctactgcggtctactgatatgtctagggtccctggaggcctctggagccataggtaccactcacacaggaggggtcactctggagcacacactcagagg

SEQ ID NO: 99415 - DNA, 120 bp, Artificial Sequence
  ENSG00000091513_160 (sequence is synthesized)
agccgagccctgcctgcctacaggggcatcgaggtggcctaatcccctcccagtgagtcagaagcacaacctgggactcctaggccaagccagcccatgttccctttcatctgaccctga

SEQ ID NO: 99416 - DNA, 120 bp, Artificial Sequence
  ENSG00000091513_161 (sequence is synthesized)
caagtaggtccttttcctggggacccttcctttctccccagagccctcaagcctggtcagtgtctcctctcggtggatcgggcagagcctgaaaggacaatcatgcctctagtgtctggg

SEQ ID NO: 99417 - DNA, 120 bp, Artificial Sequence
  ENSG00000091513_162 (sequence is synthesized)
gacaacatgatttttaagagccaaagtaattttgatgtattgtaagtttgggaactactggtctaatacccctgacttaatatcacattcctgataaatattactaaatgtaagtcacat

SEQ ID NO: 99418 - DNA, 120 bp, Artificial Sequence
  ENSG00000091513_163 (sequence is synthesized)
catgtctgattcatcatacttatattttgcaccttcttaccttcttctgttattaatttgttgctttttcaacttatattttagattgagggtacatatgcaggtttgttacatggtata

SEQ ID NO: 99419 - DNA, 120 bp, Artificial Sequence
  ENSG00000091513_164 (sequence is synthesized)
ctgcatgatgctgaggtttgcggtatgattgaacctgtcacccaggtagtgagcatagcacacaacaggtagcttttcaactcttgcccccctctctccctcctccaaaatctgtcttaa

SEQ ID NO: 99420 - DNA, 120 bp, Artificial Sequence
  ENSG00000091513_165 (sequence is synthesized)
tgcccccctctctccctcctccaaaatctgtcttaagtgctatggtatatacaagaaggaagacacaaaaccacgtgggctttttttttttcttttttttctttttgagatggagtctca

SEQ ID NO: 99421 - DNA, 86 bp, Artificial Sequence
  ENSG00000091513_166 (sequence is synthesized)
tgttggccaggatggtctccatctcttggcctcatgatccgcccacctcggcctctcatcagcccacatgggctcttttatcacaa

SEQ ID NO: 99422 - DNA, 120 bp, Artificial Sequence
  ENSG00000091513_167 (sequence is synthesized)
tgtgtgtgtgtgtgtgtgtgtatgtgcatattataggtgtgtgtaggaaaaagaatgttagaaatgtaccaattttgaaggcgtagactatgaaattacaaatgcttcaaaattttcttc

SEQ ID NO: 99423 - DNA, 120 bp, Artificial Sequence
  ENSG00000091513_168 (sequence is synthesized)
tacaaatgcttcaaaattttcttcccaatacttacgtggcattttataaatttccaccaataaacgtgtattatttttattgaaaaagcatatttttaacatgcccttctagatgccctc

SEQ ID NO: 99424 - DNA, 120 bp, Artificial Sequence
  ENSG00000091513_169 (sequence is synthesized)
ctagccagactgaatcacctcccatttgatttttcttaattttctacctttaggttctggctcattcattaacatcaatttccattcataagtcctcacaaacccacttttcctcttgcc

SEQ ID NO: 99425 - DNA, 120 bp, Artificial Sequence
  ENSG00000091513_170 (sequence is synthesized)
tgagtgcctcacataccctactgcctgagatggttccagaggcggtctcctctctcccttagaaacaccaggcacacacctgcccccagtctcgcctgcactctcctttcctcccgcaga

SEQ ID NO: 99426 - DNA, 120 bp, Artificial Sequence
  ENSG00000091513_171 (sequence is synthesized)
gaggcattcctttctcctcctctcatcctacacacactataagagacaactgaaatcttgcctcctccagccagcttcttaattcatttgttctcaaagccctggtttgagctcacacag

SEQ ID NO: 99427 - DNA, 120 bp, Artificial Sequence
  ENSG00000091513_172 (sequence is synthesized)
catctagagtgttttacaaaatataaaatattattatccctgccctgaattttttgttttggtatgtgtgttattttcccctccaataagattgtgccttggagagggctgagaacatag

SEQ ID NO: 99428 - DNA, 120 bp, Artificial Sequence
  ENSG00000091513_173 (sequence is synthesized)
tatcatagataaatgaataaaataacataaaataaaataaaaatacatataccctttgaactaactattccacttctatgtaagcacaattatatgccagtaacactcattttaacgcta

SEQ ID NO: 99429 - DNA, 120 bp, Artificial Sequence
  ENSG00000091513_174 (sequence is synthesized)
ctttagtggcaaaaaattgtaaacacctcagatgcctattaaaagaggaatggtttaaagatactattatagccacactatgaaatataatacagtagttaagaagaacgagcttgattt

SEQ ID NO: 99430 - DNA, 120 bp, Artificial Sequence
  ENSG00000091513_175 (sequence is synthesized)
gtatgtactgacaagaagaatctataaggtatgtaaacagttgaaaaaaaagctacagagttttacatttgtcaagatctaacactaaacaaaattagaaacatgtgaaatccatataca

SEQ ID NO: 99431 - DNA, 120 bp, Artificial Sequence
  ENSG00000091513_176 (sequence is synthesized)
cacgtagaaaaatacatataatgagccgtggatggaaactcgcaaatgtgatattaaagactagcactataagactgagtgagatttggagagtataggaaaggaggcttttagttaata

SEQ ID NO: 99432 - DNA, 120 bp, Artificial Sequence
  ENSG00000091513_177 (sequence is synthesized)
tagagagatattcaaaaatttatgagtgtgatctcatgtattagttattcggttaaagaaacaaaattaaatgaaaaatacatttttaaaaaggttgcaattctgaattatgggagagaa

SEQ ID NO: 99433 - DNA, 120 bp, Artificial Sequence
  ENSG00000091513_178 (sequence is synthesized)
ataaaaattagcaaaacatatttgcaaagtggctcaggaggaaggagctgaaaccctaagaatgggtgagttttttttttttttcagagacaatacagaaaagaagaggcaaaggggccg

SEQ ID NO: 99434 - DNA, 120 bp, Artificial Sequence
  ENSG00000091513_179 (sequence is synthesized)
agatgggatacagacctgtatcacacaggtgtgtgcacattctcatttagaactggaacaagggagtcagatttaaaattctggtgcagattccaaaggtgttctctgaggaaaagttct

SEQ ID NO: 99435 - DNA, 120 bp, Artificial Sequence
  ENSG00000091513_180 (sequence is synthesized)
acctggcttagagcgtcacattcttcctctgttggagcaagaggtacagaaggaattggaatttagtggaattgaagatctttttgaacagcatctgcagaatgtagttcattctcacct

SEQ ID NO: 99436 - DNA, 120 bp, Artificial Sequence
  ENSG00000091513_181 (sequence is synthesized)
ggctgggtagggaaggttggaaggggatggtcaataatcattcctggtcactgtgagtctggcatcaccttgtagaccacatgggtgtctcttcctgtccacatcactgtaaccccagtg

SEQ ID NO: 99437 - DNA, 120 bp, Artificial Sequence
  ENSG00000091513_182 (sequence is synthesized)
tgggcacttctgctggcgagaaggcccaggttctctacacaccactgagtcagttccatctccccagcggggcaccttgaccaaagccatcagctgaaccaccttcttcctgtccctagg

SEQ ID NO: 99438 - DNA, 120 bp, Artificial Sequence
  ENSG00000091513_183 (sequence is synthesized)
atgctccacctcatgtgagtaggaggaacagcatggggaagtggcaaccaaacatggtggtgagtgctgggatggtgggtgggtacaggaggggtaggctgtggcccttgggataggaca

SEQ ID NO: 99439 - DNA, 120 bp, Artificial Sequence
  ENSG00000091513_184 (sequence is synthesized)
acatggacaaaatgaaatggtgagtgaacaatctaagcccggcatgtatgacaggctagactgtaggggcagatagtaaggggatacaggctcagagcactaaggtagtgaacttattgg

SEQ ID NO: 99440 - DNA, 120 bp, Artificial Sequence
  ENSG00000091513_185 (sequence is synthesized)
gtatagagaattccatcttatttctaagaaaaggactgggtttatgtgtacatgccattgctctgcagtaaacttttgattagagttgccttgtccaatatggtagccaccagcaagatg

SEQ ID NO: 99441 - DNA, 120 bp, Artificial Sequence
  ENSG00000091513_186 (sequence is synthesized)
tgactatttaaatttaagttaattaaaattaaactaaataaaagatgtatttcttcaatcccacctagctgcatttcaagtgctcaacagccacatgtggctccatattggtcagcaaag

SEQ ID NO: 99442 - DNA, 120 bp, Artificial Sequence
  ENSG00000091513_187 (sequence is synthesized)
agaatgtttgcatcatcacagaaagctctttcagacagtgctgctctagacagcttcaacaatgataggttctggtaaccataaagttgctatgcatactactcatttggaacaccagtt

SEQ ID NO: 99443 - DNA, 120 bp, Artificial Sequence
  ENSG00000091513_188 (sequence is synthesized)
tctgagaactgaaatagaataaaacacatctttgcagtataactatgttgggtgtaactgagtcacctgaaaaagtttggaagctggggaataacatgtggtgtagggcagttagtcttt

SEQ ID NO: 99444 - DNA, 120 bp, Artificial Sequence
  ENSG00000091513_189 (sequence is synthesized)
ccacaggagtatgcagataagggagtcttgatccttattaaaatgctgattctcagagccttgagatactgatttagaaagtctgtgctaggtcaggtatccgcatttgaaaagctgccc

SEQ ID NO: 99445 - DNA, 120 bp, Artificial Sequence
  ENSG00000091513_190 (sequence is synthesized)
ccatgtaattctgacggaagcagcaatgtgcttgtctaggttcgctattgtgagaatcaagttgatatttacctaacctatatcctccacaaaagcagacagtctggctctgctcttctt

SEQ ID NO: 99446 - DNA, 120 bp, Artificial Sequence
  ENSG00000091513_191 (sequence is synthesized)
tcctccatccttagcccacagcacagaaactggcacattgcaggtgctttttgctatgtcagttcctcacctgcttaaagaggtcagggaggacagtcttcctgggcgactcctggcctc

SEQ ID NO: 99447 - DNA, 120 bp, Artificial Sequence
  ENSG00000091513_192 (sequence is synthesized)
aggaactcagatgtgtgagcctcgcccataagaaacaaggtggaggaccctgtagggcaggaaaatcatgttaacagctttggcgtggggcactccccaggataggcacaggagctgtgc

SEQ ID NO: 99448 - DNA, 120 bp, Artificial Sequence
  ENSG00000091513_193 (sequence is synthesized)
aggcaagtagaaaagagcactgggagaacggcccagttcacagaagaggaggcagcaagtctgcacactttgtactatgctgaaattgttcaatcactcgacagttcagaaataaatata

SEQ ID NO: 99449 - DNA, 120 bp, Artificial Sequence
  ENSG00000091527_0 (sequence is synthesized)
ctggctcgcgcgtgccttttcccctcaggttgtggggagagcggaatcctgctccgccgtcgcagcagcagcggcagccccggcagcctcgggcgacagcggcggcgcgcgagcccccgg

SEQ ID NO: 99450 - DNA, 80 bp, Artificial Sequence
  ENSG00000091527_1 (sequence is synthesized)
gcggaccgtaccaccgctcgccagcacgcagggggagccgcccgtctcgccgcgcacgcctcggcgaccccgcggggctg

SEQ ID NO: 99451 - DNA, 120 bp, Artificial Sequence
  ENSG00000091527_2 (sequence is synthesized)
tcgaccccgagctcggagccccgcgggccgcgcccgccgccggccccacccatccgggtcgaggaggccgaggccatggctgagacggaggagcggagcctggacaacttctttgccaag

SEQ ID NO: 99452 - DNA, 120 bp, Artificial Sequence
  ENSG00000091527_3 (sequence is synthesized)
caagagggacaagaagaagaagaaggagcggagcaaccgggcggcgagtgccgcgggcgcagcgggcagcgccggcggaagcagtggagccgcgggtgcggcgggcggcggggcgggcgc

SEQ ID NO: 99453 - DNA, 120 bp, Artificial Sequence
  ENSG00000091527_4 (sequence is synthesized)
acccggccgggtgacggcgggaccgccagcgcgggggctgcgggcccaggggccgccaccaaggctgtgacgaaggacgaagatgaatggaaagaattggagcaaaaagaggttgattac

SEQ ID NO: 99454 - DNA, 120 bp, Artificial Sequence
  ENSG00000091527_5 (sequence is synthesized)
agcggcctcagggttcaggcaatgcaaataagcagtgaaaaggaagaagacgataatgaaaagagacaagatccaggtgataactgggaagaaggtggaggtggtggtggaggtatggaa

SEQ ID NO: 99455 - DNA, 120 bp, Artificial Sequence
  ENSG00000091527_6 (sequence is synthesized)
aaatcttcaggtccctggaataaaacagctccagtacaagcacctcctgctccagtaattgttacagaaaccccagaaccagcgatgactagtggtgtgtataggcctcctggggccagg

SEQ ID NO: 99456 - DNA, 120 bp, Artificial Sequence
  ENSG00000091527_7 (sequence is synthesized)
ttaaccacaacaaggaaaacaccacaaggaccaccagaaatctacagtgatacacagttcccatccctgcagtcaactgccaagcatgtagaaagccggaaggataaagaaatggagaag

SEQ ID NO: 99457 - DNA, 120 bp, Artificial Sequence
  ENSG00000091527_8 (sequence is synthesized)
agctttgaagtagtaagacacaaaaatagaggtagggatgaggtttcaaaaaaccaggcccttaaacttcagctagacaaccaatatgctgtgcttgaaaatcagaaaagcagccactca

SEQ ID NO: 99458 - DNA, 120 bp, Artificial Sequence
  ENSG00000091527_9 (sequence is synthesized)
caatacaattaaggaatgggctttgctaacccttctgaggtaactagactgcagctaaccaccaccaacagccattcatcatctgatctctgctggatctacagacaccgatgcagacca

SEQ ID NO: 99459 - DNA, 120 bp, Artificial Sequence
  ENSG00000091527_10 (sequence is synthesized)
ctcgatttcatgaccggccctattgcactatggaagttaaagtgtcacgactgctctatgcatattggatttaggggaattttcattgttacataaatgtgtgaactagtttcaacagtg

SEQ ID NO: 99460 - DNA, 120 bp, Artificial Sequence
  ENSG00000091527_11 (sequence is synthesized)
ttctttcatatttactctgcaaatacaaaaaaccaaaacctgcagccagtggtcatttcaaaatctttttatgttcagatactgagccttcataagggttgactacctcagatttgctgc

SEQ ID NO: 99461 - DNA, 120 bp, Artificial Sequence
  ENSG00000091527_12 (sequence is synthesized)
actcattgtggacttcatgtggatcacaacttctggataagaagattacaactattaagtgtcgatgtgaaccttgcaaccagctctactggattcttatcagaaatcctgcataaaaag

SEQ ID NO: 99462 - DNA, 120 bp, Artificial Sequence
  ENSG00000091527_13 (sequence is synthesized)
tgccctacccttaaggaatactctctgtagtaggctgttgttatattagacttcctggaacacactgctgaaaagaactgatgtgttcagatcatctgtgtagggctgtgatttgtaatt

SEQ ID NO: 99463 - DNA, 120 bp, Artificial Sequence
  ENSG00000091527_14 (sequence is synthesized)
taaactaattgtattctgaggtaaccacaaaataaattcaaccaaactggggtccaccaagtgggggaaggggaagggagagaataatcttgggggttttttttttttggtaattttttt

SEQ ID NO: 99464 - DNA, 120 bp, Artificial Sequence
  ENSG00000091527_15 (sequence is synthesized)
atttggatagtgcttttttgttttgtttttgttctgcattaaggccttttttgctttgacttgaaataagttctttgacagagcatattgcttggttaattaagtaacctaaagtatgca

SEQ ID NO: 99465 - DNA, 120 bp, Artificial Sequence
  ENSG00000091527_16 (sequence is synthesized)
ttaggattgtgaaatgtctcgtgagtatgccaatcctgagggtggaaccaaatagcctttgatgaaaagggcagtggattctggaggctctacttcaggtgctgctataatgcctcatct

SEQ ID NO: 99466 - DNA, 120 bp, Artificial Sequence
  ENSG00000091527_17 (sequence is synthesized)
aatcaggactaaattgtgtaggaaactgcagtgggaagaatatgctttctgctcaggctaagagggtcactgatctgtccttagaaattcagagtaacatgagcaaaacctcagctaaaa

SEQ ID NO: 99467 - DNA, 120 bp, Artificial Sequence
  ENSG00000091527_18 (sequence is synthesized)
cccatttaagtggcatggattgtgcatgatctttgataagaattcctcatgtacttgtgcctagtttttcaaggtattggctgttctatagatgcagtgattgtcccagctagctctgtt

SEQ ID NO: 99468 - DNA, 120 bp, Artificial Sequence
  ENSG00000091527_19 (sequence is synthesized)
accagccttttggtgtgtctttatgttcatttggagagtcagggcgaaagacaggtgatgtagcacttctgtttttaataattattgcttaaaatacctattaatagttttgggtcattt

SEQ ID NO: 99469 - DNA, 120 bp, Artificial Sequence
  ENSG00000091527_20 (sequence is synthesized)
aaagggacttgaggaagctacccaggattacagaagagtgtccacctaacaagatggtctggcagtttcctagttttgtatctggttcaatagaaatatgtgaaagtggtaatgtcatca

SEQ ID NO: 99470 - DNA, 120 bp, Artificial Sequence
  ENSG00000091527_21 (sequence is synthesized)
tttgatgcagagtccgggtttctctataataaatccctttgccaaatgcatgagttgcagacttgctactggcaagagtgaagcaagtgggtgagtaaaactattttgacgtgggagcgt

SEQ ID NO: 99471 - DNA, 120 bp, Artificial Sequence
  ENSG00000091527_22 (sequence is synthesized)
tttcagataggagtttagtcttgacgaaagtgtccgtgcaggaattggactccgaggagggttacagtatctcctgacgggacctgccactcgcatctgggcaatgttgacatttgaggt

SEQ ID NO: 99472 - DNA, 120 bp, Artificial Sequence
  ENSG00000091527_23 (sequence is synthesized)
ggcaggcaggatgcctgccttctaatatatttgggtgagtaactgagccagccaagggaaggttgaatgattaaatcagaaatgggattcttggtaaactgaagacttttatttgggaat

SEQ ID NO: 99473 - DNA, 120 bp, Artificial Sequence
  ENSG00000091527_24 (sequence is synthesized)
gaaaaaccttaaaaaaatctcttcatcgttgaactgtgcattttccctgcattttttcccaacaaaattttgttgggggttatgttactgaagaatgaacagatgagtaagtggaggtgt

SEQ ID NO: 99474 - DNA, 120 bp, Artificial Sequence
  ENSG00000091527_25 (sequence is synthesized)
tatgtaaaggcatattgtactcgaaatctgaagacctgcagcagatttaaattacaactcttgttataactttttaaaagattgtgaaaatatcaaaatataaatgaatcaagttttaat

SEQ ID NO: 99475 - DNA, 120 bp, Artificial Sequence
  ENSG00000091527_26 (sequence is synthesized)
atactgtatgatgggtggatgaggctgtccattgtaccatttgtttgaattctcaggcatggtttggcagtgcaagaattctgtaacattaacaaattcaataaaaagtaaatatatgga

SEQ ID NO: 99476 - DNA, 120 bp, Artificial Sequence
  ENSG00000091527_27 (sequence is synthesized)
gggctgggctcgccagggccgggaccccttccgatatccgcggtggagccgcccttcccaccccgcgtcgctcggcgttagccaaggcccgggcggcgccaccctccgggggcactagga

SEQ ID NO: 99477 - DNA, 120 bp, Artificial Sequence
  ENSG00000091527_28 (sequence is synthesized)
tacctggaattaaatgactacatatggcacatctacatcttactttagggacatgaattttttaaaataaataaaatgggaagaaatgtaaatgacatcagatggaaatgtgttttttgg

SEQ ID NO: 99478 - DNA, 120 bp, Artificial Sequence
  ENSG00000091527_29 (sequence is synthesized)
ggtggcttttagaataaatcccagccttttcaccactttgagagcacagctggcttgaatttaaacctccacgtggacttgctcctctgctctgtcttaaaaaatgtgtaagggaccttg

SEQ ID NO: 99479 - DNA, 120 bp, Artificial Sequence
  ENSG00000091527_30 (sequence is synthesized)
ctttgccaagagggacaagaagaagaagaaggagcggagcaaccgggcggcgagtgccgcgggcgcagcgggcagcgccggcggaagcagtggagccgcgggacgaagatgaatggaaag

SEQ ID NO: 99480 - DNA, 120 bp, Artificial Sequence
  ENSG00000091527_31 (sequence is synthesized)
gaattttcgctttcagcagccgcatttgtagcagctcttttgtgatgacttagtctctaagcccgtgaaagaaaaagaaaactctcggtggcaaggttgaagtagaaatgacgaagatga

SEQ ID NO: 99481 - DNA, 120 bp, Artificial Sequence
  ENSG00000091527_32 (sequence is synthesized)
accccttccgatatccgcggtggagccgcccttcccaccccgcgtcgctcggcgttagccaaggcccgggcggcgccaccctccgggggcactaggtctggggccgcagtgcccagcaca

SEQ ID NO: 99482 - DNA, 120 bp, Artificial Sequence
  ENSG00000091527_33 (sequence is synthesized)
aaaatcgatgtgaggagaaatcattgactaatgagtagaatttacttgaatgagaaaattgttacccttgtgcataaagagagagatgtattatctattacttgctaaaagtaagagtct

SEQ ID NO: 99483 - DNA, 120 bp, Artificial Sequence
  ENSG00000091527_34 (sequence is synthesized)
taggaggaatgtcattacacagcttttaacagttttcttcaagtttgtcctgaaatagggtcacagttaatactgttcagtagaagataggaccctagagcttcaatacagcgttctgtg

SEQ ID NO: 99484 - DNA, 120 bp, Artificial Sequence
  ENSG00000091527_35 (sequence is synthesized)
ttttctgtttgaattgaagccttaaaatggtttgataaggattttctatatgcctccactcctacccctccccaggattcttctaaggggtggcttttttttaaattcaaggacgaatat

SEQ ID NO: 99485 - DNA, 120 bp, Artificial Sequence
  ENSG00000091527_36 (sequence is synthesized)
agtttgagctgaattttcgctttcagcagccgcatttgtagcagctcttttgtgatgacttagtctctaagcccgtgaaagaaaaagaaaactctcggtggcaaggacgaagatgaatgg

SEQ ID NO: 99486 - DNA, 120 bp, Artificial Sequence
  ENSG00000091527_37 (sequence is synthesized)
gcgtcgctcggcgttagccaaggcccgggcggcgccaccctccgggggcactaggtctggggccgcagtgcccagcacagagcagcgtttatcgggtgacgtctaggctgagtaattccg

SEQ ID NO: 99487 - DNA, 120 bp, Artificial Sequence
  ENSG00000091536_0 (sequence is synthesized)
gtgctcctgggccagccagaggacccccatgaggcggcatgcaggcggggagcaggccacagaacgcagggtgaaacccaaggcgctctagaggagatgaattatggatccgccctcccg

SEQ ID NO: 99488 - DNA, 120 bp, Artificial Sequence
  ENSG00000091536_1 (sequence is synthesized)
gaatcctggctcggccctccccacgccacccagggccagtcgggtctgctcacagcccgaggaggccgcgtgtccagccgcgggcaagagacagagcaggtccctgtgtctccaagtccc

SEQ ID NO: 99489 - DNA, 120 bp, Artificial Sequence
  ENSG00000091536_2 (sequence is synthesized)
tgagcccgtgacaccggccccaggccctgtagagagcaggcagccaccatggcgaaggaggaagatgaggagaagaaagccaagaaagggaagaaggggaagaaggcaccggagccggag

SEQ ID NO: 99490 - DNA, 120 bp, Artificial Sequence
  ENSG00000091536_3 (sequence is synthesized)
aagcccaaacggagcctgaaggggacgtcgcggctgttcatgggcttccgcgaccgtacacccaagatctccaagaagggccagttccgcagcgcctcggccttcttctggggcctccac

SEQ ID NO: 99491 - DNA, 120 bp, Artificial Sequence
  ENSG00000091536_4 (sequence is synthesized)
accggcccccagaagaccaagcgcaagaggaaggcccgcaccgtgctcaagtccacgtcaaagctcatgacgcagatgcgcatgggcaagaagaagcgggcgatgaagggcaagaagccg

SEQ ID NO: 99492 - DNA, 120 bp, Artificial Sequence
  ENSG00000091536_5 (sequence is synthesized)
tccttcatggtgatccgcttcccaggccgccgtggctacggccgcctgcggccgcgcgcccggtcactcagcaaagcgtccacggccatcaactggctcacaaaaaagttcctcctcaag

SEQ ID NO: 99493 - DNA, 120 bp, Artificial Sequence
  ENSG00000091536_6 (sequence is synthesized)
aaggccgaggagtcgggcagcgaacaggccacagtggacgcctggctgcagcgctcgagctcccgcatgggctcccgcaaactccccttcccgtcgggtgccgagatcctgcggcctggg

SEQ ID NO: 99494 - DNA, 120 bp, Artificial Sequence
  ENSG00000091536_7 (sequence is synthesized)
ggccggctccggaggttcccccgcagccgcagcatctacgcgtcaggcgagcccctgggcttcctgcccttcgaggacgaggccccattccatcactcgggctcccgcaagtcgctgtac

SEQ ID NO: 99495 - DNA, 120 bp, Artificial Sequence
  ENSG00000091536_8 (sequence is synthesized)
gggcttgagggcttccaggacctgggcgagtattatgactatcaccgcgacggcgacgactactacgaccggcagtcactccaccgctacgaggagcaggaaccctacctggcgggcctc

SEQ ID NO: 99496 - DNA, 120 bp, Artificial Sequence
  ENSG00000091536_9 (sequence is synthesized)
ggcccctacagcccggcctggccaccctacggcgaccactactacgggtacccgcccgaggatccctacgactactaccaccccgactattacggtggcccctttgatccggggtacacc

SEQ ID NO: 99497 - DNA, 120 bp, Artificial Sequence
  ENSG00000091536_10 (sequence is synthesized)
tacggctacggctacgacgattacgaacccccatatgcgcccccgtcggggtactcgtctccttacagctaccacgatgggtacgagggcgaggcgcacccttatggctactacctggat

SEQ ID NO: 99498 - DNA, 120 bp, Artificial Sequence
  ENSG00000091536_11 (sequence is synthesized)
ccctatgcgccgtacgacgcgccatacccaccctatgacctcccataccacactccctacgatgtaccctactttgatccctacggagtccactacaccgtcccctatgccgaaggcgtc

SEQ ID NO: 99499 - DNA, 120 bp, Artificial Sequence
  ENSG00000091536_12 (sequence is synthesized)
tatggcggtggggacgaggccatctacccccccgaggtgccctatttttacccggaggagtcggcttcggcctttgtgtacccctgggtaccaccgcccatcccgtcgccccacaacccg

SEQ ID NO: 99500 - DNA, 120 bp, Artificial Sequence
  ENSG00000091536_13 (sequence is synthesized)
tatgcccacgccatggatgacatcgccgagctggaggaaccagaggacgcgggcgtagagcgtcaggggacctccttccgcctgcccagcgccgccttcttcgagcagcaaggcatggat

SEQ ID NO: 99501 - DNA, 120 bp, Artificial Sequence
  ENSG00000091536_14 (sequence is synthesized)
aagcccgccaggtccaagctgtccctcatccgcaagttccgcctcttcccgcgaccccaggtgaagctgtttgggaaggagaagctggaggtgcccctgccaccctctctggacattcct

SEQ ID NO: 99502 - DNA, 120 bp, Artificial Sequence
  ENSG00000091536_15 (sequence is synthesized)
ctccccttgggggatgcggacgaagaagaggacgaggaggagctgcccccggtttccgctgtgccctacggccaccctttctggggcttcctcacgccgcgccagcgcaacctccagcgc

SEQ ID NO: 99503 - DNA, 120 bp, Artificial Sequence
  ENSG00000091536_16 (sequence is synthesized)
gcgctgtcggccttcggcgcccaccggggcctgggcttcggccctgagtttggccgccccgtgcctcgccctgccacctcgcttgcgcggttcctcaagaagacgctgtcggagaagaag

SEQ ID NO: 99504 - DNA, 120 bp, Artificial Sequence
  ENSG00000091536_17 (sequence is synthesized)
cccatcgcgcggctcaggggcagccagaaggcccgggcgggcggccctgctgtcagggaggcggcctacaaacgcttcggctacaagctggctggcatggaccccgagaagcccggcacg

SEQ ID NO: 99505 - DNA, 120 bp, Artificial Sequence
  ENSG00000091536_18 (sequence is synthesized)
cccatcgtgctgaggagggcccagccacgcgctcgcagcagcaacgacgcgcgccgcccgcccgcgccacagcccgcgcccaggaccctctcccactggagcgcgctcctgtctccgccc

SEQ ID NO: 99506 - DNA, 80 bp, Artificial Sequence
  ENSG00000091536_19 (sequence is synthesized)
caggaccctctcccactggagcgcgctcctgtctccgcccgtgcccccgcggcccccaagctccgggcccccgcccgcgc

SEQ ID NO: 99507 - DNA, 120 bp, Artificial Sequence
  ENSG00000091536_20 (sequence is synthesized)
gccgccccagcgcacgtgccaccggcgccgcaggccagctggtgggccttcgtggagccccctgccgtgagcccggaggtgccccccgacctactagccttcccagggccccgaccctcg

SEQ ID NO: 99508 - DNA, 120 bp, Artificial Sequence
  ENSG00000091536_21 (sequence is synthesized)
ttcaggggctcccgccggagaggggcggctttcggcttccccggggcctctccacgggcgtcgcggaggcgagcttggtcaccgctggcctcgccccagccctcgctgaggagctcgccg

SEQ ID NO: 99509 - DNA, 120 bp, Artificial Sequence
  ENSG00000091536_22 (sequence is synthesized)
ggcctcggctactgctcacccttggcgcccccgtcgcctcagctgtccttgcgcacgggccccttccagccgcccttcctgcccccggcccgccggccccgctcgctgcaggagtcccca

SEQ ID NO: 99510 - DNA, 80 bp, Artificial Sequence
  ENSG00000091536_23 (sequence is synthesized)
cgccgctgccgggctcacccaggccgccctcgccgcccctggggctctgccacagcccgcggcgcagctccctgaatctg

SEQ ID NO: 99511 - DNA, 120 bp, Artificial Sequence
  ENSG00000091536_24 (sequence is synthesized)
tgaatctgccctcgcgcctcccgcacacgtggcggcgcctcagcgagccacccactcgggctgtgaagccgcaagtgcgcctgcccttccaccgaccgcccagggccggggcctggcggg

SEQ ID NO: 99512 - DNA, 120 bp, Artificial Sequence
  ENSG00000091536_25 (sequence is synthesized)
gaacaccgggagagcccgcgagaacccgaggactcagagacgccctggactgtgcccccactggcccccagctgggacgtggacatgcctcccacccaacgcccaccctccccctggcca

SEQ ID NO: 99513 - DNA, 120 bp, Artificial Sequence
  ENSG00000091536_26 (sequence is synthesized)
ggaggtgcaggcagccgccgaggcttttccaggccaccccctgtgccggaaaacccctttctccagctcctgggccctgtgccatcccccaccctccagcctgaggatccagctgctgat

SEQ ID NO: 99514 - DNA, 120 bp, Artificial Sequence
  ENSG00000091536_27 (sequence is synthesized)
atgaccagggtcttcctgggcagacaccatgagccggggcctggacagctcaccaaatcagctggcccaacccctgagaagcctgaagaagaggccaccctgggggacccccagctgcca

SEQ ID NO: 99515 - DNA, 120 bp, Artificial Sequence
  ENSG00000091536_28 (sequence is synthesized)
gcagagaccaagcctccaaccccagcacctcccaaggatgtcactccccccaaggatatcactccccccaaggatgtcctcccagagcaaaagacattaaggcccagcctctcataccca

SEQ ID NO: 99516 - DNA, 120 bp, Artificial Sequence
  ENSG00000091536_29 (sequence is synthesized)
ctggctgcgtgtgaccagaccagggccacatggccaccatggcaccgctggggaacactgccccaagccgcagcccccttggcgcccatcagggccccagagcccctgcccaaggggggt

SEQ ID NO: 99517 - DNA, 120 bp, Artificial Sequence
  ENSG00000091536_30 (sequence is synthesized)
gaacggcgccaggcagcccctgggcgttttgctgtggtcatgcctcgtgtgcagaagctgagctctttccagcgagttgggcctgcaaccctgaagcctcaagtccagcccattcaggac

SEQ ID NO: 99518 - DNA, 120 bp, Artificial Sequence
  ENSG00000091536_31 (sequence is synthesized)
cccaagccaagagcctgtagtcttcgctggtcctgcctctggcttcgggcagatgcctatggaccctggccacgagtacacacccatccccagtcctgccacctgggccctggagctgcc

SEQ ID NO: 99519 - DNA, 120 bp, Artificial Sequence
  ENSG00000091536_32 (sequence is synthesized)
tgcctgtcccttaggggctcctgggaggaggtcggcccgccaagctggcggaacaagatgcactccatccgcaacctgccatccatgcggttccgtgagcagcacggggaggatggtgtg

SEQ ID NO: 99520 - DNA, 120 bp, Artificial Sequence
  ENSG00000091536_33 (sequence is synthesized)
gaggacatgacacagctggaagacctccaggaaaccactgtgctgtccaacctcaagattagatttgaacggaacctcatctacacatacattgggagcatcctggtgtcggtgaaccca

SEQ ID NO: 99521 - DNA, 120 bp, Artificial Sequence
  ENSG00000091536_34 (sequence is synthesized)
taccaaatgtttggaatctatgggccggagcaggtgcagcagtacaacggacgggccctgggagagaatcccccgcacctctttgctgttgcaaatctcgccttcgccaaaatgctcgat

SEQ ID NO: 99522 - DNA, 120 bp, Artificial Sequence
  ENSG00000091536_35 (sequence is synthesized)
gccaaacagaaccagtgcataatcattagtggagagagcggctctggcaaaactgaggccaccaagctgattctgcgctacctggccgccatgaaccagaaacgggaggtcatgcagcag

SEQ ID NO: 99523 - DNA, 120 bp, Artificial Sequence
  ENSG00000091536_36 (sequence is synthesized)
ataaagatcctggaggcaacacccctcttggagtccttcggtaatgccaaaaccgtcaggaacgacaactccagccgctttgggaagtttgtggaaatctttctggaagggggcgtgatc

SEQ ID NO: 99524 - DNA, 120 bp, Artificial Sequence
  ENSG00000091536_37 (sequence is synthesized)
tctggtgccataacctcccagtacctgcttgagaaatccaggatcgtgtttcaggccaaaaacgagaggaattaccacatcttctacgagttgctggccgggttgcctgcccagctcagg

SEQ ID NO: 99525 - DNA, 120 bp, Artificial Sequence
  ENSG00000091536_38 (sequence is synthesized)
caggcctttagcctgcaagaggctgagacctactactatctgaaccagggtgggaactgtgagatagcaggaaagagcgatgcagatgactttcgccggctcctggctgccatggaggtg

SEQ ID NO: 99526 - DNA, 120 bp, Artificial Sequence
  ENSG00000091536_39 (sequence is synthesized)
ttgggcttcagcagtgaggaccaggacagcatcttccgcatcctggcctccatcctgcacctgggcaacgtctactttgagaagtatgagacggatgcacaggaggtggcctcagtggtg

SEQ ID NO: 99527 - DNA, 120 bp, Artificial Sequence
  ENSG00000091536_40 (sequence is synthesized)
agtgcccgagagatccaggccgtggcagagctgctgcagatctcccctgagggcctgcagaaggccatcaccttcaaagtgaccgagacaatgcgagagaagatcttcacgcccctaact

SEQ ID NO: 99528 - DNA, 120 bp, Artificial Sequence
  ENSG00000091536_41 (sequence is synthesized)
gtggagagcgctgtggatgccagggacgccatcgccaaggtcttgtatgcactgctgttcagctggctcatcaccagggtcaacgcgctggtgtccccaaggcaggacacactgtccatc

SEQ ID NO: 99529 - DNA, 120 bp, Artificial Sequence
  ENSG00000091536_42 (sequence is synthesized)
gccatcctggacatctatggtttcgaggacctgagcttcaacagctttgagcagctgtgtattaactacgcaaacgagaaccttcagtaccttttcaacaagatcgtcttccaggaggag

SEQ ID NO: 99530 - DNA, 120 bp, Artificial Sequence
  ENSG00000091536_43 (sequence is synthesized)
caggaggagtacatccgtgagcagatagactggcaggagatcacctttgctgacaaccagccctgcatcaacctcatctcactgaagccttatggcatcctgcggatccttgacgaccag

SEQ ID NO: 99531 - DNA, 120 bp, Artificial Sequence
  ENSG00000091536_44 (sequence is synthesized)
tgttgctttccccaggctacagaccacaccttcctacagaagtgccactaccatcatggcgccaacccgctctattccaaacccaagatgccgctgcctgagttcaccatcaagcactat

SEQ ID NO: 99532 - DNA, 120 bp, Artificial Sequence
  ENSG00000091536_45 (sequence is synthesized)
gcaggcaaggtcacctaccaggtgcacaagttcctggacaagaaccacgaccaagtgcgccaggatgtgctggacctgttcgtacggagccggacacgggtggtggcacacctcttctcc

SEQ ID NO: 99533 - DNA, 120 bp, Artificial Sequence
  ENSG00000091536_46 (sequence is synthesized)
agccatgccccacaggctgcccctcagcgcctgggcaagagcagctccgtcactcggctctacaaggcgcacactgtggccgccaagttccagcagtcactcctggatctggtggaaaag

SEQ ID NO: 99534 - DNA, 120 bp, Artificial Sequence
  ENSG00000091536_47 (sequence is synthesized)
atggagaggtgcaaccccttgttcatgcgttgcctgaagcccaaccacaagaaggagccaggtctctttgagccagatgtggtaatggcacaattacgctattcaggggtgctggagacc

SEQ ID NO: 99535 - DNA, 120 bp, Artificial Sequence
  ENSG00000091536_48 (sequence is synthesized)
gtgaggatccgcaaggagggatttccagtgcgcctgcctttccaggggttcatcgacaggtactgctgtctagtggccctcaagcatgacctgccggctaatggggacatgtgtgtgtca

SEQ ID NO: 99536 - DNA, 120 bp, Artificial Sequence
  ENSG00000091536_49 (sequence is synthesized)
agcaagctgttccttaaggaacacctataccagctgctggagagtatgcgagagcatgtcctgaatctggcagccctcactctgcagcgctgcctccgtggcttcttcattaagcggcga

SEQ ID NO: 99537 - DNA, 120 bp, Artificial Sequence
  ENSG00000091536_50 (sequence is synthesized)
ttccgctctctgcgccacaagatcatcctgctgcaaagccgggcccgtggctaccttgccaggcaacgctatcagcagatgaggaggagtctggtgaagttccggtccctggtacacgca

SEQ ID NO: 99538 - DNA, 120 bp, Artificial Sequence
  ENSG00000091536_51 (sequence is synthesized)
tacgtgagccgccgacgctatctcaagctgagggcagagtggaggtgccaggtggagggggcgctgctgtgggagcaggaggagctgagcaagcgggaggtagtcgctgtggggcacctg

SEQ ID NO: 99539 - DNA, 120 bp, Artificial Sequence
  ENSG00000091536_52 (sequence is synthesized)
gaggtaccggctgagctggctgggctcttgcaagcagtggcaggcctcgggctggcccaggtgcctcaggtggcccctgtgaggactcctcgactccaggctgagccccgtgtcacactg

SEQ ID NO: 99540 - DNA, 120 bp, Artificial Sequence
  ENSG00000091536_53 (sequence is synthesized)
cccctggacatcaacaactatcctatggccaagtttgtccagtgccacttcaaggaacctgcctttgggatgctgacagtgcccctgaggacacccctcacgcagctgccagccgagcac

SEQ ID NO: 99541 - DNA, 120 bp, Artificial Sequence
  ENSG00000091536_54 (sequence is synthesized)
catgcagaagccgtgagcatcttcaagctgatcctgcgcttcatgggcgacccccacctgcatggtgcccgggagaacatcttcgggaactacatcgtgcagaaggggctggcggtgcct

SEQ ID NO: 99542 - DNA, 120 bp, Artificial Sequence
  ENSG00000091536_55 (sequence is synthesized)
gagctgcgggatgagatcctggcacagctggccaatcaggtgtggcacaatcacaatgcccacaatgctgagcggggctggctgctgctggccgcctgcctcagtggctttgcaccttcc

SEQ ID NO: 99543 - DNA, 120 bp, Artificial Sequence
  ENSG00000091536_56 (sequence is synthesized)
ccgtgcttcaacaagtaccttctcaagtttgtgtctgattatgggcggaatggcttccaggctgtgtgtcagcaccgcctcatgcaggccatgggccgggcccaacagcagggctcgggg

SEQ ID NO: 99544 - DNA, 120 bp, Artificial Sequence
  ENSG00000091536_57 (sequence is synthesized)
gctgcccgcaccttacccccgacccagctcgagtggacagcgacctatgagaaggccagcatggcgctggacgtgggctgcttcaatggtgaccagttctcctgcccggtgcactcctgg

SEQ ID NO: 99545 - DNA, 120 bp, Artificial Sequence
  ENSG00000091536_58 (sequence is synthesized)
agtacgggggaagaggtggctggagacattctgaggcacagggggctggcagatggctggcgcggctggaccgtggccatgaagaatggtgtccagtgggcagagctggctggccacgac

SEQ ID NO: 99546 - DNA, 120 bp, Artificial Sequence
  ENSG00000091536_59 (sequence is synthesized)
tacgtgttagacctggtgtcggacctggagctgctcagggacttccctcgacagaagtcctacttcattgtgggcacagaggggcctgcagccagcaggggaggccccaaagtggtgttt

SEQ ID NO: 99547 - DNA, 120 bp, Artificial Sequence
  ENSG00000091536_60 (sequence is synthesized)
gggaacagctgggactcggatgaggacatgtccactagaccccagccccaggagcacatgcccaaagtacttgactctgatgggtacagcagccacaatcaggacggtacaaatggggag

SEQ ID NO: 99548 - DNA, 120 bp, Artificial Sequence
  ENSG00000091536_61 (sequence is synthesized)
actgaggcccaaagagggacagcaacccaccaagagtcagacagtcttggagagcctgctgtgccccacaaggggctggactgctacctggatagcctctttgaccctgtgctgtcctac

SEQ ID NO: 99549 - DNA, 120 bp, Artificial Sequence
  ENSG00000091536_62 (sequence is synthesized)
ggggatgcggacctggagaagccaacagccattgcctaccgcatgaaagggggaggccagcccggtggaggcagcagtagtggtactgaagacacccccaggagacccccagagccaaag

SEQ ID NO: 99550 - DNA, 120 bp, Artificial Sequence
  ENSG00000091536_63 (sequence is synthesized)
ccaatcccaggcctggatgcctccacattggctctgcagcaagccttcatccacaaacaggccgtgctgctggcccgggagatgaccctgcaggccacggcactccagcagcagcccctg

SEQ ID NO: 99551 - DNA, 120 bp, Artificial Sequence
  ENSG00000091536_64 (sequence is synthesized)
agtgctgccctgagatccttgcccgcagagaaacccccagcaccagaggcacagccgacgtctgtaggcaccggtccccctgccaaacccgtgctcctgcgtgccactccaaagcccttg

SEQ ID NO: 99552 - DNA, 120 bp, Artificial Sequence
  ENSG00000091536_65 (sequence is synthesized)
gccccagcccctctggccaaggctccaaggctccccatcaagcctgtggctgcccctgttctagctcaggatcaggcttctccagaaaccacttcaccctccccagagctggtccggtac

SEQ ID NO: 99553 - DNA, 120 bp, Artificial Sequence
  ENSG00000091536_66 (sequence is synthesized)
tctacgctcaactctgagcacttcccacagcccacacagcagatcaagaatattgtcaggcagtaccagcagccgttccggggaggccggcctgaggccctcaggaaggatggcgggaaa

SEQ ID NO: 99554 - DNA, 120 bp, Artificial Sequence
  ENSG00000091536_67 (sequence is synthesized)
gtgttcatgaagcggccagaccctcatgaggaggccctgatgatcctgaaagggcagatgacccacctggcagctgcacctggcacccaggtgtccagagaggccgtggccctggtgaag

SEQ ID NO: 99555 - DNA, 120 bp, Artificial Sequence
  ENSG00000091536_68 (sequence is synthesized)
ccggtgaccagtgcaccaaggccatccatggcacccacttcagctctgccctcgcgatcgctggagccccctgaggaactcacgcagacgcggctgcaccgcctcatcaatcccaacttc

SEQ ID NO: 99556 - DNA, 120 bp, Artificial Sequence
  ENSG00000091536_69 (sequence is synthesized)
tacggctatcaggacgccccctggaagatcttcctgcgcaaagaggtgttttaccccaaggacagctacagccatcctgtgcagcttgacctcctgttccggcagatcctgcacgacacg

SEQ ID NO: 99557 - DNA, 120 bp, Artificial Sequence
  ENSG00000091536_70 (sequence is synthesized)
ctctccgaggcctgccttcgcatctctgaggatgagaggctcaggatgaaggccttgtttgcccagaaccagctggacacacagaagcctctggtaacggaaagcgtgaagcgggccgtg

SEQ ID NO: 99558 - DNA, 120 bp, Artificial Sequence
  ENSG00000091536_71 (sequence is synthesized)
gtcagcactgcacgagacacctgggaggtctacttctcccgcatcttccccgccacgggcagcgtgggcactggtgtgcagctcctagctgtgtcccacgtgggcatcaaactcctgagg

SEQ ID NO: 99559 - DNA, 120 bp, Artificial Sequence
  ENSG00000091536_72 (sequence is synthesized)
atggtcaagggtggccaggaggccggcgggcagctgcgggtcctgcgtgcatacagctttgcagatatcctgtttgtgaccatgccctcccagaacatgctggagttcaacctggccagt

SEQ ID NO: 99560 - DNA, 120 bp, Artificial Sequence
  ENSG00000091536_73 (sequence is synthesized)
gagaaggtcatcctcttctcagcccgagcgcaccaggtcaagaccctggtagatgacttcatcttggagctgaagaaggactctgactacgtggtcgctgtgaggaacttcctgcctgag

SEQ ID NO: 99561 - DNA, 120 bp, Artificial Sequence
  ENSG00000091536_74 (sequence is synthesized)
gaccctgcgctgctggctttccacaagggtgacatcatacacctgcagcccctagagccacctcgagtgggctacagtgctggctgcgtggttcgcaggaaggtggtgtacctggaggag

SEQ ID NO: 99562 - DNA, 120 bp, Artificial Sequence
  ENSG00000091536_75 (sequence is synthesized)
ctgcgacgtagaggccccgactttggctggaggttcgggaccatccacgggcgcgtgggccgcttcccttcggagctggtgcagcccgctgctgcccccgacttcctgcagctgccaacg

SEQ ID NO: 99563 - DNA, 120 bp, Artificial Sequence
  ENSG00000091536_76 (sequence is synthesized)
gagccaggccgcggccgagcagccgccgtggccgctgctgtggcctctgcagccgctgcacaggaggtgggccgcaggagagagggtcccccagtcagggcccgctctgctgaccatggg

SEQ ID NO: 99564 - DNA, 120 bp, Artificial Sequence
  ENSG00000091536_77 (sequence is synthesized)
gaggacgccctggcgctcccaccctacacaatgctcgagtttgcccagaagtatttccgagaccctcagaggagaccccaggatggcctcaggctgaaatccaaggagcctcgggagtcc

SEQ ID NO: 99565 - DNA, 120 bp, Artificial Sequence
  ENSG00000091536_78 (sequence is synthesized)
agaaccttggaggacatgctttgcttcaccaagactcccctccaggaatccctcatcgaactcagcgacagcagcctcagcaagatggccaccgacatgttcctagctgtaatgaggttc

SEQ ID NO: 99566 - DNA, 120 bp, Artificial Sequence
  ENSG00000091536_79 (sequence is synthesized)
atgggggatgccccactgaagggccagagtgacctggacgtgctttgtaacctcctgaagctgtgcggggaccatgaggtcatgcgggatgaatgttactgccaagttgtgaagcagatc

SEQ ID NO: 99567 - DNA, 120 bp, Artificial Sequence
  ENSG00000091536_80 (sequence is synthesized)
acagacaataccagctccaagcaggacagctgccagcgaggctggaggctgctgtatatcgtgaccgcctaccacagctgctctgaggtcctccacccacacctcactcgcttcctccaa

SEQ ID NO: 99568 - DNA, 120 bp, Artificial Sequence
  ENSG00000091536_81 (sequence is synthesized)
gacgtgagccggaccccaggcctgccctttcaggggatcgccaaggcctgcgagcagaacctgcagaaaaccttgcgcttcggaggtcgtctggagctccccagcagcatagagcttcgg

SEQ ID NO: 99569 - DNA, 120 bp, Artificial Sequence
  ENSG00000091536_82 (sequence is synthesized)
gccatgttggcaggccgcagttccaagaggcaactctttcttcttcctggaggccttgaacgccatctcaaaatcaaaacatgcactgtggccctggacgtggtggaagagatatgtgct

SEQ ID NO: 99570 - DNA, 120 bp, Artificial Sequence
  ENSG00000091536_83 (sequence is synthesized)
gagatggctctgacacgccctgaggccttcaatgaatatgttatcttcgttgtcaccaaccgtggccagcatgtgtgcccactcagtcgccgtgcttacatcctggatgtggcctcagag

SEQ ID NO: 99571 - DNA, 120 bp, Artificial Sequence
  ENSG00000091536_84 (sequence is synthesized)
atggagcaggtggacggcggctacatgctctggttccggcgtgtgctctgggatcagccactcaagttcgagaatgagctatatgtgaccatgcactacaaccaggtcctgcctgactac

SEQ ID NO: 99572 - DNA, 120 bp, Artificial Sequence
  ENSG00000091536_85 (sequence is synthesized)
ctgaagggactcttcagcagtgtgccggccagccggcccagcgagcagctgctgcagcaggtgtccaagctggcttcactgcagcatcgcgccaaggaccacttctacctgccgagcgtg

SEQ ID NO: 99573 - DNA, 120 bp, Artificial Sequence
  ENSG00000091536_86 (sequence is synthesized)
cgggaagtccaggagtacatcccagcccagctctaccgtacaacggcaggctcgacctggctcaacctggtcagccagcaccggcagcagacacaggcgctcagcccccaccaggcccgt

SEQ ID NO: 99574 - DNA, 120 bp, Artificial Sequence
  ENSG00000091536_87 (sequence is synthesized)
gcccagtttctgggcctcctcagcgccttacctatgttcggctcctccttcttcttcatccagagctgcagcaacattgctgtgccagccccttgcatccttgccatcaaccacaatggc

SEQ ID NO: 99575 - DNA, 120 bp, Artificial Sequence
  ENSG00000091536_88 (sequence is synthesized)
ctcaactttctcagcacagagactcatgaattgatggtgaagttccccctgaaggagatccagtcgacgcggacccagcggcccacggccaactccagctacccctatgtggagattgcg

SEQ ID NO: 99576 - DNA, 120 bp, Artificial Sequence
  ENSG00000091536_89 (sequence is synthesized)
ctgggggacgtggcggcccagcgcaccttgcagctgcagctggagcagggactggaactgtgtcgtgtggtggccgtgcacgtggagaacctgctcagtgcccatgagaagcggctcaca

SEQ ID NO: 99577 - DNA, 120 bp, Artificial Sequence
  ENSG00000091536_90 (sequence is synthesized)
ttgccccccagcgagatcaccctgctctgacccagcccccagccctccagtaccttctgccagaagactcactgtgtggcctcagagaaatcactgaacctctcaggatcaatgacccct

SEQ ID NO: 99578 - DNA, 120 bp, Artificial Sequence
  ENSG00000091536_91 (sequence is synthesized)
gtaaggggccagagccttggaggacactaagaggaggcaggaggagcaactcaaatccccaagaacacaagaagacccatcctgaactgggatggaatggcagcatgcaaacttggatca

SEQ ID NO: 99579 - DNA, 120 bp, Artificial Sequence
  ENSG00000091536_92 (sequence is synthesized)
gatagcaggaggaactttcaaaagtctggcccactgtgcagtggagcagaaggcaggaccatgaggcctcctgccatgtacccattgcagaccctgcccctaactcctgcctatgacaca

SEQ ID NO: 99580 - DNA, 120 bp, Artificial Sequence
  ENSG00000091536_93 (sequence is synthesized)
gaagccccacaccagttgcccagatgaactggcctctgcctttggtttactcagggtctgatgttggaatctgctccaactccacaccctagcccttacatgtcctcctaaggggcccct

SEQ ID NO: 99581 - DNA, 120 bp, Artificial Sequence
  ENSG00000091536_94 (sequence is synthesized)
ccttgtgctgccagtcagcctggatttctggtctttggttatttctgtgcaaacaaaaggtgtgcctggcagccatttctccatggagttgctaagtggccggaaaacaagcctgaggga

SEQ ID NO: 99582 - DNA, 120 bp, Artificial Sequence
  ENSG00000091536_95 (sequence is synthesized)
ggaggcaggagttggagttaccttaggcccctgattcactgcctatgaacagaccatcccccactccttgggtatccccaaccccagacccccatcacttgatgggccacacaagtttga

SEQ ID NO: 99583 - DNA, 120 bp, Artificial Sequence
  ENSG00000091536_96 (sequence is synthesized)
gagtggtacaagggagaagtttgggaaaagccttcttggaaaatgggacattagcattgagttttgaaagatgagtaggagtttgctaagaatagatggaagacagcaggataaacattc

SEQ ID NO: 99584 - DNA, 120 bp, Artificial Sequence
  ENSG00000091536_97 (sequence is synthesized)
cagagaaaatcatgtttattccctgctgtatcttccagaacctaggaggatgcctaacagagagtaagcacttaaaaaatatttgtcatatgaatgaaaaaataaacgagtgaatgttga

SEQ ID NO: 99585 - DNA, 120 bp, Artificial Sequence
  ENSG00000091536_98 (sequence is synthesized)
ggtcaaccaacaatggctgctgtctctggtggggagggagccttagaggctgtgtggggtggaaatcatcaagaaaaaagaacttgacatttttgtgccttcccctccagagtcagacag

SEQ ID NO: 99586 - DNA, 120 bp, Artificial Sequence
  ENSG00000091536_99 (sequence is synthesized)
tcttggagagcctgctgtgccccacaaggggctggactgctacctggatagcctctttgaccctgtgctgtcctacggggatgcggtagggatggtgtggggtgggtcatttgcagacag

SEQ ID NO: 99587 - DNA, 120 bp, Artificial Sequence
  ENSG00000091536_100 (sequence is synthesized)
caggcacagcatgtacacccaagtcacacacttgtacagggtgacctgagagcttctcacagccagggtcatggggtggtgtgtcccatctggatgtctgctggaggctggacaaaggat

SEQ ID NO: 99588 - DNA, 120 bp, Artificial Sequence
  ENSG00000091536_101 (sequence is synthesized)
gagggtctcttcacagctagagatgctcttggctgatcctggaaggacccacagttagaagtgcacctctagcaaggtgtggtggcatgcctctgtagtcccaactacttaggaggctga

SEQ ID NO: 99589 - DNA, 120 bp, Artificial Sequence
  ENSG00000091536_102 (sequence is synthesized)
atttagggggcggggccgggtgtgaagcaaggccagggggcagtcggacagtacccactgaagccccgcccctgcaggtgttttaccccaaggacagctacagccatcctgtgcagcttg

SEQ ID NO: 99590 - DNA, 120 bp, Artificial Sequence
  ENSG00000091536_103 (sequence is synthesized)
cacagtgagggtttcttggtgcccgaaagtggcctgggctggtcaggtctcctaaggtccagccgtggcctgtcagtatctgttggtggccagacagcccagccctctgctttgcctgag

SEQ ID NO: 99591 - DNA, 120 bp, Artificial Sequence
  ENSG00000091536_104 (sequence is synthesized)
gggtctccgtgggcatttccatgtttgtggcctgaatctctctttatgtctccacatgacctgagagtccacaaaccctgctttgcctttttgcttcacttcccctttatggtcctgtgg

SEQ ID NO: 99592 - DNA, 120 bp, Artificial Sequence
  ENSG00000091536_105 (sequence is synthesized)
actctagcctgggggacaacagcgaaactccgtctcaaaaatatatatatatattaattaaataaaaaaacgaggtgccttctcctgactccctgatccccgcgctctccagctctgccc

SEQ ID NO: 99593 - DNA, 120 bp, Artificial Sequence
  ENSG00000091536_106 (sequence is synthesized)
gagttccagagaagggttaagaatgttcccaaatctccctaaaggacccccttagtcacaagacaagaccctcctgtttgcctcagaccttttacccacccctaggctggaggttcggga

SEQ ID NO: 99594 - DNA, 120 bp, Artificial Sequence
  ENSG00000091536_107 (sequence is synthesized)
tggcctctgcagccgctgcacaggagggatggcctcaggctgaaatccaaggagcctcgggagtccagaaccttggaggacatgctttgcttcaccaaggtactcccctccaggaatccc

SEQ ID NO: 99595 - DNA, 120 bp, Artificial Sequence
  ENSG00000091536_108 (sequence is synthesized)
gattccatgcctctgtccccatccgggccttacttttctcatctgtagaatgggcacaggacaatgtccttcactgagggtgaggccaagacccaggtgcacaagttcctggacaagaac

SEQ ID NO: 99596 - DNA, 120 bp, Artificial Sequence
  ENSG00000091536_109 (sequence is synthesized)
cacgaccaagtgcgccaggatgtgctggacctgttcgtacggagccggacacggtctcccggaccctgcctgtctgttttccctgccccgacccctgcccaggtggtggcacacctcttc

SEQ ID NO: 99597 - DNA, 120 bp, Artificial Sequence
  ENSG00000091536_110 (sequence is synthesized)
caaatgaaaccctcacacccaggaccatgtgaagatgaattactgtgttccactcatgcagggccagcacacagtacgtgcccaatgtgtgcatgctcttgttaccatcaggtccaccct

SEQ ID NO: 99598 - DNA, 120 bp, Artificial Sequence
  ENSG00000091536_111 (sequence is synthesized)
cctgtctccatctgtactacctcctcacttgctctccatctcctcaggatttttagaaccactcagcttgtcctcctgctcctcccagccctgggccttacctggcatgacctctacaca

SEQ ID NO: 99599 - DNA, 120 bp, Artificial Sequence
  ENSG00000091536_112 (sequence is synthesized)
gtctcagcagcttccccttttcccagaagcctccctagagagatcccctacctgttgtgaggcagagaagagaagaataggagaggaaagagtcgcagtgcttcccctacctggggaaga

SEQ ID NO: 99600 - DNA, 120 bp, Artificial Sequence
  ENSG00000091536_113 (sequence is synthesized)
tgtctggggccccatccccttctgtccctatccccaatcctgacttcccaagcagaatatgccttttgcatatcactgcgcagggaggggcatcctcaggggacaggagctgcctgagag

SEQ ID NO: 99601 - DNA, 120 bp, Artificial Sequence
  ENSG00000091536_114 (sequence is synthesized)
caccaaccgtggtgagtgccaggaagactgagcatgctgggcccattcccatccccgggccttgtgccatgtggggccctccacccagattttagggcccaagtcaggtgccacttcctc

SEQ ID NO: 99602 - DNA, 120 bp, Artificial Sequence
  ENSG00000091536_115 (sequence is synthesized)
cttagtttgcctcaccttatgatgagagccctctctcatccctccctttgtccctcaggacatgctcaatgtgaggacacaggccgtgccctcaaggagattacatcctggaaaggtttc

SEQ ID NO: 99603 - DNA, 120 bp, Artificial Sequence
  ENSG00000091536_116 (sequence is synthesized)
cattaatagcgccgcatattatggaacctataggaacctataggtgcaagccttctttcctgcctttcatgccttaataatggccagagaagcccctcccgaggtgtcactagcccctct

SEQ ID NO: 99604 - DNA, 120 bp, Artificial Sequence
  ENSG00000091536_117 (sequence is synthesized)
cgagggctcctgggaccctaggtgaccgtcatgcatcccaaagccccttccatctgctgactgcccactctagatcatggtcttccctcctgtcaccagctggtcagctccagcaacccc

SEQ ID NO: 99605 - DNA, 120 bp, Artificial Sequence
  ENSG00000091536_118 (sequence is synthesized)
cagccagctctccctactgctgcctcagtcctcagccatgtgccatcagccctgcctgcccaagtccagctaagacattaggggagaatggcaggtaacaaaacggtcctaataactgat

SEQ ID NO: 99606 - DNA, 82 bp, Artificial Sequence
  ENSG00000091536_119 (sequence is synthesized)
ggggagaatggcaggtaacaaaacggtcctaataactgatatttattgaacggatgctgtgccccaggtataattcaaagca

SEQ ID NO: 99607 - DNA, 78 bp, Artificial Sequence
  ENSG00000091536_120 (sequence is synthesized)
tttgggaggccgaggcgggtggatctcttgaggccaggagtttcaggtagccaaccatggtagtgtgcacctgtaatt

SEQ ID NO: 99608 - DNA, 82 bp, Artificial Sequence
  ENSG00000091536_121 (sequence is synthesized)
aaaatacaaaattagccaggcatggtgacgtttgcctgccactcaggagggtgaggcaggaggttgcagtgagctgagatcg

SEQ ID NO: 99609 - DNA, 120 bp, Artificial Sequence
  ENSG00000091536_122 (sequence is synthesized)
atcttccccgccacggtgcgagcccctcacttgccccctacctgtccagaggattcagggatgagacaagaggatcctcacacgcccttcatctctgccccagggcagcgtgggcactgg

SEQ ID NO: 99610 - DNA, 120 bp, Artificial Sequence
  ENSG00000091536_123 (sequence is synthesized)
ccaagacctccagccgccgaagcccagttccactgcttaccaccttcatgatctcaggtgaggaaactgaggtccagagaggtaaagtgatttgctcaaggtcacgcaagtcactgggga

SEQ ID NO: 99611 - DNA, 120 bp, Artificial Sequence
  ENSG00000091536_124 (sequence is synthesized)
actggtacttgaactggagtgagtctcctgcctcctacagatctgatttgcagggcaggggtaagagtggttgagactatcctcgcccacaggcctgtccggcccctctcctcctactcc

SEQ ID NO: 99612 - DNA, 120 bp, Artificial Sequence
  ENSG00000091536_125 (sequence is synthesized)
gatttgggtaggtgcaaatctagatttagagcttggaccaagggacaaagggtggagaggggccggagtgtcagcccaaagggtggtaggaactgagctgaagccacagcctgggtcaga

SEQ ID NO: 99613 - DNA, 120 bp, Artificial Sequence
  ENSG00000091536_126 (sequence is synthesized)
gaggggaagcaggaagcttagggttctgtgggagctggcacaatggggccaaggtggggctgggcttcaaatggggcaggacaggatcagaagcagcacaataggtggaaggagggcatc

SEQ ID NO: 99614 - DNA, 120 bp, Artificial Sequence
  ENSG00000091536_127 (sequence is synthesized)
tgttctggagggaaaggtgctgaggtgctgtgctcagagaggagtccccttggtgggggtccttcttctcctctactgggctgtcccaggcagagggagcagcaggaccctgagttggct

SEQ ID NO: 99615 - DNA, 120 bp, Artificial Sequence
  ENSG00000091536_128 (sequence is synthesized)
ctggcctaggaaacagggcaagagagacagcctgaggagccctgtgcaaccttggagagaggctgcttgctggggcctcagtctctgggtctgtaagttggggagaacagcctggacctc

SEQ ID NO: 99616 - DNA, 120 bp, Artificial Sequence
  ENSG00000091536_129 (sequence is synthesized)
ccagaacctctggagggttgaacaaggggatgcccagcacaggcaggcccaggacagagacgtgggaaactgcttccaggtcactctggggaaggatctttgttcatattcggcttgggc

SEQ ID NO: 99617 - DNA, 120 bp, Artificial Sequence
  ENSG00000091536_130 (sequence is synthesized)
cctgggcagccctgccctgatccaatctggatgacaggtctggcccctaacttcccctcagagattttggccaagccagatgtgaaactgccggacatgcctatccatcctgttccaccg

SEQ ID NO: 99618 - DNA, 120 bp, Artificial Sequence
  ENSG00000091536_131 (sequence is synthesized)
cacatccaggtctctgcagttcctcctgcctcctactgaccctcccccaaattaaagcctcctgtttcctcagggtttttgctgccctttgaagtcccctgggctgcaggattctggaat

SEQ ID NO: 99619 - DNA, 120 bp, Artificial Sequence
  ENSG00000091536_132 (sequence is synthesized)
aggtcagggtgaggggctcaggatccaaacttccagactcctcattgcacagagggaaaactgaaccaggagtccttctggaaccccatgaggggtgcagggtaggcagcccttcggatg

SEQ ID NO: 99620 - DNA, 120 bp, Artificial Sequence
  ENSG00000091536_133 (sequence is synthesized)
ggtgcccagcccatgcctggctgccacactcaaggtggaactcgagcctgatgctgggtggcccttggctgaggtgcgtggtcaccggagcctctctcaggatgccggggtggtgggcgg

SEQ ID NO: 99621 - DNA, 120 bp, Artificial Sequence
  ENSG00000091536_134 (sequence is synthesized)
ggcaagcaggggcagcaggtgcgtctcagcctctgcagaccatgcctggcggagcaggcagccagccgggcccaacaatggcaaccggggcagcctggctgctgagggggccctggcccc

SEQ ID NO: 99622 - DNA, 120 bp, Artificial Sequence
  ENSG00000091536_135 (sequence is synthesized)
ggcggcggatgccccgcgctgtgtgggctgcagcgttgcgggagcggggcgcagggcgtctaggggtgaggggcaaggatgcctgggtcctccttaccctggaatacgtgagtggctgaa

SEQ ID NO: 99623 - DNA, 120 bp, Artificial Sequence
  ENSG00000091536_136 (sequence is synthesized)
ttattcagggtctgcggctgctggcaagcacgtgggcagatgggtgggccggaggccagggccgaaagggtgatactcgctgtgccctacttagcagtccagcgacaggcatgcagggtt

SEQ ID NO: 99624 - DNA, 120 bp, Artificial Sequence
  ENSG00000091536_137 (sequence is synthesized)
ccttcctggtgtcctctttcctcgcctgctcagggtgcagctgggattggaaaggctgagggtgtacacgtgtgtgctcccagtcatgtggatcctgcgcaggcctgcatgcctgagcat

SEQ ID NO: 99625 - DNA, 120 bp, Artificial Sequence
  ENSG00000091536_138 (sequence is synthesized)
gtgtgcaagtgtgtaccacagccaaatgacgaaagctagtgtatggggtctgagcagatgtggcatccctgggggtcagggttgtttgcccaccctctgcccatgtgcacagacgtgtgc

SEQ ID NO: 99626 - DNA, 120 bp, Artificial Sequence
  ENSG00000091536_139 (sequence is synthesized)
tcacagaggagaccctgcagcccaaaggtggcatcaggacttccattcaccagacccccagcatagggagggacccagctgtgcgcccacatgtatgtgccaagtggacaggtagagcat

SEQ ID NO: 99627 - DNA, 120 bp, Artificial Sequence
  ENSG00000091536_140 (sequence is synthesized)
gtgcctgcacaccgtgtgcctccagccgggccccacaggcctgcgtatgtgcccacaggcctacaggaacacctgtgtgcctgggagttgtatgagctgtaaatgccattgagtgtgggt

SEQ ID NO: 99628 - DNA, 120 bp, Artificial Sequence
  ENSG00000091536_141 (sequence is synthesized)
ccatatgcaggtgtccacgcattttccccaggatgagcatggggttgtggtgctaagacagtctccatctctgccctcctagaggccccatgcaccaggtcacaagtgtcctttgagttg

SEQ ID NO: 99629 - DNA, 120 bp, Artificial Sequence
  ENSG00000091536_142 (sequence is synthesized)
tcacacaagccaacatatggggtctgctggtgctggaagagttgcggttgggagggagctggcccatgcgcccatgtacctgcatatgcctttgttcaccccctagggcaggacacttgg

SEQ ID NO: 99630 - DNA, 120 bp, Artificial Sequence
  ENSG00000091536_143 (sequence is synthesized)
gagctcatgggagggcctgcctgggcactgagggtatgcgtgtgtctcatgtgtgagggtcgcatgcaggttctgggggccacagcattctgtaatgaggagacctgcaggacccacctg

SEQ ID NO: 99631 - DNA, 120 bp, Artificial Sequence
  ENSG00000091536_144 (sequence is synthesized)
gccttggggttccctccccaacaatggtagcaggccccaggtatgaccaagccaggggtcagtgggggaggggggtgcccttcaacctgcagacacagcctctctctctcacacagatgc

SEQ ID NO: 99632 - DNA, 120 bp, Artificial Sequence
  ENSG00000091536_145 (sequence is synthesized)
actccatccgcaacctgccatccatgcggttccgtgagcagcacggggaggatggtgtggaggacatgacacagctggagtgagtgggcagggccggcggggtcagcaaggggtcaccat

SEQ ID NO: 99633 - DNA, 120 bp, Artificial Sequence
  ENSG00000091536_146 (sequence is synthesized)
ggggtccccaccctcccagccagagcagctcctcctgcagttgcctctcacctcccaggacattttcagagcctcagtcatgaagtgtcacaaagactaaatgtggtgtgctttgtgagt

SEQ ID NO: 99634 - DNA, 120 bp, Artificial Sequence
  ENSG00000091536_147 (sequence is synthesized)
tagacggactttggttcaaatcctagccccaccactcaccagctggcagacgttgcacaaatcgctttgtttctctgcacctcagtttctcatccacaaaatgggagtgggatggctgtt

SEQ ID NO: 99635 - DNA, 120 bp, Artificial Sequence
  ENSG00000091536_148 (sequence is synthesized)
gtgaggatgccagcacattggaggtactcaaaacatgagggccgtgttggtcagcatcattatctaatcacagtgattacgtaagagtgtcccccaaacccccaatgaagtaggtacaat

SEQ ID NO: 99636 - DNA, 120 bp, Artificial Sequence
  ENSG00000091536_149 (sequence is synthesized)
gattatcatacccattggacaaatgaagaaaaaggcacagaatagggaagtaatttgtccaaggtctcctagctggttggtgtcagaaacaggacttgaattcaggcctatctgatcaag

SEQ ID NO: 99637 - DNA, 120 bp, Artificial Sequence
  ENSG00000091536_150 (sequence is synthesized)
gcactgcactgagttggggagggagacccatgccagaaccagccctgggggcactgacggcttctctctgtgtccttctagagacctccaggaaaccactgtgctgtccaacctcaagat

SEQ ID NO: 99638 - DNA, 120 bp, Artificial Sequence
  ENSG00000091536_151 (sequence is synthesized)
tagatttgaacggaacctcatctacgtaaggcctggggctggccctgccctgggcctaggtcaggaaggcagctgcctcctggggccgggtgggacgcacagatttctcttgtgggccct

SEQ ID NO: 99639 - DNA, 120 bp, Artificial Sequence
  ENSG00000091536_152 (sequence is synthesized)
agcccctgtggcctctgcctagaatgccagagcctagaactaaaatctgaagtcttaaaacacagtcttagaatggtggatgccagaggccgggcacagtggctcaccctgtaatcccag

SEQ ID NO: 99640 - DNA, 120 bp, Artificial Sequence
  ENSG00000091536_153 (sequence is synthesized)
ctcctccctgatcttcagattctttccctcccgccagctcagacatggaacacatttaagagaatagaagctcccagctgcctgtggccaaggctcccagggaggggctcagccctgggg

SEQ ID NO: 99641 - DNA, 120 bp, Artificial Sequence
  ENSG00000091536_154 (sequence is synthesized)
cttcctggggtgggtgggcaactgggggtttggtgggtctgagtgggataggtctttcctacagctgtaatgaggttcatgggggatgccccactgaagggccagagtgacctggacgtg

SEQ ID NO: 99642 - DNA, 120 bp, Artificial Sequence
  ENSG00000091536_155 (sequence is synthesized)
ctttgtaacctcctgaaggtcagtccagccaactttgccagatgccccctttcctgctctgtggttcagtttccccatctatcaatgagtcacaggacattagggtgggaaacctctccc

SEQ ID NO: 99643 - DNA, 120 bp, Artificial Sequence
  ENSG00000091536_156 (sequence is synthesized)
atggtccaaagaggaatgcatcatgctggtggggagggggctgggaaagggacaccaggcctgtcttcaggtgcccaccctgttcttatgtacctggtatatgacatagcccctcacatg

SEQ ID NO: 99644 - DNA, 120 bp, Artificial Sequence
  ENSG00000091536_157 (sequence is synthesized)
taccaccttcatgatctcaggcaagtctcttccctcctctgagccttgctttcctcatctggaaaatgaggataagagttgagccccacccatagggctgttgtgaaggtgagatgaggt

SEQ ID NO: 99645 - DNA, 120 bp, Artificial Sequence
  ENSG00000091542_0 (sequence is synthesized)
gaggagcccgctaaggagcggcgctggcggacgtcgggctggctgcccgtgacgtcgtgcggagagctttaaagtgcgggccgggccgggcgtccgagggtctggtcgggagtcgggccg

SEQ ID NO: 99646 - DNA, 120 bp, Artificial Sequence
  ENSG00000091542_1 (sequence is synthesized)
cgtctccgcagcagccctccgcggcatgaggcgctgccggcgcccctgccccgcgggacgtggagaaggtggaggaggaagaagccccgttgtcgccaccgttgcatgacccgccgctcc

SEQ ID NO: 99647 - DNA, 120 bp, Artificial Sequence
  ENSG00000091542_2 (sequence is synthesized)
tgaggccctaccccacgcccggaccctcgacgccccccgccgggtcccccactcacgcatgggggttcggcgctaaggacccccctccctccgggggccccggggcgcgtccccttagag

SEQ ID NO: 99648 - DNA, 120 bp, Artificial Sequence
  ENSG00000091542_3 (sequence is synthesized)
ccatgcccggctgccccgcccgccccggaggaccctagagcagcgtcgtgggggccatggcggccgccagcggctacacggacctgcgtgagaagctcaagtccatgacgtcccgggaca

SEQ ID NO: 99649 - DNA, 120 bp, Artificial Sequence
  ENSG00000091542_4 (sequence is synthesized)
actataaggcgggcagccgggaggccgccgccgctgccgcagccgccgtagccgccgcagccgcagccgccgctgccgccgaaccttaccctgtgtccggggccaagcgcaagtatcagg

SEQ ID NO: 99650 - DNA, 120 bp, Artificial Sequence
  ENSG00000091542_5 (sequence is synthesized)
aggactcggaccccgagcgcagcgactatgaggagcagcagctgcagaaggaggaggaggcgcgcaaggtgaagagcggcatccgccagatgcgcctcttcagccaggacgagtgcgcca

SEQ ID NO: 99651 - DNA, 120 bp, Artificial Sequence
  ENSG00000091542_6 (sequence is synthesized)
agatcgaggcccgcattgacgaggtggtgtcccgcgctgagaagggcctgtacaacgagcacacggtggaccgggccccactgcgcaacaagtacttcttcggcgaaggctacacttacg

SEQ ID NO: 99652 - DNA, 120 bp, Artificial Sequence
  ENSG00000091542_7 (sequence is synthesized)
gcgcccagctgcagaagcgcgggcccggccaggagcgcctctacccgccgggcgacgtggacgagatccccgagtgggtgcaccagctggtgatccaaaagctggtggagcaccgcgtca

SEQ ID NO: 99653 - DNA, 120 bp, Artificial Sequence
  ENSG00000091542_8 (sequence is synthesized)
tccccgagggcttcgtcaacagcgccgtcatcaacgactaccagcccggcggctgcatcgtgtctcacgtggaccccatccacatcttcgagcgccccatcgtgtccgtgtccttcttta

SEQ ID NO: 99654 - DNA, 120 bp, Artificial Sequence
  ENSG00000091542_9 (sequence is synthesized)
gcgactctgcgctgtgcttcggctgcaagttccagttcaagcctattcgggtgtcggaaccagtgctttccctgccggtgcgcaggggaagcgtgactgtgctcagtggatatgctgctg

SEQ ID NO: 99655 - DNA, 120 bp, Artificial Sequence
  ENSG00000091542_10 (sequence is synthesized)
atgaaatcactcactgcatacggcctcaggacatcaaggagcgccgagcagtcatcatcctcaggaagacaagattagatgcaccccggttggaaacaaagtccctgagcagctccgtgt

SEQ ID NO: 99656 - DNA, 120 bp, Artificial Sequence
  ENSG00000091542_11 (sequence is synthesized)
taccacccagctatgcttcagatcgcctgtcaggaaacaacagggaccctgctctgaaacccaagcggtcccaccgcaaggcagaccctgatgctgcccacaggccacggatcctggaga

SEQ ID NO: 99657 - DNA, 120 bp, Artificial Sequence
  ENSG00000091542_12 (sequence is synthesized)
tggacaaggaagagaaccggcgctcggtgctgctgcccacacaccggcggaggggtagcttcagctctgagaactactggcgcaagtcatacgagtcctcagaggactgctctgaggcag

SEQ ID NO: 99658 - DNA, 120 bp, Artificial Sequence
  ENSG00000091542_13 (sequence is synthesized)
gagtctacccgccgccctcctgggaactctggctcatccttacgtagttgcccctccttttgttttgagggttttgtttttgttcattggggggtttttgttttttgttttttgtttttt

SEQ ID NO: 99659 - DNA, 120 bp, Artificial Sequence
  ENSG00000091542_14 (sequence is synthesized)
ttgattctatatatttttccttggttttgttgcctgttagggctgaagaatagaattggccaggacctaggttctcatattcttggtattcctcctggatggaaaggctgttggcatcaa

SEQ ID NO: 99660 - DNA, 120 bp, Artificial Sequence
  ENSG00000091542_15 (sequence is synthesized)
taggggacagaggctgatgctggagtggccagtagaggtggtggagcagagcagccatcttttaagtggggctgtatcaggctgggtttatttaaaagcaacaaaatgttttggttaaga

SEQ ID NO: 99661 - DNA, 120 bp, Artificial Sequence
  ENSG00000091542_16 (sequence is synthesized)
aaattattttgctttcagtgtaaatcttcgcagtgttctaaacaaagttcagtcttctgctcgcccctttccctcactgatgtctgcacttggttgaggtctcctggagcctcacaggct

SEQ ID NO: 99662 - DNA, 120 bp, Artificial Sequence
  ENSG00000091542_17 (sequence is synthesized)
ctgctgttctccacttctcacctgccatccacgccctgcaagctcatgcaaacaccctttcttcctcctgcggcagagttgttcaggttgcctgggcaggggcttaaacagtgccagccc

SEQ ID NO: 99663 - DNA, 120 bp, Artificial Sequence
  ENSG00000091542_18 (sequence is synthesized)
ctgccatcccaaagctattgttaagccccccaggcgtcctccacccacgcccactagcctgccatgtccacagttccttgggctgctgaggggctagtgcagtggtcctgacctctctta

SEQ ID NO: 99664 - DNA, 120 bp, Artificial Sequence
  ENSG00000091542_19 (sequence is synthesized)
tcaagagcacacttctttgctggttgctccttttgagcatatgcgtgtgattatttggaacagttagacttgccacgttgggtcagttttagaaattgtttctagctagagggactggtg

SEQ ID NO: 99665 - DNA, 120 bp, Artificial Sequence
  ENSG00000091542_20 (sequence is synthesized)
tccttccaagtctagcatttggggtatggaaaattgttgtggtgtgtggtagggtttttgttttcttttttgagttttttttccccctttagtctcctggctttttcctttcccttccct

SEQ ID NO: 99666 - DNA, 120 bp, Artificial Sequence
  ENSG00000091542_21 (sequence is synthesized)
tctccactggccagcttgggcctcatcctcatgtcatccttctaggaaggcgcctgccccatcttgtctgccggcagcatgcatccaaggccagagctcaggcctgcagactgggctggt

SEQ ID NO: 99667 - DNA, 120 bp, Artificial Sequence
  ENSG00000091542_22 (sequence is synthesized)
gcctcctccgcttcagggtatgggagttggtgaaggggctttcaaaaaataataaggaaaaaaaggtaaagtctttggtagcttctatccactcagatcctggaaggcagcaaggttttg

SEQ ID NO: 99668 - DNA, 120 bp, Artificial Sequence
  ENSG00000091542_23 (sequence is synthesized)
tggatctagattcattaggaatgtcttcttgtcagccaggccaggacccgggcttgccaagagcagaggccctcccagcaaccaggataccaccactttgggggctttgtgtacagaggt

SEQ ID NO: 99669 - DNA, 120 bp, Artificial Sequence
  ENSG00000091542_24 (sequence is synthesized)
ccgggtctgagacctcataggctgcagaaatctggggcagccaccatcaagaagcccctctcaggggccagaactcctttgccagcgtggatttctcaagtcgggactgcataattaaag

SEQ ID NO: 99670 - DNA, 120 bp, Artificial Sequence
  ENSG00000091542_25 (sequence is synthesized)
cagttgcagttttattttttttacagcttttttcccaaaaatgatttgtagttgtgtgtgcagcacttcgccctgatatgtgtgctctacaataaaaaccaaatctaatatattttgaaa

SEQ ID NO: 99671 - DNA, 120 bp, Artificial Sequence
  ENSG00000091542_26 (sequence is synthesized)
gaaacgtccgctccgggcggcggcggcagcggcggcaggctggcttgtaccccgacaacgcgcgtctggcttctgccggacgttcctatctgggttcagaactggggccgggtgctgcag

SEQ ID NO: 99672 - DNA, 120 bp, Artificial Sequence
  ENSG00000091542_27 (sequence is synthesized)
gcacagcctgtcattgggagtttccagacagaagtgttcccattccttactcctaaaggtggacttgaggagggtctttgaaagtcagctagaccaatctctagttgaacctcaaggaga

SEQ ID NO: 99673 - DNA, 120 bp, Artificial Sequence
  ENSG00000091542_28 (sequence is synthesized)
gtgaggtacagagcagagactgctggcttccaggtctagctggctcccacttggcctggccagagaattggtctgatggtgcccacaccttcaccggaggccctttggtgaccccatgca

SEQ ID NO: 99674 - DNA, 120 bp, Artificial Sequence
  ENSG00000091583_0 (sequence is synthesized)
aaaccactttggtagtgccagtgtgactcatccacaatgatttctccagtgctcatcttgttctcgagttttctctgccatgttgctattgcaggacggacctgtcccaagccagatgat

SEQ ID NO: 99675 - DNA, 120 bp, Artificial Sequence
  ENSG00000091583_1 (sequence is synthesized)
ttaccattttccacagtggtcccgttaaaaacattctatgagccaggagaagagattacgtattcctgcaagccgggctatgtgtcccgaggagggatgagaaagtttatctgccctctc

SEQ ID NO: 99676 - DNA, 120 bp, Artificial Sequence
  ENSG00000091583_2 (sequence is synthesized)
acaggactgtggcccatcaacactctgaaatgtacacccagagtatgtccttttgctggaatcttagaaaatggagccgtacgctatacgacttttgaatatcccaacacgatcagtttt

SEQ ID NO: 99677 - DNA, 120 bp, Artificial Sequence
  ENSG00000091583_3 (sequence is synthesized)
tcttgtaacactgggttttatctgaatggcgctgattctgccaagtgcactgaggaaggaaaatggagcccggagcttcctgtctgtgctcccatcatctgccctccaccatccatacct

SEQ ID NO: 99678 - DNA, 120 bp, Artificial Sequence
  ENSG00000091583_4 (sequence is synthesized)
tgtttggaaatgatacaattacctgcacgacacatggaaattggactaaattaccagaatgcagggaagtaaaatgcccattcccatcaagaccagacaatggatttgtgaactatcctg

SEQ ID NO: 99679 - DNA, 120 bp, Artificial Sequence
  ENSG00000091583_5 (sequence is synthesized)
caaaaccaacactttattacaaggataaagccacatttggctgccatgatggatattctctggatggcccggaagaaatagaatgtaccaaactgggaaactggtctgccatgccaagtt

SEQ ID NO: 99680 - DNA, 120 bp, Artificial Sequence
  ENSG00000091583_6 (sequence is synthesized)
gtaaagcatcttgtaaagtacctgtgaaaaaagccactgtggtgtaccaaggagagagagtaaagattcaggaaaaatttaagaatggaatgctacatggtgataaagtttctttcttct

SEQ ID NO: 99681 - DNA, 120 bp, Artificial Sequence
  ENSG00000091583_7 (sequence is synthesized)
gcaaaaataaggaaaagaagtgtagctatacagaggatgctcagtgtatagatggcactatcgaagtccccaaatgcttcaaggaacacagttctctggctttttggaaaactgatgcat

SEQ ID NO: 99682 - DNA, 120 bp, Artificial Sequence
  ENSG00000091583_8 (sequence is synthesized)
ccgatgtaaagccatgctaaggtggttttcagattccacacaaaatgtcacacttgtttcttgttcatccaaggaacctaattgaaatttaaaaataaagctactgaatttattgccgca

SEQ ID NO: 99683 - DNA, 120 bp, Artificial Sequence
  ENSG00000091592_0 (sequence is synthesized)
gttgactaggcgctgttcttgctggctggtgccccagggcctggagaggtctgaagaaacctgggagccagcagcccggggctccactctgggttctgaaagcccattccctgctctgcg

SEQ ID NO: 99684 - DNA, 120 bp, Artificial Sequence
  ENSG00000091592_1 (sequence is synthesized)
gctcctcccaccccacctcttctcagccttgcagctcaagggttgatctcaggagtccaggacccaggagagggaagaatctgaggaacacagaacagtgagcgttgcccacaccccatc

SEQ ID NO: 99685 - DNA, 120 bp, Artificial Sequence
  ENSG00000091592_2 (sequence is synthesized)
tcccgtcaccacatctcccctcaccctcaccctccctgcctggccctggaccccatcccaggacctccctatcagctgacttcttccagtgtcttgcaggcccctctgggctcctccctc

SEQ ID NO: 99686 - DNA, 120 bp, Artificial Sequence
  ENSG00000091592_3 (sequence is synthesized)
ccctggcttttcctaccactccccctctatcggcgtctatctgtaggtgccctgggatttataaaactgggttccgaatgctgaataagagacggtaagagccaaggcaaaggacagcac

SEQ ID NO: 99687 - DNA, 120 bp, Artificial Sequence
  ENSG00000091592_4 (sequence is synthesized)
tgttctctgcctgcctgataccctcaccacctgggaacatcccccagacaccctcttaactccgggacagagatggctggcggagcctggggccgcctggcctgttacttggagttcctg

SEQ ID NO: 99688 - DNA, 120 bp, Artificial Sequence
  ENSG00000091592_5 (sequence is synthesized)
aagaaggaggagctgaaggagttccagcttctgctcgccaataaagcgcactccaggagctcttcgggtgagacacccgctcagccagagaagacgagtggcatggaggtggcctcgtac

SEQ ID NO: 99689 - DNA, 120 bp, Artificial Sequence
  ENSG00000091592_6 (sequence is synthesized)
ctggtggctcagtatggggagcagcgggcctgggacctagccctccatacctgggagcagatggggctgaggtcactgtgcgcccaagcccaggaaggggcaggccactctccctcattc

SEQ ID NO: 99690 - DNA, 120 bp, Artificial Sequence
  ENSG00000091592_7 (sequence is synthesized)
ccctacagcccaagtgaaccccacctggggtctcccagccaacccacctccaccgcagtgctaatgccctggatccatgaattgccggcggggtgcacccagggctcagagagaagggtt

SEQ ID NO: 99691 - DNA, 120 bp, Artificial Sequence
  ENSG00000091592_8 (sequence is synthesized)
ttgagacagctgcctgacacatctggacgccgctggagagaaatctctgcctcactcctctaccaagctcttccaagctccccagaccatgagtctccaagccaggagtcacccaacgcc

SEQ ID NO: 99692 - DNA, 120 bp, Artificial Sequence
  ENSG00000091592_9 (sequence is synthesized)
cccacatccacagcagtgctggggagctggggatccccacctcagcccagcctagcacccagagagcaggaggctcctgggacccaatggcctctggatgaaacgtcaggaatttactac

SEQ ID NO: 99693 - DNA, 120 bp, Artificial Sequence
  ENSG00000091592_10 (sequence is synthesized)
acagaaatcagagaaagagagagagagaaatcagagaaaggcaggcccccatgggcagcggtggtaggaacgcccccacaggcgcacaccagcctacagccccaccaccacccatgggag

SEQ ID NO: 99694 - DNA, 120 bp, Artificial Sequence
  ENSG00000091592_11 (sequence is synthesized)
ccttctgtgagagagagcctctgttccacatggccctggaaaaatgaggattttaaccaaaaattcacacagctgctacttctacaaagacctcaccccagaagccaagatcccctggtc

SEQ ID NO: 99695 - DNA, 120 bp, Artificial Sequence
  ENSG00000091592_12 (sequence is synthesized)
aagagaagctggcctgattatgtggaggagaatcgaggacatttaattgagatcagagacttatttggcccaggcctggatacccaagaacctcgcatagtcatactgcagggggctgct

SEQ ID NO: 99696 - DNA, 120 bp, Artificial Sequence
  ENSG00000091592_13 (sequence is synthesized)
ggaattgggaagtcaacactggccaggcaggtgaaggaagcctgggggagaggccagctgtatggggaccgcttccagcatgtcttctacttcagctgcagagagctggcccagtccaag

SEQ ID NO: 99697 - DNA, 120 bp, Artificial Sequence
  ENSG00000091592_14 (sequence is synthesized)
gtggtgagtctcgctgagctcatcggaaaagatgggacagccactccggctcccattagacagatcctgtctaggccagagcggctgctcttcatcctcgatggtgtagatgagccagga

SEQ ID NO: 99698 - DNA, 120 bp, Artificial Sequence
  ENSG00000091592_15 (sequence is synthesized)
tgggtcttgcaggagccgagttctgagctctgtctgcactggagccagccacagccggcggatgcactgctgggcagtttgctggggaaaactatacttcccgaggcatccttcctgatc

SEQ ID NO: 99699 - DNA, 120 bp, Artificial Sequence
  ENSG00000091592_16 (sequence is synthesized)
acggctcggaccacagctctgcagaacctcattccttctttggagcaggcacgttgggtagaggtcctggggttctctgagtccagcaggaaggaatatttctacagatatttcacagat

SEQ ID NO: 99700 - DNA, 120 bp, Artificial Sequence
  ENSG00000091592_17 (sequence is synthesized)
gaaaggcaagcaattagagcctttaggttggtcaaatcaaacaaagagctctgggccctgtgtcttgtgccctgggtgtcctggctggcctgcacttgcctgatgcagcagatgaagcgg

SEQ ID NO: 99701 - DNA, 120 bp, Artificial Sequence
  ENSG00000091592_18 (sequence is synthesized)
aaggaaaaactcacactgacttccaagaccaccacaaccctctgtctacattaccttgcccaggctctccaagctcagccattgggaccccagctcagagacctctgctctctggctgct

SEQ ID NO: 99702 - DNA, 120 bp, Artificial Sequence
  ENSG00000091592_19 (sequence is synthesized)
gagggcatctggcaaaaaaagacccttttcagtccagatgacctcaggaagcatgggttagatggggccatcatctccaccttcttgaagatgggtattcttcaagagcaccccatccct

SEQ ID NO: 99703 - DNA, 120 bp, Artificial Sequence
  ENSG00000091592_20 (sequence is synthesized)
ctgagctacagcttcattcacctctgtttccaagagttctttgcagcaatgtcctatgtcttggaggatgagaaggggagaggtaaacattctaattgcatcatagatttggaaaagacg

SEQ ID NO: 99704 - DNA, 120 bp, Artificial Sequence
  ENSG00000091592_21 (sequence is synthesized)
ctagaagcatatggaatacatggcctgtttggggcatcaaccacacgtttcctattgggcctgttaagtgatgagggggagagagagatggagaacatctttcactgccggctgtctcag

SEQ ID NO: 99705 - DNA, 120 bp, Artificial Sequence
  ENSG00000091592_22 (sequence is synthesized)
gggaggaacctgatgcagtgggtcccgtccctgcagctgctgctgcagccacactctctggagtccctccactgcttgtacgagactcggaacaaaacgttcctgacacaagtgatggcc

SEQ ID NO: 99706 - DNA, 120 bp, Artificial Sequence
  ENSG00000091592_23 (sequence is synthesized)
cttcagctgattgagggcaggcagcacagatcaacatggagccccaccatggtagtcctgttcaggtgggtcccagtcacagatgcctattggcagattctcttctccgtcctcaaggtc

SEQ ID NO: 99707 - DNA, 120 bp, Artificial Sequence
  ENSG00000091592_24 (sequence is synthesized)
accagaaacctgaaggagctggacctaagtggaaactcgctgagccactctgcagtgaagagtctttgtaagaccctgagacgccctcgctgcctcctggagaccctgcggttggctggc

SEQ ID NO: 99708 - DNA, 120 bp, Artificial Sequence
  ENSG00000091592_25 (sequence is synthesized)
tgtggcctcacagctgaggactgcaaggaccttgcctttgggctgagagccaaccagaccctgaccgagctggacctgagcttcaatgtgctcacggatgctggagccaaacacctttgc

SEQ ID NO: 99709 - DNA, 120 bp, Artificial Sequence
  ENSG00000091592_26 (sequence is synthesized)
cagagactgagacagccgagctgcaagctacagcgactgcagctggtcagctgtggcctcacgtctgactgctgccaggacctggcctctgtgcttagtgccagccccagcctgaaggag

SEQ ID NO: 99710 - DNA, 120 bp, Artificial Sequence
  ENSG00000091592_27 (sequence is synthesized)
ctagacctgcagcagaacaacctggatgacgttggcgtgcgactgctctgtgaggggctcaggcatcctgcctgcaaactcatacgcctggggctggaccagacaactctgagtgatgag

SEQ ID NO: 99711 - DNA, 120 bp, Artificial Sequence
  ENSG00000091592_28 (sequence is synthesized)
atgaggcaggaactgagggccctggagcaggagaaacctcagctgctcatcttcagcagacggaaaccaagtgtgatgacccctactgagggcctggatacgggagagatgagtaatagc

SEQ ID NO: 99712 - DNA, 120 bp, Artificial Sequence
  ENSG00000091592_29 (sequence is synthesized)
acatcctcactcaagcggcagagactcggatcagagagggcggcttcccatgttgctcaggctaatctcaaactcctggacgtgagcaagatcttcccaattgctgagattgcagaggaa

SEQ ID NO: 99713 - DNA, 120 bp, Artificial Sequence
  ENSG00000091592_30 (sequence is synthesized)
agctccccagaggtagtaccggtggaactcttgtgcgtgccttctcctgcctctcaaggggacctgcatacgaagcctttggggactgacgatgacttctggggccccacggggcctgtg

SEQ ID NO: 99714 - DNA, 120 bp, Artificial Sequence
  ENSG00000091592_31 (sequence is synthesized)
gctactgaggtagttgacaaagaaaagaacttgtaccgagttcacttccctgtagctggctcctaccgctggcccaacacgggtctctgctttgtgatgagagaagcggtgaccgttgag

SEQ ID NO: 99715 - DNA, 120 bp, Artificial Sequence
  ENSG00000091592_32 (sequence is synthesized)
attgaattctgtgtgtgggaccagttcctgggtgagatcaacccacagcacagctggatggtggcagggcctctgctggacatcaaggctgagcctggagctgtggaagctgtgcacctc

SEQ ID NO: 99716 - DNA, 120 bp, Artificial Sequence
  ENSG00000091592_33 (sequence is synthesized)
cctcactttgtggctctccaagggggccatgtggacacatccctgttccaaatggcccactttaaagaggaggggatgctcctggagaagccagccagggtggagctgcatcacatagtt

SEQ ID NO: 99717 - DNA, 120 bp, Artificial Sequence
  ENSG00000091592_34 (sequence is synthesized)
ctggaaaaccccagcttctcccccttgggagtcctcctgaaaatgatccataatgccctgcgcttcattcccgtcacctctgtggtgttgctttaccaccgcgtccatcctgaggaagtc

SEQ ID NO: 99718 - DNA, 120 bp, Artificial Sequence
  ENSG00000091592_35 (sequence is synthesized)
accttccacctctacctgatcccaagtgactgctccattcggaaggccatagatgatctagaaatgaaattccagtttgtgcgaatccacaagccacccccgctgaccccactttatatg

SEQ ID NO: 99719 - DNA, 120 bp, Artificial Sequence
  ENSG00000091592_36 (sequence is synthesized)
ggctgtcgttacactgtgtctgggtctggttcagggatgctggaaatactccccaaggaactggagctctgctatcgaagccctggagaagaccagctgttctcggagttctacgttggc

SEQ ID NO: 99720 - DNA, 120 bp, Artificial Sequence
  ENSG00000091592_37 (sequence is synthesized)
cacttgggatcagggatcaggctgcaagtgaaagacaagaaagatgagactctggtgtgggaggccttggtgaaaccaggagatctcatgcctgcaactactctgatccctccagcccgc

SEQ ID NO: 99721 - DNA, 120 bp, Artificial Sequence
  ENSG00000091592_38 (sequence is synthesized)
atagccgtaccttcacctctggatgccccgcagttgctgcactttgtggaccagtatcgagagcagctgatagcccgagtgacatcggtggaggttgtcttggacaaactgcatggacag

SEQ ID NO: 99722 - DNA, 120 bp, Artificial Sequence
  ENSG00000091592_39 (sequence is synthesized)
gtgctgagccaggagcagtacgagagggtgctggctgagaacacgaggcccagccagatgcggaagctgttcagcttgagccagtcctgggaccggaagtgcaaagatggactctaccaa

SEQ ID NO: 99723 - DNA, 120 bp, Artificial Sequence
  ENSG00000091592_40 (sequence is synthesized)
gccctgaaggagacccatcctcacctcattatggaactctgggagaagggcagcaaaaagggactcctgccactcagcagctgaagtatcaacaccagcccttgacccttgagtcctggc

SEQ ID NO: 99724 - DNA, 120 bp, Artificial Sequence
  ENSG00000091592_41 (sequence is synthesized)
tttggctgacccttctttgggtctcagtttctttctctgcaaacaagttgccatctggtttgccttccagcactaaagtaatggaactttgatgatgcctttgctgggcattatgtgtcc

SEQ ID NO: 99725 - DNA, 120 bp, Artificial Sequence
  ENSG00000091592_42 (sequence is synthesized)
atgccagggatgccacagggggccccagtccaggtggcctaacagcatctcagggaatgtccatctggagctggcaagacccctgcagacctcatagagcctcatctggtggccacagca

SEQ ID NO: 99726 - DNA, 120 bp, Artificial Sequence
  ENSG00000091592_43 (sequence is synthesized)
gccaagcctagagccctccggatcccatccaggcgcaaagaggaataggagggacatggaaccatttgcctctggctgtgtcacagggtgagccccaaaattggggttcagcgtgggagg

SEQ ID NO: 99727 - DNA, 120 bp, Artificial Sequence
  ENSG00000091592_44 (sequence is synthesized)
ccacgtggattcttggctttgtacaggaagatctacaagagcaagccaacagagtaaagtggaaggaagtttattcagaaaataaaggagtatcacagctcttttagaatttgtctagca

SEQ ID NO: 99728 - DNA, 120 bp, Artificial Sequence
  ENSG00000091592_45 (sequence is synthesized)
ggctttccagtttttaccagaaaacccctataaattaaaaattttttacttaaatttaagaattaaaaaaatacaaaaaagaaaaaatgaaaataaaggaataagaagttacctactcca

SEQ ID NO: 99729 - DNA, 120 bp, Artificial Sequence
  ENSG00000091592_46 (sequence is synthesized)
agccatgaaacaggggcttcccatagaagatagtaatcacaaagtatgattttatgtcacctccaaagacttcccacagagttccaagaaatatcagctaacagtcaaaaatctcacaaa

SEQ ID NO: 99730 - DNA, 120 bp, Artificial Sequence
  ENSG00000091592_47 (sequence is synthesized)
aaaccaggaaggaacaccagccagccgtggaacctcaggtgcaacagagacgccaggagatactagtgcccagcagcctgcggcagtaccaatgaagccagagagggcttggtggatgac

SEQ ID NO: 99731 - DNA, 120 bp, Artificial Sequence
  ENSG00000091592_48 (sequence is synthesized)
aaggaggcctgagtagaccgcaggtgggtctgagaaatgggcttaggtgaggcaggtctttgaaggatttgttcttaatcatatgcgagatgctcaaaaggctggatgcctgcttttgtg

SEQ ID NO: 99732 - DNA, 120 bp, Artificial Sequence
  ENSG00000091592_49 (sequence is synthesized)
ggtgaagagcaagaagagaaaacaggttgtacacatacagatgcagatggagagacagagaaaaaaaaggaagaaggcagagaaatgcaccaattcttgagctgtattatctctggacct

SEQ ID NO: 99733 - DNA, 120 bp, Artificial Sequence
  ENSG00000091592_50 (sequence is synthesized)
tgggattgtgggaggctttattttactactgattttgcctacactgttttctcaatttctagttttctacaaagatgatgtgttagctttttcacgcattaagattaaaatttaaaacag

SEQ ID NO: 99734 - DNA, 120 bp, Artificial Sequence
  ENSG00000091592_51 (sequence is synthesized)
gagctgtctcaccaggagaccacgtcctggaagtgtccgggactcgcgggacctgtggctgcagaccccgccggcacgcaggcccagagctggcgcactcctgaggatgagactctgggg

SEQ ID NO: 99735 - DNA, 120 bp, Artificial Sequence
  ENSG00000091592_52 (sequence is synthesized)
gccctagccggggtccacgggagggctgtccttggggactctaggatggcttcgttctggcccggctcacttctggagctgtgagacccaagacaaaaggggctgagggatttctcattg

SEQ ID NO: 99736 - DNA, 120 bp, Artificial Sequence
  ENSG00000091592_53 (sequence is synthesized)
acaagagttcgtgcgggaaaaccacctgatccctagggatttgtcatcttaagactcaaaaggcttaataccaggaaccaccttggcaagatatttacccaccggccatctctgtttact

SEQ ID NO: 99737 - DNA, 120 bp, Artificial Sequence
  ENSG00000091592_54 (sequence is synthesized)
catgaatgttaaatgttaaaacgcagcgctctaaccctgcatattatttacttgcaaatgtctgtaatctgtaattgtgatgcctctgatggaataaattatctttttcagtctcctcta

SEQ ID NO: 99738 - DNA, 120 bp, Artificial Sequence
  ENSG00000091592_55 (sequence is synthesized)
aaaaagaaaaagagaaaaaaacaaaaggctgttgcaatactgcaagctacagttgaaggtcacttgactaggaaggtagcgagggagatggagaaaagtatatgaattcagggttgattt

SEQ ID NO: 99739 - DNA, 120 bp, Artificial Sequence
  ENSG00000091592_56 (sequence is synthesized)
tgaaggcagagccaacaggacctgctggattgcctgtgtagggaaggacttaagcatgattccgagtttggagcctgcatgctcagtggatggtcctatcctttactgagtttggggaaa

SEQ ID NO: 99740 - DNA, 120 bp, Artificial Sequence
  ENSG00000091592_57 (sequence is synthesized)
ctggaaagggagcatgtttggaagacagtggggaatcaagagttctgtcttagctgggatttaggaaaggggatggatataaatttttgtcaatcgacagtgggtggagtttagggtcca

SEQ ID NO: 99741 - DNA, 120 bp, Artificial Sequence
  ENSG00000091592_58 (sequence is synthesized)
ttgggaagacaggctttgggctggagaaatgagggtttggattcaagatgggggaggtgaaggaagaaggatctggcttaggattatgagcactacgtttaaggacaagccctgacttac

SEQ ID NO: 99742 - DNA, 120 bp, Artificial Sequence
  ENSG00000091592_59 (sequence is synthesized)
ccgtgaggtactcagttgtgtcctcatccttctgtggaaaattgggaaaagagcaatgtctgaaggtgatggttgatttcagtacagggatcatcagagtgtccttatggagccaagcag

SEQ ID NO: 99743 - DNA, 120 bp, Artificial Sequence
  ENSG00000091592_60 (sequence is synthesized)
ggccaagaaggtgtcaggtggggaaagaccttccatgcaagatgaacagggtggcaactcaactctttgcctcttcaggaactggagctctgctatcgaagccctggagaagaccagctg

SEQ ID NO: 99744 - DNA, 120 bp, Artificial Sequence
  ENSG00000091592_61 (sequence is synthesized)
gacagaacaaaagtaaccaaatctattctctctgaggaagatcatatgtagagagcagaggtctgtgtgtgtgaaagaaaacggggaagaggatgaaaatgtccagagtggtgagctctg

SEQ ID NO: 99745 - DNA, 120 bp, Artificial Sequence
  ENSG00000091592_62 (sequence is synthesized)
ctaggccctggaatgaagctgagatgctggaagcgctaagttctctctagtgggagaaaacccactgtggaaagctaatcatttgatgtagaacctcaccaacgaccaggaagaagcaat

SEQ ID NO: 99746 - DNA, 120 bp, Artificial Sequence
  ENSG00000091592_63 (sequence is synthesized)
cagtgcccagctaggctaaactgggcctgcgatagggtgtgagtagggccagcttcctggaagtgcaacctgtgcaatggcagtaggcccccatgcttggggtttaatgcgtggcagtca

SEQ ID NO: 99747 - DNA, 120 bp, Artificial Sequence
  ENSG00000091592_64 (sequence is synthesized)
gtgccttgaaactcttaataattgtatctttgaatttgtgctttgtaagtgaagtttgatgggacctggagcatgcataggggcaggaagggagggtaggggggcttggagccacagctc

SEQ ID NO: 99748 - DNA, 120 bp, Artificial Sequence
  ENSG00000091592_65 (sequence is synthesized)
atgtggaatcccacctgccaggtgccacctcacagcgcccagacaggttcttagcttcccactgtctgccccgtggagccccaggctttactcagcctccccttctctgccttgctcagc

SEQ ID NO: 99749 - DNA, 120 bp, Artificial Sequence
  ENSG00000091592_66 (sequence is synthesized)
aaccattgctacccctaaccccagcaggggattgagtggagcacggggatgatcagcattggatgtgagctcccagaagcctctcagggtggggcaggcagctgaccctgcattgggcta

SEQ ID NO: 99750 - DNA, 120 bp, Artificial Sequence
  ENSG00000091592_67 (sequence is synthesized)
gaagtgccacagcaccttcagcaggtgactaggcttatccaggcacatcctagtgtagaggttgcaatacacttgcaggtttcccatcaactgtgggtttgggtagaggacctgtggaaa

SEQ ID NO: 99751 - DNA, 120 bp, Artificial Sequence
  ENSG00000091592_68 (sequence is synthesized)
ggggagattcctggcttgacttcccttctcccagccagggcacgcatataaattagaagttggcaggagaggaattcggcagccatggtttccaggataacaaatagctatagcccaggc

SEQ ID NO: 99752 - DNA, 120 bp, Artificial Sequence
  ENSG00000091592_69 (sequence is synthesized)
agcagagattcccagaaggtccttctctcccacccacccactgacacatacaccccaccaccaccaccaccaccaaagcctgtttcctcagctgggcatgaacacttcgagctaaaagtg

SEQ ID NO: 99753 - DNA, 120 bp, Artificial Sequence
  ENSG00000091592_70 (sequence is synthesized)
gcctttgtgaattttgcctcttgctctgtgtacacattctaaagggaacaagtctgttttgctgcagggtgaggcccagaatgcggcctgggaaaggctaacagggcacagtctttgatg

SEQ ID NO: 99754 - DNA, 120 bp, Artificial Sequence
  ENSG00000091592_71 (sequence is synthesized)
gtgagcaagcctggggtgggtagctgaggggattgggaggtatacctcttacccttgggtcagagagatgtgggttagaaccccagcagtcagtgttttattctattctattctattcta

SEQ ID NO: 99755 - DNA, 120 bp, Artificial Sequence
  ENSG00000091592_72 (sequence is synthesized)
agtcagtattagtggcagattttagattccttcacctctcagcctcagtttcctcattggaacattggagaaaatactggtgcctaatttagggggtcatgaaaattaagtgagaccatc

SEQ ID NO: 99756 - DNA, 120 bp, Artificial Sequence
  ENSG00000091592_73 (sequence is synthesized)
tctgcagaaatgttgagcacagttcccagcacacagtcggtggccagtgattggctgctgctgctgctgctgctatcatccatgtgtgtcctaggattcctcatagagggggtcaccaac

SEQ ID NO: 99757 - DNA, 120 bp, Artificial Sequence
  ENSG00000091592_74 (sequence is synthesized)
atgatcaactggccattgtccagatccaggctttggcctggcagactcaaatctctgattcctattgactcagacagtgtatctttcttccagaggcaaatacccctaaatggatgaagg

SEQ ID NO: 99758 - DNA, 120 bp, Artificial Sequence
  ENSG00000091592_75 (sequence is synthesized)
aaacctatcaaagtatagcaccggagaaaagatccccctagaagaggcctctctcacctctgagaggggtatgtactctgggcaggtcccagaagcaggagctaaaggtagcctttgtcc

SEQ ID NO: 99759 - DNA, 120 bp, Artificial Sequence
  ENSG00000091592_76 (sequence is synthesized)
attcagggtttttttttggtggattctggctccaggccctggactcatgaggtttttcctggaacgctctggtgtcgagcagagtgtgaagttgtagcttgggatcttccagtatctgtc

SEQ ID NO: 99760 - DNA, 120 bp, Artificial Sequence
  ENSG00000091592_77 (sequence is synthesized)
ctgtcagggatgtctagtggtcctgaagtccctgggctgggacgaagttagctcttgttgctgggcataggcatagcttgcaccaggatgaggccatggagtcagccaagctctctcaat

SEQ ID NO: 99761 - DNA, 120 bp, Artificial Sequence
  ENSG00000091592_78 (sequence is synthesized)
tcctgacagacagagcccccaggggtcacctgggctgggaccagcactgttttgtgatatattcatttctgtacaggtagaccaggtaaaaaataataaggtgtcctagagacacctggg

SEQ ID NO: 99762 - DNA, 120 bp, Artificial Sequence
  ENSG00000091592_79 (sequence is synthesized)
cctctgctgtctgagctccggatttagcctcacatcttctcaatatgcaaaggaccctgcagttactaaagcatttttaacacctgcactcctcactgacacccagctcctccccaataa

SEQ ID NO: 99763 - DNA, 120 bp, Artificial Sequence
  ENSG00000091592_80 (sequence is synthesized)
gcctttgcatggttctgcccgagaccctcttggttactgagacttccccactacctactcccacttaagctgcataggtaggtttgggtgactttctcaatgccacagccttacataaag

SEQ ID NO: 99764 - DNA, 120 bp, Artificial Sequence
  ENSG00000091592_81 (sequence is synthesized)
ctcttccatcccactctacacacccttccattccaccttgaaaaccctctcattgcaccctacacaccctttcattctagcctcacatccttccaatcatccatcacacaattccatttc

SEQ ID NO: 99765 - DNA, 120 bp, Artificial Sequence
  ENSG00000091592_82 (sequence is synthesized)
acccttcacacccttccattccaccttgaaaaccctcccattgcaccctacacaccctttcattctagcctcacatccttccattcatgcatcacacaattccatttcacccttcacacc

SEQ ID NO: 99766 - DNA, 120 bp, Artificial Sequence
  ENSG00000091592_83 (sequence is synthesized)
cttccagtccattattcattcacaccatttcattccattcttcacgccattccattacaaccttcatattcttccactccaccttacacaccttatattccacccttgacactcttccag

SEQ ID NO: 99767 - DNA, 120 bp, Artificial Sequence
  ENSG00000091592_84 (sequence is synthesized)
tccactacatgtccttccgtttctctcttcacatcttccatttcaccctaagcaacctcccatttcacccttcacacccttcaattccacccttcacacccctccatgacatccttcaag

SEQ ID NO: 99768 - DNA, 120 bp, Artificial Sequence
  ENSG00000091592_85 (sequence is synthesized)
ctcttccgtgccacccttaacatcctctcattccacttttcactctctggtccttccatgtccttccattctgccttctgcaaccttccattccattcttcacattctttcactccacct

SEQ ID NO: 99769 - DNA, 120 bp, Artificial Sequence
  ENSG00000091592_86 (sequence is synthesized)
ccattcttcacattctttcactccacctaaaccatccttccattccaccctccacacctttcaatttcacccttcatatacttccacccggcttggcgcagtggctcatgccagtaatcc

SEQ ID NO: 99770 - DNA, 89 bp, Artificial Sequence
  ENSG00000091592_87 (sequence is synthesized)
gcaggtggatcacttgaggtcaggaagttcaaaaccagcctggcccatgtggtgaaaccctgtctctactgctgggcctgtaatcccag

SEQ ID NO: 99771 - DNA, 88 bp, Artificial Sequence
  ENSG00000091592_88 (sequence is synthesized)
ggaactgcaccattttacattctcaacatcacggatgagggttccatcttctcctcatccagccaactggaagcccttttagctgagg

SEQ ID NO: 99772 - DNA, 120 bp, Artificial Sequence
  ENSG00000091592_89 (sequence is synthesized)
ttctcctcatccagccaactggaagcccttttagctgaggtggttaagctgtgagaaccagagtttgctgctgccgttattcactgcatcattcattcagcaaaaacctgagtacctacc

SEQ ID NO: 99773 - DNA, 120 bp, Artificial Sequence
  ENSG00000091592_90 (sequence is synthesized)
ggttacagcgtttcagcatcctggccttggttcaccccggggcctttcacttgcaggaggcagggagttctctgatggcagtttgagttggatttgctgcaactaacaaagccggccagt

SEQ ID NO: 99774 - DNA, 80 bp, Artificial Sequence
  ENSG00000091622_0 (sequence is synthesized)
gctcggagtccgttcggggccggaggcggtcggggccgggcccgggaagcgcgaggagcgcgcgtagcgccgccggagcc

SEQ ID NO: 99775 - DNA, 120 bp, Artificial Sequence
  ENSG00000091622_1 (sequence is synthesized)
tagcgccgccggagcccgccgcccgggacatggccaaggcgggccgtgcaggtggtcctcccccgggcggcggtgccccctggcaccttcgaaatgtcctcagtgactctgtggagagct

SEQ ID NO: 99776 - DNA, 120 bp, Artificial Sequence
  ENSG00000091622_2 (sequence is synthesized)
cagatgatgaattctttgatgccagagaggagatggctgaagggaagaatgccatcctcattgggatgagccagtggaactccaatgacctcgtggagcagatcgagaccatggggaaac

SEQ ID NO: 99777 - DNA, 120 bp, Artificial Sequence
  ENSG00000091622_3 (sequence is synthesized)
tggacgagcatcaaggagaagggaccgcgccgtgcacatccagcatcctccaggagaagcagcgagaactgtaccgggtttccttgagaagacagaggttcccagcccagggaagcatcg

SEQ ID NO: 99778 - DNA, 120 bp, Artificial Sequence
  ENSG00000091622_4 (sequence is synthesized)
agatccacgaagacagcgaggaaggctgcccgcagcgctcctgcaagacacatgtcctcctgctggtcctgcatgggggaaacatcctggacacgggtgccggggacccgtcctgcaagg

SEQ ID NO: 99779 - DNA, 120 bp, Artificial Sequence
  ENSG00000091622_5 (sequence is synthesized)
cagccgacatccacaccttcagctccgtgctggagaaggtcacacgagcccatttccctgctgccctgggccacatcctcatcaagttcgtcccctgtcctgccatctgctctgaggctt

SEQ ID NO: 99780 - DNA, 120 bp, Artificial Sequence
  ENSG00000091622_6 (sequence is synthesized)
tctcgcttgtctctcacctgaacccctacagccacgatgagggctgcctcagcagcagccaggaccacgtccctctggccgcccttcccctgttggccatctcctccccgcagtaccagg

SEQ ID NO: 99781 - DNA, 120 bp, Artificial Sequence
  ENSG00000091622_7 (sequence is synthesized)
atgctgtcgccaccgtcatcgagcgagccaaccaggtctacagagagttcctgaagtcctctgatgggattggcttcagtgggcaggtgtgtctcatcggggactgtgtggggggcctcc

SEQ ID NO: 99782 - DNA, 120 bp, Artificial Sequence
  ENSG00000091622_8 (sequence is synthesized)
tggccttcgatgccatctgctacagtgcggggccctcaggggacagccctgccagcagcagccggaaggggagcatcagcagcacccaggacaccccagtcgcggtggaggaagattgca

SEQ ID NO: 99783 - DNA, 120 bp, Artificial Sequence
  ENSG00000091622_9 (sequence is synthesized)
gcctggccagcagcaagcgtctcagcaaaagcaacattgacatctccagtgggttggaggatgaggagcccaagaggccgttgccgcggaaacagagcgactcctccacctatgactgcg

SEQ ID NO: 99784 - DNA, 120 bp, Artificial Sequence
  ENSG00000091622_10 (sequence is synthesized)
aggccatcacccagcaccatgccttcctctcaagcatccactccagcgtgctaaaggatgagtctgagaccccggcggctggggggccgcagctccctgaggtcagcctgggccgctttg

SEQ ID NO: 99785 - DNA, 120 bp, Artificial Sequence
  ENSG00000091622_11 (sequence is synthesized)
acttcgatgtgtccgacttcttcctcttcggctcgccactgggcctggtcctggccatgcggaggacggtgctgcctgggctggacggcttccaggtgcgtcctgcctgcagccaggtct

SEQ ID NO: 99786 - DNA, 120 bp, Artificial Sequence
  ENSG00000091622_12 (sequence is synthesized)
acagcttcttccattgcgcagacccctctgcctcacggctcgagccactgctggagcccaagttccacctggtgccgcctgtcagcgtgcctcgctaccagaggttcccactgggcgatg

SEQ ID NO: 99787 - DNA, 120 bp, Artificial Sequence
  ENSG00000091622_13 (sequence is synthesized)
ggcagtccctcctcctcgctgatgccctacacacccacagccccctcttcctggagggcagctcccgggacagcccgccacttctggatgcccctgcctcgccccctcaggcctcgaggt

SEQ ID NO: 99788 - DNA, 120 bp, Artificial Sequence
  ENSG00000091622_14 (sequence is synthesized)
tccagcgcccaggacggaggatgagcgaggggagctcccacagcgagagctcggagtcctcggacagcatggcacccgtgggtgcctcccgcatcacagccaagtggtggggaagcaaga

SEQ ID NO: 99789 - DNA, 120 bp, Artificial Sequence
  ENSG00000091622_15 (sequence is synthesized)
ggatcgactatgccctgtactgccctgatgtcctcacggccttccccaccgtggccctgccccacctcttccacgccagttactgggagtccacagacgtggtggccttcatcctgagac

SEQ ID NO: 99790 - DNA, 120 bp, Artificial Sequence
  ENSG00000091622_16 (sequence is synthesized)
aggtaatgcgctatgagagcgtgaacatcaaggaaagcgcccgcctggaccctgcagcactgagtcctgccaacccccgggagaagtggcttcgtaagcggactcaggtcaagctgagga

SEQ ID NO: 99791 - DNA, 120 bp, Artificial Sequence
  ENSG00000091622_17 (sequence is synthesized)
atgtcacggctaatcaccgggccaatgatgtgattgctgctgaagatggcccccaggtcctggtggggcggttcatgtacgggcccctcgacatggtggctctgactggagagaaggtgg

SEQ ID NO: 99792 - DNA, 120 bp, Artificial Sequence
  ENSG00000091622_18 (sequence is synthesized)
acatcctagtaatggcagagccatcctcaggccgctgggtacacctggacacagagatcaccaacagcagtggtcgcatcacatacaatgtgccgcggccccggcgcctgggggttggtg

SEQ ID NO: 99793 - DNA, 120 bp, Artificial Sequence
  ENSG00000091622_19 (sequence is synthesized)
tctatcctgtgaagatggtcgtcaggggcgaccagacctgtgccatgagctacctcacggtgttgcccaggggcatggagtgtgtagtgttcagcattgatgggtccttcgcggccagcg

SEQ ID NO: 99794 - DNA, 120 bp, Artificial Sequence
  ENSG00000091622_20 (sequence is synthesized)
tgtctatcatgggaagcgaccccaaggtccggccgggtgcagtggatgttgtccggcactggcaggacttgggctacatgatcctttacatcacgggacggccggacatgcagaagcagc

SEQ ID NO: 99795 - DNA, 120 bp, Artificial Sequence
  ENSG00000091622_21 (sequence is synthesized)
gggtggtgtcgtggctgtcccagcacaacttcccacagggcatgatcttcttctccgatgggctggtgcatgacccgctgcggcagaaggccatcttcctgcgcaacctcatgcaggagt

SEQ ID NO: 99796 - DNA, 120 bp, Artificial Sequence
  ENSG00000091622_22 (sequence is synthesized)
gcttcatcaaaatcagtgcggcctatggctccacgaaggacatctctgtctacagcgtgctgggcctgcctgcctcccagatcttcattgtgggccggcccaccaagaagtaccaaaccc

SEQ ID NO: 99797 - DNA, 120 bp, Artificial Sequence
  ENSG00000091622_23 (sequence is synthesized)
agtgccagttcctgagcgagggctacgccgcacacctggccgcgctggaggccagccaccgctcacgcccaaagaagaacaactcgcgcatgatcctgcgcaagggcagcttcgggctgc

SEQ ID NO: 99798 - DNA, 120 bp, Artificial Sequence
  ENSG00000091622_24 (sequence is synthesized)
acgcgcagccagagttcctgcggaagcgcaaccacctgcgcagaaccatgtcagtgcagcagcccgacccgcccgccgccaaccccaagcccgagcgggcccagagccagcccgagtcgg

SEQ ID NO: 99799 - DNA, 120 bp, Artificial Sequence
  ENSG00000091622_25 (sequence is synthesized)
acaaagaccacgagcggccgctgccggcgctcagctgggcgcgtgggccccccaagttcgagtcggtgccctgaggggtgggctgtgctcagagcagggagcggggggcccaatcaggct

SEQ ID NO: 99800 - DNA, 120 bp, Artificial Sequence
  ENSG00000091622_26 (sequence is synthesized)
gcctgcggggacgggagggggctgccctctccccgacacaggcgttttcctgctttttccctcccgtgtctgtccagcagtgtccgaccagagcggggagggatcctgcccgagcccggg

SEQ ID NO: 99801 - DNA, 120 bp, Artificial Sequence
  ENSG00000091622_27 (sequence is synthesized)
gggctccctgagctgcgacggggtgaggtccggggatctcggtgcagccactgctgcctcccacgggcctgcgaccgcaagcccaagtcagggttcatgtttgtgtcatcctgggggcag

SEQ ID NO: 99802 - DNA, 120 bp, Artificial Sequence
  ENSG00000091622_28 (sequence is synthesized)
gcttgcccggggctgaagcgtttgggcaaagtcgaccaccctcctgcgtccccaggcttcacagcgagctaggcaggccctcaagggggcagccccagcctcggcaccaagcgccgctgg

SEQ ID NO: 99803 - DNA, 120 bp, Artificial Sequence
  ENSG00000091622_29 (sequence is synthesized)
gtcaccattttggggttggcgctcttatggcaagatggccactttctgggagtgagagcacatccccgggctcatgttacgccgtctctgtccacagccctcgggggtggggtctggtgc

SEQ ID NO: 99804 - DNA, 120 bp, Artificial Sequence
  ENSG00000091622_30 (sequence is synthesized)
tgacggtctgtcctgcagctgtccattgtccccaacccccgttgtcctcagtgtcctcaccatttccctgtggccctggaggccagggcttcctcttcccggagccctgcctcatgccct

SEQ ID NO: 99805 - DNA, 120 bp, Artificial Sequence
  ENSG00000091622_31 (sequence is synthesized)
cccttgggaggctgcagccttgggctctggctcagctgggctggctgtgagcccctgagctggttgcttgccctctctgggctccgtcttccttctgttattggaggggtccccctagct

SEQ ID NO: 99806 - DNA, 120 bp, Artificial Sequence
  ENSG00000091622_32 (sequence is synthesized)
gagattggtgtgagtctttgactcccaagatgtcctgcagtttggcccattgaggctcttcaggcctaagggtccctccgagtgtcctgtgacccacacctttcacacagcctgggagag

SEQ ID NO: 99807 - DNA, 120 bp, Artificial Sequence
  ENSG00000091622_33 (sequence is synthesized)
ggggtctgggtgggctggaaaggaggggctcttaaaggagcctctctgggtgggctgggaagggatccctactccacggagaggtgcagctggtttgccttgcactgcgtgtcccaggga

SEQ ID NO: 99808 - DNA, 120 bp, Artificial Sequence
  ENSG00000091622_34 (sequence is synthesized)
caacccactcaaactgggtgtcctagggacaacccacctccctctcctgccaaaaggttactgattgggctccccataaccccagctctgccaggacccttttatcctttttggctccca

SEQ ID NO: 99809 - DNA, 120 bp, Artificial Sequence
  ENSG00000091622_35 (sequence is synthesized)
gaggcatagagctgagattccagggttctaggggttcctggaagtttggctccaactgttgtattctcttccctttcccctgctgctcagtttgtgcccataacctcctcctgggtagtc

SEQ ID NO: 99810 - DNA, 120 bp, Artificial Sequence
  ENSG00000091622_36 (sequence is synthesized)
ccctgaggttggcaggacttggcccttctggggcccctaaagcctgctcaggccctcctgctgctgaaccttggcctgggcactgctttcctgcatcctggaaaaccccgactccctggc

SEQ ID NO: 99811 - DNA, 120 bp, Artificial Sequence
  ENSG00000091622_37 (sequence is synthesized)
ccaggcccacacctgctgtgtggggctgcccacgtggccactgagcccccataggctgccatcaaggccggtcccagcaatttcagccaggctgccccagggcccagacgtctgtataca

SEQ ID NO: 99812 - DNA, 120 bp, Artificial Sequence
  ENSG00000091622_38 (sequence is synthesized)
cagcaggcacctgtgtcagctcagtgtcgcttctgctcaatgtctacctctcgcggctcccatgcagccagtgacgctgctggtgggggcggctggcaccgccgttgtgaattgcctggc

SEQ ID NO: 99813 - DNA, 120 bp, Artificial Sequence
  ENSG00000091622_39 (sequence is synthesized)
aaattgggtgccctcctggggctggaggggtctgggctcctaacccccatccctgctctccccactagaaatgtgtcttcagtctgccagctcttctgctctacttccagtgctgcatcc

SEQ ID NO: 99814 - DNA, 120 bp, Artificial Sequence
  ENSG00000091622_40 (sequence is synthesized)
tgcactcaagcccagggctgctggcgagtctatggggaggagtgcggatcaggctcagcctcagcctcagcctcagcctcctctatggtcctgtctcctggcggttcacaggtgcccatc

SEQ ID NO: 99815 - DNA, 120 bp, Artificial Sequence
  ENSG00000091622_41 (sequence is synthesized)
ccccctttaacatttcacagttcttggctttccaaaggcaccagctcatatggcatagccaccccaaccctaatccttcccccaaatatcctgatttaaacttgggcagacttagtctga

SEQ ID NO: 99816 - DNA, 120 bp, Artificial Sequence
  ENSG00000091622_42 (sequence is synthesized)
ttcttgaaaactctaccatctccttcttgcagaaggcactggttacactaaaatgataaaataattagtatggggtactttgctcccagttacattccctcttccctgagaaccccaggc

SEQ ID NO: 99817 - DNA, 120 bp, Artificial Sequence
  ENSG00000091622_43 (sequence is synthesized)
agagagggagagagagagagagagagggagagagaaagagagagagaaagaaaggaagacagaggaaagaaaggaagacagagagaggaaggcagagagagagagggagaaagaaagaca

SEQ ID NO: 99818 - DNA, 120 bp, Artificial Sequence
  ENSG00000091622_44 (sequence is synthesized)
aaggcagagagagagagggagaaagaaagacaggaaggcagagagagagagagagagagaaaggaagacagagagagagagagaggaagagagagagagagaggaagagagagagagagc

SEQ ID NO: 99819 - DNA, 120 bp, Artificial Sequence
  ENSG00000091622_45 (sequence is synthesized)
tcatgagccaggatccctggggaatttgaagtcagtgtgaccagggttctgtggctctggggtcagagctgggacacaggacccagcaggagggccaccaccccttccttttggaaacag

SEQ ID NO: 99820 - DNA, 120 bp, Artificial Sequence
  ENSG00000091622_46 (sequence is synthesized)
ctctggttccaagcagcaatcaggtaggaggatcggggctttggctgatgatgcacacacaagatgctgatggtgtacggtgagatattgtgaacgcaacaactggagctgtagttggcg

SEQ ID NO: 99821 - DNA, 120 bp, Artificial Sequence
  ENSG00000091622_47 (sequence is synthesized)
tgtgtgagtgtgtacctgcggttctgtttagtggcgagacaaggtatgtttcagtactgctttcacggcaactgtgtaatgcatatgctctttctacactagcggtttgctcagttttgt

SEQ ID NO: 99822 - DNA, 120 bp, Artificial Sequence
  ENSG00000091622_48 (sequence is synthesized)
ctgtccggttaagttggagaaagaaccaagttgtgttgttctctggagggggtgctgctgcctctccttgagtagttctgtgacccccaatccagctgttttgtagagaatccttctagc

SEQ ID NO: 99823 - DNA, 120 bp, Artificial Sequence
  ENSG00000091622_49 (sequence is synthesized)
ttctggtatgcctgctctccagcagctggaaacagatcttcctgcctgaccaaagctccttgtttcttgcgtggcatgtttgttcttcccgatccggtggctgtcgtagccgagggcctg

SEQ ID NO: 99824 - DNA, 120 bp, Artificial Sequence
  ENSG00000091622_50 (sequence is synthesized)
cctgccaccttcctttatcatttgccctgttggggttcagggtgcatccttagcccaggacctgctcttccagcatcatgggttttttcctaaagatctcaacggctcccttgggctcca

SEQ ID NO: 99825 - DNA, 120 bp, Artificial Sequence
  ENSG00000091622_51 (sequence is synthesized)
taaaatatttcttttttaaaaaagcagactcctttcatgcattgggatgaacggccctcttgtctgggtgctgggctacagcaaacaaatgtgtttgaatcccagtattccagagattcc

SEQ ID NO: 99826 - DNA, 120 bp, Artificial Sequence
  ENSG00000091622_52 (sequence is synthesized)
tggcggtgggctgtctagaagaggcgaggctggatctcacggtttttaaactgtatttttacccctttgggacccatacctgtgccctggagtctttcatgaggcacgtgggtcctctgc

SEQ ID NO: 99827 - DNA, 120 bp, Artificial Sequence
  ENSG00000091622_53 (sequence is synthesized)
atcctcactctcccccctagcccaggtgcagccccgggaggggtgccctgaccccgccttaaacaaccaactttcccaccgaatcccatcggcgggcggggggggggggtttgggtgcca

SEQ ID NO: 99828 - DNA, 120 bp, Artificial Sequence
  ENSG00000091622_54 (sequence is synthesized)
agtgccctggaaacctattgtcttttggctcagccaaaagaaacattccctccttcctttccttccgggcttgggggaaaccttcgtaaaaatcatagttagggttaagtccaagcagtg

SEQ ID NO: 99829 - DNA, 120 bp, Artificial Sequence
  ENSG00000091622_55 (sequence is synthesized)
aggcctgacctgggctctgctctccttgttgagacactaacaggcagttgggaggaaaatctgcatttgactccaccctctttggggcaaaggagaaacaggtgacccgagggggggcag

SEQ ID NO: 99830 - DNA, 120 bp, Artificial Sequence
  ENSG00000091622_56 (sequence is synthesized)
gccagaggagggcgactcgtgcacagggacccccacccttggaccccgctgtccttttctagttgtttacttggtggtggcagccagtctgaccttgtctgtggtctgactgttcctaag

SEQ ID NO: 99831 - DNA, 120 bp, Artificial Sequence
  ENSG00000091622_57 (sequence is synthesized)
tgtgtaactttcagtattatctgtgacagatggttctgtggtgaaaaaggtttattatattccttatggctgccttgtacaaaatccgttagaaacgctaatgtaagatatcagatttct

SEQ ID NO: 99832 - DNA, 120 bp, Artificial Sequence
  ENSG00000091622_58 (sequence is synthesized)
aacaagacaaaaacagcattatggagttaaaagatttttacaactgggtcttgattttgatgtgagctggtttttagctctcaaatgttgtcacttaaataaaaaccttctttgccttta

SEQ ID NO: 99833 - DNA, 66 bp, Artificial Sequence
  ENSG00000091622_59 (sequence is synthesized)
caatctatctacctcataatatcacagtgctctgatggagcataatatcacagagcacagggcact

SEQ ID NO: 99834 - DNA, 120 bp, Artificial Sequence
  ENSG00000091622_60 (sequence is synthesized)
gtgctctgatggagcataatatcacagagcacagggcactgtgggctctctgagaaaggccagagaggacttcctggaggagtgacttttgggtttgcataccacggctaagtgtgtggg

SEQ ID NO: 99835 - DNA, 120 bp, Artificial Sequence
  ENSG00000091622_61 (sequence is synthesized)
ctctcaggccgcctggatttgagtcctggctgtgtggtctggggaaggtgtttaacttctccttgtctcaatttcctaatctgtacaatgaaggtagccatagtaaataacctctcaggg

SEQ ID NO: 99836 - DNA, 120 bp, Artificial Sequence
  ENSG00000091622_62 (sequence is synthesized)
tggctgtgaagagtctgtgtgctaatgtgtgtgaagcactcaacacagtgtccagaatgtagaaagcacatagggatgccagccttgggaatgccagccttggggatgctgaccttgggg

SEQ ID NO: 99837 - DNA, 120 bp, Artificial Sequence
  ENSG00000091622_63 (sequence is synthesized)
atgccagccttggggatgccagctgtggggatctagccatggggatactagcctcagggatactagctatggggatgccaaccttggagatactagccatagggatgccagccttgggga

SEQ ID NO: 99838 - DNA, 120 bp, Artificial Sequence
  ENSG00000091622_64 (sequence is synthesized)
tactagtcttggagatactagccatggggatgccagccttggggatactaactgtggggatgccagcttcggggatgctggccatgactcacatcatcttcctcctggctggaagagggg

SEQ ID NO: 99839 - DNA, 120 bp, Artificial Sequence
  ENSG00000091622_65 (sequence is synthesized)
ctctctctgcaggtggagagtgggctggggagagagacttccaactcgcagcagggaacccagctggtggggagaaaggagggaaggatgtgtccacagaagggctggttgagcgctggg

SEQ ID NO: 99840 - DNA, 120 bp, Artificial Sequence
  ENSG00000091622_66 (sequence is synthesized)
cagcttgctcactgctgacgctggcacatccttgcccactgtgggccctggcacctgtgggggacaaactgaggggacctccagggtatggggcctctgggagctccacccactgctcca

SEQ ID NO: 99841 - DNA, 120 bp, Artificial Sequence
  ENSG00000091622_67 (sequence is synthesized)
ggcactgagggctgcagtgctcccctcctgcctatcctgttgaactagctaaaggtaggtgcctggggccgggtggatacctgggttctcagcagtcatatgtgcaaaaatgacccaaac

SEQ ID NO: 99842 - DNA, 120 bp, Artificial Sequence
  ENSG00000091622_68 (sequence is synthesized)
gcctacagggcccaaatcctataggcattcggcagatcactggggctggcagctggaagctttggaactttcagtcaggggcaggagggaggcctctgcacctctgttctgcctgtcccc

SEQ ID NO: 99843 - DNA, 120 bp, Artificial Sequence
  ENSG00000091622_69 (sequence is synthesized)
ctcacaggacctcgccagagacttggggctgctgcagagcccagccctcaggcagagccctcataccccggggctccggagctgggaagggtgggaagaggtccccagcagggtgccagg

SEQ ID NO: 99844 - DNA, 120 bp, Artificial Sequence
  ENSG00000091622_70 (sequence is synthesized)
tgtgtggggcgcaccgcactccgaattccccaggagaatgggagccgatgttctcagccaattgtggctctgaggagggctcagtgcggggagggccaaagtcccctgccctggagcttc

SEQ ID NO: 99845 - DNA, 120 bp, Artificial Sequence
  ENSG00000091622_71 (sequence is synthesized)
cagccagtcaggagagagcacgggcaagccccttcccttccctgggccttccttttccccctctagattgggggaaagtcagagactctgatttatctgcgttccttggacaccaacagg

SEQ ID NO: 99846 - DNA, 120 bp, Artificial Sequence
  ENSG00000091622_72 (sequence is synthesized)
aattgcaggcagatctcaatcagagttggaaggaaggaagattaggtctgtaattccgcaacctggctaattgcccaaatccctggtgtgattcttgttaaactgcgagatgtccaggcc

SEQ ID NO: 99847 - DNA, 120 bp, Artificial Sequence
  ENSG00000091622_73 (sequence is synthesized)
tccctccagcagtggctgattcaggagggaggtgccccggaatctgcatctttgacacctgctcactgctgaactggtggcgcagcatgttcccttgtcactctgatagtccaggacttc

SEQ ID NO: 99848 - DNA, 120 bp, Artificial Sequence
  ENSG00000091622_74 (sequence is synthesized)
actgtgctagttcatcatccgtctcaggaacccctctacctgtccccaggacatctgacctccagagctgggtcacccctatctccaggaagacggatggcctggccattcattcatggg

SEQ ID NO: 99849 - DNA, 120 bp, Artificial Sequence
  ENSG00000091622_75 (sequence is synthesized)
gccagcgggagggagcttagttctcccccaggcagctccttgccagggccattcatcaccccataatcacggctgggagggagctctttctcagctaattaaaatctctccggctgcaat

SEQ ID NO: 99850 - DNA, 120 bp, Artificial Sequence
  ENSG00000091622_76 (sequence is synthesized)
cgaggcctgcttcctctaatttgtgttctttggagatgaggaatggctgacagggccagccttgtacaccacgaggactctgccacctgctgagagtgctccagccctgtcacctgcccc

SEQ ID NO: 99851 - DNA, 120 bp, Artificial Sequence
  ENSG00000091622_77 (sequence is synthesized)
agattctgtcgagtcccagtgggatgtgcactgggctccatcagcctgagcttgagctaagggggaagggcaggctctgggcaggggtggagagttcccagcctccctgtatggtccttc

SEQ ID NO: 99852 - DNA, 120 bp, Artificial Sequence
  ENSG00000091622_78 (sequence is synthesized)
ctgaccagccaggtccaacagtgcatctgggtcggaagccccagggaacagaagcagagatgggggcagagggaggggtaggtgacttggaggcactggtctcaggtgagtctgagctgc

SEQ ID NO: 99853 - DNA, 120 bp, Artificial Sequence
  ENSG00000091622_79 (sequence is synthesized)
ccagagaggaggggatttcctagtgggaaggtagggagttgagggtgccaatgcaaagtctggacagtctgctggctggacactgtggggcaggctttcagccccctcgggggtcacaga

SEQ ID NO: 99854 - DNA, 120 bp, Artificial Sequence
  ENSG00000091622_80 (sequence is synthesized)
actttctgcaaagctgatgaaagctctgatcttctcccagtgatgcaatgaacacaacatcatgtctgcagctatgtgcccagctccaagctgtggccaacatgtgaaccccaagcctgg

SEQ ID NO: 99855 - DNA, 120 bp, Artificial Sequence
  ENSG00000091622_81 (sequence is synthesized)
gatatgttcctacatgttccacactagctgggtcctcagctgacttcttcctctatgattggggtgccctttggggccatgcagaagagggcaatagagactgcagtcacagggacccca

SEQ ID NO: 99856 - DNA, 120 bp, Artificial Sequence
  ENSG00000091622_82 (sequence is synthesized)
gggcccacacccatggccagcacgggaaggacacacagggagtcagtgtaggcttgaatcctcttcccctctcctccccacactgcctgtgctctgtgtcaccaggctcctgcctgggtc

SEQ ID NO: 99857 - DNA, 120 bp, Artificial Sequence
  ENSG00000091622_83 (sequence is synthesized)
ttcctgaagggtccctggagcccaattcctggccagtatgtgctctcttctgcctgatcctcagccccaaacctgccaacctgcccgatcctggctgggctcaccttgggccccctgtct

SEQ ID NO: 99858 - DNA, 120 bp, Artificial Sequence
  ENSG00000091622_84 (sequence is synthesized)
caccaggaaactcggaaactcgggagaagtgcaaattatctgccctgcctcctcctgccaccctcttagacctactcaatcagaaactctggggaggggctcaggaaccttttcacaagc

SEQ ID NO: 99859 - DNA, 120 bp, Artificial Sequence
  ENSG00000091622_85 (sequence is synthesized)
cctccaggggattctgatgcacagaaagattaatcaagaatccctgacctagagcagaagaggcgttgacatataatgaccaaacccagcccacagcctgttttgatatgactggtcagc

SEQ ID NO: 99860 - DNA, 120 bp, Artificial Sequence
  ENSG00000091622_86 (sequence is synthesized)
taagaatggtttttacactttcaaatggatggagagaataatcaaaagaatgatatttcatgacatgcaaattacatgaatttcaatgtctctaaataaaaaaagtttgattggaacaca

SEQ ID NO: 99861 - DNA, 120 bp, Artificial Sequence
  ENSG00000091640_0 (sequence is synthesized)
agtcactcccaagatggcggacctactgggctccatcctgagctccatggagaagccacccagcctcggtgaccaggagactcggcgcaaggcccgagaacaggccgcccgcctgaagaa

SEQ ID NO: 99862 - DNA, 120 bp, Artificial Sequence
  ENSG00000091640_1 (sequence is synthesized)
actacaagagcaagagaaacaacagaaagtggagtttcgtaaaaggatggagaaggaggtgtcagatttcattcaagacagtgggcagatcaagaaaaagtttcagccaatgaacaagat

SEQ ID NO: 99863 - DNA, 120 bp, Artificial Sequence
  ENSG00000091640_2 (sequence is synthesized)
cgagaggagcatactacatgatgtggtggaagtggctggcctgacatccttctcctttggggaagatgatgactgtcgctatgtcatgatcttcaaaaaggagtttgcaccctcagatga

SEQ ID NO: 99864 - DNA, 120 bp, Artificial Sequence
  ENSG00000091640_3 (sequence is synthesized)
agagctagactcttaccgtcgtggagaggaatgggacccccagaaggctgaggagaagcggaagctgaaggagctggcccagaggcaagaggaggaggcagcccagcaggggcctgtggt

SEQ ID NO: 99865 - DNA, 120 bp, Artificial Sequence
  ENSG00000091640_4 (sequence is synthesized)
cggcaagggagcagccaaagacgcagcccacatgctacaggccaataagacctacggctgtgtgcccgtggccaataagagggacacacgctccattgaagaggctatgaatgagatcag

SEQ ID NO: 99866 - DNA, 120 bp, Artificial Sequence
  ENSG00000091640_5 (sequence is synthesized)
agccaagaagcgtctgcggcagagtggggaagagttgccgccaacctcctaggcgccccgcccagctccctttgacccctggggcagggcagggggcagggagagacaaggctgctgcta

SEQ ID NO: 99867 - DNA, 120 bp, Artificial Sequence
  ENSG00000091640_6 (sequence is synthesized)
ttagagcccatcctggagccccacctctgaaccacctcctaccagctgtccctcaggctgggggaaaacaggtgtttgatttgtcaccgttggagcttggatatgtgcgtggcatgtgtg

SEQ ID NO: 99868 - DNA, 120 bp, Artificial Sequence
  ENSG00000091640_7 (sequence is synthesized)
tgtgtgtgtgagagtgtgaatgcacaggtgggtatttaatctgtattattccccgttcttggaattttcttccccatggggctggggtactttacattcaataaatactgtttaacccaa

SEQ ID NO: 99869 - DNA, 120 bp, Artificial Sequence
  ENSG00000091640_8 (sequence is synthesized)
gagggcagtggaggctgaggtacggatttctaggcccgccctaccctcctctctgcccctagtgcccgtggccaataagagggacacacgctccattgaagaggctatgaatgagatcag

SEQ ID NO: 99870 - DNA, 120 bp, Artificial Sequence
  ENSG00000091640_9 (sequence is synthesized)
cacagtccggggctggggcgctcattgatgcagtgatcacacgtaagtttaataaccaacttgataagtgctctgagagaaaaataactgtgagagcggccacctgaggttctcccccaa

SEQ ID NO: 99871 - DNA, 120 bp, Artificial Sequence
  ENSG00000091640_10 (sequence is synthesized)
gagtctatttgaaatctctgagaaaggaggaagcatgatgggaatggggaactggaattctctaatgctccgatgactgtctaagtgggggatcacccggcattgacagactgggaagct

SEQ ID NO: 99872 - DNA, 120 bp, Artificial Sequence
  ENSG00000091640_11 (sequence is synthesized)
taaatgagtcactcgcctgaggtcacatggttagtttgatgcagagaagactcgaaaaccagttaaagaacagtcagtggggcccggccttgtagctcacacctttaataccaccacttt

SEQ ID NO: 99873 - DNA, 120 bp, Artificial Sequence
  ENSG00000091640_12 (sequence is synthesized)
tgggtggctagcggggcatgaaagggccagcggggggctcctccagaggagggcactaggcccgctcctggctcaagatgctctttcccctctgccatcccatcccagacatgatgtggt

SEQ ID NO: 99874 - DNA, 120 bp, Artificial Sequence
  ENSG00000091640_13 (sequence is synthesized)
tgaattcctcattctctcctctcccctttgtagccttatcccccctccccgaccaaggaatgaaatgaaacatttgtatggactctgaccccatcattctgctcttcttcaggagtttgc

SEQ ID NO: 99875 - DNA, 120 bp, Artificial Sequence
  ENSG00000091640_14 (sequence is synthesized)
caagatggcggacctactgggctccatcctgagctccatggagaagccacccagcctcggtgaccaggagactcggcgcaaggcccgagatgcagagaagactcgaaaaccagttaaaga

SEQ ID NO: 99876 - DNA, 120 bp, Artificial Sequence
  ENSG00000091640_15 (sequence is synthesized)
gaagactcgaaaaccagttaaagaacagtcagtggggcccggccttgtagctcacacctttaataccaccactttgggaggccgcggcggacggatcgcttgagcccaggagttcaagac

SEQ ID NO: 99877 - DNA, 120 bp, Artificial Sequence
  ENSG00000091640_16 (sequence is synthesized)
tctgcctccctccgacaacctttttcccatccgtagccttaaattcccgagctgcccgggcggatcgtagtgttgattggagggatgagaatacccgccgggtccgattggccactgtct

SEQ ID NO: 99878 - DNA, 120 bp, Artificial Sequence
  ENSG00000091640_17 (sequence is synthesized)
ccgcctgcgttctcggagtagcttccctgcgggtgggctggagttcggcggccggcgtagggcgcggccctgcagggcggtgggagcctccccggggctgctcgtgttgcagcttgggat

SEQ ID NO: 99879 - DNA, 120 bp, Artificial Sequence
  ENSG00000091640_18 (sequence is synthesized)
gatactggcggaacgcaggaccccaactcccaaacctgcggaccttgaccacggacgagccctgtcccagctccccacgtgccccagggggaccagagcaggcaggacgccttccaagta

SEQ ID NO: 99880 - DNA, 120 bp, Artificial Sequence
  ENSG00000091651_0 (sequence is synthesized)
gttgacccgcggcgttcacgggaattgttcgctttagtgccggcgccatggggtcggagctgatcgggcgcctagccccgcgcctgggcctcgccgagcccgacatgctgaggaaagcag

SEQ ID NO: 99881 - DNA, 120 bp, Artificial Sequence
  ENSG00000091651_1 (sequence is synthesized)
aggagtacttgcgcctgtcccgggtgaagtgtgtcggcctctccgcacgcaccacggagaccagcagtgcagtcatgtgcctggaccttgcagcttcctggatgaagtgccccttggaca

SEQ ID NO: 99882 - DNA, 120 bp, Artificial Sequence
  ENSG00000091651_2 (sequence is synthesized)
gggcttatttaattaaactttctggtttgaacaaggagacatatcagagctgtcttaaatcttttgagtgtttactgggcctgaattcaaatattggaataagagacctagctgtacagt

SEQ ID NO: 99883 - DNA, 120 bp, Artificial Sequence
  ENSG00000091651_3 (sequence is synthesized)
ttagctgtatagaagcagtgaacatggcttcaaagatactaaaaagctatgagtccagtcttccccagacacagcaagtggatcttgacttatccaggccacttttcacttctgctgcac

SEQ ID NO: 99884 - DNA, 120 bp, Artificial Sequence
  ENSG00000091651_4 (sequence is synthesized)
tgctttcagcatgcaagattctaaagctgaaagtggataaaaacaaaatggtagccacatccggtgtaaaaaaagctatatttgatcgactgtgtaaacaactagagaagattggacagc

SEQ ID NO: 99885 - DNA, 120 bp, Artificial Sequence
  ENSG00000091651_5 (sequence is synthesized)
aggtcgacagagaacctggagatgtagctactccaccacggaagagaaagaagatagtggttgaagccccagcaaaggaaatggagaaggtagaggagatgccacataaaccacagaaag

SEQ ID NO: 99886 - DNA, 120 bp, Artificial Sequence
  ENSG00000091651_6 (sequence is synthesized)
tgccagtgctcaaaaggctacagcagagtgatttcagcttccaaactggtatacattccaaactgatagtacattgccatctccaggaagacttgacggctttgggattttgtttaaact

SEQ ID NO: 99887 - DNA, 120 bp, Artificial Sequence
  ENSG00000091651_7 (sequence is synthesized)
tttataataaggatcctaagactgttgcctttaaatagcaaagcagcctacctggaggctaagtctgggcagtgggctggcccctggtgtgagcattagaccagccacagtgcctgattg

SEQ ID NO: 99888 - DNA, 73 bp, Artificial Sequence
  ENSG00000091651_8 (sequence is synthesized)
cccctggtgtgagcattagaccagccacagtgcctgattggtatagccttatgtgctttcctacaaaatggaa

SEQ ID NO: 99889 - DNA, 78 bp, Artificial Sequence
  ENSG00000091651_9 (sequence is synthesized)
atctcataaataaatagatagatactccagcctgggtgacagagcgagacttatagatagatagatagatagatggat

SEQ ID NO: 99890 - DNA, 120 bp, Artificial Sequence
  ENSG00000091651_10 (sequence is synthesized)
agatagatagatagatagatagataaacggaattggagccattttgctttaagtgaatggcagtcccttgtcttattcagaatataaaattcagtctgaatggcatcttacagattttac

SEQ ID NO: 99891 - DNA, 120 bp, Artificial Sequence
  ENSG00000091651_11 (sequence is synthesized)
taaaattcagtctgaatggcatcttacagattttacttcaatttttgtgtacggtattttttatttgactaaatcaatatattgtacagcctaagttaataaatgttatttatatatgca

SEQ ID NO: 99892 - DNA, 120 bp, Artificial Sequence
  ENSG00000091651_12 (sequence is synthesized)
aagcatttgagcacagtgatgtttggagtcagtgctggttctgtcttcctctcaccagaggatatgaccttcattcccagccccagataaacgagccacaggagttaggcttagtgtgaa

SEQ ID NO: 99893 - DNA, 120 bp, Artificial Sequence
  ENSG00000091651_13 (sequence is synthesized)
catgcaagtacatacctaggagtattaattggcatttatggaaaacatctcttcaattcaacaaaagtatgtgcatatacggagggagtgcagctgatattgtagaaaacagtgagaata

SEQ ID NO: 99894 - DNA, 120 bp, Artificial Sequence
  ENSG00000091651_14 (sequence is synthesized)
attgttcgctttagtgccggcgccatggggtcggagctgatcgggcgcctagccccgcgcctgggcctcgccgagcccgacatgctgaggtgagttcggccgcgcaagaccagggctggg

SEQ ID NO: 99895 - DNA, 120 bp, Artificial Sequence
  ENSG00000091651_15 (sequence is synthesized)
atattttcaaatatgtaaactggctgcttcctaaattccgtattacatgtggaccaggtatgtttttattgatgtttctaacctatgattccatgaatctatgcctggaaaatgattctc

SEQ ID NO: 99896 - DNA, 120 bp, Artificial Sequence
  ENSG00000091651_16 (sequence is synthesized)
aagtctgacaagaggcccaaaagagaggtctaagatcatttctcttctcctcatatttgatcagttaagatgtctaattttatttgtgatccaaaacatgcccaaatactgaaattgaga

SEQ ID NO: 99897 - DNA, 120 bp, Artificial Sequence
  ENSG00000091651_17 (sequence is synthesized)
acaggagaaaaattaaccttgataacacttcttaaaggagaacctggagatgtagctactccaccacggaagagaaagaagatagtggttgaagccccagcaaagggtaagttttactaa

SEQ ID NO: 99898 - DNA, 120 bp, Artificial Sequence
  ENSG00000091651_18 (sequence is synthesized)
cacggtactgacgttgacattttatgcagtgaacagcccagtgctgctctagcagcttgcctgacaggagtccagttttaagtacattctgactgtgaatcatttgataagaccagtttt

SEQ ID NO: 99899 - DNA, 120 bp, Artificial Sequence
  ENSG00000091651_19 (sequence is synthesized)
attctgaagaaaaagtttattttgtgtttgtaattagtggttgctgtggagtcttattaggaaagtttattttcagggtggggtggggttgttacattcctgtaatataaatatcctgtg

SEQ ID NO: 99900 - DNA, 120 bp, Artificial Sequence
  ENSG00000091651_20 (sequence is synthesized)
agttaaaatgagtggaacaaaaaagtcctatgattgtcattcattaaattaatctgagatttactaaagagttctaaaagtcatgaagcactacagcaaatgtcttttatgtgccccttt

SEQ ID NO: 99901 - DNA, 120 bp, Artificial Sequence
  ENSG00000091651_21 (sequence is synthesized)
tgttataaaatagatcccatgtgcattttaactctcagtccaataaacaactaaacaacttagcatagataataacatgtttggaatgaaggaaaaaaactagacagaggctctggaagc

SEQ ID NO: 99902 - DNA, 120 bp, Artificial Sequence
  ENSG00000091651_22 (sequence is synthesized)
tttgcgcgcgggtttcgttgacccgcggcgttcacgggaattgttcgctttagtgccggcgccatggggtcggagctgatcgggcgcctagccccgcgcctgggcctcgccgagcccgac

SEQ ID NO: 99903 - DNA, 120 bp, Artificial Sequence
  ENSG00000091651_23 (sequence is synthesized)
aggtacatacctaggagtattaattggcatttatggaaaacatctcttcaattcaacaaaagtatgtgcatatacggagggagtgcagctgatattgtagaaaacagtgagaatagtcaa

SEQ ID NO: 99904 - DNA, 120 bp, Artificial Sequence
  ENSG00000091651_24 (sequence is synthesized)
tgctttcagcatgcaagtaggtatttcattaaacattcagaaaagttaccaatttacaagtgggtttttcatccccaaggaatacttctaacttagttgatatcaattcagagcatattt

SEQ ID NO: 99905 - DNA, 120 bp, Artificial Sequence
  ENSG00000091651_25 (sequence is synthesized)
tcccctagaaataatattaggaatattggccaagtgactatattcccagtttatcccataatgtagctaacaacttggaactagtgttgccagaattccactagcaaatagcagctgtat

SEQ ID NO: 99906 - DNA, 120 bp, Artificial Sequence
  ENSG00000091651_26 (sequence is synthesized)
atatatgctgggaattctgatttcagtctgccttttgtaagagatgatatctgtcattaaaacagtcttcacatgtgatttttctgctcatattttttaaaaagtactggttgggccagg

SEQ ID NO: 99907 - DNA, 120 bp, Artificial Sequence
  ENSG00000091651_27 (sequence is synthesized)
gaggcagaggcaggaggactgcttgaggcaaggagttcaagactagcctagacagcataataagaccccaatctcttaagaaaaaaaaaaaaaattagctgggtgtcagcacatgcctcc

SEQ ID NO: 99908 - DNA, 120 bp, Artificial Sequence
  ENSG00000091651_28 (sequence is synthesized)
agtcctggcttctcagctactcgggaggctgaagctgaaggctcactggagcctaggagttcttggttatagtgagctatggtcacgctactacactgcagcctaggcaacacagcaaca

SEQ ID NO: 99909 - DNA, 120 bp, Artificial Sequence
  ENSG00000091656_0 (sequence is synthesized)
acacaaagacatgcgcactcaacttaatcagccatttttttaaacagggctaaaacgataataattagcagaataaagacatatcggattttcatttcctttcctccttttcccaacccc

SEQ ID NO: 99910 - DNA, 120 bp, Artificial Sequence
  ENSG00000091656_1 (sequence is synthesized)
ttcacaaccaaacagcgagaccgcggtcggcacatgctttaactcctcccggacccccgaggaccgctccatgccccccactttctgctccagcgtttttattttcacccaataaagttc

SEQ ID NO: 99911 - DNA, 120 bp, Artificial Sequence
  ENSG00000091656_2 (sequence is synthesized)
gaggattattttttattttttttgtttttttaatgaaccctctcgttttacttggatgtgatcagctgtaagtaaaataaaagcaaaacaaaaaagaggcgaagatcgagtaggaactgc

SEQ ID NO: 99912 - DNA, 120 bp, Artificial Sequence
  ENSG00000091656_3 (sequence is synthesized)
aggggaaatggaaagtccctgacaggctggatgaaatgagatccccatgtagcaattgccatggaaacctgtgactcccctcctatctcaaggcaggaaaatgggcagagcacatcaaag

SEQ ID NO: 99913 - DNA, 120 bp, Artificial Sequence
  ENSG00000091656_4 (sequence is synthesized)
ctatgtggaacgacacaacttgataatgaggtgccagagaaagttgcagggatggagcctgacagggaaaacagctccacagatgacaacctgaaaacggatgagcgcaaaagtgaagcc

SEQ ID NO: 99914 - DNA, 120 bp, Artificial Sequence
  ENSG00000091656_5 (sequence is synthesized)
ttgctgggtttcagcgttgagaatgcagctgccactcaggttacctcagcaaaggagataccctgcaacgaatgtgccacttcttttcccagtttacagaaatacatggaacaccactgc

SEQ ID NO: 99915 - DNA, 120 bp, Artificial Sequence
  ENSG00000091656_6 (sequence is synthesized)
cctaatgcccgccttcctgtcctgaaggatgacaacgagagcgagatcagcgagttagaggacagtgacgtggaaaatctaacaggggagatcgtttaccagcctgatgggtcagcatat

SEQ ID NO: 99916 - DNA, 120 bp, Artificial Sequence
  ENSG00000091656_7 (sequence is synthesized)
ataattgaggactccaaagaaagtgggcagaatgcacagactggggcaaatagcaaactcttttctacagcgatgttcctggactccctggcatctgctggagagaagagtgatcagtct

SEQ ID NO: 99917 - DNA, 120 bp, Artificial Sequence
  ENSG00000091656_8 (sequence is synthesized)
gcttctgcacctatgtcgttctacccacagatcatcaacacttttcatatcgcttcatccctcgggaaaccatttacagccgatcaggctttcccaaatacctcagcattagcaggagtt

SEQ ID NO: 99918 - DNA, 120 bp, Artificial Sequence
  ENSG00000091656_9 (sequence is synthesized)
ggtcctgtgttgcacagtttccgtgtctatgatctccgacacaagagagagaaagactatctaaccagtgatggctcagccaaaaactcctgtgtgtccaaagatgtccctaacaatgtg

SEQ ID NO: 99919 - DNA, 120 bp, Artificial Sequence
  ENSG00000091656_10 (sequence is synthesized)
gacttgtccaaattcgatggttgtgttagcgatgggaaaaggaaacctgttttaatgtgtttcttgtgcaagttgtcttttggttatatcaggtcatttgtaacccatgctgtgcatgat

SEQ ID NO: 99920 - DNA, 120 bp, Artificial Sequence
  ENSG00000091656_11 (sequence is synthesized)
catcggatgaccctcaatgacgaggagcagaagctcctcagtaataaatgcgtctccgccataatacaggggattggcaaagacaaagaacctcttataagctttctggaaccaaaaaaa

SEQ ID NO: 99921 - DNA, 120 bp, Artificial Sequence
  ENSG00000091656_12 (sequence is synthesized)
tccacttctgtttatccccatttttctactacaaacctcataggacccgatccaaccttccgcggtttatggagcgcttttcatgttgaaaatggtgactctttgccggctggctttgcc

SEQ ID NO: 99922 - DNA, 120 bp, Artificial Sequence
  ENSG00000091656_13 (sequence is synthesized)
ttcttaaaaggaagcgcgagcacctcgagctcagcagagcagccgctggggattacccaaatgccaaaggctgaagtgaatctgggggggctgtctagtttagtagtgaacaccccaatt

SEQ ID NO: 99923 - DNA, 120 bp, Artificial Sequence
  ENSG00000091656_14 (sequence is synthesized)
acctctgtctccctcagccactcatcgtctgagtctagcaagatgtcagagagcaaagaccaagagaacaactgtgaaaggccaaaagaaagcaacgttttacacccaaacggggagtgc

SEQ ID NO: 99924 - DNA, 120 bp, Artificial Sequence
  ENSG00000091656_15 (sequence is synthesized)
cctgtcaaaagtgaacccactgaaccgggagatgaggatgaagaagatgcgtactccaatgaacttgatgacgaggaagtattaggtgaactcaccgatagtattggtaacaaagatttc

SEQ ID NO: 99925 - DNA, 120 bp, Artificial Sequence
  ENSG00000091656_16 (sequence is synthesized)
cctctcttaaaccaaagcatttctcctttatcatccagtgtgctaaaatttattgaaaagggtacctcgtcctcctcggcgactgtttctgatgacacagaaaagaaaaaacagactgct

SEQ ID NO: 99926 - DNA, 120 bp, Artificial Sequence
  ENSG00000091656_17 (sequence is synthesized)
gctgttagggccagtggcagtgttgctagtaactatggcatcagtggcaaggactttgcagacgcaagtgccagtaaagacagtgccacagctgctcatccaagtgaaatagcccgggga

SEQ ID NO: 99927 - DNA, 120 bp, Artificial Sequence
  ENSG00000091656_18 (sequence is synthesized)
gacgaagacagttcagccactcctcaccagcatggctttaccccgagtactcctggcacaccagggcctggaggagacggctcaccgggcagtggcatcgagtgtccaaagtgcgacact

SEQ ID NO: 99928 - DNA, 120 bp, Artificial Sequence
  ENSG00000091656_19 (sequence is synthesized)
gtgttggggtcttcgaggtctcttggtggtcatatgactatgatgcactcgaggaactcatgcaaaaccctcaaatgtcctaaatgtaactggcactacaaatatcagcagaccctggag

SEQ ID NO: 99929 - DNA, 120 bp, Artificial Sequence
  ENSG00000091656_20 (sequence is synthesized)
gcccatatgaaggagaaacaccctgagccgggtggctcttgtgtttattgtaagactggacagcctcaccccaggcttgcccggggtgagagttacacgtgtggctataaacccttccgt

SEQ ID NO: 99930 - DNA, 120 bp, Artificial Sequence
  ENSG00000091656_21 (sequence is synthesized)
tgtgaggtttgtaactactctaccactaccaaaggcaacctcagtattcatatgcagtcggacaagcacctgaacaatgttcagaatctccaaaatggcaatggtgagcaggtgtttggc

SEQ ID NO: 99931 - DNA, 120 bp, Artificial Sequence
  ENSG00000091656_22 (sequence is synthesized)
cactctgccccagcccccaacaccagcctcagtggctgcggaacaccctctccgtccaaacccaaacagaaacccacctggcggtgtgaagtttgtgattatgaaaccaatgtcgccagg

SEQ ID NO: 99932 - DNA, 120 bp, Artificial Sequence
  ENSG00000091656_23 (sequence is synthesized)
aacctccgaattcatatgaccagcgaaaagcacatgcataatatgatgcttttgcagcagaacatgaagcagatccagcataatctgcacttgggcctcgccccggcggaagcagagctt

SEQ ID NO: 99933 - DNA, 120 bp, Artificial Sequence
  ENSG00000091656_24 (sequence is synthesized)
tatcagtactacctagcccagaacataggcctgaccggaatgaagctggaaaaccctgccgaccctcagctgatgatcaatccattccagctggatccagcgacagcagcggctttggca

SEQ ID NO: 99934 - DNA, 120 bp, Artificial Sequence
  ENSG00000091656_25 (sequence is synthesized)
ccagggctcgtaaataatgagctgccgcctgaaatccggcttgccagtggtcagctaatgggtgatgacctgtccctccttactgcaggagagctgtcaccttatatcagtgacccagcg

SEQ ID NO: 99935 - DNA, 120 bp, Artificial Sequence
  ENSG00000091656_26 (sequence is synthesized)
ctgaagctattccagtgtgctgtttgcaacaaattcacctctgacagcctggaggccctaagtgtgcatgtgagcagtgagcgctctctccctgaagaggaatggagggcagtaattgga

SEQ ID NO: 99936 - DNA, 120 bp, Artificial Sequence
  ENSG00000091656_27 (sequence is synthesized)
gatatctaccagtgcaagctctgcaactacaacactcagctcaaagccaacttccagctacactgcaagactgataaacatatgcagaaatatcaactggtggctcacattaaagaaggg

SEQ ID NO: 99937 - DNA, 120 bp, Artificial Sequence
  ENSG00000091656_28 (sequence is synthesized)
ggcaaaagcaatgagtggaggttgaagtgtattgccattggcaaccctgttcacctaaaatgtaacgcctgtgactattacaccaacagtgtggataaattacgcttgcataccaccaat

SEQ ID NO: 99938 - DNA, 120 bp, Artificial Sequence
  ENSG00000091656_29 (sequence is synthesized)
cacaggcacgaggcggccctgaagctctacaagcacttgcagaagcaagagggtgcagtgaatcccgaatcctgctattactactgtgccgtgtgtgattacaccaccaaggtcaagttg

SEQ ID NO: 99939 - DNA, 120 bp, Artificial Sequence
  ENSG00000091656_30 (sequence is synthesized)
aatctggtacaacatgtccgttcggtgaagcatcagcagactgagggcctacggaagctccagctccaccagcaaggcctggcaccagaggaggacaacctcagtgagatcttttttgtt

SEQ ID NO: 99940 - DNA, 120 bp, Artificial Sequence
  ENSG00000091656_31 (sequence is synthesized)
aaagattgcccaccaaatgagcttgaaactgcctcattgggagccaggacttgtgatgatgatcttacagagcagcagttgagatcgacctcagaagaacaaagtgaggaggcagaagga

SEQ ID NO: 99941 - DNA, 120 bp, Artificial Sequence
  ENSG00000091656_32 (sequence is synthesized)
gctattaagcctacagcagtggccgaggacgatgaaaaagacacaagtgagagagacaatagtgaaggcaaaaactctaataaagactctgggataatcacaccagagaaggaactaaaa

SEQ ID NO: 99942 - DNA, 120 bp, Artificial Sequence
  ENSG00000091656_33 (sequence is synthesized)
gttagtgtggcagggggtacccagccactcctgctggcaaaagaagaggatgttgcaacaaaaaggtcaaaacctacagaggacaataaattctgtcatgaacagttctatcaatgtcct

SEQ ID NO: 99943 - DNA, 120 bp, Artificial Sequence
  ENSG00000091656_34 (sequence is synthesized)
tattgtaactacaatagtagggaccaaagtcgtatccagatgcacgtcctatcacagcactcggtgcagccggtcatctgctgtcctctctgtcaggacgtcctcagcaacaaaatgcat

SEQ ID NO: 99944 - DNA, 120 bp, Artificial Sequence
  ENSG00000091656_35 (sequence is synthesized)
ctccaactgcatctgacgcatttgcacagtgtgtctccagactgtgtggagaagctgcttatgacagtgcctgtccctgatgtgatgatgccaaacagtatgctactgccagcagctgcc

SEQ ID NO: 99945 - DNA, 120 bp, Artificial Sequence
  ENSG00000091656_36 (sequence is synthesized)
tctgagaaatcagagcgggacacacctgcagccgtgacagctgaggggtctgggaaatattcaggtgaaagtccaatggatgacaaaagcatggcaggtctcgaggattcaaaggctaat

SEQ ID NO: 99946 - DNA, 120 bp, Artificial Sequence
  ENSG00000091656_37 (sequence is synthesized)
gtggaagtaaagaatgaggagcagaaaccgactaaagaacccttggaagtctcagaatggaataaaaatagcagtaaggatgtgaaaatccccgacacactgcaagatcaattaaatgaa

SEQ ID NO: 99947 - DNA, 120 bp, Artificial Sequence
  ENSG00000091656_38 (sequence is synthesized)
cagcaaaaaaggcaaccgctctctgtttctgaccgtcatgtctacaagtatcgctgtaaccattgtagcttggctttcaaaactatgcagaagcttcagatacattcccagtatcatgca

SEQ ID NO: 99948 - DNA, 120 bp, Artificial Sequence
  ENSG00000091656_39 (sequence is synthesized)
attcgggctgcgacaatgtgtaacctctgccagcgcagtttccgtacattccaggctttaaaaaaacacttggaagcaggccaccctgaactgagtgaagctgaacttcaacagctatat

SEQ ID NO: 99949 - DNA, 120 bp, Artificial Sequence
  ENSG00000091656_40 (sequence is synthesized)
gcctccttgcccgtgaatggagaactgtgggcagagagcgaaactatgtcccaggatgaccatggcctagagcaggaaatggagagagagtatgaggtggaccacgaagggaaagcaagt

SEQ ID NO: 99950 - DNA, 120 bp, Artificial Sequence
  ENSG00000091656_41 (sequence is synthesized)
cctgtaggaagtgatagtagctctattccagatgacatgggctctgaaccaaagcggaccttaccttttagaaaagggcccaattttacgatggaaaaattccttgatccatctcgtcca

SEQ ID NO: 99951 - DNA, 120 bp, Artificial Sequence
  ENSG00000091656_42 (sequence is synthesized)
tataaatgtacagtgtgtaaagagtcattcacccaaaagaacattctcttggtccactataattcagtttctcacttgcataagctgaaaaaagttttgcaggaagcctccagtcctgtc

SEQ ID NO: 99952 - DNA, 120 bp, Artificial Sequence
  ENSG00000091656_43 (sequence is synthesized)
ccacaagaaaccaacagcaacacagataacaaaccctacaagtgcagcatctgcaatgttgcatacagccaaagctcaacattggaaatccacatgaggtctgtgctccaccagacaaag

SEQ ID NO: 99953 - DNA, 120 bp, Artificial Sequence
  ENSG00000091656_44 (sequence is synthesized)
gctagggctgcaaagctggagcccagtggtcatgtggctggtgggcacagcattgcagcaaatgtcaacagccctggccaggggatgttagattccatgagtttagcagctgtaaacagc

SEQ ID NO: 99954 - DNA, 120 bp, Artificial Sequence
  ENSG00000091656_45 (sequence is synthesized)
aaagatacccatttagatgccaaagaattaaataaaaagcaaactcctgatttaatctctgctcaacctgcacatcacccaccacagtcaccagcacaaattcagatgcaactacagcac

SEQ ID NO: 99955 - DNA, 120 bp, Artificial Sequence
  ENSG00000091656_46 (sequence is synthesized)
gaattacaacagcaagccgcattctttcagcctcagtttctaaacccagcctttttgcctcattttcctatgaccccagaagcactgctgcagtttcagcagcctcagtttctctttcca

SEQ ID NO: 99956 - DNA, 120 bp, Artificial Sequence
  ENSG00000091656_47 (sequence is synthesized)
ttttatatacctgggacggagttcagcttggggccagatttgggcttgccaggctctgccacatttgggatgcctggcatgacaggaatggctggctccttgcttgaagacctaaagcag

SEQ ID NO: 99957 - DNA, 120 bp, Artificial Sequence
  ENSG00000091656_48 (sequence is synthesized)
cagattcaaacccaacatcacgttggtcaaactcaactccagatactacagcaacaagcacaacaataccaagccacacagccccagctgcagcctcaaaaacaacagcagcagccacca

SEQ ID NO: 99958 - DNA, 120 bp, Artificial Sequence
  ENSG00000091656_49 (sequence is synthesized)
cctccacagcagcagcagcaacagcaggcaagcaaattattgaaacaagagcaaagtaacatagtgagtgcagactgccaaatcatgaaggatgtgccatcttataaggaggcagaagat

SEQ ID NO: 99959 - DNA, 120 bp, Artificial Sequence
  ENSG00000091656_50 (sequence is synthesized)
atttctgaaaagccagaaaaaccaaagcaggaatttataagtgaaggtgaaggactcaaagaaggcaaagacacaaagaagcaaaaatccttggaaccatccatcccaccaccccgaata

SEQ ID NO: 99960 - DNA, 120 bp, Artificial Sequence
  ENSG00000091656_51 (sequence is synthesized)
gcttcaggggccagaggaaatgctgccaaagcgttattggaaaactttggttttgaactggtcattcagtataacgaaaacaggcagaaggtacagaagaagggcaaaagtggtgaaggc

SEQ ID NO: 99961 - DNA, 120 bp, Artificial Sequence
  ENSG00000091656_52 (sequence is synthesized)
gaaaacactgacaaactagaatgtggaacatgtggtaaattgttttccaatgttcttattttaaagagtcaccaagaacatgtacatgggcaattttttccatatgcagcgctagaaaaa

SEQ ID NO: 99962 - DNA, 120 bp, Artificial Sequence
  ENSG00000091656_53 (sequence is synthesized)
tttgctcgtcaatacagggaggcctatgacaagctttatccaatttctccatcttctccagaaacgccgcccccgccacctcctcctcctcccttgcctccggctcctccacagccttct

SEQ ID NO: 99963 - DNA, 120 bp, Artificial Sequence
  ENSG00000091656_54 (sequence is synthesized)
tctatgggtcctgtaaagatccccaacacggtttctactcctctgcaagctccaccacccactcctcccccaccaccaccacctcctcctcctcctcctcctccccccccacctcctcca

SEQ ID NO: 99964 - DNA, 120 bp, Artificial Sequence
  ENSG00000091656_55 (sequence is synthesized)
ccttctgctcctccacaggtccaactgccggtttctctggacctgccgctctttccttccattatgatgcaacctgtgcaacaccctgcgcttcctccccagcttgccctgcagctgcca

SEQ ID NO: 99965 - DNA, 120 bp, Artificial Sequence
  ENSG00000091656_56 (sequence is synthesized)
cagatggacgcactctctgcagacctcacccaactttgccagcagcagctcggattagatcccaacttcttaagacattctcagttcaaacgcccacggacaagaattacagatgatcag

SEQ ID NO: 99966 - DNA, 120 bp, Artificial Sequence
  ENSG00000091656_57 (sequence is synthesized)
ctaaaaatcctgagggcttattttgacattaataattctccaagtgaagaacagatccaggaaatggcagagaaatctggcctctcccaaaaagttatcaaacactggtttagaaatacg

SEQ ID NO: 99967 - DNA, 120 bp, Artificial Sequence
  ENSG00000091656_58 (sequence is synthesized)
tagaagatatcagaattgatccacagcccacctctttagaacattacaaatctgatgcatcattcagtaaaaggtcttctagaacgagatttactgactaccagcttagggttctgcaag

SEQ ID NO: 99968 - DNA, 120 bp, Artificial Sequence
  ENSG00000091656_59 (sequence is synthesized)
acttttttgacacaaacgcttacccaaaagatgatgaaatagaacaactctccactgttctcaatctgcctacccgggttattgttgtatggttccagaatgctcgtcagaaagcacgaa

SEQ ID NO: 99969 - DNA, 120 bp, Artificial Sequence
  ENSG00000091656_60 (sequence is synthesized)
agagttatgagaatcaagcagaaacaaaagataatgaaaaaagagaactcactaatgaacggtacattcgaacaagcaacatgcagtaccagtgtaaaaagtgcaatgtggttttcccca

SEQ ID NO: 99970 - DNA, 120 bp, Artificial Sequence
  ENSG00000091656_61 (sequence is synthesized)
ggatctttgacttgattacgcatcagaaaaagcagtgttacaaggatgaagatgatgatgcccaagatgaaagccaaacagaagactccatggatgccactgatcaagtggtatacaagc

SEQ ID NO: 99971 - DNA, 120 bp, Artificial Sequence
  ENSG00000091656_62 (sequence is synthesized)
attgcacagtgtctggccaaacggatgcagctaaaaacgctgctgcccctgcagcaagttctggctctgggaccagcacccccctgattccatcacccaaaccagaacctgagaagactt

SEQ ID NO: 99972 - DNA, 120 bp, Artificial Sequence
  ENSG00000091656_63 (sequence is synthesized)
ctccaaaacctgaatatcccgcagaaaagccaaagcagagtgacccctctcccccttctcaaggcaccaaaccagccctgccattagcatcgacttcctcggacccaccacaggcatcca

SEQ ID NO: 99973 - DNA, 120 bp, Artificial Sequence
  ENSG00000091656_64 (sequence is synthesized)
cagcccagccacagccacagccacagccaccaaaacaaccccaacttatcggaagacctccctcggcctctcaaacaccggtcccttccagtccactgcaaatttccatgacgtctctcc

SEQ ID NO: 99974 - DNA, 120 bp, Artificial Sequence
  ENSG00000091656_65 (sequence is synthesized)
agaacagtctacctccacagttactacaataccaatgtgatcagtgtacagttgccttcccaactctggaactctggcaggaacaccagcacatgcacttccttgctgctcaaaaccaat

SEQ ID NO: 99975 - DNA, 120 bp, Artificial Sequence
  ENSG00000091656_66 (sequence is synthesized)
tccttcactctccgttcttggaaaggcccatggacatgccctacatgatatttgaccccaacaatccgctgatgactggacaactgctgggcagttccctcactcaaatgccccctcagg

SEQ ID NO: 99976 - DNA, 120 bp, Artificial Sequence
  ENSG00000091656_67 (sequence is synthesized)
ccagttcctcccacaccacagcccccacaacggttgctgcttccctaaaaaggaaactagacgataaagaagataataattgcagtgaaaaagaaggagggaatagcggtgaagaccaac

SEQ ID NO: 99977 - DNA, 120 bp, Artificial Sequence
  ENSG00000091656_68 (sequence is synthesized)
accgagataaacgcttgagaaccacgatcaccccggaacagctggaaatactctatgaaaaatacttgctggattccaatcctaccagaaaaatgcttgatcatattgcccgcgaagtcg

SEQ ID NO: 99978 - DNA, 120 bp, Artificial Sequence
  ENSG00000091656_69 (sequence is synthesized)
ggctgaaaaaaagggtcgtgcaagtctggttccagaatacacgagcgcgggagaggaaaggccagttccgggcggtgggtccagcacagtctcataaacggtgtccgttttgccgagccc

SEQ ID NO: 99979 - DNA, 120 bp, Artificial Sequence
  ENSG00000091656_70 (sequence is synthesized)
tgtttaaagcaaagtcggccttagaaagccacattcgctctcggcactggaatgaaggaaagcaggcaggttacagcttgccaccaagccctttaatatccaccgaagatgggggagaaa

SEQ ID NO: 99980 - DNA, 120 bp, Artificial Sequence
  ENSG00000091656_71 (sequence is synthesized)
gcccacagaaatacatctattttgattacccatctttgccattaactaaaattgatctatcaagtgagaatgaattggcttctacagtgtcaacacctgttagtaaaacagcagagctgt

SEQ ID NO: 99981 - DNA, 120 bp, Artificial Sequence
  ENSG00000091656_72 (sequence is synthesized)
caccgaagaatcttttaagcccttcttcttttaaagcagagtgttctgaggatgtagagaatttaaatgcccctcctgctgaggctgggtatgatcaaaataaaaccgattttgatgaga

SEQ ID NO: 99982 - DNA, 120 bp, Artificial Sequence
  ENSG00000091656_73 (sequence is synthesized)
cttcatcgattaatacggcaatcagtgacgccaccaccggagacgagggaaacactgaaatggaaagcaccacaggaagttccggagatgtgaaaccggctttgtctcccaaagagccaa

SEQ ID NO: 99983 - DNA, 120 bp, Artificial Sequence
  ENSG00000091656_74 (sequence is synthesized)
aaactctggatactctgccaaaacctgcaaccacacctaccacggaggtctgcgatgacaaatttctcttttctctcacaagcccatccatccatttcaatgacaaagatggcgaccacg

SEQ ID NO: 99984 - DNA, 120 bp, Artificial Sequence
  ENSG00000091656_75 (sequence is synthesized)
accaaagcttttacatcacagatgacccggatgacaacgccgaccgcagcgaaacgtccagcatagcggacccgagctccccaaatccattcggatccagcaatccctttaaatccaaaa

SEQ ID NO: 99985 - DNA, 120 bp, Artificial Sequence
  ENSG00000091656_76 (sequence is synthesized)
gtaatgatcggccgggtcacaagcgttttcgaacgcaaatgagcaatcttcaactcaaggttctcaaggcttgctttagtgactaccgaactccaaccatgcaagaatgtgaaatgttag

SEQ ID NO: 99986 - DNA, 120 bp, Artificial Sequence
  ENSG00000091656_77 (sequence is synthesized)
ggaatgagattggtctgcccaaacgcgtagtccaggtgtggttccaaaatgcaagggcaaaggaaaagaaatttaaaattaacatagggaagcctttcatgatcaatcaaggcggaacgg

SEQ ID NO: 99987 - DNA, 120 bp, Artificial Sequence
  ENSG00000091656_78 (sequence is synthesized)
aaggcaccaaaccagagtgtaccctctgcggggtgaagtactctgcccgcttgtccatcagagatcacattttctccaaacagcacatttcaaaagtgagggagaccgttggcagtcagc

SEQ ID NO: 99988 - DNA, 120 bp, Artificial Sequence
  ENSG00000091656_79 (sequence is synthesized)
tcgatcgggagaaagattacttggctccgaccacggttcggcagctgatggcacagcaagaacttgatcgtataaagaaagcttcagacgtgctgggcttgacggtacagcagccaggca

SEQ ID NO: 99989 - DNA, 120 bp, Artificial Sequence
  ENSG00000091656_80 (sequence is synthesized)
tgatggacagcagttctctccacggcatcagcctgccaacagcctaccccggactccccggccttcctccagtccttctccccggaatgaacggtccatcctccttgccgggatttccac

SEQ ID NO: 99990 - DNA, 120 bp, Artificial Sequence
  ENSG00000091656_81 (sequence is synthesized)
aaaattcaaacactttaacacctcccggtgcaggcatgcttgggtttcctacttcagctacttcgtctcctgccctgtctctcagcagtgcccccaccaaacctttgctgcagactccac

SEQ ID NO: 99991 - DNA, 120 bp, Artificial Sequence
  ENSG00000091656_82 (sequence is synthesized)
cacctccaccacctcctcctcctcctcctccttcatcctctctgtcaggacagcagaccgagcaacagaacaaagaatctgagaaaaagcaaactaagccaaacaaggtgaaaaaaatca

SEQ ID NO: 99992 - DNA, 120 bp, Artificial Sequence
  ENSG00000091656_83 (sequence is synthesized)
aagaggaggaattagaggccaccaaacccgaaaaacaccccaaaaaagaggaaaaaatctcatctgctctttcagtgttgggcaaagttgtaggtgaaacacatgtcgatcctattcagt

SEQ ID NO: 99993 - DNA, 120 bp, Artificial Sequence
  ENSG00000091656_84 (sequence is synthesized)
tgcaggcattacagaatgcaattgctggtgacccagcttcctttataggcggacagttcttgccatactttatccctgggtttgcttcttattttacacctcagctccctggaacagtgc

SEQ ID NO: 99994 - DNA, 120 bp, Artificial Sequence
  ENSG00000091656_85 (sequence is synthesized)
aggggggatacttcccacctgtctgtggcatggagagcctctttccttatggccctacaatgccccagacactggcaggtctgtccccaggtgcactgttgcagcagtaccaacagtatc

SEQ ID NO: 99995 - DNA, 120 bp, Artificial Sequence
  ENSG00000091656_86 (sequence is synthesized)
agcagaacctgcaggagtccctgcaaaagcagcaaaagcaacagcaagaacagcagcagaaaccagttcaggcaaagacatccaaagtagaaagtgaccagccgcaaaactccaacgatg

SEQ ID NO: 99996 - DNA, 120 bp, Artificial Sequence
  ENSG00000091656_87 (sequence is synthesized)
cttcagaaacaaaggaagacaaaagtactgctacagaaagcacaaaagaagaaccccagttagaatccaaaagtgcagacttttcagacacttacgttgttccattcgtcaagtatgagt

SEQ ID NO: 99997 - DNA, 120 bp, Artificial Sequence
  ENSG00000091656_88 (sequence is synthesized)
ttatatgcagaaagtgccagatgatgtttactgatgaagacgccgcagtaaatcatcaaaagtccttctgttatttcggtcagcctttgattgacccacaagagacagtgcttcgtgtcc

SEQ ID NO: 99998 - DNA, 120 bp, Artificial Sequence
  ENSG00000091656_89 (sequence is synthesized)
cagtcagcaaatatcagtgtcttgcctgtgatgtggctatcagtgggaatgaagcacttagccaacacctccagtcaagcttgcacaaagagaaaacaatcaaacaagcaatgagaaatg

SEQ ID NO: 99999 - DNA, 120 bp, Artificial Sequence
  ENSG00000091656_90 (sequence is synthesized)
ccaaagagcatgttagattattacctcactcagtctgctcccctaatcctaacaccacatctacctcgcagtctgcagcttcttctaataacacctatcctcatctttcttgcttctcca

SEQ ID NO: 100000 - DNA, 120 bp, Artificial Sequence
  ENSG00000091656_91 (sequence is synthesized)
tgaagtcctggcctaatatccttttccaagcgtctgccaggagagctgcttctcccccttcttctcctccttccctttccttgccttcaacggttacctcaagtttgtgcagcacctcag

SEQ ID NO: 100001 - DNA, 120 bp, Artificial Sequence
  ENSG00000091656_92 (sequence is synthesized)
gggttcaaacctcactacccacagaaagttgttcagatgagtctgacagtgagctgagccagaagctagaagacttagataattctttggaagtgaaggctaagcctgcttctggcctag

SEQ ID NO: 100002 - DNA, 120 bp, Artificial Sequence
  ENSG00000091656_93 (sequence is synthesized)
gtgaaggctaagcctgcttctggcctagatggtaatttcaatagcatccgaatggatatgttcagtgtgtaggagtgaagacaggatcccgtgcttaaaaaaataaaaaataaaaaaata

SEQ ID NO: 100003 - DNA, 120 bp, Artificial Sequence
  ENSG00000091656_94 (sequence is synthesized)
ccaaagcttctctaacccaaaaattacagtaccaaatgattgactcaggattgtttttcccatattgatatgctggcaatataggatggtatgtaatggacagaactgatgcagatggtt

SEQ ID NO: 100004 - DNA, 120 bp, Artificial Sequence
  ENSG00000091656_95 (sequence is synthesized)
gaatgcgcttgtactatatgctaaaatatggaaaaggaaaaaaaaatctcacaagttcttttggaacttgtttcaagccaaaaactctcaagaaagcaaattgcacctcagctggattga

SEQ ID NO: 100005 - DNA, 120 bp, Artificial Sequence
  ENSG00000091656_96 (sequence is synthesized)
tttccaaatgctagcatgtactgtatgggaggatgatccagatgtttcaaagagaatttctcttagtttagttaggtgtaattcagtagctttaaattctcaggtcagaacataacattt

SEQ ID NO: 100006 - DNA, 120 bp, Artificial Sequence
  ENSG00000091656_97 (sequence is synthesized)
ctcatttgttaaaagcagcaagaagcctggtaaaactgtgacttttccccaaacgtcaatctttattagaaagcattttctaggtgtgtttagtgtacaaagagactttataacccttac

SEQ ID NO: 100007 - DNA, 120 bp, Artificial Sequence
  ENSG00000091656_98 (sequence is synthesized)
tggacaacacacagatccttgagctcacgctgcaggatagtacagttttaccgcagagggaatctggaacagtggaatcatgtgtctgccctgtgtattgcagtttgtattgccacaagc

SEQ ID NO: 100008 - DNA, 120 bp, Artificial Sequence
  ENSG00000091656_99 (sequence is synthesized)
tatatttataccagtgtcacccttttcttgtagaatatactaataatctgtgccaactctaccttctcacttttacctctgacgtcattctttttttctgaaagaggtaataattctagt

SEQ ID NO: 100009 - DNA, 120 bp, Artificial Sequence
  ENSG00000091656_100 (sequence is synthesized)
tttgatagactctgaggattatgtgaacaggacatttttcatttgtgaatttaatgctatactgtcaaggtacttgcttgtgtctgaactctagtgcacttatgattttgtagaccatgt

SEQ ID NO: 100010 - DNA, 120 bp, Artificial Sequence
  ENSG00000091656_101 (sequence is synthesized)
gaaatttaataagataccttttttttcctttctttgtgtgtagtgcagcaacagtttggtctgcatttgttagaagtttaactcctaacaacccaaagacctatttaacaattggtgcat

SEQ ID NO: 100011 - DNA, 120 bp, Artificial Sequence
  ENSG00000091656_102 (sequence is synthesized)
aaatgaaagtagtactgtatacttgaaactgtttaagtacaagttgaacaaaaattatgaaaaggtatatttgcttctcgggaaagcaaagaagctgctttaaaaaataaaaaggggact

SEQ ID NO: 100012 - DNA, 120 bp, Artificial Sequence
  ENSG00000091656_103 (sequence is synthesized)
aaaaatttgttttgtataaagaggttagccctgcgcacgtaggactgaattcagtgatatccctatacactgccatttagtggataggttattgtacttccattcatactctgggcactt

SEQ ID NO: 100013 - DNA, 120 bp, Artificial Sequence
  ENSG00000091656_104 (sequence is synthesized)
gtgttgtattgttctgttacatactttttttaacctgttttgttttatcatatatgcattaaaagtattatctttatcaacatttgctgctactgtgttaacatttttgttttgcttgcc

SEQ ID NO: 100014 - DNA, 120 bp, Artificial Sequence
  ENSG00000091656_105 (sequence is synthesized)
atgaatttcaacttccaccacccagtgaattgatttataaattgctatgctttgctgtttttctgttgctgtggaacttaaagaatgtgaaagctgtcaaagggtattttacgaatcact

SEQ ID NO: 100015 - DNA, 120 bp, Artificial Sequence
  ENSG00000091656_106 (sequence is synthesized)
tttgtgtttgatatagtaaaacaatgtgattcattccaaagtaacagaaggttatttgtaagaaagttaaaggcttgtgaacaaagaaagctaagctgttgtacatatttgtagttggct

SEQ ID NO: 100016 - DNA, 120 bp, Artificial Sequence
  ENSG00000091656_107 (sequence is synthesized)
gtgcatggtacaaatttattaatatgaagaaatgcaaaatgtattgcttttgatatttctcttccgagatgaacaagtagcatgtaatgcaactgtttgacagtttaactcaagtcatgc

SEQ ID NO: 100017 - DNA, 120 bp, Artificial Sequence
  ENSG00000091656_108 (sequence is synthesized)
ttcaaactgttttaatgatcaaatcaagacacatttcattttacattttattattgtacagtttttgtttcggatgatgatcacagcaatctttattctatacattttatgtgaactttt

SEQ ID NO: 100018 - DNA, 120 bp, Artificial Sequence
  ENSG00000091656_109 (sequence is synthesized)
ttaatgtctttaatttggattttttttttttttagtattttaacatttattttaatcctgaagacacttttttgattgtgtttcgtaagagacaacatggcctcctaaggtgcaatcctg

SEQ ID NO: 100019 - DNA, 120 bp, Artificial Sequence
  ENSG00000091656_110 (sequence is synthesized)
ccgctatagtgagctaatgtcctgaatccaaaggcttcagaaaattgcttttgcctttttcatgaatgttaagcagcagcattgtgagatcgatctgtcctggcagttaacacgatgtgc

SEQ ID NO: 100020 - DNA, 120 bp, Artificial Sequence
  ENSG00000091656_111 (sequence is synthesized)
aacagtgtgttagcatggaacagaacgcttttcacaaaacaaaggactgttttacaaatgattattccgacagtgtgtcgacataaacttttacaactgcacagcagccaaaaaaagaaa

SEQ ID NO: 100021 - DNA, 120 bp, Artificial Sequence
  ENSG00000091656_112 (sequence is synthesized)
aaaaaaagaaaaaaaactttaactggatggacgttgttagggtgagaaataaaaggacagcctccaaaggttgagaatgagaattgttttttcctggatatcaaagggattatcacagcg

SEQ ID NO: 100022 - DNA, 120 bp, Artificial Sequence
  ENSG00000091656_113 (sequence is synthesized)
caatcattgtctacacaacatgtactctcaacgcctgggttacataggaaatgcaccctgaggttttaataaaagcccctatggctataactttaaataaactaaaccaaaaatgttatt

SEQ ID NO: 100023 - DNA, 120 bp, Artificial Sequence
  ENSG00000091656_114 (sequence is synthesized)
gatgttttatatatagagagtagtctcattagtttttgttactgtaatgtttgaagtctcaaatgcaccgtattacggtaaataacatggttttgaaaacttttttttattttgtcacag

SEQ ID NO: 100024 - DNA, 120 bp, Artificial Sequence
  ENSG00000091656_115 (sequence is synthesized)
acctgttgtcatagttgaaatgatgtttattgtagatggtatttgaacttattcttctggaaatagttcatcaagtatgtttgttgctcattgtgatacattaaaaactgtatctacata

SEQ ID NO: 100025 - DNA, 120 bp, Artificial Sequence
  ENSG00000091656_116 (sequence is synthesized)
atcgcccggcctctgggccagggacccgcgaggcggcggctgcttgctccgaacggaacgccgccgggtgtgcgttagaccagcggatagacgcccgcggcttggggtccctgacaggct

SEQ ID NO: 100026 - DNA, 120 bp, Artificial Sequence
  ENSG00000091656_117 (sequence is synthesized)
aggcgtcctgtggcctcaggcaaatctggtcgctgggactagagaaggtcaattcctggcttgtctcttcccttttggacccgacttgagactggtgtgtttgaaaggcacagaaatgtt

SEQ ID NO: 100027 - DNA, 120 bp, Artificial Sequence
  ENSG00000091656_118 (sequence is synthesized)
gtagtattatatttttagttgggtggatggatggaagagtgagagagaggctgcggctgccgctgccttttcgggtgttgcttagattaaggctgagacttggctgcgattgggacgcga

SEQ ID NO: 100028 - DNA, 120 bp, Artificial Sequence
  ENSG00000091656_119 (sequence is synthesized)
gtatttcttcagagctaattaaagctctgttattgctcgtgttatagtagtcacactcaaggcccatttgtgacctcttttgcttggaaaaaaatatggtacaaggcatagcttagtaaa

SEQ ID NO: 100029 - DNA, 120 bp, Artificial Sequence
  ENSG00000091656_120 (sequence is synthesized)
gaacattattttgcagtcttctttttatatctataatgttcatcaaataaccccagtgggcaccttgcatttcaaacttgcttcattatcattataaaaaaataaacctacaggaacctt

SEQ ID NO: 100030 - DNA, 120 bp, Artificial Sequence
  ENSG00000091656_121 (sequence is synthesized)
acattgccacagcattgatctaaagtggcaaggtgtggcattgatctgtaacatctgcaaaacatccctgctttggctaaaataaacaaatgtaagtgggatatgctaccagcaaaagag

SEQ ID NO: 100031 - DNA, 120 bp, Artificial Sequence
  ENSG00000091656_122 (sequence is synthesized)
gcagttgagatcgacctcaggtaatggttcctactccttctcaaaatatttccttgtcctaaatgagttgcttttgttactctcataattgatggaataaacattctctggaacttctct

SEQ ID NO: 100032 - DNA, 120 bp, Artificial Sequence
  ENSG00000091656_123 (sequence is synthesized)
aattagatctgatcatatgccttattcaaataagtaaaaagcaaaatgaaataaattcaataattggaagtatatgtaaattgactttacattttagagcagttttaggttcacagcaaa

SEQ ID NO: 100033 - DNA, 120 bp, Artificial Sequence
  ENSG00000091656_124 (sequence is synthesized)
aggcacgaggcggccctgaagctctacaaggtaagcagtgacatccatttccgttggcacagagtagaaaagggaattaactctttcagagcttggagcacaagtctccaacttaaggaa

SEQ ID NO: 100034 - DNA, 120 bp, Artificial Sequence
  ENSG00000091656_125 (sequence is synthesized)
aaaaaaagagaaaaaacatcaaagggcagggggcacagtttctgattaacattataaaaacatattgaaatatatggaattgaaggctttatttataaagttttaccctatgtctcactt

SEQ ID NO: 100035 - DNA, 120 bp, Artificial Sequence
  ENSG00000091656_126 (sequence is synthesized)
ctactgagaacatcttggttgattccaagttttggcaattacgaataaaactactatgagcatcggtgtccaggcttttgtgtggacataaattttcaactccctttgataaatgccaag

SEQ ID NO: 100036 - DNA, 120 bp, Artificial Sequence
  ENSG00000091656_127 (sequence is synthesized)
gagtacaattactagattgtatgataagagcatgtttagttttgtaaaaaccaccaaactgtcttccaaagtggttgtaccattttgcattcccaccagcgatgaatgagagttcctgtt

SEQ ID NO: 100037 - DNA, 120 bp, Artificial Sequence
  ENSG00000091664_0 (sequence is synthesized)
actctcactcttgctggaggcgagccactaccattctgctgagaaggaaaagcccgcaactactttaagagattaagacaatatgcgcaatcctcgcctttcctagcaatcactatttaa

SEQ ID NO: 100038 - DNA, 120 bp, Artificial Sequence
  ENSG00000091664_1 (sequence is synthesized)
atctggcaagaactgacaacagtctttgcaagaatggaatccgtaaaacaaaggattttggccccaggaaaagaggggctaaagaattttgctggaaaatcactcggccagatctacagg

SEQ ID NO: 100039 - DNA, 120 bp, Artificial Sequence
  ENSG00000091664_2 (sequence is synthesized)
gtgctggagaagaagcaagacaccggggagacaatcgagctgacggaggatgggaagcccctagaggtgcccgagaggaaggcgccgctgtgcgactgcacgtgcttcggcctgccccgc

SEQ ID NO: 100040 - DNA, 120 bp, Artificial Sequence
  ENSG00000091664_3 (sequence is synthesized)
cgctacattatcgccatcatgagcggcctgggcttctgcatctccttcggtatccgctgcaacctgggcgtggccattgtggacatggtcaacaacagcaccatccaccgcgggggcaag

SEQ ID NO: 100041 - DNA, 120 bp, Artificial Sequence
  ENSG00000091664_4 (sequence is synthesized)
gtcatcaaggagaaagccaaattcaactgggacccggaaaccgtggggatgatccacggttccttcttttggggctacatcatcactcagattccgggaggctacatcgcgtctcggctg

SEQ ID NO: 100042 - DNA, 120 bp, Artificial Sequence
  ENSG00000091664_5 (sequence is synthesized)
gcagccaacagggttttcggagctgccatacttcttacctctaccctaaatatgctaattccatcagcagccagagtgcattatggatgtgtcatctttgtcagaatactgcagggactt

SEQ ID NO: 100043 - DNA, 120 bp, Artificial Sequence
  ENSG00000091664_6 (sequence is synthesized)
gttgagggtgtgacctacccagcatgtcatgggatatggagcaaatgggccccacctctagagaggagtagactggcaaccacctccttttgtggttcctatgccggagctgtgattgca

SEQ ID NO: 100044 - DNA, 120 bp, Artificial Sequence
  ENSG00000091664_7 (sequence is synthesized)
atgcctttagctggcattcttgtgcagtacactggctggtcttcagtgttttatgtctacggaagctttggaatggtctggtacatgttttggcttttggtgtcttatgaaagtcctgca

SEQ ID NO: 100045 - DNA, 120 bp, Artificial Sequence
  ENSG00000091664_8 (sequence is synthesized)
aagcatcctactattacagatgaagaacgtaggtacatagaagaaagcattggagagagtgcaaatcttttaggtgcaatggaaaaattcaagactccatggaggaagttttttacatcc

SEQ ID NO: 100046 - DNA, 120 bp, Artificial Sequence
  ENSG00000091664_9 (sequence is synthesized)
atgccagtctatgcaataattgttgcaaacttctgcagaagctggactttttatttattgcttattagtcagccagcatattttgaggaagtctttggatttgaaattagcaaggttggt

SEQ ID NO: 100047 - DNA, 120 bp, Artificial Sequence
  ENSG00000091664_10 (sequence is synthesized)
atgctatctgctgtgccacacttagtaatgacaattattgtgcctattgggggacaaattgcagattttctaagaagcaagcagattctttcaactacgacagtgagaaagatcatgaat

SEQ ID NO: 100048 - DNA, 120 bp, Artificial Sequence
  ENSG00000091664_11 (sequence is synthesized)
tgtggtggttttggcatggaagccacactgctcctggtcgttggctattctcatactagaggggtagcaatctcattcttggtacttgcagtgggattcagtggatttgctatatctggt

SEQ ID NO: 100049 - DNA, 120 bp, Artificial Sequence
  ENSG00000091664_12 (sequence is synthesized)
ttcaatgttaaccacttggatatcgctccaagatatgccagtatcttaatgggcatttcgaatggtgttggcacattgtcaggaatggtttgtcctatcattgttggtgcaatgacaaag

SEQ ID NO: 100050 - DNA, 120 bp, Artificial Sequence
  ENSG00000091664_13 (sequence is synthesized)
aataagtcacgtgaagagtggcagtatgtcttcctgatcgctgccctagtccactatggtggagttatattttatgcaatatttgcctcaggagagaaacaaccctgggcagacccggag

SEQ ID NO: 100051 - DNA, 120 bp, Artificial Sequence
  ENSG00000091664_14 (sequence is synthesized)
gaaacaagtgaagaaaaatgtggatttattcatgaagatgaactcgatgaagaaacaggggacattactcaaaattatataaattatggtaccaccaagtcttatggtgccacaacacag

SEQ ID NO: 100052 - DNA, 120 bp, Artificial Sequence
  ENSG00000091664_15 (sequence is synthesized)
ctcacatagctataaggaccgagttgattattcataacaaaactaattactggatttatttttagtgtttgtgattaaattcattgtgattgcacaaaaattttaaaaacacgtgatgta

SEQ ID NO: 100053 - DNA, 120 bp, Artificial Sequence
  ENSG00000091664_16 (sequence is synthesized)
aacttgcaagcatatcaaccaggcaagtcttgctgtaaaaatgaaaacaaaacaaacccatgaggttaccatcaagtgcaatctgtaaaattgtgaagttccatcatttccattcaagtc

SEQ ID NO: 100054 - DNA, 120 bp, Artificial Sequence
  ENSG00000091664_17 (sequence is synthesized)
atccattcttgcatttgtgacttaaaggttgactggtcaaaattgtagaaacaagtagttacccattggattcatatgagctaaaactcatcactatttactaaagcacaacatctcatc

SEQ ID NO: 100055 - DNA, 120 bp, Artificial Sequence
  ENSG00000091664_18 (sequence is synthesized)
ctacaaaagttaagaagccaaagctacttgatcatgcaaaatgcacttatatatttgttacactgtattgcaagatagcacacagaagttggctgcgtcaagtagaggcgacatttatta

SEQ ID NO: 100056 - DNA, 120 bp, Artificial Sequence
  ENSG00000091664_19 (sequence is synthesized)
agtgaaaatcatggagttgggatatctctcaattaaagaaatacattgtgaactatcagctacaaagttgtactgaataactattagaattgcataatgtgagatattttgttagtcctc

SEQ ID NO: 100057 - DNA, 120 bp, Artificial Sequence
  ENSG00000091664_20 (sequence is synthesized)
aaaaggaatatcttgcagtgttttctatgaaatgcttgggcacaaacacttatttctgtgaaagagaacatgtaagttgaggggtatgcttcatgttcttccatccatttacctaatagt

SEQ ID NO: 100058 - DNA, 120 bp, Artificial Sequence
  ENSG00000091664_21 (sequence is synthesized)
atgaaacagttcacatttcaataaaatcaaacttttcatgtagcgtatcacataacttttttgcaaaaaatataaaaagaaataaacttcaatgtattttttattacaactttgtactgg

SEQ ID NO: 100059 - DNA, 120 bp, Artificial Sequence
  ENSG00000091664_22 (sequence is synthesized)
ttgtaacttgcattagaaaaaaaagagatatatacaccacaaagaatctaataagaaatttattatggagatatagcccttaaaatgcaatattaagaacaaagaaatagaaaatggttt

SEQ ID NO: 100060 - DNA, 120 bp, Artificial Sequence
  ENSG00000091664_23 (sequence is synthesized)
agatatctttcttccttcataattaaatactatatgaaacttgtgccacagagctatatataatatgaaaagattaacttcatagagatattgtaagtaggtaattttattatttaaagt

SEQ ID NO: 100061 - DNA, 120 bp, Artificial Sequence
  ENSG00000091664_24 (sequence is synthesized)
gaaatatttgtcttaaatatataggacaatacattatattaaaatggtctctctctatatatatctgtatatcttatacatgtccatacacagaaacataataaacaatcttcacacgaa

SEQ ID NO: 100062 - DNA, 120 bp, Artificial Sequence
  ENSG00000091664_25 (sequence is synthesized)
cacacgaaaccaaaaatagcatacacctaatgttgggttagggaattgcaatttctactttcatagagtcatagaattttaggtggggaagaggcattttgcttgtcatttcttaatata

SEQ ID NO: 100063 - DNA, 120 bp, Artificial Sequence
  ENSG00000091664_26 (sequence is synthesized)
actcaacaagaattgcaacatttgtgtaccaagcaataagtgcaatgcataaaatttcctgtctgtatattaccttcattttgcttgtagtagctgtttgggtggttggaataattttat

SEQ ID NO: 100064 - DNA, 120 bp, Artificial Sequence
  ENSG00000091664_27 (sequence is synthesized)
ttttcttttaaaaaagctaacatcagacccctttataatgtcctaaaattatgataatacatttcccaattcaactcaaaatattattggtgtattttgtctattctggatatttgatct

SEQ ID NO: 100065 - DNA, 120 bp, Artificial Sequence
  ENSG00000091664_28 (sequence is synthesized)
gttcaatgtactgtgctagtgactggaggccctgctactgcaaatataaaacataaagtttgtttaaaaaaatgcaaatcattctttaccttaagaaaaaaaaaataccctttgctttgt

SEQ ID NO: 100066 - DNA, 120 bp, Artificial Sequence
  ENSG00000091664_29 (sequence is synthesized)
gcctcaaagtgatgtaatgtgatcacagcttttgttgtgttgaatgaaaatatgtggactgtcattttgttgcagcaaaaaagtgttaataaaatgctctatttatcctttttttaaaaa

SEQ ID NO: 100067 - DNA, 120 bp, Artificial Sequence
  ENSG00000091664_30 (sequence is synthesized)
attcagatgattcgatctgcctgacagtagtcagggagcaaagccagtgcgcctggcctcactattaatcacaatacattttgttaatgagcagggttttttcgttgcaagaggcaattt

SEQ ID NO: 100068 - DNA, 120 bp, Artificial Sequence
  ENSG00000091664_31 (sequence is synthesized)
tgttaggaaacgaaaatgaagccactcttatccccagaatgcatgaagcgcccaagccttgggggctttttggcttgtgaaccactgaaagtgagcctttggtactgactctactctttc

SEQ ID NO: 100069 - DNA, 120 bp, Artificial Sequence
  ENSG00000091664_32 (sequence is synthesized)
gcaatggaagtaagaaatttattatggtgtatattcctatcttattcccatctcgcccccattgaccaaccaaactatcttacaagttcttcctcagcaaaactaatttggtatcaatca

SEQ ID NO: 100070 - DNA, 120 bp, Artificial Sequence
  ENSG00000091664_33 (sequence is synthesized)
tttcttaagcatttaaaaatgtacactgggtgataactatgactgcaaacctaaacaatatttttaaacagttcaatatggtctatatttaaacaaatacaataaatagttgttcatttt

SEQ ID NO: 100071 - DNA, 120 bp, Artificial Sequence
  ENSG00000091664_34 (sequence is synthesized)
acgttaaaaaaatccaaatcagccatgaaaatggcaatttttggtttgttgaatacagtagtccccccgcatcctgaacagatctattccaagaccccccgggttgctaccgaaccctac

SEQ ID NO: 100072 - DNA, 120 bp, Artificial Sequence
  ENSG00000091664_35 (sequence is synthesized)
atataatgtttttcctatacatacatacctatgataaaatttaatgtataaattgggtatagtaagtgattgaccacagtgactaatgctaaaatagaattataacaatatactgtaagg

SEQ ID NO: 100073 - DNA, 120 bp, Artificial Sequence
  ENSG00000091664_36 (sequence is synthesized)
aaacttaagtgaatgtgccccccccaccctgtaaaatatcttattgtactgtacaactagtaactgaaacctcagaaagtgaaaccgcggttaagggaggactactatattctaaatgta

SEQ ID NO: 100074 - DNA, 120 bp, Artificial Sequence
  ENSG00000091704_0 (sequence is synthesized)
agtctgaccttccctcccggcagcagcatgcgggggttgctggtgttgagtgtcctgttgggggctgtctttggcaaggaggactttgtggggcatcaggtgctccgaatctctgtagcc

SEQ ID NO: 100075 - DNA, 120 bp, Artificial Sequence
  ENSG00000091704_1 (sequence is synthesized)
gatgaggcccaggtacagaaggtgaaggagctggaggacctggagcacctgcagctggacttctggcgggggcctgcccaccctggctcccccatcgacgtccgagtgcccttccccagc

SEQ ID NO: 100076 - DNA, 120 bp, Artificial Sequence
  ENSG00000091704_2 (sequence is synthesized)
atccaggcggtcaagatctttctggagtcccacggcatcagctatgagaccatgatcgaggacgtgcagtcgctgctggacgaggagcaggagcagatgttcgccttccggtcccgggcg

SEQ ID NO: 100077 - DNA, 120 bp, Artificial Sequence
  ENSG00000091704_3 (sequence is synthesized)
cgctccaccgacacttttaactacgccacctaccacaccctggaggagatctatgacttcctggacctgctggtggcggagaacccgcaccttgtcagcaagatccagattggcaacacc

SEQ ID NO: 100078 - DNA, 120 bp, Artificial Sequence
  ENSG00000091704_4 (sequence is synthesized)
tatgaagggcgtcccatttacgtgctgaagttcagcacggggggcagtaagcgtccagccatctggatcgacacgggcatccattcccgggagtgggtcacccaggccagtggggtctgg

SEQ ID NO: 100079 - DNA, 120 bp, Artificial Sequence
  ENSG00000091704_5 (sequence is synthesized)
tggacatcttcctggagatcgtcaccaaccctgatggctttgccttcacgcacagcacgaatcgcatgtggcgcaagactcggtcccacacagcaggctccctctgtattggcgtggacc

SEQ ID NO: 100080 - DNA, 120 bp, Artificial Sequence
  ENSG00000091704_6 (sequence is synthesized)
ccaacaggaactgggacgctggctttgggttgtccggagccagcagtaacccctgctcggagacttaccacggcaagtttgccaattccgaagtggaggtcaagtccattgtagactttg

SEQ ID NO: 100081 - DNA, 120 bp, Artificial Sequence
  ENSG00000091704_7 (sequence is synthesized)
tgaaggaccatgggaacatcaaggccttcatctccatccacagctactcccagctcctcatgtatccctatggctacaaaacagaaccagtccctgaccaggatgagctggatcagcttt

SEQ ID NO: 100082 - DNA, 120 bp, Artificial Sequence
  ENSG00000091704_8 (sequence is synthesized)
ccaaggctgctgtgacagccctggcctctctctacgggaccaagttcaactatggcagcatcatcaaggcaatttatcaagccagtggaagcactattgactggacctacagccagggca

SEQ ID NO: 100083 - DNA, 120 bp, Artificial Sequence
  ENSG00000091704_9 (sequence is synthesized)
tcaagtactccttcaccttcgagctccgggacactgggcgctatggcttcctgctgccagcctcccagatcatccccacagccaaggagacgtggctggcgcttctgaccatcatggagc

SEQ ID NO: 100084 - DNA, 120 bp, Artificial Sequence
  ENSG00000091704_10 (sequence is synthesized)
acaccctgaatcacccctactgagctgaccctttgacacccttcttgtcctcctctctggccccatccaggcaaccaaataaagtttgagtgtaccaggaacagaatcctggggcttgca

SEQ ID NO: 100085 - DNA, 120 bp, Artificial Sequence
  ENSG00000091704_11 (sequence is synthesized)
cgcacagcacggtaccggccttctcctgtccttgggggaagcaggatgggcctctggcttctaagctgcacaagtagttcacccctaatctcaagccccagaagtcaagggaggggcaat

SEQ ID NO: 100086 - DNA, 120 bp, Artificial Sequence
  ENSG00000091704_12 (sequence is synthesized)
cagacctgtgctcctagccgagggtgtctcaacagtggcgtgattggcatttggggtgaatgattctttgtcatgggggctgtcctgtgcatccacggtgtttctagcatcctaacctta

SEQ ID NO: 100087 - DNA, 120 bp, Artificial Sequence
  ENSG00000091704_13 (sequence is synthesized)
cacccattcaatgccagtaggagcccccctctccagtggtgacaaccaaaatgtcttcagatattgcaaaatatcgcaggggagggtcaagattgtccccagtggaggcccactgcccca

SEQ ID NO: 100088 - DNA, 120 bp, Artificial Sequence
  ENSG00000091704_14 (sequence is synthesized)
gaccttacttcctggtcctacttctatttttacggcaaataaaacatctgaccaatgacatggggccacagtggtggtggaggacacctcgcagcttcttcgccatatagaaccctctgg

SEQ ID NO: 100089 - DNA, 120 bp, Artificial Sequence
  ENSG00000091704_15 (sequence is synthesized)
ccaaatgccatcctatggccttccccactctctttcacccgatgccccctctgctgatcttcctccccgacaaccagctgggagtggatcccatcccaagctgtgcctgcagctcagctt

SEQ ID NO: 100090 - DNA, 120 bp, Artificial Sequence
  ENSG00000091704_16 (sequence is synthesized)
ccaatcagggcacttgtgttgagggcttccacctccagggagccctcccctcagtccactctgctctctgcagcctctgaaccaccccccacccagcactgtgacaagcgtcacacgtgc

SEQ ID NO: 100091 - DNA, 120 bp, Artificial Sequence
  ENSG00000091704_17 (sequence is synthesized)
ggtgtaaggcccagagtgtcttgggagcaaggatgggatggcctcgaatggctcctcaccactgctcttgctccccgcctctctcctgcccctgcagtgaggggagggttgggggtggca

SEQ ID NO: 100092 - DNA, 120 bp, Artificial Sequence
  ENSG00000091704_18 (sequence is synthesized)
gagggctcttggggatggaggctgtgctctgagagttggttgttactcgcctgcaaaaggcaagttgcttgcaaatgggctaaggtctgaaatcctacctagggggcttctagcttaacc

SEQ ID NO: 100093 - DNA, 120 bp, Artificial Sequence
  ENSG00000091704_19 (sequence is synthesized)
tcaagtcctcccgccttggccacgtctctgtgagaactggtctccactgaggagcccgtcttccctccctgggtgtgtccatcagctctgcccaaaccaggctgggagggcagttccccc

SEQ ID NO: 100094 - DNA, 120 bp, Artificial Sequence
  ENSG00000091704_20 (sequence is synthesized)
aggttatagaaggcctttgggctttcctgaatccaggggtgggagtgagcccttccataccacctcacccccaactccatgcaaagaactggattccagaagccacagaagctggaggag

SEQ ID NO: 100095 - DNA, 120 bp, Artificial Sequence
  ENSG00000091732_0 (sequence is synthesized)
gcctcaagaggcggatattaacctcccaggacggaagttccggagccttcaaactctcggggaagcaactcggcagcggaccaagatggcggcgccctgtgagggacaagcgtttgccgt

SEQ ID NO: 100096 - DNA, 120 bp, Artificial Sequence
  ENSG00000091732_1 (sequence is synthesized)
aggggttgaaaagaattggggtgcagtagttcgctccccagaagggaccccccagaaaatccggcagctgatagatgaggggattgccccggaagagggaggcgtggacgcgaaggacac

SEQ ID NO: 100097 - DNA, 120 bp, Artificial Sequence
  ENSG00000091732_2 (sequence is synthesized)
gtctgccacatcccagtcagttaatggatcaccccaagcggaacaaccttcattggaatctacaagcaaagaagccttctttagcagagtggaaacattttcttctttgaaatgggcagg

SEQ ID NO: 100098 - DNA, 120 bp, Artificial Sequence
  ENSG00000091732_3 (sequence is synthesized)
taagccctttgagctgtctccactcgtctgtgcaaaatatggctgggtcacagtggaatgtgatatgctcaagtgctctagctgtcaagcttttctctgtgccagtttacaaccagcttt

SEQ ID NO: 100099 - DNA, 120 bp, Artificial Sequence
  ENSG00000091732_4 (sequence is synthesized)
tgactttgacagatataagcaacgatgtgctgagctgaagaaagccttgtgtactgcccatgagaagttctgtttctggccagacagcccatccccagaccgatttgggatgttgcccct

SEQ ID NO: 100100 - DNA, 120 bp, Artificial Sequence
  ENSG00000091732_5 (sequence is synthesized)
ggatgagcctgctattcttgttagtgaattcctagatcgttttcaaagcctttgtcacttggacctccagcttccttccctaaggccggaggacttgaaaactatgtgcttgacagaaga

SEQ ID NO: 100101 - DNA, 120 bp, Artificial Sequence
  ENSG00000091732_6 (sequence is synthesized)
caagatcagtcttctcctacacttgcttgaagatgaacttgatcaccgaactgatgagagaaaaactacaatcaaattaggctcagacatccaagtccacgtcactgcctgtattctctc

SEQ ID NO: 100102 - DNA, 120 bp, Artificial Sequence
  ENSG00000091732_7 (sequence is synthesized)
tgtgtgtggctgggcgtgtagttcctctttggaatccatgcagctctccctgataacatgttcgcaatgtatgaggaaggtggggctctggggcttccagcagattgaatcgtccatgac

SEQ ID NO: 100103 - DNA, 120 bp, Artificial Sequence
  ENSG00000091732_8 (sequence is synthesized)
gggcgaccagagcgcttacctctggtgcctgaatctcctcggaggatgatgacccggagccaggatgccactttctccccaggctcagagcaggctgaaaagagccctggtcccattgtc

SEQ ID NO: 100104 - DNA, 120 bp, Artificial Sequence
  ENSG00000091732_9 (sequence is synthesized)
tctcgaactcggagctgggactcttccagtcctgttgaccgtcctgagccagaggctgctagccccaccaccagaactcgcccagtgacccgaagcatgggaacaggagacacccctggc

SEQ ID NO: 100105 - DNA, 120 bp, Artificial Sequence
  ENSG00000091732_10 (sequence is synthesized)
ctggaggtaccatctagccctctgcggaaagccaagcgagctcgcctctgctcctccagcagttcggacacatcttcccgaagcttctttgatcccacctctcagcatagagactggtgc

SEQ ID NO: 100106 - DNA, 120 bp, Artificial Sequence
  ENSG00000091732_11 (sequence is synthesized)
ccttgggtgaatatcacacttggcaaagaaagcagggagaatggtggaactgaaccagatgccagcgccccagcagagccaggctggaaagcagtgctgaccatcctcttggcgcacaaa

SEQ ID NO: 100107 - DNA, 120 bp, Artificial Sequence
  ENSG00000091732_12 (sequence is synthesized)
cagtctagccagccagctgaaacggactccatgagtctctctgagaaatcaaggaaagtattccgaatatttcggcagtgggaatctctgtgctcatgctgaagatactccagcgccttc

SEQ ID NO: 100108 - DNA, 120 bp, Artificial Sequence
  ENSG00000091732_13 (sequence is synthesized)
ctggagatagctggaatgagagtgactttttgaaaaattaaggctgagttcctttcggtcagctgacactaagtttttcctgttctgggttaatcataaggagccccctgccatagcaaa

SEQ ID NO: 100109 - DNA, 120 bp, Artificial Sequence
  ENSG00000091732_14 (sequence is synthesized)
ggcagtgagtgtcaactatctgcatctggctgagagagacccgtttcctttcagggatgtggacagggtaagggcagcaagcatggttctgttaaaggagtgtgggattaacagactaga

SEQ ID NO: 100110 - DNA, 120 bp, Artificial Sequence
  ENSG00000091732_15 (sequence is synthesized)
aggaagactaaggacctgaccacccatttcagcatcttcaatgtggagcagtgttctgaggactcttctatcctaggactatgacagtgtgtattaataaaatatttgctaagattctca

SEQ ID NO: 100111 - DNA, 120 bp, Artificial Sequence
  ENSG00000091732_16 (sequence is synthesized)
acctggaactcaatgtgtataaaactgaactcttcatcttatacctaaaactttctccatcttggcaaatggcactgacgtcccatccagttgtcctagccagaaacctgaaagtcactt

SEQ ID NO: 100112 - DNA, 120 bp, Artificial Sequence
  ENSG00000091732_17 (sequence is synthesized)
ttctacctcctacatggatcttagatataacctttcaattatatgatcccttggtttggttctttaacattcaaaggacatttgtgtggataaaagaacactcagttatttcactttatg

SEQ ID NO: 100113 - DNA, 120 bp, Artificial Sequence
  ENSG00000091732_18 (sequence is synthesized)
gccatgctgccatcctttcttgcatgaatctctcgtcaccccatttaggtcctagcactccacacttggctgcccgcaagtgaatgcctgttacataccactttggttctgacaccctgg

SEQ ID NO: 100114 - DNA, 120 bp, Artificial Sequence
  ENSG00000091732_19 (sequence is synthesized)
gctgagctgcctcttcgcagcctcctggctctgacatcttccttgttcaccgcctaatggctttaagactgaattgctcaggaaagggaagataagcaacgatgtgctgagctgaagaaa

SEQ ID NO: 100115 - DNA, 120 bp, Artificial Sequence
  ENSG00000091831_0 (sequence is synthesized)
gagttgtgcctggagtgatgtttaagccaatgtcagggcaaggcaacagtccctggccgtcctccagcacctttgtaatgcatatgagctcgggagaccagtacttaaagttggaggccc

SEQ ID NO: 100116 - DNA, 120 bp, Artificial Sequence
  ENSG00000091831_1 (sequence is synthesized)
gggagcccaggagctggcggagggcgttcgtcctgggactgcacttgctcccgtcgggtcgcccggcttcaccggacccgcaggctcccggggcagggccggggccagagctcgcgtgtc

SEQ ID NO: 100117 - DNA, 120 bp, Artificial Sequence
  ENSG00000091831_2 (sequence is synthesized)
ggcgggacatgcgctgcgtcgcctctaacctcgggctgtgctctttttccaggtggcccgccggtttctgagccttctgccctgcggggacacggtctgcaccctgcccgcggccacgga

SEQ ID NO: 100118 - DNA, 120 bp, Artificial Sequence
  ENSG00000091831_3 (sequence is synthesized)
ccatgaccatgaccctccacaccaaagcatctgggatggccctactgcatcagatccaagggaacgagctggagcccctgaaccgtccgcagctcaagatccccctggagcggcccctgg

SEQ ID NO: 100119 - DNA, 120 bp, Artificial Sequence
  ENSG00000091831_4 (sequence is synthesized)
gcgaggtgtacctggacagcagcaagcccgccgtgtacaactaccccgagggcgccgcctacgagttcaacgccgcggccgccgccaacgcgcaggtctacggtcagaccggcctcccct

SEQ ID NO: 100120 - DNA, 120 bp, Artificial Sequence
  ENSG00000091831_5 (sequence is synthesized)
acggccccgggtctgaggctgcggcgttcggctccaacggcctggggggtttccccccactcaacagcgtgtctccgagcccgctgatgctactgcacccgccgccgcagctgtcgcctt

SEQ ID NO: 100121 - DNA, 120 bp, Artificial Sequence
  ENSG00000091831_6 (sequence is synthesized)
tcctgcagccccacggccagcaggtgccctactacctggagaacgagcccagcggctacacggtgcgcgaggccggcccgccggcattctacaggccaaattcagataatcgacgccagg

SEQ ID NO: 100122 - DNA, 120 bp, Artificial Sequence
  ENSG00000091831_7 (sequence is synthesized)
gtggcagagaaagattggccagtaccaatgacaagggaagtatggctatggaatctgccaaggagactcgctactgtgcagtgtgcaatgactatgcttcaggctaccattatggagtct

SEQ ID NO: 100123 - DNA, 120 bp, Artificial Sequence
  ENSG00000091831_8 (sequence is synthesized)
ggtcctgtgagggctgcaaggccttcttcaagagaagtattcaaggacataacgactatatgtgtccagccaccaaccagtgcaccattgataaaaacaggaggaagagctgccaggcct

SEQ ID NO: 100124 - DNA, 120 bp, Artificial Sequence
  ENSG00000091831_9 (sequence is synthesized)
gccggctccgtaaatgctacgaagtgggaatgatgaaaggtgggatacgaaaagaccgaagaggagggagaatgttgaaacacaagcgccagagagatgatggggagggcaggggtgaag

SEQ ID NO: 100125 - DNA, 120 bp, Artificial Sequence
  ENSG00000091831_10 (sequence is synthesized)
tggggtctgctggagacatgagagctgccaacctttggccaagcccgctcatgatcaaacgctctaagaagaacagcctggccttgtccctgacggccgaccagatggtcagtgccttgt

SEQ ID NO: 100126 - DNA, 120 bp, Artificial Sequence
  ENSG00000091831_11 (sequence is synthesized)
tggatgctgagcccccgatactctattccgagtatgatcctaccagacccttcagtgaagcttcgatgatgggcttactgaccaacctggcagacagggagctggttcacatgatcaact

SEQ ID NO: 100127 - DNA, 120 bp, Artificial Sequence
  ENSG00000091831_12 (sequence is synthesized)
gggcgaagagggtgccaggctttgtggatttgaccctccatgatcaggtccaccttctagaatgtgcctggctagagatcctgatgattggtctcgtctggcgctccatggagcacccag

SEQ ID NO: 100128 - DNA, 120 bp, Artificial Sequence
  ENSG00000091831_13 (sequence is synthesized)
ggaagctactgtttgctcctaacttgctcttggacaggaaccagggaaaatgtgtagagggcatggtggagatcttcgacatgctgctggctacatcatctcggttccgcatgatgaatc

SEQ ID NO: 100129 - DNA, 120 bp, Artificial Sequence
  ENSG00000091831_14 (sequence is synthesized)
tgcagggagaggagtttgtgtgcctcaaatctattattttgcttaattctggagtgtacacatttctgtccagcaccctgaagtctctggaagagaaggaccatatccaccgagtcctgg

SEQ ID NO: 100130 - DNA, 120 bp, Artificial Sequence
  ENSG00000091831_15 (sequence is synthesized)
acaagatcacagacactttgatccacctgatggccaaggcaggcctgaccctgcagcagcagcaccagcggctggcccagctcctcctcatcctctcccacatcaggcacatgagtaaca

SEQ ID NO: 100131 - DNA, 120 bp, Artificial Sequence
  ENSG00000091831_16 (sequence is synthesized)
aaggcatggagcatctgtacagcatgaagtgcaagaacgtggtgcccctctatgacctgctgctggagatgctggacgcccaccgcctacatgcgcccactagccgtggaggggcatccg

SEQ ID NO: 100132 - DNA, 120 bp, Artificial Sequence
  ENSG00000091831_17 (sequence is synthesized)
tggaggagacggaccaaagccacttggccactgcgggctctacttcatcgcattccttgcaaaagtattacatcacgggggaggcagagggtttccctgccacggtctgagagctccctg

SEQ ID NO: 100133 - DNA, 120 bp, Artificial Sequence
  ENSG00000091831_18 (sequence is synthesized)
gctcccacacggttcagataatccctgctgcattttaccctcatcatgcaccactttagccaaattctgtctcctgcatacactccggcatgcatccaacaccaatggctttctagatga

SEQ ID NO: 100134 - DNA, 120 bp, Artificial Sequence
  ENSG00000091831_19 (sequence is synthesized)
gtggccattcatttgcttgctcagttcttagtggcacatcttctgtcttctgttgggaacagccaaagggattccaaggctaaatctttgtaacagctctctttcccccttgctatgtta

SEQ ID NO: 100135 - DNA, 120 bp, Artificial Sequence
  ENSG00000091831_20 (sequence is synthesized)
ctaagcgtgaggattcccgtagctcttcacagctgaactcagtctatgggttggggctcagataactctgtgcatttaagctacttgtagagacccaggcctggagagtagacattttgc

SEQ ID NO: 100136 - DNA, 120 bp, Artificial Sequence
  ENSG00000091831_21 (sequence is synthesized)
ctctgataagcactttttaaatggctctaagaataagccacagcaaagaatttaaagtggctcctttaattggtgacttggagaaagctaggtcaagggtttattatagcaccctcttgt

SEQ ID NO: 100137 - DNA, 120 bp, Artificial Sequence
  ENSG00000091831_22 (sequence is synthesized)
attcctatggcaatgcatccttttatgaaagtggtacaccttaaagcttttatatgactgtagcagagtatctggtgattgtcaattcattccccctataggaatacaaggggcacacag

SEQ ID NO: 100138 - DNA, 120 bp, Artificial Sequence
  ENSG00000091831_23 (sequence is synthesized)
ggaaggcagatcccctagttggcaagactattttaacttgatacactgcagattcagatgtgctgaaagctctgcctctggctttccggtcatgggttccagttaattcatgcctcccat

SEQ ID NO: 100139 - DNA, 120 bp, Artificial Sequence
  ENSG00000091831_24 (sequence is synthesized)
ggacctatggagagcagcaagttgatcttagttaagtctccctatatgagggataagttcctgatttttgtttttatttttgtgttacaaaagaaagccctccctccctgaacttgcagt

SEQ ID NO: 100140 - DNA, 120 bp, Artificial Sequence
  ENSG00000091831_25 (sequence is synthesized)
aaggtcagcttcaggacctgttccagtgggcactgtacttggatcttcccggcgtgtgtgtgccttacacaggggtgaactgttcactgtggtgatgcatgatgagggtaaatggtagtt

SEQ ID NO: 100141 - DNA, 120 bp, Artificial Sequence
  ENSG00000091831_26 (sequence is synthesized)
agtagggcagaaactggatacagttctgaggcacagccagacttgctcagggtggccctgccacaggctgcagctacctaggaacattccttgcagaccccgcattgccctttgggggtg

SEQ ID NO: 100142 - DNA, 120 bp, Artificial Sequence
  ENSG00000091831_27 (sequence is synthesized)
ccctgggatccctggggtagtccagctcttcttcatttcccagcgtggccctggttggaagaagcagctgtcacagctgctgtagacagctgtgttcctacaattggcccagcaccctgg

SEQ ID NO: 100143 - DNA, 120 bp, Artificial Sequence
  ENSG00000091831_28 (sequence is synthesized)
ggcacgggagaagggtggggaccgttgctgtcactactcaggctgactggggcctggtcagattacgtatgcccttggtggtttagagataatccaaaatcagggtttggtttggggaag

SEQ ID NO: 100144 - DNA, 120 bp, Artificial Sequence
  ENSG00000091831_29 (sequence is synthesized)
aaaatcctcccccttcctcccccgccccgttccctaccgcctccactcctgccagctcatttccttcaatttcctttgacctataggctaaaaaagaaaggctcattccagccacagggc

SEQ ID NO: 100145 - DNA, 120 bp, Artificial Sequence
  ENSG00000091831_30 (sequence is synthesized)
agccttccctgggcctttgcttctctagcacaattatgggttacttcctttttcttaacaaaaaagaatgtttgatttcctctgggtgaccttattgtctgtaattgaaaccctattgag

SEQ ID NO: 100146 - DNA, 120 bp, Artificial Sequence
  ENSG00000091831_31 (sequence is synthesized)
aggtgatgtctgtgttagccaatgacccaggtgagctgctcgggcttctcttggtatgtcttgtttggaaaagtggatttcattcatttctgattgtccagttaagtgatcaccaaagga

SEQ ID NO: 100147 - DNA, 120 bp, Artificial Sequence
  ENSG00000091831_32 (sequence is synthesized)
ctgagaatctgggagggcaaaaaaaaaaaaaaagtttttatgtgcacttaaatttggggacaattttatgtatctgtgttaaggatatgtttaagaacataattcttttgttgctgtttg

SEQ ID NO: 100148 - DNA, 120 bp, Artificial Sequence
  ENSG00000091831_33 (sequence is synthesized)
tttaagaagcaccttagtttgtttaagaagcaccttatatagtataatatatatttttttgaaattacattgcttgtttatcagacaattgaatgtagtaattctgttctggatttaatt

SEQ ID NO: 100149 - DNA, 120 bp, Artificial Sequence
  ENSG00000091831_34 (sequence is synthesized)
tgactgggttaacatgcaaaaaccaaggaaaaatatttagtttttttttttttttttgtatacttttcaagctaccttgtcatgtatacagtcatttatgcctaaagcctggtgattatt

SEQ ID NO: 100150 - DNA, 120 bp, Artificial Sequence
  ENSG00000091831_35 (sequence is synthesized)
catttaaatgaagatcacatttcatatcaacttttgtatccacagtagacaaaatagcactaatccagatgcctattgttggatactgaatgacagacaatcttatgtagcaaagattat

SEQ ID NO: 100151 - DNA, 120 bp, Artificial Sequence
  ENSG00000091831_36 (sequence is synthesized)
gcctgaaaaggaaaattattcagggcagctaattttgcttttaccaaaatatcagtagtaatatttttggacagtagctaatgggtcagtgggttctttttaatgtttatacttagattt

SEQ ID NO: 100152 - DNA, 120 bp, Artificial Sequence
  ENSG00000091831_37 (sequence is synthesized)
tcttttaaaaaaattaaaataaaacaaaaaaaaatttctaggactagacgatgtaataccagctaaagccaaacaattatacagtggaaggttttacattattcatccaatgtgtttcta

SEQ ID NO: 100153 - DNA, 120 bp, Artificial Sequence
  ENSG00000091831_38 (sequence is synthesized)
ttcatgttaagatactactacatttgaagtgggcagagaacatcagatgattgaaatgttcgcccaggggtctccagcaactttggaaatctctttgtatttttacttgaagtgccacta

SEQ ID NO: 100154 - DNA, 120 bp, Artificial Sequence
  ENSG00000091831_39 (sequence is synthesized)
atggacagcagatattttctggctgatgttggtattgggtgtaggaacatgatttaaaaaaaaactcttgcctctgctttcccccactctgaggcaagttaaaatgtaaaagatgtgatt

SEQ ID NO: 100155 - DNA, 120 bp, Artificial Sequence
  ENSG00000091831_40 (sequence is synthesized)
tatctggggggctcaggtatggtggggaagtggattcaggaatctggggaatggcaaatatattaagaagagtattgaaagtatttggaggaaaatggttaattctgggtgtgcaccagg

SEQ ID NO: 100156 - DNA, 120 bp, Artificial Sequence
  ENSG00000091831_41 (sequence is synthesized)
gttcagtagagtccacttctgccctggagaccacaaatcaactagctccatttacagccatttctaaaatggcagcttcagttctagagaagaaagaacaacatcagcagtaaagtccat

SEQ ID NO: 100157 - DNA, 120 bp, Artificial Sequence
  ENSG00000091831_42 (sequence is synthesized)
ggaatagctagtggtctgtgtttcttttcgccattgcctagcttgccgtaatgattctataatgccatcatgcagcaattatgagaggctaggtcatccaaagagaagaccctatcaatg

SEQ ID NO: 100158 - DNA, 120 bp, Artificial Sequence
  ENSG00000091831_43 (sequence is synthesized)
taggttgcaaaatctaacccctaaggaagtgcagtctttgatttgatttccctagtaaccttgcagatatgtttaaccaagccatagcccatgccttttgagggctgaacaaataaggga

SEQ ID NO: 100159 - DNA, 120 bp, Artificial Sequence
  ENSG00000091831_44 (sequence is synthesized)
cttactgataatttacttttgatcacattaaggtgttctcaccttgaaatcttatacactgaaatggccattgatttaggccactggcttagagtactccttcccctgcatgacactgat

SEQ ID NO: 100160 - DNA, 120 bp, Artificial Sequence
  ENSG00000091831_45 (sequence is synthesized)
tacaaatactttcctattcatactttccaattatgagatggactgtgggtactgggagtgatcactaacaccatagtaatgtctaatattcacaggcagatctgcttggggaagctagtt

SEQ ID NO: 100161 - DNA, 120 bp, Artificial Sequence
  ENSG00000091831_46 (sequence is synthesized)
atgtgaaaggcaaatagagtcatacagtagctcaaaaggcaaccataattctctttggtgcaggtcttgggagcgtgatctagattacactgcaccattcccaagttaatcccctgaaaa

SEQ ID NO: 100162 - DNA, 120 bp, Artificial Sequence
  ENSG00000091831_47 (sequence is synthesized)
cttactctcaactggagcaaatgaactttggtcccaaatatccatcttttcagtagcgttaattatgctctgtttccaactgcatttcctttccaattgaattaaagtgtggcctcgttt

SEQ ID NO: 100163 - DNA, 120 bp, Artificial Sequence
  ENSG00000091831_48 (sequence is synthesized)
ttagtcatttaaaattgttttctaagtaattgctgcctctattatggcacttcaattttgcactgtcttttgagattcaagaaaaatttctattcttttttttgcatccaattgtgcctg

SEQ ID NO: 100164 - DNA, 120 bp, Artificial Sequence
  ENSG00000091831_49 (sequence is synthesized)
aacttttaaaatatgtaaatgctgccatgttccaaacccatcgtcagtgtgtgtgtttagagctgtgcaccctagaaacaacatattgtcccatgagcaggtgcctgagacacagacccc

SEQ ID NO: 100165 - DNA, 120 bp, Artificial Sequence
  ENSG00000091831_50 (sequence is synthesized)
tttgcattcacagagaggtcattggttatagagacttgaattaataagtgacattatgccagtttctgttctctcacaggtgataaacaatgctttttgtgcactacatactcttcagtg

SEQ ID NO: 100166 - DNA, 120 bp, Artificial Sequence
  ENSG00000091831_51 (sequence is synthesized)
tagagctcttgttttatgggaaaaggctcaaatgccaaattgtgtttgatggattaatatgcccttttgccgatgcatactattactgatgtgactcggttttgtcgcagctttgctttg

SEQ ID NO: 100167 - DNA, 120 bp, Artificial Sequence
  ENSG00000091831_52 (sequence is synthesized)
tttaatgaaacacacttgtaaacctcttttgcactttgaaaaagaatccagcgggatgctcgagcacctgtaaacaattttctcaacctatttgatgttcaaataaagaattaaactaaa

SEQ ID NO: 100168 - DNA, 120 bp, Artificial Sequence
  ENSG00000091831_53 (sequence is synthesized)
ctagagcatgggtggccattgttgacctacaggaggcaccactgtcaccaacaaagggtaacagtctttcttttcaatatttatttatatccagtatttattttcaatactgactatgga

SEQ ID NO: 100169 - DNA, 120 bp, Artificial Sequence
  ENSG00000091831_54 (sequence is synthesized)
gagagctctcctgtgctcaaacactgcaatactgggggtctttcaaagcacaaaaacatatatttgcatgatggcatcattaacatttttatggctttctatttcttttttgtactggtc

SEQ ID NO: 100170 - DNA, 120 bp, Artificial Sequence
  ENSG00000091831_55 (sequence is synthesized)
tcaagagccactcataaatctctcagtaactgcatagtgtcccagggccagagaccggccactcctggcattgtgattagagtcatttaatatccaaggtggtgactaatgtctggcaac

SEQ ID NO: 100171 - DNA, 120 bp, Artificial Sequence
  ENSG00000091831_56 (sequence is synthesized)
aaagcctccattgggtgtcatgtgtcctgggaccctgagcgtgggcactctaggagcacctcagtattgcgtgttagtactatggccgagagaatagttgagaaagtggtcaagaggtgg

SEQ ID NO: 100172 - DNA, 120 bp, Artificial Sequence
  ENSG00000091831_57 (sequence is synthesized)
atccatgtgaacgccactgggaaatgagagacctcgttcccaatcacggtcagtgcaactcgaaagcctaaaatcagtttaaaacaaaggtatctacctttatcttatgttcatatccta

SEQ ID NO: 100173 - DNA, 120 bp, Artificial Sequence
  ENSG00000091831_58 (sequence is synthesized)
ggcttttaataatacgtatttttcacatgtttacagaaagcagtcaactgagctattcatggaaaggtttgtgggtttggttaacgaagtggaggagtattacatttcagctggaaacac

SEQ ID NO: 100174 - DNA, 120 bp, Artificial Sequence
  ENSG00000091831_59 (sequence is synthesized)
atccctagaatgccaaaacatttattccaaagtctggtttcctggtgcaatcggaggcatggcaatgcctctgttcagagactgggggctagggccagtaaggcatttgatccacatgta

SEQ ID NO: 100175 - DNA, 120 bp, Artificial Sequence
  ENSG00000091831_60 (sequence is synthesized)
tcccagaaggcttttattgttaaattatattctttcggaaaaaccacccatgtcctattttgtaaacttgatatccatacacttttgactggcattctattttagccgtaagactatgat

SEQ ID NO: 100176 - DNA, 120 bp, Artificial Sequence
  ENSG00000091831_61 (sequence is synthesized)
tcacagcaagcctgtttttcctcttgcttggggtggcagcagaaagcatagggtactttccagcctccaagggtaggggcaaaggggctggggtttctcctccccagtacagctttctct

SEQ ID NO: 100177 - DNA, 120 bp, Artificial Sequence
  ENSG00000091831_62 (sequence is synthesized)
ggctgtgccacactgctccctgtgagcagacagcaagtctcccctcactccccactgccattcatccagcgctgtgcagtagcccagctgcgtgtctgccgggaggggctgccaagtgcc

SEQ ID NO: 100178 - DNA, 120 bp, Artificial Sequence
  ENSG00000091831_63 (sequence is synthesized)
ctgcctactggctgcttcccgaatccctgccattccacgcacaaacacatccacacactctctctgcctagttcacacactgagccactcgcacatgcgagcacattccttccttccttc

SEQ ID NO: 100179 - DNA, 120 bp, Artificial Sequence
  ENSG00000091831_64 (sequence is synthesized)
tcactctctcggcccttgacttctacaagcccatggaacatttctggaaagacgttcttgatccagcagggtggcccgccggtttctgagccttctgccctgcggggacacggtctgcac

SEQ ID NO: 100180 - DNA, 120 bp, Artificial Sequence
  ENSG00000091831_65 (sequence is synthesized)
atggtcataacagcctcctgtctaccgactcagaacggattttaccaaaactgaaaatgcaggctccatgctcagaagctctttaacaggctcgaaaggtccatgctcctttctcctgcc

SEQ ID NO: 100181 - DNA, 120 bp, Artificial Sequence
  ENSG00000091831_66 (sequence is synthesized)
cattctatagcataagaagacagtctctgagtgataatcttctcttcaagaagaagaaaactaggaaggagtaagcacaaagatctcttcacattctccgggactgcggtaccaaatatc

SEQ ID NO: 100182 - DNA, 120 bp, Artificial Sequence
  ENSG00000091831_67 (sequence is synthesized)
gacaaacagagatatatcggagtctggcacggggcacataaggcagcacattagagaaagccggcccctggatccgtctttcgcgtttattttaagcccagtcttccctgggccaccttt

SEQ ID NO: 100183 - DNA, 120 bp, Artificial Sequence
  ENSG00000091831_68 (sequence is synthesized)
agcagatcctcgtgcgcccccgccccctggccgtgaaactcagcctctatccagcagcgacgacaagtaaagtggcccgccggtttctgagccttctgccctgcggggacacggtctgca

SEQ ID NO: 100184 - DNA, 120 bp, Artificial Sequence
  ENSG00000091831_69 (sequence is synthesized)
gacaacaaccttgtctcccagtcattgtaatctgtatcagagagcatcattagatgaatgaagatggaaatgttctcacggtcagcagggatacgaaaagaccgaagaggagggagaatg

SEQ ID NO: 100185 - DNA, 120 bp, Artificial Sequence
  ENSG00000091831_70 (sequence is synthesized)
tccttgcaaaagacataactggtgctgggaaatatggattcttctctatgtcaaaggcccactggtgactgcttttaatgagtcattaaacaagaacccacccaaatgcccatcaatgat

SEQ ID NO: 100186 - DNA, 120 bp, Artificial Sequence
  ENSG00000091831_71 (sequence is synthesized)
gcttaaaaataatctcctgccagcccagtgacaagcctgtcccacccggggagaatgccccggagtggcgtgcgggtcagccagggtctgcgcctcgcagccactgtggaaggagcgcgg

SEQ ID NO: 100187 - DNA, 120 bp, Artificial Sequence
  ENSG00000091831_72 (sequence is synthesized)
tggtatctcacatgtagaagcaaagaagagaatcctgaacttgcatcctaaaatatttggaaacaagtggtttcctcgtgtctaaagcctctggtcataaggcctcacagtatcctgcag

SEQ ID NO: 100188 - DNA, 120 bp, Artificial Sequence
  ENSG00000091831_73 (sequence is synthesized)
atcatcaaatccgtgtgtggacgtggggacattttgttttgaggcagttacatgaccatgggcaagtaaattagtctctctggccttcagttttctcatttgcaatgattcaatggtttg

SEQ ID NO: 100189 - DNA, 120 bp, Artificial Sequence
  ENSG00000091831_74 (sequence is synthesized)
ccttaaagtgtcttaagaaggataggatagctacccacaaactttggatcaaattttcttcaaaacatccttcccctgactttaaaatatgccctggcaaccaacactcaacacctgtag

SEQ ID NO: 100190 - DNA, 120 bp, Artificial Sequence
  ENSG00000091831_75 (sequence is synthesized)
ctagatgagttataacagagtgactgaagagagctcccacaattcctagttattaaatacctgactaattttcattaggagacatttaagaactttagtgatgggaagatttacatatat

SEQ ID NO: 100191 - DNA, 120 bp, Artificial Sequence
  ENSG00000091831_76 (sequence is synthesized)
aattgatagtacaatctgacagagctgaatagctcctgtttgtcaactgttaaattctttgtgcaattaggtcaaagatcaagatcaaaacaagggctgcccattgacctgttcactcct

SEQ ID NO: 100192 - DNA, 120 bp, Artificial Sequence
  ENSG00000091831_77 (sequence is synthesized)
gagaaaaatggcaaaccattgaatcataaatcatgacagccaaaataattttaggatattaatgcacccctcatctttgcaaatgagaaaactgaaggccagagagactaatttacttgc

SEQ ID NO: 100193 - DNA, 120 bp, Artificial Sequence
  ENSG00000091831_78 (sequence is synthesized)
ccatttttgataaaaatgtcaccatttacagaatgtggactcctatgttggagtctgttgaaggacatggcacatttaacagcatcagagcattttttattaaaatttaatttgtgcatg

SEQ ID NO: 100194 - DNA, 120 bp, Artificial Sequence
  ENSG00000091831_79 (sequence is synthesized)
acttctaatgctgaagaacgccaagctaggaagaagtcatgggctgagatggggacagagagaacacacaatattcagtgactgtccgtgcagctggctgcccttgaaaatatccgaact

SEQ ID NO: 100195 - DNA, 120 bp, Artificial Sequence
  ENSG00000091831_80 (sequence is synthesized)
atccactgggaaaatgcctgtccccttggggtaattaccagagtttcaacatgcccaaagctgcctcatcttcagggggaacttgttctagcgattttagtatcaagaagctaatggtcc

SEQ ID NO: 100196 - DNA, 120 bp, Artificial Sequence
  ENSG00000091831_81 (sequence is synthesized)
cagggaaagggttatttttaatatttagctactgtgctaaaaatcacctaagtttctagagtcttgggaaatttcataagggaaagaacaaaggcaacttgttgactacccactggtcat

SEQ ID NO: 100197 - DNA, 120 bp, Artificial Sequence
  ENSG00000091831_82 (sequence is synthesized)
tctcctctggtcttattacatacatggatgccagtttagattgtgtttatataggaaaaattaaatgtgtgagcctccttaaggaacatcatcaatacagatatatcagatagttctgtc

SEQ ID NO: 100198 - DNA, 120 bp, Artificial Sequence
  ENSG00000091831_83 (sequence is synthesized)
cagcaaaaaacgtgcttatttgctacaagtaaatttttatttatttttctcacttccctcactccttcaaatttccaggtaaatagctgcccaggagttgcttcatctctgtcccaaaat

SEQ ID NO: 100199 - DNA, 120 bp, Artificial Sequence
  ENSG00000091831_84 (sequence is synthesized)
acctagacaattgcgggataaggagaatggcagggagggagtagtggctaaaatcacacccttcaaaagaaagtgtgtaggacacacaattgtgagaagtctgaatgccatgcacatagg

SEQ ID NO: 100200 - DNA, 120 bp, Artificial Sequence
  ENSG00000091831_85 (sequence is synthesized)
aatgaaaatgagttaatttcgtgcatgcatcatttaaagccaaatgagaagaaacttctaatttattttgttacttttcggctaacactggcagtatgtaacagatttattttgcagaaa

SEQ ID NO: 100201 - DNA, 120 bp, Artificial Sequence
  ENSG00000091831_86 (sequence is synthesized)
catctagattgtccgtgatcttgatcctgcccttatgtgtcttgtctttgaaacccagtgtttcctggatatatggttcaggagacaagtttccagaatcaagttaggacccaggtcttc

SEQ ID NO: 100202 - DNA, 120 bp, Artificial Sequence
  ENSG00000091831_87 (sequence is synthesized)
tttttttccaaaccaaacattcttgctaatcctaaactacctgaggcagcctgtggtggcctcagctctaaaaccattgtttaaaggcttctacccatcaatggcccttcagcagagtgg

SEQ ID NO: 100203 - DNA, 120 bp, Artificial Sequence
  ENSG00000091831_88 (sequence is synthesized)
tacggttaacggggtagggtctggagtcaggggagacctgggttcaaatcctacatctttacacctctaatccccagtgtccttgtctataaattgggaatatagccatgtcatgggatt

SEQ ID NO: 100204 - DNA, 120 bp, Artificial Sequence
  ENSG00000091831_89 (sequence is synthesized)
cttgtgagggttaaatgaggtaaaacacatacaatgcttagcatgtatacaattaagcactaaataattgaaacacattaagtactaaatgaatgtcagcagcttatcactattatctgt

SEQ ID NO: 100205 - DNA, 120 bp, Artificial Sequence
  ENSG00000091831_90 (sequence is synthesized)
ataatgataccaagggtgtgccgactcatacccttaggggttggctggattcggccttttctctcgggaaaacatacctgatttattaatagtgctttcaagcatgtgataaatttctca

SEQ ID NO: 100206 - DNA, 120 bp, Artificial Sequence
  ENSG00000091831_91 (sequence is synthesized)
aactgcctgtcttgttccctagaaacaccaggaaggcctacctcaaatagcaacagagaaacctatcggagccttaccctacagctttccttggggcacgggtgagcaatctgccttaga

SEQ ID NO: 100207 - DNA, 120 bp, Artificial Sequence
  ENSG00000091831_92 (sequence is synthesized)
ggggagaggctctgtgctgaggctctttgaatgctttgaataaatagatccccagataatgaaaagacttcaaaacaaattctacaagaaactgagtagtgtttatagtgaggccctagt

SEQ ID NO: 100208 - DNA, 120 bp, Artificial Sequence
  ENSG00000091831_93 (sequence is synthesized)
gtacatgcaaaaaacccccactgcccttgcttaaatgtatctgattaacttgaatacatttttaaatgagggcttttttccctctttcagtgtttcggccagtcatttgccacttctcat

SEQ ID NO: 100209 - DNA, 120 bp, Artificial Sequence
  ENSG00000091831_94 (sequence is synthesized)
tccatcttagttctctgtaaagaaggtgccagagacctaaggtgcccaaggcaattttgcattttacaattctaagctttagaatgaagtcatcaatttgctacatccggactacagtgc

SEQ ID NO: 100210 - DNA, 120 bp, Artificial Sequence
  ENSG00000091831_95 (sequence is synthesized)
aattattcctttgccttgctggaaattggagtgaaatctttctagctgtcaatttcaactcagttgcagtagtgttttgaagaattaatggcgataaggttagaaaattttaagtcaaac

SEQ ID NO: 100211 - DNA, 120 bp, Artificial Sequence
  ENSG00000091831_96 (sequence is synthesized)
gtagggaaaaagtaccagctagaccatcataagcatttgctttgaaagcatgcttctaaagtgtgtttaacctcaaataacagtcacaaatatggttattatgaatgtatgcacagattt

SEQ ID NO: 100212 - DNA, 120 bp, Artificial Sequence
  ENSG00000091831_97 (sequence is synthesized)
ttatgtttctaattttaagaagttctagggagctccctgtaacgatttagggaatctctagattctgatatactgcaagtcttttaatggtaggaatcacattgaattaattttgtaggc

SEQ ID NO: 100213 - DNA, 120 bp, Artificial Sequence
  ENSG00000091831_98 (sequence is synthesized)
ccagggcctaaatttagtaggtgttcagtacctattggcatcaattcatatgtaggtttaaaatactgtatgaagatacagaatcaccaccatcaaatcaaattgaaatatgtaacaggc

SEQ ID NO: 100214 - DNA, 120 bp, Artificial Sequence
  ENSG00000091831_99 (sequence is synthesized)
tagtataatattaacatctgactttaaacaacaacaaagaaaccaaatgagtaactcctcccttcaaactaatagtcagtttcttccaactcagtctctttctcctctcaggaagaatgc

SEQ ID NO: 100215 - DNA, 120 bp, Artificial Sequence
  ENSG00000091831_100 (sequence is synthesized)
gtatctaaaaatttcccattgcagactgctggaaacaacattctaaactatttatgcttctgcaataacctttccaatttgctggaccagtgcaagattaaacacgagatatctcaagtc

SEQ ID NO: 100216 - DNA, 120 bp, Artificial Sequence
  ENSG00000091831_101 (sequence is synthesized)
tcaatgtaaaggaacaccacgacagcctggactgtgggtgaagttcattcttccccagcagactctgcctttcattctcggggttgggtgtgccccaaacagaggtaccgacggtaacga

SEQ ID NO: 100217 - DNA, 120 bp, Artificial Sequence
  ENSG00000091831_102 (sequence is synthesized)
agcccaagaatgttcaaccacaacctgtctgtgaaggtgttggatgacgtttgccattcaggtgaagattatttatgttccagtcccacctgagtagcaaagtgaacactgtgctgaatg

SEQ ID NO: 100218 - DNA, 120 bp, Artificial Sequence
  ENSG00000091831_103 (sequence is synthesized)
ctcagaaagatgttaatgaaccgtgctggacagagcagagctgaaaggcgccttgcgagtgtcgtagtgagaatgtggctgtcccagctgcaaagccctgttaggaggcatgaggaagca

SEQ ID NO: 100219 - DNA, 120 bp, Artificial Sequence
  ENSG00000091831_104 (sequence is synthesized)
cttgctgccctaagaaacgatgccttcgacattttcaaaagatctatgtggctgtctgaaacaatgcggagagcagatagacgcaatatttgggaaccaaagagtgactgctgttggcgt

SEQ ID NO: 100220 - DNA, 120 bp, Artificial Sequence
  ENSG00000091831_105 (sequence is synthesized)
tgcatcataacataagcgctttcccccttctcgtcactatcatttgtatcaaccaaagaactgatctctggtatcctcgaaggaatgctgtggggatattcttcatctctgttcatggta

SEQ ID NO: 100221 - DNA, 120 bp, Artificial Sequence
  ENSG00000091831_106 (sequence is synthesized)
catcagcaatttgtggggaaaagatggactatataacacaatgatctgcctaaaagaaactgtctctacttatagggggctgagcaaaccttagagcatctgcggatgctcgtcattatc

SEQ ID NO: 100222 - DNA, 120 bp, Artificial Sequence
  ENSG00000091831_107 (sequence is synthesized)
ttcaaaagtccccaagagtttttctccatactttattattgctattttgtttaggctagaaaaaaaaaaactcataaaattgtcttcaaaccaaaccaaaggaaatgaaaagaaaaaaaa

SEQ ID NO: 100223 - DNA, 120 bp, Artificial Sequence
  ENSG00000091831_108 (sequence is synthesized)
atgcaaccgcacaccccattctatctgccctatctcggttacagtgtagtcctccccagggtcatcctatgtacacactacgtatttctagccaacgaggagggggaatcaaacagaaag

SEQ ID NO: 100224 - DNA, 120 bp, Artificial Sequence
  ENSG00000091831_109 (sequence is synthesized)
agtgtcccactggatgttcagagaatttatgtgaaggtcacgtcatttagcattgagatgctgtggttaccttcttccatttcttccataatatgcagccacatctatgtgtgaagaaat

SEQ ID NO: 100225 - DNA, 120 bp, Artificial Sequence
  ENSG00000091831_110 (sequence is synthesized)
gtaatagataaaatttctctggacgcataataatgtgagaaagattgtcacatgtcccagcaaattgttattaatataaatttgttacttggcaagctgagattttgcaagatgttactc

SEQ ID NO: 100226 - DNA, 120 bp, Artificial Sequence
  ENSG00000091831_111 (sequence is synthesized)
cataacgactatatgtgtccagccaccaaccagtgcaccattgataaaaacaggaggaagagctgccaggcctgccggctccgtaaatgctacgaagtgggaatgatgaaaggtggcttt

SEQ ID NO: 100227 - DNA, 120 bp, Artificial Sequence
  ENSG00000091831_112 (sequence is synthesized)
ccagcttgtcaccttcaaggttaccttgtgaataggacttttttgagctatttctatccagttgactatggattttgcctgttgctttgtttccaccaactctccctgaagatgaggcgc

SEQ ID NO: 100228 - DNA, 120 bp, Artificial Sequence
  ENSG00000091831_113 (sequence is synthesized)
acagacagacaactcacaggcaagaacagcctggtccatcttgaaagattctcaagactattctccacaagataattgtctacttttaaaaatattcagtaaagggaatttttgctgtta

SEQ ID NO: 100229 - DNA, 120 bp, Artificial Sequence
  ENSG00000091831_114 (sequence is synthesized)
cagagagatgatggggagggcaggggtgaacctgatggccaaggcaggcctgaccctgcagcagcagcaccagcggctggcccagctcctcctcatcctctcccacatcaggcacatgag

SEQ ID NO: 100230 - DNA, 120 bp, Artificial Sequence
  ENSG00000091844_0 (sequence is synthesized)
ctccccctcctctgcatcctcgccgctctccctctctcctcgcccgctgggtgctgaagttgggcggatggcagcaaaccggctccgctagaggaccgagccgcccagccccgctccccc

SEQ ID NO: 100231 - DNA, 120 bp, Artificial Sequence
  ENSG00000091844_1 (sequence is synthesized)
ggacccatcggcgcgctgcccacacctccaggcgaccggccaactgggtcctgaagtagctgaaatgcgaaaaaggcagcagtcccaaaatgaaggaacacctgccgtgtctcaagctcc

SEQ ID NO: 100232 - DNA, 120 bp, Artificial Sequence
  ENSG00000091844_2 (sequence is synthesized)
tggaaaccagaggcccaacaacacctgttgcttttgttggtgctgttgttgcagctgctcctgcctcactgtgaggaatgaagaaagaggggaaaatgcgggaagacccacacacactac

SEQ ID NO: 100233 - DNA, 120 bp, Artificial Sequence
  ENSG00000091844_3 (sequence is synthesized)
aaaaatggagagtatccaggtcctagaggaatgccaaaaccccactgcagaggaagtcttgtcctggtctcaaaattttgacaagatgatgaaggccccagcaggaagaaaccttttcag

SEQ ID NO: 100234 - DNA, 120 bp, Artificial Sequence
  ENSG00000091844_4 (sequence is synthesized)
agagttcctccgaacagaatacagtgaagagaacctacttttctggcttgcttgtgaagacttaaagaaggagcagaacaaaaaagtaattgaagaaaaggctaggatgatatatgaaga

SEQ ID NO: 100235 - DNA, 120 bp, Artificial Sequence
  ENSG00000091844_5 (sequence is synthesized)
ttacatttctatactatcaccaaaagaggtcagtcttgattctcgagttagagaggtgatcaatagaaatctgttggatcccaatcctcacatgtatgaagatgcccaacttcagatata

SEQ ID NO: 100236 - DNA, 120 bp, Artificial Sequence
  ENSG00000091844_6 (sequence is synthesized)
tactttaatgcacagagattcttttccaaggtttttgaactctcaaatttataagtcatttgttgaaagtactgctggctcttcttctgaatcttaatgttcatttaaaaacaatcattt

SEQ ID NO: 100237 - DNA, 120 bp, Artificial Sequence
  ENSG00000091844_7 (sequence is synthesized)
tggagggctgagatgggaaataaaagtagttaaataacatcagaaactgagttcctggagaactacagtttagcattcctcaggctactgtgaaaacacaaccgttatggtctttgtctc

SEQ ID NO: 100238 - DNA, 120 bp, Artificial Sequence
  ENSG00000091844_8 (sequence is synthesized)
catttttatcaaggttttccatggttaagtttggagaaaataccacacaaaacaatgaattgccaaattgtttgttttattcaagactcattctacttgcaagcaaagtgtatttgtagt

SEQ ID NO: 100239 - DNA, 120 bp, Artificial Sequence
  ENSG00000091844_9 (sequence is synthesized)
cctatgaacagtctcctcgtgtatctccagagactgcatgtgcaaagtaaaatgcttcatttgccacatagttgttgtaatatttaatccagtagcataacttatatctgtatttaagga

SEQ ID NO: 100240 - DNA, 120 bp, Artificial Sequence
  ENSG00000091844_10 (sequence is synthesized)
cttttgtgcaatatggtcttaagaaataattgccaaaaaaatcggccatggtttgcattttttaacataatctaagacagaaaaaaagcaatttttactatgtaacaatggtattcaaca

SEQ ID NO: 100241 - DNA, 120 bp, Artificial Sequence
  ENSG00000091844_11 (sequence is synthesized)
ttctatatactgtgtttagtacactaattttgaagccaatatttctgtacatgaaaaagagctatttatctctgtttgttggaaaatcctaatggggattcctctggttgttcactgcca

SEQ ID NO: 100242 - DNA, 90 bp, Artificial Sequence
  ENSG00000091844_12 (sequence is synthesized)
aaagcggaaaaaagcacaaaacaatttgaagatatcctatctcaatgacaaatcaaaagagtgatattgcttttaactgtaatagaagaa

SEQ ID NO: 100243 - DNA, 120 bp, Artificial Sequence
  ENSG00000091844_13 (sequence is synthesized)
aatcaaaagagtgatattgcttttaactgtaatagaagaaaatgaatttatgtatatatcagatgtccaatactgtaattaatttattaaagactggctctccagttttaaaatggttgt

SEQ ID NO: 100244 - DNA, 120 bp, Artificial Sequence
  ENSG00000091844_14 (sequence is synthesized)
gtaaagttatgtacttcagcaagaaaaaaataataataagcttgataacttagttttggaatataaagaaaaggacttaataaaggaatgcctacatgtagcactgtaaaacattttgat

SEQ ID NO: 100245 - DNA, 120 bp, Artificial Sequence
  ENSG00000091844_15 (sequence is synthesized)
gaatagcatctgtcctgtggcatattttccttgaaagtgaaatccaatgaaaagctaagtttttaccaggaaaagttttataagggttatgaagaaaataatcctctacttcagacctta

SEQ ID NO: 100246 - DNA, 120 bp, Artificial Sequence
  ENSG00000091844_16 (sequence is synthesized)
actgttttcacataatatcttaaggatgacattttaaagatgtttaaaccaaactattagttttcatccatcattaaaaggcagtacagtgctcaaatcttccagctgccatattatttt

SEQ ID NO: 100247 - DNA, 120 bp, Artificial Sequence
  ENSG00000091844_17 (sequence is synthesized)
ttataagtacactaaatctttacgacaaaacacttgcctgacattgtcatgtacttctgaccttcaaggaaacaatattctgtcatgcataaaagtgataattaaaataatcagtgtcat

SEQ ID NO: 100248 - DNA, 120 bp, Artificial Sequence
  ENSG00000091844_18 (sequence is synthesized)
caaagtgttacatttgaatattaatatcccctgaagactatttttttaatattaaactgaatgaatataatactgagtaacctaaaatgaaagttttaaaaagatttatatccactgaga

SEQ ID NO: 100249 - DNA, 120 bp, Artificial Sequence
  ENSG00000091844_19 (sequence is synthesized)
cactgagaacactggccttatattaaggatgatattacagttacaggttttctttgtcatttttttaactacctctcattttttaatttattaaacatattttttaaaaaaacaagtttg

SEQ ID NO: 100250 - DNA, 120 bp, Artificial Sequence
  ENSG00000091844_20 (sequence is synthesized)
ggggtttctttttaaatttattttacttgaaaggttggcatcacaagtttctttttccataaacttaaaacatttcaaaaatggtttttttaagcaagtatgattttctaatttatatag

SEQ ID NO: 100251 - DNA, 120 bp, Artificial Sequence
  ENSG00000091844_21 (sequence is synthesized)
aattcaggagacatgaataaaagggctattatctattccctatgcaaatattttaactgttgcagtgtttgacaaaatgggattttttaaaaattgcagagtagaaaacaaaatattctg

SEQ ID NO: 100252 - DNA, 120 bp, Artificial Sequence
  ENSG00000091844_22 (sequence is synthesized)
tttacactggcgttgctgactatcctaccatattcagcacttttaaatacgttatttatgaaaatgcagttaaaatgcaagatagaaaatatttataataatcatttcttttaacaaatg

SEQ ID NO: 100253 - DNA, 120 bp, Artificial Sequence
  ENSG00000091844_23 (sequence is synthesized)
cctgtgttttctgaaagtgttagtgtgttaagacatattttattcatgtcatttaaatactatttgaataagttttcagtaatatgttgaaaaaaagatagctatgaagatgtttacaaa

SEQ ID NO: 100254 - DNA, 120 bp, Artificial Sequence
  ENSG00000091844_24 (sequence is synthesized)
aagtcatattttttcctaaagagtaaagaaaaacctaaaagaatcatcacttctattgtgaagttctattgttcctaaattatttaatttttttcttgcttagaattgagtttattatgc

SEQ ID NO: 100255 - DNA, 120 bp, Artificial Sequence
  ENSG00000091844_25 (sequence is synthesized)
tactatgatatatacacatgtatggtgtagtatcatatttgtttctgtgtgtgaggctcaacaaattggtgcacatgactagaaaatatgtaatatactgtgatacactgcatgcatcca

SEQ ID NO: 100256 - DNA, 120 bp, Artificial Sequence
  ENSG00000091844_26 (sequence is synthesized)
tctttttaaatgtagactttatattctcgttgttactatatatgatggtgacctgctagtcataagttatctttataagatactttggactattagatgaattgtctgtttgacaatatc

SEQ ID NO: 100257 - DNA, 120 bp, Artificial Sequence
  ENSG00000091844_27 (sequence is synthesized)
tttaatattttaccaaatgtaaaagataagggccgttataaagagtcctaatctctaacctgggcatttgtagaacacagattttaaagttggtatatccttttgaaacctgatgaggaa

SEQ ID NO: 100258 - DNA, 120 bp, Artificial Sequence
  ENSG00000091844_28 (sequence is synthesized)
gttgagttaaaaaagattcgagagcagatttacacatcagatgttgataaccatgctatgtgagcatttctgtgctaaactcgtatttttgggtgaggggagggtttctcatttaagagt

SEQ ID NO: 100259 - DNA, 120 bp, Artificial Sequence
  ENSG00000091844_29 (sequence is synthesized)
atgtctgtatatttgcaactctactaattttctaagtatgatataattccttctgtttaagttacagagctattataaataaacaaaagagccttcaactggtgtctatgctaccattcc

SEQ ID NO: 100260 - DNA, 120 bp, Artificial Sequence
  ENSG00000091844_30 (sequence is synthesized)
aagagcacaatatttgttttcttagaatttgagttttcctagtgagtaaattcctccctggggaaaaattagcactttaaaatggacactttgtgttttcaattgccaaggtatctttgt

SEQ ID NO: 100261 - DNA, 120 bp, Artificial Sequence
  ENSG00000091844_31 (sequence is synthesized)
atactattagaatttgctgatgcacacagaaagagattaatgcactttctatagtgcctaactttagatgtatctataaaagaaagtagaggatacagattatgtatatataaataaatt

SEQ ID NO: 100262 - DNA, 120 bp, Artificial Sequence
  ENSG00000091844_32 (sequence is synthesized)
ggagagccagatttcttcagagattgatcttgtacattaatcacaccagtaatggatggatggcacttctttactcgggctgttatgatgttatccaaaggtagtagagatgctctgaca

SEQ ID NO: 100263 - DNA, 120 bp, Artificial Sequence
  ENSG00000091844_33 (sequence is synthesized)
gcacatgaacaacaagagcaaaacacaactttgatactaaagttacgaaatgcagaagtcaagaccataatgtgatgttttttttttttgaaatcttaaaatatgtacatagaatgacca

SEQ ID NO: 100264 - DNA, 120 bp, Artificial Sequence
  ENSG00000091844_34 (sequence is synthesized)
gttctgatatgccgtcttagtgcatggatgtttattagtatcctttaatgctgcctaggttctgacttacagaatgaaatacgtgttgtttatctacctgatagttcagttttgccaaag

SEQ ID NO: 100265 - DNA, 120 bp, Artificial Sequence
  ENSG00000091844_35 (sequence is synthesized)
gactatagggataagtgaataatatttatttattaggagcaaaaatacattttcatcccattaagctaatttaaaataatgcctgatttttacttttgagtttatccatttttctatacc

SEQ ID NO: 100266 - DNA, 120 bp, Artificial Sequence
  ENSG00000091844_36 (sequence is synthesized)
tacctttaacttatttatactttaaaaaatcatattgtaattgtgacaaattatatctcaaaaaataccaattattagatgctttggtgttgaaatgtaaaagagaaggaatttaaaata

SEQ ID NO: 100267 - DNA, 86 bp, Artificial Sequence
  ENSG00000091844_37 (sequence is synthesized)
tggtgttgaaatgtaaaagagaaggaatttaaaatacaatcaaaaaagtcaaaaataaaacgtatttgaaaaccacctaaaatttc

SEQ ID NO: 100268 - DNA, 120 bp, Artificial Sequence
  ENSG00000091844_38 (sequence is synthesized)
gaacccaggaggcagaggtcgcagtgagctgatatcatgccactgcactccagccttggcaacagagtgactccatctcaaaataataataataattataataataatatttttaagtct

SEQ ID NO: 100269 - DNA, 120 bp, Artificial Sequence
  ENSG00000091844_39 (sequence is synthesized)
ttaagtcttagacagaaaatgcctatagatagaagcctatcaaacatgtattttgaatactttgatcttgacacattgcctaattattttgaaagatggtaaagatatttccaaaaaata

SEQ ID NO: 100270 - DNA, 120 bp, Artificial Sequence
  ENSG00000091844_40 (sequence is synthesized)
ttttcgcctatctgtttacattgacagtttacaaccataattttctaagtatatttttcaaacatgtatttttgtgttttccatcttcaaatttctgaccaatgggtttgttctcctgca

SEQ ID NO: 100271 - DNA, 120 bp, Artificial Sequence
  ENSG00000091844_41 (sequence is synthesized)
aaaacaatatccaatctgcaaaaatttttaattcttcacttgctacaactgcaaatatttatcaataaaactgataacccaaaacttgcttcagattttccctgcagtgcttaaaatatc

SEQ ID NO: 100272 - DNA, 120 bp, Artificial Sequence
  ENSG00000091844_42 (sequence is synthesized)
cttgcaacacaagatggtgcacaatgacaagtattatttctgaatacccagatttgatttatttataggtatttttgaaattattactcttacaggtgtagtcctctccagccccaagta

SEQ ID NO: 100273 - DNA, 120 bp, Artificial Sequence
  ENSG00000091844_43 (sequence is synthesized)
acatcttttcagatgaattcaagaggctgttcaagactttgactctactgaaaacactacaaaaggcaaaatgttgccctaggtgatagaaggtcccagtttgggaactgattttcttcc

SEQ ID NO: 100274 - DNA, 120 bp, Artificial Sequence
  ENSG00000091844_44 (sequence is synthesized)
tatgacaaaagctataagatgagtaaggttactaatggaaatgtatgtccacagattcacttagggagcatagtgtaaaaacatcaggaacttaaaattacaaatttgatttcaagttat

SEQ ID NO: 100275 - DNA, 120 bp, Artificial Sequence
  ENSG00000091844_45 (sequence is synthesized)
atttctgtctcatgtgactttgggcaaatcatttatcttctctgagttcatttcctcatctgcaaatgacaaataaaatacgtaattatcaggataactatgagcattaaataaaacaaa

SEQ ID NO: 100276 - DNA, 120 bp, Artificial Sequence
  ENSG00000091844_46 (sequence is synthesized)
cgtggaaagaataaagtgtggcatacattattattttatcaaagtgcatcacgtcaataattgttattgtatacttgtattaaatgtcactttaatgcactttcccctatttttttccaa

SEQ ID NO: 100277 - DNA, 120 bp, Artificial Sequence
  ENSG00000091844_47 (sequence is synthesized)
aacatacgttaaacatctgatttagctactcatcaaaacatacaatcatgttttaagatggaacactatatcagtgttactgcttttctcaataatgtgatcccaaatcagtactttcag

SEQ ID NO: 100278 - DNA, 120 bp, Artificial Sequence
  ENSG00000091844_48 (sequence is synthesized)
ttcaccatcacctcaaatctatagaaatgtttctttcaatgacatagatagatagatgattgatagatagatgatagatagatgataaatggatatacaattataggttaaaattaaagt

SEQ ID NO: 100279 - DNA, 120 bp, Artificial Sequence
  ENSG00000091844_49 (sequence is synthesized)
ttaaataagatcaatcatttgaaagttttatttccaaaggaaataaaacaacattcccaaggacagaaataatatcaaattacttgctaaatatataaatgagttatagggctaagacta

SEQ ID NO: 100280 - DNA, 120 bp, Artificial Sequence
  ENSG00000091844_50 (sequence is synthesized)
agttataagagattgacaattagaaaacactctttttaatattaaggtggtatgattttctttaacaattttacaatgaaaataaaaacttaataaaaggtggtaatgggccaggcacgg

SEQ ID NO: 100281 - DNA, 90 bp, Artificial Sequence
  ENSG00000091844_51 (sequence is synthesized)
cgtatgtctatgcaacaaagtgagaccctgactctaagaaaaaaataaaatgtataaaatttaaaatagtaatgtgtccattaaaccttt

SEQ ID NO: 100282 - DNA, 120 bp, Artificial Sequence
  ENSG00000091844_52 (sequence is synthesized)
tgtataaaatttaaaatagtaatgtgtccattaaaccttttattttagagtagttttagatttacagaaaaactccaaatagagaggtcccatatacatctatgggcattaatgagccaa

SEQ ID NO: 100283 - DNA, 120 bp, Artificial Sequence
  ENSG00000091844_53 (sequence is synthesized)
tattgatcattacattcatacttcattcagatttccttagtttataacctaatgtcctttttctgtcccaggatcccattcaggataccacattacatttagttgtcatgtttccttagg

SEQ ID NO: 100284 - DNA, 120 bp, Artificial Sequence
  ENSG00000091844_54 (sequence is synthesized)
cttcccttggctgtgacagtttctgcaactttccttgtttttgatgacagttttgagaaataaactggtattttgtagaatgtccttctatggggattcgtctgatgtttttctcgtgac

SEQ ID NO: 100285 - DNA, 120 bp, Artificial Sequence
  ENSG00000091844_55 (sequence is synthesized)
tagacacaggtttttggtttttgaaagaacacaacggtaaagtgccatgctcatcacatggtatcaaaggtatatgccatcaccgggactcgtcttagctgtgacagtttctcaaacttt

SEQ ID NO: 100286 - DNA, 120 bp, Artificial Sequence
  ENSG00000091844_56 (sequence is synthesized)
aggctactcttagctgttgatgttaaccttgatcacttagctgaggtagcatctattatatttctccactgtaaagtaatgcgtttttaaagagattatattgaaggtaaattttctgga

SEQ ID NO: 100287 - DNA, 120 bp, Artificial Sequence
  ENSG00000091844_57 (sequence is synthesized)
catttacactgagctaaacaaattctaaacactaatattaggttccactaagtgattactaataaatgctataaagaaaatacagtgaagtggaaaaataaaactccagaagtcttagcc

SEQ ID NO: 100288 - DNA, 120 bp, Artificial Sequence
  ENSG00000091844_58 (sequence is synthesized)
tgaatattcacctaatagaggtgaaagtgaatttttcccttgaactgtctgcgcaatttacaataatcctccacatactttggatattaaagatcttatcttactaattgtcataagagg

SEQ ID NO: 100289 - DNA, 120 bp, Artificial Sequence
  ENSG00000091844_59 (sequence is synthesized)
taatttaaatttaaactaaccattttgcttattgcatttttatattgccctccactaatcaatgaacactgaatattgaaataatgtaaaagacctatttcccgctagctttaaccgatt

SEQ ID NO: 100290 - DNA, 120 bp, Artificial Sequence
  ENSG00000091844_60 (sequence is synthesized)
tgtcataaacacctttcttgtatatgatttttaaatgtttgctaaatattaaaaagaattcaatgtgtttggttttgtaaaattacatatcgaatgtgtataattttttactaccatgtt

SEQ ID NO: 100291 - DNA, 120 bp, Artificial Sequence
  ENSG00000091844_61 (sequence is synthesized)
catcacacttaatctatatccatatattgtactccaccaatatttatcagtggacaataaagaagttttgaatgcatgaatgcaacttaagaggcaccacacttggttattttgcaatgc

SEQ ID NO: 100292 - DNA, 120 bp, Artificial Sequence
  ENSG00000091844_62 (sequence is synthesized)
cagaataacggtgggtattcacaaattgaatagataatccagattatgtttcctccaatttaagtttttctgggtttttttttcccccttcctagaatcaattttatcattttacctatg

SEQ ID NO: 100293 - DNA, 120 bp, Artificial Sequence
  ENSG00000091844_63 (sequence is synthesized)
tacaataatatacttctggaaaatgctagaattttcaccatgtaacagaatttgagcatgacagtaatgtaaaaatattcagaagtctcgaactataggtttgagttttcaaagtaaatc

SEQ ID NO: 100294 - DNA, 120 bp, Artificial Sequence
  ENSG00000091844_64 (sequence is synthesized)
aaaatacagctgttttcattttactagattgtggaaacctatggatgttattgtaaaatgcatatgcattacactgactttcttaaaatgttttgaattaataaagaattcaacaatgta

SEQ ID NO: 100295 - DNA, 120 bp, Artificial Sequence
  ENSG00000091879_0 (sequence is synthesized)
ctggttggagggcaggcattctgctctgatttttcctgttgcctggctagtgaccccctacaggaagataacggctaagccaggagggcggagcagcccactacacatgtctggctgctc

SEQ ID NO: 100296 - DNA, 120 bp, Artificial Sequence
  ENSG00000091879_1 (sequence is synthesized)
ttatcaacttatcatataaggaaaggaaagtgattgattcggatactgacactgtaggatctggggagagaggaacaaaggaccgtgaaagctgctctgtaaaagctgacacagccctcc

SEQ ID NO: 100297 - DNA, 120 bp, Artificial Sequence
  ENSG00000091879_2 (sequence is synthesized)
caagtgagcaggactgttcttcccactgcaatctgacagtttactgcatgcctggagagaacacagcagtaaaaaccaggtttgctactggaaaaagaggaaagagaagactttcattga

SEQ ID NO: 100298 - DNA, 120 bp, Artificial Sequence
  ENSG00000091879_3 (sequence is synthesized)
cggacccagccatggcagcgtagcagccctgcgttttagacggcagcagctcgggactctggacgtgtgtttgccctcaagtttgctaagctgctggtttattactgaagaaagaatgtg

SEQ ID NO: 100299 - DNA, 120 bp, Artificial Sequence
  ENSG00000091879_4 (sequence is synthesized)
gcagattgttttctttactctgagctgtgatcttgtcttggccgcagcctataacaactttcggaagagcatggacagcataggaaagaagcaatatcaggtccagcatgggtcctgcag

SEQ ID NO: 100300 - DNA, 120 bp, Artificial Sequence
  ENSG00000091879_5 (sequence is synthesized)
ctacactttcctcctgccagagatggacaactgccgctcttcctccagcccctacgtgtccaatgctgtgcagagggacgcgccgctcgaatacgatgactcggtgcagaggctgcaagt

SEQ ID NO: 100301 - DNA, 120 bp, Artificial Sequence
  ENSG00000091879_6 (sequence is synthesized)
gctggagaacatcatggaaaacaacactcagtggctaatgaagcttgagaattatatccaggacaacatgaagaaagaaatggtagagatacagcagaatgcagtacagaaccagacggc

SEQ ID NO: 100302 - DNA, 120 bp, Artificial Sequence
  ENSG00000091879_7 (sequence is synthesized)
tgtgatgatagaaatagggacaaacctgttgaaccaaacagcggagcaaacgcggaagttaactgatgtggaagcccaagtattaaatcagaccacgagacttgaacttcagctcttgga

SEQ ID NO: 100303 - DNA, 120 bp, Artificial Sequence
  ENSG00000091879_8 (sequence is synthesized)
acactccctctcgacaaacaaattggaaaaacagattttggaccagaccagtgaaataaacaaattgcaagataagaacagtttcctagaaaagaaggtgctagctatggaagacaagca

SEQ ID NO: 100304 - DNA, 120 bp, Artificial Sequence
  ENSG00000091879_9 (sequence is synthesized)
catcatccaactacagtcaataaaagaagagaaagatcagctacaggtgttagtatccaagcaaaattccatcattgaagaactagaaaaaaaaatagtgactgccacggtgaataattc

SEQ ID NO: 100305 - DNA, 120 bp, Artificial Sequence
  ENSG00000091879_10 (sequence is synthesized)
agttcttcagaagcagcaacatgatctcatggagacagttaataacttactgactatgatgtccacatcaaactcagctaaggaccccactgttgctaaagaagaacaaatcagcttcag

SEQ ID NO: 100306 - DNA, 120 bp, Artificial Sequence
  ENSG00000091879_11 (sequence is synthesized)
agactgtgctgaagtattcaaatcaggacacaccacgaatggcatctacacgttaacattccctaattctacagaagagatcaaggcctactgtgacatggaagctggaggaggcgggtg

SEQ ID NO: 100307 - DNA, 120 bp, Artificial Sequence
  ENSG00000091879_12 (sequence is synthesized)
gacaattattcagcgacgtgaggatggcagcgttgattttcagaggacttggaaagaatataaagtgggatttggtaacccttcaggagaatattggctgggaaatgagtttgtttcgca

SEQ ID NO: 100308 - DNA, 120 bp, Artificial Sequence
  ENSG00000091879_13 (sequence is synthesized)
actgactaatcagcaacgctatgtgcttaaaatacaccttaaagactgggaagggaatgaggcttactcattgtatgaacatttctatctctcaagtgaagaactcaattataggattca

SEQ ID NO: 100309 - DNA, 120 bp, Artificial Sequence
  ENSG00000091879_14 (sequence is synthesized)
ccttaaaggacttacagggacagccggcaaaataagcagcatcagccaaccaggaaatgattttagcacaaaggatggagacaacgacaaatgtatttgcaaatgttcacaaatgctaac

SEQ ID NO: 100310 - DNA, 120 bp, Artificial Sequence
  ENSG00000091879_15 (sequence is synthesized)
aggaggctggtggtttgatgcatgtggtccttccaacttgaacggaatgtactatccacagaggcagaacacaaataagttcaacggcattaaatggtactactggaaaggctcaggcta

SEQ ID NO: 100311 - DNA, 120 bp, Artificial Sequence
  ENSG00000091879_16 (sequence is synthesized)
ttcgctcaaggccacaaccatgatgatccgaccagcagatttctaaacatcccagtccacctgaggaactgtctcgaactattttcaaagacttaagcccagtgcactgaaagtcacggc

SEQ ID NO: 100312 - DNA, 120 bp, Artificial Sequence
  ENSG00000091879_17 (sequence is synthesized)
tgcgcactgtgtcctcttccaccacagagggcgtgtgctcggtgctgacgggacccacatgctccagattagagcctgtaaactttatcacttaaacttgcatcacttaacggaccaaag

SEQ ID NO: 100313 - DNA, 120 bp, Artificial Sequence
  ENSG00000091879_18 (sequence is synthesized)
caagaccctaaacatccataattgtgattagacagaacacctatgcaaagatgaacccgaggctgagaatcagactgacagtttacagacgctgctgtcacaaccaagaatgttatgtgc

SEQ ID NO: 100314 - DNA, 120 bp, Artificial Sequence
  ENSG00000091879_19 (sequence is synthesized)
aagtttatcagtaaataactggaaaacagaacacttatgttatacaatacagatcatcttggaactgcattcttctgagcactgtttatacactgtgtaaatacccatatgtcctgaatt

SEQ ID NO: 100315 - DNA, 120 bp, Artificial Sequence
  ENSG00000091879_20 (sequence is synthesized)
caccatcactatcacaattaaaaggaagaaaaaaactctctaagccataaaaagacatattcagggatattctgagaaggggttactagaagtttaatatttggaaaaacagttagtgca

SEQ ID NO: 100316 - DNA, 120 bp, Artificial Sequence
  ENSG00000091879_21 (sequence is synthesized)
tttttactccatctcttaggtgctttaaatttttatttcaaaaacagcgtatttacatttatgttgacagcttagttataagttaatgctcaaatacgtatttcaaatttatatggtaga

SEQ ID NO: 100317 - DNA, 120 bp, Artificial Sequence
  ENSG00000091879_22 (sequence is synthesized)
gaaattatcaacagaaacgtgccattttagtttatatgcagaccgtactatttttttctgcctgattgttaaatatgaaggtatttttagtaattaaatataacttattaggggatatgc

SEQ ID NO: 100318 - DNA, 120 bp, Artificial Sequence
  ENSG00000091879_23 (sequence is synthesized)
ctatgtttaacttttatgataatatttacaattttataatttgtttccaaaagacctaattgtgccttgtgataaggaaacttcttacttttaatgatgaggaaaattatacatttcatt

SEQ ID NO: 100319 - DNA, 120 bp, Artificial Sequence
  ENSG00000091879_24 (sequence is synthesized)
ctatgacaaagaaactttactatcttctcactattctaaaacagaggtctgttttctttcctagtaagatatatttttatagaactagactacaatttaatttctggttgagaaaagcct

SEQ ID NO: 100320 - DNA, 120 bp, Artificial Sequence
  ENSG00000091879_25 (sequence is synthesized)
tctatttaagaaatttacaaagctatatgtctcaagattcacccttaaatttacttaaggaaaaaaataattgacactagtaagtttttttatgtcaatcagcaaactgaaaaaaaaaaa

SEQ ID NO: 100321 - DNA, 120 bp, Artificial Sequence
  ENSG00000091879_26 (sequence is synthesized)
aactgaaaaaaaaaaaagggtttcaaagtgcaaaaacaaaatctgatgttcataatatatttaaatatttaccaaaaatttgagaacacagggctgggcgcagtggctcacacctataat

SEQ ID NO: 100322 - DNA, 120 bp, Artificial Sequence
  ENSG00000091879_27 (sequence is synthesized)
aaaaaaaaaaaaagaaagaaaagaaaatttgagaacacagctttatactcgggactacaaaaccataaactcctggagttttaactccttttgaaattttcatagtacaattaatactaa

SEQ ID NO: 100323 - DNA, 120 bp, Artificial Sequence
  ENSG00000091879_28 (sequence is synthesized)
ctaatgaacatttgtgtaaagctttataatttaaaggcaatttctcatatattcttttctgaatcatttgcaaggaagttcagagtccagtctgtaactagcatctactatatgtctgtc

SEQ ID NO: 100324 - DNA, 120 bp, Artificial Sequence
  ENSG00000091879_29 (sequence is synthesized)
ttcaccttacagtgttctaccattattttttctttattccatttcaaaatctaatttattttaccccaacttctccccaccacttgacgtagttttagaacacacaggtgttgctacata

SEQ ID NO: 100325 - DNA, 120 bp, Artificial Sequence
  ENSG00000091879_30 (sequence is synthesized)
tttggagtcaatgatggactctggcaaagtcaaggctctgttttatttccaccaaggtgcacttttccaacaactatttaactagttaagaacctccctatcttagaactgtatctactt

SEQ ID NO: 100326 - DNA, 120 bp, Artificial Sequence
  ENSG00000091879_31 (sequence is synthesized)
tatatttaagaaggttttatgaattcaacaacggtatcatggccttgtatcaagttgaaaaacaactgaaaataagaaaatttcacagcctcgaaagacaacaacaagtttctaggatat

SEQ ID NO: 100327 - DNA, 120 bp, Artificial Sequence
  ENSG00000091879_32 (sequence is synthesized)
ctcaatgacaagagtgatggatacttaggtagggaaacgctaatgcaggaaaaactggcaacaacacaatttatatcaattctctttgtaggcaggtgataaaaaattcaaggacaaatc

SEQ ID NO: 100328 - DNA, 120 bp, Artificial Sequence
  ENSG00000091879_33 (sequence is synthesized)
tcattatgtcattgtgcatcatatataatctcttatgagcgagaatggggggaatttgtgtttttactttacacttcaattccttacacggtatttcaaacaaacagttttgctgagagg

SEQ ID NO: 100329 - DNA, 120 bp, Artificial Sequence
  ENSG00000091879_34 (sequence is synthesized)
agcttttgtctctccttaagaaaatgtttataaagctgaaaggaaatcaaacagtaatcttaaaaatgaaaacaaaacaacccaacaacctagataactacagtgatcagggagcacagt

SEQ ID NO: 100330 - DNA, 120 bp, Artificial Sequence
  ENSG00000091879_35 (sequence is synthesized)
tcaactccttgttatgttttagtcatatggcctactcaaacagctaaataacaacaccagtggcagataaaaatcaccatttatctttcagctattaatcttttgaatgaataaactgtg

SEQ ID NO: 100331 - DNA, 120 bp, Artificial Sequence
  ENSG00000091879_36 (sequence is synthesized)
acaaacaaattaacatttttgaacatgaaaggcaacttctgcacaatcctgtatccaagcaaactttaaattatccacttaattattacttaatcttaaaaaaaattagaacccagaact

SEQ ID NO: 100332 - DNA, 120 bp, Artificial Sequence
  ENSG00000091879_37 (sequence is synthesized)
tttcaatgaagcatttgaaagttgaagtggaatttaggaaagccataaaaatataaatactgttatcacagcaccagcaagccataatctttatacctatcagttctatttctattaaca

SEQ ID NO: 100333 - DNA, 120 bp, Artificial Sequence
  ENSG00000091879_38 (sequence is synthesized)
gtaaaaacattaagcaagatataagactacctgcccaagaattcagtcttttttcatttttgtttttctcagttctgaggatgttaatcgtcaaattttctttggactgcattcctcact

SEQ ID NO: 100334 - DNA, 120 bp, Artificial Sequence
  ENSG00000091879_39 (sequence is synthesized)
actttttgcacaatggtctcacgttctcacatttgttctcgcgaataaattgataaaaggtgttaagttctgtgaatgtctttttaattatgggcataattgtgcttgactggataaaaa

SEQ ID NO: 100335 - DNA, 120 bp, Artificial Sequence
  ENSG00000091879_40 (sequence is synthesized)
cttaagtccacccttatgtttataataatttcttgagaacagcaaactgcatttaccatcgtaaaacaacatctgacttacgggagctgcagggaagtggtgagacagttcgaacggctc

SEQ ID NO: 100336 - DNA, 120 bp, Artificial Sequence
  ENSG00000091879_41 (sequence is synthesized)
ctcagaaatccagtgacccaattctaaagaccatagcacctgcaagtgacacaacaagcagatttattatacatttattagccttagcaggcaataaaccaagaatcactttgaagacac

SEQ ID NO: 100337 - DNA, 120 bp, Artificial Sequence
  ENSG00000091879_42 (sequence is synthesized)
agcaaaaagtgatacactccgcagatctgaaatagatgtgttctcagacaacaaagtcccttcagaatcttcatgttgcataaatgttatgaatattaataaaaagttgattgagaaaaa

SEQ ID NO: 100338 - DNA, 120 bp, Artificial Sequence
  ENSG00000091879_43 (sequence is synthesized)
gaatgatttcatagagggaaaggctggcaatttggactacaaattgtgatttgtaacgatgtccacaatttcatacgtagacacactagcttgatataggtaaatgtgtttttcactttt

SEQ ID NO: 100339 - DNA, 120 bp, Artificial Sequence
  ENSG00000091879_44 (sequence is synthesized)
tttagactaagttttaagtgagaatatgatatggagctagacttgtcagcaagccaactgtgtctcctcaggacctagccctggcaaggagaggggatatttgattcttagcaagctctc

SEQ ID NO: 100340 - DNA, 120 bp, Artificial Sequence
  ENSG00000091879_45 (sequence is synthesized)
ctgcgtttgtgcttgctggatactagagagatggtttaattacattttgctttatgtaaaaagttaaaaattccaagtagcaaccacaacagtaatatagattatagaaatatttccaac

SEQ ID NO: 100341 - DNA, 120 bp, Artificial Sequence
  ENSG00000091879_46 (sequence is synthesized)
taataatttaatgttcaaagaaggaatttccagctgtcatttattatttatttatttacagacacagtctccagttgtttatttatttattttgagacagagtcttactttgttgtccag

SEQ ID NO: 100342 - DNA, 74 bp, Artificial Sequence
  ENSG00000091879_47 (sequence is synthesized)
atttatttattttgagacagagtcttactttgttgtccagaagggagtgtgatcgcagctcactgcaaccgctg

SEQ ID NO: 100343 - DNA, 62 bp, Artificial Sequence
  ENSG00000091879_48 (sequence is synthesized)
attttgtatttttagtagaggggccgcagcctccagaagtgttgagattacaggtgtgagcc

SEQ ID NO: 100344 - DNA, 120 bp, Artificial Sequence
  ENSG00000091879_49 (sequence is synthesized)
cggccccagctgtctttttaaaaaagattccattaatatatagcaacacctataaacacaaatgagttaatccaccttttttagtaaatcaaattaaaatgagtcatcttctactttgag

SEQ ID NO: 100345 - DNA, 120 bp, Artificial Sequence
  ENSG00000091879_50 (sequence is synthesized)
acctttcttgtattgtaggtttggtattacactgccataaaacagacaatgaaaaccacactcataagccaaaaaccattgtagtagtcacttaaaacagatgggttggtattcagaaac

SEQ ID NO: 100346 - DNA, 120 bp, Artificial Sequence
  ENSG00000091879_51 (sequence is synthesized)
tagtcacttaaaacagatgggttggtattcagaaacatttgagagttcaaacataggaataaagttttagaaaatgttatttttctggccgggcccggtggctcacgcctgtaatgccag

SEQ ID NO: 100347 - DNA, 120 bp, Artificial Sequence
  ENSG00000091947_0 (sequence is synthesized)
cctttcccaagatggcgtcgaagataggttcgagacggtggatgttgcagctgatcatgcagttgggttcggtgctgctcacacgctgccccttttggggctgcttcagccagctcatgc

SEQ ID NO: 100348 - DNA, 120 bp, Artificial Sequence
  ENSG00000091947_1 (sequence is synthesized)
tgtacgctgagagggctgaggcacgccggaagcccgacatcccagtgccttacctgtatttcgacatgggggcagccgtgctgtgcgctagtttcatgtcctttggcgtgaagcggcgct

SEQ ID NO: 100349 - DNA, 120 bp, Artificial Sequence
  ENSG00000091947_2 (sequence is synthesized)
ggttcgcgctgggggccgcactccaattggccattagcacctacgccgcctacatcgggggctacgtccactacggggactggctgaaggtccgtatgtactcgcgcacagttgccatca

SEQ ID NO: 100350 - DNA, 120 bp, Artificial Sequence
  ENSG00000091947_3 (sequence is synthesized)
tcggcggctttcttgtgttggccagcggtgctggggagctgtaccgccggaaacctcgcagccgctccctgcagtccaccggccaggtgttcctgggtatctacctcatctgtgtggcct

SEQ ID NO: 100351 - DNA, 120 bp, Artificial Sequence
  ENSG00000091947_4 (sequence is synthesized)
actcactgcagcacagcaaggaggaccggctggcgtatctgaaccatctcccaggaggggagctgatgatccagctgttcttcgtgctgtatggcatcctggccctggcctttctgtcag

SEQ ID NO: 100352 - DNA, 120 bp, Artificial Sequence
  ENSG00000091947_5 (sequence is synthesized)
gctactacgtgaccctcgctgcccagatcctggctgtactgctgccccctgtcatgctgctcattgatggcaatgttgcttactggcacaacacgcggcgtgttgagttctggaaccaga

SEQ ID NO: 100353 - DNA, 120 bp, Artificial Sequence
  ENSG00000091947_6 (sequence is synthesized)
gatgggcacagggagccactgagggtcaccctgccttcctccttgctggcccagctgctgtttatttatgctttttggtctgtttgtttgatcttttgcttttttaaaattgttttttgc

SEQ ID NO: 100354 - DNA, 120 bp, Artificial Sequence
  ENSG00000091947_7 (sequence is synthesized)
agttaagaggcagctcatttgtccaaatttctgggctcagcgcttgggagggcaggagccctggcactaatgctgtacaggtttttttcctgttaggagagctgaggccagctgcccact

SEQ ID NO: 100355 - DNA, 120 bp, Artificial Sequence
  ENSG00000091947_8 (sequence is synthesized)
gagtctcctgtccctgagaagggagtatggcagggctgggatgcggctactgagagtgggagagtgggagacagaggaaggaagatggagattggaagtgagcaaatgtgaaaaattcct

SEQ ID NO: 100356 - DNA, 120 bp, Artificial Sequence
  ENSG00000091947_9 (sequence is synthesized)
ctttgaacctggcagatgcagctaggctctgcagtgctgtttggagactgtgagagggagtgcgtgtgttgacacatgtggatcaggcccaggaagggcacaggggctgagcactacaga

SEQ ID NO: 100357 - DNA, 120 bp, Artificial Sequence
  ENSG00000091947_10 (sequence is synthesized)
agtcacatgggttctcagggtatgccaggggcagaaacagtaccggctctctgtcactcaccttgagagtagagcagaccctgttctgctctgggctgtgaaggggtggagcaggcagtg

SEQ ID NO: 100358 - DNA, 120 bp, Artificial Sequence
  ENSG00000091947_11 (sequence is synthesized)
gccagctttgcccttcctgctgtctctgtttctagctccatggttggcctggtgggggtggagttccctcccaaacaccagaccacacagtcctccaaaaataaacattttatatagaca

SEQ ID NO: 100359 - DNA, 120 bp, Artificial Sequence
  ENSG00000091947_12 (sequence is synthesized)
ccagactgcgccgaagcttcatgagacctctcctcgtctgtgcacggacgagtggccgactctggagcccaggctgttgcttcccagactggtggtgaatcctccatagtctgggacaaa

SEQ ID NO: 100360 - DNA, 120 bp, Artificial Sequence
  ENSG00000091947_13 (sequence is synthesized)
tatggccctgaaggctccatgagcagacgagaaggctggacttcgcaactgggtcaccttagatccggaactagagaatgacaccgttgtttccgggaggaaaaagaaaaagcgcttgac

SEQ ID NO: 100361 - DNA, 120 bp, Artificial Sequence
  ENSG00000091947_14 (sequence is synthesized)
ggacgagtggccgactctggagcccaggctgttgcttcccagactggtggtgaatcctccatagtctgactatttaatcagcaggcagatcaacaggccaaaatttccaccataactgca

SEQ ID NO: 100362 - DNA, 120 bp, Artificial Sequence
  ENSG00000091947_15 (sequence is synthesized)
ttggaggtgcctggctgggagtgaactgtgagtctaggcatggcagaaccccaggaaggtagacacagaacgaggccctgagtgcagttcctgatggcccagttccctgggaattgccct

SEQ ID NO: 100363 - DNA, 120 bp, Artificial Sequence
  ENSG00000091947_16 (sequence is synthesized)
ggccagcttctaggcctcaggggccctccaaatgcctgttgagaggcccttcctccaacagtgttgccacgaggtagactggccattaaatttcaaccctgagagccaggagaacaagat

SEQ ID NO: 100364 - DNA, 120 bp, Artificial Sequence
  ENSG00000091947_17 (sequence is synthesized)
ggggtgattctctcatggctccagcccccaaaggactagaaggggataaaggagaggtttggtgggggtcaggccccagctgggactctgccccctagagctgatgagagctctagggta

SEQ ID NO: 100365 - DNA, 120 bp, Artificial Sequence
  ENSG00000091947_18 (sequence is synthesized)
gccacttatggttctccctggtgctaggggaggccagggtgactggagacatggacaggcgccaggccattaggtcttatcttaattaccgagtatatctctgtacagctctctgtgtgg

SEQ ID NO: 100366 - DNA, 120 bp, Artificial Sequence
  ENSG00000091947_19 (sequence is synthesized)
aaaagagctagggtcctagattgtgccgaagcttcatgagacctctcctcgtctgtgcacggacgagtggccgactctggagcccaggctgttgtttcctagtctggtggtgaatccgcc

SEQ ID NO: 100367 - DNA, 120 bp, Artificial Sequence
  ENSG00000091947_20 (sequence is synthesized)
ttctctctcctgggtaaccgactgcagcacctggaggtcaaggcagtggcaggcatccggacagcaggcatgcggctgctgttgttggataacccctggacacgtgactgacctgcagtg

SEQ ID NO: 100368 - DNA, 120 bp, Artificial Sequence
  ENSG00000091947_21 (sequence is synthesized)
tgcctggctgagactgccactgtgctgggcatcacaggcaccgtgctgctcacagtggctgtggctgtgctgatggctgagcgcaagcgaagacagggcccgcaagaagccggggagctg

SEQ ID NO: 100369 - DNA, 120 bp, Artificial Sequence
  ENSG00000091947_22 (sequence is synthesized)
gggagctttctggagagactatttaatcagcaggcagatcaacaggccaaaatttccaccataactgcaaacttgaatgcggatgaatggattacaacatggtcaaaccttgcaatgaga

SEQ ID NO: 100370 - DNA, 120 bp, Artificial Sequence
  ENSG00000091972_0 (sequence is synthesized)
agagctccaggcgcacatccgcagtcagccacctcgcgcgcgcctccaggagcaaggatggagaggctggtgatcaggatgcccttctctcatctgtctacctacagcctggtttgggtc

SEQ ID NO: 100371 - DNA, 120 bp, Artificial Sequence
  ENSG00000091972_1 (sequence is synthesized)
atggcagcagtggtgctgtgcacagcacaagtgcaagtggtgacccaggatgaaagagagcagctgtacacacctgcttccttaaaatgctctctgcaaaatgcccaggaagccctcatt

SEQ ID NO: 100372 - DNA, 120 bp, Artificial Sequence
  ENSG00000091972_2 (sequence is synthesized)
gtgacatggcagaaaaagaaagctgtaagcccagaaaacatggtcaccttcagcgagaaccatggggtggtgatccagcctgcctataaggacaagataaacattacccagctgggactc

SEQ ID NO: 100373 - DNA, 120 bp, Artificial Sequence
  ENSG00000091972_3 (sequence is synthesized)
caaaactcaaccatcaccttctggaatatcaccctggaggatgaagggtgttacatgtgtctcttcaatacctttggttttgggaagatctcaggaacggcctgcctcaccgtctatgta

SEQ ID NO: 100374 - DNA, 120 bp, Artificial Sequence
  ENSG00000091972_4 (sequence is synthesized)
cagcccatagtatcccttcactacaaattctctgaagaccacctaaatatcacttgctctgccactgcccgcccagcccccatggtcttctggaaggtccctcggtcagggattgaaaat

SEQ ID NO: 100375 - DNA, 120 bp, Artificial Sequence
  ENSG00000091972_5 (sequence is synthesized)
agtacagtgactctgtctcacccaaatgggaccacgtctgttaccagcatcctccatatcaaagaccctaagaatcaggtggggaaggaggtgatctgccaggtgctgcacctggggact

SEQ ID NO: 100376 - DNA, 120 bp, Artificial Sequence
  ENSG00000091972_6 (sequence is synthesized)
gtgaccgactttaagcaaaccgtcaacaaaggctattggttttcagttccgctattgctaagcattgtttccctggtaattcttctcgtcctaatctcaatcttactgtactggaaacgt

SEQ ID NO: 100377 - DNA, 120 bp, Artificial Sequence
  ENSG00000091972_7 (sequence is synthesized)
caccggaatcaggaccgagagccctaaataagtcacacagcaccctgaaagtgattccctggtctacttgaatttgacacaagagaaaagcaggaggaaaaggggccattctccaaagga

SEQ ID NO: 100378 - DNA, 120 bp, Artificial Sequence
  ENSG00000091972_8 (sequence is synthesized)
gaggaagtcagtttacctctcaggtctgttgtaggacttgattttgtaaagcaatgccatgttatgtggttgaaagggcactggacttagttagtatcaggagcactgagctcacagact

SEQ ID NO: 100379 - DNA, 120 bp, Artificial Sequence
  ENSG00000091972_9 (sequence is synthesized)
gacttgggctcctactggtggggacctctgttagtcactttacctcatccaaagtataaaggaattggaccaaataatttaccacatagctctaaaacttaatttaaaatgtaattccag

SEQ ID NO: 100380 - DNA, 120 bp, Artificial Sequence
  ENSG00000091972_10 (sequence is synthesized)
aaaaaaaaagggaataagcaaagggggaagaattgaaagagagagagaagaaagaatacagagagcttaccttttgcctttctgttgatgttacatctcttcttcctatgttcttaggtc

SEQ ID NO: 100381 - DNA, 120 bp, Artificial Sequence
  ENSG00000091972_11 (sequence is synthesized)
tatgagtctgtttccccatcatttggtatctagtccagttcctgcttactgctttgctaatagctggccttgctagaatccttggtttcactgctgttcttcatgtgcttctatgagatt

SEQ ID NO: 100382 - DNA, 120 bp, Artificial Sequence
  ENSG00000091972_12 (sequence is synthesized)
tactccaacacaaataggactgaatttattgtgaagtaacattggcaatcttaacttattcatttaacttatttttatagctagataaatattgttagtcttagacaatagctcacattt

SEQ ID NO: 100383 - DNA, 120 bp, Artificial Sequence
  ENSG00000091972_13 (sequence is synthesized)
tttgagaagcatgccctccctgtccatttgtcttataacatgacccagccctattttacgtcattctaaattcagcctcatataatgaaaatacattatgaaaacagatgtttaggagat

SEQ ID NO: 100384 - DNA, 120 bp, Artificial Sequence
  ENSG00000091972_14 (sequence is synthesized)
ttcctgtatagcagtcagccaattcatatgctttgtctctgctggcttctttttccatgcgttaacttttcccaatagcagaggaggcaaatatgagcatacaatccctttgttctaaag

SEQ ID NO: 100385 - DNA, 120 bp, Artificial Sequence
  ENSG00000091972_15 (sequence is synthesized)
atattgttccagctagtggaatgatgttgaatctttaataaccataattagttgctttttcagtatcttctgctttgtctgtgtctatccagtggcctaggaattaaagtgtaagttgtt

SEQ ID NO: 100386 - DNA, 120 bp, Artificial Sequence
  ENSG00000091972_16 (sequence is synthesized)
ttcgctgttaaattggatatttatatatatatatagcaagattttcatgtgttatttaattctgtattgtttcttatatttgtagtaaaatattgaacaattaaaagtgttgactccaaa

SEQ ID NO: 100387 - DNA, 62 bp, Artificial Sequence
  ENSG00000091972_17 (sequence is synthesized)
ggcggaccacagagcgagactccgtctcaagaagaagaagaaggagaagaaggagaaggaga

SEQ ID NO: 100388 - DNA, 120 bp, Artificial Sequence
  ENSG00000091972_18 (sequence is synthesized)
aacaggtcaacaactgatctccacaacctcccacctcatttcctttctcagtccaggtagcaggaaaatggaaaaaaaaaaatgattttttttttccaaacactttgtcagtttccccag

SEQ ID NO: 100389 - DNA, 120 bp, Artificial Sequence
  ENSG00000091972_19 (sequence is synthesized)
cggtcacctttgaaaagggaaaaatgtctgaaaatagacaaagctgaatataaacatcatttaattccccccacacagacagcctccgctcctgtgagggcgtggggaaaacggagtggg

SEQ ID NO: 100390 - DNA, 120 bp, Artificial Sequence
  ENSG00000091972_20 (sequence is synthesized)
tggccccaagagagctgagacaatattggctctaatttttatcatctcattgatctcaaaccacagactctgaccaggacaattgggggccctctccttacagctacactcctaggaaag

SEQ ID NO: 100391 - DNA, 120 bp, Artificial Sequence
  ENSG00000091972_21 (sequence is synthesized)
agagctccaggcgcacatccgcagtcagccacctcgcgcgcgcctccaggagcaaggatggagaggctgactctgaccaggacaattgggggccctctccttacagctacactcctagga

SEQ ID NO: 100392 - DNA, 120 bp, Artificial Sequence
  ENSG00000091986_0 (sequence is synthesized)
gaacagactggaagagaagttaccccgatgacttggtttggaaggggttaaggcaccagtcatcctcttctaaagtgatttatgatgatgtgtggagtttaaaaactttaccccacccca

SEQ ID NO: 100393 - DNA, 120 bp, Artificial Sequence
  ENSG00000091986_1 (sequence is synthesized)
aagaacagccttctcactcctcactgagtccactctgaacgtgctaaaatgggaaggaggcggtgttttgctgatctgttaaattcttagtgaagtttccttgatttccagtggctgctg

SEQ ID NO: 100394 - DNA, 120 bp, Artificial Sequence
  ENSG00000091986_2 (sequence is synthesized)
ttgtttgagtttggtttggagcaaaactgaggtagtcctaacatttctgggactgaatccaggcaagagaaagaagaaaaagaagaagaaaaagaggaggaaaaaggtagggagaaataa

SEQ ID NO: 100395 - DNA, 120 bp, Artificial Sequence
  ENSG00000091986_3 (sequence is synthesized)
agggaggagagaagcacagtgaaagaaaaaaaaagtcccttttcgacatcacattcctgtgttttccctcagcctggaaaacatattaatcccagtgcttttacgcccggaaacaaagag

SEQ ID NO: 100396 - DNA, 120 bp, Artificial Sequence
  ENSG00000091986_4 (sequence is synthesized)
actaagccagactatgggggaaagggagataagaaggatcctggaactttaaagagggaaagagtgagattcagaaatcgccaggactggactttaagggacgtcctgtgtcagcacaag

SEQ ID NO: 100397 - DNA, 120 bp, Artificial Sequence
  ENSG00000091986_5 (sequence is synthesized)
ggactggcacacacagacacacgagaccgaggagaaactgcagacaaatggagatacaaagacttagaaggacagctcctttcacctcatcctacttgtccagaaggtaaaaagacacag

SEQ ID NO: 100398 - DNA, 120 bp, Artificial Sequence
  ENSG00000091986_6 (sequence is synthesized)
ccagaaagaaaaggcatcggctcagctctcagatcaggacaggctgtggatctgtggcggtactctgaaagctggagctgcagcacaccccttttgtattgctcaccctcggtaaagaga

SEQ ID NO: 100399 - DNA, 120 bp, Artificial Sequence
  ENSG00000091986_7 (sequence is synthesized)
gagagggctgggaggaaaagtagttcatctaggaaactgtcctgggaaccaaacttctgatttcttttgcaaccctctgcattccatctctatgagccaccattggattacacaatgaca

SEQ ID NO: 100400 - DNA, 120 bp, Artificial Sequence
  ENSG00000091986_8 (sequence is synthesized)
tggagaatgggaccccgtttcactatgctgttggccatgtggctagtgtgtggatcagaaccccacccccatgccactattagaggcagccacggaggacggaaagtgcctttggtttct

SEQ ID NO: 100401 - DNA, 120 bp, Artificial Sequence
  ENSG00000091986_9 (sequence is synthesized)
ccggacagcagtaggccagctcggtttctgaggcacactgggaggtctcgcggaattgagagatccactctggaggaaccaaaccttcagcctctccagagaaggaggagtgtgcccgtg

SEQ ID NO: 100402 - DNA, 120 bp, Artificial Sequence
  ENSG00000091986_10 (sequence is synthesized)
ttgagactagctcgcccaacagagccgccagcccgctcggacatcaatggggccgccgtgagacctgagcaaagaccagcagccaggggctctccgcgtgagatgatcagagatgagggg

SEQ ID NO: 100403 - DNA, 120 bp, Artificial Sequence
  ENSG00000091986_11 (sequence is synthesized)
tcctcagctcggtcaagaatgttgcgtttcccttcggggtccagctctcccaacatccttgccagctttgcagggaagaacagagtatgggtcatctcagcccctcatgcctcggaaggc

SEQ ID NO: 100404 - DNA, 120 bp, Artificial Sequence
  ENSG00000091986_12 (sequence is synthesized)
tactaccgcctcatgatgagcctgctgaaggacgatgtgtactgtgagctggcggagaggcacatccaacagattgtgctcttccaccaggcaggtgaggaaggaggcaaggtgagaagg

SEQ ID NO: 100405 - DNA, 120 bp, Artificial Sequence
  ENSG00000091986_13 (sequence is synthesized)
atcaccagcgagggccagatcctggagcagcccctggaccctagcctcatccctaagctgatgagcttcctgaagctggagaagggcaagtttggcatggtgctgctgaagaagacgctg

SEQ ID NO: 100406 - DNA, 120 bp, Artificial Sequence
  ENSG00000091986_14 (sequence is synthesized)
caggtggaggagcgctatccatatcccgttaggctggaagccatgtacgaggtcatcgaccaaggccccatccgtaggatcgagaagatcaggcagaagggctttgtccagaaatgtaag

SEQ ID NO: 100407 - DNA, 120 bp, Artificial Sequence
  ENSG00000091986_15 (sequence is synthesized)
gcctctggtgtagagggccaggtggtggcggaggggaatgacggtggagggggagcaggaaggccaagcctgggcagcgagaagaagaaagaggacccaaggagagcacaagtcccacca

SEQ ID NO: 100408 - DNA, 120 bp, Artificial Sequence
  ENSG00000091986_16 (sequence is synthesized)
accagagagagtcgggtgaaggtcctgagaaaactggccgccactgcaccagctttgccccaacctccctcaacccccagagccaccacccttcctcctgccccagccacaacagtgact

SEQ ID NO: 100409 - DNA, 120 bp, Artificial Sequence
  ENSG00000091986_17 (sequence is synthesized)
cggtccacgtcccgggcggtaacagttgctgcaagacctatgaccaccactgcctttcccaccacgcagaggccctggaccccctcaccctcccacaggccccctacaaccactgaggtg

SEQ ID NO: 100410 - DNA, 120 bp, Artificial Sequence
  ENSG00000091986_18 (sequence is synthesized)
atcactgccaggagaccctcagtttcagagaatctttaccctccatcccggaaggatcagcacagggagaggccacagacaaccaggaggcccagcaaggccaccagcttggagagcttc

SEQ ID NO: 100411 - DNA, 120 bp, Artificial Sequence
  ENSG00000091986_19 (sequence is synthesized)
acaaatgcccctcccaccaccatctcagaacccagcacaagggctgctggcccaggccgtttccgggacaaccgcatggacaggcgggaacatggccaccgagacccaaatgtggtgcca

SEQ ID NO: 100412 - DNA, 120 bp, Artificial Sequence
  ENSG00000091986_20 (sequence is synthesized)
ggtcctcccaagccagcaaaggagaaacctcccaaaaagaaggcccaggacaaaattcttagtaatgagtatgaggagaagtatgacctcagccggcctactgcctctcagctggaggac

SEQ ID NO: 100413 - DNA, 120 bp, Artificial Sequence
  ENSG00000091986_21 (sequence is synthesized)
gagctgcaggtggggaatgttccccttaaaaaagcaaaggagtctaaaaagcatgaaaagcttgagaaaccagagaaggagaagaaaaaaaagatgaagaatgagaacgcagacaagtta

SEQ ID NO: 100414 - DNA, 120 bp, Artificial Sequence
  ENSG00000091986_22 (sequence is synthesized)
cttaagagtgaaaagcaaatgaagaagtctgagaaaaagagcaagcaagagaaagagaagagcaagaagaaaaaaggaggtaaaacagaacaggatggctatcagaaacccaccaacaaa

SEQ ID NO: 100415 - DNA, 120 bp, Artificial Sequence
  ENSG00000091986_23 (sequence is synthesized)
cacttcacgcagagtcccaagaagtcagtggccgacctgctggggtcctttgaaggcaaacgaagactccttctgatcactgctcccaaggctgagaacaatatgtatgtgcaacaacgt

SEQ ID NO: 100416 - DNA, 120 bp, Artificial Sequence
  ENSG00000091986_24 (sequence is synthesized)
gatgaatatctggaaagtttctgcaagatggctaccaggaaaatctctgtgatcaccatcttcggccctgtcaacaacagcaccatgaaaatcgaccactttcagctagataatgagaag

SEQ ID NO: 100417 - DNA, 120 bp, Artificial Sequence
  ENSG00000091986_25 (sequence is synthesized)
cccatgcgagtggtggatgatgaagacttggtagaccagcgtctcatcagcgagctgaggaaagagtacggaatgacctacaatgacttcttcatggtgctaacagatgtggatctgaga

SEQ ID NO: 100418 - DNA, 120 bp, Artificial Sequence
  ENSG00000091986_26 (sequence is synthesized)
gtcaagcaatactatgaggtaccaataacaatgaagtctgtgtttgatctgatcgatactttccagtcccgaatcaaagatatggagaagcagaagaaggagggcattgtttgcaaagag

SEQ ID NO: 100419 - DNA, 120 bp, Artificial Sequence
  ENSG00000091986_27 (sequence is synthesized)
gacaaaaagcagtccctggagaacttcctatccaggttccggtggaggaggaggttgctggtgatctctgctcctaacgatgaagactgggcctattcacagcagctctctgccctcagt

SEQ ID NO: 100420 - DNA, 120 bp, Artificial Sequence
  ENSG00000091986_28 (sequence is synthesized)
ggtcaggcgtgcaattttggtctgcgccacataaccattctgaagcttttaggcgttggagaggaagttgggggagtgttagaactgttcccaattaatgggagctctgttgttgagcga

SEQ ID NO: 100421 - DNA, 120 bp, Artificial Sequence
  ENSG00000091986_29 (sequence is synthesized)
gaagacgtaccagcccatttggtgaaagacattcgtaactattttcaagtgagcccggagtacttctccatgcttctagtcggaaaagacggaaatgtcaaatcctggtatccttcccca

SEQ ID NO: 100422 - DNA, 120 bp, Artificial Sequence
  ENSG00000091986_30 (sequence is synthesized)
atgtggtccatggtgattgtgtacgatttaattgattcgatgcaacttcggagacaggaaatggcgattcagcagtcactggggatgcgctgcccagaagatgagtatgcaggctatggt

SEQ ID NO: 100423 - DNA, 120 bp, Artificial Sequence
  ENSG00000091986_31 (sequence is synthesized)
taccatagttaccaccaaggataccaggatggttaccaggatgactaccgtcatcatgagagttatcaccatggatacccttactgagcagaaatatgtaaccttagactcagccagttt

SEQ ID NO: 100424 - DNA, 120 bp, Artificial Sequence
  ENSG00000091986_32 (sequence is synthesized)
cctctgcagctgctaaaactacatgtggccagctccattcttccacactgcgtactacatttcctgcctttttctttcagtgtttttctaagactaaataaatagcaaactttcacctat

SEQ ID NO: 100425 - DNA, 120 bp, Artificial Sequence
  ENSG00000091986_33 (sequence is synthesized)
tcatgagttattattgaaacctcaaatcataaagacatttaaaagaattgtttttctaactggaggggctctagtgctaaataatagtactgaaaattgatattattttccttttcttat

SEQ ID NO: 100426 - DNA, 120 bp, Artificial Sequence
  ENSG00000091986_34 (sequence is synthesized)
atgaaggaccttatttggcatataaaattttataaaatatgtatttaaagctttttcttattttttgtattaattggtaagtgaaaactctgttaaagatcacaccacaatgttttcaag

SEQ ID NO: 100427 - DNA, 120 bp, Artificial Sequence
  ENSG00000091986_35 (sequence is synthesized)
aaacatctgaaaagataaaacaaagaacaaataacttataatacttacttaaattgacactttttgaaatgccagtctgaaaataattaagatatctctgctttgtatgagtttctttta

SEQ ID NO: 100428 - DNA, 120 bp, Artificial Sequence
  ENSG00000091986_36 (sequence is synthesized)
tgaaacttgataccacgggagtccagtaatattggccacaaaagccagagaaagtaccaagcccagctttgttatcatagccacttcctgccctgcttctgttatttttagtgttttttc

SEQ ID NO: 100429 - DNA, 120 bp, Artificial Sequence
  ENSG00000091986_37 (sequence is synthesized)
agatataaatcggggtccaggaaatcctcaccagaatctggcactgcagccaaaggcgatacttccagagttctagtaggctgctatggaatttctggcatgaaaattcttgacccctca

SEQ ID NO: 100430 - DNA, 120 bp, Artificial Sequence
  ENSG00000091986_38 (sequence is synthesized)
cactttaccccctgtacagcacaggcataccatggagatattacaggatcagttccagaccaccataataaagtggatatcgcaataaagtgagtcacacaaaatttttggtttctcagt

SEQ ID NO: 100431 - DNA, 120 bp, Artificial Sequence
  ENSG00000091986_39 (sequence is synthesized)
gcatataaaagttatgtttacactctttagtagtctattaagtgtataatagctttatgtccaaaaaatgtacatgttttattttaaaaatactttattgctaaaaattgctaatgatca

SEQ ID NO: 100432 - DNA, 120 bp, Artificial Sequence
  ENSG00000091986_40 (sequence is synthesized)
taatctttttgcattgatgttgatggctgctgaatgatcagggtggtggttactgaaggttgggggtgatggtggcaatttcttaaaataagacagcaatgaagtttgccacttcgattg

SEQ ID NO: 100433 - DNA, 120 bp, Artificial Sequence
  ENSG00000091986_41 (sequence is synthesized)
actttttcttcatgaaagatttctctgcagcatgtgatgctgtatgatagcattttaccagtagtacaacttcttttgaaattggagccaatcctctcaaaccctgttgctgctttatta

SEQ ID NO: 100434 - DNA, 120 bp, Artificial Sequence
  ENSG00000091986_42 (sequence is synthesized)
atgaaatttatgtaatgttgtaaatcctttgttgtcatttcaataatgtacatagcaacttacgcgagtagattccatctcaagaaatcactttcttcgttcattcataagaagcaagtc

SEQ ID NO: 100435 - DNA, 120 bp, Artificial Sequence
  ENSG00000091986_43 (sequence is synthesized)
gtcacatcttcaggctccacttctaattccagttctcttgctatttccactatgtctatagcagagcttcctccaatgaagtcttgggcctcttaaaatcatccatgagggatggaatca

SEQ ID NO: 100436 - DNA, 120 bp, Artificial Sequence
  ENSG00000091986_44 (sequence is synthesized)
gtcttgggcctcttaaaatcatccatgagggatggaatcagtttccgaactcattgatcttcctattttgaccttctcccatgaatcacgatgttcttaacagcatctagaatggtgaat

SEQ ID NO: 100437 - DNA, 120 bp, Artificial Sequence
  ENSG00000091986_45 (sequence is synthesized)
cctttccaggtttttaatttgctttgcccagatccattagcgggatcacaatctgtgacagttatagtcttacgaaaagtgcaaatgactccttgattcctgtgctgcacaataggtatt

SEQ ID NO: 100438 - DNA, 120 bp, Artificial Sequence
  ENSG00000091986_46 (sequence is synthesized)
gtgttagcaggcacgaaaatattaatctccttgtatatctctatccaagttcttgggtgactgggtatattgtcagtgaacagctatatatatatatattatagtggtctggaactgatc

SEQ ID NO: 100439 - DNA, 62 bp, Artificial Sequence
  ENSG00000091986_47 (sequence is synthesized)
acccctgagtagctggatttacaggcgcccaccactacacccagcttatttttgtattttta

SEQ ID NO: 100440 - DNA, 63 bp, Artificial Sequence
  ENSG00000091986_48 (sequence is synthesized)
actgaacagcaatatttttaaaagattctttttttttctgagcagtaagactcaaaaagtgag

SEQ ID NO: 100441 - DNA, 120 bp, Artificial Sequence
  ENSG00000091986_49 (sequence is synthesized)
gattctttttttttctgagcagtaagactcaaaaagtgagcttaaaatgtccagtaaaccatgctgtccatagacatgctgtcattcaggctttgttgctccatttatagagcacaggca

SEQ ID NO: 100442 - DNA, 120 bp, Artificial Sequence
  ENSG00000091986_50 (sequence is synthesized)
taaaatcaccagctgcgttaacttctaacaaggagtaagcctgttggttgaagctttgaagtgaggcattgactactcctctctagatacgtaagtctgagatggcatcttcttccaata

SEQ ID NO: 100443 - DNA, 120 bp, Artificial Sequence
  ENSG00000091986_51 (sequence is synthesized)
taaggctgtttcatctcttttgaaaatctattgtttagtgtagccactttcattaattatcttaactagatcttctggataacttactgcagcttctacatcaacatttgctgctttact

SEQ ID NO: 100444 - DNA, 120 bp, Artificial Sequence
  ENSG00000091986_52 (sequence is synthesized)
ttgcacttttatggatgcacaaggcttcttttcttcaaactcatgaaccagactctgctaccttcaaactttttttctgaagcttcctcacctccctttagctttcatagaattgaagag

SEQ ID NO: 100445 - DNA, 120 bp, Artificial Sequence
  ENSG00000091986_53 (sequence is synthesized)
agttagggccttgctctgaactaggctttggcttaagggaattttgtggctggcttgatcttctattcagatgactcaaagtttctccatatcagcagtaaggctgttttacttttttat

SEQ ID NO: 100446 - DNA, 120 bp, Artificial Sequence
  ENSG00000091986_54 (sequence is synthesized)
ttccttcaagaacttttcctttgcatttacaacttggttgtttggcataagaggcttagctttcagcctgtctcagcttttgacacaccttcctcactaagcttattcatttctagcttt

SEQ ID NO: 100447 - DNA, 120 bp, Artificial Sequence
  ENSG00000091986_55 (sequence is synthesized)
cttcctcactaagcttattcatttctagcttttgatttaaagtgaaagattgcaacttcctctcacttgaaatacctggaggctattttagggttattaattgatctactttcaatattg

SEQ ID NO: 100448 - DNA, 120 bp, Artificial Sequence
  ENSG00000091986_56 (sequence is synthesized)
tgtctcagggactaaggaggcctgagaagaaggagaaagattggagaaaggttggttgttggagcaatcagaacatacacacatttattaagtttactgtgttatataagtgtggttcat

SEQ ID NO: 100449 - DNA, 120 bp, Artificial Sequence
  ENSG00000091986_57 (sequence is synthesized)
ggtgcccccagtaattataatagcaacatcaaagatcgttgactacagattttaataacagagataataatgaaacagtgtgaaatatggcaagaattaccaaaatgtgacacagagaca

SEQ ID NO: 100450 - DNA, 120 bp, Artificial Sequence
  ENSG00000091986_58 (sequence is synthesized)
taaagtgagtacatactattgcaaaaatgatgtcaacagacttccttgatgcagggttgccacaaaccttcaatttgtaaaaaatgcagtatctgagaagtataataaaataagatgtgc

SEQ ID NO: 100451 - DNA, 120 bp, Artificial Sequence
  ENSG00000091986_59 (sequence is synthesized)
ctgtacttacttgctaatggacctattaccatactggcatcttataaaaaaaattacaaggaaggagattatatccagggattctttttgttttcaaggcaaaggttaccaagttacaat

SEQ ID NO: 100452 - DNA, 120 bp, Artificial Sequence
  ENSG00000091986_60 (sequence is synthesized)
ggaccaaagtagctggaatgcaaaggagtataatccttgtctttgaaaaaagagcatttgtttcaatcatatggcatatcaaagtaaactttctcccttcctccctcctttcgttgctgc

SEQ ID NO: 100453 - DNA, 62 bp, Artificial Sequence
  ENSG00000091986_61 (sequence is synthesized)
actcagcttccctcaaacaatcctcccacctcagcatcccaagttagctgggaccacagcca

SEQ ID NO: 100454 - DNA, 120 bp, Artificial Sequence
  ENSG00000091986_62 (sequence is synthesized)
ctcccacctcagcatcccaagttagctgggaccacagccatgctccaccatgcccagccatccttgcttctttactacatttcttttttcaacaaatatttatcaagtaatattgtcaag

SEQ ID NO: 100455 - DNA, 120 bp, Artificial Sequence
  ENSG00000091986_63 (sequence is synthesized)
taatatttatgagcttcccctcagataggcatttagcatcatgatggcaccatcctctaacaataatgggaaggctattttccactgttattaatcattaattctccaaatcattttagt

SEQ ID NO: 100456 - DNA, 120 bp, Artificial Sequence
  ENSG00000091986_64 (sequence is synthesized)
attattattaattctaataagtacagagattaataaatgcattcaaaccacatgtgaatatttgctataggtttatctgtgcctactgtatgttcagatttttctttatatctgaacttt

SEQ ID NO: 100457 - DNA, 120 bp, Artificial Sequence
  ENSG00000091986_65 (sequence is synthesized)
gttataaataaatgacagtaaaaatggaatttatagttcaatgaacttgacaaatcacttattctgccattcattttccataaagaccattcattcttccttgttttacaggtaactgag

SEQ ID NO: 100458 - DNA, 120 bp, Artificial Sequence
  ENSG00000091986_66 (sequence is synthesized)
ctccagaaagctcaagtgactttagaactcagttcttagtgtgtgaattatgctcccatctcatccctcttccttgatggagcactttcctcctcattttttcttggatagtctgtacaa

SEQ ID NO: 100459 - DNA, 120 bp, Artificial Sequence
  ENSG00000091986_67 (sequence is synthesized)
gctgcctgaggtgtgcaggaaagtgagccacgtcgaagtgtactgcttttaaatttttgccaggatgaagcatagcccaaagttgccaataaaaatggatttctttacctttctgaaatt

SEQ ID NO: 100460 - DNA, 120 bp, Artificial Sequence
  ENSG00000091986_68 (sequence is synthesized)
ctttctgaaattgtgtgatgacaatttctaagtaaaggacccaaatcatgtcaacttcaggaaatataataatgagggagccaggagcagtgaggggctcacacctgtaatcccagcact

SEQ ID NO: 100461 - DNA, 70 bp, Artificial Sequence
  ENSG00000091986_69 (sequence is synthesized)
tgggtaaggtggtgtgtgtctgtggtcccagctattcaggaggctgaagtgagagaatcgcttgagccta

SEQ ID NO: 100462 - DNA, 120 bp, Artificial Sequence
  ENSG00000091986_70 (sequence is synthesized)
gctattcaggaggctgaagtgagagaatcgcttgagcctaggaggtcgaggcttcagtgtgccgtgatcgtgccacagcactccatcatcatcatcctgggtgacaaagtgagaccctgt

SEQ ID NO: 100463 - DNA, 120 bp, Artificial Sequence
  ENSG00000091986_71 (sequence is synthesized)
ctccccaccaaaaaaaagagggagtttcatctcccaagaaaatgaattagataggaataatagaaaatttactctcagaataatagggttctagctcctgcaaccaaaaaaagatagttc

SEQ ID NO: 100464 - DNA, 120 bp, Artificial Sequence
  ENSG00000091986_72 (sequence is synthesized)
ttttttacaacctgagattactttttcaagcatttctccagttccactggcattgaaataatagttagcaatgcatctgagcttttcttcctctaatgagcaggcagagaagtcatagat

SEQ ID NO: 100465 - DNA, 120 bp, Artificial Sequence
  ENSG00000091986_73 (sequence is synthesized)
catcatttggaggactataaaataagacatagcttagcaaaaggaccaaaatacattcagaggaggatgctattggtgaatgtcctcaaagcctataatctggaaaaatacaaggcatat

SEQ ID NO: 100466 - DNA, 120 bp, Artificial Sequence
  ENSG00000091986_74 (sequence is synthesized)
ctctgaaactgtgaggattagcaaactagctaacctgaatctctgtcttctggtagtataaactaggtagtttcaaatctgagtagtttctccataaaagcatttcttcccaaacgtttc

SEQ ID NO: 100467 - DNA, 120 bp, Artificial Sequence
  ENSG00000091986_75 (sequence is synthesized)
ttaccaaactcccaaataaatgagaaaaataaaatacagttttataatttttgagaaagattatgggattatggtatttaaaaagaaaagcattctgtagagttggggaaatctggaaga

SEQ ID NO: 100468 - DNA, 120 bp, Artificial Sequence
  ENSG00000091986_76 (sequence is synthesized)
ctcttgaggacatagctttgccgaaattgctggttgtcacaagactcttcaaaaactacttttcatcagacatctcccagggctctgaggtgaatattaattcagcagaaagatcctttt

SEQ ID NO: 100469 - DNA, 120 bp, Artificial Sequence
  ENSG00000091986_77 (sequence is synthesized)
ctgctacataggcaggaggtccagacacaggggagtgggtgcaacccagctggtcccattttctgtaatataattaacaatgaagctcatactttctcaacttctagaagcctggaggat

SEQ ID NO: 100470 - DNA, 120 bp, Artificial Sequence
  ENSG00000091986_78 (sequence is synthesized)
ggaagcagcccgagagtagggtgaatgatggcctcagtgggcccttcttaatgtgtctcagtactgaatgtgtggagattgtagaaaaatagaaggcccttggaaaaaacctctgttcgt

SEQ ID NO: 100471 - DNA, 120 bp, Artificial Sequence
  ENSG00000091986_79 (sequence is synthesized)
ttctctgttcgtttcgctccctgatctccctgccggattgcttttctttcctttctcttccttggctgtcctttacctcatggtgtggggtgtgcagatagcaggttgtggcttggtgag

SEQ ID NO: 100472 - DNA, 120 bp, Artificial Sequence
  ENSG00000091986_80 (sequence is synthesized)
tgctcttcacttcaggtcaaggtgaggcacagttaacatgctaactactttcctcagttctctctgagttgtgtaaagctcccgatgccagacttcctcttaattttgcacattattaaa

SEQ ID NO: 100473 - DNA, 120 bp, Artificial Sequence
  ENSG00000091986_81 (sequence is synthesized)
gtccaaagagttaagatttggtgatgaggggcaaagggccagctgtcacagaaatcaatgaaatgatacacagaaatgggtatcatgaaaaggccactggacttgggaaaactgggtgcc

SEQ ID NO: 100474 - DNA, 120 bp, Artificial Sequence
  ENSG00000091986_82 (sequence is synthesized)
tgtccttgccctgccatgtacttacctgtgtgactggaggtgagatgttttacctatgggcctcagtttctcattacaaaatgacagagaagactagatacctaagttcctaagtttgtg

SEQ ID NO: 100475 - DNA, 120 bp, Artificial Sequence
  ENSG00000091986_83 (sequence is synthesized)
acatttgtgaatttttcttggccctctgtgagtagagtgctaaatttagaggcttcctgtggttgaactgatgtccaattctcagggaacccagacttctcagttcagaacccagttcca

SEQ ID NO: 100476 - DNA, 120 bp, Artificial Sequence
  ENSG00000091986_84 (sequence is synthesized)
gatttttgtgggaatagggaaaggtattaaataactccattgaattctttcctgcataatgccctgctgtggctgagactcaatgaggtcatcacctccaacacacagaacccctcatca

SEQ ID NO: 100477 - DNA, 120 bp, Artificial Sequence
  ENSG00000091986_85 (sequence is synthesized)
tctccttacagccagactggagcttccaaggacatcaggttggcaaggattgtgagtaccctaaacatctaaagaggccctctaataagggacatatttgttcttcaacagtttcctaac

SEQ ID NO: 100478 - DNA, 120 bp, Artificial Sequence
  ENSG00000091986_86 (sequence is synthesized)
ttgagaccacaaatgcgtaatctctctaatatcctaaagcttggacaaactgggcagcccctgagcagaccgcacagagcttaaatgtcagtgctttccttccagaaagaaaaagaatgg

SEQ ID NO: 100479 - DNA, 120 bp, Artificial Sequence
  ENSG00000091986_87 (sequence is synthesized)
tcctacacctcccaatccatgggctgatacatatgccaagggagccggatgaagaagtgggtgattttaaatagctaagactgcccatgggcaaacgttctttggcttttctcctctgca

SEQ ID NO: 100480 - DNA, 120 bp, Artificial Sequence
  ENSG00000091986_88 (sequence is synthesized)
ataagtataccttcctctctcctggtccttttctcctttcccaggcccctctatcaataataattctggctctcagatgactacagttgattaggtggaactgataggataaaggtgaca

SEQ ID NO: 100481 - DNA, 120 bp, Artificial Sequence
  ENSG00000091986_89 (sequence is synthesized)
cccttcccaaggctatctataatgcaaaaagatatccaagaaaaagagaggtagggaacaccttgggaaaccatttctggaagacagccagtccctgctgtagacaagcctcattttcct

SEQ ID NO: 100482 - DNA, 120 bp, Artificial Sequence
  ENSG00000091986_90 (sequence is synthesized)
tcccccaaatgttaaagagtaaattcctcctgtagccttagctctcttttctatctttggcttgctttttatgaactatctttagagtgccaaattagaacagggtaggcagaggcagga

SEQ ID NO: 100483 - DNA, 120 bp, Artificial Sequence
  ENSG00000091986_91 (sequence is synthesized)
atatgcccaaatttgggaagacctggttgggaatagtcgaaagccttgatatgtgcaaagaaagaaccatttgatcaacccagttcttaatacaggatactaacttaaaatttagactca

SEQ ID NO: 100484 - DNA, 120 bp, Artificial Sequence
  ENSG00000091986_92 (sequence is synthesized)
agttatacgataattcaaacatttattgtatttatactattctatatgtacttttccaggaaccaggaatacaaaactgacatttctctgtacagaggctcagactagtagagaacagtt

SEQ ID NO: 100485 - DNA, 120 bp, Artificial Sequence
  ENSG00000091986_93 (sequence is synthesized)
aggtacgccgttaattataaactaatatgtatcatcaattatgggtttttatgggggtttggcaggtggaagggaccagggagagatgatgagtgatgatggttatgtagtctttaggag

SEQ ID NO: 100486 - DNA, 120 bp, Artificial Sequence
  ENSG00000091986_94 (sequence is synthesized)
gatgcaattataacattgctcttcctttcacgcaccacatgatttagcaagtacttcatattggctccaccattaacatggtcaatggcttctggatactcacagttcaggcacagtttc

SEQ ID NO: 100487 - DNA, 120 bp, Artificial Sequence
  ENSG00000091986_95 (sequence is synthesized)
tcctgaagattttttacctctcccatctttaagaaattgtctggatgtccatgaaagatgctgacacttgtattaattcattaaaaaacaccaccccctccctgaaataaactaaaaagt

SEQ ID NO: 100488 - DNA, 120 bp, Artificial Sequence
  ENSG00000091986_96 (sequence is synthesized)
aatgaattcatagaaaaaaatttcaccaagattgaaactagagaatatacctagacttgcactttgagctttgagaaatgtgtacctattcaccattccaacgtgaagaagctctgcagt

SEQ ID NO: 100489 - DNA, 120 bp, Artificial Sequence
  ENSG00000091986_97 (sequence is synthesized)
aggaaaaataattaacacacttatagtctactgcccatgtaaggatcagctccggctaagaggccaaagatgggtgacatcgttatgctctgcctttattttttctttcttacccactta

SEQ ID NO: 100490 - DNA, 120 bp, Artificial Sequence
  ENSG00000091986_98 (sequence is synthesized)
gcttcctaattggaggaaggaggcgtggtaaaggtatatgaagactatggtttaattagaccagaaaacactgtcataatctctggggtcatcagaatgtccagttttgtctttgggcca

SEQ ID NO: 100491 - DNA, 120 bp, Artificial Sequence
  ENSG00000091986_99 (sequence is synthesized)
agataagggcagtgggatttatgatgtgttgtttatagtctgaaactactctggtgatcaccagggtcagtttctttaatgatggtttccaactggcctaatacattaagtaagactggc

SEQ ID NO: 100492 - DNA, 120 bp, Artificial Sequence
  ENSG00000091986_100 (sequence is synthesized)
tgataacatgaccagacagacataaagaccctgttgggaatgacattgaactctcaaagtcaagatttcttacacaaatctatcagctggagaaaatgaaggcagtgtggtatatgtgtg

SEQ ID NO: 100493 - DNA, 120 bp, Artificial Sequence
  ENSG00000091986_101 (sequence is synthesized)
caaataaggacattatgaagcttaaatatggaatgtctcttggacccccgatgtcatctgtattctctttttcttcttgtactatatcctttgcctgtaaataaaaggtttatttgatta

SEQ ID NO: 100494 - DNA, 120 bp, Artificial Sequence
  ENSG00000091986_102 (sequence is synthesized)
attaagatgctgaaatgtaacttgagggcaataagaaaactgttgaggaatttgccacaggaatgaaacactgatattttaggaaaattatagtgatggccactggaggatggattagag

SEQ ID NO: 100495 - DNA, 120 bp, Artificial Sequence
  ENSG00000091986_103 (sequence is synthesized)
aggatgagtctgttggctggaagaccaactggaacatattgccctggcttctgatttcatgacaaattggcatggtaatacttaatacttaacagttgcagaaaaatagaaagatctaaa

SEQ ID NO: 100496 - DNA, 120 bp, Artificial Sequence
  ENSG00000091986_104 (sequence is synthesized)
gaagttacaacagaaaaactacaggagtgtagcaatgcagtttaatggctttgagaagcatgggacagttctctgtttttttctttttttttttctgggcacagaaaaaaattgctagcc

SEQ ID NO: 100497 - DNA, 120 bp, Artificial Sequence
  ENSG00000092009_0 (sequence is synthesized)
agcatttgctcaggcagcctctctgggaagatgctgcttcttcctctccccctgctgctctttctcttgtgctccagagctgaagctggggagatcatcgggggcacagaatgcaagcca

SEQ ID NO: 100498 - DNA, 120 bp, Artificial Sequence
  ENSG00000092009_1 (sequence is synthesized)
cattcccgcccctacatggcctacctggaaattgtaacttccaacggtccctcaaaattttgtggtggtttccttataagacggaactttgtgctgacggctgctcattgtgcaggaagg

SEQ ID NO: 100499 - DNA, 120 bp, Artificial Sequence
  ENSG00000092009_2 (sequence is synthesized)
tctataacagtcacccttggagcccataacataacagaggaagaagacacatggcagaagcttgaggttataaagcaattccgtcatccaaaatataacacttctactcttcaccacgat

SEQ ID NO: 100500 - DNA, 120 bp, Artificial Sequence
  ENSG00000092009_3 (sequence is synthesized)
tgtgccgggtggctggctggggaagaacaggtgtgttgaagccgggctcagacactctgcaagaggtgaagctgagactcatggatccccaggcctgcagccacttcagagactttgacc

SEQ ID NO: 100501 - DNA, 120 bp, Artificial Sequence
  ENSG00000092009_4 (sequence is synthesized)
acaatcttcagctgtgtgtgggcaatcccaggaagacaaaatctgcatttaagggagactctgggggccctcttctgtgtgctggggtggcccagggcatcgtatcctatggacggtcgg

SEQ ID NO: 100502 - DNA, 120 bp, Artificial Sequence
  ENSG00000092009_5 (sequence is synthesized)
atgcaaagccccctgctgtcttcacccgaatctcccattaccggccctggatcaaccagatcctgcaggcaaattaatcctggatcctgagccagcctgaaagggaagctggaactggac

SEQ ID NO: 100503 - DNA, 120 bp, Artificial Sequence
  ENSG00000092009_6 (sequence is synthesized)
ctgagcagcaaagtgtgtgccactcattctggtctacccttggtccctcagccacaaccctaagcctccagaagtatcctacaggtcacagaactctcaataaacctcagtgaagacaca

SEQ ID NO: 100504 - DNA, 120 bp, Artificial Sequence
  ENSG00000092010_0 (sequence is synthesized)
accgctttcgctttcccttcgcggtgcccactccactccttgtgcggcgctaggccccccgtcccggtcatggccatgctcagggtccagcccgaggcccaagccaaggtggatgtgttt

SEQ ID NO: 100505 - DNA, 120 bp, Artificial Sequence
  ENSG00000092010_1 (sequence is synthesized)
cgtgaagacctctgtaccaagacagagaacctgctcgggagctatttccccaagaagatttctgagctggatgcatttttaaaggagccagctctcaatgaagccaacttgagcaatctg

SEQ ID NO: 100506 - DNA, 120 bp, Artificial Sequence
  ENSG00000092010_2 (sequence is synthesized)
aaggccccattggacatcccagtgcctgatccagtcaaggagaaagagaaagaggagcggaagaaacagcaggagaaggaagacaaggatgaaaagaagaagggggaggatgaagacaaa

SEQ ID NO: 100507 - DNA, 120 bp, Artificial Sequence
  ENSG00000092010_3 (sequence is synthesized)
ggtcctccctgtggcccagtgaactgcaatgaaaagatcgtggtccttctgcagcgcttgaagcctgagatcaaggatgtcattgagcagctcaacctggtcaccacctggttgcagctg

SEQ ID NO: 100508 - DNA, 120 bp, Artificial Sequence
  ENSG00000092010_4 (sequence is synthesized)
acctcggattgaggatggtaacaattttggagtggctgtccaggagaaggtgtttgagctgatgaccagcctccacaccaagctagaaggcttccacactcaaatctctaagtatttctc

SEQ ID NO: 100509 - DNA, 120 bp, Artificial Sequence
  ENSG00000092010_5 (sequence is synthesized)
tgagcgtggtgatgcagtgactaaagcagccaagcagccccatgtgggtgattatcggcagctggtgcacgagctggatgaggcagagtaccgggacatccggctgatggtcatggagat

SEQ ID NO: 100510 - DNA, 120 bp, Artificial Sequence
  ENSG00000092010_6 (sequence is synthesized)
ccgcaatgcttatgctgtgttatatgacatcatcctgaagaacttcgagaagctcaagaagcccaggggagaaacaaagggaatgatctattgagagccctctctcccattctgtgatga

SEQ ID NO: 100511 - DNA, 120 bp, Artificial Sequence
  ENSG00000092010_7 (sequence is synthesized)
gtacagcagagaccttcctgctttttactggggactccagattttccccaaacttgcttctgttgagatttttccctcaccttgcctctcaggcacaataaatatagttataccactgcc

SEQ ID NO: 100512 - DNA, 120 bp, Artificial Sequence
  ENSG00000092010_8 (sequence is synthesized)
gaagacctctgtaccaaggtaagacatgccccatcagcgtggccccacccctgcccaactcctactgctcaaccctgcctcactacctaggacgggcatttgatgctgactcccatcctc

SEQ ID NO: 100513 - DNA, 120 bp, Artificial Sequence
  ENSG00000092010_9 (sequence is synthesized)
ctccacccccacctcacacacagacagagaacctgctcgggagctatttccccaagaagatttctgagctggatgcatttttaaaggtaccgcggctgggcagggagctagggagtaaag

SEQ ID NO: 100514 - DNA, 120 bp, Artificial Sequence
  ENSG00000092010_10 (sequence is synthesized)
tgctttttttccctaggagaaggtgtttgagctgatgaccagcctccacaccaagctagaaggcttccacactcaaatctctaagtgagtgaccacccatgtgcacactgtttttgtttt

SEQ ID NO: 100515 - DNA, 120 bp, Artificial Sequence
  ENSG00000092010_11 (sequence is synthesized)
actccttgtgcggcgctaggccccccgtcccggtcatggccatgctcagggtccagcccgaggcccaagccaaggtcaggccctacataaccctaagggaactgtcctcaaatgaactgg

SEQ ID NO: 100516 - DNA, 120 bp, Artificial Sequence
  ENSG00000092010_12 (sequence is synthesized)
ccaggaaggcggagctgggtgcgagcgccctaccgctttcgctttcccttcgcggtgcccactccactccttgtgcggcgctaggccccccgtcccggtcatggccatgctcagggtcca

SEQ ID NO: 100517 - DNA, 120 bp, Artificial Sequence
  ENSG00000092010_13 (sequence is synthesized)
ccaggccacccactccctgaccctgcaggctaggggttaagggtgacaaagctcagcttctccacaaggctagaaatggggcacagagccactggaggcctctgactgacctctactccc

SEQ ID NO: 100518 - DNA, 120 bp, Artificial Sequence
  ENSG00000092020_0 (sequence is synthesized)
ctaatgaactcctgggtcacgtggtgcgcacgcgccaaaggcacacgataaaggaaaacgcgggcttatcgtggcctttaaaatccggcttggtgagcttgggtcgcctctgaaggagaa

SEQ ID NO: 100519 - DNA, 120 bp, Artificial Sequence
  ENSG00000092020_1 (sequence is synthesized)
ccattttccatctctttcatagttttttcccccagtcagcgtggtagcggtattctccgcggcagtgacagtaattgtttttgcctctttagccaagacttccgccctcgatcaagatgg

SEQ ID NO: 100520 - DNA, 120 bp, Artificial Sequence
  ENSG00000092020_2 (sequence is synthesized)
tggttggacggccttcctaacctttacggggcctggcggtgctgacgcctgagctggtaggggtggagcaggtaggaaacagcaaatgcagaagctgctgcgcggaagtcggccatggac

SEQ ID NO: 100521 - DNA, 120 bp, Artificial Sequence
  ENSG00000092020_3 (sequence is synthesized)
tggaaagaagttcttcgtcggcgcctagcgacgcccaacacctgtccaaacaaaaaaaaaagtgaacaagaattaaaagatgaagaaatggatttatttacaaaatattactccgaatgg

SEQ ID NO: 100522 - DNA, 120 bp, Artificial Sequence
  ENSG00000092020_4 (sequence is synthesized)
aaaggaggtagaaaaaacacaaatgaattctataagaccattccccggttttattataggctgcctgctgaagatgaagtcttactacagaaattaagagaggaatcaagagctgtcttt

SEQ ID NO: 100523 - DNA, 120 bp, Artificial Sequence
  ENSG00000092020_5 (sequence is synthesized)
ctacaaagaaaaagcagagaactgttagataatgaagaattacagaacttatggtttttgctggacaaacaccagacaccacctatgattggagaggaagcgatgatcaattacgaaaac

SEQ ID NO: 100524 - DNA, 120 bp, Artificial Sequence
  ENSG00000092020_6 (sequence is synthesized)
tttttgaaggttggtgaaaaggctggagcaaagtgcaagcaatttttcacagcaaaagtctttgctaaactccttcatacagattcatatggaagaatttccatcatgcagttctttaat

SEQ ID NO: 100525 - DNA, 120 bp, Artificial Sequence
  ENSG00000092020_7 (sequence is synthesized)
ggactcagtttatatgatgtcgctgggcaggggtaccttcgggaatctgatttagaaaactacatattggaacttatccctacgttgccacaattagatggtctggaaaaatctttctac

SEQ ID NO: 100526 - DNA, 120 bp, Artificial Sequence
  ENSG00000092020_8 (sequence is synthesized)
tccttttatgtttgtacagcagttaggaagttcttcttctttttagatcctttaagaacaggaaagataaaaattcaagatattttagcatgcagcttcctagatgatttattggagcta

SEQ ID NO: 100527 - DNA, 120 bp, Artificial Sequence
  ENSG00000092020_9 (sequence is synthesized)
agggatgaggaactgtccaaggagagtcaagaaacaaattggttttctgctccttctgccctaagagtttatggccagtacttgaatcttgataaagatcacaatggcatgctcagtaaa

SEQ ID NO: 100528 - DNA, 120 bp, Artificial Sequence
  ENSG00000092020_10 (sequence is synthesized)
gaagaactctcacgctatggaacagctaccatgaccaatgtcttcttagaccgtgttttccaggagtgtctcacttatgatggagaaatggactataagacctacttggactttgtcctt

SEQ ID NO: 100529 - DNA, 120 bp, Artificial Sequence
  ENSG00000092020_11 (sequence is synthesized)
gcattagaaaacagaaaggaacctgcagctctacaatatattttcaaactgcttgatattgagaacaaaggatacctgaatgtcttttcacttaattatttctttagggccatacaggaa

SEQ ID NO: 100530 - DNA, 120 bp, Artificial Sequence
  ENSG00000092020_12 (sequence is synthesized)
ctaatgaaaatccatggacaagatcctgtttcatttcaagatgtcaaggatgaaatctttgacatggtaaaaccaaaggatcctttgaaaatctctcttcaggatttaatcaacagtaat

SEQ ID NO: 100531 - DNA, 120 bp, Artificial Sequence
  ENSG00000092020_13 (sequence is synthesized)
caaggagacacagtaaccaccattctaatcgatttgaatggcttctggacttacgagaacagagaggctcttgttgcaaatgacagtgaaaactctgcagaccttgatgatacatgatct

SEQ ID NO: 100532 - DNA, 120 bp, Artificial Sequence
  ENSG00000092020_14 (sequence is synthesized)
ctgaaagactagactgtcttatattatgagatacttgaatgctgcatgtaaagcctttaaagcaaaatcctcagaaatggtctaaataaaacacttgatatgcctagagaacacagcaaa

SEQ ID NO: 100533 - DNA, 120 bp, Artificial Sequence
  ENSG00000092020_15 (sequence is synthesized)
gctgcctgctgaagatgaagtcttactacagaaattaagagaggaatcaagagctgtctttctacaaagaaaaagcagagaactgttagataatgaagaattacagacaccacctatgat

SEQ ID NO: 100534 - DNA, 120 bp, Artificial Sequence
  ENSG00000092020_16 (sequence is synthesized)
taagagaggaatcaagagctgtctttctacaaagaaaaagcagagaactgttagataatgaagaattacaggtaagaacaaagcaaaaagttgctttagatgttaaccatttctcatttg

SEQ ID NO: 100535 - DNA, 120 bp, Artificial Sequence
  ENSG00000092020_17 (sequence is synthesized)
gaagcagcagttcccaccagaagcagccgctgagtttgcatgggtcatgtaccccaaacatagtgttgtttgttatttttgtttaaggccctaggtgattctaatgtgcagccaaggttg

SEQ ID NO: 100536 - DNA, 120 bp, Artificial Sequence
  ENSG00000092020_18 (sequence is synthesized)
agaaccactgctgtagggtcagactacagaggttcaaatcccagccctgctatatgactttaggcaatggacttaacatctctgtgcttcgattatcatctctaaagtagggatagctaa

SEQ ID NO: 100537 - DNA, 120 bp, Artificial Sequence
  ENSG00000092020_19 (sequence is synthesized)
ctatatcatagagatgtggattaaagaggcagtgtatatcaaaagcttagtaggcactcaataaatgttatttttattgttagtaatcaaaaggataatagggcatgagattcatcttaa

SEQ ID NO: 100538 - DNA, 120 bp, Artificial Sequence
  ENSG00000092020_20 (sequence is synthesized)
tattgactctgccaacaaactctcattttagtggaaagcacacatttaactacatattaaaatcttgttgtttttaacttacaacatcttcacttccacaattctcttaagaacttatgg

SEQ ID NO: 100539 - DNA, 120 bp, Artificial Sequence
  ENSG00000092020_21 (sequence is synthesized)
cggcgaggaaaaaaggcagttttgaagcatttagtggcaaaaggggtaggagacggctgctgaagtgtctactacattcaggggacctggaaggcttccagatatccgcaatgaacaatg

SEQ ID NO: 100540 - DNA, 120 bp, Artificial Sequence
  ENSG00000092020_22 (sequence is synthesized)
attaaaaatttggtgaatttcaaggagataaaaaggtagaaaaaacagtagcagtactttggttatgtttatctgaagatcttttatgatttacttgcactgaccataacctgctgtgtg

SEQ ID NO: 100541 - DNA, 120 bp, Artificial Sequence
  ENSG00000092020_23 (sequence is synthesized)
acagatggggggacatcacctaacagtgaagaagtatgaactgggtagtcagtcataaatacctccttccagttctaggaagccagttatttgcatataatttgctgtctctgctgtgtg

SEQ ID NO: 100542 - DNA, 120 bp, Artificial Sequence
  ENSG00000092020_24 (sequence is synthesized)
acatactgcagaattattctctttttgatgaaaaatatgtatttggaaatatgagagccatttagccagtgatgcatatttttcttattctctataaggatcggattggtaaatatggcc

SEQ ID NO: 100543 - DNA, 120 bp, Artificial Sequence
  ENSG00000092020_25 (sequence is synthesized)
tcattaacagtttgttttattaactgttcaaacctgcccagacttaactacatgtaactggagcagaggaaaggacagagaaggtccaaatcaaagtgcctgattgtccttctgtccttg

SEQ ID NO: 100544 - DNA, 120 bp, Artificial Sequence
  ENSG00000092020_26 (sequence is synthesized)
agaagctgctgcgcggaagtcggccatggactggaaagaagttcttcgtcggcgcctagcgacgcccaacacctgtccaaacaaaatttaccttgtattttcagctgcctgctgaagatg

SEQ ID NO: 100545 - DNA, 120 bp, Artificial Sequence
  ENSG00000092020_27 (sequence is synthesized)
atgcagaagctgctgcgcggaagtcggccatggactggaaagaagttcttcgtcggcgcctagcgacgcccaacacctgtccaaacagtagagaaacagtgattatgaggctgaaactcc

SEQ ID NO: 100546 - DNA, 120 bp, Artificial Sequence
  ENSG00000092020_28 (sequence is synthesized)
ttgcattagaaaacagaaaggaacctgcagctctacaatatattttcaaactgcttgatattgagaacaaaggatacctgaatgtcttttcacttaattatttctttaggatttatttct

SEQ ID NO: 100547 - DNA, 120 bp, Artificial Sequence
  ENSG00000092020_29 (sequence is synthesized)
ttactgtgcttgaactccttatctgggaatcaagtaggtttttggtctgtgcttttataagtatttcttctatgtgaaatcactctaagtttgaatagtagaatttcttatcttttgacc

SEQ ID NO: 100548 - DNA, 120 bp, Artificial Sequence
  ENSG00000092020_30 (sequence is synthesized)
aagatgtgttacataaacttgggttagcataaaaaaacaaaaattttttaaaccctcatgtgtcttaaagataatagtagactagaaatattaagagctgaaccaagagttttaatgtat

SEQ ID NO: 100549 - DNA, 120 bp, Artificial Sequence
  ENSG00000092020_31 (sequence is synthesized)
ggtaatttgaaataattttaatttactgataattttattttaccagtatattacaagttgagttgactgatagtttcaaacccaaagctgtaatatcagtttcaaggagcatcaattaaa

SEQ ID NO: 100550 - DNA, 120 bp, Artificial Sequence
  ENSG00000092020_32 (sequence is synthesized)
cagcttggacttatgattcctacaagtgccataataatctgtgaaagcctattgtatacaatctttaataattggttgctgtaattaacctcagaaataaaagcagcttcactgaaggca

SEQ ID NO: 100551 - DNA, 120 bp, Artificial Sequence
  ENSG00000092036_0 (sequence is synthesized)
gccccgcctccacctccttcgtcgcggcctctagtgcactttcggctccttccccttcccgggcctttcagcttggtctttccgggcctcgcttcccccagcccctgcgcccggcccgaa

SEQ ID NO: 100552 - DNA, 120 bp, Artificial Sequence
  ENSG00000092036_1 (sequence is synthesized)
cgagaggttccggagccccggcgcgggcgggttctggggtgtagacgctgctggccagcccgccccagccgaggttctcggcaccgccttgagagcttcagctgccccaggattagaatc

SEQ ID NO: 100553 - DNA, 120 bp, Artificial Sequence
  ENSG00000092036_2 (sequence is synthesized)
ccaagaaaatcaaatggcatccggggatttctgctcacctggagaagggatggaaatacttcaacaagtgtgcagcaaacaacttcctccttgtaacctgagtaaagaggacctgttaca

SEQ ID NO: 100554 - DNA, 120 bp, Artificial Sequence
  ENSG00000092036_3 (sequence is synthesized)
gaacccatacttcagcaagcttctcctgaatctctcacagcatgtggatgagagtggcttaagcctcaccctagcaaaggagcaggctcaggcatggaaggaagttcgactgcataagac

SEQ ID NO: 100555 - DNA, 120 bp, Artificial Sequence
  ENSG00000092036_4 (sequence is synthesized)
aacatggttgaggtctgagattttacacagagtcattcaagagttgcttgtggactactatgtgaagatacaagacacaaatgtaacttctgaggacaaaaagtttcatgagacccttga

SEQ ID NO: 100556 - DNA, 120 bp, Artificial Sequence
  ENSG00000092036_5 (sequence is synthesized)
acagcggctgcttgtaactgaactgatgcggctcttaggtcctagccaggagagggagatacctccactgctggggctggagaaagcggaccttctggaactcatgccactctcagagga

SEQ ID NO: 100557 - DNA, 120 bp, Artificial Sequence
  ENSG00000092036_6 (sequence is synthesized)
gatcccaattcagatgctgacagtgaaaccgtgaaggcagcaaaggtgtggaaactcgcagaggtcctggtgggtgagcagcagcagtgccaggatgccaagagccagcagaaggagcag

SEQ ID NO: 100558 - DNA, 120 bp, Artificial Sequence
  ENSG00000092036_7 (sequence is synthesized)
atgttgctgctggagaagaagagtgctgcttactcccaggtgcttctccgctgcctcactttgctgcagaggcttcttcaagaacaccggctgaagactcaatccgagctagaccgcatc

SEQ ID NO: 100559 - DNA, 120 bp, Artificial Sequence
  ENSG00000092036_8 (sequence is synthesized)
aatgcccagtacctggaagtcaagtgcggtgctatgatccttaagctgaggatggaggagctaaagattttgtccgacacttacactgttgagaaagtggaagttcatcgtctgattagg

SEQ ID NO: 100560 - DNA, 120 bp, Artificial Sequence
  ENSG00000092036_9 (sequence is synthesized)
gaccgtttggagggagccattcacctacaggagcaggacatggagaactcaagacaggtcctgaactcctatgaggtccttggggaggagtttgacaggctggtgaaagagtacaccgta

SEQ ID NO: 100561 - DNA, 120 bp, Artificial Sequence
  ENSG00000092036_10 (sequence is synthesized)
ctcaagcaggcaacagagaacaagcggtgggccctccaggagttcagcaaggtctaccgttgagctctggcagggccaggagacatggcttctgcatagctgctgcctcctaatcttcct

SEQ ID NO: 100562 - DNA, 120 bp, Artificial Sequence
  ENSG00000092036_11 (sequence is synthesized)
gctagtgggaccaccttcacctggggctgccttcagtacaagggagtgtggaaatgcttacgcttgaaacactgcagtcatttaggcactctcctggtttctctttattttttatgactg

SEQ ID NO: 100563 - DNA, 120 bp, Artificial Sequence
  ENSG00000092036_12 (sequence is synthesized)
ggcctcttctggaaaatctagcaaggagatttatataatttttatgcatagctgtgtgtcagtgtcagccctgtattgtatttgattatctcctgaataaagttatgatattatatctta

SEQ ID NO: 100564 - DNA, 120 bp, Artificial Sequence
  ENSG00000092036_13 (sequence is synthesized)
gcgggcggagcttcggggaagaggagctctgggagagtcattccggccagtggccggagaccgtcgtcgctcttgggaatccttggccgcccagacagaagggaagtaggcgccggagag

SEQ ID NO: 100565 - DNA, 120 bp, Artificial Sequence
  ENSG00000092036_14 (sequence is synthesized)
ccttggcctcccaaagtgctaggattgcaggcgtaagccaccatgctcagcccagaatggggccatttttaatagattattagaagaaaacctgtcataaggcaggatttgtgggtctag

SEQ ID NO: 100566 - DNA, 120 bp, Artificial Sequence
  ENSG00000092036_15 (sequence is synthesized)
atcagggcatgggacagcccctttcctttatcctgaccccaggagcacttttggggaagacaaagattcctgatctaccctcctttctactatctttatttatgccctcttcttcctcca

SEQ ID NO: 100567 - DNA, 120 bp, Artificial Sequence
  ENSG00000092036_16 (sequence is synthesized)
tgtggatgagggctcggctacagcaagaagtagaggagcagctcaaaaagaaatgtttcactctgctctgctactatgatcccaattcaggtgcttctccgctgcctcactttgctgcag

SEQ ID NO: 100568 - DNA, 120 bp, Artificial Sequence
  ENSG00000092036_17 (sequence is synthesized)
ctctatcccttaccctaatctctttcctctcccttatcctagcgccttgtgggtatccagtaaatgtcacatagcagtattagcttttggattacccaaaagctttcaacatccttgaga

SEQ ID NO: 100569 - DNA, 120 bp, Artificial Sequence
  ENSG00000092036_18 (sequence is synthesized)
cttttcttttacagtcttctgaaataggcactttactgtgagatcaattgctcgggaattcagagtgaccttgtttatcctatcagtgcttagcccacaccttgaccgtcggcaggtact

SEQ ID NO: 100570 - DNA, 120 bp, Artificial Sequence
  ENSG00000092051_0 (sequence is synthesized)
agtgcatctccttctcctctctgcctgcctcctccctcaccgaagggttagcggacacccatccttttctgcttggggaccccaccaccacccgcaacactgccgctgtctcttcttcac

SEQ ID NO: 100571 - DNA, 120 bp, Artificial Sequence
  ENSG00000092051_1 (sequence is synthesized)
cgtatccttctctacccaccctcttctctcttctcttctccctgcccctttaaatctgcctggcccagcctcccccgtgatgctgggatggagcaaacattgatttgtgctgggatggaa

SEQ ID NO: 100572 - DNA, 120 bp, Artificial Sequence
  ENSG00000092051_2 (sequence is synthesized)
tcggaattttgatttatttttcctctcccaaccataagaagaaaaaaataataaaaacaccccctcttgagagccccctccccctttgcatccagctcccagctcttcttccctatctcc

SEQ ID NO: 100573 - DNA, 120 bp, Artificial Sequence
  ENSG00000092051_3 (sequence is synthesized)
atccaaggcagattttttcccctacactattctcatcttcccccacccttgccactacctcgcccccccacccagcctgctcctccagctggggagagaggggactctccggactccccc

SEQ ID NO: 100574 - DNA, 120 bp, Artificial Sequence
  ENSG00000092051_4 (sequence is synthesized)
acctttcctctctgggttggagcagtctctccggaaggggagggggcttggcttgtccgggcgaggtgggagtggaggtatcctgccatggatgctgtgccggggaggcagcctgagccc

SEQ ID NO: 100575 - DNA, 120 bp, Artificial Sequence
  ENSG00000092051_5 (sequence is synthesized)
tggatgctgtgccggggaggcagcctgagccccagcccacatgccactcaggatgagggtccggccctgcctgccctcgctggggcccccccgcccggccccggtctaactgcccccgcc

SEQ ID NO: 100576 - DNA, 120 bp, Artificial Sequence
  ENSG00000092051_6 (sequence is synthesized)
aggctctccagtcccaggatgcgctgagccgccggggggctgaggccgcgccaactacatgcatgtcccccgggggcaagttcgactttgacgacgggggctgctacgtggggggctggg

SEQ ID NO: 100577 - DNA, 120 bp, Artificial Sequence
  ENSG00000092051_7 (sequence is synthesized)
aggcggggcgggcacatggctacggcgtgtgcacgggccccggcgcccagggcgagtacagcggctgctgggcacacggcttcgagtcactgggcgtcttcacggggcccggcggacaca

SEQ ID NO: 100578 - DNA, 120 bp, Artificial Sequence
  ENSG00000092051_8 (sequence is synthesized)
gctaccagggccactggcagcagggcaagcgcgaagggctgggcgtggagcgcaagagccgctggacgtaccgcggcgagtggctgggcgggctgaaggggcgcagcggcgtgtgggaaa

SEQ ID NO: 100579 - DNA, 120 bp, Artificial Sequence
  ENSG00000092051_9 (sequence is synthesized)
gcgtgtccggcctgcgctacgccgggctctggaaggacggtttccaggacggctacggcactgagacctactccgacggaggcacctaccagggccagtggcaggccgggaagcgccacg

SEQ ID NO: 100580 - DNA, 120 bp, Artificial Sequence
  ENSG00000092051_10 (sequence is synthesized)
gctacggggtacgccagagtgtgccctaccatcaggcggcgctgctgcgctcgccccgccgcacctccctggattccggccacagcgaccccccgacgccacccccgcccctgcccttgc

SEQ ID NO: 100581 - DNA, 120 bp, Artificial Sequence
  ENSG00000092051_11 (sequence is synthesized)
gagggaggcagccccgcctcgggctcccggggcggcttcgtgctggccgggcccggggacgccgacggcgcgtcgtcccgaaagcgcactccggcggccggcggattctttcgccgttcg

SEQ ID NO: 100582 - DNA, 120 bp, Artificial Sequence
  ENSG00000092051_12 (sequence is synthesized)
gccgttcgctgctgctcagcgggctccgagcgggcggacgtcgcagctccctgggcagcaagcgaggctccctgcgcagcgaggtgagcagcgaggtgggcagcaccggaccgcccggct

SEQ ID NO: 100583 - DNA, 120 bp, Artificial Sequence
  ENSG00000092051_13 (sequence is synthesized)
ggctcggaggccagcgggcccccggccgcagcgccgcccgccctcatcgagggctcggccacagaggtgtacgcgggcgagtggcgcgcagatcggcgcagcggcttcggcgtcagccag

SEQ ID NO: 100584 - DNA, 120 bp, Artificial Sequence
  ENSG00000092051_14 (sequence is synthesized)
ccaacgggctgcgctacgagggcgagtggctgggcaaccggcggcacggctacgggcgcaccacccgccccgacggctcccgcgaggagggcaagtacaagcgcaaccggctggtgcacg

SEQ ID NO: 100585 - DNA, 120 bp, Artificial Sequence
  ENSG00000092051_15 (sequence is synthesized)
gcgggcgcgtccgcagtctcctgcctctggcccttcggcggggcaaggttaaggagaaggtggacagggctgtcgagggcgcccgtcgagccgtgagtgctgcccgtcagcgccaggaga

SEQ ID NO: 100586 - DNA, 120 bp, Artificial Sequence
  ENSG00000092051_16 (sequence is synthesized)
tcgccgctgccagggcagcagacgccctcctaaaggcagtggcagccagcagtgtcgctgagaaggccgtggaggcagctcgaatggccaaactgatagcccaggacctgcagcccatgc

SEQ ID NO: 100587 - DNA, 120 bp, Artificial Sequence
  ENSG00000092051_17 (sequence is synthesized)
gacagccctggggtatatgagaacggactgaccccctcagagggatcccctgaactgcccagcagtcctgcctcctcccgccaaccctggcgaccccctgcctgccggagcccactgcct

SEQ ID NO: 100588 - DNA, 120 bp, Artificial Sequence
  ENSG00000092051_18 (sequence is synthesized)
cctggaggggaccagggtcccttctccagccccaaagcttggcctgaggagtgggggggggcaggcgcacaggcagaggaactagctggctatgaggctgaggatgaggctgggatgcaa

SEQ ID NO: 100589 - DNA, 120 bp, Artificial Sequence
  ENSG00000092051_19 (sequence is synthesized)
gggccagggcccagagacggttccccactcctcggaggctgcagcgacagttcaggaagtcttcgagaggaggagggggaggatgaagagcccctgcccccgctgagggccccagcaggc

SEQ ID NO: 100590 - DNA, 120 bp, Artificial Sequence
  ENSG00000092051_20 (sequence is synthesized)
acggagcctgagcccatcgccatgctggtcctgaggggctcgtcctcgaggggtcctgatgctgggtgcctgacagaagagctcggggagcccgctgcaaccgagaggcctgcccagccg

SEQ ID NO: 100591 - DNA, 120 bp, Artificial Sequence
  ENSG00000092051_21 (sequence is synthesized)
ggagctgccaaccccctggtggtgggagccgtggccctcctggacctcagcctggcattcctgttctcccagctcctcacctgaggctacttcctggcctggttctggctttggttgcgt

SEQ ID NO: 100592 - DNA, 120 bp, Artificial Sequence
  ENSG00000092051_22 (sequence is synthesized)
gcctcttcacccctttgacctgccttttttctcttctcctcttcctggctgtgttttctcctatctttctttctcttcttcctttcttttctgtgctcctttgtttttttctctcgcttt

SEQ ID NO: 100593 - DNA, 120 bp, Artificial Sequence
  ENSG00000092051_23 (sequence is synthesized)
ttctttccctgtcttctttcagattatctcatttcttctggatctgtctctgtattcctcactcccttccccatcccaaccccttctttctctagattgtttacatatgaagggcttttc

SEQ ID NO: 100594 - DNA, 120 bp, Artificial Sequence
  ENSG00000092051_24 (sequence is synthesized)
tctctcagagttgctgtcttctctgagacacacaaatctaagtcagaccattgctccacgccctcccaccttttctttagacctcaacttcgctgcgggtgggggtttggtgtcctaagg

SEQ ID NO: 100595 - DNA, 120 bp, Artificial Sequence
  ENSG00000092051_25 (sequence is synthesized)
agactcctggaagctgaatggagaggaggaagaaaatgaagaaggagtgattgaatgtcgggcaaggcactggctgagctgctgtggctccctagcctaaggggcctgctgtccctctga

SEQ ID NO: 100596 - DNA, 120 bp, Artificial Sequence
  ENSG00000092051_26 (sequence is synthesized)
ggcctagtgaaaaagctgcaggaggtgcatcctccacctctaatcttggaggctattatcttacctccaagcactgagctgggttactgcccaattccatccttccctgaaggagagaag

SEQ ID NO: 100597 - DNA, 120 bp, Artificial Sequence
  ENSG00000092051_27 (sequence is synthesized)
ggaagtgaaaagtagagtaactccccagcatttccctctttttctcctcatcggccagcccctcctccagccccctctggtggcatgccatgccaagagcaacgtgtaaaggaacagaga

SEQ ID NO: 100598 - DNA, 120 bp, Artificial Sequence
  ENSG00000092051_28 (sequence is synthesized)
atatccaatgcagtcaagtccaccctgcccagactttgccactgacttctcccacccttctgtctcccccataatagtttatttggttggtctggactcacttgtggcctttgattaaat

SEQ ID NO: 100599 - DNA, 120 bp, Artificial Sequence
  ENSG00000092051_29 (sequence is synthesized)
tcctaaggggcctgaagaagacatttctactgcagagggttagaggcacttgagcaaggcccccacatcccaactctgggagttgtggtgggaggaggcacttctgggggataggaccag

SEQ ID NO: 100600 - DNA, 120 bp, Artificial Sequence
  ENSG00000092051_30 (sequence is synthesized)
acaagataacaggagctcacatggaagcagaagctgtgacaagtttagtagtcccaaaatgggttatatcccttccccctttacatcagaatcttgtgaaatgggaaaacaacagaagga

SEQ ID NO: 100601 - DNA, 120 bp, Artificial Sequence
  ENSG00000092051_31 (sequence is synthesized)
ggggatcaaagatagctgatctcacatgcttcccaggcagggcagaggtgggagtcaaacccgggtgacaggtgggtggagagccctgtttgaggttgtggctgatccctctctggtatt

SEQ ID NO: 100602 - DNA, 120 bp, Artificial Sequence
  ENSG00000092051_32 (sequence is synthesized)
agtttttcccctgggagcaggaagccctaggaagaggggactgcagggtccccaggggatctttcctccctcccctgcatgaggcagaggcaagctgcctgccaaccccctccctcaagg

SEQ ID NO: 100603 - DNA, 120 bp, Artificial Sequence
  ENSG00000092051_33 (sequence is synthesized)
aatggccttgcccaggaatgcccaccacacataccctcttctttttttctagtcaaactcttgtttattccttggcttgcctccctccttcctcccctctcaacctttacttctgatttc

SEQ ID NO: 100604 - DNA, 120 bp, Artificial Sequence
  ENSG00000092051_34 (sequence is synthesized)
tatttcatggaatttgggattgaagttaaactacaacagtgccgccaacaccaagtcttgcaggaaaaaaatacaaagaaatttaacaaaaaaaatatattaataaaaaagttcaaaaaa

SEQ ID NO: 100605 - DNA, 120 bp, Artificial Sequence
  ENSG00000092051_35 (sequence is synthesized)
cacatgagacgccgaagaaccggggcagaggggtcctgacagcagccagggaaacgggtgccctacgattctgcccagccccctctcaggacccccaaactgccatccacactcgacact

SEQ ID NO: 100606 - DNA, 120 bp, Artificial Sequence
  ENSG00000092051_36 (sequence is synthesized)
agaattacagaactcatttaaggatgacaaggcatctacgattaacagcagagggtgaaagggaagagaaaactgaggaagcatctgacatcacagggagaactgagaagcaacagtggg

SEQ ID NO: 100607 - DNA, 120 bp, Artificial Sequence
  ENSG00000092051_37 (sequence is synthesized)
cagaggccaaagctgggctaagaggagggggtgcgctggggaccaggaaggcgggtgtgcctaagggaggcccaaggcccaaggcctagggcctgctattgcaagcctaaggccaggcag

SEQ ID NO: 100608 - DNA, 120 bp, Artificial Sequence
  ENSG00000092051_38 (sequence is synthesized)
ttggacccctgggcattcttggtgtttatatccgaggctacaggtggatgtgggtgtaactctggatagctgggtatttgagggagatggtgtaagactgtaaatgtgtctcggtgtctt

SEQ ID NO: 100609 - DNA, 120 bp, Artificial Sequence
  ENSG00000092051_39 (sequence is synthesized)
ttgtgtggagatgcatgtctatggaatccattgttgtgtgtgggagtagcaaggaagctgttttgtgcaggcccagaaatctcttggaactcaaaacatgtccctagtcttcctcctctt

SEQ ID NO: 100610 - DNA, 120 bp, Artificial Sequence
  ENSG00000092051_40 (sequence is synthesized)
gcagctgatccagcctccaggcctcaggctgggagcatcaaccctgggtggaatagggactgtcccttcctaatcacgtcccagcctgacaccatttcagccttgggcctttgggaagtc

SEQ ID NO: 100611 - DNA, 120 bp, Artificial Sequence
  ENSG00000092051_41 (sequence is synthesized)
taatttatacagctgacctatccacctgaaaagatagtctctcccagttttgccccctctgccttcttttacccaactgatgggaggtttgaggggaggaggcttccctgtaaatgaaac

SEQ ID NO: 100612 - DNA, 120 bp, Artificial Sequence
  ENSG00000092051_42 (sequence is synthesized)
gtttctgtaaatcaaattacatttccttgcatcaggaaccttgctatctaaagcagtgctgtctaacaggaatattatataagccaaataggtagttttaaatctcctagtaaccacatt

SEQ ID NO: 100613 - DNA, 120 bp, Artificial Sequence
  ENSG00000092054_0 (sequence is synthesized)
acagctctgtcctgctctgtgtctttccctgctgctctcaggtcccctgcaggccttggcccctttcctcatctgtagacacacttgagtagcccaggcacagccatgggagattcggag

SEQ ID NO: 100614 - DNA, 120 bp, Artificial Sequence
  ENSG00000092054_1 (sequence is synthesized)
atggcagtctttggggctgccgccccctacctgcgcaagtcagagaaggagcggctagaagcgcagaccaggccttttgacctcaagaaggatgtcttcgtgcctgatgacaaacaggag

SEQ ID NO: 100615 - DNA, 120 bp, Artificial Sequence
  ENSG00000092054_2 (sequence is synthesized)
tttgtcaaggccaagatcgtgtctcgagagggtggcaaagtcactgccgagaccgagtatggcaagacagtgaccgtgaaggaggaccaggtgatgcagcagaacccacccaagttcgac

SEQ ID NO: 100616 - DNA, 120 bp, Artificial Sequence
  ENSG00000092054_3 (sequence is synthesized)
aaaatcgaggacatggccatgctgaccttcctgcatgagcccgcggtgctctacaacctcaaggatcgctacggctcctggatgatctacacctactcgggcctcttctgtgtcaccgtc

SEQ ID NO: 100617 - DNA, 120 bp, Artificial Sequence
  ENSG00000092054_4 (sequence is synthesized)
aacccttacaagtggctgccggtgtacactcctgaggtggtggctgcctaccggggcaagaagaggagcgaggccccgccccacatcttctccatctccgacaacgcctatcagtacatg

SEQ ID NO: 100618 - DNA, 120 bp, Artificial Sequence
  ENSG00000092054_5 (sequence is synthesized)
ctgacagacagagaaaaccagtccatcctgatcaccggagaatccggagcagggaagacagtcaacaccaagagggtcatccagtactttgctgttattgcagccattggggaccgcagc

SEQ ID NO: 100619 - DNA, 120 bp, Artificial Sequence
  ENSG00000092054_6 (sequence is synthesized)
aagaaggaccagagcccgggcaagggcaccctggaggaccagatcatccaggccaaccctgctctggaggcctttggcaatgccaagaccgtccggaacgacaactcctcccgcttcggg

SEQ ID NO: 100620 - DNA, 120 bp, Artificial Sequence
  ENSG00000092054_7 (sequence is synthesized)
aaattcattcgaattcattttggggcaacaggaaagttggcatctgcagacatagagacctatcttctggaaaaatccagagttattttccagctgaaagcagagagagattatcacatt

SEQ ID NO: 100621 - DNA, 120 bp, Artificial Sequence
  ENSG00000092054_8 (sequence is synthesized)
ttctaccaaatcctgtctaacaaaaagcctgagctgctggacatgctgctgatcaccaacaacccctacgattatgcattcatctcccaaggagagaccaccgtggcctccattgatgac

SEQ ID NO: 100622 - DNA, 120 bp, Artificial Sequence
  ENSG00000092054_9 (sequence is synthesized)
gctgaggagctcatggccactgataacgcttttgatgtgctgggcttcacttcagaggagaaaaactccatgtataagctgacaggcgccatcatgcactttggaaacatgaagttcaag

SEQ ID NO: 100623 - DNA, 120 bp, Artificial Sequence
  ENSG00000092054_10 (sequence is synthesized)
ctgaagcagcgggaggagcaggcggagccagacggcactgaagaggctgacaagtctgcctacctcatggggctgaactcagccgacctgctcaaggggctgtgccaccctcgggtgaaa

SEQ ID NO: 100624 - DNA, 120 bp, Artificial Sequence
  ENSG00000092054_11 (sequence is synthesized)
gtgggcaatgagtacgtcaccaaggggcagaatgtccagcaggtgatatatgccactggggcactggccaaggcagtgtatgagaggatgttcaactggatggtgacgcgcatcaatgcc

SEQ ID NO: 100625 - DNA, 120 bp, Artificial Sequence
  ENSG00000092054_12 (sequence is synthesized)
accctggagaccaagcagccacgccagtacttcataggagtcctggacatcgctggcttcgagatcttcgatttcaacagctttgagcagctctgcatcaacttcaccaacgagaagctg

SEQ ID NO: 100626 - DNA, 120 bp, Artificial Sequence
  ENSG00000092054_13 (sequence is synthesized)
cagcagttcttcaaccaccacatgtttgtgctggagcaggaggagtacaagaaggagggcatcgagtggacattcattgactttggcatggacctgcaggcctgcattgacctcatcgag

SEQ ID NO: 100627 - DNA, 120 bp, Artificial Sequence
  ENSG00000092054_14 (sequence is synthesized)
aagcccatgggcatcatgtccatcctggaagaggagtgcatgttccccaaggccaccgacatgaccttcaaggccaagctgtttgacaaccacctgggcaaatccgccaacttccagaag

SEQ ID NO: 100628 - DNA, 120 bp, Artificial Sequence
  ENSG00000092054_15 (sequence is synthesized)
ccacgcaatatcaaggggaagcctgaagcccacttctccctgatccactatgccggcatcgtggactacaacatcattggctggctgcagaagaacaaggatcctctcaatgagactgtc

SEQ ID NO: 100629 - DNA, 120 bp, Artificial Sequence
  ENSG00000092054_16 (sequence is synthesized)
gtgggcttgtatcagaagtcttccctcaagctgctcagcaccctgtttgccaactatgctggggctgatgcgcctattgagaagggcaaaggcaaggccaagaaaggctcgtcctttcag

SEQ ID NO: 100630 - DNA, 120 bp, Artificial Sequence
  ENSG00000092054_17 (sequence is synthesized)
actgtgtcagctctgcacagggaaaatctgaacaagctgatgaccaacttgcgctccacccatccccactttgtacgttgtatcatccctaatgagacaaagtctccaggggtgatggac

SEQ ID NO: 100631 - DNA, 120 bp, Artificial Sequence
  ENSG00000092054_18 (sequence is synthesized)
aaccccctggtcatgcaccagctgcgctgcaatggtgtgctggagggcatccgcatctgcaggaaaggcttccccaaccgcatcctctacggggacttccggcagaggtatcgcatcctg

SEQ ID NO: 100632 - DNA, 120 bp, Artificial Sequence
  ENSG00000092054_19 (sequence is synthesized)
aacccagcggccatccctgagggacagttcattgatagcaggaagggggcagagaagctgctcagctccctggacattgatcacaaccagtacaagtttggccacaccaaggtgttcttc

SEQ ID NO: 100633 - DNA, 120 bp, Artificial Sequence
  ENSG00000092054_20 (sequence is synthesized)
aaggccgggctgctggggctgctggaggaaatgagggacgagaggctgagccgcatcatcacgcgtatccaggcccagtcccgaggtgtgctcgccagaatggagtacaaaaagctgctg

SEQ ID NO: 100634 - DNA, 120 bp, Artificial Sequence
  ENSG00000092054_21 (sequence is synthesized)
gaacgtagagactccctgctggtaatccagtggaacattcgggccttcatgggggtcaagaattggccctggatgaagctctacttcaagatcaagccgctgctgaagagtgcagaaaga

SEQ ID NO: 100635 - DNA, 120 bp, Artificial Sequence
  ENSG00000092054_22 (sequence is synthesized)
gagaaggagatggcctccatgaaggaggagttcacacgcctcaaagaggcgctagagaagtccgaggctcgccgcaaggagctggaggagaagatggtgtccctgctgcaggagaagaat

SEQ ID NO: 100636 - DNA, 120 bp, Artificial Sequence
  ENSG00000092054_23 (sequence is synthesized)
gacctgcagctccaagtgcaggcggaacaagacaacctggcagatgctgaggagcgctgtgatcagctgatcaaaaacaagattcagctggaggccaaggtgaaggagatgaacgagagg

SEQ ID NO: 100637 - DNA, 120 bp, Artificial Sequence
  ENSG00000092054_24 (sequence is synthesized)
ctggaggatgaggaggagatgaatgctgagctcactgccaagaagcgcaagctggaagatgagtgctcagagctcaaaagggacatcgatgatctggagctgacactggccaaagtggag

SEQ ID NO: 100638 - DNA, 120 bp, Artificial Sequence
  ENSG00000092054_25 (sequence is synthesized)
gtgaaaaacctgacagaggagatggctgggctggatgagatcattgccaagctgaccaaggagaagaaagctctgcaagaggcccaccaacaggctctggatgaccttcaggccgaggag

SEQ ID NO: 100639 - DNA, 120 bp, Artificial Sequence
  ENSG00000092054_26 (sequence is synthesized)
gacaaggtcaacaccctgactaaggccaaagtcaagctggagcagcaagtggatgatctggaaggatccctggagcaagagaagaaggtgcgcatggacctggagcgagcgaagcggaag

SEQ ID NO: 100640 - DNA, 120 bp, Artificial Sequence
  ENSG00000092054_27 (sequence is synthesized)
ctggagggcgacctgaagctgacccaggagagcatcatggacctggagaatgacaagcagcagctggatgagcggctgaaaaaaaaagactttgagctgaatgctctcaacgcaaggatt

SEQ ID NO: 100641 - DNA, 120 bp, Artificial Sequence
  ENSG00000092054_28 (sequence is synthesized)
gaggatgaacaggccctcggcagccagctgcagaagaagctcaaggagcttcaggcacgcatcgaggagctggaggaggagctggaggccgagcgcaccgccagggctaaggtggagaag

SEQ ID NO: 100642 - DNA, 120 bp, Artificial Sequence
  ENSG00000092054_29 (sequence is synthesized)
ctgcgctcagacctgtctcgggagctggaggagatcagcgagcggctggaagaggccggcggggccacgtccgtgcagatcgagatgaacaagaagcgcgaggccgagttccagaagatg

SEQ ID NO: 100643 - DNA, 120 bp, Artificial Sequence
  ENSG00000092054_30 (sequence is synthesized)
cggcgggacctggaggaggccacgctgcagcacgaggccactgccgcggccctgcgcaagaagcacgccgacagcgtggccgagctgggcgagcagatcgacaacctgcagcgggtgaag

SEQ ID NO: 100644 - DNA, 120 bp, Artificial Sequence
  ENSG00000092054_31 (sequence is synthesized)
cagaagctggagaaggagaagagcgagttcaagctggagctggatgacgtcacctccaacatggagcagatcatcaaggccaaggctaacctggagaagatgtgccggaccttggaagac

SEQ ID NO: 100645 - DNA, 120 bp, Artificial Sequence
  ENSG00000092054_32 (sequence is synthesized)
cagatgaatgagcaccggagcaaggcggaggagacccagcgttctgtcaacgacctcaccagccagcgggccaagttgcaaaccgagaatggtgagctgtcccggcagctggatgagaag

SEQ ID NO: 100646 - DNA, 120 bp, Artificial Sequence
  ENSG00000092054_33 (sequence is synthesized)
gaggcactgatctcccagctgacccgaggcaagctcacctacacccagcagctggaggacctcaagaggcagctggaggaggaggttaaggcgaagaacgccctggcccacgcactgcag

SEQ ID NO: 100647 - DNA, 120 bp, Artificial Sequence
  ENSG00000092054_34 (sequence is synthesized)
tcggcccggcatgactgcgacctgctgcgggagcagtacgaggaggagacggaggccaaggccgagctgcagcgcgtcctttccaaggccaactcggaggtggcccagtggaggaccaag

SEQ ID NO: 100648 - DNA, 120 bp, Artificial Sequence
  ENSG00000092054_35 (sequence is synthesized)
tatgagacggacgccattcagcggactgaggagctcgaggaggccaagaagaagctggcccagcggctgcaggaagctgaggaggccgtggaggctgttaatgccaagtgctcctcgctg

SEQ ID NO: 100649 - DNA, 120 bp, Artificial Sequence
  ENSG00000092054_36 (sequence is synthesized)
gagaagaccaagcaccggctacagaatgagatcgaggacttgatggtggacgtagagcgctccaatgctgctgctgcagccctggacaagaagcagaggaacttcgacaagatcctggcc

SEQ ID NO: 100650 - DNA, 120 bp, Artificial Sequence
  ENSG00000092054_37 (sequence is synthesized)
gagtggaagcagaagtatgaggagtcgcagtcggagctggagtcctcgcagaaggaggctcgctccctcagcacagagctcttcaaactcaagaacgcctatgaggagtccctggaacat

SEQ ID NO: 100651 - DNA, 120 bp, Artificial Sequence
  ENSG00000092054_38 (sequence is synthesized)
ctggagaccttcaagcgggagaacaaaaacctgcaggaggagatctccgacttgactgagcagttgggttccagcggaaagactatccatgagctggagaaggtccgaaagcagctggag

SEQ ID NO: 100652 - DNA, 120 bp, Artificial Sequence
  ENSG00000092054_39 (sequence is synthesized)
gccgagaagatggagctgcagtcagccctggaggaggccgaggcctccctggagcacgaggagggcaagatcctccgggcccagctggagttcaaccagatcaaggcagagatcgagcgg

SEQ ID NO: 100653 - DNA, 120 bp, Artificial Sequence
  ENSG00000092054_40 (sequence is synthesized)
aagctggcagagaaggacgaggagatggaacaggccaagcgcaaccacctgcgggtggtggactcgctgcagacctccctggacgcagagacacgcagccgcaacgaggccctgagggtg

SEQ ID NO: 100654 - DNA, 120 bp, Artificial Sequence
  ENSG00000092054_41 (sequence is synthesized)
aagaagaagatggaaggagacctcaatgagatggagatccagctcagccacgccaaccgcatggccgccgaggcccagaagcaagtcaagagcctccagagcttgttgaaggacacccag

SEQ ID NO: 100655 - DNA, 120 bp, Artificial Sequence
  ENSG00000092054_42 (sequence is synthesized)
attcagctggacgatgcagtccgtgccaacgacgacctgaaggagaacatcgccatcgtggagcggcgcaacaacctgctgcaggctgagctggaggagttgcgtgccgtggtggagcag

SEQ ID NO: 100656 - DNA, 120 bp, Artificial Sequence
  ENSG00000092054_43 (sequence is synthesized)
acagagcggtcccggaagctggcggagcaggagctgattgagactagtgagcgggtgcagctgctgcattcccagaacaccagcctcatcaaccagaagaagaagatggatgctgacctg

SEQ ID NO: 100657 - DNA, 120 bp, Artificial Sequence
  ENSG00000092054_44 (sequence is synthesized)
tcccagctccagactgaagtggaggaggcagtgcaggagtgcaggaatgctgaggagaaggccaagaaggccatcacggatgccgccatgatggcagaggagctgaagaaggagcaggac

SEQ ID NO: 100658 - DNA, 120 bp, Artificial Sequence
  ENSG00000092054_45 (sequence is synthesized)
accagcgcccacctggagcgcatgaagaagaacatggaacagaccattaaggacctgcagcaccggctggacgaagccgagcagatcgccctcaagggcggcaagaagcagctgcagaag

SEQ ID NO: 100659 - DNA, 120 bp, Artificial Sequence
  ENSG00000092054_46 (sequence is synthesized)
ctggaagcgcgggtgcgggagctggagaatgagctggaggccgagcagaagcgcaacgcagagtcggtgaagggcatgaggaagagcgagcggcgcatcaaggagctcacctaccagacg

SEQ ID NO: 100660 - DNA, 120 bp, Artificial Sequence
  ENSG00000092054_47 (sequence is synthesized)
gaggaggacaggaaaaacctgctgcggctgcaggacctggtagacaagctgcagctaaaggtcaaggcctacaagcgccaggccgaggaggcggaggagcaagccaacaccaacctgtcc

SEQ ID NO: 100661 - DNA, 120 bp, Artificial Sequence
  ENSG00000092054_48 (sequence is synthesized)
aagttccgcaaggtgcagcacgagctggatgaggcagaggagcgggcggacatcgccgagtcccaggtcaacaagctgcgggccaagagccgtgacattggcacgaagggcttgaatgag

SEQ ID NO: 100662 - DNA, 120 bp, Artificial Sequence
  ENSG00000092054_49 (sequence is synthesized)
gagtagctttgccacatcttgatctgctcagccctggaggtgccagcaaagccccatgctggagcctgtgtaacagctccttgggaggaagcagaataaagcaattttccttgaagccga

SEQ ID NO: 100663 - DNA, 120 bp, Artificial Sequence
  ENSG00000092067_0 (sequence is synthesized)
ggaacctcattctgcatagaactttttcaaagtcggagggaggaggttgctcagagtggggtgttgccctctgcgaggatttggagtcccctggcctcccagcagggagtggagaggcat

SEQ ID NO: 100664 - DNA, 120 bp, Artificial Sequence
  ENSG00000092067_1 (sequence is synthesized)
tcccagaagcatcagcttcgggcatctccagaaccctggcttggtccctgaccaaggagtgtccccaactgctgaataggccaggagtcgcctttctctaaggcttacatctctccctct

SEQ ID NO: 100665 - DNA, 120 bp, Artificial Sequence
  ENSG00000092067_2 (sequence is synthesized)
ggggtgtgtcctgcccctccctgagtcaccccaaggggagagaggggaaaaaagggaagagaagagaggcattgactacagaggaaggaaaaggaagcagagcagaggggggagagaggc

SEQ ID NO: 100666 - DNA, 120 bp, Artificial Sequence
  ENSG00000092067_3 (sequence is synthesized)
cacacaggagtgggtgacagaggagactgcagagggcaggtctagggcagaagatcgagagagggcaggcccaggtcaggaggaggtagagagagggcagccggagcaccccaaggggtg

SEQ ID NO: 100667 - DNA, 120 bp, Artificial Sequence
  ENSG00000092067_4 (sequence is synthesized)
cctcaagagcaggtgggggcggggagccgagggggcgggccggccatgtcccacgggacctactacgagtgtgagccccggggtggccagcagccactcgagttctcagggggccgagct

SEQ ID NO: 100668 - DNA, 120 bp, Artificial Sequence
  ENSG00000092067_5 (sequence is synthesized)
gggcccggggagctaggggacatgtgtgagcatgaggcctccattgacctctccgcctacatcgagtctggggaagagcagcttctctccgatctctttgccgtgaagccagcgcctgag

SEQ ID NO: 100669 - DNA, 120 bp, Artificial Sequence
  ENSG00000092067_6 (sequence is synthesized)
cctggcatctacagcagcccagggagctacgaccccagggctgtggcggtgaaggaggagccccgggggccagagggcagccgagctgccagccgaggcagctacaatcccctgcagtac

SEQ ID NO: 100670 - DNA, 120 bp, Artificial Sequence
  ENSG00000092067_7 (sequence is synthesized)
caagtggcacactgtgggcagacagccatgcacctgcccccaactctggcagcacccggccagcctctgcgcgttctcaaggcccctttggccactgccgcacccccctgcagtcccctc

SEQ ID NO: 100671 - DNA, 120 bp, Artificial Sequence
  ENSG00000092067_8 (sequence is synthesized)
ctgaaggcgccctccccggctggccccttacacaagggcaagaaggcagtgaacaaagatagccttgagtaccggctgaggcgggagcgcaacaacatcgccgtgcgcaagagccgagac

SEQ ID NO: 100672 - DNA, 120 bp, Artificial Sequence
  ENSG00000092067_9 (sequence is synthesized)
aaggccaagaggcgcattctggagacgcagcagaaggtgctggagtacatggcagagaacgagcgcctccgcagccgcgtggagcagctcacccaggagctagacaccctccgcaacctc

SEQ ID NO: 100673 - DNA, 120 bp, Artificial Sequence
  ENSG00000092067_10 (sequence is synthesized)
ttccgccagattcctgaggcggccaacctcatcaagggcgtggggggttgcagctgaggctggctggtggattgtgggcaccaggctccctggcacggcctaactctgcggacccccatc

SEQ ID NO: 100674 - DNA, 120 bp, Artificial Sequence
  ENSG00000092067_11 (sequence is synthesized)
ctgctgggggcctagaaccctgagacatagaccatggataaatggcaaccggggtggcaaagagggcaggacccagcataatgattatatggctgaataaagttgcactgtgactgggtg

SEQ ID NO: 100675 - DNA, 120 bp, Artificial Sequence
  ENSG00000092068_0 (sequence is synthesized)
agtgtgtggagaagccactctcccgaaaccagagggatggggccggctgtgcagtagaacggggatcgaaaagaggaaaacaagggcacgaagaccagcgagaaagaagaggacacctgg

SEQ ID NO: 100676 - DNA, 120 bp, Artificial Sequence
  ENSG00000092068_1 (sequence is synthesized)
gaaaggcggaagcagaagacggggaagggaaaagaaacccaaagcaggtggaaaccagatctagagcaacaccgtcaggttcacagtttgtttttctagaagagaagaaagtacctgagg

SEQ ID NO: 100677 - DNA, 120 bp, Artificial Sequence
  ENSG00000092068_2 (sequence is synthesized)
attgctcttttttcctaccgttaatgaaaactacttttgtcttcatcataaaagaaaaaactaaggggaggtaaaggcagtctcctgttttattagggggagaggtgaagggaaatccag

SEQ ID NO: 100678 - DNA, 120 bp, Artificial Sequence
  ENSG00000092068_3 (sequence is synthesized)
gctcactttctgaataagccactgcctggtgcacagagcagaaccatcctggtttctgaagacacatccctttcagcagaattccagccggagtcgctggcacagttctatttttatatt

SEQ ID NO: 100679 - DNA, 120 bp, Artificial Sequence
  ENSG00000092068_4 (sequence is synthesized)
taaatgtatgtctcccctggcctttttttttttttttttttttagcaacacttttcttgtttgtaaacgcgagtgaccagaaagtgtgaatgcggagtaggaatatttttcgtgttctct

SEQ ID NO: 100680 - DNA, 120 bp, Artificial Sequence
  ENSG00000092068_5 (sequence is synthesized)
tttatctgcttgccttttttagagagtagcagtggttcctatttcggaaaaggacgttctaattcaaagctctctcccaatatatttacacgaatacgcatttagaaagggaggcagctt

SEQ ID NO: 100681 - DNA, 120 bp, Artificial Sequence
  ENSG00000092068_6 (sequence is synthesized)
ttgaggttgcaatcctactgagaaggatggaagaaggagccaggcaccgaaacaacaccgaaaagaaacacccaggtgggggcgagtcggacgccagccccgaggctggttccggagggg

SEQ ID NO: 100682 - DNA, 120 bp, Artificial Sequence
  ENSG00000092068_7 (sequence is synthesized)
gcggagtagccctgaagaaagagatcggattggtcagtgcctgtggtatcatcgtagggaacatcatcggctctggaatctttgtctcgccaaagggagtgctggagaatgctggttctg

SEQ ID NO: 100683 - DNA, 120 bp, Artificial Sequence
  ENSG00000092068_8 (sequence is synthesized)
tgggccttgctctcatcgtctggattgtgacgggcttcatcacagttgtgggagccctctgctatgctgaactcggggtcaccatccccaaatctggaggtgactactcctatgtcaagg

SEQ ID NO: 100684 - DNA, 120 bp, Artificial Sequence
  ENSG00000092068_9 (sequence is synthesized)
acatcttcggaggactggctgggttcctgaggctgtggattgctgtgctggtgatctaccccaccaaccaggctgtcatcgccctcaccttctccaactacgtgctgcagccgctcttcc

SEQ ID NO: 100685 - DNA, 120 bp, Artificial Sequence
  ENSG00000092068_10 (sequence is synthesized)
ccacctgcttccccccagagtctggccttcggctcctggctgccatctgcttattgctcctcacatgggtcaactgttccagtgtgcggtgggccacccgggttcaagacatcttcacag

SEQ ID NO: 100686 - DNA, 120 bp, Artificial Sequence
  ENSG00000092068_11 (sequence is synthesized)
ctgggaagctcctggccttggccctgattatcatcatggggattgtacagatatgcaaaggagagtacttctggctggagccaaagaatgcatttgagaatttccaggaacctgacatcg

SEQ ID NO: 100687 - DNA, 120 bp, Artificial Sequence
  ENSG00000092068_12 (sequence is synthesized)
gcctcgtcgcactggctttccttcagggctcctttgcctatggaggctggaactttctgaattacgtgactgaggagcttgttgatccctacaagaaccttcccagagccatcttcatct

SEQ ID NO: 100688 - DNA, 120 bp, Artificial Sequence
  ENSG00000092068_13 (sequence is synthesized)
ccatcccactggtcacatttgtgtatgtctttgccaatgtcgcttatgtcactgcaatgtccccccaggagctgctggcatccaacgccgtcgctgtgacttttggagagaagctcctag

SEQ ID NO: 100689 - DNA, 120 bp, Artificial Sequence
  ENSG00000092068_14 (sequence is synthesized)
gagtcatggcctggatcatgcccatttctgttgccctgtccacatttggaggagttaatgggtctctcttcacctcctctcggctgttcttcgctggagcccgagagggccaccttccca

SEQ ID NO: 100690 - DNA, 120 bp, Artificial Sequence
  ENSG00000092068_15 (sequence is synthesized)
gtgtgttggccatgatccacgtgaagcgctgcaccccaatcccagccctgctcttcacatgcatctccaccctgctgatgctggtcaccagcgacatgtacacactcatcaactatgtgg

SEQ ID NO: 100691 - DNA, 120 bp, Artificial Sequence
  ENSG00000092068_16 (sequence is synthesized)
gcttcatcaactacctcttctatggggtcacggttgctggacagatagtccttcgctggaagaagcctgatatcccccgccccatcaagatcaacctgctgttccccatcatctacttgc

SEQ ID NO: 100692 - DNA, 120 bp, Artificial Sequence
  ENSG00000092068_17 (sequence is synthesized)
cagagccggtggtgtgtggcattggcctggccatcatgctgacaggagtgcctgtctatttcctgggtgtttactggcaacacaagcccaagtgtttcagtgacttcattgagctgctaa

SEQ ID NO: 100693 - DNA, 120 bp, Artificial Sequence
  ENSG00000092068_18 (sequence is synthesized)
ccctggtgagccagaagatgtgtgtggtcgtgtaccccgaggtggagcggggctcagggacagaggaggctaatgaggacatggaggagcagcagcagcccatgtaccaacccactccca

SEQ ID NO: 100694 - DNA, 120 bp, Artificial Sequence
  ENSG00000092068_19 (sequence is synthesized)
cgaaggacaaggacgtggcggggcagccccagccctgaggaccaccattccctggctactctctccttcctcccccttttatcctacctccctgccttggtcctgccaacacatgcgagt

SEQ ID NO: 100695 - DNA, 120 bp, Artificial Sequence
  ENSG00000092068_20 (sequence is synthesized)
acacacacacccctctctctgcttttgtcaggcagtggtaggactttggtgtgggtggtgagaaattgtaaacaaaaactgacattcatacccaaagaaccagcctctcaccccagggtc

SEQ ID NO: 100696 - DNA, 120 bp, Artificial Sequence
  ENSG00000092068_21 (sequence is synthesized)
catgtcccaggccccactccagtgctgcccacactcccagctgctggaggagaggggagatgccaaggtgccctgcaggacctccctccgggccacaccctcagctgcctcttcaggaac

SEQ ID NO: 100697 - DNA, 120 bp, Artificial Sequence
  ENSG00000092068_22 (sequence is synthesized)
cggagctcattactgccttccctcccagggaggccccttcagagaggagaggccacaggagctgcattgtggggggacaggctcaagcaattctgtccccatcaaggggtcagctggaga

SEQ ID NO: 100698 - DNA, 120 bp, Artificial Sequence
  ENSG00000092068_23 (sequence is synthesized)
gacccaagaccctatctgttcaccagggacccaaaatccaaggggatgcttccctctgccctctttcctgcccctccccatcatacctgcacccaccccagccagggctccctgtccaga

SEQ ID NO: 100699 - DNA, 120 bp, Artificial Sequence
  ENSG00000092068_24 (sequence is synthesized)
attcggttctcctcaggacgccaactcccagagctaaggaccaaggagaagaacagcctctccacccccaagccaggcggttgaggaacatattgagaaaggttcagattgcagaaaccc

SEQ ID NO: 100700 - DNA, 120 bp, Artificial Sequence
  ENSG00000092068_25 (sequence is synthesized)
agccctgcccctgcctcctgcatccagcccccaacatggtgccaaagcttccagaagccaaaaagcttctgatttttaaggtagtgggcatctctctcctaatgacgaagctgctcagca

SEQ ID NO: 100701 - DNA, 120 bp, Artificial Sequence
  ENSG00000092068_26 (sequence is synthesized)
actccacctgcccgccgcaggaaggagcagtcccctgctatccctgcagccactcccagcacacccgcacacagccagcaccaccgcccccaccgtgcacttctcctctctgggccttgg

SEQ ID NO: 100702 - DNA, 120 bp, Artificial Sequence
  ENSG00000092068_27 (sequence is synthesized)
cttgggaccaggtacgaaggatccccaagcccttcaggcctgagatcagagccagatcagccttaagtcacctcccatccaagaacttggcctaaaaatactcccctatttctaaccctc

SEQ ID NO: 100703 - DNA, 120 bp, Artificial Sequence
  ENSG00000092068_28 (sequence is synthesized)
aggacggatctgatattaaatgccttccctgggaggaagggtgctttccccctccctagaggtgcccattccataccctgggagactgaggagagcattggctgaagcccagttcctttc

SEQ ID NO: 100704 - DNA, 120 bp, Artificial Sequence
  ENSG00000092068_29 (sequence is synthesized)
ccatccatccccaactccaataatcccccactcctcgcaggtctcagtgtcatgctgtcttggggcagggtgaaagggtagtggcagcagggcgcccactctggagatcctcaaaaaagg

SEQ ID NO: 100705 - DNA, 120 bp, Artificial Sequence
  ENSG00000092068_30 (sequence is synthesized)
ccctcctctgtggctggcagcctctgacctttccctgggcttcaaaggaaggctatggagtttgctgtgggccctgcaaccttcccagccactcctgctgcactaaggacttaggatcct

SEQ ID NO: 100706 - DNA, 120 bp, Artificial Sequence
  ENSG00000092068_31 (sequence is synthesized)
tttatcacaaatcgggattctctcccccaccccgaattctgtctgcttaaactggaatacacaggagcccttcctggcctggatggtgtctcccagcttccccgcccagcttgcccaccc

SEQ ID NO: 100707 - DNA, 120 bp, Artificial Sequence
  ENSG00000092068_32 (sequence is synthesized)
catagttggtgagatgccaagtttggtctgagttgtgaccccttcagagtagatgcccggcaggctggggttggcccctggagggtcaggggaccatcttcttattccctcttttctcat

SEQ ID NO: 100708 - DNA, 120 bp, Artificial Sequence
  ENSG00000092068_33 (sequence is synthesized)
tcctccaacttcctcccctccttcaattatttttttgtaaagttgatgccttactttttggataaatatttttgaagctggtatttctatttcttttggattttttttaatgtaaggttg

SEQ ID NO: 100709 - DNA, 120 bp, Artificial Sequence
  ENSG00000092068_34 (sequence is synthesized)
ttttgggggatggagttagaaccttaatgataatttctttcgtttggtgtaggttttagagatttgttttgtggagaggtttttttcttttgatgtaataaaatttaaaatggaaatgaa

SEQ ID NO: 100710 - DNA, 120 bp, Artificial Sequence
  ENSG00000092068_35 (sequence is synthesized)
ctaaaacatgcattaaccaccctgtgtaggggtccacccttgagagggtgggggcaattaagaagcttggcgagagagaattagcaagggtggagataggagaaacggtttcccagagtg

SEQ ID NO: 100711 - DNA, 120 bp, Artificial Sequence
  ENSG00000092068_36 (sequence is synthesized)
caacctccagcctgggcacccagacccagagggctgctgggagggacatgcctcaccccttttgctccagctggaggggagggagtctgtgggagctggccagagcgtggcagaaggcag

SEQ ID NO: 100712 - DNA, 120 bp, Artificial Sequence
  ENSG00000092068_37 (sequence is synthesized)
tgtgcctccaggagcactcacagccctcacagcttctctgcaccctcctcctctgctggtgtgtccttggaagagagaggcccttccggaaggctcagagcacctcctctcctttggagg

SEQ ID NO: 100713 - DNA, 120 bp, Artificial Sequence
  ENSG00000092068_38 (sequence is synthesized)
cagcctttgcccttgaggatgtgtctctgtgggtgaagaagagagagaatgccccagtccctagtcctgggggccacgtggcctacacagttcatacgcctcatgcctctgctccacaga

SEQ ID NO: 100714 - DNA, 120 bp, Artificial Sequence
  ENSG00000092068_39 (sequence is synthesized)
cccttcctctatggttctagctgcagttcagatttttaaatcacctctgttcttagctgctgaccacacgtcatcatctctgatggtagcagaccctttggaaagcaagggccatttgtg

SEQ ID NO: 100715 - DNA, 120 bp, Artificial Sequence
  ENSG00000092068_40 (sequence is synthesized)
aatgggaccactatttccattctccactggggatgagatcggagcagactgcagctggggaataagtcagatcaaatgtgactttcatcatgacattcctttgtttcctaccagtctaag

SEQ ID NO: 100716 - DNA, 120 bp, Artificial Sequence
  ENSG00000092068_41 (sequence is synthesized)
ccttaaactccagctgacttttcaaggttctcttatctccccaacacttcctccttgtccctccagatagctgggttcactatgtgctatgtctccatcccagaatgacttcctcctccc

SEQ ID NO: 100717 - DNA, 120 bp, Artificial Sequence
  ENSG00000092068_42 (sequence is synthesized)
aaccaacagaggcatacaaatgagaccggggctgacacagagccaggtaataccagtgtggccagtctagctgcttatgtccagtatccattctaattggctagtgcccgtgccatacga

SEQ ID NO: 100718 - DNA, 120 bp, Artificial Sequence
  ENSG00000092068_43 (sequence is synthesized)
gtggttaaatattttgatcatcacccctgtaataagaaaggatttcctagcaataaagatgttgtaacatattgggttactaggggaggttctaaagtctccatttcgagacatccatta

SEQ ID NO: 100719 - DNA, 120 bp, Artificial Sequence
  ENSG00000092068_44 (sequence is synthesized)
tacgatggcatcatctgcctggaggctgggggacagcccctaatctgtaataccagtctctgaatatctttcggatcactgatgagctcctcccactttcccagtgcatctccaccctgc

SEQ ID NO: 100720 - DNA, 120 bp, Artificial Sequence
  ENSG00000092068_45 (sequence is synthesized)
agtgccaagcagtagctagccagcagcagggctcctgaccggggcaggagcttggcgagcacccactgacctttcctctctgggtggaggctcaggtttcagcctgctgtgagggaagct

SEQ ID NO: 100721 - DNA, 120 bp, Artificial Sequence
  ENSG00000092068_46 (sequence is synthesized)
gtggtgattcagcagaaaccccagctccagcagctggcgcaggagctaacaggataagaaggaaggggaagagagagccaggaagggaggaggggaggggatggggcagtatgggcagga

SEQ ID NO: 100722 - DNA, 120 bp, Artificial Sequence
  ENSG00000092094_0 (sequence is synthesized)
agtgctatctgcaggctggccagcttcctctgcgctccggaaagctgcggcccagcgcggactagtgaggacctccacagctcctgacattgccaggagtcctgtcggcgttttctccca

SEQ ID NO: 100723 - DNA, 120 bp, Artificial Sequence
  ENSG00000092094_1 (sequence is synthesized)
gcctccgccatgccggcggtgctgggttttgaaggcagcgccaataagattggcgtgggcgtggtgcgggatggcaaggtgctggcgaacccgcggcggacttacgtcacgcctcctggc

SEQ ID NO: 100724 - DNA, 120 bp, Artificial Sequence
  ENSG00000092094_2 (sequence is synthesized)
acaggattccttccaggtgatacagccaggcatcaccgagctgttatcctagacctgctgcaggaggcactaacagagtctggattaacctcccaggatatcgactgcattgcatacacc

SEQ ID NO: 100725 - DNA, 120 bp, Artificial Sequence
  ENSG00000092094_3 (sequence is synthesized)
aagggccctggcatgggtgccccactggtttctgtggctgttgtggcccgtactgtggcccaactgtggaataagccattggtgggtgtgaaccactgtataggccacattgagatgggc

SEQ ID NO: 100726 - DNA, 120 bp, Artificial Sequence
  ENSG00000092094_4 (sequence is synthesized)
cgcctcatcactggagccaccagcccaaccgtgttgtatgtgagtggaggaaatacgcaggtgattgcatactcggaacatcgttaccgtatctttggggaaaccatcgatattgcagtg

SEQ ID NO: 100727 - DNA, 120 bp, Artificial Sequence
  ENSG00000092094_5 (sequence is synthesized)
ggtaattgtctggatcgttttgctcgagtgctgaagatttctaacgacccaagtccaggatacaacattgaacagatggcaaagcgaggcaagaagctagttgagctgccatacactgta

SEQ ID NO: 100728 - DNA, 120 bp, Artificial Sequence
  ENSG00000092094_6 (sequence is synthesized)
aaggggatggacgtctcattctcagggatcctgtctttcattgaggatgtagcccatcggatgctggccacaggcgagtgtactcctgaggatctgtgtttctccctgcaggaaactgtg

SEQ ID NO: 100729 - DNA, 120 bp, Artificial Sequence
  ENSG00000092094_7 (sequence is synthesized)
tttgcaatgctggtagagatcacagagcgagccatggcacattgtggctcccaggaggccctcattgtgggaggagtggggtgtaatgtgaggctacaggagatgatggcaacaatgtgc

SEQ ID NO: 100730 - DNA, 120 bp, Artificial Sequence
  ENSG00000092094_8 (sequence is synthesized)
agcgatgatagcccaggctggctgggagatgtttcgggctggacacaggaccccactcagtgattctggggttacacagaggtatcggacagatgaagtagaggtgacctggagggacta

SEQ ID NO: 100731 - DNA, 120 bp, Artificial Sequence
  ENSG00000092094_9 (sequence is synthesized)
ataagatcaacagaatcagagtagatagttccttaatcggaacccaaaggaccccgtgcctcaatctctatcctgatgtcatgggagtcctagcaaagctatagactccaagcaaggctt

SEQ ID NO: 100732 - DNA, 120 bp, Artificial Sequence
  ENSG00000092094_10 (sequence is synthesized)
ggggtcctttatggaaccccaggatgactcagcaataaaatatttttggttttttggttttgtatgttggtgattggattgtgttgttcaggaccaatgtagatttggtgctggataaat

SEQ ID NO: 100733 - DNA, 120 bp, Artificial Sequence
  ENSG00000092094_11 (sequence is synthesized)
tcttgttggagcttgctgctgtggaaccaagaatgaggtatctttttttttttttttaagaaacggaatcttgctgtgtttcccaggctggtctcgaactgggctcaagcagtcttacca

SEQ ID NO: 100734 - DNA, 120 bp, Artificial Sequence
  ENSG00000092094_12 (sequence is synthesized)
cctcagcctcctgagtaaggatgccattgtgcctggcaacaatagtagtatcataactattattatagcatcgggtcccgtgctaactgctttacattcattctctcatttaaattcttt

SEQ ID NO: 100735 - DNA, 120 bp, Artificial Sequence
  ENSG00000092094_13 (sequence is synthesized)
ctcatttaaattctttgaagtaggtgtgcaagacttctctcaaaatagcctggaggctcacacctgttatcccagtgctgtgggaggccaagtcaggaggatcccttgagcccaggagtt

SEQ ID NO: 100736 - DNA, 120 bp, Artificial Sequence
  ENSG00000092094_14 (sequence is synthesized)
aaatagcaagacaccatctatttgaaaaatgtaaaaattatctgggcatggtggcgcacatctgtagtcccagctccaagggaggctgaggcgggaagatagcttgagcccaggagtttg

SEQ ID NO: 100737 - DNA, 120 bp, Artificial Sequence
  ENSG00000092094_15 (sequence is synthesized)
aggttgcagtgagctgtgattgagccactgcattccagcctgagtgacagaacaaaaccttgtctcttaaaaacaaacaaacaaacagcctggagattggtctaacttgtaactctaaaa

SEQ ID NO: 100738 - DNA, 120 bp, Artificial Sequence
  ENSG00000092094_16 (sequence is synthesized)
gggctgtttatcgttgtgccagatgcacagcacattgtgtgacactgacttaagattctaactatgtgcaagagggaaaaaaacagtggagaaggctgggctggaccacgggaaagagat

SEQ ID NO: 100739 - DNA, 120 bp, Artificial Sequence
  ENSG00000092094_17 (sequence is synthesized)
aggaaaacggatacgaatgtaaggcacagagttggctcggcgtccctggcagttaggaagacaggtccctggaggggccttggcgggtctccgctcgcgggagttccgcggtgtctttcc

SEQ ID NO: 100740 - DNA, 120 bp, Artificial Sequence
  ENSG00000092094_18 (sequence is synthesized)
gggatatattaggaacttctaagccggaaaaccaatgtatttgaaatgacaatttatttctgcctgaacctacactgtctaggaatctgttcctggaatcctcagggtatacagatttct

SEQ ID NO: 100741 - DNA, 120 bp, Artificial Sequence
  ENSG00000092094_19 (sequence is synthesized)
tctcaaatcagagctgtaaaaactacccattcaccatttgggaaacacctttcttccacttcttattggaagccctggtggtcatgttgatcctctgctatgtttttctcccaaagccaa

SEQ ID NO: 100742 - DNA, 120 bp, Artificial Sequence
  ENSG00000092094_20 (sequence is synthesized)
ctggatcgttttgctcgagtgctgaaggtaagccagtggggctgcagagaacataaaatgtgggtgaatttttgggaagccatggaggtggagggaggaaatagtaaatgagcttcttat

SEQ ID NO: 100743 - DNA, 120 bp, Artificial Sequence
  ENSG00000092094_21 (sequence is synthesized)
tttctccttatctgtccctgacaggaaactgtgtttgcaatgctggtagagatcacagagcgagccatggcacattgtggctcccaggaggccctcattgtgggaggagtggggtgtatg

SEQ ID NO: 100744 - DNA, 120 bp, Artificial Sequence
  ENSG00000092094_22 (sequence is synthesized)
tattattgaaaagtgttcctctttcctattcttaacactatgcgtcttcctcctggtactctaaatcattaagcgtttggagtaggcttcccaatccttgcccctaatcccctatgtcat

SEQ ID NO: 100745 - DNA, 120 bp, Artificial Sequence
  ENSG00000092094_23 (sequence is synthesized)
tgttctaagtgagtgcacatgacgtgttctgctggaccatgaagagatggctaaaactaagctaatcctgttccctgcctctttgtaggtaatgtgaggctacaggagatgatggcaaca

SEQ ID NO: 100746 - DNA, 120 bp, Artificial Sequence
  ENSG00000092094_24 (sequence is synthesized)
gagagtggtcaacgatggaggaatatacctgcaacctggctaggtcaaaatagccaacaccttacctctgccaccatcactacccctaccccacctcacatcccttatgtcccccactat

SEQ ID NO: 100747 - DNA, 76 bp, Artificial Sequence
  ENSG00000092094_25 (sequence is synthesized)
agcccaaccgtgttgtatgtgagtggaggaaatacgcaggtgcctgtaatcctagcaactccggaggctaccgaga

SEQ ID NO: 100748 - DNA, 77 bp, Artificial Sequence
  ENSG00000092094_26 (sequence is synthesized)
ctaaaggacactacctgatttattattttggggtgattgcatactcggaacatcgttaccgtatctttggggaaacc

SEQ ID NO: 100749 - DNA, 120 bp, Artificial Sequence
  ENSG00000092094_27 (sequence is synthesized)
tcatcactggagccaccagcccaaccgtgttgtatgtgagtggaggaaatacgcagacttggggtttcatggacttcctcatcacccttaggtgattgcatactcggaacatcgttaccg

SEQ ID NO: 100750 - DNA, 120 bp, Artificial Sequence
  ENSG00000092094_28 (sequence is synthesized)
ttccattccctccttccttatttttttcttctgctagatttctaacgacccaagtccaggatacaacattgaacagatggcaaagcggtaaggggacataaggtggaagcaggctggctg

SEQ ID NO: 100751 - DNA, 120 bp, Artificial Sequence
  ENSG00000092094_29 (sequence is synthesized)
caggcgtgagccaccatgcccggccagaaggtattttaaatttataggtgaagctaaagttgtttgggttaccttatatgacctttttaaggttgggattggattcttttccaacagaac

SEQ ID NO: 100752 - DNA, 120 bp, Artificial Sequence
  ENSG00000092094_30 (sequence is synthesized)
gattggattcttttccaacagaacacttgattatcattagaaatagttcagcattgtccccagctcatgaaagggttgtgtcgagaagatgaggcacatgtttcccatgaaaatgatgca

SEQ ID NO: 100753 - DNA, 120 bp, Artificial Sequence
  ENSG00000092094_31 (sequence is synthesized)
gaaacttcagcaggtagagggcaagtagttggttgaggcctgaaggatgacatacaaggtcagagacttgggttgtggaaagtataatggaggctacaagagttgatgaaaggagcagtg

SEQ ID NO: 100754 - DNA, 120 bp, Artificial Sequence
  ENSG00000092094_32 (sequence is synthesized)
acggttttgtcttcctcttctcttttaatgtttgcttaggtgtaagaaacagggagggtgattaggtggagaggagtggatagcagaagcagaaaggcaggatttttccttcgcctttgt

SEQ ID NO: 100755 - DNA, 120 bp, Artificial Sequence
  ENSG00000092094_33 (sequence is synthesized)
tactgtctttttgacagcagattaagatctgtatcagaaagggaagaaatccctaacagcactgggaagggaaagggacttcttaaggttcgtaggaagccctcggtgttataagtctgc

SEQ ID NO: 100756 - DNA, 120 bp, Artificial Sequence
  ENSG00000092094_34 (sequence is synthesized)
ctgcagaatatgtgtcagtaagggacagatattctctgtgctaaaagttggtcacatatgaagaacggccttaatacaaaaaagtggtggtgggtgcctgtaattccagctgcttgggag

SEQ ID NO: 100757 - DNA, 120 bp, Artificial Sequence
  ENSG00000092094_35 (sequence is synthesized)
aaaaatggccttaagtgaattgccattgctgacttggctgggccattagtctgactccatatgagatttttgagttcttcagctctgcttcttggttctaaataccactgcccagctgca

SEQ ID NO: 100758 - DNA, 73 bp, Artificial Sequence
  ENSG00000092094_36 (sequence is synthesized)
agctctgcttcttggttctaaataccactgcccagctgcatacagattgcttgagaccaggagtttgagacca

SEQ ID NO: 100759 - DNA, 87 bp, Artificial Sequence
  ENSG00000092094_37 (sequence is synthesized)
tagtgagacccccatctctacaaaaatataaaaataagccacacatggtagctttgagcctaggaggtggaggctacagtgagctat

SEQ ID NO: 100760 - DNA, 120 bp, Artificial Sequence
  ENSG00000092094_38 (sequence is synthesized)
gagcgagaccctgtctcaaaaaaaaattaccactgccactgtgtcataatttagaaggattcatgttctctgcctccaagcagaaaagccggttacctactatcaagactgcatttaagg

SEQ ID NO: 100761 - DNA, 120 bp, Artificial Sequence
  ENSG00000092096_0 (sequence is synthesized)
gggaggggaaagcagcgcagagatcgcagagaccaaggaggcgcccgcggctgcagagctgcagagcgggatctcttcgagctgtctgtgtccgggcagccggcgcgcaactgagccaga

SEQ ID NO: 100762 - DNA, 120 bp, Artificial Sequence
  ENSG00000092096_1 (sequence is synthesized)
ggacagcgcatcctttcggcgcgggccggcagggcccctgcggtcggcaagctggctccccgggtggccaccgggacccccgagcccaatggcgggggcggcggcaaaatcgacaacact

SEQ ID NO: 100763 - DNA, 120 bp, Artificial Sequence
  ENSG00000092096_2 (sequence is synthesized)
gtagagatcacccccacctccaacggacaggtcgggaccctcggagatgcggtgcccacggagcagctgcagggtgagcgggagcgcgagcgggagggggagggagacgcgggcggcgac

SEQ ID NO: 100764 - DNA, 120 bp, Artificial Sequence
  ENSG00000092096_3 (sequence is synthesized)
ggactgggcagcagcctgtcgctggccgtgcccccaggccccctcagctttgaggcgctgctcgcccaggtgggggcgctgggcggcggccagcagctgcagctcggcctctgctgcctg

SEQ ID NO: 100765 - DNA, 120 bp, Artificial Sequence
  ENSG00000092096_4 (sequence is synthesized)
ccggtgctcttcgtggctctgggcatggcctcggaccccatcttcacgctggcgcccccgctgcattgccactacggggccttcccccctaatgcctctggctgggagcagcctcccaat

SEQ ID NO: 100766 - DNA, 120 bp, Artificial Sequence
  ENSG00000092096_5 (sequence is synthesized)
gccagcggcgtcagcgtcgccagcgctgccctagcagccagcgccgccagccgtgtcgccaccagtaccgacccctcgtgcagcggcttcgccccgccggacttcaaccattgcctcaag

SEQ ID NO: 100767 - DNA, 120 bp, Artificial Sequence
  ENSG00000092096_6 (sequence is synthesized)
gattgggactataatggccttcctgtgctcaccaccaacgccatcggccagtgggatctggtgtgtgacctgggctggcaggtgatcctggagcagatcctcttcatcttgggctttgcc

SEQ ID NO: 100768 - DNA, 120 bp, Artificial Sequence
  ENSG00000092096_7 (sequence is synthesized)
tccggctacctgttcctgggttaccccgcagacagatttggccgtcgcgggattgtgctgctgaccttggggctggtgggcccctgtggagtaggaggggctgctgcaggctcctccaca

SEQ ID NO: 100769 - DNA, 120 bp, Artificial Sequence
  ENSG00000092096_8 (sequence is synthesized)
ggcgtcatggccctccgattcctcttgggctttctgcttgccggtgttgacctgggtgtctacctgatgcgcctggagctgtgcgacccaacccagaggcttcgggtggccctggcaggg

SEQ ID NO: 100770 - DNA, 120 bp, Artificial Sequence
  ENSG00000092096_9 (sequence is synthesized)
gagttggtgggggtgggagggcacttcctgttcctgggcctggcccttgtctctaaggattggcgattcctacagcgaatgatcaccgctccctgcatcctcttcctgttttatggctgg

SEQ ID NO: 100771 - DNA, 120 bp, Artificial Sequence
  ENSG00000092096_10 (sequence is synthesized)
aggctcagtctgtgctgaggatcctggctgagcgaaaccggccccatgggcagatgctgggggaggaggcccaggaggccctgcaggacctggagaatacctgccctctccctgcaacat

SEQ ID NO: 100772 - DNA, 120 bp, Artificial Sequence
  ENSG00000092096_11 (sequence is synthesized)
cctccttttcctttgcttccctcctcaactaccgcaacatctggaaaaatctgcttatcctgggcttcaccaacttcattgcccatgccattcgccactgctaccagcctgtgggaggag

SEQ ID NO: 100773 - DNA, 120 bp, Artificial Sequence
  ENSG00000092096_12 (sequence is synthesized)
gagggagcccatcggacttctacctgtgctctctgctggccagcggcaccgcagccctggcctgtgtcttcctgggggtcaccgtggaccgatttggccgccggggcatccttcttctct

SEQ ID NO: 100774 - DNA, 120 bp, Artificial Sequence
  ENSG00000092096_13 (sequence is synthesized)
ccatgacccttaccggcattgcttccctggtcctgctgggcctgtgggattgtgagcatcctatcttccccacagtgtgggctcaacaagggaaccccaacagagatctgaacgaggctg

SEQ ID NO: 100775 - DNA, 120 bp, Artificial Sequence
  ENSG00000092096_14 (sequence is synthesized)
ccatcaccactttctctgtccttgggctcttctcctcccaagctgccgccatcctcagcaccctccttgctgctgaggtcatccccaccactgtccggggccgtggcctgggcctgatca

SEQ ID NO: 100776 - DNA, 120 bp, Artificial Sequence
  ENSG00000092096_15 (sequence is synthesized)
tggctctaggggcgcttggaggactgagcggcccggcccagcgcctccacatgggccatggagccttcctgcagcacgtggtgctggcggcctgcgccctcctctgcattctcagcatta

SEQ ID NO: 100777 - DNA, 120 bp, Artificial Sequence
  ENSG00000092096_16 (sequence is synthesized)
tgctgctgccggagaccaagcgcaagctcctgcccgaggtgctccgggacggggagctgtgtcgccggccttccctgctgcggcagccaccccctacccgctgtgaccacgtcccgctgc

SEQ ID NO: 100778 - DNA, 120 bp, Artificial Sequence
  ENSG00000092096_17 (sequence is synthesized)
ttgccacccccaaccctgccctctgagcggcctctgagtaccctggcgggaggctggcccacacagaaaggtggcaagaagatcgggaagactgagtagggaaggcagggctgcccagaa

SEQ ID NO: 100779 - DNA, 120 bp, Artificial Sequence
  ENSG00000092096_18 (sequence is synthesized)
gtctcagaggcacctcacgccagccatcgcggagagctcagagggccgtccccaccctgcctcctccctgctgctttgcattcacttccttggccagagtcaggggacagggagagagct

SEQ ID NO: 100780 - DNA, 120 bp, Artificial Sequence
  ENSG00000092096_19 (sequence is synthesized)
ccacactgtaaccactgggtctgggctccatcctgcgcccaaagacatccacccagacctcattatttcttgctctatcattctgtttcaataaagacatttggaataaacgagcatatc

SEQ ID NO: 100781 - DNA, 120 bp, Artificial Sequence
  ENSG00000092096_20 (sequence is synthesized)
gacttctattcaatggtctatccatgtctcaacttcactctccatcaagaaataccccttccctacctcttccgcgcaagggaatgactcgacctctatggactattagtcccattccca

SEQ ID NO: 100782 - DNA, 120 bp, Artificial Sequence
  ENSG00000092096_21 (sequence is synthesized)
aagatcaatatgttaattcctaaacaccaacagctccattcccactgatcaatagttcaacttcacaaacaaattaccccatttctgaccagcgacccctcccctacaagtcaactaact

SEQ ID NO: 100783 - DNA, 120 bp, Artificial Sequence
  ENSG00000092096_22 (sequence is synthesized)
atctccaaagacaatatcctcagacccagtaacccacagtcccatgcctgccaccaaatgacccaacgctctgtaggggaatagcccatagattagcagtcataccctcatggatcctca

SEQ ID NO: 100784 - DNA, 120 bp, Artificial Sequence
  ENSG00000092096_23 (sequence is synthesized)
gggctttgagatcctctcaccgaaatccccgtttccatgagtcggtagcttcacctctagagatcaacaacccaatcccagcaaccaataactcttcccacagatcaaaaatctcatctc

SEQ ID NO: 100785 - DNA, 120 bp, Artificial Sequence
  ENSG00000092096_24 (sequence is synthesized)
tgattctggtcaccttcaccactgaccagatgctctcactgcactaaacttccgattagactcagccccattgatccacagttccatccaagtggattaataactcaacttctgtggatc

SEQ ID NO: 100786 - DNA, 120 bp, Artificial Sequence
  ENSG00000092096_25 (sequence is synthesized)
attttcctcctgcgcatccctcgcccctgactgccttcctagccctccctcccacctgccccctgcccttgctctgcggtttcctccgcttcacccttctcctgccaccccctgcccccc

SEQ ID NO: 100787 - DNA, 120 bp, Artificial Sequence
  ENSG00000092096_26 (sequence is synthesized)
acctgcctgcatcgccaggccatcctcactgccccctaggccacatttcagctgcctagaatctcagctatctttctgcccaggcccccttgaagaatccagggctcttgcttctctcta

SEQ ID NO: 100788 - DNA, 120 bp, Artificial Sequence
  ENSG00000092096_27 (sequence is synthesized)
cacctatctccccctcccgacaatctttaaagtctttgtcctggacttactgctgccaaggaataaggtgctattcccctgatagcagtaagtccagggacaaggattgtccctagctgt

SEQ ID NO: 100789 - DNA, 120 bp, Artificial Sequence
  ENSG00000092096_28 (sequence is synthesized)
gtgaccttggacaagggttgatgtgaaggtcaaataagaggcctgatgggaaagggcctataaattggaaatgttgaacactcacccaggactctggccctagagccctcctaggtttga

SEQ ID NO: 100790 - DNA, 120 bp, Artificial Sequence
  ENSG00000092096_29 (sequence is synthesized)
gcaggagaggagagagggctgaacagtctccccagtccttgccacccagaggttagcaagggaggcaatggctgcagcctccactctgggtctgacctctctctctgtcctcctccctcc

SEQ ID NO: 100791 - DNA, 120 bp, Artificial Sequence
  ENSG00000092096_30 (sequence is synthesized)
ctctttcttcttctctcttatgccttcttcctccctggcctccctctcctctctccacccctgctgtatctccaggcctggagctgtgcgacccaacccagaggcttcgggtggccctgg

SEQ ID NO: 100792 - DNA, 120 bp, Artificial Sequence
  ENSG00000092096_31 (sequence is synthesized)
cctaaggatgaatggtcccaaatcccctaagcaatatcccatcccctctgttgagtgatgtcacatccattgacaagtgccctaatctctgaccaatagcccaagagtcaatgttcccac

SEQ ID NO: 100793 - DNA, 120 bp, Artificial Sequence
  ENSG00000092096_32 (sequence is synthesized)
ctcttaaagaaccacaaccacaccccagtgcccagtagccaggcatcacccacccatggtccccatccctccccatcttctcaagcctctgtccaactcttgctcccagaacttcattct

SEQ ID NO: 100794 - DNA, 120 bp, Artificial Sequence
  ENSG00000092096_33 (sequence is synthesized)
catacctctagctctgaagtgtgcagctgggtcttacccagcaactttcccaccaccagagagtctgggtgaccagaagcccttcccactttctagatttggccgtcgcgggattgtgct

SEQ ID NO: 100795 - DNA, 120 bp, Artificial Sequence
  ENSG00000092098_0 (sequence is synthesized)
ctagtacttcctgttctcggctaaccctggcgctgggccgggggctggagagtgaccgtggtctgagtgacctggggcggctgcgtgggccggggtgggcctcaaagccgggcaccagac

SEQ ID NO: 100796 - DNA, 120 bp, Artificial Sequence
  ENSG00000092098_1 (sequence is synthesized)
cgctgcccgcgccgggtcctggcgggcggcgaggctggggctgactcctgcctcaggatgccgggggaggaagaggagcgggccttcctggtggcccgcgaggagctggcgagcgccctg

SEQ ID NO: 100797 - DNA, 120 bp, Artificial Sequence
  ENSG00000092098_2 (sequence is synthesized)
cgcgaggagctggcgagcgccctgaggagggattccgggcaggcgttttccctggagcagctccggccgctactagccagctctctgccgctagccgcccgctacctgcagctggacgcc

SEQ ID NO: 100798 - DNA, 120 bp, Artificial Sequence
  ENSG00000092098_3 (sequence is synthesized)
gcacgccttgtccgctgcaacgctcatggggagccccgaaactacctcaacaccctgtccacggctctgaacatcctggagaaatacggccgcaaccttctcagccctcagcggcctcgg

SEQ ID NO: 100799 - DNA, 120 bp, Artificial Sequence
  ENSG00000092098_4 (sequence is synthesized)
tactggcgtggtgtcaagtttaataaccctgtctttcgcagcacggtggatgctgtgcaggggggccgagatgtgctgcgattatatggctacacagaggagcaaccagatgggttgagc

SEQ ID NO: 100800 - DNA, 120 bp, Artificial Sequence
  ENSG00000092098_5 (sequence is synthesized)
ttccccgaagggcaggaggagccagatgagcaccaggttgctacagtcacactggaagtactgctgcttcggacagagctcagcctgctattgcagaatactcatccaagacagcaggca

SEQ ID NO: 100801 - DNA, 120 bp, Artificial Sequence
  ENSG00000092098_6 (sequence is synthesized)
ctggagcagctgttggaagacaaggttgaagatgatatgctgcagctttcagaatttgaccccctattgagagagattgctcctggccccctcaccacaccctctgtcccaggctccact

SEQ ID NO: 100802 - DNA, 120 bp, Artificial Sequence
  ENSG00000092098_7 (sequence is synthesized)
cctggtccctgcttcctctgtggttctgccccaggcacactgcactgcccatcctgtaaacaggccctgtgtccagcctgtgaccacctgttccatggacacccatcccgtgctcatcac

SEQ ID NO: 100803 - DNA, 120 bp, Artificial Sequence
  ENSG00000092098_8 (sequence is synthesized)
ctccgccagaccctgcctggggtcctgcagggtacccacctgagccccagtttacctgcctcagcccaaccacggccccagtcgacctccctgctggccctgggagacagctctctttct

SEQ ID NO: 100804 - DNA, 120 bp, Artificial Sequence
  ENSG00000092098_9 (sequence is synthesized)
tcccctaatcctgcaagtgctcatttgccctggcactgtgctgcctgtgccatgctaaatgagccttgggcagtgctctgtgtggcctgtgatcggccccgaggctgtaaggggttgggg

SEQ ID NO: 100805 - DNA, 120 bp, Artificial Sequence
  ENSG00000092098_10 (sequence is synthesized)
ttgggaactgagggtccccaaggaactggaggcctagaacctgatcttgcacggggtcggtgggcctgccagagctgtacctttgagaatgaggcagctgctgtgctatgttccatatgt

SEQ ID NO: 100806 - DNA, 120 bp, Artificial Sequence
  ENSG00000092098_11 (sequence is synthesized)
gagcgacctcggctggcccagcctcccagcttggtggtggattcccgagatgctggcatttgcctgcaaccccttcagcagggggatgctttgctggcctctgcccagagtcaagtctgg

SEQ ID NO: 100807 - DNA, 120 bp, Artificial Sequence
  ENSG00000092098_12 (sequence is synthesized)
tactgtattcactgtaccttctgcaactcgagccctggctgggtgtgtgttatgtgcaaccggactagtagccccattccagcacaacatgccccccggccctatgccagctctttggaa

SEQ ID NO: 100808 - DNA, 120 bp, Artificial Sequence
  ENSG00000092098_13 (sequence is synthesized)
aagggaccccccaagcctgggcccccacgacgccttagtgcccccctgcccagttcctgtggagatcctgagaagcagcgccaagacaagatgcgggaagaaggcctccagctagtgagc

SEQ ID NO: 100809 - DNA, 120 bp, Artificial Sequence
  ENSG00000092098_14 (sequence is synthesized)
caggtgcctgtccagaggagatcttctcggctctgcagtactcgggcactgaggtgcctctgcagtggttgcgctcagaactgccctacgtcctggagatggtggctgagctggctggac

SEQ ID NO: 100810 - DNA, 120 bp, Artificial Sequence
  ENSG00000092098_15 (sequence is synthesized)
agcaggaccctgggctgggtgccttttcctgtcaggaggcccggagagcctggctggatcgtcatggcaaccttgatgaagctgtggaggagtgtgtgaggaccaggcgaaggaaggtgc

SEQ ID NO: 100811 - DNA, 120 bp, Artificial Sequence
  ENSG00000092098_16 (sequence is synthesized)
aggagctccagtctctaggctttgggcctgaggaggggtctctccaggcattgttccagcacggaggtgatgtgtcacgggccctgactgagctacagcgccaacgcctagagcccttcc

SEQ ID NO: 100812 - DNA, 120 bp, Artificial Sequence
  ENSG00000092098_17 (sequence is synthesized)
gccagcgcctctgggacagtggccctgagcccaccccttcctgggatgggccagacaagcagagcctggtcaggcggcttttggcagtctacgcactccccagctggggccgggcagagc

SEQ ID NO: 100813 - DNA, 120 bp, Artificial Sequence
  ENSG00000092098_18 (sequence is synthesized)
tggcactgtcactgctgcaggagacacccaggaactatgagttgggggatgtggtagaagctgtgaggcacagccaggaccgggccttcctgcgccgcttgcttgcccaggagtgtgccg

SEQ ID NO: 100814 - DNA, 120 bp, Artificial Sequence
  ENSG00000092098_19 (sequence is synthesized)
tgtgtggctgggccctgccccacaaccggatgcaggccctgacttcctgtgagtgcaccatctgtcctgactgcttccgccagcacttcaccatcgccttgaaggagaagcacatcacag

SEQ ID NO: 100815 - DNA, 120 bp, Artificial Sequence
  ENSG00000092098_20 (sequence is synthesized)
acatggtgtgccctgcctgtggccgccccgacctcaccgatgacacacagttgctcagctacttctctacccttgacatccagcttcgcgagagcctagagccagatgcctatgcgttgt

SEQ ID NO: 100816 - DNA, 120 bp, Artificial Sequence
  ENSG00000092098_21 (sequence is synthesized)
tccataagaagctgaccgagggtgtgctgatgcgggaccccaagttcttgtggtgtgcccagtgctcctttggcttcatatatgagcgtgagcagctggaggcaacttgtccccagtgtc

SEQ ID NO: 100817 - DNA, 120 bp, Artificial Sequence
  ENSG00000092098_22 (sequence is synthesized)
accagaccttctgtgtgcgctgcaagcgccagtgggaggagcagcaccgaggtcggagctgtgaggacttccagaactggaaacgcatgaacgacccagaataccaggcccagggcctag

SEQ ID NO: 100818 - DNA, 120 bp, Artificial Sequence
  ENSG00000092098_23 (sequence is synthesized)
caatgtatcttcaggaaaacggcattgactgccccaaatgcaagttctcgtacgccctggcccgaggaggctgcatgcactttcactgtacccagtgccgccaccagttctgcagcggct

SEQ ID NO: 100819 - DNA, 120 bp, Artificial Sequence
  ENSG00000092098_24 (sequence is synthesized)
gctacaatgccttttacgccaagaataaatgtccagagcctaactgcagggtgaaaaagtccctgcacggccaccaccctcgagactgcctcttctacctgcgggactggactgctctcc

SEQ ID NO: 100820 - DNA, 120 bp, Artificial Sequence
  ENSG00000092098_25 (sequence is synthesized)
ggcttcagaagctgctacaggacaataacgtcatgtttaatacagagcctccagctggggcccgggcagtccctggaggcggctgccgagtgatagagcagaaggaggttcccaatgggc

SEQ ID NO: 100821 - DNA, 120 bp, Artificial Sequence
  ENSG00000092098_26 (sequence is synthesized)
tcagggacgaagcttgtggcaaggaaactccagctggctatgccggcctgtgccaggcacactacaaagagtatcttgtgagcctcatcaatgcccactcgctggacccagccaccttgt

SEQ ID NO: 100822 - DNA, 120 bp, Artificial Sequence
  ENSG00000092098_27 (sequence is synthesized)
atgaggtggaagagctggagacggccactgagcgctacctgcacgtacgcccccagcctttggctggagaggatccccctgcttaccaggcccgcttgttacagaagctgacagaagagg

SEQ ID NO: 100823 - DNA, 120 bp, Artificial Sequence
  ENSG00000092098_28 (sequence is synthesized)
tacccttgggacagagtatcccccgcaggcggaagtagctgagggcaagggtcccgatgagggtcccatggcctgctccctcaggaacagctccagcaccaataaagaggcatcttacca

SEQ ID NO: 100824 - DNA, 120 bp, Artificial Sequence
  ENSG00000092098_29 (sequence is synthesized)
agtacttcctgttctcggctaaccctggcgctgggccgggggctggagagtgaccgtggtctgagtgacctggggcggctgcgtgggccgggccccgaaactacctcaacaccctgtcca

SEQ ID NO: 100825 - DNA, 120 bp, Artificial Sequence
  ENSG00000092098_30 (sequence is synthesized)
cattgtctattttcctccacccgactgtcttcagatgtttacgttgcctgcctggcccctgctggcacttgaggttgttaaccctgcccagttgttaattagaccctgatttcttagtgg

SEQ ID NO: 100826 - DNA, 120 bp, Artificial Sequence
  ENSG00000092098_31 (sequence is synthesized)
gtgtgttacctcaggcattctcttccctatcccatgttttccttcagttcctcccaactccctgtatttctgttgtgaacttcagccagccagtcaaagggataattctctctgccttcc

SEQ ID NO: 100827 - DNA, 120 bp, Artificial Sequence
  ENSG00000092098_32 (sequence is synthesized)
agtaggtagcccctcagccattcccagccagttgccactaggagaggcggtgctggctgggtcacagtccaggggctgcccgagggaggggctaggccccgaaactacctcaacaccctg

SEQ ID NO: 100828 - DNA, 120 bp, Artificial Sequence
  ENSG00000092098_33 (sequence is synthesized)
tttccgcccccctcctcccgctggcaggccgcaagcagtaggtagcccctcagccattcccagccagttgccactaggagaggcggtgctggctgggtcacagtccaggggctgcccgag

SEQ ID NO: 100829 - DNA, 120 bp, Artificial Sequence
  ENSG00000092098_34 (sequence is synthesized)
agggtggggggtgccattggctttgagagtcagaggctattgaggagtggccccggggaagagaagaggtcaacgggatgtaaagcacaactctctgtccccttaccctttgcttgctcc

SEQ ID NO: 100830 - DNA, 120 bp, Artificial Sequence
  ENSG00000092098_35 (sequence is synthesized)
tccaatgtctccatctcccctcacccttacacccctcacgcaggggttcctgagaggccaggaccccaacagtctccaacttcctctctcccatctgggtttctgccagaaatgtccaga

SEQ ID NO: 100831 - DNA, 120 bp, Artificial Sequence
  ENSG00000092098_36 (sequence is synthesized)
agcaggcagtgtgggcacaggtgggttgttaatcttgttcgtccaggtgtctcagagtccagctatgttagacacactcagttaatattagccaacacaacaaatattctgctccctttt

SEQ ID NO: 100832 - DNA, 120 bp, Artificial Sequence
  ENSG00000092098_37 (sequence is synthesized)
ctgaggcagttaccattgctgtacactgatgacatgatccatatgtctgagctgagccactgtcaccatcttagttcaggctgagggtgggtgaagggtgcccctcctgatgggcgggac

SEQ ID NO: 100833 - DNA, 120 bp, Artificial Sequence
  ENSG00000092098_38 (sequence is synthesized)
aggtattattggtcctaaattggggaccaggtaggaagctatattgatggaaatttgggatgctcctctgtcttcttggttatcttcctttgtgtttgtttgttttgagacggagttttg

SEQ ID NO: 100834 - DNA, 120 bp, Artificial Sequence
  ENSG00000092108_0 (sequence is synthesized)
agtggctcgtgggagccaagatggcggcggcggcggcagcgacagcagcagcagcagccagtattcgggaaaggcagacagtggctttgaagcgtatgttgaatttcaatgtgcctcata

SEQ ID NO: 100835 - DNA, 120 bp, Artificial Sequence
  ENSG00000092108_1 (sequence is synthesized)
ttaaaaacagcacaggagaaccagtatggaaggtactcatttatgacagatttggccaagatataatctctcctctgctatctgtgaaggagctaagagacatgggaatcactctgcatc

SEQ ID NO: 100836 - DNA, 120 bp, Artificial Sequence
  ENSG00000092108_2 (sequence is synthesized)
tgcttttacactctgatcgagatcctattccagatgttcctgcagtatactttgtaatgccaactgaagaaaatattgacagaatgtgccaggatcttcgaaatcaactatatgaatcat

SEQ ID NO: 100837 - DNA, 120 bp, Artificial Sequence
  ENSG00000092108_3 (sequence is synthesized)
attatttaaattttatttctgctatttcaagaagtaaactggaagatattgcaaatgcagcgttagcagctagtgcagtaacacaagtagccaaggtttttgaccaatatctcaatttta

SEQ ID NO: 100838 - DNA, 120 bp, Artificial Sequence
  ENSG00000092108_4 (sequence is synthesized)
ttactttggaagatgatatgtttgtattatgtaatcaaaataaggagcttgtttcatatcgtgccattaacaggccagatatcacagacacggaaatggaaactgttatggacactatag

SEQ ID NO: 100839 - DNA, 120 bp, Artificial Sequence
  ENSG00000092108_5 (sequence is synthesized)
ttgacagcctcttctgcttttttgttactctgggtgctgttcctataatcagatgttcaagaggaacagcagcagaaatggtagcagtgaaactagacaagaaacttcgagaaaatctaa

SEQ ID NO: 100840 - DNA, 120 bp, Artificial Sequence
  ENSG00000092108_6 (sequence is synthesized)
gagatgcaagaaacagtctttttacaggtgatacacttggagctggccaattcagcttccagaggcccttattagtccttgttgacagaaacatagatttggcaactcctttacatcata

SEQ ID NO: 100841 - DNA, 120 bp, Artificial Sequence
  ENSG00000092108_7 (sequence is synthesized)
cttggacatatcaagcattggtgcacgatgtactggatttccatttaaacagggttaatttggaagaatcttcaggagtggaaaactctccagctggtgctagaccaaagagaaaaaaca

SEQ ID NO: 100842 - DNA, 120 bp, Artificial Sequence
  ENSG00000092108_8 (sequence is synthesized)
agaagtcttatgatttaactccggttgataaattttggcaaaaacataaaggaagtccattcccagaagttgcagaatcagttcagcaagaactagaatcttacagagcacaggaagatg

SEQ ID NO: 100843 - DNA, 120 bp, Artificial Sequence
  ENSG00000092108_9 (sequence is synthesized)
tagaaggggaagatgaaggagccataagtatgctttctgacaataccgctaagctaacatcagctgttagttctttgccagaactccttgagaaaaaaagacttattgatctccatacaa

SEQ ID NO: 100844 - DNA, 120 bp, Artificial Sequence
  ENSG00000092108_10 (sequence is synthesized)
atgttgccactgctgttttagaacatataaaggcaagaaaattggatgtatattttgaatatgaagaaaaaataatgagcaaaactactctggataaatctcttctagatataatatcag

SEQ ID NO: 100845 - DNA, 120 bp, Artificial Sequence
  ENSG00000092108_11 (sequence is synthesized)
accctgatgcaggaactccagaagataaaatgaggttgtttcttatctattatataagcacacagcaagcaccttctgaggctgatttggagcaatataaaaaagctttaactgatgcag

SEQ ID NO: 100846 - DNA, 120 bp, Artificial Sequence
  ENSG00000092108_12 (sequence is synthesized)
gatgcaaccttaatcctttacaatatatcaaacagtggaaggcttttaccaagatggcctcagctccggccagctatggcagcactaccactaaaccaatgggtcttttatcacgagtca

SEQ ID NO: 100847 - DNA, 120 bp, Artificial Sequence
  ENSG00000092108_13 (sequence is synthesized)
tgaatacaggatcacagtttgtgatggaaggagtgaagaacctggttttgaaacagcaaaatctacctgttactcgtattttggacaatcttatggagatgaagtcaaaccccgaaactg

SEQ ID NO: 100848 - DNA, 120 bp, Artificial Sequence
  ENSG00000092108_14 (sequence is synthesized)
atgactatagatattttgatcccaaaatgctgcggggcaatgacagctcagttcccagaaataaaaatccattccaagaggccattgtttttgtggtgggaggaggcaactacattgaat

SEQ ID NO: 100849 - DNA, 120 bp, Artificial Sequence
  ENSG00000092108_15 (sequence is synthesized)
atcagaatcttgttgactacataaaggggaaacaaggcaaacacattttatatggctgcagtgagctttttaatgctacacagttcataaaacagttgtcacaacttggacaaaagtaac

SEQ ID NO: 100850 - DNA, 120 bp, Artificial Sequence
  ENSG00000092108_16 (sequence is synthesized)
acagaagaaccttactatgataatctacttggaatgtggataaatgtaaaaagaagaaaagttagaagagcaatatgtttccttctctgtaacagtgtcctaacagtgaaaatcagagtt

SEQ ID NO: 100851 - DNA, 120 bp, Artificial Sequence
  ENSG00000092108_17 (sequence is synthesized)
gtcctaacagtgaaaatcagagttatttgttaatttttaaggaaattatatacttaatatgtattgattaaaagaaacatttcagaaataaaatttcaacattgttcattttctctgata

SEQ ID NO: 100852 - DNA, 120 bp, Artificial Sequence
  ENSG00000092108_18 (sequence is synthesized)
ttaatgaaacccagttcactacctggctcagcaaaattaaaggacccacccctctaagaaggtgaaggaggtagaattgtaaatacttacctaatagtgcatgtgtgtgtatttcccata

SEQ ID NO: 100853 - DNA, 120 bp, Artificial Sequence
  ENSG00000092108_19 (sequence is synthesized)
atttaagataacatttgttactggaaatgaccaagcatcaggaggcctggttgcataagttgatttagccaaacattggactactgtgtagttatgataaagatgaagtaaatgtacata

SEQ ID NO: 100854 - DNA, 120 bp, Artificial Sequence
  ENSG00000092108_20 (sequence is synthesized)
tacagatacagaaagagctgtaaaatgtattattagatgaaaaaagatataacatgtaccctgtaatcccattttaaaaaataaaattaagaggatgtgtatgtgctattatatgcatca

SEQ ID NO: 100855 - DNA, 120 bp, Artificial Sequence
  ENSG00000092108_21 (sequence is synthesized)
atgtttttctagaaggatacacaagcatattgacatgtttttctctttttcttgtttgaaattttaatatacatctaatactttcattaaaatacagaaacaaaattacatttgtatgta

SEQ ID NO: 100856 - DNA, 120 bp, Artificial Sequence
  ENSG00000092108_22 (sequence is synthesized)
gatacagatatagatgtatagatatatcaccaggtgaaatacaacagagagctatattgagaatttccttcaggtcggagactagaacttatagtttgagaaaattttggttaatttact

SEQ ID NO: 100857 - DNA, 120 bp, Artificial Sequence
  ENSG00000092108_23 (sequence is synthesized)
tattcaatcatgtttattgagtggctctatgtatattgtactaggccctgaagatactgtagtaaacaagacagacaagttctctgttctcttgaagcttatattgtagtgacagtaaac

SEQ ID NO: 100858 - DNA, 120 bp, Artificial Sequence
  ENSG00000092108_24 (sequence is synthesized)
agagtaagcaaattagaaaacaagttaacttcaggcattttagtgacatgagaacaacaaaaacagcagggtgatgtgaggcaatgggatatgagaatggctgagaggcctactctggag

SEQ ID NO: 100859 - DNA, 120 bp, Artificial Sequence
  ENSG00000092108_25 (sequence is synthesized)
agccaagatggcggcggcggcggcagcgacagcagcagcagcagccagtattcgggaaaggcagacaggtactgacttattctcttctccttgaagcttcgtgactgccccgacgacatc

SEQ ID NO: 100860 - DNA, 120 bp, Artificial Sequence
  ENSG00000092108_26 (sequence is synthesized)
tgttgctcctgtgaaatttgacagtgagattccttctatttttagtgtaataggaaatggcaccaatagtatgccatagtatatattttgggggacaaaaatactatgctcatttcacca

SEQ ID NO: 100861 - DNA, 120 bp, Artificial Sequence
  ENSG00000092108_27 (sequence is synthesized)
ctttattcctctttatttcatgcaattttaggtagatgtgtatactaaaatccaacagtatcccaaagaaagactgttaagaataacaaaaaaactagcatattaatctcttttcttggg

SEQ ID NO: 100862 - DNA, 120 bp, Artificial Sequence
  ENSG00000092108_28 (sequence is synthesized)
tccagcctgggcgacagcgagtctccatgtcaaaaaaaaaaaaaaaacgggattcttgtttgatcaaaacaaaagcttgcagttactagtattaaaagcaaacacccaacaaagtaaaaa

SEQ ID NO: 100863 - DNA, 120 bp, Artificial Sequence
  ENSG00000092108_29 (sequence is synthesized)
gcccaaacatgtatttgtactaaaacctgaatacacctatacatttaaagaagcattttacttagaattatattttcctgtggaaacttgagtagtgccaagagtatttacatctttgac

SEQ ID NO: 100864 - DNA, 120 bp, Artificial Sequence
  ENSG00000092108_30 (sequence is synthesized)
tcacagactacttaatcttagaatgtgtttaattgaaaggtaagcatacttaactgtagaatgatcaggttgttttaatagagaagaactttggtttaatattctaatatttaacaaaat

SEQ ID NO: 100865 - DNA, 120 bp, Artificial Sequence
  ENSG00000092108_31 (sequence is synthesized)
gacttcagtcaaagggatggacattattttatctctgtttttttacttggcctttattttttcaaatcttaggttctctttttgtacctttcaccctctgctactgactcttattatttg

SEQ ID NO: 100866 - DNA, 120 bp, Artificial Sequence
  ENSG00000092108_32 (sequence is synthesized)
aaacattaaatcggaagttatactaatagacatagggactttaattaaagtttacctttttttccagtcaagaataaaaaaaaaatggtttccaaataaatatgtattttttaaaaggtt

SEQ ID NO: 100867 - DNA, 120 bp, Artificial Sequence
  ENSG00000092108_33 (sequence is synthesized)
atatgacttgcatttacatagggttttatactttgtaagatgctttagtattcattatcttattgagtccccactgtaacatgaagtataattatggaagacagcagtattatagttatt

SEQ ID NO: 100868 - DNA, 120 bp, Artificial Sequence
  ENSG00000092108_34 (sequence is synthesized)
tttttgcaaataaagtaacctaggaatccagaaagataagtgatttccaaggtcacatgtttagtaaatagaagtgggaatctatgatatttctattatattgcactgcctcaatatcac

SEQ ID NO: 100869 - DNA, 120 bp, Artificial Sequence
  ENSG00000092108_35 (sequence is synthesized)
tatagtaacatgcagtgttccctttaatttaaaattaacatcatggctacagaaacaaaaatgagaaggatggaactgagacctatgaacaaaacaagtgatgggatttggtattactgg

SEQ ID NO: 100870 - DNA, 120 bp, Artificial Sequence
  ENSG00000092108_36 (sequence is synthesized)
gtgtggatgctggaaaatgtgaagcattaaagtttagtttcaaatttatgatctttatagggtaaagtagtggttttgttggccatggaaaagaaggaaaagaaaacaattgaagaaaat

SEQ ID NO: 100871 - DNA, 120 bp, Artificial Sequence
  ENSG00000092108_37 (sequence is synthesized)
ggattattttgttttatttttaattttctaaccgaataagtaaataaatgtgttctcccttaggagaaaagcagtaatttctcccttttctctgggagtcagttaaacctcattttacgt

SEQ ID NO: 100872 - DNA, 120 bp, Artificial Sequence
  ENSG00000092108_38 (sequence is synthesized)
ctttattcaaccccttatttctgggatttaaaaaaatcctcagtctgaggctttataatttcagaatttaaattttctgccttgtggcttttccttagatttggtttaccctctatgtaa

SEQ ID NO: 100873 - DNA, 120 bp, Artificial Sequence
  ENSG00000092108_39 (sequence is synthesized)
aggaaaagaactagtaatcttaaggtctcttccagctctaaaagtgttttgttcctttaatttaaatacacagattctccttgacctacaatggggttacatacttataaacccatcata

SEQ ID NO: 100874 - DNA, 120 bp, Artificial Sequence
  ENSG00000092108_40 (sequence is synthesized)
gcttttaccaagatggcctcagctccggccagctatggcagcactaccactaaaccaatgggctgtgatacccatggcagcagaaattctcaagacccttctgtttagtgaaaacaaagg

SEQ ID NO: 100875 - DNA, 120 bp, Artificial Sequence
  ENSG00000092108_41 (sequence is synthesized)
aatattgacagaatgtgccaggcatcaaatctatgttcacatcaacaagaagagggacatggactgtgccagccctgactgttgattttgatcaggaatttaagcctttccagaaactcc

SEQ ID NO: 100876 - DNA, 120 bp, Artificial Sequence
  ENSG00000092108_42 (sequence is synthesized)
cagaagacctttatttatttctcactaggtagaatcagttacaagggtggctgcaaaagtcaatatttagatgagtcaccccaaagaaaatctagcaagattcttttagcaaggaaaagg

SEQ ID NO: 100877 - DNA, 120 bp, Artificial Sequence
  ENSG00000092108_43 (sequence is synthesized)
ataggtagaacactagcatactctgatggctatcctgatccttctataacttcttttctaaaaggtagttttaaaatcatgcatatatgatttttaaatgtttattgttttcctattcct

SEQ ID NO: 100878 - DNA, 120 bp, Artificial Sequence
  ENSG00000092108_44 (sequence is synthesized)
gtcacattcatttctggcctaaaattgtacttaatctagaaaacaatgtatcttattgatataatgcactttgcagctacctgtcttaatataacctcaaatgcttagagacctcttccc

SEQ ID NO: 100879 - DNA, 120 bp, Artificial Sequence
  ENSG00000092140_0 (sequence is synthesized)
gaatttgaatcctgtgggccgttgaatgtggctgctcgcggtcggcgtgccccgacgtacagcgggccgggaaaagtggcactgaggctctggaacttctgcccagctctccttgtaaaa

SEQ ID NO: 100880 - DNA, 120 bp, Artificial Sequence
  ENSG00000092140_1 (sequence is synthesized)
tgaatgaaagtaaacctggtgactcacagaaccttgcttgtgttttctgtcgaaaacatgatgactgtcctaataaatacggagaaaagaaaactaaggagaaatggaatctcactgtac

SEQ ID NO: 100881 - DNA, 120 bp, Artificial Sequence
  ENSG00000092140_2 (sequence is synthesized)
attactactgtttgttgatgtcaagtggaatttggcagagaggcaaagaagaagaaggagtttatggttttctaatagaagatatcaggaaggaagtgaatagagcttctaaactgaaat

SEQ ID NO: 100882 - DNA, 120 bp, Artificial Sequence
  ENSG00000092140_3 (sequence is synthesized)
gctgtgtttgcaagaaaaatggtgcttcaattggatgtgttgcaccccgatgtaaacgaagttatcatttcccatgtggacttcagagagaatgtattttccagtttactggcaattttg

SEQ ID NO: 100883 - DNA, 120 bp, Artificial Sequence
  ENSG00000092140_4 (sequence is synthesized)
cgtcattttgttgggaccatcgacctgttcaaataattacatctaataattatagagagtccttaccatgcaccatttgcttggaatttattgagcctattccaagttataacatattac

SEQ ID NO: 100884 - DNA, 120 bp, Artificial Sequence
  ENSG00000092140_5 (sequence is synthesized)
gaagtccttgttgtaagaacgcttggtttcatagagactgtttacaggttcaagcaataaatgcgggagtgtttttctttaggtgtacaatatgcaataatagtgacatctttcagaaag

SEQ ID NO: 100885 - DNA, 120 bp, Artificial Sequence
  ENSG00000092140_6 (sequence is synthesized)
agatgttgagaatgggaattcatattcctgaaaaagatgcttcctgggaattagaggaaaacgcttatcaagagcttctgcagcactatgagcgttgtgatgttcgaagatgtcgttgca

SEQ ID NO: 100886 - DNA, 120 bp, Artificial Sequence
  ENSG00000092140_7 (sequence is synthesized)
aagaagggcgagactataatgcacctgatagcaaatgggaaataaagcgctgtcagtgttgtggttccagtggcacacatttagcctgctcctcattacggtcatgggagcaaaattggg

SEQ ID NO: 100887 - DNA, 120 bp, Artificial Sequence
  ENSG00000092140_8 (sequence is synthesized)
agtgtttggaatgtaggggtattatctacaattcaggagagttccaaaaagccaaaaaacatgtattacccaattctaataatgtggggattacagattgtttgttggaagagtcatcac

SEQ ID NO: 100888 - DNA, 120 bp, Artificial Sequence
  ENSG00000092140_9 (sequence is synthesized)
ctaaattacccagacagtcacctggatcccagagtaaagatctactgaggcaaggcagcaaatttagaagaaatgtatcaacactattaatagagttaggattccaaattaaaaaaaaaa

SEQ ID NO: 100889 - DNA, 120 bp, Artificial Sequence
  ENSG00000092140_10 (sequence is synthesized)
ctaaaagattgtatatcaacaaagccaatatctggaatagtgccttagatgcattcagaaatcgaaactttaatccttcatatgcaattgaagtagcatatgttattgaaaatgataatt

SEQ ID NO: 100890 - DNA, 120 bp, Artificial Sequence
  ENSG00000092140_11 (sequence is synthesized)
ttggaagtgagcatcctggatcaaagcaagaatttctgagtctcttaatgcaacatcttgagaactcatcattgtttgaagggtccttgtcaaagaacttgtctctaaattctcaagctc

SEQ ID NO: 100891 - DNA, 120 bp, Artificial Sequence
  ENSG00000092140_12 (sequence is synthesized)
tgaaagagaatctttactatgaagctggcaaaatgcttgccatttctttagttcacggtggtccttcacctggtttcttttctaaaaccttgtttaactgccttgtttatggaccagaaa

SEQ ID NO: 100892 - DNA, 120 bp, Artificial Sequence
  ENSG00000092140_13 (sequence is synthesized)
atacccagccaattttagatgatgtttcagactttgatgtggcacagattataatcaggataaatactgcaacaactgtagctgacttaaagtcaataataaatgaatgctataactacc

SEQ ID NO: 100893 - DNA, 120 bp, Artificial Sequence
  ENSG00000092140_14 (sequence is synthesized)
ttgagttaattggatgtctcagacttataacgacattaagtgataaatatatgttagtaaaagacatacttggctaccatgtaattcagagagtccacacaccctttgaaagttttaagc

SEQ ID NO: 100894 - DNA, 120 bp, Artificial Sequence
  ENSG00000092140_15 (sequence is synthesized)
agggtctgaaaacccttggtgttttggagaaaattcaggcttatccagaagcattttgtagcatcctgtgtcataaacctgagagtctttctgcaaaaatccttagtgagctttttacag

SEQ ID NO: 100895 - DNA, 120 bp, Artificial Sequence
  ENSG00000092140_16 (sequence is synthesized)
tacacacattacctgatgtgaaagctttggggttttggaacagttacttacaggctgttgaagatggtaaatctacaacaacaatggaagacattcttatttttgcaactggttgcagtt

SEQ ID NO: 100896 - DNA, 120 bp, Artificial Sequence
  ENSG00000092140_17 (sequence is synthesized)
ccattcctccagctggatttaaacccactccttcaattgagtgtctgcatgtggattttcctgttggaaacaagtgtaataactgtttagcaattcccatcaccaatacatataaagagt

SEQ ID NO: 100897 - DNA, 120 bp, Artificial Sequence
  ENSG00000092140_18 (sequence is synthesized)
ttcaagaaaatatggacttcaccataagaaacactctaagactagaaaaggaagaaagttctcattacattggacattaaaatgtttccttgaacaaagagaagcttctttaaaagctgc

SEQ ID NO: 100898 - DNA, 120 bp, Artificial Sequence
  ENSG00000092140_19 (sequence is synthesized)
tattgataactctcttttatttcactaaccttttcatcatcactttgaacaaactagttagcttcttgacctaataaaatttatgatatgaatataaaggaatattatagccacttaggc

SEQ ID NO: 100899 - DNA, 120 bp, Artificial Sequence
  ENSG00000092140_20 (sequence is synthesized)
taaaaaaaggttttttttgttaaagcatactagtcaaaattggtgataatttctcattttcttgatatagatacttcataaacctcaatataaatactctcaaaatggttgtatggattt

SEQ ID NO: 100900 - DNA, 120 bp, Artificial Sequence
  ENSG00000092140_21 (sequence is synthesized)
tatttaggtatggtagcatggttaataaaagtaaaaactgttttactcacattttttgtaaattaggattacatatagaatgccacaatttctctaggtttattcaattttcaaattatt

SEQ ID NO: 100901 - DNA, 120 bp, Artificial Sequence
  ENSG00000092140_22 (sequence is synthesized)
cctcattttattttaaagcattaaatagaaaagctaattggttaaattttgttatataaatcagagtcatatattctgggatttgtgttactatgcatacttttctaggatgtcaccaaa

SEQ ID NO: 100902 - DNA, 120 bp, Artificial Sequence
  ENSG00000092140_23 (sequence is synthesized)
ttagttgtttaaaatgtttttagattactgatttatattaagatgacccacactgcaattagattatgcctagtgggaagtattatataaaaagcagaattaagctgggcacatgtgctt

SEQ ID NO: 100903 - DNA, 120 bp, Artificial Sequence
  ENSG00000092140_24 (sequence is synthesized)
ttataagggaggctgaggtgggagaatcgagatactcagccagcctggcaatgtagcaaagactccatctcaaaaaaaaaaacagaattgcacaaattttctggaatctatggacattcc

SEQ ID NO: 100904 - DNA, 120 bp, Artificial Sequence
  ENSG00000092140_25 (sequence is synthesized)
atgagcttaaacacttttgaggtggataacatttagttgaaaatacctaagaaagtgtgtcttctttaaagccttggctttaatcatgggaaattgttgttgttgttgttgttgtttgta

SEQ ID NO: 100905 - DNA, 120 bp, Artificial Sequence
  ENSG00000092140_26 (sequence is synthesized)
tcctatgtttggtattctgtatgtctgatccataatcattttagatatttgaatgatctctgtggattggtaggtttggccatttgaccattatttattatcaagttggttgtatgctaa

SEQ ID NO: 100906 - DNA, 120 bp, Artificial Sequence
  ENSG00000092140_27 (sequence is synthesized)
ggtaagttgacgccatagcattatacagttatcttcattgctcttgaatgatatctgttatataagcaatgtataaataaagtaaaaaggatagaatgaaaaacccattctaatgtcacc

SEQ ID NO: 100907 - DNA, 120 bp, Artificial Sequence
  ENSG00000092140_28 (sequence is synthesized)
actcagagataagtaccgtatttctgtgtatccttctataaactctttacttctgtttcctttattttttaactttaataatgctactaaaagacaatacctaaaagtaactgtactaac

SEQ ID NO: 100908 - DNA, 120 bp, Artificial Sequence
  ENSG00000092140_29 (sequence is synthesized)
aaagtgctaacaatgtgaaaatatatagtcccatagtcatgtccccatatttatactcccacagaagaaaaaattggaaaacaaagtctgatgtccttaatctattaacatatttaaatg

SEQ ID NO: 100909 - DNA, 120 bp, Artificial Sequence
  ENSG00000092140_30 (sequence is synthesized)
atataatggttcagttttccatgaaagtaaatcattatgggaagtaaaatgttttaaccatatttttcttaatacacaaagcaggtgtcagctgttgtattctcacccttcttaagaaaa

SEQ ID NO: 100910 - DNA, 120 bp, Artificial Sequence
  ENSG00000092140_31 (sequence is synthesized)
atcattacattattgatattttttaagtaacagaatagatttgaaagagataatatatctcttaataccaaaggaaaactaaaacataattctagtgtacttttctttgttccctcatgt

SEQ ID NO: 100911 - DNA, 120 bp, Artificial Sequence
  ENSG00000092140_32 (sequence is synthesized)
ctttttcaatctgtacactaacatacctagcaaatttgttttactttaacttgaaatatttaagaacattaaacaagacatttctttggctttggttgaatttttttgtctcaccaatag

SEQ ID NO: 100912 - DNA, 120 bp, Artificial Sequence
  ENSG00000092140_33 (sequence is synthesized)
taattgaaagatcaattatcaaagagtttgaatagctaatataaaccccaaagtcaccatacagtttttattccaaatatgttgataaaaagatatttgtttctttatccaccttatttt

SEQ ID NO: 100913 - DNA, 120 bp, Artificial Sequence
  ENSG00000092140_34 (sequence is synthesized)
tattacagctaaaaaccaatacaaaccaataaaacctagttaaagctattttctggtttttagttgcaattaatttcccctagggtagaaattaaagctgattaagtcacacacacatac

SEQ ID NO: 100914 - DNA, 120 bp, Artificial Sequence
  ENSG00000092140_35 (sequence is synthesized)
tttgttggggtgggggtggcaggtggagaggcagtgtacttgggttagctacaattaaaaacagtatttcaattcctcatttgacttattttatatatagacagggccttagtgataaga

SEQ ID NO: 100915 - DNA, 120 bp, Artificial Sequence
  ENSG00000092140_36 (sequence is synthesized)
tggtgtaaataatttaggatattcatgttttaaagtgaagcataaatatttattttgcaaaatgttttctagtttgaaggatgttccattattaccatttttagattaatctgtatggtc

SEQ ID NO: 100916 - DNA, 120 bp, Artificial Sequence
  ENSG00000092140_37 (sequence is synthesized)
aaggaatatcagagaaacctgtaggttatttattttctgcagtgtcattttgtcaaatggttggtattataattgttcttttcttattaattttataaccagtgcataattcttacatta

SEQ ID NO: 100917 - DNA, 120 bp, Artificial Sequence
  ENSG00000092140_38 (sequence is synthesized)
gattttaaaaaagaattatgctataaatctttataaatgtgtacatatatttcttaaatattgcaattgcctaaatgttgtatattttaaggctgttttctcttgctcttaatgttgagg

SEQ ID NO: 100918 - DNA, 120 bp, Artificial Sequence
  ENSG00000092140_39 (sequence is synthesized)
aaaactataaattgatctataatgcatctactgttaatggttttggttagtttgatattcattgtttttaaacactttccaatatggaaactttaacaccttttatacaattctctacta

SEQ ID NO: 100919 - DNA, 120 bp, Artificial Sequence
  ENSG00000092140_40 (sequence is synthesized)
ttcaagatattctttaaaatatctcaccagaaacttacaattttatactttgtaatttttagtttctgtaatttgaggaagtgactttttttgtttgggttaagtaaaaagcctttgatt

SEQ ID NO: 100920 - DNA, 120 bp, Artificial Sequence
  ENSG00000092140_41 (sequence is synthesized)
gattaccagcatgagaattcaccttggtttctattttatgcatttgtaaatttttcccctaattatatggaagctattggaacttttgtattcagtgctaaatactaagtcaaggggagt

SEQ ID NO: 100921 - DNA, 120 bp, Artificial Sequence
  ENSG00000092140_42 (sequence is synthesized)
atattaggtaagttttttcagtgactgtgcctttagcattcagtcattataagaaaatgatcagaacaaaatcattacattataaacatgtaattcttttatatagtgattatcatgtac

SEQ ID NO: 100922 - DNA, 120 bp, Artificial Sequence
  ENSG00000092140_43 (sequence is synthesized)
tgcattgttactttaaaataagctattaaactagtttttatggttcaagtaatgcaatacaaagtttcatgcttcaagtaatgcaatacaaaacataacccatttaatgatgaattactt

SEQ ID NO: 100923 - DNA, 120 bp, Artificial Sequence
  ENSG00000092140_44 (sequence is synthesized)
gaatgtatattatctgtggtttaggaaaatttggattgtcttgaagagactcagttttcaagttctgattttgaccattatctcttctaattcataaacatatcccagtacctacactat

SEQ ID NO: 100924 - DNA, 120 bp, Artificial Sequence
  ENSG00000092140_45 (sequence is synthesized)
gccaggtattatgctaggtgatcgtttatatgtcagcctatttcccccccttttaaagactgccagattaaccaaaaagcgtgacatttataacaatgttttataaataaataaatgtgt

SEQ ID NO: 100925 - DNA, 120 bp, Artificial Sequence
  ENSG00000092140_46 (sequence is synthesized)
ttatgccactaaaggtaaactgcctatttaaactaagtaattttttgggatttaataagattaagattctgacgaaactgaaagatacaagattcctttactctccacatttgagagatc

SEQ ID NO: 100926 - DNA, 120 bp, Artificial Sequence
  ENSG00000092140_47 (sequence is synthesized)
ctataagcaagcagttagtgtctgacacccaggaacctatagaaatgagggaatctgtgttaaaactatgtatcctctaatgtaaaatagcttaccagaataaattatttaagccaaaaa

SEQ ID NO: 100927 - DNA, 120 bp, Artificial Sequence
  ENSG00000092140_48 (sequence is synthesized)
catttattcttttagttgaggcaaagaagtggaggcaattatttttgaagatatcaagaaggtaggagagttaatggtaaaaacagaggttctagggcacaaggaagaaccgtgggagaa

SEQ ID NO: 100928 - DNA, 120 bp, Artificial Sequence
  ENSG00000092140_49 (sequence is synthesized)
aggtgagcatgaatctaaggactacgtgagatgttaaacgtgagatattagtatcataattcctaaacttcctggtgatagtgagcttgtggtaaaaggtggtctctaaaggtcccctta

SEQ ID NO: 100929 - DNA, 120 bp, Artificial Sequence
  ENSG00000092140_50 (sequence is synthesized)
tggtttggaactacagattgaatatcccttatccaaaatgcttggaaccagaattttagatttgaaatttttttcagatttaggaatatttgcttaccagttgagcacctctaatctgaa

SEQ ID NO: 100930 - DNA, 120 bp, Artificial Sequence
  ENSG00000092140_51 (sequence is synthesized)
gaatttgaatcctgtgggccgttgaatgtggctgctcgcggtcggcgtgccccgacgtacagcgggccgggaaaagtggcactgaggctctggaacttctgcccagctctccttgcttgt

SEQ ID NO: 100931 - DNA, 120 bp, Artificial Sequence
  ENSG00000092140_52 (sequence is synthesized)
cagtggcatgatcatggctcactgcagccccgacctcctgggcacaagtgatcctcccacctgagcctaccaagtggctggaactacagatgcatgccaccatgcttggctaatttttaa

SEQ ID NO: 100932 - DNA, 84 bp, Artificial Sequence
  ENSG00000092140_53 (sequence is synthesized)
tctcaagtagtcctcccacctttgcctcccaaaatgttgggattacaggcaaggcagcaaatttagaagaaatgtatcaacact

SEQ ID NO: 100933 - DNA, 120 bp, Artificial Sequence
  ENSG00000092140_54 (sequence is synthesized)
gaatttgaatcctgtgggccgttgaatgtggctgctcgcggtcggcgtgccccgacgtacagcgggccgggaaaagtggcactgaggctctggaacttctgcccagctctccttgctaaa

SEQ ID NO: 100934 - DNA, 120 bp, Artificial Sequence
  ENSG00000092140_55 (sequence is synthesized)
tctgctcctctccctcctcccaccctcctgcgtcagctaaaaaacattcccttcaatttaaaaaatgttcccgactcttaacaccccagttgagaactactgatcttagatgtattaaag

SEQ ID NO: 100935 - DNA, 120 bp, Artificial Sequence
  ENSG00000092140_56 (sequence is synthesized)
aagcacatctacaatcaaggagaggggcaggctttaccttttgaaggaagaagtatgaaagtgtatcactgactgatcaagtagagctaaaaaacattcccttcaatttaaaaaatgttc

SEQ ID NO: 100936 - DNA, 120 bp, Artificial Sequence
  ENSG00000092140_57 (sequence is synthesized)
gatagtattttgagcagaatagtcatgaaaaacttaggagatttcagcagagattttgaatgaatgaaaagaagtcatgtaaatctctaagaatgttttaggaaaaggaaattgcaagta

SEQ ID NO: 100937 - DNA, 120 bp, Artificial Sequence
  ENSG00000092140_58 (sequence is synthesized)
aattttctgttaatggattgtttcctatttttaactttctccatctgtacctttaagagctaacctgtatgaaagtgtcttgcacataaatggccaagtatttctttgtttatgctgttc

SEQ ID NO: 100938 - DNA, 120 bp, Artificial Sequence
  ENSG00000092140_59 (sequence is synthesized)
actaaaatattcttgataaaattctgtccatcttttaattctcagctgttactctttttcatgaattctcaggtcatctttcttgcctatctagtactaggtaacttttctctttttttt

SEQ ID NO: 100939 - DNA, 120 bp, Artificial Sequence
  ENSG00000092140_60 (sequence is synthesized)
tcttttctttttaagagataaggtctcagtctgtcacccaggctggagtacattggtgtgatcatagctcactgaacctccaactcctgggctcaaaatccttctacctcatcttccaga

SEQ ID NO: 100940 - DNA, 120 bp, Artificial Sequence
  ENSG00000092140_61 (sequence is synthesized)
gtagctaggactacaggtgtataccacccacaccaggccttttttttttttctttagaggggggctagctgtgttgcccaggatgttcttgaacttctggcctcaagcaggcctcccacc

SEQ ID NO: 100941 - DNA, 120 bp, Artificial Sequence
  ENSG00000092140_62 (sequence is synthesized)
tcagcctccctagtagctagtcttacctagtgctatataatttttcaatgtcagttatttccttttttataaatagtttcacgtagtaaagtggcattatactctggatttcttgaaggc

SEQ ID NO: 100942 - DNA, 120 bp, Artificial Sequence
  ENSG00000092140_63 (sequence is synthesized)
agaaatagacaaatttgttgaactggatgatcagacatttattctagaagaatatttcttggtttacttttactgcacccatatgtactaagaaatttgagtataaattaacaagtatca

SEQ ID NO: 100943 - DNA, 120 bp, Artificial Sequence
  ENSG00000092140_64 (sequence is synthesized)
tttgaaatgtgcatgtcactcaaaagtaaatgagtaaagtggctgtattttctccttcattacagataaatactgcaacaactgtagctgacttaaagtcaataataaatgaatgctata

SEQ ID NO: 100944 - DNA, 120 bp, Artificial Sequence
  ENSG00000092140_65 (sequence is synthesized)
agagagagaagcaggaccgtggggtgggagagggtgtcaggaggccggacgtcgcagccggggcctcgcagtgcttttggggacgtctggtgctggggcccggcctggagactaagggaa

SEQ ID NO: 100945 - DNA, 120 bp, Artificial Sequence
  ENSG00000092140_66 (sequence is synthesized)
ttcggggcactgggggcgtttgctggaccagcgctctcgacggttgcgcacgccagccagctctcagtgttgaggattcggaggccctgccggtcccccgcgagtaaaccttgtttatac

SEQ ID NO: 100946 - DNA, 120 bp, Artificial Sequence
  ENSG00000092140_67 (sequence is synthesized)
gcatcctccgtggctttttttaaacccgtagtttattatttccaccaattcggctcgaatgctgaaattttaacagtagttaaatctcactgtgaaggcgttgccacgtttaaacaaatc

SEQ ID NO: 100947 - DNA, 120 bp, Artificial Sequence
  ENSG00000092140_68 (sequence is synthesized)
tcttttaatgaaagatggaaggttggggcgggtttagaatgaaaagatgctctacgtggctccgcgttcctcctgagagagatacccgggcaaccttgattaactctggactgcagggaa

SEQ ID NO: 100948 - DNA, 120 bp, Artificial Sequence
  ENSG00000092140_69 (sequence is synthesized)
gtgacagtctttgaaatgcctgagtgggatttaaactgaaattcgagtgtcctttgtatttaaaacccggatatttttctttcacggttgacatttttcatgtaccgcaaaaatccgaga

SEQ ID NO: 100949 - DNA, 120 bp, Artificial Sequence
  ENSG00000092140_70 (sequence is synthesized)
ctcctatttaaaccggctgtggtaacagcggtggtgattaactagggtcttagtttgcaaacaatagggataaggtttagttccaccgccctgccttttcgcctccctcattcattggcc

SEQ ID NO: 100950 - DNA, 120 bp, Artificial Sequence
  ENSG00000092140_71 (sequence is synthesized)
aactgggttattatggagtctttttggaagtaatccactaatgctttgagcatctgtttctttgggttttattgttttgggcttttttttttttaatttttaatgatgaactatctgaaa

SEQ ID NO: 100951 - DNA, 120 bp, Artificial Sequence
  ENSG00000092140_72 (sequence is synthesized)
tatggaactctgtctaacccagtagtaaagtcatgccttctggaatggtttaaaagtgtgccataaatgtaaactataaatgggaactttaaatgtgtacaagttttacatctttattaa

SEQ ID NO: 100952 - DNA, 120 bp, Artificial Sequence
  ENSG00000092140_73 (sequence is synthesized)
aaatcgtcagttttgtgtagcttaatacgaaaagatattttaagttccttttaaggttttaacaccaggatattgtaccatttaaatgtataaatatatttttaaaagtaggacttcata

SEQ ID NO: 100953 - DNA, 120 bp, Artificial Sequence
  ENSG00000092140_74 (sequence is synthesized)
ataatcagaataaaaacattccttcatccagtgctggctattccagcacccccattcttcctgctattgaacttttaagtgttagccaggaagaatagacttaaatactcggtgtttagg

SEQ ID NO: 100954 - DNA, 120 bp, Artificial Sequence
  ENSG00000092140_75 (sequence is synthesized)
atagttaaaatatgagcatttttcatatagtgtctttgtaacagagacattggctatacttctctaagcctttctgctcatttcatatgtgctgtcaacaaatggtaatttttaaaaatt

SEQ ID NO: 100955 - DNA, 120 bp, Artificial Sequence
  ENSG00000092140_76 (sequence is synthesized)
gatcgctatatcctaatctctttatttttttctacctgaattattttcattggatttttgctctttcttaaatcagtgagtttcagaatttattgtgtatacactaccttgaaggatttg

SEQ ID NO: 100956 - DNA, 80 bp, Artificial Sequence
  ENSG00000092148_0 (sequence is synthesized)
gcctccgccgggctcggctgccctcggcagcttccccgcctggctctccctcgaccctcctcccctccccctcccggttc

SEQ ID NO: 100957 - DNA, 120 bp, Artificial Sequence
  ENSG00000092148_1 (sequence is synthesized)
gcccgcagcaccgcgcgggcctctgagttgcagggcctgaggagccgcgtgctggggactggacgtccgctggctgctgccgcacgcgagaacctctcgcttccctgtcaccaggtcctc

SEQ ID NO: 100958 - DNA, 120 bp, Artificial Sequence
  ENSG00000092148_2 (sequence is synthesized)
gcggaggaaggggagggacgaggcgcggcttttcctgtgccgcctgcccggttcgacctgcgcggcctgcggcttcttgggaactctagggccgcggccgggcctggctctgccggcggc

SEQ ID NO: 100959 - DNA, 120 bp, Artificial Sequence
  ENSG00000092148_3 (sequence is synthesized)
ctgttgggagctggatcggagcggtttggaacgacaagcccgagtaagagcctgcgggaaggggaggcgggagcgcctcggaccgtcggaagggccctgcgtgggggcgcggatcccgga

SEQ ID NO: 100960 - DNA, 120 bp, Artificial Sequence
  ENSG00000092148_4 (sequence is synthesized)
cggcgagtggcggaaagcgagaccccggcgccgagtgaggtcggccaggctgctgccgacttccccgctggcccctttgttcccctcccggggccctgccggcggcggggcccggttgcc

SEQ ID NO: 100961 - DNA, 120 bp, Artificial Sequence
  ENSG00000092148_5 (sequence is synthesized)
tgcccgcgccagagcctcaggccggctccttttgcccttgagaagggttcgctgccaggccttcgagttccgggcgcagctcccgggagagccggcgccctgcctggcccggcggcctcc

SEQ ID NO: 100962 - DNA, 120 bp, Artificial Sequence
  ENSG00000092148_6 (sequence is synthesized)
tctcgggcacgaaggcttgctgctgcttctccagaacttcccttcctcgtagacacagcaaagagacttttaaaaaaccatggcagatgtggacccagatacattgctggaatggctaca

SEQ ID NO: 100963 - DNA, 120 bp, Artificial Sequence
  ENSG00000092148_7 (sequence is synthesized)
gatgggacagggagatgaaagggacatgcaactaatagcccttgaacagctatgcatgctgcttttgatgtctgacaacgtggatcgttgttttgaaacatgtcctcctcgcactttctt

SEQ ID NO: 100964 - DNA, 120 bp, Artificial Sequence
  ENSG00000092148_8 (sequence is synthesized)
accagccctttgcaaaatttttcttgatgaaagtgctccagacaatgtattagaggtgacagcccgtgccataacatactacctggatgtatctgcggaatgtacccgaaggattgttgg

SEQ ID NO: 100965 - DNA, 120 bp, Artificial Sequence
  ENSG00000092148_9 (sequence is synthesized)
ggtagatggagctataaaagcactttgtaatcgtttggttgtagttgaacttaacaacaggactagcagagacttagccgaacagtgtgtaaaggtattagaactgatatgtactcgtga

SEQ ID NO: 100966 - DNA, 120 bp, Artificial Sequence
  ENSG00000092148_10 (sequence is synthesized)
gtcaggagcagtctttgaggctggtggtttgaattgtgtgcttaccttcattcgtgacagtggacatctagttcataaagacaccttgcactctgctatggctgtggtatcaagactctg

SEQ ID NO: 100967 - DNA, 120 bp, Artificial Sequence
  ENSG00000092148_11 (sequence is synthesized)
tggcaaaatggagcctcaagattcttctttagaaatttgtgtagaatctctgtctagtttattaaagcatgaagatcatcaggtttcagatggagctctgcgatgctttgcatcactggc

SEQ ID NO: 100968 - DNA, 120 bp, Artificial Sequence
  ENSG00000092148_12 (sequence is synthesized)
tgaccgatttacccgtcgtggtgttgacccagctccattagccaagcatggattaactgaggagctgttatctcgaatggctgctgctggtggtactgtttcaggaccatcatcagcatg

SEQ ID NO: 100969 - DNA, 120 bp, Artificial Sequence
  ENSG00000092148_13 (sequence is synthesized)
caaaccaggtcgcagcaccacaggagctccatccaccactgcagattccaaattgagtaatcaggtgtcaacaattgtaagtctgctctcaacactttgcagaggctctccggtagtaac

SEQ ID NO: 100970 - DNA, 120 bp, Artificial Sequence
  ENSG00000092148_14 (sequence is synthesized)
acatgatcttctgaggtcggagcttccagattcaattgaaagtgcattgcagggtgatgaaagatgtgtgcttgatactatgcgtttggttgaccttctcttggtgctattatttgaagg

SEQ ID NO: 100971 - DNA, 120 bp, Artificial Sequence
  ENSG00000092148_15 (sequence is synthesized)
acgaaaagctttgccaaagtctagtgctggatctacaggcagaatcccaggactccggagattagatagttctggggagcgctcacatcggcagcttatagattgtattcgaagtaaaga

SEQ ID NO: 100972 - DNA, 120 bp, Artificial Sequence
  ENSG00000092148_16 (sequence is synthesized)
taccgatgcacttatagatgcaattgacacaggagcctttgaagtaaattttatggatgatgtaggtcagactctattaaactgggcctctgcttttggaactcaggaaatggtagaatt

SEQ ID NO: 100973 - DNA, 120 bp, Artificial Sequence
  ENSG00000092148_17 (sequence is synthesized)
tctttgtgagagaggtgcagatgttaatagaggtcaaaggtcatcatcattacattatgctgcatgttttggaagacctcaagtagcaaagactctgttacggcatggtgcaaatccaga

SEQ ID NO: 100974 - DNA, 120 bp, Artificial Sequence
  ENSG00000092148_18 (sequence is synthesized)
tctgagagatgaagatgggaaaactccattagataaagctcgagaaaggggccatagtgaagtggtagctattcttcagtctccaggtgattggatgtgtccagttaataaaggagatga

SEQ ID NO: 100975 - DNA, 120 bp, Artificial Sequence
  ENSG00000092148_19 (sequence is synthesized)
taagaaaaagaaagatacaaacaaagatgaagaagaatgtaatgagcccaaaggagatccggaaatggcacccatatacttgaaaaggttattgccagtgtttgcacaaacatttcagca

SEQ ID NO: 100976 - DNA, 120 bp, Artificial Sequence
  ENSG00000092148_20 (sequence is synthesized)
aactatgctgccttcaataaggaaagcaagtcttgctctaattcgaaaaatgattcatttttgctctgaagcactgttaaaagaagtttgtgattctgatgttggtcacaatttgcctac

SEQ ID NO: 100977 - DNA, 120 bp, Artificial Sequence
  ENSG00000092148_21 (sequence is synthesized)
aatactagtggaaatcactgcaactgtcctggatcaagaggatgatgatgatggccacttgctggctttgcagatcataagggatttagtagataaaggtggtgatatatttttggatca

SEQ ID NO: 100978 - DNA, 120 bp, Artificial Sequence
  ENSG00000092148_22 (sequence is synthesized)
gctagccagacttggtgtaattagcaaagtgtcaacgttggcaggtccttcctctgatgatgagaatgaagaggaatcaaaaccagaaaaagaagatgaaccacaggaagatgctaaaga

SEQ ID NO: 100979 - DNA, 120 bp, Artificial Sequence
  ENSG00000092148_23 (sequence is synthesized)
attgcaacaaggtaaaccatatcattggagagactggtcaatcattaggggaagggactgcttatatatttggagtgatgcagcagccttggaattatctaatggcagtaatggatggtt

SEQ ID NO: 100980 - DNA, 120 bp, Artificial Sequence
  ENSG00000092148_24 (sequence is synthesized)
cagatttatcttggatggaaaacttgccaccatgtattcaagtggtagtccggaaggtggatctgacagttcagaaagccgaagtgaattcttagagaagttacaaagagctcgaggcca

SEQ ID NO: 100981 - DNA, 120 bp, Artificial Sequence
  ENSG00000092148_25 (sequence is synthesized)
agtaaagccatctacttcaagtcaacctatactgtcagcaccaggacccactaaacttactgtaggaaattggtcactgacatgtttgaaagaaggagaaattgctattcataattcaga

SEQ ID NO: 100982 - DNA, 120 bp, Artificial Sequence
  ENSG00000092148_26 (sequence is synthesized)
tggtcagcaagctacaatattgaaagaagatttacctggttttgtatttgaatctaatagaggaaccaaacattcatttactgcagaaacttccctgggttcagaatttgtgactggctg

SEQ ID NO: 100983 - DNA, 120 bp, Artificial Sequence
  ENSG00000092148_27 (sequence is synthesized)
gactggcaaaagaggcagaaaactgaaatctaagttagaaaaaacaaagcaaaaggtacgaactatggctcgagatttatacgatgaccattttaaagctgttgaaagcatgcctcgtgg

SEQ ID NO: 100984 - DNA, 120 bp, Artificial Sequence
  ENSG00000092148_28 (sequence is synthesized)
agtagtggtaacactcagaaacatagcaactcagttagagtcatcttgggaacttcatacaaatagacaatgtattgagagtgagaacacttggagagatttaatgaagacagctttaga

SEQ ID NO: 100985 - DNA, 120 bp, Artificial Sequence
  ENSG00000092148_29 (sequence is synthesized)
aaacctaattgtacttttgaaggatgaaaacacaatttcaccatatgaaatgtgtagcagtggcttggtacaagcacttcttactgtgttaaacaatagcatggatttggatatgaaaca

SEQ ID NO: 100986 - DNA, 120 bp, Artificial Sequence
  ENSG00000092148_30 (sequence is synthesized)
agattgtagtcaactggtagaaagaataaatgtttttaaaactgcctttagtgaaaatgaagatgatgaaagtcgaccagcagttgcgttaattcgaaagttaatagctgtactagaatc

SEQ ID NO: 100987 - DNA, 120 bp, Artificial Sequence
  ENSG00000092148_31 (sequence is synthesized)
tattgaacgtctacctctccatttgtatgatacaccaggatccacatataacctccagatacttacaaggagattacgatttcggttggaacgtgcacctggtgaaactgcattgattga

SEQ ID NO: 100988 - DNA, 120 bp, Artificial Sequence
  ENSG00000092148_32 (sequence is synthesized)
caggactggcagaatgttgaagatggaacctttggctacagttgaatctctggaacagtaccttttgaaaatggtagcaaaacagtggtatgattttgaccgatcttcatttgtttttgt

SEQ ID NO: 100989 - DNA, 120 bp, Artificial Sequence
  ENSG00000092148_33 (sequence is synthesized)
tcgaaaattaagagaaggacaaaattttatatttcggcaccagcatgattttgatgaaaatggaatcatttactggattggaacaaatgcaaaaactgcttatgaatgggtaaatccagc

SEQ ID NO: 100990 - DNA, 120 bp, Artificial Sequence
  ENSG00000092148_34 (sequence is synthesized)
tgcctatggacttgtagtagtaacgtcatcagaaggaagaaatctaccttatggccgcttagaagacatactaagtcgtgataattcagctttaaattgtcatagcaatgatgataagaa

SEQ ID NO: 100991 - DNA, 120 bp, Artificial Sequence
  ENSG00000092148_35 (sequence is synthesized)
tgcctggtttgccatagatctgggtctctgggtgataccatcagcatatacacttcgtcatgctcgtggttatggaaggtctgcactgagaaattgggttttccaggtatccaaagatgg

SEQ ID NO: 100992 - DNA, 120 bp, Artificial Sequence
  ENSG00000092148_36 (sequence is synthesized)
acagaactggacttctttgtatacccatgttgatgactgcagtctcaatgaaccagggtcaactgcaacttggcctcttgatccaccaaaggatgagaaacaagggtggagacatgtgag

SEQ ID NO: 100993 - DNA, 120 bp, Artificial Sequence
  ENSG00000092148_37 (sequence is synthesized)
aattaaacagatggggaaaaatgccagtggacaaacacactacctctcattatctggattcgaactttatggcactgtaaatggagtatgtgaagatcagctagggaaagcagctaaaga

SEQ ID NO: 100994 - DNA, 120 bp, Artificial Sequence
  ENSG00000092148_38 (sequence is synthesized)
agcagaagctaatcttagacggcagagacgtctagtacgttcccaggttctgaaatacatggttccaggagctcgtgttatcagaggcctggattggaaatggcgagatcaggatggcag

SEQ ID NO: 100995 - DNA, 120 bp, Artificial Sequence
  ENSG00000092148_39 (sequence is synthesized)
cgtatgggcgcagaaggaaaatttgacctcaagcttgcaccagggtacgaccctgatacagtggcatcacccaaacctgtttcatccactgtttcaggcacaacgcaatcatggagcagc

SEQ ID NO: 100996 - DNA, 120 bp, Artificial Sequence
  ENSG00000092148_40 (sequence is synthesized)
ttggtgaaaaacaactgtccagacaagacatctgctgctgcaggctcctcaagtagaaaaggaagcagcagttctgtgtgtagcgtggccagtagcagcgacatcagcttgggttcgacc

SEQ ID NO: 100997 - DNA, 120 bp, Artificial Sequence
  ENSG00000092148_41 (sequence is synthesized)
aaaacggaacggagatcagaaattgtaatggaacacagtatagtttcaggagctgatgtccatgaaccaattgttgttctttcatctgctgaaaacgtccctcaaacagaagtagggtca

SEQ ID NO: 100998 - DNA, 120 bp, Artificial Sequence
  ENSG00000092148_42 (sequence is synthesized)
tcttccagtgcaagcaccagcaccttaacagcggaaacgggaagtgaaaatgctgaaaggaagttaggccctgatagttctgttcgtactcctggggagtctagtgcaatatccatggga

SEQ ID NO: 100999 - DNA, 120 bp, Artificial Sequence
  ENSG00000092148_43 (sequence is synthesized)
attgtcagtgttagttctcctgatgttagttcagtatctgaattaactaataaagaagcagcttcacaacgacctcttagctcttcagcaagtaacagactgtcagtgagttctttgttg

SEQ ID NO: 101000 - DNA, 120 bp, Artificial Sequence
  ENSG00000092148_44 (sequence is synthesized)
gctgctggggcccctatgagctctagtgcaagtgtacctaacctgtcctcaagagaaacatctagcttggagagttttgtaaggagagtggcaaacatagcacggactaatgccacgaac

SEQ ID NO: 101001 - DNA, 120 bp, Artificial Sequence
  ENSG00000092148_45 (sequence is synthesized)
aacatgaatctaagccgaagcagcagtgataacaacactaatactttggggaggaatgtgatgagcacagcaacttctcctcttatgggtgctcagagtttccctaatttgaccacacct

SEQ ID NO: 101002 - DNA, 120 bp, Artificial Sequence
  ENSG00000092148_46 (sequence is synthesized)
ggtactacatcaacagtgactatgtcaacatccagtgttactagcagcagcaatgtagctacagcaacaacagttttatcagttggtcaatctttaagtaacactttaaccaccagcctc

SEQ ID NO: 101003 - DNA, 120 bp, Artificial Sequence
  ENSG00000092148_47 (sequence is synthesized)
acatcaacttccagtgagagtgacacaggtcaggaagcagaatattccttatatgatttccttgatagctgccgtgccagtactctattggctgagctcgatgatgatgaggacttacct

SEQ ID NO: 101004 - DNA, 120 bp, Artificial Sequence
  ENSG00000092148_48 (sequence is synthesized)
gagccagatgaagaagatgatgagaatgaagatgacaatcaggaggaccaagaatacgaggaggttatgattctgagacgcccatccctgcaacgtcgagctggctcccgctctgatgta

SEQ ID NO: 101005 - DNA, 120 bp, Artificial Sequence
  ENSG00000092148_49 (sequence is synthesized)
acgcatcatgctgttacctcgcagctaccacaggtacctgctggagcagggagccgacctattggggagcaggaagaagaagagtacgaaactaaaggaggacgccggagaacatgggat

SEQ ID NO: 101006 - DNA, 120 bp, Artificial Sequence
  ENSG00000092148_50 (sequence is synthesized)
gatgattatgtgctaaagagacagttttctgcattggttcctgcttttgatcctagacctggtcgtactaatgtccagcagacaactgatctagaaataccacccccagggacccctcat

SEQ ID NO: 101007 - DNA, 120 bp, Artificial Sequence
  ENSG00000092148_51 (sequence is synthesized)
tcagagctcttggaagaagtcgaatgtactccgtcacctcgattagctctcactttgaaagtaacaggtcttggaacgactcgtgaagttgaattaccactcaccaatttcagatcaacc

SEQ ID NO: 101008 - DNA, 120 bp, Artificial Sequence
  ENSG00000092148_52 (sequence is synthesized)
atcttttactatgtacaaaaattgcttcaattgtcctgtaatggcaatgtgaaatcagataaacttaggcgtatttgggagcccacatacacaatcatgtacagagaaatgaaggattct

SEQ ID NO: 101009 - DNA, 120 bp, Artificial Sequence
  ENSG00000092148_53 (sequence is synthesized)
gataaagaaaaggaaaatggaaaaatgggttgctggtctatagagcatgtggagcagtaccttggcactgatgaattaccaaagaatgacttgataacctacctgcagaagaatgcagac

SEQ ID NO: 101010 - DNA, 120 bp, Artificial Sequence
  ENSG00000092148_54 (sequence is synthesized)
gctgctttcctgcgccactggaaattaactggcactaataaaagtattaggaaaaacagaaattgttctcagctcatagctgcatataaggatttttgtgagcatggaacaaagtctggg

SEQ ID NO: 101011 - DNA, 120 bp, Artificial Sequence
  ENSG00000092148_55 (sequence is synthesized)
ttaaaccagggggccatttctactcttcaaagtagtgatattcttaatttaacaaaagaacaacctcaggccaaagcaggcaatggacagaactcttgtggagtagaagatgtccttcag

SEQ ID NO: 101012 - DNA, 120 bp, Artificial Sequence
  ENSG00000092148_56 (sequence is synthesized)
cttctgcgtattctatatatagttgcaagtgacccttattcaagaatatcccaggaagatggtgatgaacagcctcagtttacttttccaccagatgaattcactagcaaaaaaattaca

SEQ ID NO: 101013 - DNA, 120 bp, Artificial Sequence
  ENSG00000092148_57 (sequence is synthesized)
acaaaaatattacagcagattgaggaaccattggcactggcaagtggggctctgccagactggtgtgaacaattaaccagcaaatgtccttttctaataccatttgaaactagacagctt

SEQ ID NO: 101014 - DNA, 120 bp, Artificial Sequence
  ENSG00000092148_58 (sequence is synthesized)
tatttcacatgtacagcatttggcgcctcaagagcaatagtatggttacagaaccgacgtgaagccactgtggagcgaacgagaaccacaagcagtgttaggcgagatgaccctggagag

SEQ ID NO: 101015 - DNA, 120 bp, Artificial Sequence
  ENSG00000092148_59 (sequence is synthesized)
tttcgagttggtcgtctcaagcatgaaagagtaaaagttccacgtggcgagtcactgatggaatgggctgagaatgtcatgcaaatacatgcagatcggaaatcagttcttgaggttgaa

SEQ ID NO: 101016 - DNA, 120 bp, Artificial Sequence
  ENSG00000092148_60 (sequence is synthesized)
tttttaggagaagaaggaactggcttgggacccacattagagttttatgctctggtggcagcagaattccagagaactgacttgggagcttggctttgtgatgataattttccagatgat

SEQ ID NO: 101017 - DNA, 120 bp, Artificial Sequence
  ENSG00000092148_61 (sequence is synthesized)
gaatctcgtcacgttgatcttggaggtggattgaaacctcctggatattatgtgcagaggtcatgtggactgttcacagcaccatttccacaggatagtgatgagcttgaaaggatcacg

SEQ ID NO: 101018 - DNA, 120 bp, Artificial Sequence
  ENSG00000092148_62 (sequence is synthesized)
aaactgtttcatttccttggaattttcttggccaaatgcattcaagacaatagacttgtggacttacctatttctaaacctttttttaaacttatgtgtatgggtgacattaaaagcaat

SEQ ID NO: 101019 - DNA, 120 bp, Artificial Sequence
  ENSG00000092148_63 (sequence is synthesized)
atgagtaaactgatttatgagtcacgaggtgatagagacttacactgtactgaaagtcagtctgaagcttctacagaagaaggtcatgattcactctcggtaggaagctttgaagaggat

SEQ ID NO: 101020 - DNA, 120 bp, Artificial Sequence
  ENSG00000092148_64 (sequence is synthesized)
tcaaaatcagaatttattcttgatccccctaaaccaaaacccccagcttggtttaatggaattttgacttgggaagactttgaattagtaaacccacacagagccagatttttaaaagaa

SEQ ID NO: 101021 - DNA, 120 bp, Artificial Sequence
  ENSG00000092148_65 (sequence is synthesized)
attaaagaccttgctatcaagaggcgccaaattttaagcaacaaaggtctttctgaagatgagaagaacacaaaattacaggaactagtgctgaagaatccatcaggttctgggcctcca

SEQ ID NO: 101022 - DNA, 120 bp, Artificial Sequence
  ENSG00000092148_66 (sequence is synthesized)
cttagcatagaggatttaggtttaaatttccagttttgcccttcctcaagaatatatggttttacagctgtggatctcaagccaagtggtgaagatgagatgataacaatggataatgca

SEQ ID NO: 101023 - DNA, 120 bp, Artificial Sequence
  ENSG00000092148_67 (sequence is synthesized)
gaagaatatgtggatttgatgtttgacttttgtatgcatacgggtattcagaaacaaatggaagcctttagagatgggtttaataaagtttttccaatggagaaattaagttccttcagc

SEQ ID NO: 101024 - DNA, 120 bp, Artificial Sequence
  ENSG00000092148_68 (sequence is synthesized)
catgaagaagtccaaatgattctttgtggaaaccagtcaccatcctgggcagcagaggatattatcaattacactgaacctaagctgggttatacacgtgacagccctggtttcctgagg

SEQ ID NO: 101025 - DNA, 120 bp, Artificial Sequence
  ENSG00000092148_69 (sequence is synthesized)
tttgtgagggttttatgtggcatgtcttctgatgaaaggaaagcattcttgcagtttaccactggttgttcaactctacccccaggtggactggctaacctgcatcccaggctcacggtt

SEQ ID NO: 101026 - DNA, 120 bp, Artificial Sequence
  ENSG00000092148_70 (sequence is synthesized)
gtacgcaaggttgatgctactgatgcaagctatccatcagtcaatacatgtgtgcattaccttaagttgcctgaatattcttccgaggagatcatgagagagcgcctgctagctgctaca

SEQ ID NO: 101027 - DNA, 120 bp, Artificial Sequence
  ENSG00000092148_71 (sequence is synthesized)
atggagaaaggctttcatctcaattgagctttgaagtgcaatgggagacatcagagactttaaaaatactagtgaagcctcttgtgtttgtgtgcagagaagtatatgatccaccatgct

SEQ ID NO: 101028 - DNA, 120 bp, Artificial Sequence
  ENSG00000092148_72 (sequence is synthesized)
aatgacacttgcctttttttccaccattaaggctttaagaacatgtggaataagttttttagctgctaatgacaaaacaaatcctgtaactacccagccagcaagtatatagcacagaac

SEQ ID NO: 101029 - DNA, 120 bp, Artificial Sequence
  ENSG00000092148_73 (sequence is synthesized)
actgtgttactttacaagggcttatgtgactggaataaggtggtcccacttgactgttccaaagagcagcttctcagatcttcagtgttcactggtaaatttctaacagtgtatttgtgt

SEQ ID NO: 101030 - DNA, 120 bp, Artificial Sequence
  ENSG00000092148_74 (sequence is synthesized)
aaagtttgtcatttcatactccatacactacagttgctgtcactgatccctgttttgctggcttttaagctacttggtcaaaaatcctgcttccttaaaacatagagaattaatgagcat
